United States Patent Application Publication US 2024/0226339 A1 - sequence listing, part 3

SEQ ID NO: 44813 - DNA, 22 bp, synthetic construct
  misc_feature 1..22: note = chemically synthesized
  source 1..22: mol_type = other DNA
ctgtgaaacagctctgggcagc

SEQ ID NO: 44814 - DNA, 22 bp, synthetic construct
  misc_feature 1..22: note = chemically synthesized
  source 1..22: mol_type = other DNA
tgaaacagctctgggcagcacc

SEQ ID NO: 44815 - DNA, 22 bp, synthetic construct
  misc_feature 1..22: note = chemically synthesized
  source 1..22: mol_type = other DNA
tgggcagcacctgggccacagc

SEQ ID NO: 44816 - DNA, 22 bp, synthetic construct
  misc_feature 1..22: note = chemically synthesized
  source 1..22: mol_type = other DNA
ggcagcacctgggccacagcat

SEQ ID NO: 44817 - DNA, 22 bp, synthetic construct
  misc_feature 1..22: note = chemically synthesized
  source 1..22: mol_type = other DNA
ggccacagcatgtggaaggaga

SEQ ID NO: 44818 - DNA, 22 bp, synthetic construct
  misc_feature 1..22: note = chemically synthesized
  source 1..22: mol_type = other DNA
ctaagctgcctggtactctgcc

SEQ ID NO: 44819 - DNA, 22 bp, synthetic construct
  misc_feature 1..22: note = chemically synthesized
  source 1..22: mol_type = other DNA
agctgcctggtactctgccatc

SEQ ID NO: 44820 - DNA, 22 bp, synthetic construct
  misc_feature 1..22: note = chemically synthesized
  source 1..22: mol_type = other DNA
cctggtactctgccatctgtct

SEQ ID NO: 44821 - DNA, 22 bp, synthetic construct
  misc_feature 1..22: note = chemically synthesized
  source 1..22: mol_type = other DNA
gtactctgccatctgtcttctc

SEQ ID NO: 44822 - DNA, 22 bp, synthetic construct
  misc_feature 1..22: note = chemically synthesized
  source 1..22: mol_type = other DNA
tgccatctgtcttctcttcctc

SEQ ID NO: 44823 - DNA, 22 bp, synthetic construct
  misc_feature 1..22: note = chemically synthesized
  source 1..22: mol_type = other DNA
ccatctgtcttctcttcctcct

SEQ ID NO: 44824 - DNA, 22 bp, synthetic construct
  misc_feature 1..22: note = chemically synthesized
  source 1..22: mol_type = other DNA
tcttctcttcctcctaatccat

SEQ ID NO: 44825 - DNA, 22 bp, synthetic construct
  misc_feature 1..22: note = chemically synthesized
  source 1..22: mol_type = other DNA
ctcttcctcctaatccataagc

SEQ ID NO: 44826 - DNA, 22 bp, synthetic construct
  misc_feature 1..22: note = chemically synthesized
  source 1..22: mol_type = other DNA
tcttcctcctaatccataagca

SEQ ID NO: 44827 - DNA, 22 bp, synthetic construct
  misc_feature 1..22: note = chemically synthesized
  source 1..22: mol_type = other DNA
ttcctcctaatccataagcacc

SEQ ID NO: 44828 - DNA, 22 bp, synthetic construct
  misc_feature 1..22: note = chemically synthesized
  source 1..22: mol_type = other DNA
cctcctaatccataagcaccag

SEQ ID NO: 44829 - DNA, 22 bp, synthetic construct
  misc_feature 1..22: note = chemically synthesized
  source 1..22: mol_type = other DNA
ctcctaatccataagcaccaga

SEQ ID NO: 44830 - DNA, 22 bp, synthetic construct
  misc_feature 1..22: note = chemically synthesized
  source 1..22: mol_type = other DNA
ctaatccataagcaccagacct

SEQ ID NO: 44831 - DNA, 22 bp, synthetic construct
  misc_feature 1..22: note = chemically synthesized
  source 1..22: mol_type = other DNA
atccataagcaccagacctcaa

SEQ ID NO: 44832 - DNA, 22 bp, synthetic construct
  misc_feature 1..22: note = chemically synthesized
  source 1..22: mol_type = other DNA
aagccccatgtgcagctccgga

SEQ ID NO: 44833 - DNA, 22 bp, synthetic construct
  misc_feature 1..22: note = chemically synthesized
  source 1..22: mol_type = other DNA
cggaagctgctagacctcaagc

SEQ ID NO: 44834 - DNA, 22 bp, synthetic construct
  misc_feature 1..22: note = chemically synthesized
  source 1..22: mol_type = other DNA
ctagacctcaagcaggactaag

SEQ ID NO: 44835 - DNA, 22 bp, synthetic construct
  misc_feature 1..22: note = chemically synthesized
  source 1..22: mol_type = other DNA
gacctcaagcaggactaagatt

SEQ ID NO: 44836 - DNA, 22 bp, synthetic construct
  misc_feature 1..22: note = chemically synthesized
  source 1..22: mol_type = other DNA
aagcaggactaagattcggaga

SEQ ID NO: 44837 - DNA, 22 bp, synthetic construct
  misc_feature 1..22: note = chemically synthesized
  source 1..22: mol_type = other DNA
agattcggagagagcagccacc

SEQ ID NO: 44838 - DNA, 22 bp, synthetic construct
  misc_feature 1..22: note = chemically synthesized
  source 1..22: mol_type = other DNA
ggagagagcagccaccgacctg

SEQ ID NO: 44839 - DNA, 22 bp, synthetic construct
  misc_feature 1..22: note = chemically synthesized
  source 1..22: mol_type = other DNA
gctcctcccaggcaggccagcc

SEQ ID NO: 44840 - DNA, 22 bp, synthetic construct
  misc_feature 1..22: note = chemically synthesized
  source 1..22: mol_type = other DNA
ctcccaggcaggccagcccagg

SEQ ID NO: 44841 - DNA, 22 bp, synthetic construct
  misc_feature 1..22: note = chemically synthesized
  source 1..22: mol_type = other DNA
ccaggcaggccagcccaggtga

SEQ ID NO: 44842 - DNA, 22 bp, synthetic construct
  misc_feature 1..22: note = chemically synthesized
  source 1..22: mol_type = other DNA
cagccaggcactcaccccactg

SEQ ID NO: 44843 - DNA, 22 bp, synthetic construct
  misc_feature 1..22: note = chemically synthesized
  source 1..22: mol_type = other DNA
accccactgccaggctgtttac

SEQ ID NO: 44844 - DNA, 22 bp, synthetic construct
  misc_feature 1..22: note = chemically synthesized
  source 1..22: mol_type = other DNA
ccaggctgtttactcttagctg

SEQ ID NO: 44845 - DNA, 22 bp, synthetic construct
  misc_feature 1..22: note = chemically synthesized
  source 1..22: mol_type = other DNA
tttactcttagctggtgtttgt

SEQ ID NO: 44846 - DNA, 22 bp, synthetic construct
  misc_feature 1..22: note = chemically synthesized
  source 1..22: mol_type = other DNA
actcttagctggtgtttgtctc

SEQ ID NO: 44847 - DNA, 22 bp, synthetic construct
  misc_feature 1..22: note = chemically synthesized
  source 1..22: mol_type = other DNA
ctcttagctggtgtttgtctcc

SEQ ID NO: 44848 - DNA, 22 bp, synthetic construct
  misc_feature 1..22: note = chemically synthesized
  source 1..22: mol_type = other DNA
ttagctggtgtttgtctcctgt

SEQ ID NO: 44849 - DNA, 22 bp, synthetic construct
  misc_feature 1..22: note = chemically synthesized
  source 1..22: mol_type = other DNA
agctggtgtttgtctcctgtct

SEQ ID NO: 44850 - DNA, 22 bp, synthetic construct
  misc_feature 1..22: note = chemically synthesized
  source 1..22: mol_type = other DNA
gctggtgtttgtctcctgtctg

SEQ ID NO: 44851 - DNA, 22 bp, synthetic construct
  misc_feature 1..22: note = chemically synthesized
  source 1..22: mol_type = other DNA
gtgtttgtctcctgtctgctct

SEQ ID NO: 44852 - DNA, 22 bp, synthetic construct
  misc_feature 1..22: note = chemically synthesized
  source 1..22: mol_type = other DNA
gtctcctgtctgctctactgta

SEQ ID NO: 44853 - DNA, 22 bp, synthetic construct
  misc_feature 1..22: note = chemically synthesized
  source 1..22: mol_type = other DNA
tctcctgtctgctctactgtag

SEQ ID NO: 44854 - DNA, 22 bp, synthetic construct
  misc_feature 1..22: note = chemically synthesized
  source 1..22: mol_type = other DNA
ctgtctgctctactgtagctcc

SEQ ID NO: 44855 - DNA, 22 bp, synthetic construct
  misc_feature 1..22: note = chemically synthesized
  source 1..22: mol_type = other DNA
tctgctctactgtagctccctc

SEQ ID NO: 44856 - DNA, 22 bp, synthetic construct
  misc_feature 1..22: note = chemically synthesized
  source 1..22: mol_type = other DNA
ctctactgtagctccctccctc

SEQ ID NO: 44857 - DNA, 22 bp, synthetic construct
  misc_feature 1..22: note = chemically synthesized
  source 1..22: mol_type = other DNA
tactgtagctccctccctcctc

SEQ ID NO: 44858 - DNA, 22 bp, synthetic construct
  misc_feature 1..22: note = chemically synthesized
  source 1..22: mol_type = other DNA
ctgtagctccctccctcctctc

SEQ ID NO: 44859 - DNA, 22 bp, synthetic construct
  misc_feature 1..22: note = chemically synthesized
  source 1..22: mol_type = other DNA
tagctccctccctcctctcctc

SEQ ID NO: 44860 - DNA, 22 bp, synthetic construct
  misc_feature 1..22: note = chemically synthesized
  source 1..22: mol_type = other DNA
cctccctcctctcctcctttcg

SEQ ID NO: 44861 - DNA, 22 bp, synthetic construct
  misc_feature 1..22: note = chemically synthesized
  source 1..22: mol_type = other DNA
cctcctctcctcctttcggtcc

SEQ ID NO: 44862 - DNA, 22 bp, synthetic construct
  misc_feature 1..22: note = chemically synthesized
  source 1..22: mol_type = other DNA
ctctcctcctttcggtcctctg

SEQ ID NO: 44863 - DNA, 22 bp, synthetic construct
  misc_feature 1..22: note = chemically synthesized
  source 1..22: mol_type = other DNA
tcctcctttcggtcctctgccc

SEQ ID NO: 44864 - DNA, 22 bp, synthetic construct
  misc_feature 1..22: note = chemically synthesized
  source 1..22: mol_type = other DNA
ctcctttcggtcctctgcccag

SEQ ID NO: 44865 - DNA, 22 bp, synthetic construct
  misc_feature 1..22: note = chemically synthesized
  source 1..22: mol_type = other DNA
ctttcggtcctctgcccaggcc

SEQ ID NO: 44866 - DNA, 22 bp, synthetic construct
  misc_feature 1..22: note = chemically synthesized
  source 1..22: mol_type = other DNA
tcggtcctctgcccaggcctgc

SEQ ID NO: 44867 - DNA, 22 bp, synthetic construct
  misc_feature 1..22: note = chemically synthesized
  source 1..22: mol_type = other DNA
cggtcctctgcccaggcctgcc

SEQ ID NO: 44868 - DNA, 22 bp, synthetic construct
  misc_feature 1..22: note = chemically synthesized
  source 1..22: mol_type = other DNA
ggtcctctgcccaggcctgcct

SEQ ID NO: 44869 - DNA, 22 bp, synthetic construct
  misc_feature 1..22: note = chemically synthesized
  source 1..22: mol_type = other DNA
tgcccaggcctgcctgaggctg

SEQ ID NO: 44870 - DNA, 22 bp, synthetic construct
  misc_feature 1..22: note = chemically synthesized
  source 1..22: mol_type = other DNA
cccaggcctgcctgaggctgcc

SEQ ID NO: 44871 - DNA, 22 bp, synthetic construct
  misc_feature 1..22: note = chemically synthesized
  source 1..22: mol_type = other DNA
cctgaggctgcctgccagtgag

SEQ ID NO: 44872 - DNA, 22 bp, synthetic construct
  misc_feature 1..22: note = chemically synthesized
  source 1..22: mol_type = other DNA
aggctgcctgccagtgagattg

SEQ ID NO: 44873 - DNA, 22 bp, synthetic construct
  misc_feature 1..22: note = chemically synthesized
  source 1..22: mol_type = other DNA
cctgccagtgagattgcatgtc

SEQ ID NO: 44874 - DNA, 22 bp, synthetic construct
  misc_feature 1..22: note = chemically synthesized
  source 1..22: mol_type = other DNA
ccagtgagattgcatgtcaggg

SEQ ID NO: 44875 - DNA, 22 bp, synthetic construct
  misc_feature 1..22: note = chemically synthesized
  source 1..22: mol_type = other DNA
catgtcagggctttgccctggg

SEQ ID NO: 44876 - DNA, 22 bp, synthetic construct
  misc_feature 1..22: note = chemically synthesized
  source 1..22: mol_type = other DNA
tgccctgggcactgagggctag

SEQ ID NO: 44877 - DNA, 22 bp, synthetic construct
  misc_feature 1..22: note = chemically synthesized
  source 1..22: mol_type = other DNA
gccctgggcactgagggctagg

SEQ ID NO: 44878 - DNA, 22 bp, synthetic construct
  misc_feature 1..22: note = chemically synthesized
  source 1..22: mol_type = other DNA
ccctgggcactgagggctaggg

SEQ ID NO: 44879 - DNA, 22 bp, synthetic construct
  misc_feature 1..22: note = chemically synthesized
  source 1..22: mol_type = other DNA
ggcactgagggctagggtgccc

SEQ ID NO: 44880 - DNA, 22 bp, synthetic construct
  misc_feature 1..22: note = chemically synthesized
  source 1..22: mol_type = other DNA
agggctagggtgcccagaggcc

SEQ ID NO: 44881 - DNA, 22 bp, synthetic construct
  misc_feature 1..22: note = chemically synthesized
  source 1..22: mol_type = other DNA
gggtgcccagaggcctgcggct

SEQ ID NO: 44882 - DNA, 22 bp, synthetic construct
  misc_feature 1..22: note = chemically synthesized
  source 1..22: mol_type = other DNA
cggctgtgccctggatggaaaa

SEQ ID NO: 44883 - DNA, 22 bp, synthetic construct
  misc_feature 1..22: note = chemically synthesized
  source 1..22: mol_type = other DNA
tgccctggatggaaaaccagca

SEQ ID NO: 44884 - DNA, 22 bp, synthetic construct
  misc_feature 1..22: note = chemically synthesized
  source 1..22: mol_type = other DNA
gatggaaaaccagcagcctgca

SEQ ID NO: 44885 - DNA, 22 bp, synthetic construct
  misc_feature 1..22: note = chemically synthesized
  source 1..22: mol_type = other DNA
caaagctgtgggggcagcacag

SEQ ID NO: 44886 - DNA, 22 bp, synthetic construct
  misc_feature 1..22: note = chemically synthesized
  source 1..22: mol_type = other DNA
tgggggcagcacaggacctgtg

SEQ ID NO: 44887 - DNA, 22 bp, synthetic construct
  misc_feature 1..22: note = chemically synthesized
  source 1..22: mol_type = other DNA
tgtgtgagagcggtggtcttga

SEQ ID NO: 44888 - DNA, 22 bp, synthetic construct
  misc_feature 1..22: note = chemically synthesized
  source 1..22: mol_type = other DNA
gagagtgaaagtggacaagtca

SEQ ID NO: 44889 - DNA, 22 bp, synthetic construct
  misc_feature 1..22: note = chemically synthesized
  source 1..22: mol_type = other DNA
agagtgaaagtggacaagtcaa

SEQ ID NO: 44890 - DNA, 22 bp, synthetic construct
  misc_feature 1..22: note = chemically synthesized
  source 1..22: mol_type = other DNA
ccggggccagttcccccattat

SEQ ID NO: 44891 - DNA, 22 bp, synthetic construct
  misc_feature 1..22: note = chemically synthesized
  source 1..22: mol_type = other DNA
ccccattatgcactgcctctgc

SEQ ID NO: 44892 - DNA, 22 bp, synthetic construct
  misc_feature 1..22: note = chemically synthesized
  source 1..22: mol_type = other DNA
tgcactgcctctgcttccccgc

SEQ ID NO: 44893 - DNA, 22 bp, synthetic construct
  misc_feature 1..22: note = chemically synthesized
  source 1..22: mol_type = other DNA
cctctgcttccccgccaccatt

SEQ ID NO: 44894 - DNA, 22 bp, synthetic construct
  misc_feature 1..22: note = chemically synthesized
  source 1..22: mol_type = other DNA
tgcttccccgccaccattaacc

SEQ ID NO: 44895 - DNA, 22 bp, synthetic construct
  misc_feature 1..22: note = chemically synthesized
  source 1..22: mol_type = other DNA
cttccccgccaccattaaccgt

SEQ ID NO: 44896 - DNA, 22 bp, synthetic construct
  misc_feature 1..22: note = chemically synthesized
  source 1..22: mol_type = other DNA
ccccgccaccattaaccgtgcc

SEQ ID NO: 44897 - DNA, 22 bp, synthetic construct
  misc_feature 1..22: note = chemically synthesized
  source 1..22: mol_type = other DNA
cccgccaccattaaccgtgcct

SEQ ID NO: 44898 - DNA, 22 bp, synthetic construct
  misc_feature 1..22: note = chemically synthesized
  source 1..22: mol_type = other DNA
accgtgcctctgtgggctgaca

SEQ ID NO: 44899 - DNA, 22 bp, synthetic construct
  misc_feature 1..22: note = chemically synthesized
  source 1..22: mol_type = other DNA
tgtgggctgacagatgtgcctt

SEQ ID NO: 44900 - DNA, 22 bp, synthetic construct
  misc_feature 1..22: note = chemically synthesized
  source 1..22: mol_type = other DNA
tgggctgacagatgtgccttca

SEQ ID NO: 44901 - DNA, 22 bp, synthetic construct
  misc_feature 1..22: note = chemically synthesized
  source 1..22: mol_type = other DNA
acagatgtgccttcagagaagg

SEQ ID NO: 44902 - DNA, 22 bp, synthetic construct
  misc_feature 1..22: note = chemically synthesized
  source 1..22: mol_type = other DNA
cagagaagggcagggagcagct

SEQ ID NO: 44903 - DNA, 22 bp, synthetic construct
  misc_feature 1..22: note = chemically synthesized
  source 1..22: mol_type = other DNA
agagaagggcagggagcagctg

SEQ ID NO: 44904 - DNA, 22 bp, synthetic construct
  misc_feature 1..22: note = chemically synthesized
  source 1..22: mol_type = other DNA
ggggcctggccagagcaatcat

SEQ ID NO: 44905 - DNA, 22 bp, synthetic construct
  misc_feature 1..22: note = chemically synthesized
  source 1..22: mol_type = other DNA
gccagagcaatcatcccagcag

SEQ ID NO: 44906 - DNA, 22 bp, synthetic construct
  misc_feature 1..22: note = chemically synthesized
  source 1..22: mol_type = other DNA
acatcagagcaggcagcctacc

SEQ ID NO: 44907 - DNA, 22 bp, synthetic construct
  misc_feature 1..22: note = chemically synthesized
  source 1..22: mol_type = other DNA
catcagagcaggcagcctaccc

SEQ ID NO: 44908 - DNA, 22 bp, synthetic construct
  misc_feature 1..22: note = chemically synthesized
  source 1..22: mol_type = other DNA
cccaagagccagggaaggaagg

SEQ ID NO: 44909 - DNA, 22 bp, synthetic construct
  misc_feature 1..22: note = chemically synthesized
  source 1..22: mol_type = other DNA
agaaaaaatggcagaagaatgg

SEQ ID NO: 44910 - DNA, 22 bp, synthetic construct
  misc_feature 1..22: note = chemically synthesized
  source 1..22: mol_type = other DNA
cgtgtattgatggaataaacca

SEQ ID NO: 44911 - DNA, 22 bp, synthetic construct
  misc_feature 1..22: note = chemically synthesized
  source 1..22: mol_type = other DNA
atggaataaaccagacacccca

SEQ ID NO: 44912 - DNA, 22 bp, synthetic construct
  misc_feature 1..22: note = chemically synthesized
  source 1..22: mol_type = other DNA
cccaactcctcaggacagggtt

SEQ ID NO: 44913 - DNA, 22 bp, synthetic construct
  misc_feature 1..22: note = chemically synthesized
  source 1..22: mol_type = other DNA
ccaactcctcaggacagggttc

SEQ ID NO: 44914 - DNA, 22 bp, synthetic construct
  misc_feature 1..22: note = chemically synthesized
  source 1..22: mol_type = other DNA
ctcaggacagggttcagagcta

SEQ ID NO: 44915 - DNA, 22 bp, synthetic construct
  misc_feature 1..22: note = chemically synthesized
  source 1..22: mol_type = other DNA
aggacagggttcagagctaggc

SEQ ID NO: 44916 - DNA, 22 bp, synthetic construct
  misc_feature 1..22: note = chemically synthesized
  source 1..22: mol_type = other DNA
agagctaggctggtggctgcta

SEQ ID NO: 44917 - DNA, 22 bp, synthetic construct
  misc_feature 1..22: note = chemically synthesized
  source 1..22: mol_type = other DNA
ggctggtggctgctacacagag

SEQ ID NO: 44918 - DNA, 22 bp, synthetic construct
  misc_feature 1..22: note = chemically synthesized
  source 1..22: mol_type = other DNA
gtggctgctacacagagacagc

SEQ ID NO: 44919 - DNA, 22 bp, synthetic construct
  misc_feature 1..22: note = chemically synthesized
  source 1..22: mol_type = other DNA
ctacacagagacagcaccctcc

SEQ ID NO: 44920 - DNA, 22 bp, synthetic construct
  misc_feature 1..22: note = chemically synthesized
  source 1..22: mol_type = other DNA
cacagagacagcaccctccacc

SEQ ID NO: 44921 - DNA, 22 bp, synthetic construct
  misc_feature 1..22: note = chemically synthesized
  source 1..22: mol_type = other DNA
caccagttaaggtataagacaa

SEQ ID NO: 44922 - DNA, 22 bp, synthetic construct
  misc_feature 1..22: note = chemically synthesized
  source 1..22: mol_type = other DNA
aggtataagacaaggtataagg

SEQ ID NO: 44923 - DNA, 22 bp, synthetic construct
  misc_feature 1..22: note = chemically synthesized
  source 1..22: mol_type = other DNA
atgggctgtaggcatcaaacct

SEQ ID NO: 44924 - DNA, 22 bp, synthetic construct
  misc_feature 1..22: note = chemically synthesized
  source 1..22: mol_type = other DNA
taggcatcaaacctggaactca

SEQ ID NO: 44925 - DNA, 22 bp, synthetic construct
  misc_feature 1..22: note = chemically synthesized
  source 1..22: mol_type = other DNA
gaactcacagtcggggcacctc

SEQ ID NO: 44926 - DNA, 22 bp, synthetic construct
  misc_feature 1..22: note = chemically synthesized
  source 1..22: mol_type = other DNA
acagtcggggcacctcacttca

SEQ ID NO: 44927 - DNA, 22 bp, synthetic construct
  misc_feature 1..22: note = chemically synthesized
  source 1..22: mol_type = other DNA
acttcaagccttggtggatagg

SEQ ID NO: 44928 - DNA, 22 bp, synthetic construct
  misc_feature 1..22: note = chemically synthesized
  source 1..22: mol_type = other DNA
caagccttggtggataggtaag

SEQ ID NO: 44929 - DNA, 22 bp, synthetic construct
  misc_feature 1..22: note = chemically synthesized
  source 1..22: mol_type = other DNA
aagccttggtggataggtaaga

SEQ ID NO: 44930 - DNA, 22 bp, synthetic construct
  misc_feature 1..22: note = chemically synthesized
  source 1..22: mol_type = other DNA
ggtggataggtaagatgaacac

SEQ ID NO: 44931 - DNA, 22 bp, synthetic construct
  misc_feature 1..22: note = chemically synthesized
  source 1..22: mol_type = other DNA
gtggataggtaagatgaacact

SEQ ID NO: 44932 - DNA, 22 bp, synthetic construct
  misc_feature 1..22: note = chemically synthesized
  source 1..22: mol_type = other DNA
aggctcccaagttagacagatg

SEQ ID NO: 44933 - DNA, 22 bp, synthetic construct
  misc_feature 1..22: note = chemically synthesized
  source 1..22: mol_type = other DNA
ccaagttagacagatgagctgg

SEQ ID NO: 44934 - DNA, 22 bp, synthetic construct
  misc_feature 1..22: note = chemically synthesized
  source 1..22: mol_type = other DNA
gacagatgagctggatccttca

SEQ ID NO: 44935 - DNA, 22 bp, synthetic construct
  misc_feature 1..22: note = chemically synthesized
  source 1..22: mol_type = other DNA
gatccttcatctaccaccaatt

SEQ ID NO: 44936 - DNA, 22 bp, synthetic construct
  misc_feature 1..22: note = chemically synthesized
  source 1..22: mol_type = other DNA
catctaccaccaatttcctggc

SEQ ID NO: 44937 - DNA, 22 bp, synthetic construct
  misc_feature 1..22: note = chemically synthesized
  source 1..22: mol_type = other DNA
atctaccaccaatttcctggct

SEQ ID NO: 44938 - DNA, 22 bp, synthetic construct
  misc_feature 1..22: note = chemically synthesized
  source 1..22: mol_type = other DNA
ccaccaatttcctggctgtgtg

SEQ ID NO: 44939 - DNA, 22 bp, synthetic construct
  misc_feature 1..22: note = chemically synthesized
  source 1..22: mol_type = other DNA
cctggctgtgtgtctgggagca

SEQ ID NO: 44940 - DNA, 22 bp, synthetic construct
  misc_feature 1..22: note = chemically synthesized
  source 1..22: mol_type = other DNA
ctggctgtgtgtctgggagcag

SEQ ID NO: 44941 - DNA, 22 bp, synthetic construct
  misc_feature 1..22: note = chemically synthesized
  source 1..22: mol_type = other DNA
gctgtgtgtctgggagcagctc

SEQ ID NO: 44942 - DNA, 22 bp, synthetic construct
  misc_feature 1..22: note = chemically synthesized
  source 1..22: mol_type = other DNA
tgtgtctgggagcagctcttta

SEQ ID NO: 44943 - DNA, 22 bp, synthetic construct
  misc_feature 1..22: note = chemically synthesized
  source 1..22: mol_type = other DNA
ggagcagctctttaacctctcc

SEQ ID NO: 44944 - DNA, 22 bp, synthetic construct
  misc_feature 1..22: note = chemically synthesized
  source 1..22: mol_type = other DNA
tttaacctctccaagcctcagt

SEQ ID NO: 44945 - DNA, 22 bp, synthetic construct
  misc_feature 1..22: note = chemically synthesized
  source 1..22: mol_type = other DNA
taacctctccaagcctcagttt

SEQ ID NO: 44946 - DNA, 22 bp, synthetic construct
  misc_feature 1..22: note = chemically synthesized
  source 1..22: mol_type = other DNA
aacctctccaagcctcagtttc

SEQ ID NO: 44947 - DNA, 22 bp, synthetic construct
  misc_feature 1..22: note = chemically synthesized
  source 1..22: mol_type = other DNA
acctctccaagcctcagtttct

SEQ ID NO: 44948 - DNA, 22 bp, synthetic construct
  misc_feature 1..22: note = chemically synthesized
  source 1..22: mol_type = other DNA
tccaagcctcagtttcttcact

SEQ ID NO: 44949 - DNA, 22 bp, synthetic construct
  misc_feature 1..22: note = chemically synthesized
  source 1..22: mol_type = other DNA
caagcctcagtttcttcactgg

SEQ ID NO: 44950 - DNA, 22 bp, synthetic construct
  misc_feature 1..22: note = chemically synthesized
  source 1..22: mol_type = other DNA
agtttcttcactggtaaaatgt

SEQ ID NO: 44951 - DNA, 22 bp, synthetic construct
  misc_feature 1..22: note = chemically synthesized
  source 1..22: mol_type = other DNA
cttcactggtaaaatgtgtatg

SEQ ID NO: 44952 - DNA, 22 bp, synthetic construct
  misc_feature 1..22: note = chemically synthesized
  source 1..22: mol_type = other DNA
ttcactggtaaaatgtgtatga

SEQ ID NO: 44953 - DNA, 22 bp, synthetic construct
  misc_feature 1..22: note = chemically synthesized
  source 1..22: mol_type = other DNA
cactggtaaaatgtgtatgatg

SEQ ID NO: 44954 - DNA, 22 bp, synthetic construct
  misc_feature 1..22: note = chemically synthesized
  source 1..22: mol_type = other DNA
actggtaaaatgtgtatgatga

SEQ ID NO: 44955 - DNA, 22 bp, synthetic construct
  misc_feature 1..22: note = chemically synthesized
  source 1..22: mol_type = other DNA
gtaaaatgtgtatgatgacatt

SEQ ID NO: 44956 - DNA, 22 bp, synthetic construct
  misc_feature 1..22: note = chemically synthesized
  source 1..22: mol_type = other DNA
tatggccaacctggggttgctg

SEQ ID NO: 44957 - DNA, 22 bp, synthetic construct
  misc_feature 1..22: note = chemically synthesized
  source 1..22: mol_type = other DNA
gggttgctgatggaactagtta

SEQ ID NO: 44958 - DNA, 22 bp, synthetic construct
  misc_feature 1..22: note = chemically synthesized
  source 1..22: mol_type = other DNA
ctgatggaactagttaaaagag

SEQ ID NO: 44959 - DNA, 22 bp, synthetic construct
  misc_feature 1..22: note = chemically synthesized
  source 1..22: mol_type = other DNA
atggaactagttaaaagagtgt

SEQ ID NO: 44960 - DNA, 22 bp, synthetic construct
  misc_feature 1..22: note = chemically synthesized
  source 1..22: mol_type = other DNA
gttaaaagagtgtctgtgaagc

SEQ ID NO: 44961 - DNA, 22 bp, synthetic construct
  misc_feature 1..22: note = chemically synthesized
  source 1..22: mol_type = other DNA
aaagagtgtctgtgaagcaagc

SEQ ID NO: 44962 - DNA, 22 bp, synthetic construct
  misc_feature 1..22: note = chemically synthesized
  source 1..22: mol_type = other DNA
tgaagcaagcctagctgggtgg

SEQ ID NO: 44963 - DNA, 22 bp, synthetic construct
  misc_feature 1..22: note = chemically synthesized
  source 1..22: mol_type = other DNA
gctgggtgggcttgcaagcatt

SEQ ID NO: 44964 - DNA, 22 bp, synthetic construct
  misc_feature 1..22: note = chemically synthesized
  source 1..22: mol_type = other DNA
ggtgggcttgcaagcatttctg

SEQ ID NO: 44965 - DNA, 22 bp, synthetic construct
  misc_feature 1..22: note = chemically synthesized
  source 1..22: mol_type = other DNA
gcaagcatttctgggtcgctgc

SEQ ID NO: 44966 - DNA, 22 bp, synthetic construct
  misc_feature 1..22: note = chemically synthesized
  source 1..22: mol_type = other DNA
caagcatttctgggtcgctgca

SEQ ID NO: 44967 - DNA, 22 bp, synthetic construct
  misc_feature 1..22: note = chemically synthesized
  source 1..22: mol_type = other DNA
ctgggtcgctgcatcctcctct

SEQ ID NO: 44968 - DNA, 22 bp, synthetic construct
  misc_feature 1..22: note = chemically synthesized
  source 1..22: mol_type = other DNA
tgggtcgctgcatcctcctctg

SEQ ID NO: 44969 - DNA, 22 bp, synthetic construct
  misc_feature 1..22: note = chemically synthesized
  source 1..22: mol_type = other DNA
ggtcgctgcatcctcctctgta

SEQ ID NO: 44970 - DNA, 22 bp, synthetic construct
  misc_feature 1..22: note = chemically synthesized
  source 1..22: mol_type = other DNA
catcctcctctgtaaaatggga

SEQ ID NO: 44971 - DNA, 22 bp, synthetic construct
  misc_feature 1..22: note = chemically synthesized
  source 1..22: mol_type = other DNA
ctctgtaaaatgggagaaccct

SEQ ID NO: 44972 - DNA, 22 bp, synthetic construct
  misc_feature 1..22: note = chemically synthesized
  source 1..22: mol_type = other DNA
tgtaaaatgggagaaccctgaa

SEQ ID NO: 44973 - DNA, 22 bp, synthetic construct
  misc_feature 1..22: note = chemically synthesized
  source 1..22: mol_type = other DNA
taaaatgggagaaccctgaact

SEQ ID NO: 44974 - DNA, 22 bp, synthetic construct
  misc_feature 1..22: note = chemically synthesized
  source 1..22: mol_type = other DNA
aactgctcagccgacctcatgg

SEQ ID NO: 44975 - DNA, 22 bp, synthetic construct
  misc_feature 1..22: note = chemically synthesized
  source 1..22: mol_type = other DNA
ctcagccgacctcatggttgac

SEQ ID NO: 44976 - DNA, 22 bp, synthetic construct
  misc_feature 1..22: note = chemically synthesized
  source 1..22: mol_type = other DNA
agccgacctcatggttgactca

SEQ ID NO: 44977 - DNA, 22 bp, synthetic construct
  misc_feature 1..22: note = chemically synthesized
  source 1..22: mol_type = other DNA
atggttgactcactcagcaaca

SEQ ID NO: 44978 - DNA, 22 bp, synthetic construct
  misc_feature 1..22: note = chemically synthesized
  source 1..22: mol_type = other DNA
actcactcagcaacagaggtct

SEQ ID NO: 44979 - DNA, 22 bp, synthetic construct
  misc_feature 1..22: note = chemically synthesized
  source 1..22: mol_type = other DNA
actcagcaacagaggtctccac

SEQ ID NO: 44980 - DNA, 22 bp, synthetic construct
  misc_feature 1..22: note = chemically synthesized
  source 1..22: mol_type = other DNA
agcaacagaggtctccacagga

SEQ ID NO: 44981 - DNA, 22 bp, synthetic construct
  misc_feature 1..22: note = chemically synthesized
  source 1..22: mol_type = other DNA
cacaggagccctgcccacatga

SEQ ID NO: 44982 - DNA, 22 bp, synthetic construct
  misc_feature 1..22: note = chemically synthesized
  source 1..22: mol_type = other DNA
cccacatgagacatctttggca

SEQ ID NO: 44983 - DNA, 22 bp, synthetic construct
  misc_feature 1..22: note = chemically synthesized
  source 1..22: mol_type = other DNA
tggcacatcttctgaaacaaga

SEQ ID NO: 44984 - DNA, 22 bp, synthetic construct
  misc_feature 1..22: note = chemically synthesized
  source 1..22: mol_type = other DNA
ggcacatcttctgaaacaagac

SEQ ID NO: 44985 - DNA, 22 bp, synthetic construct
  misc_feature 1..22: note = chemically synthesized
  source 1..22: mol_type = other DNA
gcacatcttctgaaacaagacc

SEQ ID NO: 44986 - DNA, 22 bp, synthetic construct
  misc_feature 1..22: note = chemically synthesized
  source 1..22: mol_type = other DNA
ctgaaacaagacctgtttctgg

SEQ ID NO: 44987 - DNA, 22 bp, synthetic construct
  misc_feature 1..22: note = chemically synthesized
  source 1..22: mol_type = other DNA
tgaaacaagacctgtttctgga

SEQ ID NO: 44988 - DNA, 22 bp, synthetic construct
  misc_feature 1..22: note = chemically synthesized
  source 1..22: mol_type = other DNA
aaacaagacctgtttctggaaa

SEQ ID NO: 44989 - DNA, 22 bp, synthetic construct
  misc_feature 1..22: note = chemically synthesized
  source 1..22: mol_type = other DNA
tttctggaaagttgttggtaaa

SEQ ID NO: 44990 - DNA, 22 bp, synthetic construct
  misc_feature 1..22: note = chemically synthesized
  source 1..22: mol_type = other DNA
ctggaaagttgttggtaaacat

SEQ ID NO: 44991 - DNA, 22 bp, synthetic construct
  misc_feature 1..22: note = chemically synthesized
  source 1..22: mol_type = other DNA
tggaaagttgttggtaaacatc

SEQ ID NO: 44992 - DNA, 22 bp, synthetic construct
  misc_feature 1..22: note = chemically synthesized
  source 1..22: mol_type = other DNA
gaaagttgttggtaaacatcca

SEQ ID NO: 44993 - DNA, 22 bp, synthetic construct
  misc_feature 1..22: note = chemically synthesized
  source 1..22: mol_type = other DNA
ttggtaaacatccaattttgca

SEQ ID NO: 44994 - DNA, 22 bp, synthetic construct
  misc_feature 1..22: note = chemically synthesized
  source 1..22: mol_type = other DNA
gtaaacatccaattttgcactt

SEQ ID NO: 44995 - DNA, 22 bp, synthetic construct
  misc_feature 1..22: note = chemically synthesized
  source 1..22: mol_type = other DNA
tgcacttatttatattattgtt

SEQ ID NO: 44996 - DNA, 22 bp, synthetic construct
  misc_feature 1..22: note = chemically synthesized
  source 1..22: mol_type = other DNA
gcacttatttatattattgttt

SEQ ID NO: 44997 - DNA, 22 bp, synthetic construct
  misc_feature 1..22: note = chemically synthesized
  source 1..22: mol_type = other DNA
cacttatttatattattgtttc

SEQ ID NO: 44998 - DNA, 22 bp, synthetic construct
  misc_feature 1..22: note = chemically synthesized
  source 1..22: mol_type = other DNA
atttatattattgtttcagaaa

SEQ ID NO: 44999 - DNA, 22 bp, synthetic construct
  misc_feature 1..22: note = chemically synthesized
  source 1..22: mol_type = other DNA
tttatattattgtttcagaaac

SEQ ID NO: 45000 - DNA, 22 bp, synthetic construct
  misc_feature 1..22: note = chemically synthesized
  source 1..22: mol_type = other DNA
atattattgtttcagaaacact

SEQ ID NO: 45001 - DNA, 22 bp, synthetic construct
  misc_feature 1..22: note = chemically synthesized
  source 1..22: mol_type = other DNA
tattattgtttcagaaacacta

SEQ ID NO: 45002 - DNA, 22 bp, synthetic construct
  misc_feature 1..22: note = chemically synthesized
  source 1..22: mol_type = other DNA
ttgtttcagaaacactaccttc

SEQ ID NO: 45003 - DNA, 22 bp, synthetic construct
  misc_feature 1..22: note = chemically synthesized
  source 1..22: mol_type = other DNA
tttcagaaacactaccttcatt

SEQ ID NO: 45004 - DNA, 22 bp, synthetic construct
  misc_feature 1..22: note = chemically synthesized
  source 1..22: mol_type = other DNA
cagaaacactaccttcattctg

SEQ ID NO: 45005 - DNA, 22 bp, synthetic construct
  misc_feature 1..22: note = chemically synthesized
  source 1..22: mol_type = other DNA
agaaacactaccttcattctgc

SEQ ID NO: 45006 - DNA, 22 bp, synthetic construct
  misc_feature 1..22: note = chemically synthesized
  source 1..22: mol_type = other DNA
ccttcattctgctttgattcaa

SEQ ID NO: 45007 - DNA, 22 bp, synthetic construct
  misc_feature 1..22: note = chemically synthesized
  source 1..22: mol_type = other DNA
cattctgctttgattcaatggc

SEQ ID NO: 45008 - DNA, 22 bp, synthetic construct
  misc_feature 1..22: note = chemically synthesized
  source 1..22: mol_type = other DNA
attctgctttgattcaatggca

SEQ ID NO: 45009 - DNA, 22 bp, synthetic construct
  misc_feature 1..22: note = chemically synthesized
  source 1..22: mol_type = other DNA
tgctttgattcaatggcagcca

SEQ ID NO: 45010 - DNA, 22 bp, synthetic construct
  misc_feature 1..22: note = chemically synthesized
  source 1..22: mol_type = other DNA
ctttgattcaatggcagccaat

SEQ ID NO: 45011 - DNA, 22 bp, synthetic construct
  misc_feature 1..22: note = chemically synthesized
  source 1..22: mol_type = other DNA
tgattcaatggcagccaattta

SEQ ID NO: 45012 - DNA, 22 bp, synthetic construct
  misc_feature 1..22: note = chemically synthesized
  source 1..22: mol_type = other DNA
gattcaatggcagccaatttaa

SEQ ID NO: 45013 - DNA, 22 bp, synthetic construct
  misc_feature 1..22: note = chemically synthesized
  source 1..22: mol_type = other DNA
attcaatggcagccaatttaat

SEQ ID NO: 45014 - DNA, 22 bp, synthetic construct
  misc_feature 1..22: note = chemically synthesized
  source 1..22: mol_type = other DNA
aatggcagccaatttaattcat

SEQ ID NO: 45015 - DNA, 22 bp, synthetic construct
  misc_feature 1..22: note = chemically synthesized
  source 1..22: mol_type = other DNA
aattcatttggtccaaacctgt

SEQ ID NO: 45016 - DNA, 22 bp, synthetic construct
  misc_feature 1..22: note = chemically synthesized
  source 1..22: mol_type = other DNA
attcatttggtccaaacctgta

SEQ ID NO: 45017 - DNA, 22 bp, synthetic construct
  misc_feature 1..22: note = chemically synthesized
  source 1..22: mol_type = other DNA
atttggtccaaacctgtagtgc

SEQ ID NO: 45018 - DNA, 22 bp, synthetic construct
  misc_feature 1..22: note = chemically synthesized
  source 1..22: mol_type = other DNA
ggtccaaacctgtagtgctact

SEQ ID NO: 45019 - DNA, 22 bp, synthetic construct
  misc_feature 1..22: note = chemically synthesized
  source 1..22: mol_type = other DNA
gtccaaacctgtagtgctactt

SEQ ID NO: 45020 - DNA, 22 bp, synthetic construct
  misc_feature 1..22: note = chemically synthesized
  source 1..22: mol_type = other DNA
tagtgctacttgccagaacaaa

SEQ ID NO: 45021 - DNA, 22 bp, synthetic construct
  misc_feature 1..22: note = chemically synthesized
  source 1..22: mol_type = other DNA
cttgccagaacaaaatggaatg

SEQ ID NO: 45022 - DNA, 22 bp, synthetic construct
  misc_feature 1..22: note = chemically synthesized
  source 1..22: mol_type = other DNA
gccagaacaaaatggaatgagc

SEQ ID NO: 45023 - DNA, 22 bp, synthetic construct
  misc_feature 1..22: note = chemically synthesized
  source 1..22: mol_type = other DNA
ccagaacaaaatggaatgagcc

SEQ ID NO: 45024 - DNA, 22 bp, synthetic construct
  misc_feature 1..22: note = chemically synthesized
  source 1..22: mol_type = other DNA
attccctgccctcaaggagctc

SEQ ID NO: 45025 - DNA, 22 bp, synthetic construct
  misc_feature 1..22: note = chemically synthesized
  source 1..22: mol_type = other DNA
cctgccctcaaggagctcacag

SEQ ID NO: 45026 - DNA, 22 bp, synthetic construct
  misc_feature 1..22: note = chemically synthesized
  source 1..22: mol_type = other DNA
ccctcaaggagctcacagtcca

SEQ ID NO: 45027 - DNA, 22 bp, synthetic construct
  misc_feature 1..22: note = chemically synthesized
  source 1..22: mol_type = other DNA
aaggagctcacagtccagtggc

SEQ ID NO: 45028 - DNA, 22 bp, synthetic construct
  misc_feature 1..22: note = chemically synthesized
  source 1..22: mol_type = other DNA
acagtccagtggctctgtcttt

SEQ ID NO: 45029 - DNA, 22 bp, synthetic construct
  misc_feature 1..22: note = chemically synthesized
  source 1..22: mol_type = other DNA
tgtctttaatatctataagagc

SEQ ID NO: 45030 - DNA, 22 bp, synthetic construct
  misc_feature 1..22: note = chemically synthesized
  source 1..22: mol_type = other DNA
tctttaatatctataagagcac

SEQ ID NO: 45031 - DNA, 22 bp, synthetic construct
  misc_feature 1..22: note = chemically synthesized
  source 1..22: mol_type = other DNA
taatatctataagagcacaggt

SEQ ID NO: 45032 - DNA, 22 bp, synthetic construct
  misc_feature 1..22: note = chemically synthesized
  source 1..22: mol_type = other DNA
aatatctataagagcacaggta

SEQ ID NO: 45033 - DNA, 22 bp, synthetic construct
  misc_feature 1..22: note = chemically synthesized
  source 1..22: mol_type = other DNA
atatctataagagcacaggtaa

SEQ ID NO: 45034 - DNA, 22 bp, synthetic construct
  misc_feature 1..22: note = chemically synthesized
  source 1..22: mol_type = other DNA
taagagcacaggtaagtgtcac

SEQ ID NO: 45035 - DNA, 22 bp, synthetic construct
  misc_feature 1..22: note = chemically synthesized
  source 1..22: mol_type = other DNA
tgggggaaatgaagaacactct

SEQ ID NO: 45036 - DNA, 22 bp, synthetic construct
  misc_feature 1..22: note = chemically synthesized
  source 1..22: mol_type = other DNA
gggggaaatgaagaacactctt

SEQ ID NO: 45037 - DNA, 22 bp, synthetic construct
  misc_feature 1..22: note = chemically synthesized
  source 1..22: mol_type = other DNA
ggggaaatgaagaacactcttg

SEQ ID NO: 45038 - DNA, 22 bp, synthetic construct
  misc_feature 1..22: note = chemically synthesized
  source 1..22: mol_type = other DNA
ttgtaatatgattaatcacttc

SEQ ID NO: 45039 - DNA, 22 bp, synthetic construct
  misc_feature 1..22: note = chemically synthesized
  source 1..22: mol_type = other DNA
gtaatatgattaatcacttcca

SEQ ID NO: 45040 - DNA, 22 bp, synthetic construct
  misc_feature 1..22: note = chemically synthesized
  source 1..22: mol_type = other DNA
taatatgattaatcacttccaa

SEQ ID NO: 45041 - DNA, 22 bp, synthetic construct
  misc_feature 1..22: note = chemically synthesized
  source 1..22: mol_type = other DNA
atcacttccaaatactttacct

SEQ ID NO: 45042 - DNA, 22 bp, synthetic construct
  misc_feature 1..22: note = chemically synthesized
  source 1..22: mol_type = other DNA
ccaaatactttacctggtttgt

SEQ ID NO: 45043 - DNA, 22 bp, synthetic construct
  misc_feature 1..22: note = chemically synthesized
  source 1..22: mol_type = other DNA
caaatactttacctggtttgta

SEQ ID NO: 45044 - DNA, 22 bp, synthetic construct
  misc_feature 1..22: note = chemically synthesized
  source 1..22: mol_type = other DNA
tacctggtttgtaagttctctt

SEQ ID NO: 45045 - DNA, 22 bp, synthetic construct
  misc_feature 1..22: note = chemically synthesized
  source 1..22: mol_type = other DNA
acctggtttgtaagttctcttt

SEQ ID NO: 45046 - DNA, 22 bp, synthetic construct
  misc_feature 1..22: note = chemically synthesized
  source 1..22: mol_type = other DNA
cctggtttgtaagttctctttc

SEQ ID NO: 45047 - DNA, 22 bp, synthetic construct
  misc_feature 1..22: note = chemically synthesized
  source 1..22: mol_type = other DNA
gtttgtaagttctctttcgggt

SEQ ID NO: 45048 - DNA, 22 bp, synthetic construct
  misc_feature 1..22: note = chemically synthesized
  source 1..22: mol_type = other DNA
gtaagttctctttcgggtgctt

SEQ ID NO: 45049 - DNA, 22 bp, synthetic construct
  misc_feature 1..22: note = chemically synthesized
  source 1..22: mol_type = other DNA
taagttctctttcgggtgcttc

SEQ ID NO: 45050 - DNA, 22 bp, synthetic construct
  misc_feature 1..22: note = chemically synthesized
  source 1..22: mol_type = other DNA
tctttcgggtgcttccctgagt

SEQ ID NO: 45051 - DNA, 22 bp, synthetic construct
  misc_feature 1..22: note = chemically synthesized
  source 1..22: mol_type = other DNA
tttcgggtgcttccctgagtgg

SEQ ID NO: 45052 - DNA, 22 bp, synthetic construct
  misc_feature 1..22: note = chemically synthesized
  source 1..22: mol_type = other DNA
tcgggtgcttccctgagtggca

SEQ ID NO: 45053 - DNA, 22 bp, synthetic construct
  misc_feature 1..22: note = chemically synthesized
  source 1..22: mol_type = other DNA
cgggtgcttccctgagtggcaa

SEQ ID NO: 45054 - DNA, 22 bp, synthetic construct
  misc_feature 1..22: note = chemically synthesized
  source 1..22: mol_type = other DNA
gggtgcttccctgagtggcaag

SEQ ID NO: 45055 - DNA, 22 bp, synthetic construct
  misc_feature 1..22: note = chemically synthesized
  source 1..22: mol_type = other DNA
ccctgagtggcaagagggaaag

SEQ ID NO: 45056 - DNA, 22 bp, synthetic construct
  misc_feature 1..22: note = chemically synthesized
  source 1..22: mol_type = other DNA
cctgagtggcaagagggaaagg

SEQ ID NO: 45057 - DNA, 22 bp, synthetic construct
  misc_feature 1..22: note = chemically synthesized
  source 1..22: mol_type = other DNA
agtggcaagagggaaaggcctt

SEQ ID NO: 45058 - DNA, 22 bp, synthetic construct
  misc_feature 1..22: note = chemically synthesized
  source 1..22: mol_type = other DNA
ttgcaagtactgacaccgcttt

SEQ ID NO: 45059 - DNA, 22 bp, synthetic construct
  misc_feature 1..22: note = chemically synthesized
  source 1..22: mol_type = other DNA
tgcaagtactgacaccgctttc

SEQ ID NO: 45060 - DNA, 22 bp, synthetic construct
  misc_feature 1..22: note = chemically synthesized
  source 1..22: mol_type = other DNA
gcaagtactgacaccgctttct

SEQ ID NO: 45061 - DNA, 22 bp, synthetic construct
  misc_feature 1..22: note = chemically synthesized
  source 1..22: mol_type = other DNA
caagtactgacaccgctttctt

SEQ ID NO: 45062 - DNA, 22 bp, synthetic construct
  misc_feature 1..22: note = chemically synthesized
  source 1..22: mol_type = other DNA
acaccgctttcttttttttttt

SEQ ID NO: 45063 - DNA, 22 bp, synthetic construct
  misc_feature 1..22: note = chemically synthesized
  source 1..22: mol_type = other DNA
tctttttttttttttttttttt

SEQ ID NO: 45064 - DNA, 22 bp, synthetic construct
  misc_feature 1..22: note = chemically synthesized
  source 1..22: mol_type = other DNA
cttttttttttttttttttttt

SEQ ID NO: 45065 - DNA, 22 bp, synthetic construct
  misc_feature 1..22: note = chemically synthesized
  source 1..22: mol_type = other DNA
tttttttttttttttttttttg

SEQ ID NO: 45066 - DNA, 22 bp, synthetic construct
  misc_feature 1..22: note = chemically synthesized
  source 1..22: mol_type = other DNA
tttttttttttttttttttgag

SEQ ID NO: 45067 - DNA, 22 bp, synthetic construct
  misc_feature 1..22: note = chemically synthesized
  source 1..22: mol_type = other DNA
ttttttttttttttttttgaga

SEQ ID NO: 45068 - DNA, 22 bp, synthetic construct
  misc_feature 1..22: note = chemically synthesized
  source 1..22: mol_type = other DNA
tttttttttttttttttgagac

SEQ ID NO: 45069 - DNA, 22 bp, synthetic construct
  misc_feature 1..22: note = chemically synthesized
  source 1..22: mol_type = other DNA
ttttttttttttttttgagaca

SEQ ID NO: 45070 - DNA, 22 bp, synthetic construct
  misc_feature 1..22: note = chemically synthesized
  source 1..22: mol_type = other DNA
tttttttttttttttgagacag

SEQ ID NO: 45071 - DNA, 22 bp, synthetic construct
  misc_feature 1..22: note = chemically synthesized
  source 1..22: mol_type = other DNA
ttttttttttttttgagacaga

SEQ ID NO: 45072 - DNA, 22 bp, synthetic construct
  misc_feature 1..22: note = chemically synthesized
  source 1..22: mol_type = other DNA
tttttttttttttgagacagag

SEQ ID NO: 45073 - DNA, 22 bp, synthetic construct
  misc_feature 1..22: note = chemically synthesized
  source 1..22: mol_type = other DNA
ttttttttttttgagacagagt

SEQ ID NO: 45074 - DNA, 22 bp, synthetic construct
  misc_feature 1..22: note = chemically synthesized
  source 1..22: mol_type = other DNA
tttttttttttgagacagagtt

SEQ ID NO: 45075 - DNA, 22 bp, synthetic construct
  misc_feature 1..22: note = chemically synthesized
  source 1..22: mol_type = other DNA
ttttttttttgagacagagttt

SEQ ID NO: 45076 - DNA, 22 bp, synthetic construct
  misc_feature 1..22: note = chemically synthesized
  source 1..22: mol_type = other DNA
tttttttttgagacagagtttc

SEQ ID NO: 45077 - DNA, 22 bp, synthetic construct
  misc_feature 1..22: note = chemically synthesized
  source 1..22: mol_type = other DNA
ttttttttgagacagagtttcg

SEQ ID NO: 45078 - DNA, 22 bp, synthetic construct
  misc_feature 1..22: note = chemically synthesized
  source 1..22: mol_type = other DNA
tttttttgagacagagtttcgc

SEQ ID NO: 45079 - DNA, 22 bp, synthetic construct
  misc_feature 1..22: note = chemically synthesized
  source 1..22: mol_type = other DNA
ttttttgagacagagtttcgct

SEQ ID NO: 45080 - DNA, 22 bp, synthetic construct
  misc_feature 1..22: note = chemically synthesized
  source 1..22: mol_type = other DNA
tttttgagacagagtttcgctc

SEQ ID NO: 45081 - DNA, 22 bp, synthetic construct
  misc_feature 1..22: note = chemically synthesized
  source 1..22: mol_type = other DNA
ttttgagacagagtttcgctct

SEQ ID NO: 45082 - DNA, 22 bp, synthetic construct
  misc_feature 1..22: note = chemically synthesized
  source 1..22: mol_type = other DNA
tttgagacagagtttcgctctt

SEQ ID NO: 45083 - DNA, 22 bp, synthetic construct
  misc_feature 1..22: note = chemically synthesized
  source 1..22: mol_type = other DNA
ttgagacagagtttcgctcttg

SEQ ID NO: 45084 - DNA, 22 bp, synthetic construct
  misc_feature 1..22: note = chemically synthesized
  source 1..22: mol_type = other DNA
tgagacagagtttcgctcttgt

SEQ ID NO: 45085 - DNA, 22 bp, synthetic construct
  misc_feature 1..22: note = chemically synthesized
  source 1..22: mol_type = other DNA
gagacagagtttcgctcttgtt

SEQ ID NO: 45086 - DNA, 22 bp, synthetic construct
  misc_feature 1..22: note = chemically synthesized
  source 1..22: mol_type = other DNA
agacagagtttcgctcttgttg

SEQ ID NO: 45087 - DNA, 22 bp, synthetic construct
  misc_feature 1..22: note = chemically synthesized
  source 1..22: mol_type = other DNA
cgctcttgttgcccaggctggg

SEQ ID NO: 45088 - DNA, 22 bp, synthetic construct
  misc_feature 1..22: note = chemically synthesized
  source 1..22: mol_type = other DNA
gctcttgttgcccaggctgggg

SEQ ID NO: 45089 - DNA, 22 bp, synthetic construct
  misc_feature 1..22: note = chemically synthesized
  source 1..22: mol_type = other DNA
ttgttgcccaggctggggtgca

SEQ ID NO: 45090 - DNA, 22 bp, synthetic construct
  misc_feature 1..22: note = chemically synthesized
  source 1..22: mol_type = other DNA
gttgcccaggctggggtgcaat

SEQ ID NO: 45091 - DNA, 22 bp, synthetic construct
  misc_feature 1..22: note = chemically synthesized
  source 1..22: mol_type = other DNA
ttgcccaggctggggtgcaatg

SEQ ID NO: 45092 - DNA, 22 bp, synthetic construct
  misc_feature 1..22: note = chemically synthesized
  source 1..22: mol_type = other DNA
cccaggctggggtgcaatggtg

SEQ ID NO: 45093 - DNA, 22 bp, synthetic construct
  misc_feature 1..22: note = chemically synthesized
  source 1..22: mol_type = other DNA
gggtgcaatggtgtgatctcgg

SEQ ID NO: 45094 - DNA, 22 bp, synthetic construct
  misc_feature 1..22: note = chemically synthesized
  source 1..22: mol_type = other DNA
ggctcaccacctctgcctcctg

SEQ ID NO: 45095 - DNA, 22 bp, synthetic construct
  misc_feature 1..22: note = chemically synthesized
  source 1..22: mol_type = other DNA
accacctctgcctcctgggttc

SEQ ID NO: 45096 - DNA, 22 bp, synthetic construct
  misc_feature 1..22: note = chemically synthesized
  source 1..22: mol_type = other DNA
tgcctcctgggttcaagcaatt

SEQ ID NO: 45097 - DNA, 22 bp, synthetic construct
  misc_feature 1..22: note = chemically synthesized
  source 1..22: mol_type = other DNA
cctcctgggttcaagcaattct

SEQ ID NO: 45098 - DNA, 22 bp, synthetic construct
  misc_feature 1..22: note = chemically synthesized
  source 1..22: mol_type = other DNA
ctgggttcaagcaattctcctc

SEQ ID NO: 45099 - DNA, 22 bp, synthetic construct
  misc_feature 1..22: note = chemically synthesized
  source 1..22: mol_type = other DNA
ggttcaagcaattctcctccct

SEQ ID NO: 45100 - DNA, 22 bp, synthetic construct
  misc_feature 1..22: note = chemically synthesized
  source 1..22: mol_type = other DNA
aagcaattctcctccctcagcc

SEQ ID NO: 45101 - DNA, 22 bp, synthetic construct
  misc_feature 1..22: note = chemically synthesized
  source 1..22: mol_type = other DNA
tcctccctcagcctcctgagta

SEQ ID NO: 45102 - DNA, 22 bp, synthetic construct
  misc_feature 1..22: note = chemically synthesized
  source 1..22: mol_type = other DNA
ctccctcagcctcctgagtagc

SEQ ID NO: 45103 - DNA, 22 bp, synthetic construct
  misc_feature 1..22: note = chemically synthesized
  source 1..22: mol_type = other DNA
cctcagcctcctgagtagctgg

SEQ ID NO: 45104 - DNA, 22 bp, synthetic construct
  misc_feature 1..22: note = chemically synthesized
  source 1..22: mol_type = other DNA
agcctcctgagtagctgggatt

SEQ ID NO: 45105 - DNA, 22 bp, synthetic construct
  misc_feature 1..22: note = chemically synthesized
  source 1..22: mol_type = other DNA
ctgagtagctgggattacaggc

SEQ ID NO: 45106 - DNA, 22 bp, synthetic construct
  misc_feature 1..22: note = chemically synthesized
  source 1..22: mol_type = other DNA
agtagctgggattacaggcatg

SEQ ID NO: 45107 - DNA, 22 bp, synthetic construct
  misc_feature 1..22: note = chemically synthesized
  source 1..22: mol_type = other DNA
ggattacaggcatgtgcgacca

SEQ ID NO: 45108 - DNA, 22 bp, synthetic construct
  misc_feature 1..22: note = chemically synthesized
  source 1..22: mol_type = other DNA
caggcatgtgcgaccatgcctg

SEQ ID NO: 45109 - DNA, 22 bp, synthetic construct
  misc_feature 1..22: note = chemically synthesized
  source 1..22: mol_type = other DNA
gctaagtttatatttttaatag

SEQ ID NO: 45110 - DNA, 22 bp, synthetic construct
  misc_feature 1..22: note = chemically synthesized
  source 1..22: mol_type = other DNA
agtttatatttttaatagagat

SEQ ID NO: 45111 - DNA, 22 bp, synthetic construct
  misc_feature 1..22: note = chemically synthesized
  source 1..22: mol_type = other DNA
atatttttaatagagatgaggt

SEQ ID NO: 45112 - DNA, 22 bp, synthetic construct
  misc_feature 1..22: note = chemically synthesized
  source 1..22: mol_type = other DNA
tatttttaatagagatgaggtt

SEQ ID NO: 45113 - DNA, 22 bp, synthetic construct
  misc_feature 1..22: note = chemically synthesized
  source 1..22: mol_type = other DNA
ttaatagagatgaggtttctcc

SEQ ID NO: 45114 - DNA, 22 bp, synthetic construct
  misc_feature 1..22: note = chemically synthesized
  source 1..22: mol_type = other DNA
taatagagatgaggtttctcca

SEQ ID NO: 45115 - DNA, 22 bp, synthetic construct
  misc_feature 1..22: note = chemically synthesized
  source 1..22: mol_type = other DNA
aatagagatgaggtttctccat

SEQ ID NO: 45116 - DNA, 22 bp, synthetic construct
  misc_feature 1..22: note = chemically synthesized
  source 1..22: mol_type = other DNA
atagagatgaggtttctccatg

SEQ ID NO: 45117 - DNA, 22 bp, synthetic construct
  misc_feature 1..22: note = chemically synthesized
  source 1..22: mol_type = other DNA
ctccatgttggtcaggctggtc

SEQ ID NO: 45118 - DNA, 22 bp, synthetic construct
  misc_feature 1..22: note = chemically synthesized
  source 1..22: mol_type = other DNA
tccatgttggtcaggctggtct

SEQ ID NO: 45119 - DNA, 22 bp, synthetic construct
  misc_feature 1..22: note = chemically synthesized
  source 1..22: mol_type = other DNA
catgttggtcaggctggtctca

SEQ ID NO: 45120 - DNA, 22 bp, synthetic construct
  misc_feature 1..22: note = chemically synthesized
  source 1..22: mol_type = other DNA
gtcaggctggtctcaaactctt

SEQ ID NO: 45121 - DNA, 22 bp, synthetic construct
  misc_feature 1..22: note = chemically synthesized
  source 1..22: mol_type = other DNA
gtctcaaactcttgacctcagg

SEQ ID NO: 45122 - DNA, 22 bp, synthetic construct
  misc_feature 1..22: note = chemically synthesized
  source 1..22: mol_type = other DNA
aaactcttgacctcaggtgatc

SEQ ID NO: 45123 - DNA, 22 bp, synthetic construct
  misc_feature 1..22: note = chemically synthesized
  source 1..22: mol_type = other DNA
ttgacctcaggtgatctaccca

SEQ ID NO: 45124 - DNA, 22 bp, synthetic construct
  misc_feature 1..22: note = chemically synthesized
  source 1..22: mol_type = other DNA
gacctcaggtgatctacccacc

SEQ ID NO: 45125 - DNA, 22 bp, synthetic construct
  misc_feature 1..22: note = chemically synthesized
  source 1..22: mol_type = other DNA
acctcaggtgatctacccacct

SEQ ID NO: 45126 - DNA, 22 bp, synthetic construct
  misc_feature 1..22: note = chemically synthesized
  source 1..22: mol_type = other DNA
aggtgatctacccacctcggcc

SEQ ID NO: 45127 - DNA, 22 bp, synthetic construct
  misc_feature 1..22: note = chemically synthesized
  source 1..22: mol_type = other DNA
cccacctcggcctcccaaagtg

SEQ ID NO: 45128 - DNA, 22 bp, synthetic construct
  misc_feature 1..22: note = chemically synthesized
  source 1..22: mol_type = other DNA
ggcctcccaaagtgctggaatt

SEQ ID NO: 45129 - DNA, 22 bp, synthetic construct
  misc_feature 1..22: note = chemically synthesized
  source 1..22: mol_type = other DNA
ccaaagtgctggaattacagac

SEQ ID NO: 45130 - DNA, 22 bp, synthetic construct
  misc_feature 1..22: note = chemically synthesized
  source 1..22: mol_type = other DNA
gaattacagacgtgagccactg

SEQ ID NO: 45131 - DNA, 22 bp, synthetic construct
  misc_feature 1..22: note = chemically synthesized
  source 1..22: mol_type = other DNA
cagacgtgagccactgcgccca

SEQ ID NO: 45132 - DNA, 22 bp, synthetic construct
  misc_feature 1..22: note = chemically synthesized
  source 1..22: mol_type = other DNA
cgcccagccttacactgctttc

SEQ ID NO: 45133 - DNA, 22 bp, synthetic construct
  misc_feature 1..22: note = chemically synthesized
  source 1..22: mol_type = other DNA
acactgctttcttaattacagc

SEQ ID NO: 45134 - DNA, 22 bp, synthetic construct
  misc_feature 1..22: note = chemically synthesized
  source 1..22: mol_type = other DNA
cactgctttcttaattacagca

SEQ ID NO: 45135 - DNA, 22 bp, synthetic construct
  misc_feature 1..22: note = chemically synthesized
  source 1..22: mol_type = other DNA
ctttcttaattacagcagtgtg

SEQ ID NO: 45136 - DNA, 22 bp, synthetic construct
  misc_feature 1..22: note = chemically synthesized
  source 1..22: mol_type = other DNA
tcttaattacagcagtgtgctc

SEQ ID NO: 45137 - DNA, 22 bp, synthetic construct
  misc_feature 1..22: note = chemically synthesized
  source 1..22: mol_type = other DNA
cttaattacagcagtgtgctca

SEQ ID NO: 45138 - DNA, 22 bp, synthetic construct
  misc_feature 1..22: note = chemically synthesized
  source 1..22: mol_type = other DNA
ttaattacagcagtgtgctcat

SEQ ID NO: 45139 - DNA, 22 bp, synthetic construct
  misc_feature 1..22: note = chemically synthesized
  source 1..22: mol_type = other DNA
aattacagcagtgtgctcatct

SEQ ID NO: 45140 - DNA, 22 bp, synthetic construct
  misc_feature 1..22: note = chemically synthesized
  source 1..22: mol_type = other DNA
attacagcagtgtgctcatctc

SEQ ID NO: 45141 - DNA, 22 bp, synthetic construct
  misc_feature 1..22: note = chemically synthesized
  source 1..22: mol_type = other DNA
cagcagtgtgctcatctcacat

SEQ ID NO: 45142 - DNA, 22 bp, synthetic construct
  misc_feature 1..22: note = chemically synthesized
  source 1..22: mol_type = other DNA
atctcacataaaaatttaagac

SEQ ID NO: 45143 - DNA, 22 bp, synthetic construct
  misc_feature 1..22: note = chemically synthesized
  source 1..22: mol_type = other DNA
acataaaaatttaagacgggaa

SEQ ID NO: 45144 - DNA, 22 bp, synthetic construct
  misc_feature 1..22: note = chemically synthesized
  source 1..22: mol_type = other DNA
aagacgggaaaacaggaagatg

SEQ ID NO: 45145 - DNA, 22 bp, synthetic construct
  misc_feature 1..22: note = chemically synthesized
  source 1..22: mol_type = other DNA
agacgggaaaacaggaagatgc

SEQ ID NO: 45146 - DNA, 22 bp, synthetic construct
  misc_feature 1..22: note = chemically synthesized
  source 1..22: mol_type = other DNA
tgagaagttatatcagcccctc

SEQ ID NO: 45147 - DNA, 22 bp, synthetic construct
  misc_feature 1..22: note = chemically synthesized
  source 1..22: mol_type = other DNA
agaagttatatcagcccctctg

SEQ ID NO: 45148 - DNA, 22 bp, synthetic construct
  misc_feature 1..22: note = chemically synthesized
  source 1..22: mol_type = other DNA
tatcagcccctctgcctctcta

SEQ ID NO: 45149 - DNA, 22 bp, synthetic construct
  misc_feature 1..22: note = chemically synthesized
  source 1..22: mol_type = other DNA
tgcctctctacattccaaaaca

SEQ ID NO: 45150 - DNA, 22 bp, synthetic construct
  misc_feature 1..22: note = chemically synthesized
  source 1..22: mol_type = other DNA
cctctctacattccaaaacagc

SEQ ID NO: 45151 - DNA, 22 bp, synthetic construct
  misc_feature 1..22: note = chemically synthesized
  source 1..22: mol_type = other DNA
tctacattccaaaacagccttt

SEQ ID NO: 45152 - DNA, 22 bp, synthetic construct
  misc_feature 1..22: note = chemically synthesized
  source 1..22: mol_type = other DNA
tacattccaaaacagcctttta

SEQ ID NO: 45153 - DNA, 22 bp, synthetic construct
  misc_feature 1..22: note = chemically synthesized
  source 1..22: mol_type = other DNA
cattccaaaacagccttttatt

SEQ ID NO: 45154 - DNA, 22 bp, synthetic construct
  misc_feature 1..22: note = chemically synthesized
  source 1..22: mol_type = other DNA
caaaacagccttttattctaat

SEQ ID NO: 45155 - DNA, 22 bp, synthetic construct
  misc_feature 1..22: note = chemically synthesized
  source 1..22: mol_type = other DNA
ttattctaattattttactagt

SEQ ID NO: 45156 - DNA, 22 bp, synthetic construct
  misc_feature 1..22: note = chemically synthesized
  source 1..22: mol_type = other DNA
tattctaattattttactagtg

SEQ ID NO: 45157 - DNA, 22 bp, synthetic construct
  misc_feature 1..22: note = chemically synthesized
  source 1..22: mol_type = other DNA
attctaattattttactagtga

SEQ ID NO: 45158 - DNA, 22 bp, synthetic construct
  misc_feature 1..22: note = chemically synthesized
  source 1..22: mol_type = other DNA
ttctaattattttactagtgaa

SEQ ID NO: 45159 - DNA, 22 bp, synthetic construct
  misc_feature 1..22: note = chemically synthesized
  source 1..22: mol_type = other DNA
taattattttactagtgaatta

SEQ ID NO: 45160 - DNA, 22 bp, synthetic construct
  misc_feature 1..22: note = chemically synthesized
  source 1..22: mol_type = other DNA
attattttactagtgaattatg

SEQ ID NO: 45161 - DNA, 22 bp, synthetic construct
  misc_feature 1..22: note = chemically synthesized
  source 1..22: mol_type = other DNA
ttttactagtgaattatggaat

SEQ ID NO: 45162 - DNA, 22 bp, synthetic construct
  misc_feature 1..22: note = chemically synthesized
  source 1..22: mol_type = other DNA
tactagtgaattatggaataaa

SEQ ID NO: 45163 - DNA, 22 bp, synthetic construct
  misc_feature 1..22: note = chemically synthesized
  source 1..22: mol_type = other DNA
actagtgaattatggaataaag

SEQ ID NO: 45164 - DNA, 22 bp, synthetic construct
  misc_feature 1..22: note = chemically synthesized
  source 1..22: mol_type = other DNA
ctagtgaattatggaataaagt

SEQ ID NO: 45165 - DNA, 22 bp, synthetic construct
  misc_feature 1..22: note = chemically synthesized
  source 1..22: mol_type = other DNA
gtgaattatggaataaagtagt

SEQ ID NO: 45166 - DNA, 22 bp, synthetic construct
  misc_feature 1..22: note = chemically synthesized
  source 1..22: mol_type = other DNA
tggaataaagtagtattatgtt

SEQ ID NO: 45167 - DNA, 22 bp, synthetic construct
  misc_feature 1..22: note = chemically synthesized
  source 1..22: mol_type = other DNA
tgtttctttctacacaacttgt

SEQ ID NO: 45168 - DNA, 22 bp, synthetic construct
  misc_feature 1..22: note = chemically synthesized
  source 1..22: mol_type = other DNA
ctttctacacaacttgtgttgc

SEQ ID NO: 45169 - DNA, 22 bp, synthetic construct
  misc_feature 1..22: note = chemically synthesized
  source 1..22: mol_type = other DNA
tttctacacaacttgtgttgca

SEQ ID NO: 45170 - DNA, 22 bp, synthetic construct
  misc_feature 1..22: note = chemically synthesized
  source 1..22: mol_type = other DNA
tctacacaacttgtgttgcact

SEQ ID NO: 45171 - DNA, 22 bp, synthetic construct
  misc_feature 1..22: note = chemically synthesized
  source 1..22: mol_type = other DNA
ctacacaacttgtgttgcacta

SEQ ID NO: 45172 - DNA, 22 bp, synthetic construct
  misc_feature 1..22: note = chemically synthesized
  source 1..22: mol_type = other DNA
tacacaacttgtgttgcactag

SEQ ID NO: 45173 - DNA, 22 bp, synthetic construct
  misc_feature 1..22: note = chemically synthesized
  source 1..22: mol_type = other DNA
cacaacttgtgttgcactaggt

SEQ ID NO: 45174 - DNA, 22 bp, synthetic construct
  misc_feature 1..22: note = chemically synthesized
  source 1..22: mol_type = other DNA
gtgttgcactaggtgaaatctc

SEQ ID NO: 45175 - DNA, 22 bp, synthetic construct
  misc_feature 1..22: note = chemically synthesized
  source 1..22: mol_type = other DNA
tgttgcactaggtgaaatctca

SEQ ID NO: 45176 - DNA, 22 bp, synthetic construct
  misc_feature 1..22: note = chemically synthesized
  source 1..22: mol_type = other DNA
cactaggtgaaatctcaggcta

SEQ ID NO: 45177 - DNA, 22 bp, synthetic construct
  misc_feature 1..22: note = chemically synthesized
  source 1..22: mol_type = other DNA
ggtgaaatctcaggctaacaga

SEQ ID NO: 45178 - DNA, 22 bp, synthetic construct
  misc_feature 1..22: note = chemically synthesized
  source 1..22: mol_type = other DNA
aggctaacagagcttcagggag

SEQ ID NO: 45179 - DNA, 22 bp, synthetic construct
  misc_feature 1..22: note = chemically synthesized
  source 1..22: mol_type = other DNA
acagagcttcagggaggaaagg

SEQ ID NO: 45180 - DNA, 22 bp, synthetic construct
  misc_feature 1..22: note = chemically synthesized
  source 1..22: mol_type = other DNA
cagggaggaaaggccagaccaa

SEQ ID NO: 45181 - DNA, 22 bp, synthetic construct
  misc_feature 1..22: note = chemically synthesized
  source 1..22: mol_type = other DNA
agggaggaaaggccagaccaaa

SEQ ID NO: 45182 - DNA, 22 bp, synthetic construct
  misc_feature 1..22: note = chemically synthesized
  source 1..22: mol_type = other DNA
actccacagagaagctgtacca

SEQ ID NO: 45183 - DNA, 22 bp, synthetic construct
  misc_feature 1..22: note = chemically synthesized
  source 1..22: mol_type = other DNA
cacagagaagctgtaccaccag

SEQ ID NO: 45184 - DNA, 22 bp, synthetic construct
  misc_feature 1..22: note = chemically synthesized
  source 1..22: mol_type = other DNA
taccaccagaagtcctggaaaa

SEQ ID NO: 45185 - DNA, 22 bp, synthetic construct
  misc_feature 1..22: note = chemically synthesized
  source 1..22: mol_type = other DNA
gaaaactgagaggtttgcatgt

SEQ ID NO: 45186 - DNA, 22 bp, synthetic construct
  misc_feature 1..22: note = chemically synthesized
  source 1..22: mol_type = other DNA
agaggtttgcatgttgtaacaa

SEQ ID NO: 45187 - DNA, 22 bp, synthetic construct
  misc_feature 1..22: note = chemically synthesized
  source 1..22: mol_type = other DNA
gcatgttgtaacaatgcaactc

SEQ ID NO: 45188 - DNA, 22 bp, synthetic construct
  misc_feature 1..22: note = chemically synthesized
  source 1..22: mol_type = other DNA
catgttgtaacaatgcaactca

SEQ ID NO: 45189 - DNA, 22 bp, synthetic construct
  misc_feature 1..22: note = chemically synthesized
  source 1..22: mol_type = other DNA
taacaatgcaactcaagactat

SEQ ID NO: 45190 - DNA, 22 bp, synthetic construct
  misc_feature 1..22: note = chemically synthesized
  source 1..22: mol_type = other DNA
aagactatcagaatgatatgaa

SEQ ID NO: 45191 - DNA, 22 bp, synthetic construct
  misc_feature 1..22: note = chemically synthesized
  source 1..22: mol_type = other DNA
tcagaatgatatgaatatttgt

SEQ ID NO: 45192 - DNA, 22 bp, synthetic construct
  misc_feature 1..22: note = chemically synthesized
  source 1..22: mol_type = other DNA
gtatagatacttatcaaagcaa

SEQ ID NO: 45193 - DNA, 22 bp, synthetic construct
  misc_feature 1..22: note = chemically synthesized
  source 1..22: mol_type = other DNA
tatagatacttatcaaagcaac

SEQ ID NO: 45194 - DNA, 22 bp, synthetic construct
  misc_feature 1..22: note = chemically synthesized
  source 1..22: mol_type = other DNA
atcaaagcaacaatcagagatc

SEQ ID NO: 45195 - DNA, 22 bp, synthetic construct
  misc_feature 1..22: note = chemically synthesized
  source 1..22: mol_type = other DNA
tcaaagcaacaatcagagatca

SEQ ID NO: 45196 - DNA, 22 bp, synthetic construct
  misc_feature 1..22: note = chemically synthesized
  source 1..22: mol_type = other DNA
caaatgagcttacagtttatga

SEQ ID NO: 45197 - DNA, 22 bp, synthetic construct
  misc_feature 1..22: note = chemically synthesized
  source 1..22: mol_type = other DNA
acagtttatgatcctgctttgt

SEQ ID NO: 45198 - DNA, 22 bp, synthetic construct
  misc_feature 1..22: note = chemically synthesized
  source 1..22: mol_type = other DNA
cagtttatgatcctgctttgta

SEQ ID NO: 45199 - DNA, 22 bp, synthetic construct
  misc_feature 1..22: note = chemically synthesized
  source 1..22: mol_type = other DNA
atgatcctgctttgtaaaagct

SEQ ID NO: 45200 - DNA, 22 bp, synthetic construct
  misc_feature 1..22: note = chemically synthesized
  source 1..22: mol_type = other DNA
tgatcctgctttgtaaaagctg

SEQ ID NO: 45201 - DNA, 22 bp, synthetic construct
  misc_feature 1..22: note = chemically synthesized
  source 1..22: mol_type = other DNA
ctttgtaaaagctggtgaaaca

SEQ ID NO: 45202 - DNA, 22 bp, synthetic construct
  misc_feature 1..22: note = chemically synthesized
  source 1..22: mol_type = other DNA
tgtaaaagctggtgaaacaaaa

SEQ ID NO: 45203 - DNA, 22 bp, synthetic construct
  misc_feature 1..22: note = chemically synthesized
  source 1..22: mol_type = other DNA
gtaaaagctggtgaaacaaaat

SEQ ID NO: 45204 - DNA, 22 bp, synthetic construct
  misc_feature 1..22: note = chemically synthesized
  source 1..22: mol_type = other DNA
taaaagctggtgaaacaaaatg

SEQ ID NO: 45205 - DNA, 22 bp, synthetic construct
  misc_feature 1..22: note = chemically synthesized
  source 1..22: mol_type = other DNA
gtgaaacaaaatgatggatagc

SEQ ID NO: 45206 - DNA, 22 bp, synthetic construct
  misc_feature 1..22: note = chemically synthesized
  source 1..22: mol_type = other DNA
gctgagctccaaagtcagggag

SEQ ID NO: 45207 - DNA, 22 bp, synthetic construct
  misc_feature 1..22: note = chemically synthesized
  source 1..22: mol_type = other DNA
ctgagctccaaagtcagggagt

SEQ ID NO: 45208 - DNA, 22 bp, synthetic construct
  misc_feature 1..22: note = chemically synthesized
  source 1..22: mol_type = other DNA
agctccaaagtcagggagtagg

SEQ ID NO: 45209 - DNA, 22 bp, synthetic construct
  misc_feature 1..22: note = chemically synthesized
  source 1..22: mol_type = other DNA
caaagtcagggagtaggtaaac

SEQ ID NO: 45210 - DNA, 22 bp, synthetic construct
  misc_feature 1..22: note = chemically synthesized
  source 1..22: mol_type = other DNA
cctcctggctctcctctacatt

SEQ ID NO: 45211 - DNA, 22 bp, synthetic construct
  misc_feature 1..22: note = chemically synthesized
  source 1..22: mol_type = other DNA
ctggctctcctctacattctgt

SEQ ID NO: 45212 - DNA, 22 bp, synthetic construct
  misc_feature 1..22: note = chemically synthesized
  source 1..22: mol_type = other DNA
gctctcctctacattctgtgag

SEQ ID NO: 45213 - DNA, 22 bp, synthetic construct
  misc_feature 1..22: note = chemically synthesized
  source 1..22: mol_type = other DNA
tcctctacattctgtgagcaaa

SEQ ID NO: 45214 - DNA, 22 bp, synthetic construct
  misc_feature 1..22: note = chemically synthesized
  source 1..22: mol_type = other DNA
ctctacattctgtgagcaaacg

SEQ ID NO: 45215 - DNA, 22 bp, synthetic construct
  misc_feature 1..22: note = chemically synthesized
  source 1..22: mol_type = other DNA
tacattctgtgagcaaacggaa

SEQ ID NO: 45216 - DNA, 22 bp, synthetic construct
  misc_feature 1..22: note = chemically synthesized
  source 1..22: mol_type = other DNA
cattctgtgagcaaacggaaaa

SEQ ID NO: 45217 - DNA, 22 bp, synthetic construct
  misc_feature 1..22: note = chemically synthesized
  source 1..22: mol_type = other DNA
tgtgagcaaacggaaaaataaa

SEQ ID NO: 45218 - DNA, 22 bp, synthetic construct
  misc_feature 1..22: note = chemically synthesized
  source 1..22: mol_type = other DNA
tgagcaaacggaaaaataaacc

SEQ ID NO: 45219 - DNA, 22 bp, synthetic construct
  misc_feature 1..22: note = chemically synthesized
  source 1..22: mol_type = other DNA
agcctaataaaactgcacagac

SEQ ID NO: 45220 - DNA, 22 bp, synthetic construct
  misc_feature 1..22: note = chemically synthesized
  source 1..22: mol_type = other DNA
ataaaactgcacagacagaata

SEQ ID NO: 45221 - DNA, 22 bp, synthetic construct
  misc_feature 1..22: note = chemically synthesized
  source 1..22: mol_type = other DNA
cacagacagaataacttcttca

SEQ ID NO: 45222 - DNA, 22 bp, synthetic construct
  misc_feature 1..22: note = chemically synthesized
  source 1..22: mol_type = other DNA
cttcatcagattcagaagagta

SEQ ID NO: 45223 - DNA, 22 bp, synthetic construct
  misc_feature 1..22: note = chemically synthesized
  source 1..22: mol_type = other DNA
ttcatcagattcagaagagtag

SEQ ID NO: 45224 - DNA, 22 bp, synthetic construct
  misc_feature 1..22: note = chemically synthesized
  source 1..22: mol_type = other DNA
catcagattcagaagagtagca

SEQ ID NO: 45225 - DNA, 22 bp, synthetic construct
  misc_feature 1..22: note = chemically synthesized
  source 1..22: mol_type = other DNA
atcagattcagaagagtagcag

SEQ ID NO: 45226 - DNA, 22 bp, synthetic construct
  misc_feature 1..22: note = chemically synthesized
  source 1..22: mol_type = other DNA
agaagagtagcagggggtttct

SEQ ID NO: 45227 - DNA, 22 bp, synthetic construct
  misc_feature 1..22: note = chemically synthesized
  source 1..22: mol_type = other DNA
ctcgctagcacagatttgagct

SEQ ID NO: 45228 - DNA, 22 bp, synthetic construct
  misc_feature 1..22: note = chemically synthesized
  source 1..22: mol_type = other DNA
tcgctagcacagatttgagctc

SEQ ID NO: 45229 - DNA, 22 bp, synthetic construct
  misc_feature 1..22: note = chemically synthesized
  source 1..22: mol_type = other DNA
gctagcacagatttgagctctg

SEQ ID NO: 45230 - DNA, 22 bp, synthetic construct
  misc_feature 1..22: note = chemically synthesized
  source 1..22: mol_type = other DNA
gcacagatttgagctctgccat

SEQ ID NO: 45231 - DNA, 22 bp, synthetic construct
  misc_feature 1..22: note = chemically synthesized
  source 1..22: mol_type = other DNA
gagctctgccatcacacacttt

SEQ ID NO: 45232 - DNA, 22 bp, synthetic construct
  misc_feature 1..22: note = chemically synthesized
  source 1..22: mol_type = other DNA
agctctgccatcacacactttg

SEQ ID NO: 45233 - DNA, 22 bp, synthetic construct
  misc_feature 1..22: note = chemically synthesized
  source 1..22: mol_type = other DNA
tgccatcacacactttgtacat

SEQ ID NO: 45234 - DNA, 22 bp, synthetic construct
  misc_feature 1..22: note = chemically synthesized
  source 1..22: mol_type = other DNA
ccatcacacactttgtacatac

SEQ ID NO: 45235 - DNA, 22 bp, synthetic construct
  misc_feature 1..22: note = chemically synthesized
  source 1..22: mol_type = other DNA
tgtacatacaattctgggatct

SEQ ID NO: 45236 - DNA, 22 bp, synthetic construct
  misc_feature 1..22: note = chemically synthesized
  source 1..22: mol_type = other DNA
gtacatacaattctgggatctc

SEQ ID NO: 45237 - DNA, 22 bp, synthetic construct
  misc_feature 1..22: note = chemically synthesized
  source 1..22: mol_type = other DNA
tacatacaattctgggatctca

SEQ ID NO: 45238 - DNA, 22 bp, synthetic construct
  misc_feature 1..22: note = chemically synthesized
  source 1..22: mol_type = other DNA
tgggatctcaggtattgctcct

SEQ ID NO: 45239 - DNA, 22 bp, synthetic construct
  misc_feature 1..22: note = chemically synthesized
  source 1..22: mol_type = other DNA
ggatctcaggtattgctcctaa

SEQ ID NO: 45240 - DNA, 22 bp, synthetic construct
  misc_feature 1..22: note = chemically synthesized
  source 1..22: mol_type = other DNA
aggtattgctcctaaagaaaga

SEQ ID NO: 45241 - DNA, 22 bp, synthetic construct
  misc_feature 1..22: note = chemically synthesized
  source 1..22: mol_type = other DNA
ctcctaaagaaagagccagctt

SEQ ID NO: 45242 - DNA, 22 bp, synthetic construct
  misc_feature 1..22: note = chemically synthesized
  source 1..22: mol_type = other DNA
ctaaagaaagagccagcttcct

SEQ ID NO: 45243 - DNA, 22 bp, synthetic construct
  misc_feature 1..22: note = chemically synthesized
  source 1..22: mol_type = other DNA
aagaaagagccagcttccttct

SEQ ID NO: 45244 - DNA, 22 bp, synthetic construct
  misc_feature 1..22: note = chemically synthesized
  source 1..22: mol_type = other DNA
ccttctcttatcttcctccaac

SEQ ID NO: 45245 - DNA, 22 bp, synthetic construct
  misc_feature 1..22: note = chemically synthesized
  source 1..22: mol_type = other DNA
cttctcttatcttcctccaaca

SEQ ID NO: 45246 - DNA, 22 bp, synthetic construct
  misc_feature 1..22: note = chemically synthesized
  source 1..22: mol_type = other DNA
ctcttatcttcctccaacatcc

SEQ ID NO: 45247 - DNA, 22 bp, synthetic construct
  misc_feature 1..22: note = chemically synthesized
  source 1..22: mol_type = other DNA
tcttatcttcctccaacatcca

SEQ ID NO: 45248 - DNA, 22 bp, synthetic construct
  misc_feature 1..22: note = chemically synthesized
  source 1..22: mol_type = other DNA
ttatcttcctccaacatccaaa

SEQ ID NO: 45249 - DNA, 22 bp, synthetic construct
  misc_feature 1..22: note = chemically synthesized
  source 1..22: mol_type = other DNA
atcttcctccaacatccaaaag

SEQ ID NO: 45250 - DNA, 22 bp, synthetic construct
  misc_feature 1..22: note = chemically synthesized
  source 1..22: mol_type = other DNA
tcttcctccaacatccaaaagc

SEQ ID NO: 45251 - DNA, 22 bp, synthetic construct
  misc_feature 1..22: note = chemically synthesized
  source 1..22: mol_type = other DNA
cctccaacatccaaaagcagtg

SEQ ID NO: 45252 - DNA, 22 bp, synthetic construct
  misc_feature 1..22: note = chemically synthesized
  source 1..22: mol_type = other DNA
ctccaacatccaaaagcagtgt

SEQ ID NO: 45253 - DNA, 22 bp, synthetic construct
  misc_feature 1..22: note = chemically synthesized
  source 1..22: mol_type = other DNA
caacatccaaaagcagtgttca

SEQ ID NO: 45254 - DNA, 22 bp, synthetic construct
  misc_feature 1..22: note = chemically synthesized
  source 1..22: mol_type = other DNA
acacccaatcccatgctttcta

SEQ ID NO: 45255 - DNA, 22 bp, synthetic construct
  misc_feature 1..22: note = chemically synthesized
  source 1..22: mol_type = other DNA
tctaatattaaaatatgaattt

SEQ ID NO: 45256 - DNA, 22 bp, synthetic construct
  misc_feature 1..22: note = chemically synthesized
  source 1..22: mol_type = other DNA
ctaatattaaaatatgaattta

SEQ ID NO: 45257 - DNA, 22 bp, synthetic construct
  misc_feature 1..22: note = chemically synthesized
  source 1..22: mol_type = other DNA
taatattaaaatatgaatttaa

SEQ ID NO: 45258 - DNA, 22 bp, synthetic construct
  misc_feature 1..22: note = chemically synthesized
  source 1..22: mol_type = other DNA
atattaaaatatgaatttaaga

SEQ ID NO: 45259 - DNA, 22 bp, synthetic construct
  misc_feature 1..22: note = chemically synthesized
  source 1..22: mol_type = other DNA
aaatatgaatttaagaaatacc

SEQ ID NO: 45260 - DNA, 22 bp, synthetic construct
  misc_feature 1..22: note = chemically synthesized
  source 1..22: mol_type = other DNA
aagaaataccagtgaaaagaga

SEQ ID NO: 45261 - DNA, 22 bp, synthetic construct
  misc_feature 1..22: note = chemically synthesized
  source 1..22: mol_type = other DNA
agaaataccagtgaaaagagat

SEQ ID NO: 45262 - DNA, 22 bp, synthetic construct
  misc_feature 1..22: note = chemically synthesized
  source 1..22: mol_type = other DNA
tttaaaccagaaactctttgtg

SEQ ID NO: 45263 - DNA, 22 bp, synthetic construct
  misc_feature 1..22: note = chemically synthesized
  source 1..22: mol_type = other DNA
ttaaaccagaaactctttgtgt

SEQ ID NO: 45264 - DNA, 22 bp, synthetic construct
  misc_feature 1..22: note = chemically synthesized
  source 1..22: mol_type = other DNA
taaaccagaaactctttgtgtt

SEQ ID NO: 45265 - DNA, 22 bp, synthetic construct
  misc_feature 1..22: note = chemically synthesized
  source 1..22: mol_type = other DNA
aaaccagaaactctttgtgttg

SEQ ID NO: 45266 - DNA, 22 bp, synthetic construct
  misc_feature 1..22: note = chemically synthesized
  source 1..22: mol_type = other DNA
aaccagaaactctttgtgttgt

SEQ ID NO: 45267 - DNA, 22 bp, synthetic construct
  misc_feature 1..22: note = chemically synthesized
  source 1..22: mol_type = other DNA
tttgtgttgtaatgttcttgat

SEQ ID NO: 45268 - DNA, 22 bp, synthetic construct
  misc_feature 1..22: note = chemically synthesized
  source 1..22: mol_type = other DNA
tgtgttgtaatgttcttgatat

SEQ ID NO: 45269 - DNA, 22 bp, synthetic construct
  misc_feature 1..22: note = chemically synthesized
  source 1..22: mol_type = other DNA
gtgttgtaatgttcttgatatg

SEQ ID NO: 45270 - DNA, 22 bp, synthetic construct
  misc_feature 1..22: note = chemically synthesized
  source 1..22: mol_type = other DNA
tgttgtaatgttcttgatatgt

SEQ ID NO: 45271 - DNA, 22 bp, synthetic construct
  misc_feature 1..22: note = chemically synthesized
  source 1..22: mol_type = other DNA
taatgttcttgatatgttaata

SEQ ID NO: 45272 - DNA, 22 bp, synthetic construct
  misc_feature 1..22: note = chemically synthesized
  source 1..22: mol_type = other DNA
ttgatatgttaataaaactgtt

SEQ ID NO: 45273 - DNA, 22 bp, synthetic construct
  misc_feature 1..22: note = chemically synthesized
  source 1..22: mol_type = other DNA
gatatgttaataaaactgtttt

SEQ ID NO: 45274 - DNA, 22 bp, synthetic construct
  misc_feature 1..22: note = chemically synthesized
  source 1..22: mol_type = other DNA
atatgttaataaaactgttttc

SEQ ID NO: 45275 - DNA, 22 bp, synthetic construct
  misc_feature 1..22: note = chemically synthesized
  source 1..22: mol_type = other DNA
ataaaactgttttcaatcatca

SEQ ID NO: 45276 - DNA, 22 bp, synthetic construct
  misc_feature 1..22: note = chemically synthesized
  source 1..22: mol_type = other DNA
ttttcaatcatcatcagagaaa

SEQ ID NO: 45277 - DNA, 22 bp, synthetic construct
  misc_feature 1..22: note = chemically synthesized
  source 1..22: mol_type = other DNA
tcaatcatcatcagagaaaaac

SEQ ID NO: 45278 - DNA, 22 bp, synthetic construct
  misc_feature 1..22: note = chemically synthesized
  source 1..22: mol_type = other DNA
caatcatcatcagagaaaaaca

SEQ ID NO: 45279 - DNA, 22 bp, synthetic construct
  misc_feature 1..22: note = chemically synthesized
  source 1..22: mol_type = other DNA
aatcatcatcagagaaaaacaa

SEQ ID NO: 45280 - DNA, 22 bp, synthetic construct
  misc_feature 1..22: note = chemically synthesized
  source 1..22: mol_type = other DNA
acctctgatcatggtagcacag

SEQ ID NO: 45281 - DNA, 22 bp, synthetic construct
  misc_feature 1..22: note = chemically synthesized
  source 1..22: mol_type = other DNA
cctctgatcatggtagcacagt

SEQ ID NO: 45282 - DNA, 22 bp, synthetic construct
  misc_feature 1..22: note = chemically synthesized
  source 1..22: mol_type = other DNA
tgatcatggtagcacagtagag

SEQ ID NO: 45283 - DNA, 22 bp, synthetic construct
  misc_feature 1..22: note = chemically synthesized
  source 1..22: mol_type = other DNA
atcatggtagcacagtagagca

SEQ ID NO: 45284 - DNA, 22 bp, synthetic construct
  misc_feature 1..22: note = chemically synthesized
  source 1..22: mol_type = other DNA
aattggtgatcaaaagaaataa

SEQ ID NO: 45285 - DNA, 22 bp, synthetic construct
  misc_feature 1..22: note = chemically synthesized
  source 1..22: mol_type = other DNA
gtgatcaaaagaaataaattct

SEQ ID NO: 45286 - DNA, 22 bp, synthetic construct
  misc_feature 1..22: note = chemically synthesized
  source 1..22: mol_type = other DNA
tagtcctgtcacccagaaacta

SEQ ID NO: 45287 - DNA, 22 bp, synthetic construct
  misc_feature 1..22: note = chemically synthesized
  source 1..22: mol_type = other DNA
gtcctgtcacccagaaactatg

SEQ ID NO: 45288 - DNA, 22 bp, synthetic construct
  misc_feature 1..22: note = chemically synthesized
  source 1..22: mol_type = other DNA
tcacccagaaactatgtgacca

SEQ ID NO: 45289 - DNA, 22 bp, synthetic construct
  misc_feature 1..22: note = chemically synthesized
  source 1..22: mol_type = other DNA
tgtgaccaggggaggtacttaa

SEQ ID NO: 45290 - DNA, 22 bp, synthetic construct
  misc_feature 1..22: note = chemically synthesized
  source 1..22: mol_type = other DNA
aatctctaagagaatcaagtct

SEQ ID NO: 45291 - DNA, 22 bp, synthetic construct
  misc_feature 1..22: note = chemically synthesized
  source 1..22: mol_type = other DNA
atctctaagagaatcaagtctc

SEQ ID NO: 45292 - DNA, 22 bp, synthetic construct
  misc_feature 1..22: note = chemically synthesized
  source 1..22: mol_type = other DNA
taagagaatcaagtctcgagtg

SEQ ID NO: 45293 - DNA, 22 bp, synthetic construct
  misc_feature 1..22: note = chemically synthesized
  source 1..22: mol_type = other DNA
agagaatcaagtctcgagtggg

SEQ ID NO: 45294 - DNA, 22 bp, synthetic construct
  misc_feature 1..22: note = chemically synthesized
  source 1..22: mol_type = other DNA
gagtgggtaaaatgagctgggg

SEQ ID NO: 45295 - DNA, 22 bp, synthetic construct
  misc_feature 1..22: note = chemically synthesized
  source 1..22: mol_type = other DNA
gggaaggagtgaaccagtgaga

SEQ ID NO: 45296 - DNA, 22 bp, synthetic construct
  misc_feature 1..22: note = chemically synthesized
  source 1..22: mol_type = other DNA
gtctgtctggggctcccagaag

SEQ ID NO: 45297 - DNA, 22 bp, synthetic construct
  misc_feature 1..22: note = chemically synthesized
  source 1..22: mol_type = other DNA
tctggggctcccagaagacaca

SEQ ID NO: 45298 - DNA, 22 bp, synthetic construct
  misc_feature 1..22: note = chemically synthesized
  source 1..22: mol_type = other DNA
gggctcccagaagacacagcca

SEQ ID NO: 45299 - DNA, 22 bp, synthetic construct
  misc_feature 1..22: note = chemically synthesized
  source 1..22: mol_type = other DNA
ccagaagacacagccagacttc

SEQ ID NO: 45300 - DNA, 22 bp, synthetic construct
  misc_feature 1..22: note = chemically synthesized
  source 1..22: mol_type = other DNA
ctttcttgctcttgtccaaaca

SEQ ID NO: 45301 - DNA, 22 bp, synthetic construct
  misc_feature 1..22: note = chemically synthesized
  source 1..22: mol_type = other DNA
tttcttgctcttgtccaaacac

SEQ ID NO: 45302 - DNA, 22 bp, synthetic construct
  misc_feature 1..22: note = chemically synthesized
  source 1..22: mol_type = other DNA
tcttgctcttgtccaaacacct

SEQ ID NO: 45303 - DNA, 22 bp, synthetic construct
  misc_feature 1..22: note = chemically synthesized
  source 1..22: mol_type = other DNA
cttgctcttgtccaaacacctc

SEQ ID NO: 45304 - DNA, 22 bp, synthetic construct
  misc_feature 1..22: note = chemically synthesized
  source 1..22: mol_type = other DNA
ttgctcttgtccaaacacctcc

SEQ ID NO: 45305 - DNA, 22 bp, synthetic construct
  misc_feature 1..22: note = chemically synthesized
  source 1..22: mol_type = other DNA
gctcttgtccaaacacctcctt

SEQ ID NO: 45306 - DNA, 22 bp, synthetic construct
  misc_feature 1..22: note = chemically synthesized
  source 1..22: mol_type = other DNA
ctcttgtccaaacacctccttg

SEQ ID NO: 45307 - DNA, 22 bp, synthetic construct
  misc_feature 1..22: note = chemically synthesized
  source 1..22: mol_type = other DNA
ttgtccaaacacctccttgtct

SEQ ID NO: 45308 - DNA, 22 bp, synthetic construct
  misc_feature 1..22: note = chemically synthesized
  source 1..22: mol_type = other DNA
gtccaaacacctccttgtcttt

SEQ ID NO: 45309 - DNA, 22 bp, synthetic construct
  misc_feature 1..22: note = chemically synthesized
  source 1..22: mol_type = other DNA
tccaaacacctccttgtctttt

SEQ ID NO: 45310 - DNA, 22 bp, synthetic construct
  misc_feature 1..22: note = chemically synthesized
  source 1..22: mol_type = other DNA
cttgtcttttaaggcctgggct

SEQ ID NO: 45311 - DNA, 22 bp, synthetic construct
  misc_feature 1..22: note = chemically synthesized
  source 1..22: mol_type = other DNA
gtcttttaaggcctgggctgtc

SEQ ID NO: 45312 - DNA, 22 bp, synthetic construct
  misc_feature 1..22: note = chemically synthesized
  source 1..22: mol_type = other DNA
tcttttaaggcctgggctgtct

SEQ ID NO: 45313 - DNA, 22 bp, synthetic construct
  misc_feature 1..22: note = chemically synthesized
  source 1..22: mol_type = other DNA
ttaaggcctgggctgtctaggg

SEQ ID NO: 45314 - DNA, 22 bp, synthetic construct
  misc_feature 1..22: note = chemically synthesized
  source 1..22: mol_type = other DNA
taaggcctgggctgtctagggg

SEQ ID NO: 45315 - DNA, 22 bp, synthetic construct
  misc_feature 1..22: note = chemically synthesized
  source 1..22: mol_type = other DNA
aaggcctgggctgtctaggggg

SEQ ID NO: 45316 - DNA, 22 bp, synthetic construct
  misc_feature 1..22: note = chemically synthesized
  source 1..22: mol_type = other DNA
aggcctgggctgtctaggggga

SEQ ID NO: 45317 - DNA, 22 bp, synthetic construct
  misc_feature 1..22: note = chemically synthesized
  source 1..22: mol_type = other DNA
ggctgtctagggggatggctac

SEQ ID NO: 45318 - DNA, 22 bp, synthetic construct
  misc_feature 1..22: note = chemically synthesized
  source 1..22: mol_type = other DNA
tctagggggatggctactggct

SEQ ID NO: 45319 - DNA, 22 bp, synthetic construct
  misc_feature 1..22: note = chemically synthesized
  source 1..22: mol_type = other DNA
gggggatggctactggcttgga

SEQ ID NO: 45320 - DNA, 22 bp, synthetic construct
  misc_feature 1..22: note = chemically synthesized
  source 1..22: mol_type = other DNA
ctggcttggagcaaaaccaacg

SEQ ID NO: 45321 - DNA, 22 bp, synthetic construct
  misc_feature 1..22: note = chemically synthesized
  source 1..22: mol_type = other DNA
gcttggagcaaaaccaacgtgt

SEQ ID NO: 45322 - DNA, 22 bp, synthetic construct
  misc_feature 1..22: note = chemically synthesized
  source 1..22: mol_type = other DNA
ggagcaaaaccaacgtgtctgt

SEQ ID NO: 45323 - DNA, 22 bp, synthetic construct
  misc_feature 1..22: note = chemically synthesized
  source 1..22: mol_type = other DNA
gagcaaaaccaacgtgtctgtc

SEQ ID NO: 45324 - DNA, 22 bp, synthetic construct
  misc_feature 1..22: note = chemically synthesized
  source 1..22: mol_type = other DNA
tcatcttaatacacacggaatg

SEQ ID NO: 45325 - DNA, 22 bp, synthetic construct
  misc_feature 1..22: note = chemically synthesized
  source 1..22: mol_type = other DNA
aatacacacggaatgtgttgaa

SEQ ID NO: 45326 - DNA, 22 bp, synthetic construct
  misc_feature 1..22: note = chemically synthesized
  source 1..22: mol_type = other DNA
atacacacggaatgtgttgaaa

SEQ ID NO: 45327 - DNA, 22 bp, synthetic construct
  misc_feature 1..22: note = chemically synthesized
  source 1..22: mol_type = other DNA
aaatgaaggtgtctgtgtggaa

SEQ ID NO: 45328 - DNA, 22 bp, synthetic construct
  misc_feature 1..22: note = chemically synthesized
  source 1..22: mol_type = other DNA
tgtggaagggacagacccagat

SEQ ID NO: 45329 - DNA, 22 bp, synthetic construct
  misc_feature 1..22: note = chemically synthesized
  source 1..22: mol_type = other DNA
tgcatttgtcctggcaatggga

SEQ ID NO: 45330 - DNA, 22 bp, synthetic construct
  misc_feature 1..22: note = chemically synthesized
  source 1..22: mol_type = other DNA
catttgtcctggcaatgggagc

SEQ ID NO: 45331 - DNA, 22 bp, synthetic construct
  misc_feature 1..22: note = chemically synthesized
  source 1..22: mol_type = other DNA
gtcctggcaatgggagcaggaa

SEQ ID NO: 45332 - DNA, 22 bp, synthetic construct
  misc_feature 1..22: note = chemically synthesized
  source 1..22: mol_type = other DNA
tcctggcaatgggagcaggaat

SEQ ID NO: 45333 - DNA, 22 bp, synthetic construct
  misc_feature 1..22: note = chemically synthesized
  source 1..22: mol_type = other DNA
gcaatgggagcaggaatgagtc

SEQ ID NO: 45334 - DNA, 22 bp, synthetic construct
  misc_feature 1..22: note = chemically synthesized
  source 1..22: mol_type = other DNA
ctctaaacctggtcactcctag

SEQ ID NO: 45335 - DNA, 22 bp, synthetic construct
  misc_feature 1..22: note = chemically synthesized
  source 1..22: mol_type = other DNA
tctaaacctggtcactcctagt

SEQ ID NO: 45336 - DNA, 22 bp, synthetic construct
  misc_feature 1..22: note = chemically synthesized
  source 1..22: mol_type = other DNA
taaacctggtcactcctagtcc

SEQ ID NO: 45337 - DNA, 22 bp, synthetic construct
  misc_feature 1..22: note = chemically synthesized
  source 1..22: mol_type = other DNA
aacctggtcactcctagtccca

SEQ ID NO: 45338 - DNA, 22 bp, synthetic construct
  misc_feature 1..22: note = chemically synthesized
  source 1..22: mol_type = other DNA
gtcactcctagtcccaagatgg

SEQ ID NO: 45339 - DNA, 22 bp, synthetic construct
  misc_feature 1..22: note = chemically synthesized
  source 1..22: mol_type = other DNA
ctagtcccaagatggagaagcc

SEQ ID NO: 45340 - DNA, 22 bp, synthetic construct
  misc_feature 1..22: note = chemically synthesized
  source 1..22: mol_type = other DNA
gtcccaagatggagaagccaca

SEQ ID NO: 45341 - DNA, 22 bp, synthetic construct
  misc_feature 1..22: note = chemically synthesized
  source 1..22: mol_type = other DNA
gatcatgttagccccattctgc

SEQ ID NO: 45342 - DNA, 22 bp, synthetic construct
  misc_feature 1..22: note = chemically synthesized
  source 1..22: mol_type = other DNA
atcatgttagccccattctgca

SEQ ID NO: 45343 - DNA, 22 bp, synthetic construct
  misc_feature 1..22: note = chemically synthesized
  source 1..22: mol_type = other DNA
gccccattctgcagcctcagga

SEQ ID NO: 45344 - DNA, 22 bp, synthetic construct
  misc_feature 1..22: note = chemically synthesized
  source 1..22: mol_type = other DNA
tgcagcctcaggaggctctgac

SEQ ID NO: 45345 - DNA, 22 bp, synthetic construct
  misc_feature 1..22: note = chemically synthesized
  source 1..22: mol_type = other DNA
cagcctcaggaggctctgacca

SEQ ID NO: 45346 - DNA, 22 bp, synthetic construct
  misc_feature 1..22: note = chemically synthesized
  source 1..22: mol_type = other DNA
aggaggctctgaccaggtggaa

SEQ ID NO: 45347 - DNA, 22 bp, synthetic construct
  misc_feature 1..22: note = chemically synthesized
  source 1..22: mol_type = other DNA
tgaccaggtggaaagccagaat

SEQ ID NO: 45348 - DNA, 22 bp, synthetic construct
  misc_feature 1..22: note = chemically synthesized
  source 1..22: mol_type = other DNA
accaggtggaaagccagaatgg

SEQ ID NO: 45349 - DNA, 22 bp, synthetic construct
  misc_feature 1..22: note = chemically synthesized
  source 1..22: mol_type = other DNA
caaggagcctcacttctccagg

SEQ ID NO: 45350 - DNA, 22 bp, synthetic construct
  misc_feature 1..22: note = chemically synthesized
  source 1..22: mol_type = other DNA
acttctccaggcattgtgactt

SEQ ID NO: 45351 - DNA, 22 bp, synthetic construct
  misc_feature 1..22: note = chemically synthesized
  source 1..22: mol_type = other DNA
ctccaggcattgtgacttttta

SEQ ID NO: 45352 - DNA, 22 bp, synthetic construct
  misc_feature 1..22: note = chemically synthesized
  source 1..22: mol_type = other DNA
tccaggcattgtgactttttat

SEQ ID NO: 45353 - DNA, 22 bp, synthetic construct
  misc_feature 1..22: note = chemically synthesized
  source 1..22: mol_type = other DNA
caggcattgtgactttttatta

SEQ ID NO: 45354 - DNA, 22 bp, synthetic construct
  misc_feature 1..22: note = chemically synthesized
  source 1..22: mol_type = other DNA
tgactttttattaaaaaccctt

SEQ ID NO: 45355 - DNA, 22 bp, synthetic construct
  misc_feature 1..22: note = chemically synthesized
  source 1..22: mol_type = other DNA
tttattaaaaacccttacccat

SEQ ID NO: 45356 - DNA, 22 bp, synthetic construct
  misc_feature 1..22: note = chemically synthesized
  source 1..22: mol_type = other DNA
ttattaaaaacccttacccatg

SEQ ID NO: 45357 - DNA, 22 bp, synthetic construct
  misc_feature 1..22: note = chemically synthesized
  source 1..22: mol_type = other DNA
tattaaaaacccttacccatgc

SEQ ID NO: 45358 - DNA, 22 bp, synthetic construct
  misc_feature 1..22: note = chemically synthesized
  source 1..22: mol_type = other DNA
attaaaaacccttacccatgcc

SEQ ID NO: 45359 - DNA, 22 bp, synthetic construct
  misc_feature 1..22: note = chemically synthesized
  source 1..22: mol_type = other DNA
ttaaaaacccttacccatgcca

SEQ ID NO: 45360 - DNA, 22 bp, synthetic construct
  misc_feature 1..22: note = chemically synthesized
  source 1..22: mol_type = other DNA
aaaacccttacccatgccaccc

SEQ ID NO: 45361 - DNA, 22 bp, synthetic construct
  misc_feature 1..22: note = chemically synthesized
  source 1..22: mol_type = other DNA
acccatgccacccaccgcagcc

SEQ ID NO: 45362 - DNA, 22 bp, synthetic construct
  misc_feature 1..22: note = chemically synthesized
  source 1..22: mol_type = other DNA
cccatgccacccaccgcagcct

SEQ ID NO: 45363 - DNA, 22 bp, synthetic construct
  misc_feature 1..22: note = chemically synthesized
  source 1..22: mol_type = other DNA
gacaggcattccaggagccaga

SEQ ID NO: 45364 - DNA, 22 bp, synthetic construct
  misc_feature 1..22: note = chemically synthesized
  source 1..22: mol_type = other DNA
caggagccagacatgtccctgg

SEQ ID NO: 45365 - DNA, 22 bp, synthetic construct
  misc_feature 1..22: note = chemically synthesized
  source 1..22: mol_type = other DNA
gaagacagtaggctattgcttc

SEQ ID NO: 45366 - DNA, 22 bp, synthetic construct
  misc_feature 1..22: note = chemically synthesized
  source 1..22: mol_type = other DNA
ttgcttcctctgagcactgcaa

SEQ ID NO: 45367 - DNA, 22 bp, synthetic construct
  misc_feature 1..22: note = chemically synthesized
  source 1..22: mol_type = other DNA
cttcctctgagcactgcaacaa

SEQ ID NO: 45368 - DNA, 22 bp, synthetic construct
  misc_feature 1..22: note = chemically synthesized
  source 1..22: mol_type = other DNA
cctctgagcactgcaacaattt

SEQ ID NO: 45369 - DNA, 22 bp, synthetic construct
  misc_feature 1..22: note = chemically synthesized
  source 1..22: mol_type = other DNA
ctctgagcactgcaacaatttt

SEQ ID NO: 45370 - DNA, 22 bp, synthetic construct
  misc_feature 1..22: note = chemically synthesized
  source 1..22: mol_type = other DNA
tgagcactgcaacaattttctc

SEQ ID NO: 45371 - DNA, 22 bp, synthetic construct
  misc_feature 1..22: note = chemically synthesized
  source 1..22: mol_type = other DNA
agcactgcaacaattttctctg

SEQ ID NO: 45372 - DNA, 22 bp, synthetic construct
  misc_feature 1..22: note = chemically synthesized
  source 1..22: mol_type = other DNA
caacaattttctctggaccctc

SEQ ID NO: 45373 - DNA, 22 bp, synthetic construct
  misc_feature 1..22: note = chemically synthesized
  source 1..22: mol_type = other DNA
tctctggaccctctcctccacc

SEQ ID NO: 45374 - DNA, 22 bp, synthetic construct
  misc_feature 1..22: note = chemically synthesized
  source 1..22: mol_type = other DNA
ctctggaccctctcctccacct

SEQ ID NO: 45375 - DNA, 22 bp, synthetic construct
  misc_feature 1..22: note = chemically synthesized
  source 1..22: mol_type = other DNA
tctggaccctctcctccaccta

SEQ ID NO: 45376 - DNA, 22 bp, synthetic construct
  misc_feature 1..22: note = chemically synthesized
  source 1..22: mol_type = other DNA
tggaccctctcctccacctatt

SEQ ID NO: 45377 - DNA, 22 bp, synthetic construct
  misc_feature 1..22: note = chemically synthesized
  source 1..22: mol_type = other DNA
gaccctctcctccacctattca

SEQ ID NO: 45378 - DNA, 22 bp, synthetic construct
  misc_feature 1..22: note = chemically synthesized
  source 1..22: mol_type = other DNA
tcctccacctattcacagatgg

SEQ ID NO: 45379 - DNA, 22 bp, synthetic construct
  misc_feature 1..22: note = chemically synthesized
  source 1..22: mol_type = other DNA
ctccacctattcacagatgggg

SEQ ID NO: 45380 - DNA, 22 bp, synthetic construct
  misc_feature 1..22: note = chemically synthesized
  source 1..22: mol_type = other DNA
cacctattcacagatggggcat

SEQ ID NO: 45381 - DNA, 22 bp, synthetic construct
  misc_feature 1..22: note = chemically synthesized
  source 1..22: mol_type = other DNA
ttcacagatggggcataaccct

SEQ ID NO: 45382 - DNA, 22 bp, synthetic construct
  misc_feature 1..22: note = chemically synthesized
  source 1..22: mol_type = other DNA
acagatggggcataaccctccc

SEQ ID NO: 45383 - DNA, 22 bp, synthetic construct
  misc_feature 1..22: note = chemically synthesized
  source 1..22: mol_type = other DNA
cctcctatccattagattgccc

SEQ ID NO: 45384 - DNA, 22 bp, synthetic construct
  misc_feature 1..22: note = chemically synthesized
  source 1..22: mol_type = other DNA
ctatccattagattgcccaaat

SEQ ID NO: 45385 - DNA, 22 bp, synthetic construct
  misc_feature 1..22: note = chemically synthesized
  source 1..22: mol_type = other DNA
tccattagattgcccaaatctg

SEQ ID NO: 45386 - DNA, 22 bp, synthetic construct
  misc_feature 1..22: note = chemically synthesized
  source 1..22: mol_type = other DNA
gattgcccaaatctgggaaaat

SEQ ID NO: 45387 - DNA, 22 bp, synthetic construct
  misc_feature 1..22: note = chemically synthesized
  source 1..22: mol_type = other DNA
cccaaatctgggaaaataatgt

SEQ ID NO: 45388 - DNA, 22 bp, synthetic construct
  misc_feature 1..22: note = chemically synthesized
  source 1..22: mol_type = other DNA
ggaaaataatgtgtggcgctca

SEQ ID NO: 45389 - DNA, 22 bp, synthetic construct
  misc_feature 1..22: note = chemically synthesized
  source 1..22: mol_type = other DNA
aggtctgagtgcagaccaagct

SEQ ID NO: 45390 - DNA, 22 bp, synthetic construct
  misc_feature 1..22: note = chemically synthesized
  source 1..22: mol_type = other DNA
agtgcagaccaagctcccaata

SEQ ID NO: 45391 - DNA, 22 bp, synthetic construct
  misc_feature 1..22: note = chemically synthesized
  source 1..22: mol_type = other DNA
ccaataccagtggctctttcag

SEQ ID NO: 45392 - DNA, 22 bp, synthetic construct
  misc_feature 1..22: note = chemically synthesized
  source 1..22: mol_type = other DNA
tttcaggcttacaaagccttgg

SEQ ID NO: 45393 - DNA, 22 bp, synthetic construct
  misc_feature 1..22: note = chemically synthesized
  source 1..22: mol_type = other DNA
tcaggcttacaaagccttggtg

SEQ ID NO: 45394 - DNA, 22 bp, synthetic construct
  misc_feature 1..22: note = chemically synthesized
  source 1..22: mol_type = other DNA
caggcttacaaagccttggtgg

SEQ ID NO: 45395 - DNA, 22 bp, synthetic construct
  misc_feature 1..22: note = chemically synthesized
  source 1..22: mol_type = other DNA
aggcttacaaagccttggtggt

SEQ ID NO: 45396 - DNA, 22 bp, synthetic construct
  misc_feature 1..22: note = chemically synthesized
  source 1..22: mol_type = other DNA
acaaagccttggtggtttccac

SEQ ID NO: 45397 - DNA, 22 bp, synthetic construct
  misc_feature 1..22: note = chemically synthesized
  source 1..22: mol_type = other DNA
caaagccttggtggtttccaca

SEQ ID NO: 45398 - DNA, 22 bp, synthetic construct
  misc_feature 1..22: note = chemically synthesized
  source 1..22: mol_type = other DNA
ggtggtttccacacccagcagt

SEQ ID NO: 45399 - DNA, 22 bp, synthetic construct
  misc_feature 1..22: note = chemically synthesized
  source 1..22: mol_type = other DNA
gtggtttccacacccagcagtt

SEQ ID NO: 45400 - DNA, 22 bp, synthetic construct
  misc_feature 1..22: note = chemically synthesized
  source 1..22: mol_type = other DNA
ccacacccagcagttcctaccc

SEQ ID NO: 45401 - DNA, 22 bp, synthetic construct
  misc_feature 1..22: note = chemically synthesized
  source 1..22: mol_type = other DNA
cacacccagcagttcctaccca

SEQ ID NO: 45402 - DNA, 22 bp, synthetic construct
  misc_feature 1..22: note = chemically synthesized
  source 1..22: mol_type = other DNA
ctacccaggactgagaagccct

SEQ ID NO: 45403 - DNA, 22 bp, synthetic construct
  misc_feature 1..22: note = chemically synthesized
  source 1..22: mol_type = other DNA
cccaggactgagaagccctcag

SEQ ID NO: 45404 - DNA, 22 bp, synthetic construct
  misc_feature 1..22: note = chemically synthesized
  source 1..22: mol_type = other DNA
agaagccctcagcaaacaccca

SEQ ID NO: 45405 - DNA, 22 bp, synthetic construct
  misc_feature 1..22: note = chemically synthesized
  source 1..22: mol_type = other DNA
agcaaacacccagatggccctt

SEQ ID NO: 45406 - DNA, 22 bp, synthetic construct
  misc_feature 1..22: note = chemically synthesized
  source 1..22: mol_type = other DNA
gttcaccctcctggaaacctat

SEQ ID NO: 45407 - DNA, 22 bp, synthetic construct
  misc_feature 1..22: note = chemically synthesized
  source 1..22: mol_type = other DNA
ttcaccctcctggaaacctata

SEQ ID NO: 45408 - DNA, 22 bp, synthetic construct
  misc_feature 1..22: note = chemically synthesized
  source 1..22: mol_type = other DNA
accctcctggaaacctatagct

SEQ ID NO: 45409 - DNA, 22 bp, synthetic construct
  misc_feature 1..22: note = chemically synthesized
  source 1..22: mol_type = other DNA
ctggaaacctatagctgccagg

SEQ ID NO: 45410 - DNA, 22 bp, synthetic construct
  misc_feature 1..22: note = chemically synthesized
  source 1..22: mol_type = other DNA
gaaacctatagctgccagggaa

SEQ ID NO: 45411 - DNA, 22 bp, synthetic construct
  misc_feature 1..22: note = chemically synthesized
  source 1..22: mol_type = other DNA
tagctgccagggaaatgtgaca

SEQ ID NO: 45412 - DNA, 22 bp, synthetic construct
  misc_feature 1..22: note = chemically synthesized
  source 1..22: mol_type = other DNA
ccagggaaatgtgacattttgt

SEQ ID NO: 45413 - DNA, 22 bp, synthetic construct
  misc_feature 1..22: note = chemically synthesized
  source 1..22: mol_type = other DNA
tgtgaggactaatttaacccgc

SEQ ID NO: 45414 - DNA, 22 bp, synthetic construct
  misc_feature 1..22: note = chemically synthesized
  source 1..22: mol_type = other DNA
gtgaggactaatttaacccgcc

SEQ ID NO: 45415 - DNA, 22 bp, synthetic construct
  misc_feature 1..22: note = chemically synthesized
  source 1..22: mol_type = other DNA
tgaggactaatttaacccgcct

SEQ ID NO: 45416 - DNA, 22 bp, synthetic construct
  misc_feature 1..22: note = chemically synthesized
  source 1..22: mol_type = other DNA
atttaacccgcctagaagattt

SEQ ID NO: 45417 - DNA, 22 bp, synthetic construct
  misc_feature 1..22: note = chemically synthesized
  source 1..22: mol_type = other DNA
aacccgcctagaagatttagga

SEQ ID NO: 45418 - DNA, 22 bp, synthetic construct
  misc_feature 1..22: note = chemically synthesized
  source 1..22: mol_type = other DNA
acccgcctagaagatttaggag

SEQ ID NO: 45419 - DNA, 22 bp, synthetic construct
  misc_feature 1..22: note = chemically synthesized
  source 1..22: mol_type = other DNA
gaagatttaggagccaagatgc

SEQ ID NO: 45420 - DNA, 22 bp, synthetic construct
  misc_feature 1..22: note = chemically synthesized
  source 1..22: mol_type = other DNA
aggagccaagatgcaaccctaa

SEQ ID NO: 45421 - DNA, 22 bp, synthetic construct
  misc_feature 1..22: note = chemically synthesized
  source 1..22: mol_type = other DNA
ggagccaagatgcaaccctaaa

SEQ ID NO: 45422 - DNA, 22 bp, synthetic construct
  misc_feature 1..22: note = chemically synthesized
  source 1..22: mol_type = other DNA
aagcccactgcaagggacaata

SEQ ID NO: 45423 - DNA, 22 bp, synthetic construct
  misc_feature 1..22: note = chemically synthesized
  source 1..22: mol_type = other DNA
caagggacaatattctggatct

SEQ ID NO: 45424 - DNA, 22 bp, synthetic construct
  misc_feature 1..22: note = chemically synthesized
  source 1..22: mol_type = other DNA
tggatcttttgtcagagcttta

SEQ ID NO: 45425 - DNA, 22 bp, synthetic construct
  misc_feature 1..22: note = chemically synthesized
  source 1..22: mol_type = other DNA
gatcttttgtcagagctttatt

SEQ ID NO: 45426 - DNA, 22 bp, synthetic construct
  misc_feature 1..22: note = chemically synthesized
  source 1..22: mol_type = other DNA
ttgtcagagctttattatttta

SEQ ID NO: 45427 - DNA, 22 bp, synthetic construct
  misc_feature 1..22: note = chemically synthesized
  source 1..22: mol_type = other DNA
tgtcagagctttattattttaa

SEQ ID NO: 45428 - DNA, 22 bp, synthetic construct
  misc_feature 1..22: note = chemically synthesized
  source 1..22: mol_type = other DNA
gtcagagctttattattttaat

SEQ ID NO: 45429 - DNA, 22 bp, synthetic construct
  misc_feature 1..22: note = chemically synthesized
  source 1..22: mol_type = other DNA
tcagagctttattattttaata

SEQ ID NO: 45430 - DNA, 22 bp, synthetic construct
  misc_feature 1..22: note = chemically synthesized
  source 1..22: mol_type = other DNA
tattattttaataaaattttta

SEQ ID NO: 45431 - DNA, 22 bp, synthetic construct
  misc_feature 1..22: note = chemically synthesized
  source 1..22: mol_type = other DNA
attattttaataaaatttttat

SEQ ID NO: 45432 - DNA, 22 bp, synthetic construct
  misc_feature 1..22: note = chemically synthesized
  source 1..22: mol_type = other DNA
ttattttaataaaatttttata

SEQ ID NO: 45433 - DNA, 22 bp, synthetic construct
  misc_feature 1..22: note = chemically synthesized
  source 1..22: mol_type = other DNA
ttttaataaaatttttatatta

SEQ ID NO: 45434 - DNA, 22 bp, synthetic construct
  misc_feature 1..22: note = chemically synthesized
  source 1..22: mol_type = other DNA
taataaaatttttatattaaac

SEQ ID NO: 45435 - DNA, 22 bp, synthetic construct
  misc_feature 1..22: note = chemically synthesized
  source 1..22: mol_type = other DNA
aataaaatttttatattaaaca

SEQ ID NO: 45436 - DNA, 22 bp, synthetic construct
  misc_feature 1..22: note = chemically synthesized
  source 1..22: mol_type = other DNA
ataaaatttttatattaaacag

SEQ ID NO: 45437 - DNA, 22 bp, synthetic construct
  misc_feature 1..22: note = chemically synthesized
  source 1..22: mol_type = other DNA
ttatattaaacagcaattcaca

SEQ ID NO: 45438 - DNA, 22 bp, synthetic construct
  misc_feature 1..22: note = chemically synthesized
  source 1..22: mol_type = other DNA
tatattaaacagcaattcacat

SEQ ID NO: 45439 - DNA, 22 bp, synthetic construct
  misc_feature 1..22: note = chemically synthesized
  source 1..22: mol_type = other DNA
atattaaacagcaattcacatt

SEQ ID NO: 45440 - DNA, 22 bp, synthetic construct
  misc_feature 1..22: note = chemically synthesized
  source 1..22: mol_type = other DNA
tattaaacagcaattcacattc

SEQ ID NO: 45441 - DNA, 22 bp, synthetic construct
  misc_feature 1..22: note = chemically synthesized
  source 1..22: mol_type = other DNA
aacagcaattcacattcatcta

SEQ ID NO: 45442 - DNA, 22 bp, synthetic construct
  misc_feature 1..22: note = chemically synthesized
  source 1..22: mol_type = other DNA
acattcatctaaacctcctgaa

SEQ ID NO: 45443 - DNA, 22 bp, synthetic construct
  misc_feature 1..22: note = chemically synthesized
  source 1..22: mol_type = other DNA
atctaaacctcctgaaaattgg

SEQ ID NO: 45444 - DNA, 22 bp, synthetic construct
  misc_feature 1..22: note = chemically synthesized
  source 1..22: mol_type = other DNA
aacctcctgaaaattggttatt

SEQ ID NO: 45445 - DNA, 22 bp, synthetic construct
  misc_feature 1..22: note = chemically synthesized
  source 1..22: mol_type = other DNA
ctgaaaattggttattggctgc

SEQ ID NO: 45446 - DNA, 22 bp, synthetic construct
  misc_feature 1..22: note = chemically synthesized
  source 1..22: mol_type = other DNA
aaaattggttattggctgcttc

SEQ ID NO: 45447 - DNA, 22 bp, synthetic construct
  misc_feature 1..22: note = chemically synthesized
  source 1..22: mol_type = other DNA
gttattggctgcttcgttgatt

SEQ ID NO: 45448 - DNA, 22 bp, synthetic construct
  misc_feature 1..22: note = chemically synthesized
  source 1..22: mol_type = other DNA
ttggctgcttcgttgattctag

SEQ ID NO: 45449 - DNA, 22 bp, synthetic construct
  misc_feature 1..22: note = chemically synthesized
  source 1..22: mol_type = other DNA
gctgcttcgttgattctagaaa

SEQ ID NO: 45450 - DNA, 22 bp, synthetic construct
  misc_feature 1..22: note = chemically synthesized
  source 1..22: mol_type = other DNA
cttcgttgattctagaaaaaaa

SEQ ID NO: 45451 - DNA, 22 bp, synthetic construct
  misc_feature 1..22: note = chemically synthesized
  source 1..22: mol_type = other DNA
cgttgattctagaaaaaaaaga

SEQ ID NO: 45452 - DNA, 22 bp, synthetic construct
  misc_feature 1..22: note = chemically synthesized
  source 1..22: mol_type = other DNA
gttgattctagaaaaaaaagaa

SEQ ID NO: 45453 - DNA, 22 bp, synthetic construct
  misc_feature 1..22: note = chemically synthesized
  source 1..22: mol_type = other DNA
attctagaaaaaaaagaaagca

SEQ ID NO: 45454 - DNA, 22 bp, synthetic construct
  misc_feature 1..22: note = chemically synthesized
  source 1..22: mol_type = other DNA
tagaaaaaaaagaaagcaagaa

SEQ ID NO: 45455 - DNA, 22 bp, synthetic construct
  misc_feature 1..22: note = chemically synthesized
  source 1..22: mol_type = other DNA
gaaaaaaaagaaagcaagaaat

SEQ ID NO: 45456 - DNA, 22 bp, synthetic construct
  misc_feature 1..22: note = chemically synthesized
  source 1..22: mol_type = other DNA
agtattaaggcccaacccagcc

SEQ ID NO: 45457 - DNA, 22 bp, synthetic construct
  misc_feature 1..22: note = chemically synthesized
  source 1..22: mol_type = other DNA
aggcccaacccagccaaaaccc

SEQ ID NO: 45458 - DNA, 22 bp, synthetic construct
  misc_feature 1..22: note = chemically synthesized
  source 1..22: mol_type = other DNA
ctagaagcctgctggaagccta

SEQ ID NO: 45459 - DNA, 22 bp, synthetic construct
  misc_feature 1..22: note = chemically synthesized
  source 1..22: mol_type = other DNA
gaagcctgctggaagcctacat

SEQ ID NO: 45460 - DNA, 22 bp, synthetic construct
  misc_feature 1..22: note = chemically synthesized
  source 1..22: mol_type = other DNA
ctggaagcctacatggcttcga

SEQ ID NO: 45461 - DNA, 22 bp, synthetic construct
  misc_feature 1..22: note = chemically synthesized
  source 1..22: mol_type = other DNA
gaagcctacatggcttcgagcg

SEQ ID NO: 45462 - DNA, 22 bp, synthetic construct
  misc_feature 1..22: note = chemically synthesized
  source 1..22: mol_type = other DNA
catggcttcgagcggcacattc

SEQ ID NO: 45463 - DNA, 22 bp, synthetic construct
  misc_feature 1..22: note = chemically synthesized
  source 1..22: mol_type = other DNA
cgagcggcacattctgagaact

SEQ ID NO: 45464 - DNA, 22 bp, synthetic construct
  misc_feature 1..22: note = chemically synthesized
  source 1..22: mol_type = other DNA
gagcggcacattctgagaactc

SEQ ID NO: 45465 - DNA, 22 bp, synthetic construct
  misc_feature 1..22: note = chemically synthesized
  source 1..22: mol_type = other DNA
tgagaactctgaagagtaccac

SEQ ID NO: 45466 - DNA, 22 bp, synthetic construct
  misc_feature 1..22: note = chemically synthesized
  source 1..22: mol_type = other DNA
agaactctgaagagtaccactc

SEQ ID NO: 45467 - DNA, 22 bp, synthetic construct
  misc_feature 1..22: note = chemically synthesized
  source 1..22: mol_type = other DNA
tgaagagtaccactcagccgac

SEQ ID NO: 45468 - DNA, 22 bp, synthetic construct
  misc_feature 1..22: note = chemically synthesized
  source 1..22: mol_type = other DNA
aagagtaccactcagccgacac

SEQ ID NO: 45469 - DNA, 22 bp, synthetic construct
  misc_feature 1..22: note = chemically synthesized
  source 1..22: mol_type = other DNA
agccgacactgcccccatgaca

SEQ ID NO: 45470 - DNA, 22 bp, synthetic construct
  misc_feature 1..22: note = chemically synthesized
  source 1..22: mol_type = other DNA
cccccatgacatagggccctgg

SEQ ID NO: 45471 - DNA, 22 bp, synthetic construct
  misc_feature 1..22: note = chemically synthesized
  source 1..22: mol_type = other DNA
gtctcctctttgactcacactt

SEQ ID NO: 45472 - DNA, 22 bp, synthetic construct
  misc_feature 1..22: note = chemically synthesized
  source 1..22: mol_type = other DNA
ctctttgactcacacttgcctg

SEQ ID NO: 45473 - DNA, 22 bp, synthetic construct
  misc_feature 1..22: note = chemically synthesized
  source 1..22: mol_type = other DNA
tttgactcacacttgcctggca

SEQ ID NO: 45474 - DNA, 22 bp, synthetic construct
  misc_feature 1..22: note = chemically synthesized
  source 1..22: mol_type = other DNA
tgactcacacttgcctggcagg

SEQ ID NO: 45475 - DNA, 22 bp, synthetic construct
  misc_feature 1..22: note = chemically synthesized
  source 1..22: mol_type = other DNA
gactcacacttgcctggcagga

SEQ ID NO: 45476 - DNA, 22 bp, synthetic construct
  misc_feature 1..22: note = chemically synthesized
  source 1..22: mol_type = other DNA
actcacacttgcctggcaggac

SEQ ID NO: 45477 - DNA, 22 bp, synthetic construct
  misc_feature 1..22: note = chemically synthesized
  source 1..22: mol_type = other DNA
acacttgcctggcaggactccc

SEQ ID NO: 45478 - DNA, 22 bp, synthetic construct
  misc_feature 1..22: note = chemically synthesized
  source 1..22: mol_type = other DNA
gcctggcaggactccccaaaca

SEQ ID NO: 45479 - DNA, 22 bp, synthetic construct
  misc_feature 1..22: note = chemically synthesized
  source 1..22: mol_type = other DNA
cctggcaggactccccaaacag

SEQ ID NO: 45480 - DNA, 22 bp, synthetic construct
  misc_feature 1..22: note = chemically synthesized
  source 1..22: mol_type = other DNA
gcaggactccccaaacagaaca

SEQ ID NO: 45481 - DNA, 22 bp, synthetic construct
  misc_feature 1..22: note = chemically synthesized
  source 1..22: mol_type = other DNA
cccaaacagaacagagatgctc

SEQ ID NO: 45482 - DNA, 22 bp, synthetic construct
  misc_feature 1..22: note = chemically synthesized
  source 1..22: mol_type = other DNA
agccgggcacaagagagcaggc

SEQ ID NO: 45483 - DNA, 22 bp, synthetic construct
  misc_feature 1..22: note = chemically synthesized
  source 1..22: mol_type = other DNA
atgctgcactgtggtttcccca

SEQ ID NO: 45484 - DNA, 22 bp, synthetic construct
  misc_feature 1..22: note = chemically synthesized
  source 1..22: mol_type = other DNA
cactgtggtttccccagcaatt

SEQ ID NO: 45485 - DNA, 22 bp, synthetic construct
  misc_feature 1..22: note = chemically synthesized
  source 1..22: mol_type = other DNA
tggtttccccagcaattccaga

SEQ ID NO: 45486 - DNA, 22 bp, synthetic construct
  misc_feature 1..22: note = chemically synthesized
  source 1..22: mol_type = other DNA
ccccagcaattccagaactgct

SEQ ID NO: 45487 - DNA, 22 bp, synthetic construct
  misc_feature 1..22: note = chemically synthesized
  source 1..22: mol_type = other DNA
cccagcaattccagaactgctg

SEQ ID NO: 45488 - DNA, 22 bp, synthetic construct
  misc_feature 1..22: note = chemically synthesized
  source 1..22: mol_type = other DNA
cagaactgctgcctaccggcac

SEQ ID NO: 45489 - DNA, 22 bp, synthetic construct
  misc_feature 1..22: note = chemically synthesized
  source 1..22: mol_type = other DNA
ctgcctaccggcacgcatgcag

SEQ ID NO: 45490 - DNA, 22 bp, synthetic construct
  misc_feature 1..22: note = chemically synthesized
  source 1..22: mol_type = other DNA
cctaccggcacgcatgcaggat

SEQ ID NO: 45491 - DNA, 22 bp, synthetic construct
  misc_feature 1..22: note = chemically synthesized
  source 1..22: mol_type = other DNA
ccggcacgcatgcaggatcaat

SEQ ID NO: 45492 - DNA, 22 bp, synthetic construct
  misc_feature 1..22: note = chemically synthesized
  source 1..22: mol_type = other DNA
ctgggtctgcctgggtccaccc

SEQ ID NO: 45493 - DNA, 22 bp, synthetic construct
  misc_feature 1..22: note = chemically synthesized
  source 1..22: mol_type = other DNA
tgggtctgcctgggtccaccct

SEQ ID NO: 45494 - DNA, 22 bp, synthetic construct
  misc_feature 1..22: note = chemically synthesized
  source 1..22: mol_type = other DNA
ggtctgcctgggtccacccttc

SEQ ID NO: 45495 - DNA, 22 bp, synthetic construct
  misc_feature 1..22: note = chemically synthesized
  source 1..22: mol_type = other DNA
cctgggtccacccttcctttct

SEQ ID NO: 45496 - DNA, 22 bp, synthetic construct
  misc_feature 1..22: note = chemically synthesized
  source 1..22: mol_type = other DNA
ggtccacccttcctttcttagt

SEQ ID NO: 45497 - DNA, 22 bp, synthetic construct
  misc_feature 1..22: note = chemically synthesized
  source 1..22: mol_type = other DNA
cctttcttagtcactgcaagat

SEQ ID NO: 45498 - DNA, 22 bp, synthetic construct
  misc_feature 1..22: note = chemically synthesized
  source 1..22: mol_type = other DNA
ctttcttagtcactgcaagatt

SEQ ID NO: 45499 - DNA, 22 bp, synthetic construct
  misc_feature 1..22: note = chemically synthesized
  source 1..22: mol_type = other DNA
tcttagtcactgcaagatttca

SEQ ID NO: 45500 - DNA, 22 bp, synthetic construct
  misc_feature 1..22: note = chemically synthesized
  source 1..22: mol_type = other DNA
cttagtcactgcaagatttcac

SEQ ID NO: 45501 - DNA, 22 bp, synthetic construct
  misc_feature 1..22: note = chemically synthesized
  source 1..22: mol_type = other DNA
ttagtcactgcaagatttcacc

SEQ ID NO: 45502 - DNA, 22 bp, synthetic construct
  misc_feature 1..22: note = chemically synthesized
  source 1..22: mol_type = other DNA
agtcactgcaagatttcaccca

SEQ ID NO: 45503 - DNA, 22 bp, synthetic construct
  misc_feature 1..22: note = chemically synthesized
  source 1..22: mol_type = other DNA
gtcactgcaagatttcacccag

SEQ ID NO: 45504 - DNA, 22 bp, synthetic construct
  misc_feature 1..22: note = chemically synthesized
  source 1..22: mol_type = other DNA
caagatttcacccagcccagcc

SEQ ID NO: 45505 - DNA, 22 bp, synthetic construct
  misc_feature 1..22: note = chemically synthesized
  source 1..22: mol_type = other DNA
cacccagcccagccacccactg

SEQ ID NO: 45506 - DNA, 22 bp, synthetic construct
  misc_feature 1..22: note = chemically synthesized
  source 1..22: mol_type = other DNA
acccagcccagccacccactga

SEQ ID NO: 45507 - DNA, 22 bp, synthetic construct
  misc_feature 1..22: note = chemically synthesized
  source 1..22: mol_type = other DNA
aaaaggcagaggaggccaccta

SEQ ID NO: 45508 - DNA, 22 bp, synthetic construct
  misc_feature 1..22: note = chemically synthesized
  source 1..22: mol_type = other DNA
tctgaatgctaggatatgacac

SEQ ID NO: 45509 - DNA, 22 bp, synthetic construct
  misc_feature 1..22: note = chemically synthesized
  source 1..22: mol_type = other DNA
aatgctaggatatgacacactt

SEQ ID NO: 45510 - DNA, 22 bp, synthetic construct
  misc_feature 1..22: note = chemically synthesized
  source 1..22: mol_type = other DNA
ggatatgacacacttgaacctt

SEQ ID NO: 45511 - DNA, 22 bp, synthetic construct
  misc_feature 1..22: note = chemically synthesized
  source 1..22: mol_type = other DNA
gaaccttcctcctggccagcct

SEQ ID NO: 45512 - DNA, 22 bp, synthetic construct
  misc_feature 1..22: note = chemically synthesized
  source 1..22: mol_type = other DNA
aaccttcctcctggccagcctg

SEQ ID NO: 45513 - DNA, 22 bp, synthetic construct
  misc_feature 1..22: note = chemically synthesized
  source 1..22: mol_type = other DNA
cctcctggccagcctgctctcc

SEQ ID NO: 45514 - DNA, 22 bp, synthetic construct
  misc_feature 1..22: note = chemically synthesized
  source 1..22: mol_type = other DNA
ctcctggccagcctgctctccc

SEQ ID NO: 45515 - DNA, 22 bp, synthetic construct
  misc_feature 1..22: note = chemically synthesized
  source 1..22: mol_type = other DNA
ctggccagcctgctctcccaaa

SEQ ID NO: 45516 - DNA, 22 bp, synthetic construct
  misc_feature 1..22: note = chemically synthesized
  source 1..22: mol_type = other DNA
gccagcctgctctcccaaagaa

SEQ ID NO: 45517 - DNA, 22 bp, synthetic construct
  misc_feature 1..22: note = chemically synthesized
  source 1..22: mol_type = other DNA
ctctcccaaagaaggaataaca

SEQ ID NO: 45518 - DNA, 22 bp, synthetic construct
  misc_feature 1..22: note = chemically synthesized
  source 1..22: mol_type = other DNA
tcccaaagaaggaataacagaa

SEQ ID NO: 45519 - DNA, 22 bp, synthetic construct
  misc_feature 1..22: note = chemically synthesized
  source 1..22: mol_type = other DNA
ccaaagaaggaataacagaaca

SEQ ID NO: 45520 - DNA, 22 bp, synthetic construct
  misc_feature 1..22: note = chemically synthesized
  source 1..22: mol_type = other DNA
tgactacttctggtttgtaaat

SEQ ID NO: 45521 - DNA, 22 bp, synthetic construct
  misc_feature 1..22: note = chemically synthesized
  source 1..22: mol_type = other DNA
actacttctggtttgtaaattt

SEQ ID NO: 45522 - DNA, 22 bp, synthetic construct
  misc_feature 1..22: note = chemically synthesized
  source 1..22: mol_type = other DNA
cttctggtttgtaaatttatac

SEQ ID NO: 45523 - DNA, 22 bp, synthetic construct
  misc_feature 1..22: note = chemically synthesized
  source 1..22: mol_type = other DNA
ctggtttgtaaatttataccaa

SEQ ID NO: 45524 - DNA, 22 bp, synthetic construct
  misc_feature 1..22: note = chemically synthesized
  source 1..22: mol_type = other DNA
tggtttgtaaatttataccaat

SEQ ID NO: 45525 - DNA, 22 bp, synthetic construct
  misc_feature 1..22: note = chemically synthesized
  source 1..22: mol_type = other DNA
gtttgtaaatttataccaatgt

SEQ ID NO: 45526 - DNA, 22 bp, synthetic construct
  misc_feature 1..22: note = chemically synthesized
  source 1..22: mol_type = other DNA
gtaaatttataccaatgttctt

SEQ ID NO: 45527 - DNA, 22 bp, synthetic construct
  misc_feature 1..22: note = chemically synthesized
  source 1..22: mol_type = other DNA
taaatttataccaatgttcttc

SEQ ID NO: 45528 - DNA, 22 bp, synthetic construct
  misc_feature 1..22: note = chemically synthesized
  source 1..22: mol_type = other DNA
ataccaatgttcttcttgaagt

SEQ ID NO: 45529 - DNA, 22 bp, synthetic construct
  misc_feature 1..22: note = chemically synthesized
  source 1..22: mol_type = other DNA
taccaatgttcttcttgaagtg

SEQ ID NO: 45530 - DNA, 22 bp, synthetic construct
  misc_feature 1..22: note = chemically synthesized
  source 1..22: mol_type = other DNA
ttcttgaagtgggagctcagca

SEQ ID NO: 45531 - DNA, 22 bp, synthetic construct
  misc_feature 1..22: note = chemically synthesized
  source 1..22: mol_type = other DNA
cttgaagtgggagctcagcatc

SEQ ID NO: 45532 - DNA, 22 bp, synthetic construct
  misc_feature 1..22: note = chemically synthesized
  source 1..22: mol_type = other DNA
ttgaagtgggagctcagcatcg

SEQ ID NO: 45533 - DNA, 22 bp, synthetic construct
  misc_feature 1..22: note = chemically synthesized
  source 1..22: mol_type = other DNA
gaagtgggagctcagcatcggg

SEQ ID NO: 45534 - DNA, 22 bp, synthetic construct
  misc_feature 1..22: note = chemically synthesized
  source 1..22: mol_type = other DNA
aagtgggagctcagcatcggga

SEQ ID NO: 45535 - DNA, 22 bp, synthetic construct
  misc_feature 1..22: note = chemically synthesized
  source 1..22: mol_type = other DNA
agcatcgggacacccagaaaaa

SEQ ID NO: 45536 - DNA, 22 bp, synthetic construct
  misc_feature 1..22: note = chemically synthesized
  source 1..22: mol_type = other DNA
caaggcaaaaagcaaatagcag

SEQ ID NO: 45537 - DNA, 22 bp, synthetic construct
  misc_feature 1..22: note = chemically synthesized
  source 1..22: mol_type = other DNA
ctgaaacagccaactctgtctc

SEQ ID NO: 45538 - DNA, 22 bp, synthetic construct
  misc_feature 1..22: note = chemically synthesized
  source 1..22: mol_type = other DNA
aaacagccaactctgtctctgt

SEQ ID NO: 45539 - DNA, 22 bp, synthetic construct
  misc_feature 1..22: note = chemically synthesized
  source 1..22: mol_type = other DNA
tgtctctgtctcccccaagccc

SEQ ID NO: 45540 - DNA, 22 bp, synthetic construct
  misc_feature 1..22: note = chemically synthesized
  source 1..22: mol_type = other DNA
tctctgtctcccccaagccctc

SEQ ID NO: 45541 - DNA, 22 bp, synthetic construct
  misc_feature 1..22: note = chemically synthesized
  source 1..22: mol_type = other DNA
tgtctcccccaagccctcctag

SEQ ID NO: 45542 - DNA, 22 bp, synthetic construct
  misc_feature 1..22: note = chemically synthesized
  source 1..22: mol_type = other DNA
tctcccccaagccctcctagtc

SEQ ID NO: 45543 - DNA, 22 bp, synthetic construct
  misc_feature 1..22: note = chemically synthesized
  source 1..22: mol_type = other DNA
ccccaagccctcctagtcagaa

SEQ ID NO: 45544 - DNA, 22 bp, synthetic construct
  misc_feature 1..22: note = chemically synthesized
  source 1..22: mol_type = other DNA
ctagtcagaacgttctctcagc

SEQ ID NO: 45545 - DNA, 22 bp, synthetic construct
  misc_feature 1..22: note = chemically synthesized
  source 1..22: mol_type = other DNA
gtcagaacgttctctcagcatt

SEQ ID NO: 45546 - DNA, 22 bp, synthetic construct
  misc_feature 1..22: note = chemically synthesized
  source 1..22: mol_type = other DNA
tctcagcatttcagcaggtact

SEQ ID NO: 45547 - DNA, 22 bp, synthetic construct
  misc_feature 1..22: note = chemically synthesized
  source 1..22: mol_type = other DNA
tcagcatttcagcaggtactgc

SEQ ID NO: 45548 - DNA, 22 bp, synthetic construct
  misc_feature 1..22: note = chemically synthesized
  source 1..22: mol_type = other DNA
agcatttcagcaggtactgctc

SEQ ID NO: 45549 - DNA, 22 bp, synthetic construct
  misc_feature 1..22: note = chemically synthesized
  source 1..22: mol_type = other DNA
cagcaggtactgctcacctgga

SEQ ID NO: 45550 - DNA, 22 bp, synthetic construct
  misc_feature 1..22: note = chemically synthesized
  source 1..22: mol_type = other DNA
agcaggtactgctcacctggaa

SEQ ID NO: 45551 - DNA, 22 bp, synthetic construct
  misc_feature 1..22: note = chemically synthesized
  source 1..22: mol_type = other DNA
ctcacctggaaatacagctgat

SEQ ID NO: 45552 - DNA, 22 bp, synthetic construct
  misc_feature 1..22: note = chemically synthesized
  source 1..22: mol_type = other DNA
acctggaaatacagctgatgta

SEQ ID NO: 45553 - DNA, 22 bp, synthetic construct
  misc_feature 1..22: note = chemically synthesized
  source 1..22: mol_type = other DNA
gaaatacagctgatgtatttac

SEQ ID NO: 45554 - DNA, 22 bp, synthetic construct
  misc_feature 1..22: note = chemically synthesized
  source 1..22: mol_type = other DNA
atgtatttactgagaagcttct

SEQ ID NO: 45555 - DNA, 22 bp, synthetic construct
  misc_feature 1..22: note = chemically synthesized
  source 1..22: mol_type = other DNA
actgagaagcttcttcaagctt

SEQ ID NO: 45556 - DNA, 22 bp, synthetic construct
  misc_feature 1..22: note = chemically synthesized
  source 1..22: mol_type = other DNA
ctgagaagcttcttcaagcttt

SEQ ID NO: 45557 - DNA, 22 bp, synthetic construct
  misc_feature 1..22: note = chemically synthesized
  source 1..22: mol_type = other DNA
agaagcttcttcaagctttcta

SEQ ID NO: 45558 - DNA, 22 bp, synthetic construct
  misc_feature 1..22: note = chemically synthesized
  source 1..22: mol_type = other DNA
cttcaagctttctactggtgct

SEQ ID NO: 45559 - DNA, 22 bp, synthetic construct
  misc_feature 1..22: note = chemically synthesized
  source 1..22: mol_type = other DNA
ttcaagctttctactggtgctt

SEQ ID NO: 45560 - DNA, 22 bp, synthetic construct
  misc_feature 1..22: note = chemically synthesized
  source 1..22: mol_type = other DNA
caagctttctactggtgcttag

SEQ ID NO: 45561 - DNA, 22 bp, synthetic construct
  misc_feature 1..22: note = chemically synthesized
  source 1..22: mol_type = other DNA
aagctttctactggtgcttagg

SEQ ID NO: 45562 - DNA, 22 bp, synthetic construct
  misc_feature 1..22: note = chemically synthesized
  source 1..22: mol_type = other DNA
tctactggtgcttagggacaat

SEQ ID NO: 45563 - DNA, 22 bp, synthetic construct
  misc_feature 1..22: note = chemically synthesized
  source 1..22: mol_type = other DNA
ctactggtgcttagggacaatg

SEQ ID NO: 45564 - DNA, 22 bp, synthetic construct
  misc_feature 1..22: note = chemically synthesized
  source 1..22: mol_type = other DNA
tactggtgcttagggacaatgc

SEQ ID NO: 45565 - DNA, 22 bp, synthetic construct
  misc_feature 1..22: note = chemically synthesized
  source 1..22: mol_type = other DNA
ctggtgcttagggacaatgcca

SEQ ID NO: 45566 - DNA, 22 bp, synthetic construct
  misc_feature 1..22: note = chemically synthesized
  source 1..22: mol_type = other DNA
gtgcttagggacaatgccaatc

SEQ ID NO: 45567 - DNA, 22 bp, synthetic construct
  misc_feature 1..22: note = chemically synthesized
  source 1..22: mol_type = other DNA
agggacaatgccaatcaagtct

SEQ ID NO: 45568 - DNA, 22 bp, synthetic construct
  misc_feature 1..22: note = chemically synthesized
  source 1..22: mol_type = other DNA
gggacaatgccaatcaagtctt

SEQ ID NO: 45569 - DNA, 22 bp, synthetic construct
  misc_feature 1..22: note = chemically synthesized
  source 1..22: mol_type = other DNA
gaaattatatagagaggtggaa

SEQ ID NO: 45570 - DNA, 22 bp, synthetic construct
  misc_feature 1..22: note = chemically synthesized
  source 1..22: mol_type = other DNA
aaattatatagagaggtggaat

SEQ ID NO: 45571 - DNA, 22 bp, synthetic construct
  misc_feature 1..22: note = chemically synthesized
  source 1..22: mol_type = other DNA
tatagagaggtggaatatcagg

SEQ ID NO: 45572 - DNA, 22 bp, synthetic construct
  misc_feature 1..22: note = chemically synthesized
  source 1..22: mol_type = other DNA
tccctgaaaatgcttaaaagat

SEQ ID NO: 45573 - DNA, 22 bp, synthetic construct
  misc_feature 1..22: note = chemically synthesized
  source 1..22: mol_type = other DNA
aaaatgcttaaaagatcaaact

SEQ ID NO: 45574 - DNA, 22 bp, synthetic construct
  misc_feature 1..22: note = chemically synthesized
  source 1..22: mol_type = other DNA
aaaagatcaaactgattcctat

SEQ ID NO: 45575 - DNA, 22 bp, synthetic construct
  misc_feature 1..22: note = chemically synthesized
  source 1..22: mol_type = other DNA
aaagatcaaactgattcctatc

SEQ ID NO: 45576 - DNA, 22 bp, synthetic construct
  misc_feature 1..22: note = chemically synthesized
  source 1..22: mol_type = other DNA
attcctatcacatgcctcccct

SEQ ID NO: 45577 - DNA, 22 bp, synthetic construct
  misc_feature 1..22: note = chemically synthesized
  source 1..22: mol_type = other DNA
ctatcacatgcctcccctacca

SEQ ID NO: 45578 - DNA, 22 bp, synthetic construct
  misc_feature 1..22: note = chemically synthesized
  source 1..22: mol_type = other DNA
tcacatgcctcccctaccagtg

SEQ ID NO: 45579 - DNA, 22 bp, synthetic construct
  misc_feature 1..22: note = chemically synthesized
  source 1..22: mol_type = other DNA
ccctaccagtgagcgcccacca

SEQ ID NO: 45580 - DNA, 22 bp, synthetic construct
  misc_feature 1..22: note = chemically synthesized
  source 1..22: mol_type = other DNA
ccagtgagcgcccaccactagc

SEQ ID NO: 45581 - DNA, 22 bp, synthetic construct
  misc_feature 1..22: note = chemically synthesized
  source 1..22: mol_type = other DNA
gcttccttgctccaaactatta

SEQ ID NO: 45582 - DNA, 22 bp, synthetic construct
  misc_feature 1..22: note = chemically synthesized
  source 1..22: mol_type = other DNA
ccttgctccaaactattaaaac

SEQ ID NO: 45583 - DNA, 22 bp, synthetic construct
  misc_feature 1..22: note = chemically synthesized
  source 1..22: mol_type = other DNA
cttgctccaaactattaaaaca

SEQ ID NO: 45584 - DNA, 22 bp, synthetic construct
  misc_feature 1..22: note = chemically synthesized
  source 1..22: mol_type = other DNA
gctccaaactattaaaacagag

SEQ ID NO: 45585 - DNA, 22 bp, synthetic construct
  misc_feature 1..22: note = chemically synthesized
  source 1..22: mol_type = other DNA
ctccaaactattaaaacagagc

SEQ ID NO: 45586 - DNA, 22 bp, synthetic construct
  misc_feature 1..22: note = chemically synthesized
  source 1..22: mol_type = other DNA
caaactattaaaacagagcgtc

SEQ ID NO: 45587 - DNA, 22 bp, synthetic construct
  misc_feature 1..22: note = chemically synthesized
  source 1..22: mol_type = other DNA
ttaaaacagagcgtccccccaa

SEQ ID NO: 45588 - DNA, 22 bp, synthetic construct
  misc_feature 1..22: note = chemically synthesized
  source 1..22: mol_type = other DNA
aaacagagcgtccccccaaaaa

SEQ ID NO: 45589 - DNA, 22 bp, synthetic construct
  misc_feature 1..22: note = chemically synthesized
  source 1..22: mol_type = other DNA
ctgcaagccacaacttccctac

SEQ ID NO: 45590 - DNA, 22 bp, synthetic construct
  misc_feature 1..22: note = chemically synthesized
  source 1..22: mol_type = other DNA
tgcaagccacaacttccctacc

SEQ ID NO: 45591 - DNA, 22 bp, synthetic construct
  misc_feature 1..22: note = chemically synthesized
  source 1..22: mol_type = other DNA
caagccacaacttccctaccct

SEQ ID NO: 45592 - DNA, 22 bp, synthetic construct
  misc_feature 1..22: note = chemically synthesized
  source 1..22: mol_type = other DNA
ccctaccctgtgtgcaggctgt

SEQ ID NO: 45593 - DNA, 22 bp, synthetic construct
  misc_feature 1..22: note = chemically synthesized
  source 1..22: mol_type = other DNA
cctaccctgtgtgcaggctgtg

SEQ ID NO: 45594 - DNA, 22 bp, synthetic construct
  misc_feature 1..22: note = chemically synthesized
  source 1..22: mol_type = other DNA
ccctgtgtgcaggctgtggaag

SEQ ID NO: 45595 - DNA, 22 bp, synthetic construct
  misc_feature 1..22: note = chemically synthesized
  source 1..22: mol_type = other DNA
tgtgcaggctgtggaagcgtgg

SEQ ID NO: 45596 - DNA, 22 bp, synthetic construct
  misc_feature 1..22: note = chemically synthesized
  source 1..22: mol_type = other DNA
tggaagcgtggggtggacccag

SEQ ID NO: 45597 - DNA, 22 bp, synthetic construct
  misc_feature 1..22: note = chemically synthesized
  source 1..22: mol_type = other DNA
tggatcagaatccctagtctac

SEQ ID NO: 45598 - DNA, 22 bp, synthetic construct
  misc_feature 1..22: note = chemically synthesized
  source 1..22: mol_type = other DNA
gatcagaatccctagtctaccc

SEQ ID NO: 45599 - DNA, 22 bp, synthetic construct
  misc_feature 1..22: note = chemically synthesized
  source 1..22: mol_type = other DNA
gtctacccctgcggctgcatga

SEQ ID NO: 45600 - DNA, 22 bp, synthetic construct
  misc_feature 1..22: note = chemically synthesized
  source 1..22: mol_type = other DNA
cccctgcggctgcatgagacca

SEQ ID NO: 45601 - DNA, 22 bp, synthetic construct
  misc_feature 1..22: note = chemically synthesized
  source 1..22: mol_type = other DNA
cggctgcatgagaccagacctg

SEQ ID NO: 45602 - DNA, 22 bp, synthetic construct
  misc_feature 1..22: note = chemically synthesized
  source 1..22: mol_type = other DNA
catgagaccagacctgccattt

SEQ ID NO: 45603 - DNA, 22 bp, synthetic construct
  misc_feature 1..22: note = chemically synthesized
  source 1..22: mol_type = other DNA
ccatttaacctctctaagcttc

SEQ ID NO: 45604 - DNA, 22 bp, synthetic construct
  misc_feature 1..22: note = chemically synthesized
  source 1..22: mol_type = other DNA
aacctctctaagcttcaactac

SEQ ID NO: 45605 - DNA, 22 bp, synthetic construct
  misc_feature 1..22: note = chemically synthesized
  source 1..22: mol_type = other DNA
acctctctaagcttcaactacc

SEQ ID NO: 45606 - DNA, 22 bp, synthetic construct
  misc_feature 1..22: note = chemically synthesized
  source 1..22: mol_type = other DNA
tctaagcttcaactaccctttc

SEQ ID NO: 45607 - DNA, 22 bp, synthetic construct
  misc_feature 1..22: note = chemically synthesized
  source 1..22: mol_type = other DNA
taagcttcaactaccctttctc

SEQ ID NO: 45608 - DNA, 22 bp, synthetic construct
  misc_feature 1..22: note = chemically synthesized
  source 1..22: mol_type = other DNA
agcttcaactaccctttctcct

SEQ ID NO: 45609 - DNA, 22 bp, synthetic construct
  misc_feature 1..22: note = chemically synthesized
  source 1..22: mol_type = other DNA
caactaccctttctcctgcctc

SEQ ID NO: 45610 - DNA, 22 bp, synthetic construct
  misc_feature 1..22: note = chemically synthesized
  source 1..22: mol_type = other DNA
aactaccctttctcctgcctct

SEQ ID NO: 45611 - DNA, 22 bp, synthetic construct
  misc_feature 1..22: note = chemically synthesized
  source 1..22: mol_type = other DNA
ccctttctcctgcctcttcaca

SEQ ID NO: 45612 - DNA, 22 bp, synthetic construct
  misc_feature 1..22: note = chemically synthesized
  source 1..22: mol_type = other DNA
tctcctgcctcttcacagggtt

SEQ ID NO: 45613 - DNA, 22 bp, synthetic construct
  misc_feature 1..22: note = chemically synthesized
  source 1..22: mol_type = other DNA
ctcctgcctcttcacagggtta

SEQ ID NO: 45614 - DNA, 22 bp, synthetic construct
  misc_feature 1..22: note = chemically synthesized
  source 1..22: mol_type = other DNA
tcctgcctcttcacagggttac

SEQ ID NO: 45615 - DNA, 22 bp, synthetic construct
  misc_feature 1..22: note = chemically synthesized
  source 1..22: mol_type = other DNA
ctgcctcttcacagggttactc

SEQ ID NO: 45616 - DNA, 22 bp, synthetic construct
  misc_feature 1..22: note = chemically synthesized
  source 1..22: mol_type = other DNA
cctcttcacagggttactcatg

SEQ ID NO: 45617 - DNA, 22 bp, synthetic construct
  misc_feature 1..22: note = chemically synthesized
  source 1..22: mol_type = other DNA
ttcacagggttactcatgaggt

SEQ ID NO: 45618 - DNA, 22 bp, synthetic construct
  misc_feature 1..22: note = chemically synthesized
  source 1..22: mol_type = other DNA
cacagggttactcatgaggtga

SEQ ID NO: 45619 - DNA, 22 bp, synthetic construct
  misc_feature 1..22: note = chemically synthesized
  source 1..22: mol_type = other DNA
acagggttactcatgaggtgag

SEQ ID NO: 45620 - DNA, 22 bp, synthetic construct
  misc_feature 1..22: note = chemically synthesized
  source 1..22: mol_type = other DNA
ctcatgaggtgagtctcaattt

SEQ ID NO: 45621 - DNA, 22 bp, synthetic construct
  misc_feature 1..22: note = chemically synthesized
  source 1..22: mol_type = other DNA
atgaggtgagtctcaatttgac

SEQ ID NO: 45622 - DNA, 22 bp, synthetic construct
  misc_feature 1..22: note = chemically synthesized
  source 1..22: mol_type = other DNA
aatttgacaatactcctcaaag

SEQ ID NO: 45623 - DNA, 22 bp, synthetic construct
  misc_feature 1..22: note = chemically synthesized
  source 1..22: mol_type = other DNA
gacaatactcctcaaagggctt

SEQ ID NO: 45624 - DNA, 22 bp, synthetic construct
  misc_feature 1..22: note = chemically synthesized
  source 1..22: mol_type = other DNA
acaatactcctcaaagggctta

SEQ ID NO: 45625 - DNA, 22 bp, synthetic construct
  misc_feature 1..22: note = chemically synthesized
  source 1..22: mol_type = other DNA
ctcaaagggcttactcaaaaaa

SEQ ID NO: 45626 - DNA, 22 bp, synthetic construct
  misc_feature 1..22: note = chemically synthesized
  source 1..22: mol_type = other DNA
aaagggcttactcaaaaaaaaa

SEQ ID NO: 45627 - DNA, 22 bp, synthetic construct
  misc_feature 1..22: note = chemically synthesized
  source 1..22: mol_type = other DNA
actcaaaaaaaaaatgtgattt

SEQ ID NO: 45628 - DNA, 22 bp, synthetic construct
  misc_feature 1..22: note = chemically synthesized
  source 1..22: mol_type = other DNA
ctcaaaaaaaaaatgtgatttt

SEQ ID NO: 45629 - DNA, 22 bp, synthetic construct
  misc_feature 1..22: note = chemically synthesized
  source 1..22: mol_type = other DNA
aaaaaaaaaatgtgattttatc

SEQ ID NO: 45630 - DNA, 22 bp, synthetic construct
  misc_feature 1..22: note = chemically synthesized
  source 1..22: mol_type = other DNA
tatccgtatcctcattactaac

SEQ ID NO: 45631 - DNA, 22 bp, synthetic construct
  misc_feature 1..22: note = chemically synthesized
  source 1..22: mol_type = other DNA
atccgtatcctcattactaaca

SEQ ID NO: 45632 - DNA, 22 bp, synthetic construct
  misc_feature 1..22: note = chemically synthesized
  source 1..22: mol_type = other DNA
tccgtatcctcattactaacag

SEQ ID NO: 45633 - DNA, 22 bp, synthetic construct
  misc_feature 1..22: note = chemically synthesized
  source 1..22: mol_type = other DNA
attactaacagcacaatggaca

SEQ ID NO: 45634 - DNA, 22 bp, synthetic construct
  misc_feature 1..22: note = chemically synthesized
  source 1..22: mol_type = other DNA
ctaacagcacaatggacattcg

SEQ ID NO: 45635 - DNA, 22 bp, synthetic construct
  misc_feature 1..22: note = chemically synthesized
  source 1..22: mol_type = other DNA
acagcacaatggacattcgaaa

SEQ ID NO: 45636 - DNA, 22 bp, synthetic construct
  misc_feature 1..22: note = chemically synthesized
  source 1..22: mol_type = other DNA
gaaagggatgggcccaattttt

SEQ ID NO: 45637 - DNA, 22 bp, synthetic construct
  misc_feature 1..22: note = chemically synthesized
  source 1..22: mol_type = other DNA
ttcataagccaaaaaagctaga

SEQ ID NO: 45638 - DNA, 22 bp, synthetic construct
  misc_feature 1..22: note = chemically synthesized
  source 1..22: mol_type = other DNA
tcataagccaaaaaagctagag

SEQ ID NO: 45639 - DNA, 22 bp, synthetic construct
  misc_feature 1..22: note = chemically synthesized
  source 1..22: mol_type = other DNA
cataagccaaaaaagctagagg

SEQ ID NO: 45640 - DNA, 22 bp, synthetic construct
  misc_feature 1..22: note = chemically synthesized
  source 1..22: mol_type = other DNA
ataagccaaaaaagctagagga

SEQ ID NO: 45641 - DNA, 22 bp, synthetic construct
  misc_feature 1..22: note = chemically synthesized
  source 1..22: mol_type = other DNA
gaggatcggagagaaaagaagg

SEQ ID NO: 45642 - DNA, 22 bp, synthetic construct
  misc_feature 1..22: note = chemically synthesized
  source 1..22: mol_type = other DNA
agaaacggcttcaagggtgtcc

SEQ ID NO: 45643 - DNA, 22 bp, synthetic construct
  misc_feature 1..22: note = chemically synthesized
  source 1..22: mol_type = other DNA
caagggtgtcctttggcacccc

SEQ ID NO: 45644 - DNA, 22 bp, synthetic construct
  misc_feature 1..22: note = chemically synthesized
  source 1..22: mol_type = other DNA
aagggtgtcctttggcacccca

SEQ ID NO: 45645 - DNA, 22 bp, synthetic construct
  misc_feature 1..22: note = chemically synthesized
  source 1..22: mol_type = other DNA
tggcaccccattcttccagatt

SEQ ID NO: 45646 - DNA, 22 bp, synthetic construct
  misc_feature 1..22: note = chemically synthesized
  source 1..22: mol_type = other DNA
ggcaccccattcttccagattg

SEQ ID NO: 45647 - DNA, 22 bp, synthetic construct
  misc_feature 1..22: note = chemically synthesized
  source 1..22: mol_type = other DNA
gcaccccattcttccagattgt

SEQ ID NO: 45648 - DNA, 22 bp, synthetic construct
  misc_feature 1..22: note = chemically synthesized
  source 1..22: mol_type = other DNA
ttccagattgttccaaatgcct

SEQ ID NO: 45649 - DNA, 22 bp, synthetic construct
  misc_feature 1..22: note = chemically synthesized
  source 1..22: mol_type = other DNA
ccagattgttccaaatgcctgc

SEQ ID NO: 45650 - DNA, 22 bp, synthetic construct
  misc_feature 1..22: note = chemically synthesized
  source 1..22: mol_type = other DNA
cagattgttccaaatgcctgct

SEQ ID NO: 45651 - DNA, 22 bp, synthetic construct
  misc_feature 1..22: note = chemically synthesized
  source 1..22: mol_type = other DNA
ttccaaatgcctgctgcagtaa

SEQ ID NO: 45652 - DNA, 22 bp, synthetic construct
  misc_feature 1..22: note = chemically synthesized
  source 1..22: mol_type = other DNA
caaatgcctgctgcagtaataa

SEQ ID NO: 45653 - DNA, 22 bp, synthetic construct
  misc_feature 1..22: note = chemically synthesized
  source 1..22: mol_type = other DNA
ctgcagtaataacagccccaaa

SEQ ID NO: 45654 - DNA, 22 bp, synthetic construct
  misc_feature 1..22: note = chemically synthesized
  source 1..22: mol_type = other DNA
cagtaataacagccccaaaaga

SEQ ID NO: 45655 - DNA, 22 bp, synthetic construct
  misc_feature 1..22: note = chemically synthesized
  source 1..22: mol_type = other DNA
tgtcaggacttgtaggtgaaat

SEQ ID NO: 45656 - DNA, 22 bp, synthetic construct
  misc_feature 1..22: note = chemically synthesized
  source 1..22: mol_type = other DNA
gtcaggacttgtaggtgaaatg

SEQ ID NO: 45657 - DNA, 22 bp, synthetic construct
  misc_feature 1..22: note = chemically synthesized
  source 1..22: mol_type = other DNA
tcaggacttgtaggtgaaatgt

SEQ ID NO: 45658 - DNA, 22 bp, synthetic construct
  misc_feature 1..22: note = chemically synthesized
  source 1..22: mol_type = other DNA
gtaggtgaaatgtgttggagca

SEQ ID NO: 45659 - DNA, 22 bp, synthetic construct
  misc_feature 1..22: note = chemically synthesized
  source 1..22: mol_type = other DNA
taggtgaaatgtgttggagcag

SEQ ID NO: 45660 - DNA, 22 bp, synthetic construct
  misc_feature 1..22: note = chemically synthesized
  source 1..22: mol_type = other DNA
gagcagctgtcagcttggggaa

SEQ ID NO: 45661 - DNA, 22 bp, synthetic construct
  misc_feature 1..22: note = chemically synthesized
  source 1..22: mol_type = other DNA
tcagcttggggaaaatcactca

SEQ ID NO: 45662 - DNA, 22 bp, synthetic construct
  misc_feature 1..22: note = chemically synthesized
  source 1..22: mol_type = other DNA
ggggaaaatcactcatcaggta

SEQ ID NO: 45663 - DNA, 22 bp, synthetic construct
  misc_feature 1..22: note = chemically synthesized
  source 1..22: mol_type = other DNA
gggaaaatcactcatcaggtag

SEQ ID NO: 45664 - DNA, 22 bp, synthetic construct
  misc_feature 1..22: note = chemically synthesized
  source 1..22: mol_type = other DNA
atcaggtagtcagccgagtgag

SEQ ID NO: 45665 - DNA, 22 bp, synthetic construct
  misc_feature 1..22: note = chemically synthesized
  source 1..22: mol_type = other DNA
ccttcagctggacaaacactgc

SEQ ID NO: 45666 - DNA, 22 bp, synthetic construct
  misc_feature 1..22: note = chemically synthesized
  source 1..22: mol_type = other DNA
cagctggacaaacactgcatcc

SEQ ID NO: 45667 - DNA, 22 bp, synthetic construct
  misc_feature 1..22: note = chemically synthesized
  source 1..22: mol_type = other DNA
agctggacaaacactgcatcca

SEQ ID NO: 45668 - DNA, 22 bp, synthetic construct
  misc_feature 1..22: note = chemically synthesized
  source 1..22: mol_type = other DNA
gacaaacactgcatccacacag

SEQ ID NO: 45669 - DNA, 22 bp, synthetic construct
  misc_feature 1..22: note = chemically synthesized
  source 1..22: mol_type = other DNA
catccacacagggaacaagcgg

SEQ ID NO: 45670 - DNA, 22 bp, synthetic construct
  misc_feature 1..22: note = chemically synthesized
  source 1..22: mol_type = other DNA
tcctgtccttcccttaggggcc

SEQ ID NO: 45671 - DNA, 22 bp, synthetic construct
  misc_feature 1..22: note = chemically synthesized
  source 1..22: mol_type = other DNA
cctgtccttcccttaggggcca

SEQ ID NO: 45672 - DNA, 22 bp, synthetic construct
  misc_feature 1..22: note = chemically synthesized
  source 1..22: mol_type = other DNA
ctgtccttcccttaggggccaa

SEQ ID NO: 45673 - DNA, 22 bp, synthetic construct
  misc_feature 1..22: note = chemically synthesized
  source 1..22: mol_type = other DNA
tccttcccttaggggccaaacc

SEQ ID NO: 45674 - DNA, 22 bp, synthetic construct
  misc_feature 1..22: note = chemically synthesized
  source 1..22: mol_type = other DNA
cccttaggggccaaaccagccc

SEQ ID NO: 45675 - DNA, 22 bp, synthetic construct
  misc_feature 1..22: note = chemically synthesized
  source 1..22: mol_type = other DNA
ccttaggggccaaaccagccct

SEQ ID NO: 45676 - DNA, 22 bp, synthetic construct
  misc_feature 1..22: note = chemically synthesized
  source 1..22: mol_type = other DNA
aggggccaaaccagccctcttt

SEQ ID NO: 45677 - DNA, 22 bp, synthetic construct
  misc_feature 1..22: note = chemically synthesized
  source 1..22: mol_type = other DNA
ggggccaaaccagccctctttt

SEQ ID NO: 45678 - DNA, 22 bp, synthetic construct
  misc_feature 1..22: note = chemically synthesized
  source 1..22: mol_type = other DNA
ttttaccttcttgtccaaccca

SEQ ID NO: 45679 - DNA, 22 bp, synthetic construct
  misc_feature 1..22: note = chemically synthesized
  source 1..22: mol_type = other DNA
ttaccttcttgtccaacccagt

SEQ ID NO: 45680 - DNA, 22 bp, synthetic construct
  misc_feature 1..22: note = chemically synthesized
  source 1..22: mol_type = other DNA
taccttcttgtccaacccagtg

SEQ ID NO: 45681 - DNA, 22 bp, synthetic construct
  misc_feature 1..22: note = chemically synthesized
  source 1..22: mol_type = other DNA
accttcttgtccaacccagtgg

SEQ ID NO: 45682 - DNA, 22 bp, synthetic construct
  misc_feature 1..22: note = chemically synthesized
  source 1..22: mol_type = other DNA
ccttcttgtccaacccagtggg

SEQ ID NO: 45683 - DNA, 22 bp, synthetic construct
  misc_feature 1..22: note = chemically synthesized
  source 1..22: mol_type = other DNA
cttgtccaacccagtgggcctc

SEQ ID NO: 45684 - DNA, 22 bp, synthetic construct
  misc_feature 1..22: note = chemically synthesized
  source 1..22: mol_type = other DNA
ttgtccaacccagtgggcctct

SEQ ID NO: 45685 - DNA, 22 bp, synthetic construct
  misc_feature 1..22: note = chemically synthesized
  source 1..22: mol_type = other DNA
gtccaacccagtgggcctctct

SEQ ID NO: 45686 - DNA, 22 bp, synthetic construct
  misc_feature 1..22: note = chemically synthesized
  source 1..22: mol_type = other DNA
tccaacccagtgggcctctctc

SEQ ID NO: 45687 - DNA, 22 bp, synthetic construct
  misc_feature 1..22: note = chemically synthesized
  source 1..22: mol_type = other DNA
tctccctcaaatgcatacctcc

SEQ ID NO: 45688 - DNA, 22 bp, synthetic construct
  misc_feature 1..22: note = chemically synthesized
  source 1..22: mol_type = other DNA
tccctcaaatgcatacctcctt

SEQ ID NO: 45689 - DNA, 22 bp, synthetic construct
  misc_feature 1..22: note = chemically synthesized
  source 1..22: mol_type = other DNA
cctcaaatgcatacctccttct

SEQ ID NO: 45690 - DNA, 22 bp, synthetic construct
  misc_feature 1..22: note = chemically synthesized
  source 1..22: mol_type = other DNA
aaatgcatacctccttctcttt

SEQ ID NO: 45691 - DNA, 22 bp, synthetic construct
  misc_feature 1..22: note = chemically synthesized
  source 1..22: mol_type = other DNA
cttctctttcctccagctccct

SEQ ID NO: 45692 - DNA, 22 bp, synthetic construct
  misc_feature 1..22: note = chemically synthesized
  source 1..22: mol_type = other DNA
ctctttcctccagctccctaag

SEQ ID NO: 45693 - DNA, 22 bp, synthetic construct
  misc_feature 1..22: note = chemically synthesized
  source 1..22: mol_type = other DNA
tctttcctccagctccctaagc

SEQ ID NO: 45694 - DNA, 22 bp, synthetic construct
  misc_feature 1..22: note = chemically synthesized
  source 1..22: mol_type = other DNA
tttcctccagctccctaagctg

SEQ ID NO: 45695 - DNA, 22 bp, synthetic construct
  misc_feature 1..22: note = chemically synthesized
  source 1..22: mol_type = other DNA
tcctccagctccctaagctgtt

SEQ ID NO: 45696 - DNA, 22 bp, synthetic construct
  misc_feature 1..22: note = chemically synthesized
  source 1..22: mol_type = other DNA
cctccagctccctaagctgttg

SEQ ID NO: 45697 - DNA, 22 bp, synthetic construct
  misc_feature 1..22: note = chemically synthesized
  source 1..22: mol_type = other DNA
ctccagctccctaagctgttgt

SEQ ID NO: 45698 - DNA, 22 bp, synthetic construct
  misc_feature 1..22: note = chemically synthesized
  source 1..22: mol_type = other DNA
cagctccctaagctgttgttca

SEQ ID NO: 45699 - DNA, 22 bp, synthetic construct
  misc_feature 1..22: note = chemically synthesized
  source 1..22: mol_type = other DNA
cctaagctgttgttcagggcac

SEQ ID NO: 45700 - DNA, 22 bp, synthetic construct
  misc_feature 1..22: note = chemically synthesized
  source 1..22: mol_type = other DNA
agctgttgttcagggcacagac

SEQ ID NO: 45701 - DNA, 22 bp, synthetic construct
  misc_feature 1..22: note = chemically synthesized
  source 1..22: mol_type = other DNA
ttgttcagggcacagacagctc

SEQ ID NO: 45702 - DNA, 22 bp, synthetic construct
  misc_feature 1..22: note = chemically synthesized
  source 1..22: mol_type = other DNA
ttcagggcacagacagctcttc

SEQ ID NO: 45703 - DNA, 22 bp, synthetic construct
  misc_feature 1..22: note = chemically synthesized
  source 1..22: mol_type = other DNA
agggcacagacagctcttcagg

SEQ ID NO: 45704 - DNA, 22 bp, synthetic construct
  misc_feature 1..22: note = chemically synthesized
  source 1..22: mol_type = other DNA
ttcaggctgccagagcaagaga

SEQ ID NO: 45705 - DNA, 22 bp, synthetic construct
  misc_feature 1..22: note = chemically synthesized
  source 1..22: mol_type = other DNA
caggctgccagagcaagagagt

SEQ ID NO: 45706 - DNA, 22 bp, synthetic construct
  misc_feature 1..22: note = chemically synthesized
  source 1..22: mol_type = other DNA
aggctgccagagcaagagagtt

SEQ ID NO: 45707 - DNA, 22 bp, synthetic construct
  misc_feature 1..22: note = chemically synthesized
  source 1..22: mol_type = other DNA
ccagagcaagagagttaggaaa

SEQ ID NO: 45708 - DNA, 22 bp, synthetic construct
  misc_feature 1..22: note = chemically synthesized
  source 1..22: mol_type = other DNA
ggaaataacgacccctccacat

SEQ ID NO: 45709 - DNA, 22 bp, synthetic construct
  misc_feature 1..22: note = chemically synthesized
  source 1..22: mol_type = other DNA
cacatgcattcccacctcccgg

SEQ ID NO: 45710 - DNA, 22 bp, synthetic construct
  misc_feature 1..22: note = chemically synthesized
  source 1..22: mol_type = other DNA
ccacctcccggaagcaggggac

SEQ ID NO: 45711 - DNA, 22 bp, synthetic construct
  misc_feature 1..22: note = chemically synthesized
  source 1..22: mol_type = other DNA
ccggaagcaggggacacagctg

SEQ ID NO: 45712 - DNA, 22 bp, synthetic construct
  misc_feature 1..22: note = chemically synthesized
  source 1..22: mol_type = other DNA
gccactctgtgacggagggtgg

SEQ ID NO: 45713 - DNA, 22 bp, synthetic construct
  misc_feature 1..22: note = chemically synthesized
  source 1..22: mol_type = other DNA
tgtgacggagggtgggtaacct

SEQ ID NO: 45714 - DNA, 22 bp, synthetic construct
  misc_feature 1..22: note = chemically synthesized
  source 1..22: mol_type = other DNA
tgacggagggtgggtaacctct

SEQ ID NO: 45715 - DNA, 22 bp, synthetic construct
  misc_feature 1..22: note = chemically synthesized
  source 1..22: mol_type = other DNA
tctacctgggtctatcatttta

SEQ ID NO: 45716 - DNA, 22 bp, synthetic construct
  misc_feature 1..22: note = chemically synthesized
  source 1..22: mol_type = other DNA
tacctgggtctatcattttaga

SEQ ID NO: 45717 - DNA, 22 bp, synthetic construct
  misc_feature 1..22: note = chemically synthesized
  source 1..22: mol_type = other DNA
cctgggtctatcattttagaat

SEQ ID NO: 45718 - DNA, 22 bp, synthetic construct
  misc_feature 1..22: note = chemically synthesized
  source 1..22: mol_type = other DNA
ggtctatcattttagaataaat

SEQ ID NO: 45719 - DNA, 22 bp, synthetic construct
  misc_feature 1..22: note = chemically synthesized
  source 1..22: mol_type = other DNA
tcattttagaataaatcattcg

SEQ ID NO: 45720 - DNA, 22 bp, synthetic construct
  misc_feature 1..22: note = chemically synthesized
  source 1..22: mol_type = other DNA
tagaataaatcattcgtggctg

SEQ ID NO: 45721 - DNA, 22 bp, synthetic construct
  misc_feature 1..22: note = chemically synthesized
  source 1..22: mol_type = other DNA
agaataaatcattcgtggctga

SEQ ID NO: 45722 - DNA, 22 bp, synthetic construct
  misc_feature 1..22: note = chemically synthesized
  source 1..22: mol_type = other DNA
gaataaatcattcgtggctgac

SEQ ID NO: 45723 - DNA, 22 bp, synthetic construct
  misc_feature 1..22: note = chemically synthesized
  source 1..22: mol_type = other DNA
gtggctgactcttaaatgggaa

SEQ ID NO: 45724 - DNA, 22 bp, synthetic construct
  misc_feature 1..22: note = chemically synthesized
  source 1..22: mol_type = other DNA
actcttaaatgggaagggccaa

SEQ ID NO: 45725 - DNA, 22 bp, synthetic construct
  misc_feature 1..22: note = chemically synthesized
  source 1..22: mol_type = other DNA
ttaaatgggaagggccaattac

SEQ ID NO: 45726 - DNA, 22 bp, synthetic construct
  misc_feature 1..22: note = chemically synthesized
  source 1..22: mol_type = other DNA
aaatgggaagggccaattacag

SEQ ID NO: 45727 - DNA, 22 bp, synthetic construct
  misc_feature 1..22: note = chemically synthesized
  source 1..22: mol_type = other DNA
aatgggaagggccaattacaga

SEQ ID NO: 45728 - DNA, 22 bp, synthetic construct
  misc_feature 1..22: note = chemically synthesized
  source 1..22: mol_type = other DNA
cagatatctctgagaacaactc

SEQ ID NO: 45729 - DNA, 22 bp, synthetic construct
  misc_feature 1..22: note = chemically synthesized
  source 1..22: mol_type = other DNA
tgagaacaactctacctgaggg

SEQ ID NO: 45730 - DNA, 22 bp, synthetic construct
  misc_feature 1..22: note = chemically synthesized
  source 1..22: mol_type = other DNA
agaacaactctacctgagggag

SEQ ID NO: 45731 - DNA, 22 bp, synthetic construct
  misc_feature 1..22: note = chemically synthesized
  source 1..22: mol_type = other DNA
tacctgagggagggggaaatcc

SEQ ID NO: 45732 - DNA, 22 bp, synthetic construct
  misc_feature 1..22: note = chemically synthesized
  source 1..22: mol_type = other DNA
cctgagggagggggaaatccct

SEQ ID NO: 45733 - DNA, 22 bp, synthetic construct
  misc_feature 1..22: note = chemically synthesized
  source 1..22: mol_type = other DNA
agggagggggaaatccctccca

SEQ ID NO: 45734 - DNA, 22 bp, synthetic construct
  misc_feature 1..22: note = chemically synthesized
  source 1..22: mol_type = other DNA
ccaaaacaacggtgggcagaaa

SEQ ID NO: 45735 - DNA, 22 bp, synthetic construct
  misc_feature 1..22: note = chemically synthesized
  source 1..22: mol_type = other DNA
catcccgtaaatacccagaagc

SEQ ID NO: 45736 - DNA, 22 bp, synthetic construct
  misc_feature 1..22: note = chemically synthesized
  source 1..22: mol_type = other DNA
gttcgtctgccagatgctgtgg

SEQ ID NO: 45737 - DNA, 22 bp, synthetic construct
  misc_feature 1..22: note = chemically synthesized
  source 1..22: mol_type = other DNA
gtctgccagatgctgtggagat

SEQ ID NO: 45738 - DNA, 22 bp, synthetic construct
  misc_feature 1..22: note = chemically synthesized
  source 1..22: mol_type = other DNA
ccagatgctgtggagatggcat

SEQ ID NO: 45739 - DNA, 22 bp, synthetic construct
  misc_feature 1..22: note = chemically synthesized
  source 1..22: mol_type = other DNA
tggagatggcatggtggcattt

SEQ ID NO: 45740 - DNA, 22 bp, synthetic construct
  misc_feature 1..22: note = chemically synthesized
  source 1..22: mol_type = other DNA
ggtaaataacccaaatagggct

SEQ ID NO: 45741 - DNA, 22 bp, synthetic construct
  misc_feature 1..22: note = chemically synthesized
  source 1..22: mol_type = other DNA
gtaaataacccaaatagggctt

SEQ ID NO: 45742 - DNA, 22 bp, synthetic construct
  misc_feature 1..22: note = chemically synthesized
  source 1..22: mol_type = other DNA
tgcagggtatgggacaccacac

SEQ ID NO: 45743 - DNA, 22 bp, synthetic construct
  misc_feature 1..22: note = chemically synthesized
  source 1..22: mol_type = other DNA
gcagggtatgggacaccacact

SEQ ID NO: 45744 - DNA, 22 bp, synthetic construct
  misc_feature 1..22: note = chemically synthesized
  source 1..22: mol_type = other DNA
cagggtatgggacaccacacta

SEQ ID NO: 45745 - DNA, 22 bp, synthetic construct
  misc_feature 1..22: note = chemically synthesized
  source 1..22: mol_type = other DNA
ggctttgcagcccgggtgaaac

SEQ ID NO: 45746 - DNA, 22 bp, synthetic construct
  misc_feature 1..22: note = chemically synthesized
  source 1..22: mol_type = other DNA
tgcagcccgggtgaaaccagat

SEQ ID NO: 45747 - DNA, 22 bp, synthetic construct
  misc_feature 1..22: note = chemically synthesized
  source 1..22: mol_type = other DNA
gcagcccgggtgaaaccagatg

SEQ ID NO: 45748 - DNA, 22 bp, synthetic construct
  misc_feature 1..22: note = chemically synthesized
  source 1..22: mol_type = other DNA
cagcccgggtgaaaccagatgg

SEQ ID NO: 45749 - DNA, 22 bp, synthetic construct
  misc_feature 1..22: note = chemically synthesized
  source 1..22: mol_type = other DNA
ataggcaagggatgttagcaca

SEQ ID NO: 45750 - DNA, 22 bp, synthetic construct
  misc_feature 1..22: note = chemically synthesized
  source 1..22: mol_type = other DNA
gcacacctaaaaatcccctttc

SEQ ID NO: 45751 - DNA, 22 bp, synthetic construct
  misc_feature 1..22: note = chemically synthesized
  source 1..22: mol_type = other DNA
aaaatcccctttcccagccatc

SEQ ID NO: 45752 - DNA, 22 bp, synthetic construct
  misc_feature 1..22: note = chemically synthesized
  source 1..22: mol_type = other DNA
tcccagccatcctttgacaccc

SEQ ID NO: 45753 - DNA, 22 bp, synthetic construct
  misc_feature 1..22: note = chemically synthesized
  source 1..22: mol_type = other DNA
cccagccatcctttgacaccca

SEQ ID NO: 45754 - DNA, 22 bp, synthetic construct
  misc_feature 1..22: note = chemically synthesized
  source 1..22: mol_type = other DNA
ccagccatcctttgacacccac

SEQ ID NO: 45755 - DNA, 22 bp, synthetic construct
  misc_feature 1..22: note = chemically synthesized
  source 1..22: mol_type = other DNA
tgacacccaccatagaaatcac

SEQ ID NO: 45756 - DNA, 22 bp, synthetic construct
  misc_feature 1..22: note = chemically synthesized
  source 1..22: mol_type = other DNA
gacacccaccatagaaatcaca

SEQ ID NO: 45757 - DNA, 22 bp, synthetic construct
  misc_feature 1..22: note = chemically synthesized
  source 1..22: mol_type = other DNA
acacccaccatagaaatcacag

SEQ ID NO: 45758 - DNA, 22 bp, synthetic construct
  misc_feature 1..22: note = chemically synthesized
  source 1..22: mol_type = other DNA
ggcccaaaatagcctgtcctgt

SEQ ID NO: 45759 - DNA, 22 bp, synthetic construct
  misc_feature 1..22: note = chemically synthesized
  source 1..22: mol_type = other DNA
tcctgttagccaaatgccagca

SEQ ID NO: 45760 - DNA, 22 bp, synthetic construct
  misc_feature 1..22: note = chemically synthesized
  source 1..22: mol_type = other DNA
ttagccaaatgccagcactccc

SEQ ID NO: 45761 - DNA, 22 bp, synthetic construct
  misc_feature 1..22: note = chemically synthesized
  source 1..22: mol_type = other DNA
gccaaatgccagcactcccact

SEQ ID NO: 45762 - DNA, 22 bp, synthetic construct
  misc_feature 1..22: note = chemically synthesized
  source 1..22: mol_type = other DNA
ccactttctctgagggcatgga

SEQ ID NO: 45763 - DNA, 22 bp, synthetic construct
  misc_feature 1..22: note = chemically synthesized
  source 1..22: mol_type = other DNA
tctctgagggcatggaggggag

SEQ ID NO: 45764 - DNA, 22 bp, synthetic construct
  misc_feature 1..22: note = chemically synthesized
  source 1..22: mol_type = other DNA
ctctgagggcatggaggggagg

SEQ ID NO: 45765 - DNA, 22 bp, synthetic construct
  misc_feature 1..22: note = chemically synthesized
  source 1..22: mol_type = other DNA
tctgagggcatggaggggaggc

SEQ ID NO: 45766 - DNA, 22 bp, synthetic construct
  misc_feature 1..22: note = chemically synthesized
  source 1..22: mol_type = other DNA
tgagggcatggaggggaggcag

SEQ ID NO: 45767 - DNA, 22 bp, synthetic construct
  misc_feature 1..22: note = chemically synthesized
  source 1..22: mol_type = other DNA
agggcatggaggggaggcagca

SEQ ID NO: 45768 - DNA, 22 bp, synthetic construct
  misc_feature 1..22: note = chemically synthesized
  source 1..22: mol_type = other DNA
gggctctggcctcctcatttaa

SEQ ID NO: 45769 - DNA, 22 bp, synthetic construct
  misc_feature 1..22: note = chemically synthesized
  source 1..22: mol_type = other DNA
tggcctcctcatttaattctct

SEQ ID NO: 45770 - DNA, 22 bp, synthetic construct
  misc_feature 1..22: note = chemically synthesized
  source 1..22: mol_type = other DNA
gcctcctcatttaattctctct

SEQ ID NO: 45771 - DNA, 22 bp, synthetic construct
  misc_feature 1..22: note = chemically synthesized
  source 1..22: mol_type = other DNA
ctcatttaattctctctgcatc

SEQ ID NO: 45772 - DNA, 22 bp, synthetic construct
  misc_feature 1..22: note = chemically synthesized
  source 1..22: mol_type = other DNA
atttaattctctctgcatcaga

SEQ ID NO: 45773 - DNA, 22 bp, synthetic construct
  misc_feature 1..22: note = chemically synthesized
  source 1..22: mol_type = other DNA
aattctctctgcatcagaggaa

SEQ ID NO: 45774 - DNA, 22 bp, synthetic construct
  misc_feature 1..22: note = chemically synthesized
  source 1..22: mol_type = other DNA
attctctctgcatcagaggaag

SEQ ID NO: 45775 - DNA, 22 bp, synthetic construct
  misc_feature 1..22: note = chemically synthesized
  source 1..22: mol_type = other DNA
tctctgcatcagaggaagagtc

SEQ ID NO: 45776 - DNA, 22 bp, synthetic construct
  misc_feature 1..22: note = chemically synthesized
  source 1..22: mol_type = other DNA
tctgcatcagaggaagagtcac

SEQ ID NO: 45777 - DNA, 22 bp, synthetic construct
  misc_feature 1..22: note = chemically synthesized
  source 1..22: mol_type = other DNA
tgcatcagaggaagagtcacct

SEQ ID NO: 45778 - DNA, 22 bp, synthetic construct
  misc_feature 1..22: note = chemically synthesized
  source 1..22: mol_type = other DNA
catcagaggaagagtcaccttc

SEQ ID NO: 45779 - DNA, 22 bp, synthetic construct
  misc_feature 1..22: note = chemically synthesized
  source 1..22: mol_type = other DNA
cacaggccagctgtggtctgac

SEQ ID NO: 45780 - DNA, 22 bp, synthetic construct
  misc_feature 1..22: note = chemically synthesized
  source 1..22: mol_type = other DNA
acaggccagctgtggtctgact

SEQ ID NO: 45781 - DNA, 22 bp, synthetic construct
  misc_feature 1..22: note = chemically synthesized
  source 1..22: mol_type = other DNA
tggtctgacttgccacatctaa

SEQ ID NO: 45782 - DNA, 22 bp, synthetic construct
  misc_feature 1..22: note = chemically synthesized
  source 1..22: mol_type = other DNA
acttgccacatctaatgccacc

SEQ ID NO: 45783 - DNA, 22 bp, synthetic construct
  misc_feature 1..22: note = chemically synthesized
  source 1..22: mol_type = other DNA
gccacatctaatgccaccaggc

SEQ ID NO: 45784 - DNA, 22 bp, synthetic construct
  misc_feature 1..22: note = chemically synthesized
  source 1..22: mol_type = other DNA
ccacatctaatgccaccaggcc

SEQ ID NO: 45785 - DNA, 22 bp, synthetic construct
  misc_feature 1..22: note = chemically synthesized
  source 1..22: mol_type = other DNA
atgccaccaggccctgccagcg

SEQ ID NO: 45786 - DNA, 22 bp, synthetic construct
  misc_feature 1..22: note = chemically synthesized
  source 1..22: mol_type = other DNA
ccagcggcccccattctggtct

SEQ ID NO: 45787 - DNA, 22 bp, synthetic construct
  misc_feature 1..22: note = chemically synthesized
  source 1..22: mol_type = other DNA
tggtctgtcaaacccctggaaa

SEQ ID NO: 45788 - DNA, 22 bp, synthetic construct
  misc_feature 1..22: note = chemically synthesized
  source 1..22: mol_type = other DNA
gtctgtcaaacccctggaaaac

SEQ ID NO: 45789 - DNA, 22 bp, synthetic construct
  misc_feature 1..22: note = chemically synthesized
  source 1..22: mol_type = other DNA
tcaaacccctggaaaacttcag

SEQ ID NO: 45790 - DNA, 22 bp, synthetic construct
  misc_feature 1..22: note = chemically synthesized
  source 1..22: mol_type = other DNA
gaaaacttcagacagtgttcct

SEQ ID NO: 45791 - DNA, 22 bp, synthetic construct
  misc_feature 1..22: note = chemically synthesized
  source 1..22: mol_type = other DNA
cagacagtgttcctcagatcca

SEQ ID NO: 45792 - DNA, 22 bp, synthetic construct
  misc_feature 1..22: note = chemically synthesized
  source 1..22: mol_type = other DNA
agacagtgttcctcagatccag

SEQ ID NO: 45793 - DNA, 22 bp, synthetic construct
  misc_feature 1..22: note = chemically synthesized
  source 1..22: mol_type = other DNA
ctcagatccaggacagagctgg

SEQ ID NO: 45794 - DNA, 22 bp, synthetic construct
  misc_feature 1..22: note = chemically synthesized
  source 1..22: mol_type = other DNA
agatccaggacagagctggctc

SEQ ID NO: 45795 - DNA, 22 bp, synthetic construct
  misc_feature 1..22: note = chemically synthesized
  source 1..22: mol_type = other DNA
gctcaggacgccacatgggtca

SEQ ID NO: 45796 - DNA, 22 bp, synthetic construct
  misc_feature 1..22: note = chemically synthesized
  source 1..22: mol_type = other DNA
aggacgccacatgggtcaaccc

SEQ ID NO: 45797 - DNA, 22 bp, synthetic construct
  misc_feature 1..22: note = chemically synthesized
  source 1..22: mol_type = other DNA
agaccctccaaggtgacaaaga

SEQ ID NO: 45798 - DNA, 22 bp, synthetic construct
  misc_feature 1..22: note = chemically synthesized
  source 1..22: mol_type = other DNA
caaggtgacaaagacctcacta

SEQ ID NO: 45799 - DNA, 22 bp, synthetic construct
  misc_feature 1..22: note = chemically synthesized
  source 1..22: mol_type = other DNA
actagactgtatctcatttttc

SEQ ID NO: 45800 - DNA, 22 bp, synthetic construct
  misc_feature 1..22: note = chemically synthesized
  source 1..22: mol_type = other DNA
gactgtatctcatttttccagc

SEQ ID NO: 45801 - DNA, 22 bp, synthetic construct
  misc_feature 1..22: note = chemically synthesized
  source 1..22: mol_type = other DNA
tatctcatttttccagcctcag

SEQ ID NO: 45802 - DNA, 22 bp, synthetic construct
  misc_feature 1..22: note = chemically synthesized
  source 1..22: mol_type = other DNA
atttttccagcctcagtgagcc

SEQ ID NO: 45803 - DNA, 22 bp, synthetic construct
  misc_feature 1..22: note = chemically synthesized
  source 1..22: mol_type = other DNA
ttccagcctcagtgagccggcc

SEQ ID NO: 45804 - DNA, 22 bp, synthetic construct
  misc_feature 1..22: note = chemically synthesized
  source 1..22: mol_type = other DNA
tccagcctcagtgagccggccc

SEQ ID NO: 45805 - DNA, 22 bp, synthetic construct
  misc_feature 1..22: note = chemically synthesized
  source 1..22: mol_type = other DNA
ccagcctcagtgagccggcccc

SEQ ID NO: 45806 - DNA, 22 bp, synthetic construct
  misc_feature 1..22: note = chemically synthesized
  source 1..22: mol_type = other DNA
cagcctcagtgagccggcccca

SEQ ID NO: 45807 - DNA, 22 bp, synthetic construct
  misc_feature 1..22: note = chemically synthesized
  source 1..22: mol_type = other DNA
agtgagccggccccagctggca

SEQ ID NO: 45808 - DNA, 22 bp, synthetic construct
  misc_feature 1..22: note = chemically synthesized
  source 1..22: mol_type = other DNA
gcatgctgagtccaggaaagcc

SEQ ID NO: 45809 - DNA, 22 bp, synthetic construct
  misc_feature 1..22: note = chemically synthesized
  source 1..22: mol_type = other DNA
agtccaggaaagccctggctat

SEQ ID NO: 45810 - DNA, 22 bp, synthetic construct
  misc_feature 1..22: note = chemically synthesized
  source 1..22: mol_type = other DNA
gctatacaaaacacagcaccca

SEQ ID NO: 45811 - DNA, 22 bp, synthetic construct
  misc_feature 1..22: note = chemically synthesized
  source 1..22: mol_type = other DNA
tacaaaacacagcacccacgtg

SEQ ID NO: 45812 - DNA, 22 bp, synthetic construct
  misc_feature 1..22: note = chemically synthesized
  source 1..22: mol_type = other DNA
tgtgcatggctgcttagagggc

SEQ ID NO: 45813 - DNA, 22 bp, synthetic construct
  misc_feature 1..22: note = chemically synthesized
  source 1..22: mol_type = other DNA
gtgcatggctgcttagagggct

SEQ ID NO: 45814 - DNA, 22 bp, synthetic construct
  misc_feature 1..22: note = chemically synthesized
  source 1..22: mol_type = other DNA
tgcatggctgcttagagggcta

SEQ ID NO: 45815 - DNA, 22 bp, synthetic construct
  misc_feature 1..22: note = chemically synthesized
  source 1..22: mol_type = other DNA
cttagagggctaatgataaagg

SEQ ID NO: 45816 - DNA, 22 bp, synthetic construct
  misc_feature 1..22: note = chemically synthesized
  source 1..22: mol_type = other DNA
agagggctaatgataaaggcag

SEQ ID NO: 45817 - DNA, 22 bp, synthetic construct
  misc_feature 1..22: note = chemically synthesized
  source 1..22: mol_type = other DNA
gagggctaatgataaaggcagc

SEQ ID NO: 45818 - DNA, 22 bp, synthetic construct
  misc_feature 1..22: note = chemically synthesized
  source 1..22: mol_type = other DNA
atgataaaggcagctcactaag

SEQ ID NO: 45819 - DNA, 22 bp, synthetic construct
  misc_feature 1..22: note = chemically synthesized
  source 1..22: mol_type = other DNA
actaagaaaacgaccgtgccca

SEQ ID NO: 45820 - DNA, 22 bp, synthetic construct
  misc_feature 1..22: note = chemically synthesized
  source 1..22: mol_type = other DNA
agaaaacgaccgtgcccagcag

SEQ ID NO: 45821 - DNA, 22 bp, synthetic construct
  misc_feature 1..22: note = chemically synthesized
  source 1..22: mol_type = other DNA
ctaaatggcgaaggcagcattt

SEQ ID NO: 45822 - DNA, 22 bp, synthetic construct
  misc_feature 1..22: note = chemically synthesized
  source 1..22: mol_type = other DNA
aatggcgaaggcagcatttacc

SEQ ID NO: 45823 - DNA, 22 bp, synthetic construct
  misc_feature 1..22: note = chemically synthesized
  source 1..22: mol_type = other DNA
accactgatgacagccccccgc

SEQ ID NO: 45824 - DNA, 22 bp, synthetic construct
  misc_feature 1..22: note = chemically synthesized
  source 1..22: mol_type = other DNA
ccactgatgacagccccccgca

SEQ ID NO: 45825 - DNA, 22 bp, synthetic construct
  misc_feature 1..22: note = chemically synthesized
  source 1..22: mol_type = other DNA
atgacagccccccgcatgtttc

SEQ ID NO: 45826 - DNA, 22 bp, synthetic construct
  misc_feature 1..22: note = chemically synthesized
  source 1..22: mol_type = other DNA
cctcctaaacgcctgatatata

SEQ ID NO: 45827 - DNA, 22 bp, synthetic construct
  misc_feature 1..22: note = chemically synthesized
  source 1..22: mol_type = other DNA
ctcctaaacgcctgatatatat

SEQ ID NO: 45828 - DNA, 22 bp, synthetic construct
  misc_feature 1..22: note = chemically synthesized
  source 1..22: mol_type = other DNA
ctaaacgcctgatatatatcca

SEQ ID NO: 45829 - DNA, 22 bp, synthetic construct
  misc_feature 1..22: note = chemically synthesized
  source 1..22: mol_type = other DNA
aacgcctgatatatatccattt

SEQ ID NO: 45830 - DNA, 22 bp, synthetic construct
  misc_feature 1..22: note = chemically synthesized
  source 1..22: mol_type = other DNA
atatatatccatttttctgtca

SEQ ID NO: 45831 - DNA, 22 bp, synthetic construct
  misc_feature 1..22: note = chemically synthesized
  source 1..22: mol_type = other DNA
ttctgtcagcaacctcaaataa

SEQ ID NO: 45832 - DNA, 22 bp, synthetic construct
  misc_feature 1..22: note = chemically synthesized
  source 1..22: mol_type = other DNA
tctgtcagcaacctcaaataat

SEQ ID NO: 45833 - DNA, 22 bp, synthetic construct
  misc_feature 1..22: note = chemically synthesized
  source 1..22: mol_type = other DNA
ctgtcagcaacctcaaataatg

SEQ ID NO: 45834 - DNA, 22 bp, synthetic construct
  misc_feature 1..22: note = chemically synthesized
  source 1..22: mol_type = other DNA
tgtcagcaacctcaaataatgt

SEQ ID NO: 45835 - DNA, 22 bp, synthetic construct
  misc_feature 1..22: note = chemically synthesized
  source 1..22: mol_type = other DNA
tcagcaacctcaaataatgtct

SEQ ID NO: 45836 - DNA, 22 bp, synthetic construct
  misc_feature 1..22: note = chemically synthesized
  source 1..22: mol_type = other DNA
aaataatgtctataatgctgag

SEQ ID NO: 45837 - DNA, 22 bp, synthetic construct
  misc_feature 1..22: note = chemically synthesized
  source 1..22: mol_type = other DNA
taatgctgagatttatacatgg

SEQ ID NO: 45838 - DNA, 22 bp, synthetic construct
  misc_feature 1..22: note = chemically synthesized
  source 1..22: mol_type = other DNA
agatttatacatgggtacttat

SEQ ID NO: 45839 - DNA, 22 bp, synthetic construct
  misc_feature 1..22: note = chemically synthesized
  source 1..22: mol_type = other DNA
atacatgggtacttataaatgt

SEQ ID NO: 45840 - DNA, 22 bp, synthetic construct
  misc_feature 1..22: note = chemically synthesized
  source 1..22: mol_type = other DNA
tacatgggtacttataaatgtg

SEQ ID NO: 45841 - DNA, 22 bp, synthetic construct
  misc_feature 1..22: note = chemically synthesized
  source 1..22: mol_type = other DNA
ataaatgtgatttcattatagc

SEQ ID NO: 45842 - DNA, 22 bp, synthetic construct
  misc_feature 1..22: note = chemically synthesized
  source 1..22: mol_type = other DNA
taaatgtgatttcattatagcc

SEQ ID NO: 45843 - DNA, 22 bp, synthetic construct
  misc_feature 1..22: note = chemically synthesized
  source 1..22: mol_type = other DNA
cattatagcctctgcaaaacta

SEQ ID NO: 45844 - DNA, 22 bp, synthetic construct
  misc_feature 1..22: note = chemically synthesized
  source 1..22: mol_type = other DNA
attatagcctctgcaaaactac

SEQ ID NO: 45845 - DNA, 22 bp, synthetic construct
  misc_feature 1..22: note = chemically synthesized
  source 1..22: mol_type = other DNA
tagcctctgcaaaactaccttt

SEQ ID NO: 45846 - DNA, 22 bp, synthetic construct
  misc_feature 1..22: note = chemically synthesized
  source 1..22: mol_type = other DNA
tgcaaaactacctttccgccta

SEQ ID NO: 45847 - DNA, 22 bp, synthetic construct
  misc_feature 1..22: note = chemically synthesized
  source 1..22: mol_type = other DNA
caaaactacctttccgcctaaa

SEQ ID NO: 45848 - DNA, 22 bp, synthetic construct
  misc_feature 1..22: note = chemically synthesized
  source 1..22: mol_type = other DNA
cctttccgcctaaacattcaat

SEQ ID NO: 45849 - DNA, 22 bp, synthetic construct
  misc_feature 1..22: note = chemically synthesized
  source 1..22: mol_type = other DNA
tccgcctaaacattcaattaat

SEQ ID NO: 45850 - DNA, 22 bp, synthetic construct
  misc_feature 1..22: note = chemically synthesized
  source 1..22: mol_type = other DNA
ccgcctaaacattcaattaatg

SEQ ID NO: 45851 - DNA, 22 bp, synthetic construct
  misc_feature 1..22: note = chemically synthesized
  source 1..22: mol_type = other DNA
cgcctaaacattcaattaatgt

SEQ ID NO: 45852 - DNA, 22 bp, synthetic construct
  misc_feature 1..22: note = chemically synthesized
  source 1..22: mol_type = other DNA
aacattcaattaatgtaattaa

SEQ ID NO: 45853 - DNA, 22 bp, synthetic construct
  misc_feature 1..22: note = chemically synthesized
  source 1..22: mol_type = other DNA
aattaatgtaattaaattgcta

SEQ ID NO: 45854 - DNA, 22 bp, synthetic construct
  misc_feature 1..22: note = chemically synthesized
  source 1..22: mol_type = other DNA
atgtaattaaattgctacctga

SEQ ID NO: 45855 - DNA, 22 bp, synthetic construct
  misc_feature 1..22: note = chemically synthesized
  source 1..22: mol_type = other DNA
aattgctacctgatggcattat

SEQ ID NO: 45856 - DNA, 22 bp, synthetic construct
  misc_feature 1..22: note = chemically synthesized
  source 1..22: mol_type = other DNA
ctacctgatggcattatctaat

SEQ ID NO: 45857 - DNA, 22 bp, synthetic construct
  misc_feature 1..22: note = chemically synthesized
  source 1..22: mol_type = other DNA
cctgatggcattatctaattta

SEQ ID NO: 45858 - DNA, 22 bp, synthetic construct
  misc_feature 1..22: note = chemically synthesized
  source 1..22: mol_type = other DNA
atggcattatctaatttaactt

SEQ ID NO: 45859 - DNA, 22 bp, synthetic construct
  misc_feature 1..22: note = chemically synthesized
  source 1..22: mol_type = other DNA
tctaatttaacttgggatccaa

SEQ ID NO: 45860 - DNA, 22 bp, synthetic construct
  misc_feature 1..22: note = chemically synthesized
  source 1..22: mol_type = other DNA
atttaacttgggatccaaacta

SEQ ID NO: 45861 - DNA, 22 bp, synthetic construct
  misc_feature 1..22: note = chemically synthesized
  source 1..22: mol_type = other DNA
aacttgggatccaaactattga

SEQ ID NO: 45862 - DNA, 22 bp, synthetic construct
  misc_feature 1..22: note = chemically synthesized
  source 1..22: mol_type = other DNA
acttgggatccaaactattgaa

SEQ ID NO: 45863 - DNA, 22 bp, synthetic construct
  misc_feature 1..22: note = chemically synthesized
  source 1..22: mol_type = other DNA
gggatccaaactattgaaaagc

SEQ ID NO: 45864 - DNA, 22 bp, synthetic construct
  misc_feature 1..22: note = chemically synthesized
  source 1..22: mol_type = other DNA
ggatccaaactattgaaaagca

SEQ ID NO: 45865 - DNA, 22 bp, synthetic construct
  misc_feature 1..22: note = chemically synthesized
  source 1..22: mol_type = other DNA
ttgaaaagcatgtgccttttaa

SEQ ID NO: 45866 - DNA, 22 bp, synthetic construct
  misc_feature 1..22: note = chemically synthesized
  source 1..22: mol_type = other DNA
aaaagcatgtgccttttaacac

SEQ ID NO: 45867 - DNA, 22 bp, synthetic construct
  misc_feature 1..22: note = chemically synthesized
  source 1..22: mol_type = other DNA
ttaacaccctgactggtaaggc

SEQ ID NO: 45868 - DNA, 22 bp, synthetic construct
  misc_feature 1..22: note = chemically synthesized
  source 1..22: mol_type = other DNA
taacaccctgactggtaaggca

SEQ ID NO: 45869 - DNA, 22 bp, synthetic construct
  misc_feature 1..22: note = chemically synthesized
  source 1..22: mol_type = other DNA
aacaccctgactggtaaggcat

SEQ ID NO: 45870 - DNA, 22 bp, synthetic construct
  misc_feature 1..22: note = chemically synthesized
  source 1..22: mol_type = other DNA
acaccctgactggtaaggcatg

SEQ ID NO: 45871 - DNA, 22 bp, synthetic construct
  misc_feature 1..22: note = chemically synthesized
  source 1..22: mol_type = other DNA
actggtaaggcatgtgatgaac

SEQ ID NO: 45872 - DNA, 22 bp, synthetic construct
  misc_feature 1..22: note = chemically synthesized
  source 1..22: mol_type = other DNA
gtaaggcatgtgatgaacagag

SEQ ID NO: 45873 - DNA, 22 bp, synthetic construct
  misc_feature 1..22: note = chemically synthesized
  source 1..22: mol_type = other DNA
taaacatgttggcgtaactgag

SEQ ID NO: 45874 - DNA, 22 bp, synthetic construct
  misc_feature 1..22: note = chemically synthesized
  source 1..22: mol_type = other DNA
gcgtaactgagctgtttaaaaa

SEQ ID NO: 45875 - DNA, 22 bp, synthetic construct
  misc_feature 1..22: note = chemically synthesized
  source 1..22: mol_type = other DNA
agctgtttaaaaataaattagc

SEQ ID NO: 45876 - DNA, 22 bp, synthetic construct
  misc_feature 1..22: note = chemically synthesized
  source 1..22: mol_type = other DNA
tttaaaaataaattagcaaact

SEQ ID NO: 45877 - DNA, 22 bp, synthetic construct
  misc_feature 1..22: note = chemically synthesized
  source 1..22: mol_type = other DNA
aaaaataaattagcaaactata

SEQ ID NO: 45878 - DNA, 22 bp, synthetic construct
  misc_feature 1..22: note = chemically synthesized
  source 1..22: mol_type = other DNA
aaaataaattagcaaactataa

SEQ ID NO: 45879 - DNA, 22 bp, synthetic construct
  misc_feature 1..22: note = chemically synthesized
  source 1..22: mol_type = other DNA
gcaaactataaaaataaacagt

SEQ ID NO: 45880 - DNA, 22 bp, synthetic construct
  misc_feature 1..22: note = chemically synthesized
  source 1..22: mol_type = other DNA
taaaaataaacagtaacgtaca

SEQ ID NO: 45881 - DNA, 22 bp, synthetic construct
  misc_feature 1..22: note = chemically synthesized
  source 1..22: mol_type = other DNA
aattatgaactaactctaattt

SEQ ID NO: 45882 - DNA, 22 bp, synthetic construct
  misc_feature 1..22: note = chemically synthesized
  source 1..22: mol_type = other DNA
tgaactaactctaatttttgtt

SEQ ID NO: 45883 - DNA, 22 bp, synthetic construct
  misc_feature 1..22: note = chemically synthesized
  source 1..22: mol_type = other DNA
actctaatttttgttctgaaat

SEQ ID NO: 45884 - DNA, 22 bp, synthetic construct
  misc_feature 1..22: note = chemically synthesized
  source 1..22: mol_type = other DNA
taatttttgttctgaaatactg

SEQ ID NO: 45885 - DNA, 22 bp, synthetic construct
  misc_feature 1..22: note = chemically synthesized
  source 1..22: mol_type = other DNA
atttttgttctgaaatactgtc

SEQ ID NO: 45886 - DNA, 22 bp, synthetic construct
  misc_feature 1..22: note = chemically synthesized
  source 1..22: mol_type = other DNA
ttgttctgaaatactgtctttg

SEQ ID NO: 45887 - DNA, 22 bp, synthetic construct
  misc_feature 1..22: note = chemically synthesized
  source 1..22: mol_type = other DNA
tgttctgaaatactgtctttga

SEQ ID NO: 45888 - DNA, 22 bp, synthetic construct
  misc_feature 1..22: note = chemically synthesized
  source 1..22: mol_type = other DNA
gttctgaaatactgtctttgac

SEQ ID NO: 45889 - DNA, 22 bp, synthetic construct
  misc_feature 1..22: note = chemically synthesized
  source 1..22: mol_type = other DNA
ttctgaaatactgtctttgacc

SEQ ID NO: 45890 - DNA, 22 bp, synthetic construct
  misc_feature 1..22: note = chemically synthesized
  source 1..22: mol_type = other DNA
tgaaatactgtctttgacctta

SEQ ID NO: 45891 - DNA, 22 bp, synthetic construct
  misc_feature 1..22: note = chemically synthesized
  source 1..22: mol_type = other DNA
aaatactgtctttgaccttagt

SEQ ID NO: 45892 - DNA, 22 bp, synthetic construct
  misc_feature 1..22: note = chemically synthesized
  source 1..22: mol_type = other DNA
tctttgaccttagtcataaaca

SEQ ID NO: 45893 - DNA, 22 bp, synthetic construct
  misc_feature 1..22: note = chemically synthesized
  source 1..22: mol_type = other DNA
tgaccttagtcataaacaagca

SEQ ID NO: 45894 - DNA, 22 bp, synthetic construct
  misc_feature 1..22: note = chemically synthesized
  source 1..22: mol_type = other DNA
gaccttagtcataaacaagcac

SEQ ID NO: 45895 - DNA, 22 bp, synthetic construct
  misc_feature 1..22: note = chemically synthesized
  source 1..22: mol_type = other DNA
accttagtcataaacaagcact

SEQ ID NO: 45896 - DNA, 22 bp, synthetic construct
  misc_feature 1..22: note = chemically synthesized
  source 1..22: mol_type = other DNA
agtcataaacaagcactattaa

SEQ ID NO: 45897 - DNA, 22 bp, synthetic construct
  misc_feature 1..22: note = chemically synthesized
  source 1..22: mol_type = other DNA
gtcataaacaagcactattaaa

SEQ ID NO: 45898 - DNA, 22 bp, synthetic construct
  misc_feature 1..22: note = chemically synthesized
  source 1..22: mol_type = other DNA
ttaaaaaaacataatatcccaa

SEQ ID NO: 45899 - DNA, 22 bp, synthetic construct
  misc_feature 1..22: note = chemically synthesized
  source 1..22: mol_type = other DNA
aaaaaacataatatcccaacag

SEQ ID NO: 45900 - DNA, 22 bp, synthetic construct
  misc_feature 1..22: note = chemically synthesized
  source 1..22: mol_type = other DNA
aatgctcttctagctctgcaga

SEQ ID NO: 45901 - DNA, 22 bp, synthetic construct
  misc_feature 1..22: note = chemically synthesized
  source 1..22: mol_type = other DNA
ttctagctctgcagaatgcaaa

SEQ ID NO: 45902 - DNA, 22 bp, synthetic construct
  misc_feature 1..22: note = chemically synthesized
  source 1..22: mol_type = other DNA
ctagctctgcagaatgcaaagc

SEQ ID NO: 45903 - DNA, 22 bp, synthetic construct
  misc_feature 1..22: note = chemically synthesized
  source 1..22: mol_type = other DNA
tagctctgcagaatgcaaagca

SEQ ID NO: 45904 - DNA, 22 bp, synthetic construct
  misc_feature 1..22: note = chemically synthesized
  source 1..22: mol_type = other DNA
gctctgcagaatgcaaagcaag

SEQ ID NO: 45905 - DNA, 22 bp, synthetic construct
  misc_feature 1..22: note = chemically synthesized
  source 1..22: mol_type = other DNA
tgcagaatgcaaagcaagacaa

SEQ ID NO: 45906 - DNA, 22 bp, synthetic construct
  misc_feature 1..22: note = chemically synthesized
  source 1..22: mol_type = other DNA
cagaatgcaaagcaagacaagg

SEQ ID NO: 45907 - DNA, 22 bp, synthetic construct
  misc_feature 1..22: note = chemically synthesized
  source 1..22: mol_type = other DNA
gcctttcttgaaaagctagaaa

SEQ ID NO: 45908 - DNA, 22 bp, synthetic construct
  misc_feature 1..22: note = chemically synthesized
  source 1..22: mol_type = other DNA
cctttcttgaaaagctagaaaa

SEQ ID NO: 45909 - DNA, 22 bp, synthetic construct
  misc_feature 1..22: note = chemically synthesized
  source 1..22: mol_type = other DNA
tcttgaaaagctagaaaactgt

SEQ ID NO: 45910 - DNA, 22 bp, synthetic construct
  misc_feature 1..22: note = chemically synthesized
  source 1..22: mol_type = other DNA
cttgaaaagctagaaaactgtg

SEQ ID NO: 45911 - DNA, 22 bp, synthetic construct
  misc_feature 1..22: note = chemically synthesized
  source 1..22: mol_type = other DNA
ttgaaaagctagaaaactgtgt

SEQ ID NO: 45912 - DNA, 22 bp, synthetic construct
  misc_feature 1..22: note = chemically synthesized
  source 1..22: mol_type = other DNA
gaaaagctagaaaactgtgtcc

SEQ ID NO: 45913 - DNA, 22 bp, synthetic construct
  misc_feature 1..22: note = chemically synthesized
  source 1..22: mol_type = other DNA
aaaagctagaaaactgtgtcca

SEQ ID NO: 45914 - DNA, 22 bp, synthetic construct
  misc_feature 1..22: note = chemically synthesized
  source 1..22: mol_type = other DNA
gaaaactgtgtccaaaacctac

SEQ ID NO: 45915 - DNA, 22 bp, synthetic construct
  misc_feature 1..22: note = chemically synthesized
  source 1..22: mol_type = other DNA
tgtccaaaacctacaaagacta

SEQ ID NO: 45916 - DNA, 22 bp, synthetic construct
  misc_feature 1..22: note = chemically synthesized
  source 1..22: mol_type = other DNA
caaagactattgtgctcttgtt

SEQ ID NO: 45917 - DNA, 22 bp, synthetic construct
  misc_feature 1..22: note = chemically synthesized
  source 1..22: mol_type = other DNA
ttgtgctcttgttgacttgaag

SEQ ID NO: 45918 - DNA, 22 bp, synthetic construct
  misc_feature 1..22: note = chemically synthesized
  source 1..22: mol_type = other DNA
tgctcttgttgacttgaagctg

SEQ ID NO: 45919 - DNA, 22 bp, synthetic construct
  misc_feature 1..22: note = chemically synthesized
  source 1..22: mol_type = other DNA
ttgttgacttgaagctgcttcc

SEQ ID NO: 45920 - DNA, 22 bp, synthetic construct
  misc_feature 1..22: note = chemically synthesized
  source 1..22: mol_type = other DNA
gttgacttgaagctgcttccgt

SEQ ID NO: 45921 - DNA, 22 bp, synthetic construct
  misc_feature 1..22: note = chemically synthesized
  source 1..22: mol_type = other DNA
ttgacttgaagctgcttccgtt

SEQ ID NO: 45922 - DNA, 22 bp, synthetic construct
  misc_feature 1..22: note = chemically synthesized
  source 1..22: mol_type = other DNA
acttgaagctgcttccgttcaa

SEQ ID NO: 45923 - DNA, 22 bp, synthetic construct
  misc_feature 1..22: note = chemically synthesized
  source 1..22: mol_type = other DNA
gaagctgcttccgttcaagcca

SEQ ID NO: 45924 - DNA, 22 bp, synthetic construct
  misc_feature 1..22: note = chemically synthesized
  source 1..22: mol_type = other DNA
aagctgcttccgttcaagccag

SEQ ID NO: 45925 - DNA, 22 bp, synthetic construct
  misc_feature 1..22: note = chemically synthesized
  source 1..22: mol_type = other DNA
cttccgttcaagccagaaaagt

SEQ ID NO: 45926 - DNA, 22 bp, synthetic construct
  misc_feature 1..22: note = chemically synthesized
  source 1..22: mol_type = other DNA
ccgttcaagccagaaaagttaa

SEQ ID NO: 45927 - DNA, 22 bp, synthetic construct
  misc_feature 1..22: note = chemically synthesized
  source 1..22: mol_type = other DNA
cgttcaagccagaaaagttaaa

SEQ ID NO: 45928 - DNA, 22 bp, synthetic construct
  misc_feature 1..22: note = chemically synthesized
  source 1..22: mol_type = other DNA
aagccagaaaagttaaaacctt

SEQ ID NO: 45929 - DNA, 22 bp, synthetic construct
  misc_feature 1..22: note = chemically synthesized
  source 1..22: mol_type = other DNA
aaaccttgtgaagtgcttttac

SEQ ID NO: 45930 - DNA, 22 bp, synthetic construct
  misc_feature 1..22: note = chemically synthesized
  source 1..22: mol_type = other DNA
gtgaagtgcttttacattttca

SEQ ID NO: 45931 - DNA, 22 bp, synthetic construct
  misc_feature 1..22: note = chemically synthesized
  source 1..22: mol_type = other DNA
tgaagtgcttttacattttcag

SEQ ID NO: 45932 - DNA, 22 bp, synthetic construct
  misc_feature 1..22: note = chemically synthesized
  source 1..22: mol_type = other DNA
ttacattttcagatgttttgga

SEQ ID NO: 45933 - DNA, 22 bp, synthetic construct
  misc_feature 1..22: note = chemically synthesized
  source 1..22: mol_type = other DNA
tacattttcagatgttttggag

SEQ ID NO: 45934 - DNA, 22 bp, synthetic construct
  misc_feature 1..22: note = chemically synthesized
  source 1..22: mol_type = other DNA
acattttcagatgttttggagt

SEQ ID NO: 45935 - DNA, 22 bp, synthetic construct
  misc_feature 1..22: note = chemically synthesized
  source 1..22: mol_type = other DNA
cattttcagatgttttggagtc

SEQ ID NO: 45936 - DNA, 22 bp, synthetic construct
  misc_feature 1..22: note = chemically synthesized
  source 1..22: mol_type = other DNA
tcagatgttttggagtctctca

SEQ ID NO: 45937 - DNA, 22 bp, synthetic construct
  misc_feature 1..22: note = chemically synthesized
  source 1..22: mol_type = other DNA
cagatgttttggagtctctcaa

SEQ ID NO: 45938 - DNA, 22 bp, synthetic construct
  misc_feature 1..22: note = chemically synthesized
  source 1..22: mol_type = other DNA
agatgttttggagtctctcaag

SEQ ID NO: 45939 - DNA, 22 bp, synthetic construct
  misc_feature 1..22: note = chemically synthesized
  source 1..22: mol_type = other DNA
tggagtctctcaagaaatgagg

SEQ ID NO: 45940 - DNA, 22 bp, synthetic construct
  misc_feature 1..22: note = chemically synthesized
  source 1..22: mol_type = other DNA
ggagtctctcaagaaatgagga

SEQ ID NO: 45941 - DNA, 22 bp, synthetic construct
  misc_feature 1..22: note = chemically synthesized
  source 1..22: mol_type = other DNA
gagtctctcaagaaatgaggac

SEQ ID NO: 45942 - DNA, 22 bp, synthetic construct
  misc_feature 1..22: note = chemically synthesized
  source 1..22: mol_type = other DNA
tcaagaaatgaggacaggcaag

SEQ ID NO: 45943 - DNA, 22 bp, synthetic construct
  misc_feature 1..22: note = chemically synthesized
  source 1..22: mol_type = other DNA
aagaaatgaggacaggcaaggg

SEQ ID NO: 45944 - DNA, 22 bp, synthetic construct
  misc_feature 1..22: note = chemically synthesized
  source 1..22: mol_type = other DNA
tttccacatgcagctgtttcaa

SEQ ID NO: 45945 - DNA, 22 bp, synthetic construct
  misc_feature 1..22: note = chemically synthesized
  source 1..22: mol_type = other DNA
ccacatgcagctgtttcaacag

SEQ ID NO: 45946 - DNA, 22 bp, synthetic construct
  misc_feature 1..22: note = chemically synthesized
  source 1..22: mol_type = other DNA
cacatgcagctgtttcaacagc

SEQ ID NO: 45947 - DNA, 22 bp, synthetic construct
  misc_feature 1..22: note = chemically synthesized
  source 1..22: mol_type = other DNA
tttcaacagctcactgcataac

SEQ ID NO: 45948 - DNA, 22 bp, synthetic construct
  misc_feature 1..22: note = chemically synthesized
  source 1..22: mol_type = other DNA
caacagctcactgcataacaga

SEQ ID NO: 45949 - DNA, 22 bp, synthetic construct
  misc_feature 1..22: note = chemically synthesized
  source 1..22: mol_type = other DNA
aacagctcactgcataacagag

SEQ ID NO: 45950 - DNA, 22 bp, synthetic construct
  misc_feature 1..22: note = chemically synthesized
  source 1..22: mol_type = other DNA
actgcataacagagtctcttac

SEQ ID NO: 45951 - DNA, 22 bp, synthetic construct
  misc_feature 1..22: note = chemically synthesized
  source 1..22: mol_type = other DNA
cataacagagtctcttacacag

SEQ ID NO: 45952 - DNA, 22 bp, synthetic construct
  misc_feature 1..22: note = chemically synthesized
  source 1..22: mol_type = other DNA
ttacacagggctgcctccgcac

SEQ ID NO: 45953 - DNA, 22 bp, synthetic construct
  misc_feature 1..22: note = chemically synthesized
  source 1..22: mol_type = other DNA
acacagggctgcctccgcacct

SEQ ID NO: 45954 - DNA, 22 bp, synthetic construct
  misc_feature 1..22: note = chemically synthesized
  source 1..22: mol_type = other DNA
cacagggctgcctccgcacctg

SEQ ID NO: 45955 - DNA, 22 bp, synthetic construct
  misc_feature 1..22: note = chemically synthesized
  source 1..22: mol_type = other DNA
cctccgcacctgagctgagctt

SEQ ID NO: 45956 - DNA, 22 bp, synthetic construct
  misc_feature 1..22: note = chemically synthesized
  source 1..22: mol_type = other DNA
cgcacctgagctgagcttgctg

SEQ ID NO: 45957 - DNA, 22 bp, synthetic construct
  misc_feature 1..22: note = chemically synthesized
  source 1..22: mol_type = other DNA
agctgagcttgctgtcctaagt

SEQ ID NO: 45958 - DNA, 22 bp, synthetic construct
  misc_feature 1..22: note = chemically synthesized
  source 1..22: mol_type = other DNA
agcttgctgtcctaagtcggct

SEQ ID NO: 45959 - DNA, 22 bp, synthetic construct
  misc_feature 1..22: note = chemically synthesized
  source 1..22: mol_type = other DNA
gctgtcctaagtcggctactgc

SEQ ID NO: 45960 - DNA, 22 bp, synthetic construct
  misc_feature 1..22: note = chemically synthesized
  source 1..22: mol_type = other DNA
ctgtcctaagtcggctactgct

SEQ ID NO: 45961 - DNA, 22 bp, synthetic construct
  misc_feature 1..22: note = chemically synthesized
  source 1..22: mol_type = other DNA
tcctaagtcggctactgcttct

SEQ ID NO: 45962 - DNA, 22 bp, synthetic construct
  misc_feature 1..22: note = chemically synthesized
  source 1..22: mol_type = other DNA
agtcggctactgcttctaagtc

SEQ ID NO: 45963 - DNA, 22 bp, synthetic construct
  misc_feature 1..22: note = chemically synthesized
  source 1..22: mol_type = other DNA
ctgcttctaagtccccagcttt

SEQ ID NO: 45964 - DNA, 22 bp, synthetic construct
  misc_feature 1..22: note = chemically synthesized
  source 1..22: mol_type = other DNA
cttctaagtccccagcttttct

SEQ ID NO: 45965 - DNA, 22 bp, synthetic construct
  misc_feature 1..22: note = chemically synthesized
  source 1..22: mol_type = other DNA
ctaagtccccagcttttctaag

SEQ ID NO: 45966 - DNA, 22 bp, synthetic construct
  misc_feature 1..22: note = chemically synthesized
  source 1..22: mol_type = other DNA
taagtccccagcttttctaaga

SEQ ID NO: 45967 - DNA, 22 bp, synthetic construct
  misc_feature 1..22: note = chemically synthesized
  source 1..22: mol_type = other DNA
agtccccagcttttctaagaca

SEQ ID NO: 45968 - DNA, 22 bp, synthetic construct
  misc_feature 1..22: note = chemically synthesized
  source 1..22: mol_type = other DNA
ttctaagacatatggcagaaat

SEQ ID NO: 45969 - DNA, 22 bp, synthetic construct
  misc_feature 1..22: note = chemically synthesized
  source 1..22: mol_type = other DNA
tctaagacatatggcagaaatg

SEQ ID NO: 45970 - DNA, 22 bp, synthetic construct
  misc_feature 1..22: note = chemically synthesized
  source 1..22: mol_type = other DNA
ctaagacatatggcagaaatgt

SEQ ID NO: 45971 - DNA, 22 bp, synthetic construct
  misc_feature 1..22: note = chemically synthesized
  source 1..22: mol_type = other DNA
taagacatatggcagaaatgtg

SEQ ID NO: 45972 - DNA, 22 bp, synthetic construct
  misc_feature 1..22: note = chemically synthesized
  source 1..22: mol_type = other DNA
agacatatggcagaaatgtgga

SEQ ID NO: 45973 - DNA, 22 bp, synthetic construct
  misc_feature 1..22: note = chemically synthesized
  source 1..22: mol_type = other DNA
tcttccaaacagcacaagacag

SEQ ID NO: 45974 - DNA, 22 bp, synthetic construct
  misc_feature 1..22: note = chemically synthesized
  source 1..22: mol_type = other DNA
ccaaacagcacaagacagaaag

SEQ ID NO: 45975 - DNA, 22 bp, synthetic construct
  misc_feature 1..22: note = chemically synthesized
  source 1..22: mol_type = other DNA
caaacagcacaagacagaaagc

SEQ ID NO: 45976 - DNA, 22 bp, synthetic construct
  misc_feature 1..22: note = chemically synthesized
  source 1..22: mol_type = other DNA
ttgaaactgtatacaggacacg

SEQ ID NO: 45977 - DNA, 22 bp, synthetic construct
  misc_feature 1..22: note = chemically synthesized
  source 1..22: mol_type = other DNA
aaactgtatacaggacacgtct

SEQ ID NO: 45978 - DNA, 22 bp, synthetic construct
  misc_feature 1..22: note = chemically synthesized
  source 1..22: mol_type = other DNA
tatacaggacacgtcttcacag

SEQ ID NO: 45979 - DNA, 22 bp, synthetic construct
  misc_feature 1..22: note = chemically synthesized
  source 1..22: mol_type = other DNA
cacagtaatccaatgctcctgt

SEQ ID NO: 45980 - DNA, 22 bp, synthetic construct
  misc_feature 1..22: note = chemically synthesized
  source 1..22: mol_type = other DNA
acagtaatccaatgctcctgta

SEQ ID NO: 45981 - DNA, 22 bp, synthetic construct
  misc_feature 1..22: note = chemically synthesized
  source 1..22: mol_type = other DNA
ctgtaacaaaggacagcatact

SEQ ID NO: 45982 - DNA, 22 bp, synthetic construct
  misc_feature 1..22: note = chemically synthesized
  source 1..22: mol_type = other DNA
taacaaaggacagcatactatg

SEQ ID NO: 45983 - DNA, 22 bp, synthetic construct
  misc_feature 1..22: note = chemically synthesized
  source 1..22: mol_type = other DNA
tgggataattactatggattat

SEQ ID NO: 45984 - DNA, 22 bp, synthetic construct
  misc_feature 1..22: note = chemically synthesized
  source 1..22: mol_type = other DNA
ctatggattattattacagttt

SEQ ID NO: 45985 - DNA, 22 bp, synthetic construct
  misc_feature 1..22: note = chemically synthesized
  source 1..22: mol_type = other DNA
tggattattattacagtttcta

SEQ ID NO: 45986 - DNA, 22 bp, synthetic construct
  misc_feature 1..22: note = chemically synthesized
  source 1..22: mol_type = other DNA
ttattacagtttctaaagcaaa

SEQ ID NO: 45987 - DNA, 22 bp, synthetic construct
  misc_feature 1..22: note = chemically synthesized
  source 1..22: mol_type = other DNA
ttacagtttctaaagcaaaaga

SEQ ID NO: 45988 - DNA, 22 bp, synthetic construct
  misc_feature 1..22: note = chemically synthesized
  source 1..22: mol_type = other DNA
cagtttctaaagcaaaagaaca

SEQ ID NO: 45989 - DNA, 22 bp, synthetic construct
  misc_feature 1..22: note = chemically synthesized
  source 1..22: mol_type = other DNA
ctaaagcaaaagaacaaaaaaa

SEQ ID NO: 45990 - DNA, 22 bp, synthetic construct
  misc_feature 1..22: note = chemically synthesized
  source 1..22: mol_type = other DNA
taaagcaaaagaacaaaaaaaa

SEQ ID NO: 45991 - DNA, 22 bp, synthetic construct
  misc_feature 1..22: note = chemically synthesized
  source 1..22: mol_type = other DNA
aagcaaaagaacaaaaaaaaat

SEQ ID NO: 45992 - DNA, 22 bp, synthetic construct
  misc_feature 1..22: note = chemically synthesized
  source 1..22: mol_type = other DNA
acaaaagacatattacacacgc

SEQ ID NO: 45993 - DNA, 22 bp, synthetic construct
  misc_feature 1..22: note = chemically synthesized
  source 1..22: mol_type = other DNA
cacacgcagatttctaaagctt

SEQ ID NO: 45994 - DNA, 22 bp, synthetic construct
  misc_feature 1..22: note = chemically synthesized
  source 1..22: mol_type = other DNA
ctaaagctttaaaatcatatgg

SEQ ID NO: 45995 - DNA, 22 bp, synthetic construct
  misc_feature 1..22: note = chemically synthesized
  source 1..22: mol_type = other DNA
taaagctttaaaatcatatggt

SEQ ID NO: 45996 - DNA, 22 bp, synthetic construct
  misc_feature 1..22: note = chemically synthesized
  source 1..22: mol_type = other DNA
aagctttaaaatcatatggtct

SEQ ID NO: 45997 - DNA, 22 bp, synthetic construct
  misc_feature 1..22: note = chemically synthesized
  source 1..22: mol_type = other DNA
taaaatcatatggtcttcggtg

SEQ ID NO: 45998 - DNA, 22 bp, synthetic construct
  misc_feature 1..22: note = chemically synthesized
  source 1..22: mol_type = other DNA
aaaatcatatggtcttcggtgt

SEQ ID NO: 45999 - DNA, 22 bp, synthetic construct
  misc_feature 1..22: note = chemically synthesized
  source 1..22: mol_type = other DNA
aaatcatatggtcttcggtgtt

SEQ ID NO: 46000 - DNA, 22 bp, synthetic construct
  misc_feature 1..22: note = chemically synthesized
  source 1..22: mol_type = other DNA
cggtgttggttcctatggggtt

SEQ ID NO: 46001 - DNA, 22 bp, synthetic construct
  misc_feature 1..22: note = chemically synthesized
  source 1..22: mol_type = other DNA
ggtgttggttcctatggggtta

SEQ ID NO: 46002 - DNA, 22 bp, synthetic construct
  misc_feature 1..22: note = chemically synthesized
  source 1..22: mol_type = other DNA
gttcctatggggttacggataa

SEQ ID NO: 46003 - DNA, 22 bp, synthetic construct
  misc_feature 1..22: note = chemically synthesized
  source 1..22: mol_type = other DNA
ctatggggttacggataatgcc

SEQ ID NO: 46004 - DNA, 22 bp, synthetic construct
  misc_feature 1..22: note = chemically synthesized
  source 1..22: mol_type = other DNA
tggggttacggataatgcccta

SEQ ID NO: 46005 - DNA, 22 bp, synthetic construct
  misc_feature 1..22: note = chemically synthesized
  source 1..22: mol_type = other DNA
cggataatgccctaactgagca

SEQ ID NO: 46006 - DNA, 22 bp, synthetic construct
  misc_feature 1..22: note = chemically synthesized
  source 1..22: mol_type = other DNA
actgagcacgacagatgcaaac

SEQ ID NO: 46007 - DNA, 22 bp, synthetic construct
  misc_feature 1..22: note = chemically synthesized
  source 1..22: mol_type = other DNA
agcacgacagatgcaaacacaa

SEQ ID NO: 46008 - DNA, 22 bp, synthetic construct
  misc_feature 1..22: note = chemically synthesized
  source 1..22: mol_type = other DNA
aaattctctcatgtcatggtgc

SEQ ID NO: 46009 - DNA, 22 bp, synthetic construct
  misc_feature 1..22: note = chemically synthesized
  source 1..22: mol_type = other DNA
tctcatgtcatggtgcttactg

SEQ ID NO: 46010 - DNA, 22 bp, synthetic construct
  misc_feature 1..22: note = chemically synthesized
  source 1..22: mol_type = other DNA
tcatgtcatggtgcttactgcc

SEQ ID NO: 46011 - DNA, 22 bp, synthetic construct
  misc_feature 1..22: note = chemically synthesized
  source 1..22: mol_type = other DNA
atgtcatggtgcttactgccct

SEQ ID NO: 46012 - DNA, 22 bp, synthetic construct
  misc_feature 1..22: note = chemically synthesized
  source 1..22: mol_type = other DNA
actgccctttctttcacaaaca

SEQ ID NO: 46013 - DNA, 22 bp, synthetic construct
  misc_feature 1..22: note = chemically synthesized
  source 1..22: mol_type = other DNA
ctgccctttctttcacaaacaa

SEQ ID NO: 46014 - DNA, 22 bp, synthetic construct
  misc_feature 1..22: note = chemically synthesized
  source 1..22: mol_type = other DNA
ccctttctttcacaaacaaaag

SEQ ID NO: 46015 - DNA, 22 bp, synthetic construct
  misc_feature 1..22: note = chemically synthesized
  source 1..22: mol_type = other DNA
tctttcacaaacaaaagtagtt

SEQ ID NO: 46016 - DNA, 22 bp, synthetic construct
  misc_feature 1..22: note = chemically synthesized
  source 1..22: mol_type = other DNA
ctttcacaaacaaaagtagttg

SEQ ID NO: 46017 - DNA, 22 bp, synthetic construct
  misc_feature 1..22: note = chemically synthesized
  source 1..22: mol_type = other DNA
tttcacaaacaaaagtagttga

SEQ ID NO: 46018 - DNA, 22 bp, synthetic construct
  misc_feature 1..22: note = chemically synthesized
  source 1..22: mol_type = other DNA
tcacaaacaaaagtagttgagc

SEQ ID NO: 46019 - DNA, 22 bp, synthetic construct
  misc_feature 1..22: note = chemically synthesized
  source 1..22: mol_type = other DNA
cacaaacaaaagtagttgagca

SEQ ID NO: 46020 - DNA, 22 bp, synthetic construct
  misc_feature 1..22: note = chemically synthesized
  source 1..22: mol_type = other DNA
acaaacaaaagtagttgagcaa

SEQ ID NO: 46021 - DNA, 22 bp, synthetic construct
  misc_feature 1..22: note = chemically synthesized
  source 1..22: mol_type = other DNA
agcaacagctaagtagttattc

SEQ ID NO: 46022 - DNA, 22 bp, synthetic construct
  misc_feature 1..22: note = chemically synthesized
  source 1..22: mol_type = other DNA
agtagttattcatctcaaagaa

SEQ ID NO: 46023 - DNA, 22 bp, synthetic construct
  misc_feature 1..22: note = chemically synthesized
  source 1..22: mol_type = other DNA
ttcatctcaaagaaccaaccta

SEQ ID NO: 46024 - DNA, 22 bp, synthetic construct
  misc_feature 1..22: note = chemically synthesized
  source 1..22: mol_type = other DNA
atctcaaagaaccaacctaaaa

SEQ ID NO: 46025 - DNA, 22 bp, synthetic construct
  misc_feature 1..22: note = chemically synthesized
  source 1..22: mol_type = other DNA
aaagaaccaacctaaaattctg

SEQ ID NO: 46026 - DNA, 22 bp, synthetic construct
  misc_feature 1..22: note = chemically synthesized
  source 1..22: mol_type = other DNA
aaattctgacaggcccagcact

SEQ ID NO: 46027 - DNA, 22 bp, synthetic construct
  misc_feature 1..22: note = chemically synthesized
  source 1..22: mol_type = other DNA
tgacaggcccagcactgtctac

SEQ ID NO: 46028 - DNA, 22 bp, synthetic construct
  misc_feature 1..22: note = chemically synthesized
  source 1..22: mol_type = other DNA
acaggcccagcactgtctaccc

SEQ ID NO: 46029 - DNA, 22 bp, synthetic construct
  misc_feature 1..22: note = chemically synthesized
  source 1..22: mol_type = other DNA
tctacccccacccccaaacaac

SEQ ID NO: 46030 - DNA, 22 bp, synthetic construct
  misc_feature 1..22: note = chemically synthesized
  source 1..22: mol_type = other DNA
cccccacccccaaacaacaaca

SEQ ID NO: 46031 - DNA, 22 bp, synthetic construct
  misc_feature 1..22: note = chemically synthesized
  source 1..22: mol_type = other DNA
cacaaataaaaactaggaggaa

SEQ ID NO: 46032 - DNA, 22 bp, synthetic construct
  misc_feature 1..22: note = chemically synthesized
  source 1..22: mol_type = other DNA
ggaggaagctcaaactcatcca

SEQ ID NO: 46033 - DNA, 22 bp, synthetic construct
  misc_feature 1..22: note = chemically synthesized
  source 1..22: mol_type = other DNA
aaactcatccacacttggttca

SEQ ID NO: 46034 - DNA, 22 bp, synthetic construct
  misc_feature 1..22: note = chemically synthesized
  source 1..22: mol_type = other DNA
atccacacttggttcaggacac

SEQ ID NO: 46035 - DNA, 22 bp, synthetic construct
  misc_feature 1..22: note = chemically synthesized
  source 1..22: mol_type = other DNA
ggttcaggacacagggaaggcc

SEQ ID NO: 46036 - DNA, 22 bp, synthetic construct
  misc_feature 1..22: note = chemically synthesized
  source 1..22: mol_type = other DNA
gttcaggacacagggaaggcct

SEQ ID NO: 46037 - DNA, 22 bp, synthetic construct
  misc_feature 1..22: note = chemically synthesized
  source 1..22: mol_type = other DNA
aggacacagggaaggcctgatg

SEQ ID NO: 46038 - DNA, 22 bp, synthetic construct
  misc_feature 1..22: note = chemically synthesized
  source 1..22: mol_type = other DNA
atgtgaaagaggagacagagaa

SEQ ID NO: 46039 - DNA, 22 bp, synthetic construct
  misc_feature 1..22: note = chemically synthesized
  source 1..22: mol_type = other DNA
cctgggtgtgcagaattacacc

SEQ ID NO: 46040 - DNA, 22 bp, synthetic construct
  misc_feature 1..22: note = chemically synthesized
  source 1..22: mol_type = other DNA
ctgggtgtgcagaattacaccc

SEQ ID NO: 46041 - DNA, 22 bp, synthetic construct
  misc_feature 1..22: note = chemically synthesized
  source 1..22: mol_type = other DNA
ggtgtgcagaattacaccccag

SEQ ID NO: 46042 - DNA, 22 bp, synthetic construct
  misc_feature 1..22: note = chemically synthesized
  source 1..22: mol_type = other DNA
caccccaggccacactccctgc

SEQ ID NO: 46043 - DNA, 22 bp, synthetic construct
  misc_feature 1..22: note = chemically synthesized
  source 1..22: mol_type = other DNA
cctgcaggggccacaggagcaa

SEQ ID NO: 46044 - DNA, 22 bp, synthetic construct
  misc_feature 1..22: note = chemically synthesized
  source 1..22: mol_type = other DNA
caggggccacaggagcaagcac

SEQ ID NO: 46045 - DNA, 22 bp, synthetic construct
  misc_feature 1..22: note = chemically synthesized
  source 1..22: mol_type = other DNA
cagccgggtccctgagtctgac

SEQ ID NO: 46046 - DNA, 22 bp, synthetic construct
  misc_feature 1..22: note = chemically synthesized
  source 1..22: mol_type = other DNA
agtctgacttttacccaaacag

SEQ ID NO: 46047 - DNA, 22 bp, synthetic construct
  misc_feature 1..22: note = chemically synthesized
  source 1..22: mol_type = other DNA
acttttacccaaacagggggtt

SEQ ID NO: 46048 - DNA, 22 bp, synthetic construct
  misc_feature 1..22: note = chemically synthesized
  source 1..22: mol_type = other DNA
ttacccaaacagggggttgcca

SEQ ID NO: 46049 - DNA, 22 bp, synthetic construct
  misc_feature 1..22: note = chemically synthesized
  source 1..22: mol_type = other DNA
tacccaaacagggggttgccag

SEQ ID NO: 46050 - DNA, 22 bp, synthetic construct
  misc_feature 1..22: note = chemically synthesized
  source 1..22: mol_type = other DNA
acccaaacagggggttgccagt

SEQ ID NO: 46051 - DNA, 22 bp, synthetic construct
  misc_feature 1..22: note = chemically synthesized
  source 1..22: mol_type = other DNA
cccaaacagggggttgccagtt

SEQ ID NO: 46052 - DNA, 22 bp, synthetic construct
  misc_feature 1..22: note = chemically synthesized
  source 1..22: mol_type = other DNA
ccagttgctgcgagacaaatat

SEQ ID NO: 46053 - DNA, 22 bp, synthetic construct
  misc_feature 1..22: note = chemically synthesized
  source 1..22: mol_type = other DNA
ctgcgagacaaatatccctagc

SEQ ID NO: 46054 - DNA, 22 bp, synthetic construct
  misc_feature 1..22: note = chemically synthesized
  source 1..22: mol_type = other DNA
cgagacaaatatccctagcaca

SEQ ID NO: 46055 - DNA, 22 bp, synthetic construct
  misc_feature 1..22: note = chemically synthesized
  source 1..22: mol_type = other DNA
gcacattacctagttggcaaag

SEQ ID NO: 46056 - DNA, 22 bp, synthetic construct
  misc_feature 1..22: note = chemically synthesized
  source 1..22: mol_type = other DNA
cctagttggcaaaggaatgcaa

SEQ ID NO: 46057 - DNA, 22 bp, synthetic construct
  misc_feature 1..22: note = chemically synthesized
  source 1..22: mol_type = other DNA
gttggcaaaggaatgcaactgg

SEQ ID NO: 46058 - DNA, 22 bp, synthetic construct
  misc_feature 1..22: note = chemically synthesized
  source 1..22: mol_type = other DNA
gcaaaggaatgcaactgggagg

SEQ ID NO: 46059 - DNA, 22 bp, synthetic construct
  misc_feature 1..22: note = chemically synthesized
  source 1..22: mol_type = other DNA
ggaggttctggaatagcacagt

SEQ ID NO: 46060 - DNA, 22 bp, synthetic construct
  misc_feature 1..22: note = chemically synthesized
  source 1..22: mol_type = other DNA
tggaatagcacagtgtggaact

SEQ ID NO: 46061 - DNA, 22 bp, synthetic construct
  misc_feature 1..22: note = chemically synthesized
  source 1..22: mol_type = other DNA
gaatagcacagtgtggaactgc

SEQ ID NO: 46062 - DNA, 22 bp, synthetic construct
  misc_feature 1..22: note = chemically synthesized
  source 1..22: mol_type = other DNA
cactggacttttcctgttctga

SEQ ID NO: 46063 - DNA, 22 bp, synthetic construct
  misc_feature 1..22: note = chemically synthesized
  source 1..22: mol_type = other DNA
gacttttcctgttctgaagagg

SEQ ID NO: 46064 - DNA, 22 bp, synthetic construct
  misc_feature 1..22: note = chemically synthesized
  source 1..22: mol_type = other DNA
ttcctgttctgaagaggacttt

SEQ ID NO: 46065 - DNA, 22 bp, synthetic construct
  misc_feature 1..22: note = chemically synthesized
  source 1..22: mol_type = other DNA
tcctgttctgaagaggactttg

SEQ ID NO: 46066 - DNA, 22 bp, synthetic construct
  misc_feature 1..22: note = chemically synthesized
  source 1..22: mol_type = other DNA
cctgttctgaagaggactttgc

SEQ ID NO: 46067 - DNA, 22 bp, synthetic construct
  misc_feature 1..22: note = chemically synthesized
  source 1..22: mol_type = other DNA
ctgttctgaagaggactttgct

SEQ ID NO: 46068 - DNA, 22 bp, synthetic construct
  misc_feature 1..22: note = chemically synthesized
  source 1..22: mol_type = other DNA
ttctgaagaggactttgctttc

SEQ ID NO: 46069 - DNA, 22 bp, synthetic construct
  misc_feature 1..22: note = chemically synthesized
  source 1..22: mol_type = other DNA
tgaagaggactttgctttcctc

SEQ ID NO: 46070 - DNA, 22 bp, synthetic construct
  misc_feature 1..22: note = chemically synthesized
  source 1..22: mol_type = other DNA
aagaggactttgctttcctccg

SEQ ID NO: 46071 - DNA, 22 bp, synthetic construct
  misc_feature 1..22: note = chemically synthesized
  source 1..22: mol_type = other DNA
tgctttcctccgggatgtaaag

SEQ ID NO: 46072 - DNA, 22 bp, synthetic construct
  misc_feature 1..22: note = chemically synthesized
  source 1..22: mol_type = other DNA
gctttcctccgggatgtaaagc

SEQ ID NO: 46073 - DNA, 22 bp, synthetic construct
  misc_feature 1..22: note = chemically synthesized
  source 1..22: mol_type = other DNA
ctttcctccgggatgtaaagca

SEQ ID NO: 46074 - DNA, 22 bp, synthetic construct
  misc_feature 1..22: note = chemically synthesized
  source 1..22: mol_type = other DNA
tcctccgggatgtaaagcattt

SEQ ID NO: 46075 - DNA, 22 bp, synthetic construct
  misc_feature 1..22: note = chemically synthesized
  source 1..22: mol_type = other DNA
cctccgggatgtaaagcatttg

SEQ ID NO: 46076 - DNA, 22 bp, synthetic construct
  misc_feature 1..22: note = chemically synthesized
  source 1..22: mol_type = other DNA
ctccgggatgtaaagcatttgg

SEQ ID NO: 46077 - DNA, 22 bp, synthetic construct
  misc_feature 1..22: note = chemically synthesized
  source 1..22: mol_type = other DNA
cgggatgtaaagcatttggcag

SEQ ID NO: 46078 - DNA, 22 bp, synthetic construct
  misc_feature 1..22: note = chemically synthesized
  source 1..22: mol_type = other DNA
ggcaggcaaaggacaaaactta

SEQ ID NO: 46079 - DNA, 22 bp, synthetic construct
  misc_feature 1..22: note = chemically synthesized
  source 1..22: mol_type = other DNA
gcaggcaaaggacaaaacttac

SEQ ID NO: 46080 - DNA, 22 bp, synthetic construct
  misc_feature 1..22: note = chemically synthesized
  source 1..22: mol_type = other DNA
acctcaggtactatggcaaact

SEQ ID NO: 46081 - DNA, 22 bp, synthetic construct
  misc_feature 1..22: note = chemically synthesized
  source 1..22: mol_type = other DNA
cctcaggtactatggcaaactg

SEQ ID NO: 46082 - DNA, 22 bp, synthetic construct
  misc_feature 1..22: note = chemically synthesized
  source 1..22: mol_type = other DNA
aggtactatggcaaactggcca

SEQ ID NO: 46083 - DNA, 22 bp, synthetic construct
  misc_feature 1..22: note = chemically synthesized
  source 1..22: mol_type = other DNA
tggcaaactggccaaagagaag

SEQ ID NO: 46084 - DNA, 22 bp, synthetic construct
  misc_feature 1..22: note = chemically synthesized
  source 1..22: mol_type = other DNA
gccaaagagaagcgttgctagg

SEQ ID NO: 46085 - DNA, 22 bp, synthetic construct
  misc_feature 1..22: note = chemically synthesized
  source 1..22: mol_type = other DNA
ctaggagaatggacacggcagg

SEQ ID NO: 46086 - DNA, 22 bp, synthetic construct
  misc_feature 1..22: note = chemically synthesized
  source 1..22: mol_type = other DNA
ggagaatggacacggcaggaaa

SEQ ID NO: 46087 - DNA, 22 bp, synthetic construct
  misc_feature 1..22: note = chemically synthesized
  source 1..22: mol_type = other DNA
agcttggcccaggaagaagctg

SEQ ID NO: 46088 - DNA, 22 bp, synthetic construct
  misc_feature 1..22: note = chemically synthesized
  source 1..22: mol_type = other DNA
ggcccaggaagaagctggcgct

SEQ ID NO: 46089 - DNA, 22 bp, synthetic construct
  misc_feature 1..22: note = chemically synthesized
  source 1..22: mol_type = other DNA
gcccaggaagaagctggcgctc

SEQ ID NO: 46090 - DNA, 22 bp, synthetic construct
  misc_feature 1..22: note = chemically synthesized
  source 1..22: mol_type = other DNA
gcgctcagctacaggggccgtg

SEQ ID NO: 46091 - DNA, 22 bp, synthetic construct
  misc_feature 1..22: note = chemically synthesized
  source 1..22: mol_type = other DNA
agctacaggggccgtgggaata

SEQ ID NO: 46092 - DNA, 22 bp, synthetic construct
  misc_feature 1..22: note = chemically synthesized
  source 1..22: mol_type = other DNA
caggggccgtgggaatagctgg

SEQ ID NO: 46093 - DNA, 22 bp, synthetic construct
  misc_feature 1..22: note = chemically synthesized
  source 1..22: mol_type = other DNA
gaggcctgtgcatttccctgag

SEQ ID NO: 46094 - DNA, 22 bp, synthetic construct
  misc_feature 1..22: note = chemically synthesized
  source 1..22: mol_type = other DNA
tgcatttccctgagggtctcct

SEQ ID NO: 46095 - DNA, 22 bp, synthetic construct
  misc_feature 1..22: note = chemically synthesized
  source 1..22: mol_type = other DNA
ccctgagggtctccttggcgac

SEQ ID NO: 46096 - DNA, 22 bp, synthetic construct
  misc_feature 1..22: note = chemically synthesized
  source 1..22: mol_type = other DNA
cctgagggtctccttggcgaca

SEQ ID NO: 46097 - DNA, 22 bp, synthetic construct
  misc_feature 1..22: note = chemically synthesized
  source 1..22: mol_type = other DNA
agggtctccttggcgacagggc

SEQ ID NO: 46098 - DNA, 22 bp, synthetic construct
  misc_feature 1..22: note = chemically synthesized
  source 1..22: mol_type = other DNA
cttggcgacagggctggacctt

SEQ ID NO: 46099 - DNA, 22 bp, synthetic construct
  misc_feature 1..22: note = chemically synthesized
  source 1..22: mol_type = other DNA
ggcgacagggctggacctttgc

SEQ ID NO: 46100 - DNA, 22 bp, synthetic construct
  misc_feature 1..22: note = chemically synthesized
  source 1..22: mol_type = other DNA
gcgacagggctggacctttgca

SEQ ID NO: 46101 - DNA, 22 bp, synthetic construct
  misc_feature 1..22: note = chemically synthesized
  source 1..22: mol_type = other DNA
gacctttgcactggcagcctgg

SEQ ID NO: 46102 - DNA, 22 bp, synthetic construct
  misc_feature 1..22: note = chemically synthesized
  source 1..22: mol_type = other DNA
tgcactggcagcctggactctt

SEQ ID NO: 46103 - DNA, 22 bp, synthetic construct
  misc_feature 1..22: note = chemically synthesized
  source 1..22: mol_type = other DNA
gcactggcagcctggactcttc

SEQ ID NO: 46104 - DNA, 22 bp, synthetic construct
  misc_feature 1..22: note = chemically synthesized
  source 1..22: mol_type = other DNA
cactggcagcctggactcttct

SEQ ID NO: 46105 - DNA, 22 bp, synthetic construct
  misc_feature 1..22: note = chemically synthesized
  source 1..22: mol_type = other DNA
gcagcctggactcttctctgag

SEQ ID NO: 46106 - DNA, 22 bp, synthetic construct
  misc_feature 1..22: note = chemically synthesized
  source 1..22: mol_type = other DNA
gactcttctctgagctccccct

SEQ ID NO: 46107 - DNA, 22 bp, synthetic construct
  misc_feature 1..22: note = chemically synthesized
  source 1..22: mol_type = other DNA
ttctctgagctcccccttgggt

SEQ ID NO: 46108 - DNA, 22 bp, synthetic construct
  misc_feature 1..22: note = chemically synthesized
  source 1..22: mol_type = other DNA
ctctgagctcccccttgggtta

SEQ ID NO: 46109 - DNA, 22 bp, synthetic construct
  misc_feature 1..22: note = chemically synthesized
  source 1..22: mol_type = other DNA
tctgagctcccccttgggttac

SEQ ID NO: 46110 - DNA, 22 bp, synthetic construct
  misc_feature 1..22: note = chemically synthesized
  source 1..22: mol_type = other DNA
tgagctcccccttgggttacct

SEQ ID NO: 46111 - DNA, 22 bp, synthetic construct
  misc_feature 1..22: note = chemically synthesized
  source 1..22: mol_type = other DNA
agctcccccttgggttacctat

SEQ ID NO: 46112 - DNA, 22 bp, synthetic construct
  misc_feature 1..22: note = chemically synthesized
  source 1..22: mol_type = other DNA
ccccttgggttacctatgattc

SEQ ID NO: 46113 - DNA, 22 bp, synthetic construct
  misc_feature 1..22: note = chemically synthesized
  source 1..22: mol_type = other DNA
gggttacctatgattccagaag

SEQ ID NO: 46114 - DNA, 22 bp, synthetic construct
  misc_feature 1..22: note = chemically synthesized
  source 1..22: mol_type = other DNA
ggttacctatgattccagaaga

SEQ ID NO: 46115 - DNA, 22 bp, synthetic construct
  misc_feature 1..22: note = chemically synthesized
  source 1..22: mol_type = other DNA
cctatgattccagaagagtttg

SEQ ID NO: 46116 - DNA, 22 bp, synthetic construct
  misc_feature 1..22: note = chemically synthesized
  source 1..22: mol_type = other DNA
tgattccagaagagtttgttct

SEQ ID NO: 46117 - DNA, 22 bp, synthetic construct
  misc_feature 1..22: note = chemically synthesized
  source 1..22: mol_type = other DNA
cagaagagtttgttctacatgt

SEQ ID NO: 46118 - DNA, 22 bp, synthetic construct
  misc_feature 1..22: note = chemically synthesized
  source 1..22: mol_type = other DNA
gttctacatgtggcaaagccag

SEQ ID NO: 46119 - DNA, 22 bp, synthetic construct
  misc_feature 1..22: note = chemically synthesized
  source 1..22: mol_type = other DNA
ttctacatgtggcaaagccagc

SEQ ID NO: 46120 - DNA, 22 bp, synthetic construct
  misc_feature 1..22: note = chemically synthesized
  source 1..22: mol_type = other DNA
tacatgtggcaaagccagcacc

SEQ ID NO: 46121 - DNA, 22 bp, synthetic construct
  misc_feature 1..22: note = chemically synthesized
  source 1..22: mol_type = other DNA
catgtggcaaagccagcaccat

SEQ ID NO: 46122 - DNA, 22 bp, synthetic construct
  misc_feature 1..22: note = chemically synthesized
  source 1..22: mol_type = other DNA
aggcctaccttgagggatgtta

SEQ ID NO: 46123 - DNA, 22 bp, synthetic construct
  misc_feature 1..22: note = chemically synthesized
  source 1..22: mol_type = other DNA
ccttgagggatgttaaacttac

SEQ ID NO: 46124 - DNA, 22 bp, synthetic construct
  misc_feature 1..22: note = chemically synthesized
  source 1..22: mol_type = other DNA
gagggatgttaaacttacgccc

SEQ ID NO: 46125 - DNA, 22 bp, synthetic construct
  misc_feature 1..22: note = chemically synthesized
  source 1..22: mol_type = other DNA
agggatgttaaacttacgccct

SEQ ID NO: 46126 - DNA, 22 bp, synthetic construct
  misc_feature 1..22: note = chemically synthesized
  source 1..22: mol_type = other DNA
aacttacgccctacccactgct

SEQ ID NO: 46127 - DNA, 22 bp, synthetic construct
  misc_feature 1..22: note = chemically synthesized
  source 1..22: mol_type = other DNA
acgccctacccactgctactta

SEQ ID NO: 46128 - DNA, 22 bp, synthetic construct
  misc_feature 1..22: note = chemically synthesized
  source 1..22: mol_type = other DNA
cgccctacccactgctacttaa

SEQ ID NO: 46129 - DNA, 22 bp, synthetic construct
  misc_feature 1..22: note = chemically synthesized
  source 1..22: mol_type = other DNA
cccactgctacttaaggtgtct

SEQ ID NO: 46130 - DNA, 22 bp, synthetic construct
  misc_feature 1..22: note = chemically synthesized
  source 1..22: mol_type = other DNA
ctacttaaggtgtcttttgaat

SEQ ID NO: 46131 - DNA, 22 bp, synthetic construct
  misc_feature 1..22: note = chemically synthesized
  source 1..22: mol_type = other DNA
cttaaggtgtcttttgaatcct

SEQ ID NO: 46132 - DNA, 22 bp, synthetic construct
  misc_feature 1..22: note = chemically synthesized
  source 1..22: mol_type = other DNA
aaggtgtcttttgaatcctgag

SEQ ID NO: 46133 - DNA, 22 bp, synthetic construct
  misc_feature 1..22: note = chemically synthesized
  source 1..22: mol_type = other DNA
aggtgtcttttgaatcctgagg

SEQ ID NO: 46134 - DNA, 22 bp, synthetic construct
  misc_feature 1..22: note = chemically synthesized
  source 1..22: mol_type = other DNA
ttgaatcctgaggaccaaggag

SEQ ID NO: 46135 - DNA, 22 bp, synthetic construct
  misc_feature 1..22: note = chemically synthesized
  source 1..22: mol_type = other DNA
tgaatcctgaggaccaaggagc

SEQ ID NO: 46136 - DNA, 22 bp, synthetic construct
  misc_feature 1..22: note = chemically synthesized
  source 1..22: mol_type = other DNA
gaatcctgaggaccaaggagct

SEQ ID NO: 46137 - DNA, 22 bp, synthetic construct
  misc_feature 1..22: note = chemically synthesized
  source 1..22: mol_type = other DNA
aatcctgaggaccaaggagctc

SEQ ID NO: 46138 - DNA, 22 bp, synthetic construct
  misc_feature 1..22: note = chemically synthesized
  source 1..22: mol_type = other DNA
aggaccaaggagctctcctatg

SEQ ID NO: 46139 - DNA, 22 bp, synthetic construct
  misc_feature 1..22: note = chemically synthesized
  source 1..22: mol_type = other DNA
tcctatgacaaggaacctgtca

SEQ ID NO: 46140 - DNA, 22 bp, synthetic construct
  misc_feature 1..22: note = chemically synthesized
  source 1..22: mol_type = other DNA
ctatgacaaggaacctgtcact

SEQ ID NO: 46141 - DNA, 22 bp, synthetic construct
  misc_feature 1..22: note = chemically synthesized
  source 1..22: mol_type = other DNA
tgacaaggaacctgtcactggt

SEQ ID NO: 46142 - DNA, 22 bp, synthetic construct
  misc_feature 1..22: note = chemically synthesized
  source 1..22: mol_type = other DNA
tcactggttcttctgtgattgc

SEQ ID NO: 46143 - DNA, 22 bp, synthetic construct
  misc_feature 1..22: note = chemically synthesized
  source 1..22: mol_type = other DNA
gttcttctgtgattgctaaagc

SEQ ID NO: 46144 - DNA, 22 bp, synthetic construct
  misc_feature 1..22: note = chemically synthesized
  source 1..22: mol_type = other DNA
ttctgtgattgctaaagcctag

SEQ ID NO: 46145 - DNA, 22 bp, synthetic construct
  misc_feature 1..22: note = chemically synthesized
  source 1..22: mol_type = other DNA
ctgtgattgctaaagcctagag

SEQ ID NO: 46146 - DNA, 22 bp, synthetic construct
  misc_feature 1..22: note = chemically synthesized
  source 1..22: mol_type = other DNA
tgtgattgctaaagcctagagg

SEQ ID NO: 46147 - DNA, 22 bp, synthetic construct
  misc_feature 1..22: note = chemically synthesized
  source 1..22: mol_type = other DNA
tgattgctaaagcctagaggac

SEQ ID NO: 46148 - DNA, 22 bp, synthetic construct
  misc_feature 1..22: note = chemically synthesized
  source 1..22: mol_type = other DNA
ctaaagcctagaggacctcctc

SEQ ID NO: 46149 - DNA, 22 bp, synthetic construct
  misc_feature 1..22: note = chemically synthesized
  source 1..22: mol_type = other DNA
aagcctagaggacctcctccaa

SEQ ID NO: 46150 - DNA, 22 bp, synthetic construct
  misc_feature 1..22: note = chemically synthesized
  source 1..22: mol_type = other DNA
gaggacctcctccaaagaaaag

SEQ ID NO: 46151 - DNA, 22 bp, synthetic construct
  misc_feature 1..22: note = chemically synthesized
  source 1..22: mol_type = other DNA
ctccaaagaaaagtggctcaga

SEQ ID NO: 46152 - DNA, 22 bp, synthetic construct
  misc_feature 1..22: note = chemically synthesized
  source 1..22: mol_type = other DNA
caaagaaaagtggctcagacag

SEQ ID NO: 46153 - DNA, 22 bp, synthetic construct
  misc_feature 1..22: note = chemically synthesized
  source 1..22: mol_type = other DNA
agacagaaacactgactcttat

SEQ ID NO: 46154 - DNA, 22 bp, synthetic construct
  misc_feature 1..22: note = chemically synthesized
  source 1..22: mol_type = other DNA
actcttatttctcatcagactc

SEQ ID NO: 46155 - DNA, 22 bp, synthetic construct
  misc_feature 1..22: note = chemically synthesized
  source 1..22: mol_type = other DNA
ttatttctcatcagactccgaa

SEQ ID NO: 46156 - DNA, 22 bp, synthetic construct
  misc_feature 1..22: note = chemically synthesized
  source 1..22: mol_type = other DNA
atttctcatcagactccgaaat

SEQ ID NO: 46157 - DNA, 22 bp, synthetic construct
  misc_feature 1..22: note = chemically synthesized
  source 1..22: mol_type = other DNA
tttctcatcagactccgaaatc

SEQ ID NO: 46158 - DNA, 22 bp, synthetic construct
  misc_feature 1..22: note = chemically synthesized
  source 1..22: mol_type = other DNA
ctcatcagactccgaaatcaca

SEQ ID NO: 46159 - DNA, 22 bp, synthetic construct
  misc_feature 1..22: note = chemically synthesized
  source 1..22: mol_type = other DNA
tcatcagactccgaaatcacag

SEQ ID NO: 46160 - DNA, 22 bp, synthetic construct
  misc_feature 1..22: note = chemically synthesized
  source 1..22: mol_type = other DNA
atcagactccgaaatcacaggc

SEQ ID NO: 46161 - DNA, 22 bp, synthetic construct
  misc_feature 1..22: note = chemically synthesized
  source 1..22: mol_type = other DNA
cgaaatcacaggcttctggtct

SEQ ID NO: 46162 - DNA, 22 bp, synthetic construct
  misc_feature 1..22: note = chemically synthesized
  source 1..22: mol_type = other DNA
ctggtctaaagattcaagctga

SEQ ID NO: 46163 - DNA, 22 bp, synthetic construct
  misc_feature 1..22: note = chemically synthesized
  source 1..22: mol_type = other DNA
tggtctaaagattcaagctgag

SEQ ID NO: 46164 - DNA, 22 bp, synthetic construct
  misc_feature 1..22: note = chemically synthesized
  source 1..22: mol_type = other DNA
gtctaaagattcaagctgagaa

SEQ ID NO: 46165 - DNA, 22 bp, synthetic construct
  misc_feature 1..22: note = chemically synthesized
  source 1..22: mol_type = other DNA
aagattcaagctgagaaacaag

SEQ ID NO: 46166 - DNA, 22 bp, synthetic construct
  misc_feature 1..22: note = chemically synthesized
  source 1..22: mol_type = other DNA
aagctgagaaacaagaaagcaa

SEQ ID NO: 46167 - DNA, 22 bp, synthetic construct
  misc_feature 1..22: note = chemically synthesized
  source 1..22: mol_type = other DNA
agaaacaagaaagcaatttgtt

SEQ ID NO: 46168 - DNA, 22 bp, synthetic construct
  misc_feature 1..22: note = chemically synthesized
  source 1..22: mol_type = other DNA
gtttgattcaggcccttgcaaa

SEQ ID NO: 46169 - DNA, 22 bp, synthetic construct
  misc_feature 1..22: note = chemically synthesized
  source 1..22: mol_type = other DNA
tttgattcaggcccttgcaaat

SEQ ID NO: 46170 - DNA, 22 bp, synthetic construct
  misc_feature 1..22: note = chemically synthesized
  source 1..22: mol_type = other DNA
gattcaggcccttgcaaattac

SEQ ID NO: 46171 - DNA, 22 bp, synthetic construct
  misc_feature 1..22: note = chemically synthesized
  source 1..22: mol_type = other DNA
attcaggcccttgcaaattacc

SEQ ID NO: 46172 - DNA, 22 bp, synthetic construct
  misc_feature 1..22: note = chemically synthesized
  source 1..22: mol_type = other DNA
aggcccttgcaaattacccccc

SEQ ID NO: 46173 - DNA, 22 bp, synthetic construct
  misc_feature 1..22: note = chemically synthesized
  source 1..22: mol_type = other DNA
gcaaattaccccccaataattt

SEQ ID NO: 46174 - DNA, 22 bp, synthetic construct
  misc_feature 1..22: note = chemically synthesized
  source 1..22: mol_type = other DNA
caaattaccccccaataattta

SEQ ID NO: 46175 - DNA, 22 bp, synthetic construct
  misc_feature 1..22: note = chemically synthesized
  source 1..22: mol_type = other DNA
ccccccaataatttacttggtc

SEQ ID NO: 46176 - DNA, 22 bp, synthetic construct
  misc_feature 1..22: note = chemically synthesized
  source 1..22: mol_type = other DNA
acttggtctcagctttggctgg

SEQ ID NO: 46177 - DNA, 22 bp, synthetic construct
  misc_feature 1..22: note = chemically synthesized
  source 1..22: mol_type = other DNA
cttggtctcagctttggctggc

SEQ ID NO: 46178 - DNA, 22 bp, synthetic construct
  misc_feature 1..22: note = chemically synthesized
  source 1..22: mol_type = other DNA
ggtctcagctttggctggcttg

SEQ ID NO: 46179 - DNA, 22 bp, synthetic construct
  misc_feature 1..22: note = chemically synthesized
  source 1..22: mol_type = other DNA
gtctcagctttggctggcttgg

SEQ ID NO: 46180 - DNA, 22 bp, synthetic construct
  misc_feature 1..22: note = chemically synthesized
  source 1..22: mol_type = other DNA
agctttggctggcttggatgtt

SEQ ID NO: 46181 - DNA, 22 bp, synthetic construct
  misc_feature 1..22: note = chemically synthesized
  source 1..22: mol_type = other DNA
tggctggcttggatgttatgag

SEQ ID NO: 46182 - DNA, 22 bp, synthetic construct
  misc_feature 1..22: note = chemically synthesized
  source 1..22: mol_type = other DNA
ggctggcttggatgttatgagg

SEQ ID NO: 46183 - DNA, 22 bp, synthetic construct
  misc_feature 1..22: note = chemically synthesized
  source 1..22: mol_type = other DNA
gctggcttggatgttatgagga

SEQ ID NO: 46184 - DNA, 22 bp, synthetic construct
  misc_feature 1..22: note = chemically synthesized
  source 1..22: mol_type = other DNA
gcttggatgttatgaggattcc

SEQ ID NO: 46185 - DNA, 22 bp, synthetic construct
  misc_feature 1..22: note = chemically synthesized
  source 1..22: mol_type = other DNA
ggatgttatgaggattccaaga

SEQ ID NO: 46186 - DNA, 22 bp, synthetic construct
  misc_feature 1..22: note = chemically synthesized
  source 1..22: mol_type = other DNA
gatgttatgaggattccaagaa

SEQ ID NO: 46187 - DNA, 22 bp, synthetic construct
  misc_feature 1..22: note = chemically synthesized
  source 1..22: mol_type = other DNA
tgaggattccaagaattttttt

SEQ ID NO: 46188 - DNA, 22 bp, synthetic construct
  misc_feature 1..22: note = chemically synthesized
  source 1..22: mol_type = other DNA
caagaatttttttacttttcca

SEQ ID NO: 46189 - DNA, 22 bp, synthetic construct
  misc_feature 1..22: note = chemically synthesized
  source 1..22: mol_type = other DNA
ttttacttttccattagagggc

SEQ ID NO: 46190 - DNA, 22 bp, synthetic construct
  misc_feature 1..22: note = chemically synthesized
  source 1..22: mol_type = other DNA
tttacttttccattagagggct

SEQ ID NO: 46191 - DNA, 22 bp, synthetic construct
  misc_feature 1..22: note = chemically synthesized
  source 1..22: mol_type = other DNA
ttacttttccattagagggctc

SEQ ID NO: 46192 - DNA, 22 bp, synthetic construct
  misc_feature 1..22: note = chemically synthesized
  source 1..22: mol_type = other DNA
tacttttccattagagggctct

SEQ ID NO: 46193 - DNA, 22 bp, synthetic construct
  misc_feature 1..22: note = chemically synthesized
  source 1..22: mol_type = other DNA
acttttccattagagggctctg

SEQ ID NO: 46194 - DNA, 22 bp, synthetic construct
  misc_feature 1..22: note = chemically synthesized
  source 1..22: mol_type = other DNA
cttttccattagagggctctgc

SEQ ID NO: 46195 - DNA, 22 bp, synthetic construct
  misc_feature 1..22: note = chemically synthesized
  source 1..22: mol_type = other DNA
ttccattagagggctctgcact

SEQ ID NO: 46196 - DNA, 22 bp, synthetic construct
  misc_feature 1..22: note = chemically synthesized
  source 1..22: mol_type = other DNA
tccattagagggctctgcactc

SEQ ID NO: 46197 - DNA, 22 bp, synthetic construct
  misc_feature 1..22: note = chemically synthesized
  source 1..22: mol_type = other DNA
ccattagagggctctgcactct

SEQ ID NO: 46198 - DNA, 22 bp, synthetic construct
  misc_feature 1..22: note = chemically synthesized
  source 1..22: mol_type = other DNA
cattagagggctctgcactctc

SEQ ID NO: 46199 - DNA, 22 bp, synthetic construct
  misc_feature 1..22: note = chemically synthesized
  source 1..22: mol_type = other DNA
gagggctctgcactctcctttc

SEQ ID NO: 46200 - DNA, 22 bp, synthetic construct
  misc_feature 1..22: note = chemically synthesized
  source 1..22: mol_type = other DNA
tgcactctcctttcaaggaaaa

SEQ ID NO: 46201 - DNA, 22 bp, synthetic construct
  misc_feature 1..22: note = chemically synthesized
  source 1..22: mol_type = other DNA
cactctcctttcaaggaaaaag

SEQ ID NO: 46202 - DNA, 22 bp, synthetic construct
  misc_feature 1..22: note = chemically synthesized
  source 1..22: mol_type = other DNA
tcctttcaaggaaaaaggctct

SEQ ID NO: 46203 - DNA, 22 bp, synthetic construct
  misc_feature 1..22: note = chemically synthesized
  source 1..22: mol_type = other DNA
ctttcaaggaaaaaggctctat

SEQ ID NO: 46204 - DNA, 22 bp, synthetic construct
  misc_feature 1..22: note = chemically synthesized
  source 1..22: mol_type = other DNA
tcaaggaaaaaggctctatgtg

SEQ ID NO: 46205 - DNA, 22 bp, synthetic construct
  misc_feature 1..22: note = chemically synthesized
  source 1..22: mol_type = other DNA
caaggaaaaaggctctatgtgc

SEQ ID NO: 46206 - DNA, 22 bp, synthetic construct
  misc_feature 1..22: note = chemically synthesized
  source 1..22: mol_type = other DNA
aaggaaaaaggctctatgtgcc

SEQ ID NO: 46207 - DNA, 22 bp, synthetic construct
  misc_feature 1..22: note = chemically synthesized
  source 1..22: mol_type = other DNA
tatgtgccagcccacttctttc

SEQ ID NO: 46208 - DNA, 22 bp, synthetic construct
  misc_feature 1..22: note = chemically synthesized
  source 1..22: mol_type = other DNA
tgtgccagcccacttctttcca

SEQ ID NO: 46209 - DNA, 22 bp, synthetic construct
  misc_feature 1..22: note = chemically synthesized
  source 1..22: mol_type = other DNA
ctttccagaaatggggaaaggg

SEQ ID NO: 46210 - DNA, 22 bp, synthetic construct
  misc_feature 1..22: note = chemically synthesized
  source 1..22: mol_type = other DNA
tttccagaaatggggaaaggga

SEQ ID NO: 46211 - DNA, 22 bp, synthetic construct
  misc_feature 1..22: note = chemically synthesized
  source 1..22: mol_type = other DNA
tccagaaatggggaaagggagg

SEQ ID NO: 46212 - DNA, 22 bp, synthetic construct
  misc_feature 1..22: note = chemically synthesized
  source 1..22: mol_type = other DNA
ccagaaatggggaaagggagga

SEQ ID NO: 46213 - DNA, 22 bp, synthetic construct
  misc_feature 1..22: note = chemically synthesized
  source 1..22: mol_type = other DNA
cagaaatggggaaagggaggag

SEQ ID NO: 46214 - DNA, 22 bp, synthetic construct
  misc_feature 1..22: note = chemically synthesized
  source 1..22: mol_type = other DNA
tggaaaagaggacaacggattt

SEQ ID NO: 46215 - DNA, 22 bp, synthetic construct
  misc_feature 1..22: note = chemically synthesized
  source 1..22: mol_type = other DNA
ccggaagaaattccaagccagg

SEQ ID NO: 46216 - DNA, 22 bp, synthetic construct
  misc_feature 1..22: note = chemically synthesized
  source 1..22: mol_type = other DNA
cggaagaaattccaagccaggg

SEQ ID NO: 46217 - DNA, 22 bp, synthetic construct
  misc_feature 1..22: note = chemically synthesized
  source 1..22: mol_type = other DNA
caagccaggggctaaccgtgga

SEQ ID NO: 46218 - DNA, 22 bp, synthetic construct
  misc_feature 1..22: note = chemically synthesized
  source 1..22: mol_type = other DNA
accgtggacctgagcacagcag

SEQ ID NO: 46219 - DNA, 22 bp, synthetic construct
  misc_feature 1..22: note = chemically synthesized
  source 1..22: mol_type = other DNA
agcacagcagagccacacggac

SEQ ID NO: 46220 - DNA, 22 bp, synthetic construct
  misc_feature 1..22: note = chemically synthesized
  source 1..22: mol_type = other DNA
agaaaacggttctgtggaagca

SEQ ID NO: 46221 - DNA, 22 bp, synthetic construct
  misc_feature 1..22: note = chemically synthesized
  source 1..22: mol_type = other DNA
tgtggaagcacaagacacgtgg

SEQ ID NO: 46222 - DNA, 22 bp, synthetic construct
  misc_feature 1..22: note = chemically synthesized
  source 1..22: mol_type = other DNA
tggaagcacaagacacgtggca

SEQ ID NO: 46223 - DNA, 22 bp, synthetic construct
  misc_feature 1..22: note = chemically synthesized
  source 1..22: mol_type = other DNA
agaagtccaggaaaagatgcag

SEQ ID NO: 46224 - DNA, 22 bp, synthetic construct
  misc_feature 1..22: note = chemically synthesized
  source 1..22: mol_type = other DNA
ccaacccattcctaaatatcac

SEQ ID NO: 46225 - DNA, 22 bp, synthetic construct
  misc_feature 1..22: note = chemically synthesized
  source 1..22: mol_type = other DNA
caacccattcctaaatatcacc

SEQ ID NO: 46226 - DNA, 22 bp, synthetic construct
  misc_feature 1..22: note = chemically synthesized
  source 1..22: mol_type = other DNA
ctaaatatcaccaattaacagc

SEQ ID NO: 46227 - DNA, 22 bp, synthetic construct
  misc_feature 1..22: note = chemically synthesized
  source 1..22: mol_type = other DNA
aatatcaccaattaacagcagc

SEQ ID NO: 46228 - DNA, 22 bp, synthetic construct
  misc_feature 1..22: note = chemically synthesized
  source 1..22: mol_type = other DNA
acagcagctcgatggtctacct

SEQ ID NO: 46229 - DNA, 22 bp, synthetic construct
  misc_feature 1..22: note = chemically synthesized
  source 1..22: mol_type = other DNA
gatggtctacctgagacctgag

SEQ ID NO: 46230 - DNA, 22 bp, synthetic construct
  misc_feature 1..22: note = chemically synthesized
  source 1..22: mol_type = other DNA
cctgagacctgagaaaacaaac

SEQ ID NO: 46231 - DNA, 22 bp, synthetic construct
  misc_feature 1..22: note = chemically synthesized
  source 1..22: mol_type = other DNA
agacctgagaaaacaaacgaag

SEQ ID NO: 46232 - DNA, 22 bp, synthetic construct
  misc_feature 1..22: note = chemically synthesized
  source 1..22: mol_type = other DNA
agaaaacaaacgaagggaaaga

SEQ ID NO: 46233 - DNA, 22 bp, synthetic construct
  misc_feature 1..22: note = chemically synthesized
  source 1..22: mol_type = other DNA
tctggatcaaaagatcaagttg

SEQ ID NO: 46234 - DNA, 22 bp, synthetic construct
  misc_feature 1..22: note = chemically synthesized
  source 1..22: mol_type = other DNA
ctggatcaaaagatcaagttgt

SEQ ID NO: 46235 - DNA, 22 bp, synthetic construct
  misc_feature 1..22: note = chemically synthesized
  source 1..22: mol_type = other DNA
tggatcaaaagatcaagttgtc

SEQ ID NO: 46236 - DNA, 22 bp, synthetic construct
  misc_feature 1..22: note = chemically synthesized
  source 1..22: mol_type = other DNA
gatcaaaagatcaagttgtctt

SEQ ID NO: 46237 - DNA, 22 bp, synthetic construct
  misc_feature 1..22: note = chemically synthesized
  source 1..22: mol_type = other DNA
tctttggtagctaaagaacaac

SEQ ID NO: 46238 - DNA, 22 bp, synthetic construct
  misc_feature 1..22: note = chemically synthesized
  source 1..22: mol_type = other DNA
tggtagctaaagaacaacagag

SEQ ID NO: 46239 - DNA, 22 bp, synthetic construct
  misc_feature 1..22: note = chemically synthesized
  source 1..22: mol_type = other DNA
ggtagctaaagaacaacagaga

SEQ ID NO: 46240 - DNA, 22 bp, synthetic construct
  misc_feature 1..22: note = chemically synthesized
  source 1..22: mol_type = other DNA
gtagctaaagaacaacagagaa

SEQ ID NO: 46241 - DNA, 22 bp, synthetic construct
  misc_feature 1..22: note = chemically synthesized
  source 1..22: mol_type = other DNA
aagaacaacagagaaggaaaaa

SEQ ID NO: 46242 - DNA, 22 bp, synthetic construct
  misc_feature 1..22: note = chemically synthesized
  source 1..22: mol_type = other DNA
ggaggaggagaaaaacacctgg

SEQ ID NO: 46243 - DNA, 22 bp, synthetic construct
  misc_feature 1..22: note = chemically synthesized
  source 1..22: mol_type = other DNA
gccctccccaaagaactcgact

SEQ ID NO: 46244 - DNA, 22 bp, synthetic construct
  misc_feature 1..22: note = chemically synthesized
  source 1..22: mol_type = other DNA
cccaaagaactcgacttaaatc

SEQ ID NO: 46245 - DNA, 22 bp, synthetic construct
  misc_feature 1..22: note = chemically synthesized
  source 1..22: mol_type = other DNA
gacttaaatcatctcagctata

SEQ ID NO: 46246 - DNA, 22 bp, synthetic construct
  misc_feature 1..22: note = chemically synthesized
  source 1..22: mol_type = other DNA
aaatcatctcagctataggcag

SEQ ID NO: 46247 - DNA, 22 bp, synthetic construct
  misc_feature 1..22: note = chemically synthesized
  source 1..22: mol_type = other DNA
aatcatctcagctataggcagt

SEQ ID NO: 46248 - DNA, 22 bp, synthetic construct
  misc_feature 1..22: note = chemically synthesized
  source 1..22: mol_type = other DNA
agctataggcagtcaactgggg

SEQ ID NO: 46249 - DNA, 22 bp, synthetic construct
  misc_feature 1..22: note = chemically synthesized
  source 1..22: mol_type = other DNA
taggcagtcaactggggctctc

SEQ ID NO: 46250 - DNA, 22 bp, synthetic construct
  misc_feature 1..22: note = chemically synthesized
  source 1..22: mol_type = other DNA
gggctctccgaacagccacaat

SEQ ID NO: 46251 - DNA, 22 bp, synthetic construct
  misc_feature 1..22: note = chemically synthesized
  source 1..22: mol_type = other DNA
tccgaacagccacaatcggggg

SEQ ID NO: 46252 - DNA, 22 bp, synthetic construct
  misc_feature 1..22: note = chemically synthesized
  source 1..22: mol_type = other DNA
cgaacagccacaatcggggggc

SEQ ID NO: 46253 - DNA, 22 bp, synthetic construct
  misc_feature 1..22: note = chemically synthesized
  source 1..22: mol_type = other DNA
ctctctttcccctcacgatctt

SEQ ID NO: 46254 - DNA, 22 bp, synthetic construct
  misc_feature 1..22: note = chemically synthesized
  source 1..22: mol_type = other DNA
tctttcccctcacgatcttcct

SEQ ID NO: 46255 - DNA, 22 bp, synthetic construct
  misc_feature 1..22: note = chemically synthesized
  source 1..22: mol_type = other DNA
tttcccctcacgatcttcctga

SEQ ID NO: 46256 - DNA, 22 bp, synthetic construct
  misc_feature 1..22: note = chemically synthesized
  source 1..22: mol_type = other DNA
tcccctcacgatcttcctgaac

SEQ ID NO: 46257 - DNA, 22 bp, synthetic construct
  misc_feature 1..22: note = chemically synthesized
  source 1..22: mol_type = other DNA
cccctcacgatcttcctgaaca

SEQ ID NO: 46258 - DNA, 22 bp, synthetic construct
  misc_feature 1..22: note = chemically synthesized
  source 1..22: mol_type = other DNA
ccctcacgatcttcctgaacag

SEQ ID NO: 46259 - DNA, 22 bp, synthetic construct
  misc_feature 1..22: note = chemically synthesized
  source 1..22: mol_type = other DNA
acgatcttcctgaacagggcag

SEQ ID NO: 46260 - DNA, 22 bp, synthetic construct
  misc_feature 1..22: note = chemically synthesized
  source 1..22: mol_type = other DNA
cctgaacagggcagtagtctag

SEQ ID NO: 46261 - DNA, 22 bp, synthetic construct
  misc_feature 1..22: note = chemically synthesized
  source 1..22: mol_type = other DNA
ctgaacagggcagtagtctagc

SEQ ID NO: 46262 - DNA, 22 bp, synthetic construct
  misc_feature 1..22: note = chemically synthesized
  source 1..22: mol_type = other DNA
aacagggcagtagtctagcatc

SEQ ID NO: 46263 - DNA, 22 bp, synthetic construct
  misc_feature 1..22: note = chemically synthesized
  source 1..22: mol_type = other DNA
gcatccactgaagtcctgaagt

SEQ ID NO: 46264 - DNA, 22 bp, synthetic construct
  misc_feature 1..22: note = chemically synthesized
  source 1..22: mol_type = other DNA
aagtcctgaagtggtgaaggag

SEQ ID NO: 46265 - DNA, 22 bp, synthetic construct
  misc_feature 1..22: note = chemically synthesized
  source 1..22: mol_type = other DNA
aagtggtgaaggagccccagac

SEQ ID NO: 46266 - DNA, 22 bp, synthetic construct
  misc_feature 1..22: note = chemically synthesized
  source 1..22: mol_type = other DNA
tgagcacctccacagcctttct

SEQ ID NO: 46267 - DNA, 22 bp, synthetic construct
  misc_feature 1..22: note = chemically synthesized
  source 1..22: mol_type = other DNA
agcacctccacagcctttctgg

SEQ ID NO: 46268 - DNA, 22 bp, synthetic construct
  misc_feature 1..22: note = chemically synthesized
  source 1..22: mol_type = other DNA
cacagcctttctggcccatccc

SEQ ID NO: 46269 - DNA, 22 bp, synthetic construct
  misc_feature 1..22: note = chemically synthesized
  source 1..22: mol_type = other DNA
tctggcccatcccaataaacag

SEQ ID NO: 46270 - DNA, 22 bp, synthetic construct
  misc_feature 1..22: note = chemically synthesized
  source 1..22: mol_type = other DNA
ctggcccatcccaataaacagc

SEQ ID NO: 46271 - DNA, 22 bp, synthetic construct
  misc_feature 1..22: note = chemically synthesized
  source 1..22: mol_type = other DNA
tggcccatcccaataaacagca

SEQ ID NO: 46272 - DNA, 22 bp, synthetic construct
  misc_feature 1..22: note = chemically synthesized
  source 1..22: mol_type = other DNA
gcccatcccaataaacagcaat

SEQ ID NO: 46273 - DNA, 22 bp, synthetic construct
  misc_feature 1..22: note = chemically synthesized
  source 1..22: mol_type = other DNA
tattctcccagtcaccgagcca

SEQ ID NO: 46274 - DNA, 22 bp, synthetic construct
  misc_feature 1..22: note = chemically synthesized
  source 1..22: mol_type = other DNA
ttctcccagtcaccgagccaca

SEQ ID NO: 46275 - DNA, 22 bp, synthetic construct
  misc_feature 1..22: note = chemically synthesized
  source 1..22: mol_type = other DNA
tcccagtcaccgagccacacat

SEQ ID NO: 46276 - DNA, 22 bp, synthetic construct
  misc_feature 1..22: note = chemically synthesized
  source 1..22: mol_type = other DNA
ccagtcaccgagccacacattt

SEQ ID NO: 46277 - DNA, 22 bp, synthetic construct
  misc_feature 1..22: note = chemically synthesized
  source 1..22: mol_type = other DNA
tggggtccatcttgactcctcc

SEQ ID NO: 46278 - DNA, 22 bp, synthetic construct
  misc_feature 1..22: note = chemically synthesized
  source 1..22: mol_type = other DNA
ggggtccatcttgactcctccc

SEQ ID NO: 46279 - DNA, 22 bp, synthetic construct
  misc_feature 1..22: note = chemically synthesized
  source 1..22: mol_type = other DNA
gggtccatcttgactcctccct

SEQ ID NO: 46280 - DNA, 22 bp, synthetic construct
  misc_feature 1..22: note = chemically synthesized
  source 1..22: mol_type = other DNA
gactcctcccttcctttcatac

SEQ ID NO: 46281 - DNA, 22 bp, synthetic construct
  misc_feature 1..22: note = chemically synthesized
  source 1..22: mol_type = other DNA
actcctcccttcctttcataca

SEQ ID NO: 46282 - DNA, 22 bp, synthetic construct
  misc_feature 1..22: note = chemically synthesized
  source 1..22: mol_type = other DNA
ctcccttcctttcatacaaccc

SEQ ID NO: 46283 - DNA, 22 bp, synthetic construct
  misc_feature 1..22: note = chemically synthesized
  source 1..22: mol_type = other DNA
ccttcctttcatacaacccatc

SEQ ID NO: 46284 - DNA, 22 bp, synthetic construct
  misc_feature 1..22: note = chemically synthesized
  source 1..22: mol_type = other DNA
cctttcatacaacccatcccac

SEQ ID NO: 46285 - DNA, 22 bp, synthetic construct
  misc_feature 1..22: note = chemically synthesized
  source 1..22: mol_type = other DNA
ctttcatacaacccatcccacc

SEQ ID NO: 46286 - DNA, 22 bp, synthetic construct
  misc_feature 1..22: note = chemically synthesized
  source 1..22: mol_type = other DNA
tcatacaacccatcccaccagt

SEQ ID NO: 46287 - DNA, 22 bp, synthetic construct
  misc_feature 1..22: note = chemically synthesized
  source 1..22: mol_type = other DNA
catacaacccatcccaccagtc

SEQ ID NO: 46288 - DNA, 22 bp, synthetic construct
  misc_feature 1..22: note = chemically synthesized
  source 1..22: mol_type = other DNA
atacaacccatcccaccagtca

SEQ ID NO: 46289 - DNA, 22 bp, synthetic construct
  misc_feature 1..22: note = chemically synthesized
  source 1..22: mol_type = other DNA
ccggttttcccttcgaagtatg

SEQ ID NO: 46290 - DNA, 22 bp, synthetic construct
  misc_feature 1..22: note = chemically synthesized
  source 1..22: mol_type = other DNA
tcccttcgaagtatgtccagaa

SEQ ID NO: 46291 - DNA, 22 bp, synthetic construct
  misc_feature 1..22: note = chemically synthesized
  source 1..22: mol_type = other DNA
cccttcgaagtatgtccagaat

SEQ ID NO: 46292 - DNA, 22 bp, synthetic construct
  misc_feature 1..22: note = chemically synthesized
  source 1..22: mol_type = other DNA
ccttcgaagtatgtccagaatc

SEQ ID NO: 46293 - DNA, 22 bp, synthetic construct
  misc_feature 1..22: note = chemically synthesized
  source 1..22: mol_type = other DNA
cgaagtatgtccagaatccagc

SEQ ID NO: 46294 - DNA, 22 bp, synthetic construct
  misc_feature 1..22: note = chemically synthesized
  source 1..22: mol_type = other DNA
gaagtatgtccagaatccagcc

SEQ ID NO: 46295 - DNA, 22 bp, synthetic construct
  misc_feature 1..22: note = chemically synthesized
  source 1..22: mol_type = other DNA
ctcacgtccccaccaccctggt

SEQ ID NO: 46296 - DNA, 22 bp, synthetic construct
  misc_feature 1..22: note = chemically synthesized
  source 1..22: mol_type = other DNA
tcacgtccccaccaccctggtc

SEQ ID NO: 46297 - DNA, 22 bp, synthetic construct
  misc_feature 1..22: note = chemically synthesized
  source 1..22: mol_type = other DNA
acgtccccaccaccctggtcca

SEQ ID NO: 46298 - DNA, 22 bp, synthetic construct
  misc_feature 1..22: note = chemically synthesized
  source 1..22: mol_type = other DNA
gtccacgccaccatcacttgcc

SEQ ID NO: 46299 - DNA, 22 bp, synthetic construct
  misc_feature 1..22: note = chemically synthesized
  source 1..22: mol_type = other DNA
gcctaaaatttgccttctgact

SEQ ID NO: 46300 - DNA, 22 bp, synthetic construct
  misc_feature 1..22: note = chemically synthesized
  source 1..22: mol_type = other DNA
cctaaaatttgccttctgactg

SEQ ID NO: 46301 - DNA, 22 bp, synthetic construct
  misc_feature 1..22: note = chemically synthesized
  source 1..22: mol_type = other DNA
aaatttgccttctgactgcttc

SEQ ID NO: 46302 - DNA, 22 bp, synthetic construct
  misc_feature 1..22: note = chemically synthesized
  source 1..22: mol_type = other DNA
gccttctgactgcttctgcctc

SEQ ID NO: 46303 - DNA, 22 bp, synthetic construct
  misc_feature 1..22: note = chemically synthesized
  source 1..22: mol_type = other DNA
ccttctgactgcttctgcctca

SEQ ID NO: 46304 - DNA, 22 bp, synthetic construct
  misc_feature 1..22: note = chemically synthesized
  source 1..22: mol_type = other DNA
ctgactgcttctgcctcacttt

SEQ ID NO: 46305 - DNA, 22 bp, synthetic construct
  misc_feature 1..22: note = chemically synthesized
  source 1..22: mol_type = other DNA
tgactgcttctgcctcactttc

SEQ ID NO: 46306 - DNA, 22 bp, synthetic construct
  misc_feature 1..22: note = chemically synthesized
  source 1..22: mol_type = other DNA
actgcttctgcctcactttccc

SEQ ID NO: 46307 - DNA, 22 bp, synthetic construct
  misc_feature 1..22: note = chemically synthesized
  source 1..22: mol_type = other DNA
cttctgcctcactttcccatgc

SEQ ID NO: 46308 - DNA, 22 bp, synthetic construct
  misc_feature 1..22: note = chemically synthesized
  source 1..22: mol_type = other DNA
ctgcctcactttcccatgcttg

SEQ ID NO: 46309 - DNA, 22 bp, synthetic construct
  misc_feature 1..22: note = chemically synthesized
  source 1..22: mol_type = other DNA
tgcctcactttcccatgcttga

SEQ ID NO: 46310 - DNA, 22 bp, synthetic construct
  misc_feature 1..22: note = chemically synthesized
  source 1..22: mol_type = other DNA
cctcactttcccatgcttgagt

SEQ ID NO: 46311 - DNA, 22 bp, synthetic construct
  misc_feature 1..22: note = chemically synthesized
  source 1..22: mol_type = other DNA
actttcccatgcttgagtctca

SEQ ID NO: 46312 - DNA, 22 bp, synthetic construct
  misc_feature 1..22: note = chemically synthesized
  source 1..22: mol_type = other DNA
tcccatgcttgagtctcaaaat

SEQ ID NO: 46313 - DNA, 22 bp, synthetic construct
  misc_feature 1..22: note = chemically synthesized
  source 1..22: mol_type = other DNA
cccatgcttgagtctcaaaatg

SEQ ID NO: 46314 - DNA, 22 bp, synthetic construct
  misc_feature 1..22: note = chemically synthesized
  source 1..22: mol_type = other DNA
ccatgcttgagtctcaaaatgc

SEQ ID NO: 46315 - DNA, 22 bp, synthetic construct
  misc_feature 1..22: note = chemically synthesized
  source 1..22: mol_type = other DNA
gagtctcaaaatgcggcccaag

SEQ ID NO: 46316 - DNA, 22 bp, synthetic construct
  misc_feature 1..22: note = chemically synthesized
  source 1..22: mol_type = other DNA
agtctcaaaatgcggcccaaga

SEQ ID NO: 46317 - DNA, 22 bp, synthetic construct
  misc_feature 1..22: note = chemically synthesized
  source 1..22: mol_type = other DNA
aaaatgcggcccaagagactct

SEQ ID NO: 46318 - DNA, 22 bp, synthetic construct
  misc_feature 1..22: note = chemically synthesized
  source 1..22: mol_type = other DNA
tctggaagcgcaagtcatatga

SEQ ID NO: 46319 - DNA, 22 bp, synthetic construct
  misc_feature 1..22: note = chemically synthesized
  source 1..22: mol_type = other DNA
tggaagcgcaagtcatatgaca

SEQ ID NO: 46320 - DNA, 22 bp, synthetic construct
  misc_feature 1..22: note = chemically synthesized
  source 1..22: mol_type = other DNA
gaagcgcaagtcatatgacatc

SEQ ID NO: 46321 - DNA, 22 bp, synthetic construct
  misc_feature 1..22: note = chemically synthesized
  source 1..22: mol_type = other DNA
ctccagtggcttccatctccct

SEQ ID NO: 46322 - DNA, 22 bp, synthetic construct
  misc_feature 1..22: note = chemically synthesized
  source 1..22: mol_type = other DNA
cagtggcttccatctcccttgg

SEQ ID NO: 46323 - DNA, 22 bp, synthetic construct
  misc_feature 1..22: note = chemically synthesized
  source 1..22: mol_type = other DNA
ccatctcccttggagtcagagc

SEQ ID NO: 46324 - DNA, 22 bp, synthetic construct
  misc_feature 1..22: note = chemically synthesized
  source 1..22: mol_type = other DNA
catctcccttggagtcagagcc

SEQ ID NO: 46325 - DNA, 22 bp, synthetic construct
  misc_feature 1..22: note = chemically synthesized
  source 1..22: mol_type = other DNA
ccttggagtcagagccaaaaat

SEQ ID NO: 46326 - DNA, 22 bp, synthetic construct
  misc_feature 1..22: note = chemically synthesized
  source 1..22: mol_type = other DNA
ggagtcagagccaaaaatccct

SEQ ID NO: 46327 - DNA, 22 bp, synthetic construct
  misc_feature 1..22: note = chemically synthesized
  source 1..22: mol_type = other DNA
gagtcagagccaaaaatccctg

SEQ ID NO: 46328 - DNA, 22 bp, synthetic construct
  misc_feature 1..22: note = chemically synthesized
  source 1..22: mol_type = other DNA
ctctacgtccttcaaggagcca

SEQ ID NO: 46329 - DNA, 22 bp, synthetic construct
  misc_feature 1..22: note = chemically synthesized
  source 1..22: mol_type = other DNA
tacgtccttcaaggagccagct

SEQ ID NO: 46330 - DNA, 22 bp, synthetic construct
  misc_feature 1..22: note = chemically synthesized
  source 1..22: mol_type = other DNA
cgtccttcaaggagccagctgg

SEQ ID NO: 46331 - DNA, 22 bp, synthetic construct
  misc_feature 1..22: note = chemically synthesized
  source 1..22: mol_type = other DNA
caaggagccagctggtctcctc

SEQ ID NO: 46332 - DNA, 22 bp, synthetic construct
  misc_feature 1..22: note = chemically synthesized
  source 1..22: mol_type = other DNA
aaggagccagctggtctcctct

SEQ ID NO: 46333 - DNA, 22 bp, synthetic construct
  misc_feature 1..22: note = chemically synthesized
  source 1..22: mol_type = other DNA
gtctcctctcctcctcctcctg

SEQ ID NO: 46334 - DNA, 22 bp, synthetic construct
  misc_feature 1..22: note = chemically synthesized
  source 1..22: mol_type = other DNA
ctctcctcctcctcctgcactc

SEQ ID NO: 46335 - DNA, 22 bp, synthetic construct
  misc_feature 1..22: note = chemically synthesized
  source 1..22: mol_type = other DNA
tcctcctcctcctgcactcttt

SEQ ID NO: 46336 - DNA, 22 bp, synthetic construct
  misc_feature 1..22: note = chemically synthesized
  source 1..22: mol_type = other DNA
ctcctcctcctgcactctttcc

SEQ ID NO: 46337 - DNA, 22 bp, synthetic construct
  misc_feature 1..22: note = chemically synthesized
  source 1..22: mol_type = other DNA
ctcctcctgcactctttccact

SEQ ID NO: 46338 - DNA, 22 bp, synthetic construct
  misc_feature 1..22: note = chemically synthesized
  source 1..22: mol_type = other DNA
ctcctgcactctttccactctg

SEQ ID NO: 46339 - DNA, 22 bp, synthetic construct
  misc_feature 1..22: note = chemically synthesized
  source 1..22: mol_type = other DNA
ctgcactctttccactctgacc

SEQ ID NO: 46340 - DNA, 22 bp, synthetic construct
  misc_feature 1..22: note = chemically synthesized
  source 1..22: mol_type = other DNA
cactctttccactctgacctca

SEQ ID NO: 46341 - DNA, 22 bp, synthetic construct
  misc_feature 1..22: note = chemically synthesized
  source 1..22: mol_type = other DNA
tttccactctgacctcagggcc

SEQ ID NO: 46342 - DNA, 22 bp, synthetic construct
  misc_feature 1..22: note = chemically synthesized
  source 1..22: mol_type = other DNA
tccactctgacctcagggcccc

SEQ ID NO: 46343 - DNA, 22 bp, synthetic construct
  misc_feature 1..22: note = chemically synthesized
  source 1..22: mol_type = other DNA
ccactctgacctcagggcccct

SEQ ID NO: 46344 - DNA, 22 bp, synthetic construct
  misc_feature 1..22: note = chemically synthesized
  source 1..22: mol_type = other DNA
cactctgacctcagggcccctt

SEQ ID NO: 46345 - DNA, 22 bp, synthetic construct
  misc_feature 1..22: note = chemically synthesized
  source 1..22: mol_type = other DNA
tgacctcagggccccttgctcc

SEQ ID NO: 46346 - DNA, 22 bp, synthetic construct
  misc_feature 1..22: note = chemically synthesized
  source 1..22: mol_type = other DNA
acctcagggccccttgctcctc

SEQ ID NO: 46347 - DNA, 22 bp, synthetic construct
  misc_feature 1..22: note = chemically synthesized
  source 1..22: mol_type = other DNA
agggccccttgctcctcctcca

SEQ ID NO: 46348 - DNA, 22 bp, synthetic construct
  misc_feature 1..22: note = chemically synthesized
  source 1..22: mol_type = other DNA
gctcctcctccagtagccaggc

SEQ ID NO: 46349 - DNA, 22 bp, synthetic construct
  misc_feature 1..22: note = chemically synthesized
  source 1..22: mol_type = other DNA
ctcctcctccagtagccaggcg

SEQ ID NO: 46350 - DNA, 22 bp, synthetic construct
  misc_feature 1..22: note = chemically synthesized
  source 1..22: mol_type = other DNA
ctcctccagtagccaggcgtat

SEQ ID NO: 46351 - DNA, 22 bp, synthetic construct
  misc_feature 1..22: note = chemically synthesized
  source 1..22: mol_type = other DNA
ctccagtagccaggcgtattac

SEQ ID NO: 46352 - DNA, 22 bp, synthetic construct
  misc_feature 1..22: note = chemically synthesized
  source 1..22: mol_type = other DNA
cagtagccaggcgtattacaca

SEQ ID NO: 46353 - DNA, 22 bp, synthetic construct
  misc_feature 1..22: note = chemically synthesized
  source 1..22: mol_type = other DNA
cacacaaggtctctgctctcta

SEQ ID NO: 46354 - DNA, 22 bp, synthetic construct
  misc_feature 1..22: note = chemically synthesized
  source 1..22: mol_type = other DNA
tgctctctacacactcttcctg

SEQ ID NO: 46355 - DNA, 22 bp, synthetic construct
  misc_feature 1..22: note = chemically synthesized
  source 1..22: mol_type = other DNA
ctctctacacactcttcctgga

SEQ ID NO: 46356 - DNA, 22 bp, synthetic construct
  misc_feature 1..22: note = chemically synthesized
  source 1..22: mol_type = other DNA
tctacacactcttcctggaacc

SEQ ID NO: 46357 - DNA, 22 bp, synthetic construct
  misc_feature 1..22: note = chemically synthesized
  source 1..22: mol_type = other DNA
tacacactcttcctggaaccat

SEQ ID NO: 46358 - DNA, 22 bp, synthetic construct
  misc_feature 1..22: note = chemically synthesized
  source 1..22: mol_type = other DNA
cacactcttcctggaaccatct

SEQ ID NO: 46359 - DNA, 22 bp, synthetic construct
  misc_feature 1..22: note = chemically synthesized
  source 1..22: mol_type = other DNA
ttcctggaaccatcttctcaaa

SEQ ID NO: 46360 - DNA, 22 bp, synthetic construct
  misc_feature 1..22: note = chemically synthesized
  source 1..22: mol_type = other DNA
cctggaaccatcttctcaaaat

SEQ ID NO: 46361 - DNA, 22 bp, synthetic construct
  misc_feature 1..22: note = chemically synthesized
  source 1..22: mol_type = other DNA
ctggaaccatcttctcaaaatt

SEQ ID NO: 46362 - DNA, 22 bp, synthetic construct
  misc_feature 1..22: note = chemically synthesized
  source 1..22: mol_type = other DNA
gaaccatcttctcaaaattctc

SEQ ID NO: 46363 - DNA, 22 bp, synthetic construct
  misc_feature 1..22: note = chemically synthesized
  source 1..22: mol_type = other DNA
ctcaaaattctcatggccaact

SEQ ID NO: 46364 - DNA, 22 bp, synthetic construct
  misc_feature 1..22: note = chemically synthesized
  source 1..22: mol_type = other DNA
tcaaaattctcatggccaactt

SEQ ID NO: 46365 - DNA, 22 bp, synthetic construct
  misc_feature 1..22: note = chemically synthesized
  source 1..22: mol_type = other DNA
aaaattctcatggccaacttcc

SEQ ID NO: 46366 - DNA, 22 bp, synthetic construct
  misc_feature 1..22: note = chemically synthesized
  source 1..22: mol_type = other DNA
tcatggccaacttcctcacctc

SEQ ID NO: 46367 - DNA, 22 bp, synthetic construct
  misc_feature 1..22: note = chemically synthesized
  source 1..22: mol_type = other DNA
atggccaacttcctcacctctt

SEQ ID NO: 46368 - DNA, 22 bp, synthetic construct
  misc_feature 1..22: note = chemically synthesized
  source 1..22: mol_type = other DNA
cctcacctctttggagcctttg

SEQ ID NO: 46369 - DNA, 22 bp, synthetic construct
  misc_feature 1..22: note = chemically synthesized
  source 1..22: mol_type = other DNA
ctcacctctttggagcctttgc

SEQ ID NO: 46370 - DNA, 22 bp, synthetic construct
  misc_feature 1..22: note = chemically synthesized
  source 1..22: mol_type = other DNA
acctctttggagcctttgcttc

SEQ ID NO: 46371 - DNA, 22 bp, synthetic construct
  misc_feature 1..22: note = chemically synthesized
  source 1..22: mol_type = other DNA
tttggagcctttgcttctcatt

SEQ ID NO: 46372 - DNA, 22 bp, synthetic construct
  misc_feature 1..22: note = chemically synthesized
  source 1..22: mol_type = other DNA
tggagcctttgcttctcattgg

SEQ ID NO: 46373 - DNA, 22 bp, synthetic construct
  misc_feature 1..22: note = chemically synthesized
  source 1..22: mol_type = other DNA
ggagcctttgcttctcattggg

SEQ ID NO: 46374 - DNA, 22 bp, synthetic construct
  misc_feature 1..22: note = chemically synthesized
  source 1..22: mol_type = other DNA
gagcctttgcttctcattgggc

SEQ ID NO: 46375 - DNA, 22 bp, synthetic construct
  misc_feature 1..22: note = chemically synthesized
  source 1..22: mol_type = other DNA
tgcttctcattgggccttccct

SEQ ID NO: 46376 - DNA, 22 bp, synthetic construct
  misc_feature 1..22: note = chemically synthesized
  source 1..22: mol_type = other DNA
gcttctcattgggccttcccta

SEQ ID NO: 46377 - DNA, 22 bp, synthetic construct
  misc_feature 1..22: note = chemically synthesized
  source 1..22: mol_type = other DNA
cttctcattgggccttccctaa

SEQ ID NO: 46378 - DNA, 22 bp, synthetic construct
  misc_feature 1..22: note = chemically synthesized
  source 1..22: mol_type = other DNA
ctcattgggccttccctaatta

SEQ ID NO: 46379 - DNA, 22 bp, synthetic construct
  misc_feature 1..22: note = chemically synthesized
  source 1..22: mol_type = other DNA
tcattgggccttccctaattat

SEQ ID NO: 46380 - DNA, 22 bp, synthetic construct
  misc_feature 1..22: note = chemically synthesized
  source 1..22: mol_type = other DNA
attgggccttccctaattatcc

SEQ ID NO: 46381 - DNA, 22 bp, synthetic construct
  misc_feature 1..22: note = chemically synthesized
  source 1..22: mol_type = other DNA
ggccttccctaattatcctatt

SEQ ID NO: 46382 - DNA, 22 bp, synthetic construct
  misc_feature 1..22: note = chemically synthesized
  source 1..22: mol_type = other DNA
ccctaattatcctatttaaaag

SEQ ID NO: 46383 - DNA, 22 bp, synthetic construct
  misc_feature 1..22: note = chemically synthesized
  source 1..22: mol_type = other DNA
cctaattatcctatttaaaagc

SEQ ID NO: 46384 - DNA, 22 bp, synthetic construct
  misc_feature 1..22: note = chemically synthesized
  source 1..22: mol_type = other DNA
attatcctatttaaaagcctgg

SEQ ID NO: 46385 - DNA, 22 bp, synthetic construct
  misc_feature 1..22: note = chemically synthesized
  source 1..22: mol_type = other DNA
tcctatttaaaagcctggtcac

SEQ ID NO: 46386 - DNA, 22 bp, synthetic construct
  misc_feature 1..22: note = chemically synthesized
  source 1..22: mol_type = other DNA
tttaaaagcctggtcaccatgc

SEQ ID NO: 46387 - DNA, 22 bp, synthetic construct
  misc_feature 1..22: note = chemically synthesized
  source 1..22: mol_type = other DNA
aaaagcctggtcaccatgcacc

SEQ ID NO: 46388 - DNA, 22 bp, synthetic construct
  misc_feature 1..22: note = chemically synthesized
  source 1..22: mol_type = other DNA
aaagcctggtcaccatgcaccc

SEQ ID NO: 46389 - DNA, 22 bp, synthetic construct
  misc_feature 1..22: note = chemically synthesized
  source 1..22: mol_type = other DNA
gtcaccatgcaccccttacccc

SEQ ID NO: 46390 - DNA, 22 bp, synthetic construct
  misc_feature 1..22: note = chemically synthesized
  source 1..22: mol_type = other DNA
acccctcttccccaccttattt

SEQ ID NO: 46391 - DNA, 22 bp, synthetic construct
  misc_feature 1..22: note = chemically synthesized
  source 1..22: mol_type = other DNA
cccctcttccccaccttatttt

SEQ ID NO: 46392 - DNA, 22 bp, synthetic construct
  misc_feature 1..22: note = chemically synthesized
  source 1..22: mol_type = other DNA
ttccccaccttattttcgtgca

SEQ ID NO: 46393 - DNA, 22 bp, synthetic construct
  misc_feature 1..22: note = chemically synthesized
  source 1..22: mol_type = other DNA
ccccaccttattttcgtgcagg

SEQ ID NO: 46394 - DNA, 22 bp, synthetic construct
  misc_feature 1..22: note = chemically synthesized
  source 1..22: mol_type = other DNA
cccaccttattttcgtgcaggc

SEQ ID NO: 46395 - DNA, 22 bp, synthetic construct
  misc_feature 1..22: note = chemically synthesized
  source 1..22: mol_type = other DNA
attttcgtgcaggcagtttgat

SEQ ID NO: 46396 - DNA, 22 bp, synthetic construct
  misc_feature 1..22: note = chemically synthesized
  source 1..22: mol_type = other DNA
ttttcgtgcaggcagtttgatc

SEQ ID NO: 46397 - DNA, 22 bp, synthetic construct
  misc_feature 1..22: note = chemically synthesized
  source 1..22: mol_type = other DNA
tcgtgcaggcagtttgatcttc

SEQ ID NO: 46398 - DNA, 22 bp, synthetic construct
  misc_feature 1..22: note = chemically synthesized
  source 1..22: mol_type = other DNA
cgtgcaggcagtttgatcttct

SEQ ID NO: 46399 - DNA, 22 bp, synthetic construct
  misc_feature 1..22: note = chemically synthesized
  source 1..22: mol_type = other DNA
gtgcaggcagtttgatcttctc

SEQ ID NO: 46400 - DNA, 22 bp, synthetic construct
  misc_feature 1..22: note = chemically synthesized
  source 1..22: mol_type = other DNA
gatcttctcttgccatactata

SEQ ID NO: 46401 - DNA, 22 bp, synthetic construct
  misc_feature 1..22: note = chemically synthesized
  source 1..22: mol_type = other DNA
atcttctcttgccatactatat

SEQ ID NO: 46402 - DNA, 22 bp, synthetic construct
  misc_feature 1..22: note = chemically synthesized
  source 1..22: mol_type = other DNA
ctcttgccatactatataattc

SEQ ID NO: 46403 - DNA, 22 bp, synthetic construct
  misc_feature 1..22: note = chemically synthesized
  source 1..22: mol_type = other DNA
tcttgccatactatataattca

SEQ ID NO: 46404 - DNA, 22 bp, synthetic construct
  misc_feature 1..22: note = chemically synthesized
  source 1..22: mol_type = other DNA
ttgccatactatataattcaca

SEQ ID NO: 46405 - DNA, 22 bp, synthetic construct
  misc_feature 1..22: note = chemically synthesized
  source 1..22: mol_type = other DNA
gccatactatataattcacata

SEQ ID NO: 46406 - DNA, 22 bp, synthetic construct
  misc_feature 1..22: note = chemically synthesized
  source 1..22: mol_type = other DNA
ccatactatataattcacatat

SEQ ID NO: 46407 - DNA, 22 bp, synthetic construct
  misc_feature 1..22: note = chemically synthesized
  source 1..22: mol_type = other DNA
tataattcacatatttattggt

SEQ ID NO: 46408 - DNA, 22 bp, synthetic construct
  misc_feature 1..22: note = chemically synthesized
  source 1..22: mol_type = other DNA
acatatttattggtgcatcttc

SEQ ID NO: 46409 - DNA, 22 bp, synthetic construct
  misc_feature 1..22: note = chemically synthesized
  source 1..22: mol_type = other DNA
attggtgcatcttctgtctctc

SEQ ID NO: 46410 - DNA, 22 bp, synthetic construct
  misc_feature 1..22: note = chemically synthesized
  source 1..22: mol_type = other DNA
ttggtgcatcttctgtctctcc

SEQ ID NO: 46411 - DNA, 22 bp, synthetic construct
  misc_feature 1..22: note = chemically synthesized
  source 1..22: mol_type = other DNA
gtgcatcttctgtctctcccca

SEQ ID NO: 46412 - DNA, 22 bp, synthetic construct
  misc_feature 1..22: note = chemically synthesized
  source 1..22: mol_type = other DNA
ctgtctctccccagctagaaag

SEQ ID NO: 46413 - DNA, 22 bp, synthetic construct
  misc_feature 1..22: note = chemically synthesized
  source 1..22: mol_type = other DNA
tgtctctccccagctagaaagg

SEQ ID NO: 46414 - DNA, 22 bp, synthetic construct
  misc_feature 1..22: note = chemically synthesized
  source 1..22: mol_type = other DNA
tctctccccagctagaaagggg

SEQ ID NO: 46415 - DNA, 22 bp, synthetic construct
  misc_feature 1..22: note = chemically synthesized
  source 1..22: mol_type = other DNA
tccccagctagaaagggggtgc

SEQ ID NO: 46416 - DNA, 22 bp, synthetic construct
  misc_feature 1..22: note = chemically synthesized
  source 1..22: mol_type = other DNA
cccagctagaaagggggtgcca

SEQ ID NO: 46417 - DNA, 22 bp, synthetic construct
  misc_feature 1..22: note = chemically synthesized
  source 1..22: mol_type = other DNA
gaaagggggtgccacaagagca

SEQ ID NO: 46418 - DNA, 22 bp, synthetic construct
  misc_feature 1..22: note = chemically synthesized
  source 1..22: mol_type = other DNA
ttaaggctttctatgcccaaca

SEQ ID NO: 46419 - DNA, 22 bp, synthetic construct
  misc_feature 1..22: note = chemically synthesized
  source 1..22: mol_type = other DNA
taaggctttctatgcccaacac

SEQ ID NO: 46420 - DNA, 22 bp, synthetic construct
  misc_feature 1..22: note = chemically synthesized
  source 1..22: mol_type = other DNA
aaggctttctatgcccaacacc

SEQ ID NO: 46421 - DNA, 22 bp, synthetic construct
  misc_feature 1..22: note = chemically synthesized
  source 1..22: mol_type = other DNA
aggctttctatgcccaacacca

SEQ ID NO: 46422 - DNA, 22 bp, synthetic construct
  misc_feature 1..22: note = chemically synthesized
  source 1..22: mol_type = other DNA
tctatgcccaacaccaagaacc

SEQ ID NO: 46423 - DNA, 22 bp, synthetic construct
  misc_feature 1..22: note = chemically synthesized
  source 1..22: mol_type = other DNA
ctatgcccaacaccaagaaccg

SEQ ID NO: 46424 - DNA, 22 bp, synthetic construct
  misc_feature 1..22: note = chemically synthesized
  source 1..22: mol_type = other DNA
tatgcccaacaccaagaaccgt

SEQ ID NO: 46425 - DNA, 22 bp, synthetic construct
  misc_feature 1..22: note = chemically synthesized
  source 1..22: mol_type = other DNA
tgcccaacaccaagaaccgttc

SEQ ID NO: 46426 - DNA, 22 bp, synthetic construct
  misc_feature 1..22: note = chemically synthesized
  source 1..22: mol_type = other DNA
ccagcatgtggcaggtgttcaa

SEQ ID NO: 46427 - DNA, 22 bp, synthetic construct
  misc_feature 1..22: note = chemically synthesized
  source 1..22: mol_type = other DNA
aaaatatttgttgaaaaatgaa

SEQ ID NO: 46428 - DNA, 22 bp, synthetic construct
  misc_feature 1..22: note = chemically synthesized
  source 1..22: mol_type = other DNA
gttgaaaaatgaatgagtgaac

SEQ ID NO: 46429 - DNA, 22 bp, synthetic construct
  misc_feature 1..22: note = chemically synthesized
  source 1..22: mol_type = other DNA
ttgaaaaatgaatgagtgaacc

SEQ ID NO: 46430 - DNA, 22 bp, synthetic construct
  misc_feature 1..22: note = chemically synthesized
  source 1..22: mol_type = other DNA
aaaaatgaatgagtgaaccttc

SEQ ID NO: 46431 - DNA, 22 bp, synthetic construct
  misc_feature 1..22: note = chemically synthesized
  source 1..22: mol_type = other DNA
cacaattccaaactgccaggag

SEQ ID NO: 46432 - DNA, 22 bp, synthetic construct
  misc_feature 1..22: note = chemically synthesized
  source 1..22: mol_type = other DNA
acaattccaaactgccaggagg

SEQ ID NO: 46433 - DNA, 22 bp, synthetic construct
  misc_feature 1..22: note = chemically synthesized
  source 1..22: mol_type = other DNA
caaactgccaggaggccactca

SEQ ID NO: 46434 - DNA, 22 bp, synthetic construct
  misc_feature 1..22: note = chemically synthesized
  source 1..22: mol_type = other DNA
ccaggaggccactcaatgccat

SEQ ID NO: 46435 - DNA, 22 bp, synthetic construct
  misc_feature 1..22: note = chemically synthesized
  source 1..22: mol_type = other DNA
aatgccatatctataaaactgt

SEQ ID NO: 46436 - DNA, 22 bp, synthetic construct
  misc_feature 1..22: note = chemically synthesized
  source 1..22: mol_type = other DNA
taaaactgtcaggcagcccaac

SEQ ID NO: 46437 - DNA, 22 bp, synthetic construct
  misc_feature 1..22: note = chemically synthesized
  source 1..22: mol_type = other DNA
tcaggcagcccaacctgggggc

SEQ ID NO: 46438 - DNA, 22 bp, synthetic construct
  misc_feature 1..22: note = chemically synthesized
  source 1..22: mol_type = other DNA
ggggcactttagctttggatct

SEQ ID NO: 46439 - DNA, 22 bp, synthetic construct
  misc_feature 1..22: note = chemically synthesized
  source 1..22: mol_type = other DNA
tagctttggatcttgggtttga

SEQ ID NO: 46440 - DNA, 22 bp, synthetic construct
  misc_feature 1..22: note = chemically synthesized
  source 1..22: mol_type = other DNA
agctttggatcttgggtttgag

SEQ ID NO: 46441 - DNA, 22 bp, synthetic construct
  misc_feature 1..22: note = chemically synthesized
  source 1..22: mol_type = other DNA
gctttggatcttgggtttgagc

SEQ ID NO: 46442 - DNA, 22 bp, synthetic construct
  misc_feature 1..22: note = chemically synthesized
  source 1..22: mol_type = other DNA
tggatcttgggtttgagccaga

SEQ ID NO: 46443 - DNA, 22 bp, synthetic construct
  misc_feature 1..22: note = chemically synthesized
  source 1..22: mol_type = other DNA
ggatcttgggtttgagccagat

SEQ ID NO: 46444 - DNA, 22 bp, synthetic construct
  misc_feature 1..22: note = chemically synthesized
  source 1..22: mol_type = other DNA
gatcttgggtttgagccagatt

SEQ ID NO: 46445 - DNA, 22 bp, synthetic construct
  misc_feature 1..22: note = chemically synthesized
  source 1..22: mol_type = other DNA
gggtttgagccagattccattt

SEQ ID NO: 46446 - DNA, 22 bp, synthetic construct
  misc_feature 1..22: note = chemically synthesized
  source 1..22: mol_type = other DNA
ggtttgagccagattccatttt

SEQ ID NO: 46447 - DNA, 22 bp, synthetic construct
  misc_feature 1..22: note = chemically synthesized
  source 1..22: mol_type = other DNA
gagccagattccattttcccca

SEQ ID NO: 46448 - DNA, 22 bp, synthetic construct
  misc_feature 1..22: note = chemically synthesized
  source 1..22: mol_type = other DNA
agccagattccattttccccac

SEQ ID NO: 46449 - DNA, 22 bp, synthetic construct
  misc_feature 1..22: note = chemically synthesized
  source 1..22: mol_type = other DNA
cattttccccacaggccctgag

SEQ ID NO: 46450 - DNA, 22 bp, synthetic construct
  misc_feature 1..22: note = chemically synthesized
  source 1..22: mol_type = other DNA
tccccacaggccctgagaccca

SEQ ID NO: 46451 - DNA, 22 bp, synthetic construct
  misc_feature 1..22: note = chemically synthesized
  source 1..22: mol_type = other DNA
ccccacaggccctgagacccac

SEQ ID NO: 46452 - DNA, 22 bp, synthetic construct
  misc_feature 1..22: note = chemically synthesized
  source 1..22: mol_type = other DNA
cccacaggccctgagacccaca

SEQ ID NO: 46453 - DNA, 22 bp, synthetic construct
  misc_feature 1..22: note = chemically synthesized
  source 1..22: mol_type = other DNA
agacccacagggaagagctttt

SEQ ID NO: 46454 - DNA, 22 bp, synthetic construct
  misc_feature 1..22: note = chemically synthesized
  source 1..22: mol_type = other DNA
ttgcattataatgtaaatggag

SEQ ID NO: 46455 - DNA, 22 bp, synthetic construct
  misc_feature 1..22: note = chemically synthesized
  source 1..22: mol_type = other DNA
tgcattataatgtaaatggagg

SEQ ID NO: 46456 - DNA, 22 bp, synthetic construct
  misc_feature 1..22: note = chemically synthesized
  source 1..22: mol_type = other DNA
gcattataatgtaaatggaggg

SEQ ID NO: 46457 - DNA, 22 bp, synthetic construct
  misc_feature 1..22: note = chemically synthesized
  source 1..22: mol_type = other DNA
cattataatgtaaatggagggg

SEQ ID NO: 46458 - DNA, 22 bp, synthetic construct
  misc_feature 1..22: note = chemically synthesized
  source 1..22: mol_type = other DNA
taatgtaaatggaggggttgag

SEQ ID NO: 46459 - DNA, 22 bp, synthetic construct
  misc_feature 1..22: note = chemically synthesized
  source 1..22: mol_type = other DNA
agctggtttgggggaacccttg

SEQ ID NO: 46460 - DNA, 22 bp, synthetic construct
  misc_feature 1..22: note = chemically synthesized
  source 1..22: mol_type = other DNA
gtttgggggaacccttgacagg

SEQ ID NO: 46461 - DNA, 22 bp, synthetic construct
  misc_feature 1..22: note = chemically synthesized
  source 1..22: mol_type = other DNA
gggggaacccttgacaggagcc

SEQ ID NO: 46462 - DNA, 22 bp, synthetic construct
  misc_feature 1..22: note = chemically synthesized
  source 1..22: mol_type = other DNA
ggggaacccttgacaggagcca

SEQ ID NO: 46463 - DNA, 22 bp, synthetic construct
  misc_feature 1..22: note = chemically synthesized
  source 1..22: mol_type = other DNA
gacaggagccagttaaaaccaa

SEQ ID NO: 46464 - DNA, 22 bp, synthetic construct
  misc_feature 1..22: note = chemically synthesized
  source 1..22: mol_type = other DNA
acaggagccagttaaaaccaaa

SEQ ID NO: 46465 - DNA, 22 bp, synthetic construct
  misc_feature 1..22: note = chemically synthesized
  source 1..22: mol_type = other DNA
aaaccaaacgaaagtctttcct

SEQ ID NO: 46466 - DNA, 22 bp, synthetic construct
  misc_feature 1..22: note = chemically synthesized
  source 1..22: mol_type = other DNA
tcctaaggcttaggtggagcct

SEQ ID NO: 46467 - DNA, 22 bp, synthetic construct
  misc_feature 1..22: note = chemically synthesized
  source 1..22: mol_type = other DNA
cctaaggcttaggtggagcctc

SEQ ID NO: 46468 - DNA, 22 bp, synthetic construct
  misc_feature 1..22: note = chemically synthesized
  source 1..22: mol_type = other DNA
ctaaggcttaggtggagcctct

SEQ ID NO: 46469 - DNA, 22 bp, synthetic construct
  misc_feature 1..22: note = chemically synthesized
  source 1..22: mol_type = other DNA
aggcttaggtggagcctctaga

SEQ ID NO: 46470 - DNA, 22 bp, synthetic construct
  misc_feature 1..22: note = chemically synthesized
  source 1..22: mol_type = other DNA
aggtggagcctctagaaagagg

SEQ ID NO: 46471 - DNA, 22 bp, synthetic construct
  misc_feature 1..22: note = chemically synthesized
  source 1..22: mol_type = other DNA
ggtggagcctctagaaagaggg

SEQ ID NO: 46472 - DNA, 22 bp, synthetic construct
  misc_feature 1..22: note = chemically synthesized
  source 1..22: mol_type = other DNA
tagaaagaggggctgagagcct

SEQ ID NO: 46473 - DNA, 22 bp, synthetic construct
  misc_feature 1..22: note = chemically synthesized
  source 1..22: mol_type = other DNA
gaaagaggggctgagagcctgg

SEQ ID NO: 46474 - DNA, 22 bp, synthetic construct
  misc_feature 1..22: note = chemically synthesized
  source 1..22: mol_type = other DNA
agagcctggggaagagccaacc

SEQ ID NO: 46475 - DNA, 22 bp, synthetic construct
  misc_feature 1..22: note = chemically synthesized
  source 1..22: mol_type = other DNA
gggaagagccaaccaccagcag

SEQ ID NO: 46476 - DNA, 22 bp, synthetic construct
  misc_feature 1..22: note = chemically synthesized
  source 1..22: mol_type = other DNA
ctcagagttcttcccactgggg

SEQ ID NO: 46477 - DNA, 22 bp, synthetic construct
  misc_feature 1..22: note = chemically synthesized
  source 1..22: mol_type = other DNA
agagttcttcccactggggctg

SEQ ID NO: 46478 - DNA, 22 bp, synthetic construct
  misc_feature 1..22: note = chemically synthesized
  source 1..22: mol_type = other DNA
ttcccactggggctgtgcagcc

SEQ ID NO: 46479 - DNA, 22 bp, synthetic construct
  misc_feature 1..22: note = chemically synthesized
  source 1..22: mol_type = other DNA
cccactggggctgtgcagccaa

SEQ ID NO: 46480 - DNA, 22 bp, synthetic construct
  misc_feature 1..22: note = chemically synthesized
  source 1..22: mol_type = other DNA
ccactggggctgtgcagccaac

SEQ ID NO: 46481 - DNA, 22 bp, synthetic construct
  misc_feature 1..22: note = chemically synthesized
  source 1..22: mol_type = other DNA
gggctgtgcagccaactgcgtt

SEQ ID NO: 46482 - DNA, 22 bp, synthetic construct
  misc_feature 1..22: note = chemically synthesized
  source 1..22: mol_type = other DNA
tgcagccaactgcgtttccagg

SEQ ID NO: 46483 - DNA, 22 bp, synthetic construct
  misc_feature 1..22: note = chemically synthesized
  source 1..22: mol_type = other DNA
cgtttccaggcacactgagatg

SEQ ID NO: 46484 - DNA, 22 bp, synthetic construct
  misc_feature 1..22: note = chemically synthesized
  source 1..22: mol_type = other DNA
ccaggcacactgagatgcccat

SEQ ID NO: 46485 - DNA, 22 bp, synthetic construct
  misc_feature 1..22: note = chemically synthesized
  source 1..22: mol_type = other DNA
caggcacactgagatgcccata

SEQ ID NO: 46486 - DNA, 22 bp, synthetic construct
  misc_feature 1..22: note = chemically synthesized
  source 1..22: mol_type = other DNA
agatgcccatactcatatccaa

SEQ ID NO: 46487 - DNA, 22 bp, synthetic construct
  misc_feature 1..22: note = chemically synthesized
  source 1..22: mol_type = other DNA
atatccaatactgtgcaggggc

SEQ ID NO: 46488 - DNA, 22 bp, synthetic construct
  misc_feature 1..22: note = chemically synthesized
  source 1..22: mol_type = other DNA
tgcaggggcactggccaggcac

SEQ ID NO: 46489 - DNA, 22 bp, synthetic construct
  misc_feature 1..22: note = chemically synthesized
  source 1..22: mol_type = other DNA
gccaggcacaaatcccagctgc

SEQ ID NO: 46490 - DNA, 22 bp, synthetic construct
  misc_feature 1..22: note = chemically synthesized
  source 1..22: mol_type = other DNA
cctccacggcattactctccct

SEQ ID NO: 46491 - DNA, 22 bp, synthetic construct
  misc_feature 1..22: note = chemically synthesized
  source 1..22: mol_type = other DNA
cacggcattactctccctccat

SEQ ID NO: 46492 - DNA, 22 bp, synthetic construct
  misc_feature 1..22: note = chemically synthesized
  source 1..22: mol_type = other DNA
ctctccctccattcttgctttc

SEQ ID NO: 46493 - DNA, 22 bp, synthetic construct
  misc_feature 1..22: note = chemically synthesized
  source 1..22: mol_type = other DNA
tccctccattcttgctttcaga

SEQ ID NO: 46494 - DNA, 22 bp, synthetic construct
  misc_feature 1..22: note = chemically synthesized
  source 1..22: mol_type = other DNA
cctccattcttgctttcagatt

SEQ ID NO: 46495 - DNA, 22 bp, synthetic construct
  misc_feature 1..22: note = chemically synthesized
  source 1..22: mol_type = other DNA
cattcttgctttcagattctcc

SEQ ID NO: 46496 - DNA, 22 bp, synthetic construct
  misc_feature 1..22: note = chemically synthesized
  source 1..22: mol_type = other DNA
ttgctttcagattctccctcct

SEQ ID NO: 46497 - DNA, 22 bp, synthetic construct
  misc_feature 1..22: note = chemically synthesized
  source 1..22: mol_type = other DNA
gctttcagattctccctcctcc

SEQ ID NO: 46498 - DNA, 22 bp, synthetic construct
  misc_feature 1..22: note = chemically synthesized
  source 1..22: mol_type = other DNA
ctttcagattctccctcctcct

SEQ ID NO: 46499 - DNA, 22 bp, synthetic construct
  misc_feature 1..22: note = chemically synthesized
  source 1..22: mol_type = other DNA
tcagattctccctcctcctggc

SEQ ID NO: 46500 - DNA, 22 bp, synthetic construct
  misc_feature 1..22: note = chemically synthesized
  source 1..22: mol_type = other DNA
cagattctccctcctcctggca

SEQ ID NO: 46501 - DNA, 22 bp, synthetic construct
  misc_feature 1..22: note = chemically synthesized
  source 1..22: mol_type = other DNA
agattctccctcctcctggcag

SEQ ID NO: 46502 - DNA, 22 bp, synthetic construct
  misc_feature 1..22: note = chemically synthesized
  source 1..22: mol_type = other DNA
tccctcctcctggcaggggcac

SEQ ID NO: 46503 - DNA, 22 bp, synthetic construct
  misc_feature 1..22: note = chemically synthesized
  source 1..22: mol_type = other DNA
cctcctcctggcaggggcactg

SEQ ID NO: 46504 - DNA, 22 bp, synthetic construct
  misc_feature 1..22: note = chemically synthesized
  source 1..22: mol_type = other DNA
ctcctggcaggggcactgggga

SEQ ID NO: 46505 - DNA, 22 bp, synthetic construct
  misc_feature 1..22: note = chemically synthesized
  source 1..22: mol_type = other DNA
ctggcaggggcactggggaggg

SEQ ID NO: 46506 - DNA, 22 bp, synthetic construct
  misc_feature 1..22: note = chemically synthesized
  source 1..22: mol_type = other DNA
gcaggggcactggggagggcag

SEQ ID NO: 46507 - DNA, 22 bp, synthetic construct
  misc_feature 1..22: note = chemically synthesized
  source 1..22: mol_type = other DNA
gggagggcaggagagaaggagg

SEQ ID NO: 46508 - DNA, 22 bp, synthetic construct
  misc_feature 1..22: note = chemically synthesized
  source 1..22: mol_type = other DNA
ctacctgagagcccgggatgca

SEQ ID NO: 46509 - DNA, 22 bp, synthetic construct
  misc_feature 1..22: note = chemically synthesized
  source 1..22: mol_type = other DNA
tacctgagagcccgggatgcag

SEQ ID NO: 46510 - DNA, 22 bp, synthetic construct
  misc_feature 1..22: note = chemically synthesized
  source 1..22: mol_type = other DNA
cctgagagcccgggatgcagcc

SEQ ID NO: 46511 - DNA, 22 bp, synthetic construct
  misc_feature 1..22: note = chemically synthesized
  source 1..22: mol_type = other DNA
agagcccgggatgcagccagaa

SEQ ID NO: 46512 - DNA, 22 bp, synthetic construct
  misc_feature 1..22: note = chemically synthesized
  source 1..22: mol_type = other DNA
aaataccctttcccaccctagc

SEQ ID NO: 46513 - DNA, 22 bp, synthetic construct
  misc_feature 1..22: note = chemically synthesized
  source 1..22: mol_type = other DNA
tcccaccctagcatacaatttg

SEQ ID NO: 46514 - DNA, 22 bp, synthetic construct
  misc_feature 1..22: note = chemically synthesized
  source 1..22: mol_type = other DNA
cccaccctagcatacaatttga

SEQ ID NO: 46515 - DNA, 22 bp, synthetic construct
  misc_feature 1..22: note = chemically synthesized
  source 1..22: mol_type = other DNA
ccaccctagcatacaatttgac

SEQ ID NO: 46516 - DNA, 22 bp, synthetic construct
  misc_feature 1..22: note = chemically synthesized
  source 1..22: mol_type = other DNA
gcatacaatttgacaggtgaat

SEQ ID NO: 46517 - DNA, 22 bp, synthetic construct
  misc_feature 1..22: note = chemically synthesized
  source 1..22: mol_type = other DNA
gacaggtgaataagtgctcccc

SEQ ID NO: 46518 - DNA, 22 bp, synthetic construct
  misc_feature 1..22: note = chemically synthesized
  source 1..22: mol_type = other DNA
acaggtgaataagtgctcccca

SEQ ID NO: 46519 - DNA, 22 bp, synthetic construct
  misc_feature 1..22: note = chemically synthesized
  source 1..22: mol_type = other DNA
cccagtaggcaataacaaggag

SEQ ID NO: 46520 - DNA, 22 bp, synthetic construct
  misc_feature 1..22: note = chemically synthesized
  source 1..22: mol_type = other DNA
aattaaaagaactcgccaattt

SEQ ID NO: 46521 - DNA, 22 bp, synthetic construct
  misc_feature 1..22: note = chemically synthesized
  source 1..22: mol_type = other DNA
aaagaactcgccaatttgggaa

SEQ ID NO: 46522 - DNA, 22 bp, synthetic construct
  misc_feature 1..22: note = chemically synthesized
  source 1..22: mol_type = other DNA
gccaatttgggaagtaatgtca

SEQ ID NO: 46523 - DNA, 22 bp, synthetic construct
  misc_feature 1..22: note = chemically synthesized
  source 1..22: mol_type = other DNA
gggaagtaatgtcattctatgt

SEQ ID NO: 46524 - DNA, 22 bp, synthetic construct
  misc_feature 1..22: note = chemically synthesized
  source 1..22: mol_type = other DNA
ggaagtaatgtcattctatgtg

SEQ ID NO: 46525 - DNA, 22 bp, synthetic construct
  misc_feature 1..22: note = chemically synthesized
  source 1..22: mol_type = other DNA
tatgtgactccactcttttccg

SEQ ID NO: 46526 - DNA, 22 bp, synthetic construct
  misc_feature 1..22: note = chemically synthesized
  source 1..22: mol_type = other DNA
tgtgactccactcttttccgtt

SEQ ID NO: 46527 - DNA, 22 bp, synthetic construct
  misc_feature 1..22: note = chemically synthesized
  source 1..22: mol_type = other DNA
cactcttttccgttaccaataa

SEQ ID NO: 46528 - DNA, 22 bp, synthetic construct
  misc_feature 1..22: note = chemically synthesized
  source 1..22: mol_type = other DNA
ttttccgttaccaataaaacac

SEQ ID NO: 46529 - DNA, 22 bp, synthetic construct
  misc_feature 1..22: note = chemically synthesized
  source 1..22: mol_type = other DNA
ttccgttaccaataaaacactt

SEQ ID NO: 46530 - DNA, 22 bp, synthetic construct
  misc_feature 1..22: note = chemically synthesized
  source 1..22: mol_type = other DNA
tccgttaccaataaaacactta

SEQ ID NO: 46531 - DNA, 22 bp, synthetic construct
  misc_feature 1..22: note = chemically synthesized
  source 1..22: mol_type = other DNA
ccgttaccaataaaacacttaa

SEQ ID NO: 46532 - DNA, 22 bp, synthetic construct
  misc_feature 1..22: note = chemically synthesized
  source 1..22: mol_type = other DNA
cgttaccaataaaacacttaaa

SEQ ID NO: 46533 - DNA, 22 bp, synthetic construct
  misc_feature 1..22: note = chemically synthesized
  source 1..22: mol_type = other DNA
ccaataaaacacttaaagatgc

SEQ ID NO: 46534 - DNA, 22 bp, synthetic construct
  misc_feature 1..22: note = chemically synthesized
  source 1..22: mol_type = other DNA
aaagatgctattcatgcagaca

SEQ ID NO: 46535 - DNA, 22 bp, synthetic construct
  misc_feature 1..22: note = chemically synthesized
  source 1..22: mol_type = other DNA
aagatgctattcatgcagacat

SEQ ID NO: 46536 - DNA, 22 bp, synthetic construct
  misc_feature 1..22: note = chemically synthesized
  source 1..22: mol_type = other DNA
ttcatgcagacataaagtgcta

SEQ ID NO: 46537 - DNA, 22 bp, synthetic construct
  misc_feature 1..22: note = chemically synthesized
  source 1..22: mol_type = other DNA
atgcagacataaagtgctaatg

SEQ ID NO: 46538 - DNA, 22 bp, synthetic construct
  misc_feature 1..22: note = chemically synthesized
  source 1..22: mol_type = other DNA
atggccacttgttaccatgttt

SEQ ID NO: 46539 - DNA, 22 bp, synthetic construct
  misc_feature 1..22: note = chemically synthesized
  source 1..22: mol_type = other DNA
gttaccatgtttcataatgcta

SEQ ID NO: 46540 - DNA, 22 bp, synthetic construct
  misc_feature 1..22: note = chemically synthesized
  source 1..22: mol_type = other DNA
ttaccatgtttcataatgctaa

SEQ ID NO: 46541 - DNA, 22 bp, synthetic construct
  misc_feature 1..22: note = chemically synthesized
  source 1..22: mol_type = other DNA
ccatgtttcataatgctaatat

SEQ ID NO: 46542 - DNA, 22 bp, synthetic construct
  misc_feature 1..22: note = chemically synthesized
  source 1..22: mol_type = other DNA
cataatgctaatatttccctct

SEQ ID NO: 46543 - DNA, 22 bp, synthetic construct
  misc_feature 1..22: note = chemically synthesized
  source 1..22: mol_type = other DNA
ataatgctaatatttccctctg

SEQ ID NO: 46544 - DNA, 22 bp, synthetic construct
  misc_feature 1..22: note = chemically synthesized
  source 1..22: mol_type = other DNA
atatttccctctgatttctgac

SEQ ID NO: 46545 - DNA, 22 bp, synthetic construct
  misc_feature 1..22: note = chemically synthesized
  source 1..22: mol_type = other DNA
ccctctgatttctgacagttct

SEQ ID NO: 46546 - DNA, 22 bp, synthetic construct
  misc_feature 1..22: note = chemically synthesized
  source 1..22: mol_type = other DNA
cctctgatttctgacagttctt

SEQ ID NO: 46547 - DNA, 22 bp, synthetic construct
  misc_feature 1..22: note = chemically synthesized
  source 1..22: mol_type = other DNA
tgatttctgacagttctttttt

SEQ ID NO: 46548 - DNA, 22 bp, synthetic construct
  misc_feature 1..22: note = chemically synthesized
  source 1..22: mol_type = other DNA
atttctgacagttctttttttt

SEQ ID NO: 46549 - DNA, 22 bp, synthetic construct
  misc_feature 1..22: note = chemically synthesized
  source 1..22: mol_type = other DNA
ctgacagttctttttttttcct

SEQ ID NO: 46550 - DNA, 22 bp, synthetic construct
  misc_feature 1..22: note = chemically synthesized
  source 1..22: mol_type = other DNA
tgacagttctttttttttcctt

SEQ ID NO: 46551 - DNA, 22 bp, synthetic construct
  misc_feature 1..22: note = chemically synthesized
  source 1..22: mol_type = other DNA
acagttctttttttttccttct

SEQ ID NO: 46552 - DNA, 22 bp, synthetic construct
  misc_feature 1..22: note = chemically synthesized
  source 1..22: mol_type = other DNA
tttttttttccttcttcttttt

SEQ ID NO: 46553 - DNA, 22 bp, synthetic construct
  misc_feature 1..22: note = chemically synthesized
  source 1..22: mol_type = other DNA
tttttttccttcttcttttttg

SEQ ID NO: 46554 - DNA, 22 bp, synthetic construct
  misc_feature 1..22: note = chemically synthesized
  source 1..22: mol_type = other DNA
ttttttccttcttcttttttgg

SEQ ID NO: 46555 - DNA, 22 bp, synthetic construct
  misc_feature 1..22: note = chemically synthesized
  source 1..22: mol_type = other DNA
tttttccttcttcttttttggg

SEQ ID NO: 46556 - DNA, 22 bp, synthetic construct
  misc_feature 1..22: note = chemically synthesized
  source 1..22: mol_type = other DNA
ttttccttcttcttttttgggg

SEQ ID NO: 46557 - DNA, 22 bp, synthetic construct
  misc_feature 1..22: note = chemically synthesized
  source 1..22: mol_type = other DNA
tttccttcttcttttttggggc

SEQ ID NO: 46558 - DNA, 22 bp, synthetic construct
  misc_feature 1..22: note = chemically synthesized
  source 1..22: mol_type = other DNA
ttccttcttcttttttggggct

SEQ ID NO: 46559 - DNA, 22 bp, synthetic construct
  misc_feature 1..22: note = chemically synthesized
  source 1..22: mol_type = other DNA
tccttcttcttttttggggcta

SEQ ID NO: 46560 - DNA, 22 bp, synthetic construct
  misc_feature 1..22: note = chemically synthesized
  source 1..22: mol_type = other DNA
ccttcttcttttttggggctat

SEQ ID NO: 46561 - DNA, 22 bp, synthetic construct
  misc_feature 1..22: note = chemically synthesized
  source 1..22: mol_type = other DNA
cttcttcttttttggggctatt

SEQ ID NO: 46562 - DNA, 22 bp, synthetic construct
  misc_feature 1..22: note = chemically synthesized
  source 1..22: mol_type = other DNA
cttcttttttggggctatttta

SEQ ID NO: 46563 - DNA, 22 bp, synthetic construct
  misc_feature 1..22: note = chemically synthesized
  source 1..22: mol_type = other DNA
ttcttttttggggctattttaa

SEQ ID NO: 46564 - DNA, 22 bp, synthetic construct
  misc_feature 1..22: note = chemically synthesized
  source 1..22: mol_type = other DNA
cttttttggggctattttaagt

SEQ ID NO: 46565 - DNA, 22 bp, synthetic construct
  misc_feature 1..22: note = chemically synthesized
  source 1..22: mol_type = other DNA
ttttttggggctattttaagtt

SEQ ID NO: 46566 - DNA, 22 bp, synthetic construct
  misc_feature 1..22: note = chemically synthesized
  source 1..22: mol_type = other DNA
ttttggggctattttaagttaa

SEQ ID NO: 46567 - DNA, 22 bp, synthetic construct
  misc_feature 1..22: note = chemically synthesized
  source 1..22: mol_type = other DNA
tttggggctattttaagttaac

SEQ ID NO: 46568 - DNA, 22 bp, synthetic construct
  misc_feature 1..22: note = chemically synthesized
  source 1..22: mol_type = other DNA
ttggggctattttaagttaaca

SEQ ID NO: 46569 - DNA, 22 bp, synthetic construct
  misc_feature 1..22: note = chemically synthesized
  source 1..22: mol_type = other DNA
tggggctattttaagttaacag

SEQ ID NO: 46570 - DNA, 22 bp, synthetic construct
  misc_feature 1..22: note = chemically synthesized
  source 1..22: mol_type = other DNA
ggggctattttaagttaacaga

SEQ ID NO: 46571 - DNA, 22 bp, synthetic construct
  misc_feature 1..22: note = chemically synthesized
  source 1..22: mol_type = other DNA
gggctattttaagttaacagag

SEQ ID NO: 46572 - DNA, 22 bp, synthetic construct
  misc_feature 1..22: note = chemically synthesized
  source 1..22: mol_type = other DNA
ttttaagttaacagagcgctaa

SEQ ID NO: 46573 - DNA, 22 bp, synthetic construct
  misc_feature 1..22: note = chemically synthesized
  source 1..22: mol_type = other DNA
taagttaacagagcgctaatct

SEQ ID NO: 46574 - DNA, 22 bp, synthetic construct
  misc_feature 1..22: note = chemically synthesized
  source 1..22: mol_type = other DNA
aagttaacagagcgctaatctg

SEQ ID NO: 46575 - DNA, 22 bp, synthetic construct
  misc_feature 1..22: note = chemically synthesized
  source 1..22: mol_type = other DNA
agttaacagagcgctaatctga

SEQ ID NO: 46576 - DNA, 22 bp, synthetic construct
  misc_feature 1..22: note = chemically synthesized
  source 1..22: mol_type = other DNA
acagagcgctaatctgattcaa

SEQ ID NO: 46577 - DNA, 22 bp, synthetic construct
  misc_feature 1..22: note = chemically synthesized
  source 1..22: mol_type = other DNA
atctgattcaaaactgaagact

SEQ ID NO: 46578 - DNA, 22 bp, synthetic construct
  misc_feature 1..22: note = chemically synthesized
  source 1..22: mol_type = other DNA
attcaaaactgaagactcaaag

SEQ ID NO: 46579 - DNA, 22 bp, synthetic construct
  misc_feature 1..22: note = chemically synthesized
  source 1..22: mol_type = other DNA
aaaactgaagactcaaagagct

SEQ ID NO: 46580 - DNA, 22 bp, synthetic construct
  misc_feature 1..22: note = chemically synthesized
  source 1..22: mol_type = other DNA
aagactcaaagagctacactct

SEQ ID NO: 46581 - DNA, 22 bp, synthetic construct
  misc_feature 1..22: note = chemically synthesized
  source 1..22: mol_type = other DNA
aaagagctacactctacataac

SEQ ID NO: 46582 - DNA, 22 bp, synthetic construct
  misc_feature 1..22: note = chemically synthesized
  source 1..22: mol_type = other DNA
cactctacataactgcactatt

SEQ ID NO: 46583 - DNA, 22 bp, synthetic construct
  misc_feature 1..22: note = chemically synthesized
  source 1..22: mol_type = other DNA
tacataactgcactattaatga

SEQ ID NO: 46584 - DNA, 22 bp, synthetic construct
  misc_feature 1..22: note = chemically synthesized
  source 1..22: mol_type = other DNA
cataactgcactattaatgaca

SEQ ID NO: 46585 - DNA, 22 bp, synthetic construct
  misc_feature 1..22: note = chemically synthesized
  source 1..22: mol_type = other DNA
cactattaatgacaaccattgc

SEQ ID NO: 46586 - DNA, 22 bp, synthetic construct
  misc_feature 1..22: note = chemically synthesized
  source 1..22: mol_type = other DNA
ttaatgacaaccattgctttac

SEQ ID NO: 46587 - DNA, 22 bp, synthetic construct
  misc_feature 1..22: note = chemically synthesized
  source 1..22: mol_type = other DNA
atgacaaccattgctttacatg

SEQ ID NO: 46588 - DNA, 22 bp, synthetic construct
  misc_feature 1..22: note = chemically synthesized
  source 1..22: mol_type = other DNA
ctttacatgttgcaccatttca

SEQ ID NO: 46589 - DNA, 22 bp, synthetic construct
  misc_feature 1..22: note = chemically synthesized
  source 1..22: mol_type = other DNA
tacatgttgcaccatttcatga

SEQ ID NO: 46590 - DNA, 22 bp, synthetic construct
  misc_feature 1..22: note = chemically synthesized
  source 1..22: mol_type = other DNA
acatgttgcaccatttcatgaa

SEQ ID NO: 46591 - DNA, 22 bp, synthetic construct
  misc_feature 1..22: note = chemically synthesized
  source 1..22: mol_type = other DNA
catgttgcaccatttcatgaaa

SEQ ID NO: 46592 - DNA, 22 bp, synthetic construct
  misc_feature 1..22: note = chemically synthesized
  source 1..22: mol_type = other DNA
caccatttcatgaaaacaatca

SEQ ID NO: 46593 - DNA, 22 bp, synthetic construct
  misc_feature 1..22: note = chemically synthesized
  source 1..22: mol_type = other DNA
catgaaaacaatcatcactcag

SEQ ID NO: 46594 - DNA, 22 bp, synthetic construct
  misc_feature 1..22: note = chemically synthesized
  source 1..22: mol_type = other DNA
atgaaaacaatcatcactcagt

SEQ ID NO: 46595 - DNA, 22 bp, synthetic construct
  misc_feature 1..22: note = chemically synthesized
  source 1..22: mol_type = other DNA
agtcaacgtattttccaagcca

SEQ ID NO: 46596 - DNA, 22 bp, synthetic construct
  misc_feature 1..22: note = chemically synthesized
  source 1..22: mol_type = other DNA
tccaagccacagaaaataagtt

SEQ ID NO: 46597 - DNA, 22 bp, synthetic construct
  misc_feature 1..22: note = chemically synthesized
  source 1..22: mol_type = other DNA
ccaagccacagaaaataagttg

SEQ ID NO: 46598 - DNA, 22 bp, synthetic construct
  misc_feature 1..22: note = chemically synthesized
  source 1..22: mol_type = other DNA
caagccacagaaaataagttga

SEQ ID NO: 46599 - DNA, 22 bp, synthetic construct
  misc_feature 1..22: note = chemically synthesized
  source 1..22: mol_type = other DNA
aaataagttgaaaatgcagtag

SEQ ID NO: 46600 - DNA, 22 bp, synthetic construct
  misc_feature 1..22: note = chemically synthesized
  source 1..22: mol_type = other DNA
aaaatgcagtaggcaaagaagc

SEQ ID NO: 46601 - DNA, 22 bp, synthetic construct
  misc_feature 1..22: note = chemically synthesized
  source 1..22: mol_type = other DNA
gtcatgtaagacactaaggggc

SEQ ID NO: 46602 - DNA, 22 bp, synthetic construct
  misc_feature 1..22: note = chemically synthesized
  source 1..22: mol_type = other DNA
aggggcaggggagtcattaatt

SEQ ID NO: 46603 - DNA, 22 bp, synthetic construct
  misc_feature 1..22: note = chemically synthesized
  source 1..22: mol_type = other DNA
attcttctccaagctttcaaca

SEQ ID NO: 46604 - DNA, 22 bp, synthetic construct
  misc_feature 1..22: note = chemically synthesized
  source 1..22: mol_type = other DNA
ttctccaagctttcaacactct

SEQ ID NO: 46605 - DNA, 22 bp, synthetic construct
  misc_feature 1..22: note = chemically synthesized
  source 1..22: mol_type = other DNA
ctccaagctttcaacactctgt

SEQ ID NO: 46606 - DNA, 22 bp, synthetic construct
  misc_feature 1..22: note = chemically synthesized
  source 1..22: mol_type = other DNA
tccaagctttcaacactctgtt

SEQ ID NO: 46607 - DNA, 22 bp, synthetic construct
  misc_feature 1..22: note = chemically synthesized
  source 1..22: mol_type = other DNA
caagctttcaacactctgtttc

SEQ ID NO: 46608 - DNA, 22 bp, synthetic construct
  misc_feature 1..22: note = chemically synthesized
  source 1..22: mol_type = other DNA
tcaacactctgtttctatgaag

SEQ ID NO: 46609 - DNA, 22 bp, synthetic construct
  misc_feature 1..22: note = chemically synthesized
  source 1..22: mol_type = other DNA
caacactctgtttctatgaagg

SEQ ID NO: 46610 - DNA, 22 bp, synthetic construct
  misc_feature 1..22: note = chemically synthesized
  source 1..22: mol_type = other DNA
aacactctgtttctatgaaggc

SEQ ID NO: 46611 - DNA, 22 bp, synthetic construct
  misc_feature 1..22: note = chemically synthesized
  source 1..22: mol_type = other DNA
tgtttctatgaaggcaagggtt

SEQ ID NO: 46612 - DNA, 22 bp, synthetic construct
  misc_feature 1..22: note = chemically synthesized
  source 1..22: mol_type = other DNA
tttctatgaaggcaagggttgg

SEQ ID NO: 46613 - DNA, 22 bp, synthetic construct
  misc_feature 1..22: note = chemically synthesized
  source 1..22: mol_type = other DNA
ctatgaaggcaagggttggagg

SEQ ID NO: 46614 - DNA, 22 bp, synthetic construct
  misc_feature 1..22: note = chemically synthesized
  source 1..22: mol_type = other DNA
tatgaaggcaagggttggaggg

SEQ ID NO: 46615 - DNA, 22 bp, synthetic construct
  misc_feature 1..22: note = chemically synthesized
  source 1..22: mol_type = other DNA
tgaaggcaagggttggagggag

SEQ ID NO: 46616 - DNA, 22 bp, synthetic construct
  misc_feature 1..22: note = chemically synthesized
  source 1..22: mol_type = other DNA
gagggagcttttttctttcaaa

SEQ ID NO: 46617 - DNA, 22 bp, synthetic construct
  misc_feature 1..22: note = chemically synthesized
  source 1..22: mol_type = other DNA
ttttctttcaaataaatcagta

SEQ ID NO: 46618 - DNA, 22 bp, synthetic construct
  misc_feature 1..22: note = chemically synthesized
  source 1..22: mol_type = other DNA
tttctttcaaataaatcagtaa

SEQ ID NO: 46619 - DNA, 22 bp, synthetic construct
  misc_feature 1..22: note = chemically synthesized
  source 1..22: mol_type = other DNA
ttctttcaaataaatcagtaaa

SEQ ID NO: 46620 - DNA, 22 bp, synthetic construct
  misc_feature 1..22: note = chemically synthesized
  source 1..22: mol_type = other DNA
tctttcaaataaatcagtaaaa

SEQ ID NO: 46621 - DNA, 22 bp, synthetic construct
  misc_feature 1..22: note = chemically synthesized
  source 1..22: mol_type = other DNA
ctttcaaataaatcagtaaaat

SEQ ID NO: 46622 - DNA, 22 bp, synthetic construct
  misc_feature 1..22: note = chemically synthesized
  source 1..22: mol_type = other DNA
tttcaaataaatcagtaaaatg

SEQ ID NO: 46623 - DNA, 22 bp, synthetic construct
  misc_feature 1..22: note = chemically synthesized
  source 1..22: mol_type = other DNA
tcaaataaatcagtaaaatgat

SEQ ID NO: 46624 - DNA, 22 bp, synthetic construct
  misc_feature 1..22: note = chemically synthesized
  source 1..22: mol_type = other DNA
caaataaatcagtaaaatgatg

SEQ ID NO: 46625 - DNA, 22 bp, synthetic construct
  misc_feature 1..22: note = chemically synthesized
  source 1..22: mol_type = other DNA
aaataaatcagtaaaatgatga

SEQ ID NO: 46626 - DNA, 22 bp, synthetic construct
  misc_feature 1..22: note = chemically synthesized
  source 1..22: mol_type = other DNA
cctctgctacgcccagtggccc

SEQ ID NO: 46627 - DNA, 22 bp, synthetic construct
  misc_feature 1..22: note = chemically synthesized
  source 1..22: mol_type = other DNA
ctctgctacgcccagtggccca

SEQ ID NO: 46628 - DNA, 22 bp, synthetic construct
  misc_feature 1..22: note = chemically synthesized
  source 1..22: mol_type = other DNA
tgctacgcccagtggcccaggc

SEQ ID NO: 46629 - DNA, 22 bp, synthetic construct
  misc_feature 1..22: note = chemically synthesized
  source 1..22: mol_type = other DNA
ctacgcccagtggcccaggcac

SEQ ID NO: 46630 - DNA, 22 bp, synthetic construct
  misc_feature 1..22: note = chemically synthesized
  source 1..22: mol_type = other DNA
cgcccagtggcccaggcactct

SEQ ID NO: 46631 - DNA, 22 bp, synthetic construct
  misc_feature 1..22: note = chemically synthesized
  source 1..22: mol_type = other DNA
tcactaaggtatcctcccagca

SEQ ID NO: 46632 - DNA, 22 bp, synthetic construct
  misc_feature 1..22: note = chemically synthesized
  source 1..22: mol_type = other DNA
actaaggtatcctcccagcaat

SEQ ID NO: 46633 - DNA, 22 bp, synthetic construct
  misc_feature 1..22: note = chemically synthesized
  source 1..22: mol_type = other DNA
aggtatcctcccagcaatgtag

SEQ ID NO: 46634 - DNA, 22 bp, synthetic construct
  misc_feature 1..22: note = chemically synthesized
  source 1..22: mol_type = other DNA
ccagcaatgtaggtgttcaaag

SEQ ID NO: 46635 - DNA, 22 bp, synthetic construct
  misc_feature 1..22: note = chemically synthesized
  source 1..22: mol_type = other DNA
aaaggcaaaagaaagggaacca

SEQ ID NO: 46636 - DNA, 22 bp, synthetic construct
  misc_feature 1..22: note = chemically synthesized
  source 1..22: mol_type = other DNA
atggcgtaatacttgctcggcc

SEQ ID NO: 46637 - DNA, 22 bp, synthetic construct
  misc_feature 1..22: note = chemically synthesized
  source 1..22: mol_type = other DNA
gctcggccaaagacatagtaac

SEQ ID NO: 46638 - DNA, 22 bp, synthetic construct
  misc_feature 1..22: note = chemically synthesized
  source 1..22: mol_type = other DNA
ctcggccaaagacatagtaacg

SEQ ID NO: 46639 - DNA, 22 bp, synthetic construct
  misc_feature 1..22: note = chemically synthesized
  source 1..22: mol_type = other DNA
ggccaaagacatagtaacgctt

SEQ ID NO: 46640 - DNA, 22 bp, synthetic construct
  misc_feature 1..22: note = chemically synthesized
  source 1..22: mol_type = other DNA
cccaggaaatacaagtgtcaca

SEQ ID NO: 46641 - DNA, 22 bp, synthetic construct
  misc_feature 1..22: note = chemically synthesized
  source 1..22: mol_type = other DNA
ccaggaaatacaagtgtcacag

SEQ ID NO: 46642 - DNA, 22 bp, synthetic construct
  misc_feature 1..22: note = chemically synthesized
  source 1..22: mol_type = other DNA
caaaatgaatatgtgtgcagcc

SEQ ID NO: 46643 - DNA, 22 bp, synthetic construct
  misc_feature 1..22: note = chemically synthesized
  source 1..22: mol_type = other DNA
ggcttgcaacttaattcaaaca

SEQ ID NO: 46644 - DNA, 22 bp, synthetic construct
  misc_feature 1..22: note = chemically synthesized
  source 1..22: mol_type = other DNA
gcaacttaattcaaacaacttg

SEQ ID NO: 46645 - DNA, 22 bp, synthetic construct
  misc_feature 1..22: note = chemically synthesized
  source 1..22: mol_type = other DNA
caacttaattcaaacaacttgg

SEQ ID NO: 46646 - DNA, 22 bp, synthetic construct
  misc_feature 1..22: note = chemically synthesized
  source 1..22: mol_type = other DNA
aattcaaacaacttggaaggct

SEQ ID NO: 46647 - DNA, 22 bp, synthetic construct
  misc_feature 1..22: note = chemically synthesized
  source 1..22: mol_type = other DNA
attcaaacaacttggaaggcta

SEQ ID NO: 46648 - DNA, 22 bp, synthetic construct
  misc_feature 1..22: note = chemically synthesized
  source 1..22: mol_type = other DNA
aaacaacttggaaggctaagga

SEQ ID NO: 46649 - DNA, 22 bp, synthetic construct
  misc_feature 1..22: note = chemically synthesized
  source 1..22: mol_type = other DNA
ggaaggctaaggagcactggag

SEQ ID NO: 46650 - DNA, 22 bp, synthetic construct
  misc_feature 1..22: note = chemically synthesized
  source 1..22: mol_type = other DNA
gaaggctaaggagcactggagc

SEQ ID NO: 46651 - DNA, 22 bp, synthetic construct
  misc_feature 1..22: note = chemically synthesized
  source 1..22: mol_type = other DNA
aggagcactggagctggggagc

SEQ ID NO: 46652 - DNA, 22 bp, synthetic construct
  misc_feature 1..22: note = chemically synthesized
  source 1..22: mol_type = other DNA
gagctggggagctgcagatgaa

SEQ ID NO: 46653 - DNA, 22 bp, synthetic construct
  misc_feature 1..22: note = chemically synthesized
  source 1..22: mol_type = other DNA
gggagctgcagatgaacccctg

SEQ ID NO: 46654 - DNA, 22 bp, synthetic construct
  misc_feature 1..22: note = chemically synthesized
  source 1..22: mol_type = other DNA
cagatgaacccctgtgctcacc

SEQ ID NO: 46655 - DNA, 22 bp, synthetic construct
  misc_feature 1..22: note = chemically synthesized
  source 1..22: mol_type = other DNA
tgctcaccacccctggagagca

SEQ ID NO: 46656 - DNA, 22 bp, synthetic construct
  misc_feature 1..22: note = chemically synthesized
  source 1..22: mol_type = other DNA
accacccctggagagcagtcag

SEQ ID NO: 46657 - DNA, 22 bp, synthetic construct
  misc_feature 1..22: note = chemically synthesized
  source 1..22: mol_type = other DNA
gagagcagtcagagaggaagcc

SEQ ID NO: 46658 - DNA, 22 bp, synthetic construct
  misc_feature 1..22: note = chemically synthesized
  source 1..22: mol_type = other DNA
ctttcctcagatgttttaaagg

SEQ ID NO: 46659 - DNA, 22 bp, synthetic construct
  misc_feature 1..22: note = chemically synthesized
  source 1..22: mol_type = other DNA
tcctcagatgttttaaaggaag

SEQ ID NO: 46660 - DNA, 22 bp, synthetic construct
  misc_feature 1..22: note = chemically synthesized
  source 1..22: mol_type = other DNA
cctcagatgttttaaaggaagc

SEQ ID NO: 46661 - DNA, 22 bp, synthetic construct
  misc_feature 1..22: note = chemically synthesized
  source 1..22: mol_type = other DNA
ctcagatgttttaaaggaagcc

SEQ ID NO: 46662 - DNA, 22 bp, synthetic construct
  misc_feature 1..22: note = chemically synthesized
  source 1..22: mol_type = other DNA
agatgttttaaaggaagccacc

SEQ ID NO: 46663 - DNA, 22 bp, synthetic construct
  misc_feature 1..22: note = chemically synthesized
  source 1..22: mol_type = other DNA
taaaggaagccacctagagccc

SEQ ID NO: 46664 - DNA, 22 bp, synthetic construct
  misc_feature 1..22: note = chemically synthesized
  source 1..22: mol_type = other DNA
aaaggaagccacctagagcccc

SEQ ID NO: 46665 - DNA, 22 bp, synthetic construct
  misc_feature 1..22: note = chemically synthesized
  source 1..22: mol_type = other DNA
aaggaagccacctagagcccca

SEQ ID NO: 46666 - DNA, 22 bp, synthetic construct
  misc_feature 1..22: note = chemically synthesized
  source 1..22: mol_type = other DNA
gagccccacctgtcactgtgga

SEQ ID NO: 46667 - DNA, 22 bp, synthetic construct
  misc_feature 1..22: note = chemically synthesized
  source 1..22: mol_type = other DNA
tcactgtggaactgctcatggt

SEQ ID NO: 46668 - DNA, 22 bp, synthetic construct
  misc_feature 1..22: note = chemically synthesized
  source 1..22: mol_type = other DNA
tggaactgctcatggtggctgc

SEQ ID NO: 46669 - DNA, 22 bp, synthetic construct
  misc_feature 1..22: note = chemically synthesized
  source 1..22: mol_type = other DNA
ctcatggtggctgcccgatgcg

SEQ ID NO: 46670 - DNA, 22 bp, synthetic construct
  misc_feature 1..22: note = chemically synthesized
  source 1..22: mol_type = other DNA
atggtggctgcccgatgcgctg

SEQ ID NO: 46671 - DNA, 22 bp, synthetic construct
  misc_feature 1..22: note = chemically synthesized
  source 1..22: mol_type = other DNA
cccgatgcgctgatgtggaact

SEQ ID NO: 46672 - DNA, 22 bp, synthetic construct
  misc_feature 1..22: note = chemically synthesized
  source 1..22: mol_type = other DNA
atgtggaactcagaatcattca

SEQ ID NO: 46673 - DNA, 22 bp, synthetic construct
  misc_feature 1..22: note = chemically synthesized
  source 1..22: mol_type = other DNA
agaatcattcatttgggcttgt

SEQ ID NO: 46674 - DNA, 22 bp, synthetic construct
  misc_feature 1..22: note = chemically synthesized
  source 1..22: mol_type = other DNA
atttgggcttgtggctgagctg

SEQ ID NO: 46675 - DNA, 22 bp, synthetic construct
  misc_feature 1..22: note = chemically synthesized
  source 1..22: mol_type = other DNA
gggcttgtggctgagctgtgct

SEQ ID NO: 46676 - DNA, 22 bp, synthetic construct
  misc_feature 1..22: note = chemically synthesized
  source 1..22: mol_type = other DNA
ggcttgtggctgagctgtgcta

SEQ ID NO: 46677 - DNA, 22 bp, synthetic construct
  misc_feature 1..22: note = chemically synthesized
  source 1..22: mol_type = other DNA
gtggctgagctgtgctaggtaa

SEQ ID NO: 46678 - DNA, 22 bp, synthetic construct
  misc_feature 1..22: note = chemically synthesized
  source 1..22: mol_type = other DNA
tggctgagctgtgctaggtaac

SEQ ID NO: 46679 - DNA, 22 bp, synthetic construct
  misc_feature 1..22: note = chemically synthesized
  source 1..22: mol_type = other DNA
agctgtgctaggtaactgggtg

SEQ ID NO: 46680 - DNA, 22 bp, synthetic construct
  misc_feature 1..22: note = chemically synthesized
  source 1..22: mol_type = other DNA
tgctaggtaactgggtggcctg

SEQ ID NO: 46681 - DNA, 22 bp, synthetic construct
  misc_feature 1..22: note = chemically synthesized
  source 1..22: mol_type = other DNA
ggtaactgggtggcctgggcaa

SEQ ID NO: 46682 - DNA, 22 bp, synthetic construct
  misc_feature 1..22: note = chemically synthesized
  source 1..22: mol_type = other DNA
ggtggcctgggcaagtcacttc

SEQ ID NO: 46683 - DNA, 22 bp, synthetic construct
  misc_feature 1..22: note = chemically synthesized
  source 1..22: mol_type = other DNA
ggcaagtcacttcacctccctt

SEQ ID NO: 46684 - DNA, 22 bp, synthetic construct
  misc_feature 1..22: note = chemically synthesized
  source 1..22: mol_type = other DNA
cacctcccttggcctgtgtcct

SEQ ID NO: 46685 - DNA, 22 bp, synthetic construct
  misc_feature 1..22: note = chemically synthesized
  source 1..22: mol_type = other DNA
acctcccttggcctgtgtcctt

SEQ ID NO: 46686 - DNA, 22 bp, synthetic construct
  misc_feature 1..22: note = chemically synthesized
  source 1..22: mol_type = other DNA
ccttggcctgtgtccttgagct

SEQ ID NO: 46687 - DNA, 22 bp, synthetic construct
  misc_feature 1..22: note = chemically synthesized
  source 1..22: mol_type = other DNA
ggcctgtgtccttgagctttcc

SEQ ID NO: 46688 - DNA, 22 bp, synthetic construct
  misc_feature 1..22: note = chemically synthesized
  source 1..22: mol_type = other DNA
gcctgtgtccttgagctttcct

SEQ ID NO: 46689 - DNA, 22 bp, synthetic construct
  misc_feature 1..22: note = chemically synthesized
  source 1..22: mol_type = other DNA
tgtccttgagctttcctggctg

SEQ ID NO: 46690 - DNA, 22 bp, synthetic construct
  misc_feature 1..22: note = chemically synthesized
  source 1..22: mol_type = other DNA
gagctttcctggctgcacatct

SEQ ID NO: 46691 - DNA, 22 bp, synthetic construct
  misc_feature 1..22: note = chemically synthesized
  source 1..22: mol_type = other DNA
agctttcctggctgcacatctt

SEQ ID NO: 46692 - DNA, 22 bp, synthetic construct
  misc_feature 1..22: note = chemically synthesized
  source 1..22: mol_type = other DNA
tcctggctgcacatcttgctct

SEQ ID NO: 46693 - DNA, 22 bp, synthetic construct
  misc_feature 1..22: note = chemically synthesized
  source 1..22: mol_type = other DNA
cctggctgcacatcttgctctc

SEQ ID NO: 46694 - DNA, 22 bp, synthetic construct
  misc_feature 1..22: note = chemically synthesized
  source 1..22: mol_type = other DNA
ctggctgcacatcttgctctca

SEQ ID NO: 46695 - DNA, 22 bp, synthetic construct
  misc_feature 1..22: note = chemically synthesized
  source 1..22: mol_type = other DNA
gctgcacatcttgctctcaggt

SEQ ID NO: 46696 - DNA, 22 bp, synthetic construct
  misc_feature 1..22: note = chemically synthesized
  source 1..22: mol_type = other DNA
cacatcttgctctcaggtataa

SEQ ID NO: 46697 - DNA, 22 bp, synthetic construct
  misc_feature 1..22: note = chemically synthesized
  source 1..22: mol_type = other DNA
gctctcaggtataaaggatctg

SEQ ID NO: 46698 - DNA, 22 bp, synthetic construct
  misc_feature 1..22: note = chemically synthesized
  source 1..22: mol_type = other DNA
ctctcaggtataaaggatctgt

SEQ ID NO: 46699 - DNA, 22 bp, synthetic construct
  misc_feature 1..22: note = chemically synthesized
  source 1..22: mol_type = other DNA
tcaggtataaaggatctgtctc

SEQ ID NO: 46700 - DNA, 22 bp, synthetic construct
  misc_feature 1..22: note = chemically synthesized
  source 1..22: mol_type = other DNA
aggtataaaggatctgtctcct

SEQ ID NO: 46701 - DNA, 22 bp, synthetic construct
  misc_feature 1..22: note = chemically synthesized
  source 1..22: mol_type = other DNA
tctccttctacctgcccctgtg

SEQ ID NO: 46702 - DNA, 22 bp, synthetic construct
  misc_feature 1..22: note = chemically synthesized
  source 1..22: mol_type = other DNA
cttctacctgcccctgtgccac

SEQ ID NO: 46703 - DNA, 22 bp, synthetic construct
  misc_feature 1..22: note = chemically synthesized
  source 1..22: mol_type = other DNA
ctacctgcccctgtgccacaca

SEQ ID NO: 46704 - DNA, 22 bp, synthetic construct
  misc_feature 1..22: note = chemically synthesized
  source 1..22: mol_type = other DNA
tacctgcccctgtgccacacac

SEQ ID NO: 46705 - DNA, 22 bp, synthetic construct
  misc_feature 1..22: note = chemically synthesized
  source 1..22: mol_type = other DNA
cctgcccctgtgccacacacac

SEQ ID NO: 46706 - DNA, 22 bp, synthetic construct
  misc_feature 1..22: note = chemically synthesized
  source 1..22: mol_type = other DNA
cccctgtgccacacacactcgc

SEQ ID NO: 46707 - DNA, 22 bp, synthetic construct
  misc_feature 1..22: note = chemically synthesized
  source 1..22: mol_type = other DNA
tgccacacacactcgcctctca

SEQ ID NO: 46708 - DNA, 22 bp, synthetic construct
  misc_feature 1..22: note = chemically synthesized
  source 1..22: mol_type = other DNA
gcctctcaaatgagaaaggcag

SEQ ID NO: 46709 - DNA, 22 bp, synthetic construct
  misc_feature 1..22: note = chemically synthesized
  source 1..22: mol_type = other DNA
tcaaatgagaaaggcagctttg

SEQ ID NO: 46710 - DNA, 22 bp, synthetic construct
  misc_feature 1..22: note = chemically synthesized
  source 1..22: mol_type = other DNA
aaatgagaaaggcagctttgag

SEQ ID NO: 46711 - DNA, 22 bp, synthetic construct
  misc_feature 1..22: note = chemically synthesized
  source 1..22: mol_type = other DNA
tgagagaggatgcttgccttcc

SEQ ID NO: 46712 - DNA, 22 bp, synthetic construct
  misc_feature 1..22: note = chemically synthesized
  source 1..22: mol_type = other DNA
gagagaggatgcttgccttccc

SEQ ID NO: 46713 - DNA, 22 bp, synthetic construct
  misc_feature 1..22: note = chemically synthesized
  source 1..22: mol_type = other DNA
agagaggatgcttgccttcccg

SEQ ID NO: 46714 - DNA, 22 bp, synthetic construct
  misc_feature 1..22: note = chemically synthesized
  source 1..22: mol_type = other DNA
gccttcccggctcccctcccaa

SEQ ID NO: 46715 - DNA, 22 bp, synthetic construct
  misc_feature 1..22: note = chemically synthesized
  source 1..22: mol_type = other DNA
ccttcccggctcccctcccaac

SEQ ID NO: 46716 - DNA, 22 bp, synthetic construct
  misc_feature 1..22: note = chemically synthesized
  source 1..22: mol_type = other DNA
cccggctcccctcccaacccag

SEQ ID NO: 46717 - DNA, 22 bp, synthetic construct
  misc_feature 1..22: note = chemically synthesized
  source 1..22: mol_type = other DNA
ccggctcccctcccaacccaga

SEQ ID NO: 46718 - DNA, 22 bp, synthetic construct
  misc_feature 1..22: note = chemically synthesized
  source 1..22: mol_type = other DNA
ccctcccaacccagaacctatc

SEQ ID NO: 46719 - DNA, 22 bp, synthetic construct
  misc_feature 1..22: note = chemically synthesized
  source 1..22: mol_type = other DNA
ccaacccagaacctatcacaat

SEQ ID NO: 46720 - DNA, 22 bp, synthetic construct
  misc_feature 1..22: note = chemically synthesized
  source 1..22: mol_type = other DNA
tcacaatgctctgcagagagta

SEQ ID NO: 46721 - DNA, 22 bp, synthetic construct
  misc_feature 1..22: note = chemically synthesized
  source 1..22: mol_type = other DNA
tgcagagagtacatgctcaaca

SEQ ID NO: 46722 - DNA, 22 bp, synthetic construct
  misc_feature 1..22: note = chemically synthesized
  source 1..22: mol_type = other DNA
cagagagtacatgctcaacaaa

SEQ ID NO: 46723 - DNA, 22 bp, synthetic construct
  misc_feature 1..22: note = chemically synthesized
  source 1..22: mol_type = other DNA
aacaaatccaatgctaaattgt

SEQ ID NO: 46724 - DNA, 22 bp, synthetic construct
  misc_feature 1..22: note = chemically synthesized
  source 1..22: mol_type = other DNA
aattgtaaaaagtgagactaga

SEQ ID NO: 46725 - DNA, 22 bp, synthetic construct
  misc_feature 1..22: note = chemically synthesized
  source 1..22: mol_type = other DNA
taaaaagtgagactagatggta

SEQ ID NO: 46726 - DNA, 22 bp, synthetic construct
  misc_feature 1..22: note = chemically synthesized
  source 1..22: mol_type = other DNA
gatggtatctgcctctcctctc

SEQ ID NO: 46727 - DNA, 22 bp, synthetic construct
  misc_feature 1..22: note = chemically synthesized
  source 1..22: mol_type = other DNA
cctctcctctcagctctaaatt

SEQ ID NO: 46728 - DNA, 22 bp, synthetic construct
  misc_feature 1..22: note = chemically synthesized
  source 1..22: mol_type = other DNA
tcctctcagctctaaattattt

SEQ ID NO: 46729 - DNA, 22 bp, synthetic construct
  misc_feature 1..22: note = chemically synthesized
  source 1..22: mol_type = other DNA
ctctcagctctaaattatttgg

SEQ ID NO: 46730 - DNA, 22 bp, synthetic construct
  misc_feature 1..22: note = chemically synthesized
  source 1..22: mol_type = other DNA
tcagctctaaattatttggtct

SEQ ID NO: 46731 - DNA, 22 bp, synthetic construct
  misc_feature 1..22: note = chemically synthesized
  source 1..22: mol_type = other DNA
agctctaaattatttggtctaa

SEQ ID NO: 46732 - DNA, 22 bp, synthetic construct
  misc_feature 1..22: note = chemically synthesized
  source 1..22: mol_type = other DNA
taaattatttggtctaaagaaa

SEQ ID NO: 46733 - DNA, 22 bp, synthetic construct
  misc_feature 1..22: note = chemically synthesized
  source 1..22: mol_type = other DNA
aattatttggtctaaagaaaac

SEQ ID NO: 46734 - DNA, 22 bp, synthetic construct
  misc_feature 1..22: note = chemically synthesized
  source 1..22: mol_type = other DNA
tttggtctaaagaaaactgaag

SEQ ID NO: 46735 - DNA, 22 bp, synthetic construct
  misc_feature 1..22: note = chemically synthesized
  source 1..22: mol_type = other DNA
ggtctaaagaaaactgaagccc

SEQ ID NO: 46736 - DNA, 22 bp, synthetic construct
  misc_feature 1..22: note = chemically synthesized
  source 1..22: mol_type = other DNA
gtctaaagaaaactgaagcccc

SEQ ID NO: 46737 - DNA, 22 bp, synthetic construct
  misc_feature 1..22: note = chemically synthesized
  source 1..22: mol_type = other DNA
aagaaaactgaagcccccagca

SEQ ID NO: 46738 - DNA, 22 bp, synthetic construct
  misc_feature 1..22: note = chemically synthesized
  source 1..22: mol_type = other DNA
aagcccccagcaactccatttt

SEQ ID NO: 46739 - DNA, 22 bp, synthetic construct
  misc_feature 1..22: note = chemically synthesized
  source 1..22: mol_type = other DNA
cattttgcatatctaattggag

SEQ ID NO: 46740 - DNA, 22 bp, synthetic construct
  misc_feature 1..22: note = chemically synthesized
  source 1..22: mol_type = other DNA
tgcatatctaattggagatggt

SEQ ID NO: 46741 - DNA, 22 bp, synthetic construct
  misc_feature 1..22: note = chemically synthesized
  source 1..22: mol_type = other DNA
gcatatctaattggagatggtt

SEQ ID NO: 46742 - DNA, 22 bp, synthetic construct
  misc_feature 1..22: note = chemically synthesized
  source 1..22: mol_type = other DNA
catatctaattggagatggttt

SEQ ID NO: 46743 - DNA, 22 bp, synthetic construct
  misc_feature 1..22: note = chemically synthesized
  source 1..22: mol_type = other DNA
attggagatggtttcaataata

SEQ ID NO: 46744 - DNA, 22 bp, synthetic construct
  misc_feature 1..22: note = chemically synthesized
  source 1..22: mol_type = other DNA
gagatggtttcaataatataat

SEQ ID NO: 46745 - DNA, 22 bp, synthetic construct
  misc_feature 1..22: note = chemically synthesized
  source 1..22: mol_type = other DNA
caataatataattatcaaggca

SEQ ID NO: 46746 - DNA, 22 bp, synthetic construct
  misc_feature 1..22: note = chemically synthesized
  source 1..22: mol_type = other DNA
aataatataattatcaaggcat

SEQ ID NO: 46747 - DNA, 22 bp, synthetic construct
  misc_feature 1..22: note = chemically synthesized
  source 1..22: mol_type = other DNA
tcaaggcatccctacgttactt

SEQ ID NO: 46748 - DNA, 22 bp, synthetic construct
  misc_feature 1..22: note = chemically synthesized
  source 1..22: mol_type = other DNA
cgttacttgaagttggttcata

SEQ ID NO: 46749 - DNA, 22 bp, synthetic construct
  misc_feature 1..22: note = chemically synthesized
  source 1..22: mol_type = other DNA
cttgaagttggttcataatctg

SEQ ID NO: 46750 - DNA, 22 bp, synthetic construct
  misc_feature 1..22: note = chemically synthesized
  source 1..22: mol_type = other DNA
gaagttggttcataatctggcg

SEQ ID NO: 46751 - DNA, 22 bp, synthetic construct
  misc_feature 1..22: note = chemically synthesized
  source 1..22: mol_type = other DNA
aagttggttcataatctggcga

SEQ ID NO: 46752 - DNA, 22 bp, synthetic construct
  misc_feature 1..22: note = chemically synthesized
  source 1..22: mol_type = other DNA
gttcataatctggcgacgttca

SEQ ID NO: 46753 - DNA, 22 bp, synthetic construct
  misc_feature 1..22: note = chemically synthesized
  source 1..22: mol_type = other DNA
ataatctggcgacgttcacagc

SEQ ID NO: 46754 - DNA, 22 bp, synthetic construct
  misc_feature 1..22: note = chemically synthesized
  source 1..22: mol_type = other DNA
gcgacgttcacagccttatgaa

SEQ ID NO: 46755 - DNA, 22 bp, synthetic construct
  misc_feature 1..22: note = chemically synthesized
  source 1..22: mol_type = other DNA
acagccttatgaagacagttta

SEQ ID NO: 46756 - DNA, 22 bp, synthetic construct
  misc_feature 1..22: note = chemically synthesized
  source 1..22: mol_type = other DNA
atgaagacagtttattctcttt

SEQ ID NO: 46757 - DNA, 22 bp, synthetic construct
  misc_feature 1..22: note = chemically synthesized
  source 1..22: mol_type = other DNA
tgaagacagtttattctctttt

SEQ ID NO: 46758 - DNA, 22 bp, synthetic construct
  misc_feature 1..22: note = chemically synthesized
  source 1..22: mol_type = other DNA
attctcttttagtgtctcaagt

SEQ ID NO: 46759 - DNA, 22 bp, synthetic construct
  misc_feature 1..22: note = chemically synthesized
  source 1..22: mol_type = other DNA
ttctcttttagtgtctcaagta

SEQ ID NO: 46760 - DNA, 22 bp, synthetic construct
  misc_feature 1..22: note = chemically synthesized
  source 1..22: mol_type = other DNA
tcttttagtgtctcaagtatga

SEQ ID NO: 46761 - DNA, 22 bp, synthetic construct
  misc_feature 1..22: note = chemically synthesized
  source 1..22: mol_type = other DNA
ttttagtgtctcaagtatgagt

SEQ ID NO: 46762 - DNA, 22 bp, synthetic construct
  misc_feature 1..22: note = chemically synthesized
  source 1..22: mol_type = other DNA
ttagtgtctcaagtatgagtca

SEQ ID NO: 46763 - DNA, 22 bp, synthetic construct
  misc_feature 1..22: note = chemically synthesized
  source 1..22: mol_type = other DNA
tagtgtctcaagtatgagtcac

SEQ ID NO: 46764 - DNA, 22 bp, synthetic construct
  misc_feature 1..22: note = chemically synthesized
  source 1..22: mol_type = other DNA
agtgtctcaagtatgagtcacc

SEQ ID NO: 46765 - DNA, 22 bp, synthetic construct
  misc_feature 1..22: note = chemically synthesized
  source 1..22: mol_type = other DNA
gtgtctcaagtatgagtcacct

SEQ ID NO: 46766 - DNA, 22 bp, synthetic construct
  misc_feature 1..22: note = chemically synthesized
  source 1..22: mol_type = other DNA
aagtatgagtcacctctgatga

SEQ ID NO: 46767 - DNA, 22 bp, synthetic construct
  misc_feature 1..22: note = chemically synthesized
  source 1..22: mol_type = other DNA
tgatgacggataggagaacaag

SEQ ID NO: 46768 - DNA, 22 bp, synthetic construct
  misc_feature 1..22: note = chemically synthesized
  source 1..22: mol_type = other DNA
atgacggataggagaacaagca

SEQ ID NO: 46769 - DNA, 22 bp, synthetic construct
  misc_feature 1..22: note = chemically synthesized
  source 1..22: mol_type = other DNA
tactacaatacacacctaaagt

SEQ ID NO: 46770 - DNA, 22 bp, synthetic construct
  misc_feature 1..22: note = chemically synthesized
  source 1..22: mol_type = other DNA
actacaatacacacctaaagta

SEQ ID NO: 46771 - DNA, 22 bp, synthetic construct
  misc_feature 1..22: note = chemically synthesized
  source 1..22: mol_type = other DNA
ctacaatacacacctaaagtaa

SEQ ID NO: 46772 - DNA, 22 bp, synthetic construct
  misc_feature 1..22: note = chemically synthesized
  source 1..22: mol_type = other DNA
caatacacacctaaagtaaatg

SEQ ID NO: 46773 - DNA, 22 bp, synthetic construct
  misc_feature 1..22: note = chemically synthesized
  source 1..22: mol_type = other DNA
aagtaaatgaataaacccaacc

SEQ ID NO: 46774 - DNA, 22 bp, synthetic construct
  misc_feature 1..22: note = chemically synthesized
  source 1..22: mol_type = other DNA
tgcccacccacatggcatccat

SEQ ID NO: 46775 - DNA, 22 bp, synthetic construct
  misc_feature 1..22: note = chemically synthesized
  source 1..22: mol_type = other DNA
gcccacccacatggcatccatt

SEQ ID NO: 46776 - DNA, 22 bp, synthetic construct
  misc_feature 1..22: note = chemically synthesized
  source 1..22: mol_type = other DNA
cccacccacatggcatccattt

SEQ ID NO: 46777 - DNA, 22 bp, synthetic construct
  misc_feature 1..22: note = chemically synthesized
  source 1..22: mol_type = other DNA
ggaggagacacagagaaaggag

SEQ ID NO: 46778 - DNA, 22 bp, synthetic construct
  misc_feature 1..22: note = chemically synthesized
  source 1..22: mol_type = other DNA
gaggagacacagagaaaggagt

SEQ ID NO: 46779 - DNA, 22 bp, synthetic construct
  misc_feature 1..22: note = chemically synthesized
  source 1..22: mol_type = other DNA
cacctcttagacgtctcagaga

SEQ ID NO: 46780 - DNA, 22 bp, synthetic construct
  misc_feature 1..22: note = chemically synthesized
  source 1..22: mol_type = other DNA
acctcttagacgtctcagagat

SEQ ID NO: 46781 - DNA, 22 bp, synthetic construct
  misc_feature 1..22: note = chemically synthesized
  source 1..22: mol_type = other DNA
ttagacgtctcagagattaaca

SEQ ID NO: 46782 - DNA, 22 bp, synthetic construct
  misc_feature 1..22: note = chemically synthesized
  source 1..22: mol_type = other DNA
agacgtctcagagattaacatt

SEQ ID NO: 46783 - DNA, 22 bp, synthetic construct
  misc_feature 1..22: note = chemically synthesized
  source 1..22: mol_type = other DNA
gacgtctcagagattaacattt

SEQ ID NO: 46784 - DNA, 22 bp, synthetic construct
  misc_feature 1..22: note = chemically synthesized
  source 1..22: mol_type = other DNA
agagattaacattttctcaaaa

SEQ ID NO: 46785 - DNA, 22 bp, synthetic construct
  misc_feature 1..22: note = chemically synthesized
  source 1..22: mol_type = other DNA
acattttctcaaaaatgaacac

SEQ ID NO: 46786 - DNA, 22 bp, synthetic construct
  misc_feature 1..22: note = chemically synthesized
  source 1..22: mol_type = other DNA
tctcaaaaatgaacacacagag

SEQ ID NO: 46787 - DNA, 22 bp, synthetic construct
  misc_feature 1..22: note = chemically synthesized
  source 1..22: mol_type = other DNA
ctcaaaaatgaacacacagagc

SEQ ID NO: 46788 - DNA, 22 bp, synthetic construct
  misc_feature 1..22: note = chemically synthesized
  source 1..22: mol_type = other DNA
tcaaaaatgaacacacagagca

SEQ ID NO: 46789 - DNA, 22 bp, synthetic construct
  misc_feature 1..22: note = chemically synthesized
  source 1..22: mol_type = other DNA
aaaaatgaacacacagagcaac

SEQ ID NO: 46790 - DNA, 22 bp, synthetic construct
  misc_feature 1..22: note = chemically synthesized
  source 1..22: mol_type = other DNA
acgagtcacagtggaccacacc

SEQ ID NO: 46791 - DNA, 22 bp, synthetic construct
  misc_feature 1..22: note = chemically synthesized
  source 1..22: mol_type = other DNA
tggttaccccctgagaaaggca

SEQ ID NO: 46792 - DNA, 22 bp, synthetic construct
  misc_feature 1..22: note = chemically synthesized
  source 1..22: mol_type = other DNA
gttaccccctgagaaaggcaga

SEQ ID NO: 46793 - DNA, 22 bp, synthetic construct
  misc_feature 1..22: note = chemically synthesized
  source 1..22: mol_type = other DNA
ccccctgagaaaggcagagaaa

SEQ ID NO: 46794 - DNA, 22 bp, synthetic construct
  misc_feature 1..22: note = chemically synthesized
  source 1..22: mol_type = other DNA
agaaaggcagagaaaggacccc

SEQ ID NO: 46795 - DNA, 22 bp, synthetic construct
  misc_feature 1..22: note = chemically synthesized
  source 1..22: mol_type = other DNA
gaggagaggttcagggatcatg

SEQ ID NO: 46796 - DNA, 22 bp, synthetic construct
  misc_feature 1..22: note = chemically synthesized
  source 1..22: mol_type = other DNA
aggagaggttcagggatcatga

SEQ ID NO: 46797 - DNA, 22 bp, synthetic construct
  misc_feature 1..22: note = chemically synthesized
  source 1..22: mol_type = other DNA
agggatcatgaggactcaccac

SEQ ID NO: 46798 - DNA, 22 bp, synthetic construct
  misc_feature 1..22: note = chemically synthesized
  source 1..22: mol_type = other DNA
accaccccactgaaatccatgg

SEQ ID NO: 46799 - DNA, 22 bp, synthetic construct
  misc_feature 1..22: note = chemically synthesized
  source 1..22: mol_type = other DNA
aaatccatggatagtctagcct

SEQ ID NO: 46800 - DNA, 22 bp, synthetic construct
  misc_feature 1..22: note = chemically synthesized
  source 1..22: mol_type = other DNA
gcctgtgaggggttgggggtgg

SEQ ID NO: 46801 - DNA, 22 bp, synthetic construct
  misc_feature 1..22: note = chemically synthesized
  source 1..22: mol_type = other DNA
tgaggggttgggggtggcaaat

SEQ ID NO: 46802 - DNA, 22 bp, synthetic construct
  misc_feature 1..22: note = chemically synthesized
  source 1..22: mol_type = other DNA
ggggtggcaaattactttatct

SEQ ID NO: 46803 - DNA, 22 bp, synthetic construct
  misc_feature 1..22: note = chemically synthesized
  source 1..22: mol_type = other DNA
ctttatctttctcatctttgag

SEQ ID NO: 46804 - DNA, 22 bp, synthetic construct
  misc_feature 1..22: note = chemically synthesized
  source 1..22: mol_type = other DNA
tatctttctcatctttgagcgg

SEQ ID NO: 46805 - DNA, 22 bp, synthetic construct
  misc_feature 1..22: note = chemically synthesized
  source 1..22: mol_type = other DNA
atctttctcatctttgagcggc

SEQ ID NO: 46806 - DNA, 22 bp, synthetic construct
  misc_feature 1..22: note = chemically synthesized
  source 1..22: mol_type = other DNA
tctttctcatctttgagcggct

SEQ ID NO: 46807 - DNA, 22 bp, synthetic construct
  misc_feature 1..22: note = chemically synthesized
  source 1..22: mol_type = other DNA
tctcatctttgagcggctcttc

SEQ ID NO: 46808 - DNA, 22 bp, synthetic construct
  misc_feature 1..22: note = chemically synthesized
  source 1..22: mol_type = other DNA
ctcatctttgagcggctcttcc

SEQ ID NO: 46809 - DNA, 22 bp, synthetic construct
  misc_feature 1..22: note = chemically synthesized
  source 1..22: mol_type = other DNA
tcatctttgagcggctcttccc

SEQ ID NO: 46810 - DNA, 22 bp, synthetic construct
  misc_feature 1..22: note = chemically synthesized
  source 1..22: mol_type = other DNA
atctttgagcggctcttcccca

SEQ ID NO: 46811 - DNA, 22 bp, synthetic construct
  misc_feature 1..22: note = chemically synthesized
  source 1..22: mol_type = other DNA
tgagcggctcttccccagagtc

SEQ ID NO: 46812 - DNA, 22 bp, synthetic construct
  misc_feature 1..22: note = chemically synthesized
  source 1..22: mol_type = other DNA
gagcggctcttccccagagtca

SEQ ID NO: 46813 - DNA, 22 bp, synthetic construct
  misc_feature 1..22: note = chemically synthesized
  source 1..22: mol_type = other DNA
agcggctcttccccagagtcag

SEQ ID NO: 46814 - DNA, 22 bp, synthetic construct
  misc_feature 1..22: note = chemically synthesized
  source 1..22: mol_type = other DNA
ttccccagagtcaggatgactc

SEQ ID NO: 46815 - DNA, 22 bp, synthetic construct
  misc_feature 1..22: note = chemically synthesized
  source 1..22: mol_type = other DNA
ccccagagtcaggatgactctc

SEQ ID NO: 46816 - DNA, 22 bp, synthetic construct
  misc_feature 1..22: note = chemically synthesized
  source 1..22: mol_type = other DNA
cccagagtcaggatgactctca

SEQ ID NO: 46817 - DNA, 22 bp, synthetic construct
  misc_feature 1..22: note = chemically synthesized
  source 1..22: mol_type = other DNA
tcactaggtttcaggtacatcc

SEQ ID NO: 46818 - DNA, 22 bp, synthetic construct
  misc_feature 1..22: note = chemically synthesized
  source 1..22: mol_type = other DNA
actaggtttcaggtacatcccc

SEQ ID NO: 46819 - DNA, 22 bp, synthetic construct
  misc_feature 1..22: note = chemically synthesized
  source 1..22: mol_type = other DNA
ggtttcaggtacatccccatca

SEQ ID NO: 46820 - DNA, 22 bp, synthetic construct
  misc_feature 1..22: note = chemically synthesized
  source 1..22: mol_type = other DNA
caggtacatccccatcatgccc

SEQ ID NO: 46821 - DNA, 22 bp, synthetic construct
  misc_feature 1..22: note = chemically synthesized
  source 1..22: mol_type = other DNA
aggtacatccccatcatgcccc

SEQ ID NO: 46822 - DNA, 22 bp, synthetic construct
  misc_feature 1..22: note = chemically synthesized
  source 1..22: mol_type = other DNA
cagtctctgcagctgacacggc

SEQ ID NO: 46823 - DNA, 22 bp, synthetic construct
  misc_feature 1..22: note = chemically synthesized
  source 1..22: mol_type = other DNA
tgcagctgacacggctccaaga

SEQ ID NO: 46824 - DNA, 22 bp, synthetic construct
  misc_feature 1..22: note = chemically synthesized
  source 1..22: mol_type = other DNA
cagctgacacggctccaagatg

SEQ ID NO: 46825 - DNA, 22 bp, synthetic construct
  misc_feature 1..22: note = chemically synthesized
  source 1..22: mol_type = other DNA
acacggctccaagatgctaaat

SEQ ID NO: 46826 - DNA, 22 bp, synthetic construct
  misc_feature 1..22: note = chemically synthesized
  source 1..22: mol_type = other DNA
caagatgctaaatatgagacaa

SEQ ID NO: 46827 - DNA, 22 bp, synthetic construct
  misc_feature 1..22: note = chemically synthesized
  source 1..22: mol_type = other DNA
aatatgagacaaggaggggaca

SEQ ID NO: 46828 - DNA, 22 bp, synthetic construct
  misc_feature 1..22: note = chemically synthesized
  source 1..22: mol_type = other DNA
agtcccaggagtggcactagaa

SEQ ID NO: 46829 - DNA, 22 bp, synthetic construct
  misc_feature 1..22: note = chemically synthesized
  source 1..22: mol_type = other DNA
gtcccaggagtggcactagaag

SEQ ID NO: 46830 - DNA, 22 bp, synthetic construct
  misc_feature 1..22: note = chemically synthesized
  source 1..22: mol_type = other DNA
gaaggagtccctgctccctcag

SEQ ID NO: 46831 - DNA, 22 bp, synthetic construct
  misc_feature 1..22: note = chemically synthesized
  source 1..22: mol_type = other DNA
ctccctcaggagccatctgccg

SEQ ID NO: 46832 - DNA, 22 bp, synthetic construct
  misc_feature 1..22: note = chemically synthesized
  source 1..22: mol_type = other DNA
cctcaggagccatctgccgggt

SEQ ID NO: 46833 - DNA, 22 bp, synthetic construct
  misc_feature 1..22: note = chemically synthesized
  source 1..22: mol_type = other DNA
aggagccatctgccgggtgctt

SEQ ID NO: 46834 - DNA, 22 bp, synthetic construct
  misc_feature 1..22: note = chemically synthesized
  source 1..22: mol_type = other DNA
ccgggtgcttctggagatgctg

SEQ ID NO: 46835 - DNA, 22 bp, synthetic construct
  misc_feature 1..22: note = chemically synthesized
  source 1..22: mol_type = other DNA
ctggagatgctgcctccacgcc

SEQ ID NO: 46836 - DNA, 22 bp, synthetic construct
  misc_feature 1..22: note = chemically synthesized
  source 1..22: mol_type = other DNA
tggagatgctgcctccacgccc

SEQ ID NO: 46837 - DNA, 22 bp, synthetic construct
  misc_feature 1..22: note = chemically synthesized
  source 1..22: mol_type = other DNA
gagatgctgcctccacgcccca

SEQ ID NO: 46838 - DNA, 22 bp, synthetic construct
  misc_feature 1..22: note = chemically synthesized
  source 1..22: mol_type = other DNA
cctccacgccccacttgaggct

SEQ ID NO: 46839 - DNA, 22 bp, synthetic construct
  misc_feature 1..22: note = chemically synthesized
  source 1..22: mol_type = other DNA
cacgccccacttgaggctgtcc

SEQ ID NO: 46840 - DNA, 22 bp, synthetic construct
  misc_feature 1..22: note = chemically synthesized
  source 1..22: mol_type = other DNA
gaggctgtccacagcagaaacc

SEQ ID NO: 46841 - DNA, 22 bp, synthetic construct
  misc_feature 1..22: note = chemically synthesized
  source 1..22: mol_type = other DNA
aggctgtccacagcagaaacca

SEQ ID NO: 46842 - DNA, 22 bp, synthetic construct
  misc_feature 1..22: note = chemically synthesized
  source 1..22: mol_type = other DNA
tccacagcagaaaccagcgccc

SEQ ID NO: 46843 - DNA, 22 bp, synthetic construct
  misc_feature 1..22: note = chemically synthesized
  source 1..22: mol_type = other DNA
aagccagccaccccatgggaac

SEQ ID NO: 46844 - DNA, 22 bp, synthetic construct
  misc_feature 1..22: note = chemically synthesized
  source 1..22: mol_type = other DNA
tggcaggtgtgggtgttgggtt

SEQ ID NO: 46845 - DNA, 22 bp, synthetic construct
  misc_feature 1..22: note = chemically synthesized
  source 1..22: mol_type = other DNA
ggcaggtgtgggtgttgggtta

SEQ ID NO: 46846 - DNA, 22 bp, synthetic construct
  misc_feature 1..22: note = chemically synthesized
  source 1..22: mol_type = other DNA
gcaggtgtgggtgttgggttag

SEQ ID NO: 46847 - DNA, 22 bp, synthetic construct
  misc_feature 1..22: note = chemically synthesized
  source 1..22: mol_type = other DNA
ggttagcctctagccagaactc

SEQ ID NO: 46848 - DNA, 22 bp, synthetic construct
  misc_feature 1..22: note = chemically synthesized
  source 1..22: mol_type = other DNA
gcctctagccagaactcctgct

SEQ ID NO: 46849 - DNA, 22 bp, synthetic construct
  misc_feature 1..22: note = chemically synthesized
  source 1..22: mol_type = other DNA
tagccagaactcctgctgcttc

SEQ ID NO: 46850 - DNA, 22 bp, synthetic construct
  misc_feature 1..22: note = chemically synthesized
  source 1..22: mol_type = other DNA
gccagaactcctgctgcttctc

SEQ ID NO: 46851 - DNA, 22 bp, synthetic construct
  misc_feature 1..22: note = chemically synthesized
  source 1..22: mol_type = other DNA
ctgctgcttctctctttgtgga

SEQ ID NO: 46852 - DNA, 22 bp, synthetic construct
  misc_feature 1..22: note = chemically synthesized
  source 1..22: mol_type = other DNA
ctgcttctctctttgtggagca

SEQ ID NO: 46853 - DNA, 22 bp, synthetic construct
  misc_feature 1..22: note = chemically synthesized
  source 1..22: mol_type = other DNA
cttctctctttgtggagcaaat

SEQ ID NO: 46854 - DNA, 22 bp, synthetic construct
  misc_feature 1..22: note = chemically synthesized
  source 1..22: mol_type = other DNA
ctctctttgtggagcaaatctt

SEQ ID NO: 46855 - DNA, 22 bp, synthetic construct
  misc_feature 1..22: note = chemically synthesized
  source 1..22: mol_type = other DNA
tctctttgtggagcaaatcttc

SEQ ID NO: 46856 - DNA, 22 bp, synthetic construct
  misc_feature 1..22: note = chemically synthesized
  source 1..22: mol_type = other DNA
tctttgtggagcaaatcttcat

SEQ ID NO: 46857 - DNA, 22 bp, synthetic construct
  misc_feature 1..22: note = chemically synthesized
  source 1..22: mol_type = other DNA
tttgtggagcaaatcttcatgt

SEQ ID NO: 46858 - DNA, 22 bp, synthetic construct
  misc_feature 1..22: note = chemically synthesized
  source 1..22: mol_type = other DNA
tgtggagcaaatcttcatgtcc

SEQ ID NO: 46859 - DNA, 22 bp, synthetic construct
  misc_feature 1..22: note = chemically synthesized
  source 1..22: mol_type = other DNA
gtggagcaaatcttcatgtcct

SEQ ID NO: 46860 - DNA, 22 bp, synthetic construct
  misc_feature 1..22: note = chemically synthesized
  source 1..22: mol_type = other DNA
tggagcaaatcttcatgtcctg

SEQ ID NO: 46861 - DNA, 22 bp, synthetic construct
  misc_feature 1..22: note = chemically synthesized
  source 1..22: mol_type = other DNA
catgtcctgtctggatcttccc

SEQ ID NO: 46862 - DNA, 22 bp, synthetic construct
  misc_feature 1..22: note = chemically synthesized
  source 1..22: mol_type = other DNA
atgtcctgtctggatcttccca

SEQ ID NO: 46863 - DNA, 22 bp, synthetic construct
  misc_feature 1..22: note = chemically synthesized
  source 1..22: mol_type = other DNA
tctggatcttcccagtcctgcc

SEQ ID NO: 46864 - DNA, 22 bp, synthetic construct
  misc_feature 1..22: note = chemically synthesized
  source 1..22: mol_type = other DNA
gatcttcccagtcctgccctct

SEQ ID NO: 46865 - DNA, 22 bp, synthetic construct
  misc_feature 1..22: note = chemically synthesized
  source 1..22: mol_type = other DNA
cccagtcctgccctctctcttc

SEQ ID NO: 46866 - DNA, 22 bp, synthetic construct
  misc_feature 1..22: note = chemically synthesized
  source 1..22: mol_type = other DNA
ccagtcctgccctctctcttct

SEQ ID NO: 46867 - DNA, 22 bp, synthetic construct
  misc_feature 1..22: note = chemically synthesized
  source 1..22: mol_type = other DNA
ccctctctcttctgaatcttcc

SEQ ID NO: 46868 - DNA, 22 bp, synthetic construct
  misc_feature 1..22: note = chemically synthesized
  source 1..22: mol_type = other DNA
tctcttctgaatcttcccaccc

SEQ ID NO: 46869 - DNA, 22 bp, synthetic construct
  misc_feature 1..22: note = chemically synthesized
  source 1..22: mol_type = other DNA
tcttctgaatcttcccaccctt

SEQ ID NO: 46870 - DNA, 22 bp, synthetic construct
  misc_feature 1..22: note = chemically synthesized
  source 1..22: mol_type = other DNA
ttctgaatcttcccacccttcc

SEQ ID NO: 46871 - DNA, 22 bp, synthetic construct
  misc_feature 1..22: note = chemically synthesized
  source 1..22: mol_type = other DNA
ctgaatcttcccacccttccaa

SEQ ID NO: 46872 - DNA, 22 bp, synthetic construct
  misc_feature 1..22: note = chemically synthesized
  source 1..22: mol_type = other DNA
tgaatcttcccacccttccaag

SEQ ID NO: 46873 - DNA, 22 bp, synthetic construct
  misc_feature 1..22: note = chemically synthesized
  source 1..22: mol_type = other DNA
aatcttcccacccttccaaggg

SEQ ID NO: 46874 - DNA, 22 bp, synthetic construct
  misc_feature 1..22: note = chemically synthesized
  source 1..22: mol_type = other DNA
cccacccttccaagggcctgct

SEQ ID NO: 46875 - DNA, 22 bp, synthetic construct
  misc_feature 1..22: note = chemically synthesized
  source 1..22: mol_type = other DNA
ccacccttccaagggcctgctg

SEQ ID NO: 46876 - DNA, 22 bp, synthetic construct
  misc_feature 1..22: note = chemically synthesized
  source 1..22: mol_type = other DNA
ccaagggcctgctgcctaatcc

SEQ ID NO: 46877 - DNA, 22 bp, synthetic construct
  misc_feature 1..22: note = chemically synthesized
  source 1..22: mol_type = other DNA
caagggcctgctgcctaatcca

SEQ ID NO: 46878 - DNA, 22 bp, synthetic construct
  misc_feature 1..22: note = chemically synthesized
  source 1..22: mol_type = other DNA
ctgcctaatccatctccccact

SEQ ID NO: 46879 - DNA, 22 bp, synthetic construct
  misc_feature 1..22: note = chemically synthesized
  source 1..22: mol_type = other DNA
cctaatccatctccccactcac

SEQ ID NO: 46880 - DNA, 22 bp, synthetic construct
  misc_feature 1..22: note = chemically synthesized
  source 1..22: mol_type = other DNA
atccatctccccactcacacgc

SEQ ID NO: 46881 - DNA, 22 bp, synthetic construct
  misc_feature 1..22: note = chemically synthesized
  source 1..22: mol_type = other DNA
cccactcacacgctaaagtaaa

SEQ ID NO: 46882 - DNA, 22 bp, synthetic construct
  misc_feature 1..22: note = chemically synthesized
  source 1..22: mol_type = other DNA
acacgctaaagtaaatgaataa

SEQ ID NO: 46883 - DNA, 22 bp, synthetic construct
  misc_feature 1..22: note = chemically synthesized
  source 1..22: mol_type = other DNA
aagtaaatgaataaacccaaca

SEQ ID NO: 46884 - DNA, 22 bp, synthetic construct
  misc_feature 1..22: note = chemically synthesized
  source 1..22: mol_type = other DNA
atccctgatcaggactgaaaaa

SEQ ID NO: 46885 - DNA, 22 bp, synthetic construct
  misc_feature 1..22: note = chemically synthesized
  source 1..22: mol_type = other DNA
atcaggactgaaaaaagaaaaa

SEQ ID NO: 46886 - DNA, 22 bp, synthetic construct
  misc_feature 1..22: note = chemically synthesized
  source 1..22: mol_type = other DNA
aaaaaagaaaaagaaatagcct

SEQ ID NO: 46887 - DNA, 22 bp, synthetic construct
  misc_feature 1..22: note = chemically synthesized
  source 1..22: mol_type = other DNA
ccatcacaccactctctgggaa

SEQ ID NO: 46888 - DNA, 22 bp, synthetic construct
  misc_feature 1..22: note = chemically synthesized
  source 1..22: mol_type = other DNA
tctgggaaaatagaactgagtc

SEQ ID NO: 46889 - DNA, 22 bp, synthetic construct
  misc_feature 1..22: note = chemically synthesized
  source 1..22: mol_type = other DNA
tgggaaaatagaactgagtcct

SEQ ID NO: 46890 - DNA, 22 bp, synthetic construct
  misc_feature 1..22: note = chemically synthesized
  source 1..22: mol_type = other DNA
ggaaaatagaactgagtcctag

SEQ ID NO: 46891 - DNA, 22 bp, synthetic construct
  misc_feature 1..22: note = chemically synthesized
  source 1..22: mol_type = other DNA
agtcctagctctagcactgggc

SEQ ID NO: 46892 - DNA, 22 bp, synthetic construct
  misc_feature 1..22: note = chemically synthesized
  source 1..22: mol_type = other DNA
gctctagcactgggcacagctg

SEQ ID NO: 46893 - DNA, 22 bp, synthetic construct
  misc_feature 1..22: note = chemically synthesized
  source 1..22: mol_type = other DNA
tagcactgggcacagctgggtc

SEQ ID NO: 46894 - DNA, 22 bp, synthetic construct
  misc_feature 1..22: note = chemically synthesized
  source 1..22: mol_type = other DNA
gcactgggcacagctgggtcag

SEQ ID NO: 46895 - DNA, 22 bp, synthetic construct
  misc_feature 1..22: note = chemically synthesized
  source 1..22: mol_type = other DNA
ggcacagctgggtcagcaccta

SEQ ID NO: 46896 - DNA, 22 bp, synthetic construct
  misc_feature 1..22: note = chemically synthesized
  source 1..22: mol_type = other DNA
ggtcagcacctacgaagggtcc

SEQ ID NO: 46897 - DNA, 22 bp, synthetic construct
  misc_feature 1..22: note = chemically synthesized
  source 1..22: mol_type = other DNA
cgaagggtcctatgcagtgaac

SEQ ID NO: 46898 - DNA, 22 bp, synthetic construct
  misc_feature 1..22: note = chemically synthesized
  source 1..22: mol_type = other DNA
tgcagtgaacaccttgcagtct

SEQ ID NO: 46899 - DNA, 22 bp, synthetic construct
  misc_feature 1..22: note = chemically synthesized
  source 1..22: mol_type = other DNA
gcagtctgaagggcagactctc

SEQ ID NO: 46900 - DNA, 22 bp, synthetic construct
  misc_feature 1..22: note = chemically synthesized
  source 1..22: mol_type = other DNA
cagtctgaagggcagactctct

SEQ ID NO: 46901 - DNA, 22 bp, synthetic construct
  misc_feature 1..22: note = chemically synthesized
  source 1..22: mol_type = other DNA
aagggcagactctctcttctca

SEQ ID NO: 46902 - DNA, 22 bp, synthetic construct
  misc_feature 1..22: note = chemically synthesized
  source 1..22: mol_type = other DNA
tctcttctcaacaagccagaga

SEQ ID NO: 46903 - DNA, 22 bp, synthetic construct
  misc_feature 1..22: note = chemically synthesized
  source 1..22: mol_type = other DNA
tcttctcaacaagccagagatt

SEQ ID NO: 46904 - DNA, 22 bp, synthetic construct
  misc_feature 1..22: note = chemically synthesized
  source 1..22: mol_type = other DNA
ttctcaacaagccagagattct

SEQ ID NO: 46905 - DNA, 22 bp, synthetic construct
  misc_feature 1..22: note = chemically synthesized
  source 1..22: mol_type = other DNA
ctcaacaagccagagattctct

SEQ ID NO: 46906 - DNA, 22 bp, synthetic construct
  misc_feature 1..22: note = chemically synthesized
  source 1..22: mol_type = other DNA
tcaacaagccagagattctctg

SEQ ID NO: 46907 - DNA, 22 bp, synthetic construct
  misc_feature 1..22: note = chemically synthesized
  source 1..22: mol_type = other DNA
aacaagccagagattctctgcc

SEQ ID NO: 46908 - DNA, 22 bp, synthetic construct
  misc_feature 1..22: note = chemically synthesized
  source 1..22: mol_type = other DNA
tctgccttccagacaggcacct

SEQ ID NO: 46909 - DNA, 22 bp, synthetic construct
  misc_feature 1..22: note = chemically synthesized
  source 1..22: mol_type = other DNA
tgccttccagacaggcacctcc

SEQ ID NO: 46910 - DNA, 22 bp, synthetic construct
  misc_feature 1..22: note = chemically synthesized
  source 1..22: mol_type = other DNA
ccttccagacaggcacctccat

SEQ ID NO: 46911 - DNA, 22 bp, synthetic construct
  misc_feature 1..22: note = chemically synthesized
  source 1..22: mol_type = other DNA
ccagacaggcacctccatgaag

SEQ ID NO: 46912 - DNA, 22 bp, synthetic construct
  misc_feature 1..22: note = chemically synthesized
  source 1..22: mol_type = other DNA
cagacaggcacctccatgaaga

SEQ ID NO: 46913 - DNA, 22 bp, synthetic construct
  misc_feature 1..22: note = chemically synthesized
  source 1..22: mol_type = other DNA
catgaagagaagctgttcctgg

SEQ ID NO: 46914 - DNA, 22 bp, synthetic construct
  misc_feature 1..22: note = chemically synthesized
  source 1..22: mol_type = other DNA
ttcctggcttgtggtgagcaaa

SEQ ID NO: 46915 - DNA, 22 bp, synthetic construct
  misc_feature 1..22: note = chemically synthesized
  source 1..22: mol_type = other DNA
ctggcttgtggtgagcaaaact

SEQ ID NO: 46916 - DNA, 22 bp, synthetic construct
  misc_feature 1..22: note = chemically synthesized
  source 1..22: mol_type = other DNA
gcttgtggtgagcaaaactccc

SEQ ID NO: 46917 - DNA, 22 bp, synthetic construct
  misc_feature 1..22: note = chemically synthesized
  source 1..22: mol_type = other DNA
gtggtgagcaaaactccctgga

SEQ ID NO: 46918 - DNA, 22 bp, synthetic construct
  misc_feature 1..22: note = chemically synthesized
  source 1..22: mol_type = other DNA
tggtgagcaaaactccctggat

SEQ ID NO: 46919 - DNA, 22 bp, synthetic construct
  misc_feature 1..22: note = chemically synthesized
  source 1..22: mol_type = other DNA
cctggattgagtcgagacctgg

SEQ ID NO: 46920 - DNA, 22 bp, synthetic construct
  misc_feature 1..22: note = chemically synthesized
  source 1..22: mol_type = other DNA
gattgagtcgagacctggattc

SEQ ID NO: 46921 - DNA, 22 bp, synthetic construct
  misc_feature 1..22: note = chemically synthesized
  source 1..22: mol_type = other DNA
agtcgagacctggattctagtt

SEQ ID NO: 46922 - DNA, 22 bp, synthetic construct
  misc_feature 1..22: note = chemically synthesized
  source 1..22: mol_type = other DNA
gattctagttccactactttga

SEQ ID NO: 46923 - DNA, 22 bp, synthetic construct
  misc_feature 1..22: note = chemically synthesized
  source 1..22: mol_type = other DNA
tagttccactactttgaattct

SEQ ID NO: 46924 - DNA, 22 bp, synthetic construct
  misc_feature 1..22: note = chemically synthesized
  source 1..22: mol_type = other DNA
gttccactactttgaattctct

SEQ ID NO: 46925 - DNA, 22 bp, synthetic construct
  misc_feature 1..22: note = chemically synthesized
  source 1..22: mol_type = other DNA
cactactttgaattctctaggt

SEQ ID NO: 46926 - DNA, 22 bp, synthetic construct
  misc_feature 1..22: note = chemically synthesized
  source 1..22: mol_type = other DNA
ctttgaattctctaggttcaca

SEQ ID NO: 46927 - DNA, 22 bp, synthetic construct
  misc_feature 1..22: note = chemically synthesized
  source 1..22: mol_type = other DNA
tgaattctctaggttcacagtc

SEQ ID NO: 46928 - DNA, 22 bp, synthetic construct
  misc_feature 1..22: note = chemically synthesized
  source 1..22: mol_type = other DNA
gaattctctaggttcacagtcc

SEQ ID NO: 46929 - DNA, 22 bp, synthetic construct
  misc_feature 1..22: note = chemically synthesized
  source 1..22: mol_type = other DNA
aattctctaggttcacagtcct

SEQ ID NO: 46930 - DNA, 22 bp, synthetic construct
  misc_feature 1..22: note = chemically synthesized
  source 1..22: mol_type = other DNA
tctaggttcacagtcctaaatc

SEQ ID NO: 46931 - DNA, 22 bp, synthetic construct
  misc_feature 1..22: note = chemically synthesized
  source 1..22: mol_type = other DNA
taggttcacagtcctaaatcct

SEQ ID NO: 46932 - DNA, 22 bp, synthetic construct
  misc_feature 1..22: note = chemically synthesized
  source 1..22: mol_type = other DNA
ggttcacagtcctaaatcctca

SEQ ID NO: 46933 - DNA, 22 bp, synthetic construct
  misc_feature 1..22: note = chemically synthesized
  source 1..22: mol_type = other DNA
acagtcctaaatcctcagagaa

SEQ ID NO: 46934 - DNA, 22 bp, synthetic construct
  misc_feature 1..22: note = chemically synthesized
  source 1..22: mol_type = other DNA
aatcctcagagaaggacagact

SEQ ID NO: 46935 - DNA, 22 bp, synthetic construct
  misc_feature 1..22: note = chemically synthesized
  source 1..22: mol_type = other DNA
agagaaggacagacttgagggc

SEQ ID NO: 46936 - DNA, 22 bp, synthetic construct
  misc_feature 1..22: note = chemically synthesized
  source 1..22: mol_type = other DNA
gagggcagacagccacaggtgg

SEQ ID NO: 46937 - DNA, 22 bp, synthetic construct
  misc_feature 1..22: note = chemically synthesized
  source 1..22: mol_type = other DNA
agggcagacagccacaggtggc

SEQ ID NO: 46938 - DNA, 22 bp, synthetic construct
  misc_feature 1..22: note = chemically synthesized
  source 1..22: mol_type = other DNA
gcatgggctgaggcagcacaca

SEQ ID NO: 46939 - DNA, 22 bp, synthetic construct
  misc_feature 1..22: note = chemically synthesized
  source 1..22: mol_type = other DNA
aggcagcacacaaggactctga

SEQ ID NO: 46940 - DNA, 22 bp, synthetic construct
  misc_feature 1..22: note = chemically synthesized
  source 1..22: mol_type = other DNA
tgagccacaccagccatctcct

SEQ ID NO: 46941 - DNA, 22 bp, synthetic construct
  misc_feature 1..22: note = chemically synthesized
  source 1..22: mol_type = other DNA
agccacaccagccatctccttg

SEQ ID NO: 46942 - DNA, 22 bp, synthetic construct
  misc_feature 1..22: note = chemically synthesized
  source 1..22: mol_type = other DNA
cttgtggactttcctgagagca

SEQ ID NO: 46943 - DNA, 22 bp, synthetic construct
  misc_feature 1..22: note = chemically synthesized
  source 1..22: mol_type = other DNA
gtggactttcctgagagcacgt

SEQ ID NO: 46944 - DNA, 22 bp, synthetic construct
  misc_feature 1..22: note = chemically synthesized
  source 1..22: mol_type = other DNA
tggactttcctgagagcacgtg

SEQ ID NO: 46945 - DNA, 22 bp, synthetic construct
  misc_feature 1..22: note = chemically synthesized
  source 1..22: mol_type = other DNA
tcctgagagcacgtgcagctag

SEQ ID NO: 46946 - DNA, 22 bp, synthetic construct
  misc_feature 1..22: note = chemically synthesized
  source 1..22: mol_type = other DNA
cctgagagcacgtgcagctagc

SEQ ID NO: 46947 - DNA, 22 bp, synthetic construct
  misc_feature 1..22: note = chemically synthesized
  source 1..22: mol_type = other DNA
ctgagagcacgtgcagctagca

SEQ ID NO: 46948 - DNA, 22 bp, synthetic construct
  misc_feature 1..22: note = chemically synthesized
  source 1..22: mol_type = other DNA
agagcacgtgcagctagcagtg

SEQ ID NO: 46949 - DNA, 22 bp, synthetic construct
  misc_feature 1..22: note = chemically synthesized
  source 1..22: mol_type = other DNA
gcagtgctccaagcactctctg

SEQ ID NO: 46950 - DNA, 22 bp, synthetic construct
  misc_feature 1..22: note = chemically synthesized
  source 1..22: mol_type = other DNA
caagcactctctgagaggcttc

SEQ ID NO: 46951 - DNA, 22 bp, synthetic construct
  misc_feature 1..22: note = chemically synthesized
  source 1..22: mol_type = other DNA
tctgagaggcttccaggctgga

SEQ ID NO: 46952 - DNA, 22 bp, synthetic construct
  misc_feature 1..22: note = chemically synthesized
  source 1..22: mol_type = other DNA
tgagaggcttccaggctggagc

SEQ ID NO: 46953 - DNA, 22 bp, synthetic construct
  misc_feature 1..22: note = chemically synthesized
  source 1..22: mol_type = other DNA
agaggcttccaggctggagctc

SEQ ID NO: 46954 - DNA, 22 bp, synthetic construct
  misc_feature 1..22: note = chemically synthesized
  source 1..22: mol_type = other DNA
ccaggctggagctctgagaggc

SEQ ID NO: 46955 - DNA, 22 bp, synthetic construct
  misc_feature 1..22: note = chemically synthesized
  source 1..22: mol_type = other DNA
caggctggagctctgagaggct

SEQ ID NO: 46956 - DNA, 22 bp, synthetic construct
  misc_feature 1..22: note = chemically synthesized
  source 1..22: mol_type = other DNA
gagctctgagaggcttccaggc

SEQ ID NO: 46957 - DNA, 22 bp, synthetic construct
  misc_feature 1..22: note = chemically synthesized
  source 1..22: mol_type = other DNA
tgagaggcttccaggctgggct

SEQ ID NO: 46958 - DNA, 22 bp, synthetic construct
  misc_feature 1..22: note = chemically synthesized
  source 1..22: mol_type = other DNA
agaggcttccaggctgggctac

SEQ ID NO: 46959 - DNA, 22 bp, synthetic construct
  misc_feature 1..22: note = chemically synthesized
  source 1..22: mol_type = other DNA
ccaggctgggctacctccagcc

SEQ ID NO: 46960 - DNA, 22 bp, synthetic construct
  misc_feature 1..22: note = chemically synthesized
  source 1..22: mol_type = other DNA
caggctgggctacctccagcca

SEQ ID NO: 46961 - DNA, 22 bp, synthetic construct
  misc_feature 1..22: note = chemically synthesized
  source 1..22: mol_type = other DNA
ggctacctccagccatgtggtg

SEQ ID NO: 46962 - DNA, 22 bp, synthetic construct
  misc_feature 1..22: note = chemically synthesized
  source 1..22: mol_type = other DNA
cctccagccatgtggtggaaac

SEQ ID NO: 46963 - DNA, 22 bp, synthetic construct
  misc_feature 1..22: note = chemically synthesized
  source 1..22: mol_type = other DNA
cagccatgtggtggaaactggt

SEQ ID NO: 46964 - DNA, 22 bp, synthetic construct
  misc_feature 1..22: note = chemically synthesized
  source 1..22: mol_type = other DNA
gtagcaaaggaagcccagaagg

SEQ ID NO: 46965 - DNA, 22 bp, synthetic construct
  misc_feature 1..22: note = chemically synthesized
  source 1..22: mol_type = other DNA
aactagaaggctaaggaacacc

SEQ ID NO: 46966 - DNA, 22 bp, synthetic construct
  misc_feature 1..22: note = chemically synthesized
  source 1..22: mol_type = other DNA
gaaggctaaggaacaccccggc

SEQ ID NO: 46967 - DNA, 22 bp, synthetic construct
  misc_feature 1..22: note = chemically synthesized
  source 1..22: mol_type = other DNA
aggaacaccccggccactggtg

SEQ ID NO: 46968 - DNA, 22 bp, synthetic construct
  misc_feature 1..22: note = chemically synthesized
  source 1..22: mol_type = other DNA
gtgggatcgcagtgctgagcca

SEQ ID NO: 46969 - DNA, 22 bp, synthetic construct
  misc_feature 1..22: note = chemically synthesized
  source 1..22: mol_type = other DNA
agccatgagccctaccaggcaa

SEQ ID NO: 46970 - DNA, 22 bp, synthetic construct
  misc_feature 1..22: note = chemically synthesized
  source 1..22: mol_type = other DNA
ccaggcaacccatttctgggca

SEQ ID NO: 46971 - DNA, 22 bp, synthetic construct
  misc_feature 1..22: note = chemically synthesized
  source 1..22: mol_type = other DNA
ctgggcagtcccaagacttgga

SEQ ID NO: 46972 - DNA, 22 bp, synthetic construct
  misc_feature 1..22: note = chemically synthesized
  source 1..22: mol_type = other DNA
tgggcagtcccaagacttggag

SEQ ID NO: 46973 - DNA, 22 bp, synthetic construct
  misc_feature 1..22: note = chemically synthesized
  source 1..22: mol_type = other DNA
ggcagtcccaagacttggagaa

SEQ ID NO: 46974 - DNA, 22 bp, synthetic construct
  misc_feature 1..22: note = chemically synthesized
  source 1..22: mol_type = other DNA
ggagaacaagccatctgaaaat

SEQ ID NO: 46975 - DNA, 22 bp, synthetic construct
  misc_feature 1..22: note = chemically synthesized
  source 1..22: mol_type = other DNA
gagaacaagccatctgaaaata

SEQ ID NO: 46976 - DNA, 22 bp, synthetic construct
  misc_feature 1..22: note = chemically synthesized
  source 1..22: mol_type = other DNA
aaaatagaattaaatagccagg

SEQ ID NO: 46977 - DNA, 22 bp, synthetic construct
  misc_feature 1..22: note = chemically synthesized
  source 1..22: mol_type = other DNA
aatagccaggtgcggtggctca

SEQ ID NO: 46978 - DNA, 22 bp, synthetic construct
  misc_feature 1..22: note = chemically synthesized
  source 1..22: mol_type = other DNA
acacctgtaatctcagcatttt

SEQ ID NO: 46979 - DNA, 22 bp, synthetic construct
  misc_feature 1..22: note = chemically synthesized
  source 1..22: mol_type = other DNA
taatctcagcattttgggaggc

SEQ ID NO: 46980 - DNA, 22 bp, synthetic construct
  misc_feature 1..22: note = chemically synthesized
  source 1..22: mol_type = other DNA
agcattttgggaggccgaggcg

SEQ ID NO: 46981 - DNA, 22 bp, synthetic construct
  misc_feature 1..22: note = chemically synthesized
  source 1..22: mol_type = other DNA
tgggaggccgaggcgtgtgggt

SEQ ID NO: 46982 - DNA, 22 bp, synthetic construct
  misc_feature 1..22: note = chemically synthesized
  source 1..22: mol_type = other DNA
gggaggccgaggcgtgtgggtc

SEQ ID NO: 46983 - DNA, 22 bp, synthetic construct
  misc_feature 1..22: note = chemically synthesized
  source 1..22: mol_type = other DNA
ggaggccgaggcgtgtgggtca

SEQ ID NO: 46984 - DNA, 22 bp, synthetic construct
  misc_feature 1..22: note = chemically synthesized
  source 1..22: mol_type = other DNA
aggtcaggagttcaagaccagc

SEQ ID NO: 46985 - DNA, 22 bp, synthetic construct
  misc_feature 1..22: note = chemically synthesized
  source 1..22: mol_type = other DNA
aagaccagcctagccaacatgg

SEQ ID NO: 46986 - DNA, 22 bp, synthetic construct
  misc_feature 1..22: note = chemically synthesized
  source 1..22: mol_type = other DNA
gccaacatggtgaaaccccatc

SEQ ID NO: 46987 - DNA, 22 bp, synthetic construct
  misc_feature 1..22: note = chemically synthesized
  source 1..22: mol_type = other DNA
tacttaaaaaaaaaaaaaaaaa

SEQ ID NO: 46988 - DNA, 22 bp, synthetic construct
  misc_feature 1..22: note = chemically synthesized
  source 1..22: mol_type = other DNA
cttaaaaaaaaaaaaaaaaaaa

SEQ ID NO: 46989 - DNA, 22 bp, synthetic construct
  misc_feature 1..22: note = chemically synthesized
  source 1..22: mol_type = other DNA
aaaaaaaaaaaaaaaaaaaaaa

SEQ ID NO: 46990 - DNA, 22 bp, synthetic construct
  misc_feature 1..22: note = chemically synthesized
  source 1..22: mol_type = other DNA
aaaaaaaaaaaaaaaaaaaaaa

SEQ ID NO: 46991 - DNA, 22 bp, synthetic construct
  misc_feature 1..22: note = chemically synthesized
  source 1..22: mol_type = other DNA
taatcccagctacttgggaggc

SEQ ID NO: 46992 - DNA, 22 bp, synthetic construct
  misc_feature 1..22: note = chemically synthesized
  source 1..22: mol_type = other DNA
cttgggaggctgaggcaggaga

SEQ ID NO: 46993 - DNA, 22 bp, synthetic construct
  misc_feature 1..22: note = chemically synthesized
  source 1..22: mol_type = other DNA
gggaggctgaggcaggagaatc

SEQ ID NO: 46994 - DNA, 22 bp, synthetic construct
  misc_feature 1..22: note = chemically synthesized
  source 1..22: mol_type = other DNA
ggaggctgaggcaggagaatca

SEQ ID NO: 46995 - DNA, 22 bp, synthetic construct
  misc_feature 1..22: note = chemically synthesized
  source 1..22: mol_type = other DNA
aggcaggagaatcacttgaacc

SEQ ID NO: 46996 - DNA, 22 bp, synthetic construct
  misc_feature 1..22: note = chemically synthesized
  source 1..22: mol_type = other DNA
gaacctgggaggcggaggctgc

SEQ ID NO: 46997 - DNA, 22 bp, synthetic construct
  misc_feature 1..22: note = chemically synthesized
  source 1..22: mol_type = other DNA
aacctgggaggcggaggctgca

SEQ ID NO: 46998 - DNA, 22 bp, synthetic construct
  misc_feature 1..22: note = chemically synthesized
  source 1..22: mol_type = other DNA
ggaggcggaggctgcaatgagc

SEQ ID NO: 46999 - DNA, 22 bp, synthetic construct
  misc_feature 1..22: note = chemically synthesized
  source 1..22: mol_type = other DNA
caatgagccgagatcgtagcac

SEQ ID NO: 47000 - DNA, 22 bp, synthetic construct
  misc_feature 1..22: note = chemically synthesized
  source 1..22: mol_type = other DNA
cactccagcctgggcgacagag

SEQ ID NO: 47001 - DNA, 22 bp, synthetic construct
  misc_feature 1..22: note = chemically synthesized
  source 1..22: mol_type = other DNA
cagcctgggcgacagagcgaga

SEQ ID NO: 47002 - DNA, 22 bp, synthetic construct
  misc_feature 1..22: note = chemically synthesized
  source 1..22: mol_type = other DNA
ggcgacagagcgagactccatc

SEQ ID NO: 47003 - DNA, 22 bp, synthetic construct
  misc_feature 1..22: note = chemically synthesized
  source 1..22: mol_type = other DNA
catctcaaaaaaaaaaaaaaat

SEQ ID NO: 47004 - DNA, 22 bp, synthetic construct
  misc_feature 1..22: note = chemically synthesized
  source 1..22: mol_type = other DNA
aaaaaaaaaaaaaaattaaatt

SEQ ID NO: 47005 - DNA, 22 bp, synthetic construct
  misc_feature 1..22: note = chemically synthesized
  source 1..22: mol_type = other DNA
aattgggtgggggagtttctta

SEQ ID NO: 47006 - DNA, 22 bp, synthetic construct
  misc_feature 1..22: note = chemically synthesized
  source 1..22: mol_type = other DNA
ggtgggggagtttcttaggaaa

SEQ ID NO: 47007 - DNA, 22 bp, synthetic construct
  misc_feature 1..22: note = chemically synthesized
  source 1..22: mol_type = other DNA
cttaggaaaaaaatcagagttg

SEQ ID NO: 47008 - DNA, 22 bp, synthetic construct
  misc_feature 1..22: note = chemically synthesized
  source 1..22: mol_type = other DNA
ttaggaaaaaaatcagagttgt

SEQ ID NO: 47009 - DNA, 22 bp, synthetic construct
  misc_feature 1..22: note = chemically synthesized
  source 1..22: mol_type = other DNA
aggaaaaaaatcagagttgtgc

SEQ ID NO: 47010 - DNA, 22 bp, synthetic construct
  misc_feature 1..22: note = chemically synthesized
  source 1..22: mol_type = other DNA
ggaaaaaaatcagagttgtgca

SEQ ID NO: 47011 - DNA, 22 bp, synthetic construct
  misc_feature 1..22: note = chemically synthesized
  source 1..22: mol_type = other DNA
tgcaaataaatctagttggtct

SEQ ID NO: 47012 - DNA, 22 bp, synthetic construct
  misc_feature 1..22: note = chemically synthesized
  source 1..22: mol_type = other DNA
gttggtctgactgtctttacaa

SEQ ID NO: 47013 - DNA, 22 bp, synthetic construct
  misc_feature 1..22: note = chemically synthesized
  source 1..22: mol_type = other DNA
gtctgactgtctttacaacaca

SEQ ID NO: 47014 - DNA, 22 bp, synthetic construct
  misc_feature 1..22: note = chemically synthesized
  source 1..22: mol_type = other DNA
actgtctttacaacacaatgaa

SEQ ID NO: 47015 - DNA, 22 bp, synthetic construct
  misc_feature 1..22: note = chemically synthesized
  source 1..22: mol_type = other DNA
tctttacaacacaatgaaaggg

SEQ ID NO: 47016 - DNA, 22 bp, synthetic construct
  misc_feature 1..22: note = chemically synthesized
  source 1..22: mol_type = other DNA
tacaacacaatgaaagggtaag

SEQ ID NO: 47017 - DNA, 22 bp, synthetic construct
  misc_feature 1..22: note = chemically synthesized
  source 1..22: mol_type = other DNA
acaacacaatgaaagggtaagg

SEQ ID NO: 47018 - DNA, 22 bp, synthetic construct
  misc_feature 1..22: note = chemically synthesized
  source 1..22: mol_type = other DNA
caacacaatgaaagggtaaggc

SEQ ID NO: 47019 - DNA, 22 bp, synthetic construct
  misc_feature 1..22: note = chemically synthesized
  source 1..22: mol_type = other DNA
tgaattccattgataagagagg

SEQ ID NO: 47020 - DNA, 22 bp, synthetic construct
  misc_feature 1..22: note = chemically synthesized
  source 1..22: mol_type = other DNA
cattgataagagaggatttccc

SEQ ID NO: 47021 - DNA, 22 bp, synthetic construct
  misc_feature 1..22: note = chemically synthesized
  source 1..22: mol_type = other DNA
ataagagaggatttccctactc

SEQ ID NO: 47022 - DNA, 22 bp, synthetic construct
  misc_feature 1..22: note = chemically synthesized
  source 1..22: mol_type = other DNA
ccctactcaaatatcaaaggtc

SEQ ID NO: 47023 - DNA, 22 bp, synthetic construct
  misc_feature 1..22: note = chemically synthesized
  source 1..22: mol_type = other DNA
cctactcaaatatcaaaggtct

SEQ ID NO: 47024 - DNA, 22 bp, synthetic construct
  misc_feature 1..22: note = chemically synthesized
  source 1..22: mol_type = other DNA
ctcaaatatcaaaggtcttgca

SEQ ID NO: 47025 - DNA, 22 bp, synthetic construct
  misc_feature 1..22: note = chemically synthesized
  source 1..22: mol_type = other DNA
aaatatcaaaggtcttgcatac

SEQ ID NO: 47026 - DNA, 22 bp, synthetic construct
  misc_feature 1..22: note = chemically synthesized
  source 1..22: mol_type = other DNA
gcatacacatacactaaaacag

SEQ ID NO: 47027 - DNA, 22 bp, synthetic construct
  misc_feature 1..22: note = chemically synthesized
  source 1..22: mol_type = other DNA
catacacatacactaaaacaga

SEQ ID NO: 47028 - DNA, 22 bp, synthetic construct
  misc_feature 1..22: note = chemically synthesized
  source 1..22: mol_type = other DNA
aaacagaaaaaagaaaaaaaaa

SEQ ID NO: 47029 - DNA, 22 bp, synthetic construct
  misc_feature 1..22: note = chemically synthesized
  source 1..22: mol_type = other DNA
ttaaactcatccaagagccagt

SEQ ID NO: 47030 - DNA, 22 bp, synthetic construct
  misc_feature 1..22: note = chemically synthesized
  source 1..22: mol_type = other DNA
taaactcatccaagagccagtc

SEQ ID NO: 47031 - DNA, 22 bp, synthetic construct
  misc_feature 1..22: note = chemically synthesized
  source 1..22: mol_type = other DNA
aaactcatccaagagccagtca

SEQ ID NO: 47032 - DNA, 22 bp, synthetic construct
  misc_feature 1..22: note = chemically synthesized
  source 1..22: mol_type = other DNA
aactcatccaagagccagtcaa

SEQ ID NO: 47033 - DNA, 22 bp, synthetic construct
  misc_feature 1..22: note = chemically synthesized
  source 1..22: mol_type = other DNA
atccaagagccagtcaaagcca

SEQ ID NO: 47034 - DNA, 22 bp, synthetic construct
  misc_feature 1..22: note = chemically synthesized
  source 1..22: mol_type = other DNA
ccgaactcagccgttctccctc

SEQ ID NO: 47035 - DNA, 22 bp, synthetic construct
  misc_feature 1..22: note = chemically synthesized
  source 1..22: mol_type = other DNA
cgaactcagccgttctccctct

SEQ ID NO: 47036 - DNA, 22 bp, synthetic construct
  misc_feature 1..22: note = chemically synthesized
  source 1..22: mol_type = other DNA
agccgttctccctctggtgaga

SEQ ID NO: 47037 - DNA, 22 bp, synthetic construct
  misc_feature 1..22: note = chemically synthesized
  source 1..22: mol_type = other DNA
tccctctggtgagacaggctct

SEQ ID NO: 47038 - DNA, 22 bp, synthetic construct
  misc_feature 1..22: note = chemically synthesized
  source 1..22: mol_type = other DNA
cctctggtgagacaggctctag

SEQ ID NO: 47039 - DNA, 22 bp, synthetic construct
  misc_feature 1..22: note = chemically synthesized
  source 1..22: mol_type = other DNA
tggtgagacaggctctagcttg

SEQ ID NO: 47040 - DNA, 22 bp, synthetic construct
  misc_feature 1..22: note = chemically synthesized
  source 1..22: mol_type = other DNA
gtgagacaggctctagcttgtt

SEQ ID NO: 47041 - DNA, 22 bp, synthetic construct
  misc_feature 1..22: note = chemically synthesized
  source 1..22: mol_type = other DNA
tagcttgtttccagaatgccac

SEQ ID NO: 47042 - DNA, 22 bp, synthetic construct
  misc_feature 1..22: note = chemically synthesized
  source 1..22: mol_type = other DNA
gcttgtttccagaatgccacta

SEQ ID NO: 47043 - DNA, 22 bp, synthetic construct
  misc_feature 1..22: note = chemically synthesized
  source 1..22: mol_type = other DNA
gtttccagaatgccactaccag

SEQ ID NO: 47044 - DNA, 22 bp, synthetic construct
  misc_feature 1..22: note = chemically synthesized
  source 1..22: mol_type = other DNA
tttccagaatgccactaccagc

SEQ ID NO: 47045 - DNA, 22 bp, synthetic construct
  misc_feature 1..22: note = chemically synthesized
  source 1..22: mol_type = other DNA
ccagaatgccactaccagcttc

SEQ ID NO: 47046 - DNA, 22 bp, synthetic construct
  misc_feature 1..22: note = chemically synthesized
  source 1..22: mol_type = other DNA
cagaatgccactaccagcttcc

SEQ ID NO: 47047 - DNA, 22 bp, synthetic construct
  misc_feature 1..22: note = chemically synthesized
  source 1..22: mol_type = other DNA
ccagcttcccacacctccaggg

SEQ ID NO: 47048 - DNA, 22 bp, synthetic construct
  misc_feature 1..22: note = chemically synthesized
  source 1..22: mol_type = other DNA
cccacacctccaggggaccccc

SEQ ID NO: 47049 - DNA, 22 bp, synthetic construct
  misc_feature 1..22: note = chemically synthesized
  source 1..22: mol_type = other DNA
ccacacctccaggggaccccct

SEQ ID NO: 47050 - DNA, 22 bp, synthetic construct
  misc_feature 1..22: note = chemically synthesized
  source 1..22: mol_type = other DNA
caggggaccccctaactccaaa

SEQ ID NO: 47051 - DNA, 22 bp, synthetic construct
  misc_feature 1..22: note = chemically synthesized
  source 1..22: mol_type = other DNA
actccaaagtgttgcccagacc

SEQ ID NO: 47052 - DNA, 22 bp, synthetic construct
  misc_feature 1..22: note = chemically synthesized
  source 1..22: mol_type = other DNA
caaagtgttgcccagacctaag

SEQ ID NO: 47053 - DNA, 22 bp, synthetic construct
  misc_feature 1..22: note = chemically synthesized
  source 1..22: mol_type = other DNA
cccagacctaaggatcctcccc

SEQ ID NO: 47054 - DNA, 22 bp, synthetic construct
  misc_feature 1..22: note = chemically synthesized
  source 1..22: mol_type = other DNA
aggatcctcccccacgtgctcc

SEQ ID NO: 47055 - DNA, 22 bp, synthetic construct
  misc_feature 1..22: note = chemically synthesized
  source 1..22: mol_type = other DNA
ccccacgtgctccttccccaac

SEQ ID NO: 47056 - DNA, 22 bp, synthetic construct
  misc_feature 1..22: note = chemically synthesized
  source 1..22: mol_type = other DNA
cttccccaacactggcttccag

SEQ ID NO: 47057 - DNA, 22 bp, synthetic construct
  misc_feature 1..22: note = chemically synthesized
  source 1..22: mol_type = other DNA
ccccaacactggcttccaggtg

SEQ ID NO: 47058 - DNA, 22 bp, synthetic construct
  misc_feature 1..22: note = chemically synthesized
  source 1..22: mol_type = other DNA
cccaacactggcttccaggtga

SEQ ID NO: 47059 - DNA, 22 bp, synthetic construct
  misc_feature 1..22: note = chemically synthesized
  source 1..22: mol_type = other DNA
gcttccaggtgagcgagacaga

SEQ ID NO: 47060 - DNA, 22 bp, synthetic construct
  misc_feature 1..22: note = chemically synthesized
  source 1..22: mol_type = other DNA
ccaggtgagcgagacagaatct

SEQ ID NO: 47061 - DNA, 22 bp, synthetic construct
  misc_feature 1..22: note = chemically synthesized
  source 1..22: mol_type = other DNA
caggtgagcgagacagaatctg

SEQ ID NO: 47062 - DNA, 22 bp, synthetic construct
  misc_feature 1..22: note = chemically synthesized
  source 1..22: mol_type = other DNA
caagcagagttcactgcttgac

SEQ ID NO: 47063 - DNA, 22 bp, synthetic construct
  misc_feature 1..22: note = chemically synthesized
  source 1..22: mol_type = other DNA
actgcttgaccatggggtgaaa

SEQ ID NO: 47064 - DNA, 22 bp, synthetic construct
  misc_feature 1..22: note = chemically synthesized
  source 1..22: mol_type = other DNA
cttgaccatggggtgaaagcca

SEQ ID NO: 47065 - DNA, 22 bp, synthetic construct
  misc_feature 1..22: note = chemically synthesized
  source 1..22: mol_type = other DNA
gaccatggggtgaaagccacaa

SEQ ID NO: 47066 - DNA, 22 bp, synthetic construct
  misc_feature 1..22: note = chemically synthesized
  source 1..22: mol_type = other DNA
accatggggtgaaagccacaaa

SEQ ID NO: 47067 - DNA, 22 bp, synthetic construct
  misc_feature 1..22: note = chemically synthesized
  source 1..22: mol_type = other DNA
tcccaaccccagcactttcact

SEQ ID NO: 47068 - DNA, 22 bp, synthetic construct
  misc_feature 1..22: note = chemically synthesized
  source 1..22: mol_type = other DNA
tcactttttcactttctcccca

SEQ ID NO: 47069 - DNA, 22 bp, synthetic construct
  misc_feature 1..22: note = chemically synthesized
  source 1..22: mol_type = other DNA
cactttttcactttctccccag

SEQ ID NO: 47070 - DNA, 22 bp, synthetic construct
  misc_feature 1..22: note = chemically synthesized
  source 1..22: mol_type = other DNA
actttttcactttctccccagg

SEQ ID NO: 47071 - DNA, 22 bp, synthetic construct
  misc_feature 1..22: note = chemically synthesized
  source 1..22: mol_type = other DNA
tttcactttctccccagggagg

SEQ ID NO: 47072 - DNA, 22 bp, synthetic construct
  misc_feature 1..22: note = chemically synthesized
  source 1..22: mol_type = other DNA
ttcactttctccccagggagga

SEQ ID NO: 47073 - DNA, 22 bp, synthetic construct
  misc_feature 1..22: note = chemically synthesized
  source 1..22: mol_type = other DNA
tcactttctccccagggaggaa

SEQ ID NO: 47074 - DNA, 22 bp, synthetic construct
  misc_feature 1..22: note = chemically synthesized
  source 1..22: mol_type = other DNA
cactttctccccagggaggaag

SEQ ID NO: 47075 - DNA, 22 bp, synthetic construct
  misc_feature 1..22: note = chemically synthesized
  source 1..22: mol_type = other DNA
actttctccccagggaggaagg

SEQ ID NO: 47076 - DNA, 22 bp, synthetic construct
  misc_feature 1..22: note = chemically synthesized
  source 1..22: mol_type = other DNA
tctccccagggaggaaggggga

SEQ ID NO: 47077 - DNA, 22 bp, synthetic construct
  misc_feature 1..22: note = chemically synthesized
  source 1..22: mol_type = other DNA
ctccccagggaggaagggggaa

SEQ ID NO: 47078 - DNA, 22 bp, synthetic construct
  misc_feature 1..22: note = chemically synthesized
  source 1..22: mol_type = other DNA
tccccagggaggaagggggaaa

SEQ ID NO: 47079 - DNA, 22 bp, synthetic construct
  misc_feature 1..22: note = chemically synthesized
  source 1..22: mol_type = other DNA
cccagggaggaagggggaaata

SEQ ID NO: 47080 - DNA, 22 bp, synthetic construct
  misc_feature 1..22: note = chemically synthesized
  source 1..22: mol_type = other DNA
gcccagcctcacaccttccctg

SEQ ID NO: 47081 - DNA, 22 bp, synthetic construct
  misc_feature 1..22: note = chemically synthesized
  source 1..22: mol_type = other DNA
cccagcctcacaccttccctgg

SEQ ID NO: 47082 - DNA, 22 bp, synthetic construct
  misc_feature 1..22: note = chemically synthesized
  source 1..22: mol_type = other DNA
acaccttccctggacagggagc

SEQ ID NO: 47083 - DNA, 22 bp, synthetic construct
  misc_feature 1..22: note = chemically synthesized
  source 1..22: mol_type = other DNA
ccctggacagggagctggggat

SEQ ID NO: 47084 - DNA, 22 bp, synthetic construct
  misc_feature 1..22: note = chemically synthesized
  source 1..22: mol_type = other DNA
cctggacagggagctggggatc

SEQ ID NO: 47085 - DNA, 22 bp, synthetic construct
  misc_feature 1..22: note = chemically synthesized
  source 1..22: mol_type = other DNA
gacagggagctggggatccatt

SEQ ID NO: 47086 - DNA, 22 bp, synthetic construct
  misc_feature 1..22: note = chemically synthesized
  source 1..22: mol_type = other DNA
gggatccattcaaagcccggtc

SEQ ID NO: 47087 - DNA, 22 bp, synthetic construct
  misc_feature 1..22: note = chemically synthesized
  source 1..22: mol_type = other DNA
aaagcccggtctttctctgttc

SEQ ID NO: 47088 - DNA, 22 bp, synthetic construct
  misc_feature 1..22: note = chemically synthesized
  source 1..22: mol_type = other DNA
tctctgttcaatcaagcagcgt

SEQ ID NO: 47089 - DNA, 22 bp, synthetic construct
  misc_feature 1..22: note = chemically synthesized
  source 1..22: mol_type = other DNA
ctctgttcaatcaagcagcgtg

SEQ ID NO: 47090 - DNA, 22 bp, synthetic construct
  misc_feature 1..22: note = chemically synthesized
  source 1..22: mol_type = other DNA
tctgttcaatcaagcagcgtga

SEQ ID NO: 47091 - DNA, 22 bp, synthetic construct
  misc_feature 1..22: note = chemically synthesized
  source 1..22: mol_type = other DNA
tgttcaatcaagcagcgtgagc

SEQ ID NO: 47092 - DNA, 22 bp, synthetic construct
  misc_feature 1..22: note = chemically synthesized
  source 1..22: mol_type = other DNA
ttcaatcaagcagcgtgagcaa

SEQ ID NO: 47093 - DNA, 22 bp, synthetic construct
  misc_feature 1..22: note = chemically synthesized
  source 1..22: mol_type = other DNA
aatcaagcagcgtgagcaaagt

SEQ ID NO: 47094 - DNA, 22 bp, synthetic construct
  misc_feature 1..22: note = chemically synthesized
  source 1..22: mol_type = other DNA
aatactacatatgaaccagcat

SEQ ID NO: 47095 - DNA, 22 bp, synthetic construct
  misc_feature 1..22: note = chemically synthesized
  source 1..22: mol_type = other DNA
catatgaaccagcattatgtta

SEQ ID NO: 47096 - DNA, 22 bp, synthetic construct
  misc_feature 1..22: note = chemically synthesized
  source 1..22: mol_type = other DNA
tgttaggcaccaagaaggcaca

SEQ ID NO: 47097 - DNA, 22 bp, synthetic construct
  misc_feature 1..22: note = chemically synthesized
  source 1..22: mol_type = other DNA
ggcaccaagaaggcacaaaaaa

SEQ ID NO: 47098 - DNA, 22 bp, synthetic construct
  misc_feature 1..22: note = chemically synthesized
  source 1..22: mol_type = other DNA
ctgccctccaaaaggttataat

SEQ ID NO: 47099 - DNA, 22 bp, synthetic construct
  misc_feature 1..22: note = chemically synthesized
  source 1..22: mol_type = other DNA
ccctccaaaaggttataatttg

SEQ ID NO: 47100 - DNA, 22 bp, synthetic construct
  misc_feature 1..22: note = chemically synthesized
  source 1..22: mol_type = other DNA
caaaaggttataatttgaggag

SEQ ID NO: 47101 - DNA, 22 bp, synthetic construct
  misc_feature 1..22: note = chemically synthesized
  source 1..22: mol_type = other DNA
taatttgaggaggagaaaatac

SEQ ID NO: 47102 - DNA, 22 bp, synthetic construct
  misc_feature 1..22: note = chemically synthesized
  source 1..22: mol_type = other DNA
gaggaggagaaaatacacccac

SEQ ID NO: 47103 - DNA, 22 bp, synthetic construct
  misc_feature 1..22: note = chemically synthesized
  source 1..22: mol_type = other DNA
aggaggagaaaatacacccacg

SEQ ID NO: 47104 - DNA, 22 bp, synthetic construct
  misc_feature 1..22: note = chemically synthesized
  source 1..22: mol_type = other DNA
atccccttttaactaatcccag

SEQ ID NO: 47105 - DNA, 22 bp, synthetic construct
  misc_feature 1..22: note = chemically synthesized
  source 1..22: mol_type = other DNA
ttaactaatcccagagtgacac

SEQ ID NO: 47106 - DNA, 22 bp, synthetic construct
  misc_feature 1..22: note = chemically synthesized
  source 1..22: mol_type = other DNA
taactaatcccagagtgacacc

SEQ ID NO: 47107 - DNA, 22 bp, synthetic construct
  misc_feature 1..22: note = chemically synthesized
  source 1..22: mol_type = other DNA
aactaatcccagagtgacacct

SEQ ID NO: 47108 - DNA, 22 bp, synthetic construct
  misc_feature 1..22: note = chemically synthesized
  source 1..22: mol_type = other DNA
actaatcccagagtgacacctc

SEQ ID NO: 47109 - DNA, 22 bp, synthetic construct
  misc_feature 1..22: note = chemically synthesized
  source 1..22: mol_type = other DNA
atcccagagtgacacctcctcc

SEQ ID NO: 47110 - DNA, 22 bp, synthetic construct
  misc_feature 1..22: note = chemically synthesized
  source 1..22: mol_type = other DNA
ctccaaagaaagccaagttgct

SEQ ID NO: 47111 - DNA, 22 bp, synthetic construct
  misc_feature 1..22: note = chemically synthesized
  source 1..22: mol_type = other DNA
caaagaaagccaagttgctgac

SEQ ID NO: 47112 - DNA, 22 bp, synthetic construct
  misc_feature 1..22: note = chemically synthesized
  source 1..22: mol_type = other DNA
ctgacagagtcaggccttccta

SEQ ID NO: 47113 - DNA, 22 bp, synthetic construct
  misc_feature 1..22: note = chemically synthesized
  source 1..22: mol_type = other DNA
acagagtcaggccttcctagtt

SEQ ID NO: 47114 - DNA, 22 bp, synthetic construct
  misc_feature 1..22: note = chemically synthesized
  source 1..22: mol_type = other DNA
cctagttacctagaaaaatggc

SEQ ID NO: 47115 - DNA, 22 bp, synthetic construct
  misc_feature 1..22: note = chemically synthesized
  source 1..22: mol_type = other DNA
ctagttacctagaaaaatggcc

SEQ ID NO: 47116 - DNA, 22 bp, synthetic construct
  misc_feature 1..22: note = chemically synthesized
  source 1..22: mol_type = other DNA
gttacctagaaaaatggcctgg

SEQ ID NO: 47117 - DNA, 22 bp, synthetic construct
  misc_feature 1..22: note = chemically synthesized
  source 1..22: mol_type = other DNA
cctagaaaaatggcctggggag

SEQ ID NO: 47118 - DNA, 22 bp, synthetic construct
  misc_feature 1..22: note = chemically synthesized
  source 1..22: mol_type = other DNA
gaaaaatggcctggggaggtcc

SEQ ID NO: 47119 - DNA, 22 bp, synthetic construct
  misc_feature 1..22: note = chemically synthesized
  source 1..22: mol_type = other DNA
gggaggtccagcccactagaag

SEQ ID NO: 47120 - DNA, 22 bp, synthetic construct
  misc_feature 1..22: note = chemically synthesized
  source 1..22: mol_type = other DNA
gaaggagatacagaaacaagcc

SEQ ID NO: 47121 - DNA, 22 bp, synthetic construct
  misc_feature 1..22: note = chemically synthesized
  source 1..22: mol_type = other DNA
cataaatatctgtgggacccag

SEQ ID NO: 47122 - DNA, 22 bp, synthetic construct
  misc_feature 1..22: note = chemically synthesized
  source 1..22: mol_type = other DNA
tgggacccagctacctctctga

SEQ ID NO: 47123 - DNA, 22 bp, synthetic construct
  misc_feature 1..22: note = chemically synthesized
  source 1..22: mol_type = other DNA
cctctctgaaacacagcccagt

SEQ ID NO: 47124 - DNA, 22 bp, synthetic construct
  misc_feature 1..22: note = chemically synthesized
  source 1..22: mol_type = other DNA
tctgaaacacagcccagtgctt

SEQ ID NO: 47125 - DNA, 22 bp, synthetic construct
  misc_feature 1..22: note = chemically synthesized
  source 1..22: mol_type = other DNA
tgaaacacagcccagtgctttc

SEQ ID NO: 47126 - DNA, 22 bp, synthetic construct
  misc_feature 1..22: note = chemically synthesized
  source 1..22: mol_type = other DNA
aaacacagcccagtgctttcag

SEQ ID NO: 47127 - DNA, 22 bp, synthetic construct
  misc_feature 1..22: note = chemically synthesized
  source 1..22: mol_type = other DNA
tcaggcagggagaaagtggtgg

SEQ ID NO: 47128 - DNA, 22 bp, synthetic construct
  misc_feature 1..22: note = chemically synthesized
  source 1..22: mol_type = other DNA
caggcagggagaaagtggtggt

SEQ ID NO: 47129 - DNA, 22 bp, synthetic construct
  misc_feature 1..22: note = chemically synthesized
  source 1..22: mol_type = other DNA
aggcagggagaaagtggtggtg

SEQ ID NO: 47130 - DNA, 22 bp, synthetic construct
  misc_feature 1..22: note = chemically synthesized
  source 1..22: mol_type = other DNA
acacagacatgggggcttccaa

SEQ ID NO: 47131 - DNA, 22 bp, synthetic construct
  misc_feature 1..22: note = chemically synthesized
  source 1..22: mol_type = other DNA
ccaaatgactcttgatcaccca

SEQ ID NO: 47132 - DNA, 22 bp, synthetic construct
  misc_feature 1..22: note = chemically synthesized
  source 1..22: mol_type = other DNA
caaatgactcttgatcacccaa

SEQ ID NO: 47133 - DNA, 22 bp, synthetic construct
  misc_feature 1..22: note = chemically synthesized
  source 1..22: mol_type = other DNA
ttgatcacccaactttccagct

SEQ ID NO: 47134 - DNA, 22 bp, synthetic construct
  misc_feature 1..22: note = chemically synthesized
  source 1..22: mol_type = other DNA
gatcacccaactttccagcttc

SEQ ID NO: 47135 - DNA, 22 bp, synthetic construct
  misc_feature 1..22: note = chemically synthesized
  source 1..22: mol_type = other DNA
atcacccaactttccagcttcc

SEQ ID NO: 47136 - DNA, 22 bp, synthetic construct
  misc_feature 1..22: note = chemically synthesized
  source 1..22: mol_type = other DNA
tccagcttccccatttctgccc

SEQ ID NO: 47137 - DNA, 22 bp, synthetic construct
  misc_feature 1..22: note = chemically synthesized
  source 1..22: mol_type = other DNA
ccagcttccccatttctgcccc

SEQ ID NO: 47138 - DNA, 22 bp, synthetic construct
  misc_feature 1..22: note = chemically synthesized
  source 1..22: mol_type = other DNA
cagcttccccatttctgcccct

SEQ ID NO: 47139 - DNA, 22 bp, synthetic construct
  misc_feature 1..22: note = chemically synthesized
  source 1..22: mol_type = other DNA
ccccatttctgcccctgacttg

SEQ ID NO: 47140 - DNA, 22 bp, synthetic construct
  misc_feature 1..22: note = chemically synthesized
  source 1..22: mol_type = other DNA
cccatttctgcccctgacttga

SEQ ID NO: 47141 - DNA, 22 bp, synthetic construct
  misc_feature 1..22: note = chemically synthesized
  source 1..22: mol_type = other DNA
ctgcccctgacttgagctccca

SEQ ID NO: 47142 - DNA, 22 bp, synthetic construct
  misc_feature 1..22: note = chemically synthesized
  source 1..22: mol_type = other DNA
tgcccctgacttgagctcccag

SEQ ID NO: 47143 - DNA, 22 bp, synthetic construct
  misc_feature 1..22: note = chemically synthesized
  source 1..22: mol_type = other DNA
cccctgacttgagctcccaggc

SEQ ID NO: 47144 - DNA, 22 bp, synthetic construct
  misc_feature 1..22: note = chemically synthesized
  source 1..22: mol_type = other DNA
acttgagctcccaggccactca

SEQ ID NO: 47145 - DNA, 22 bp, synthetic construct
  misc_feature 1..22: note = chemically synthesized
  source 1..22: mol_type = other DNA
gagctcccaggccactcaaccc

SEQ ID NO: 47146 - DNA, 22 bp, synthetic construct
  misc_feature 1..22: note = chemically synthesized
  source 1..22: mol_type = other DNA
agctcccaggccactcaaccca

SEQ ID NO: 47147 - DNA, 22 bp, synthetic construct
  misc_feature 1..22: note = chemically synthesized
  source 1..22: mol_type = other DNA
ccaggccactcaacccactgtg

SEQ ID NO: 47148 - DNA, 22 bp, synthetic construct
  misc_feature 1..22: note = chemically synthesized
  source 1..22: mol_type = other DNA
aacccactgtgaggtcttactg

SEQ ID NO: 47149 - DNA, 22 bp, synthetic construct
  misc_feature 1..22: note = chemically synthesized
  source 1..22: mol_type = other DNA
tgaggtcttactgtggggatta

SEQ ID NO: 47150 - DNA, 22 bp, synthetic construct
  misc_feature 1..22: note = chemically synthesized
  source 1..22: mol_type = other DNA
actgtggggattaccgagtcac

SEQ ID NO: 47151 - DNA, 22 bp, synthetic construct
  misc_feature 1..22: note = chemically synthesized
  source 1..22: mol_type = other DNA
ctgtggggattaccgagtcacc

SEQ ID NO: 47152 - DNA, 22 bp, synthetic construct
  misc_feature 1..22: note = chemically synthesized
  source 1..22: mol_type = other DNA
tggggattaccgagtcaccacc

SEQ ID NO: 47153 - DNA, 22 bp, synthetic construct
  misc_feature 1..22: note = chemically synthesized
  source 1..22: mol_type = other DNA
ccgagtcaccaccaggctgcgc

SEQ ID NO: 47154 - DNA, 22 bp, synthetic construct
  misc_feature 1..22: note = chemically synthesized
  source 1..22: mol_type = other DNA
cgctgaacaggaagtgaacaag

SEQ ID NO: 47155 - DNA, 22 bp, synthetic construct
  misc_feature 1..22: note = chemically synthesized
  source 1..22: mol_type = other DNA
aacaggaagtgaacaagtcaat

SEQ ID NO: 47156 - DNA, 22 bp, synthetic construct
  misc_feature 1..22: note = chemically synthesized
  source 1..22: mol_type = other DNA
gagaaagatccaataagggaat

SEQ ID NO: 47157 - DNA, 22 bp, synthetic construct
  misc_feature 1..22: note = chemically synthesized
  source 1..22: mol_type = other DNA
tctgggcaccgctgggccaaca

SEQ ID NO: 47158 - DNA, 22 bp, synthetic construct
  misc_feature 1..22: note = chemically synthesized
  source 1..22: mol_type = other DNA
tgggcaccgctgggccaacacc

SEQ ID NO: 47159 - DNA, 22 bp, synthetic construct
  misc_feature 1..22: note = chemically synthesized
  source 1..22: mol_type = other DNA
ggcaccgctgggccaacaccca

SEQ ID NO: 47160 - DNA, 22 bp, synthetic construct
  misc_feature 1..22: note = chemically synthesized
  source 1..22: mol_type = other DNA
ggccaacacccacggaggggtc

SEQ ID NO: 47161 - DNA, 22 bp, synthetic construct
  misc_feature 1..22: note = chemically synthesized
  source 1..22: mol_type = other DNA
gaatacaaataccctggagtct

SEQ ID NO: 47162 - DNA, 22 bp, synthetic construct
  misc_feature 1..22: note = chemically synthesized
  source 1..22: mol_type = other DNA
gagtctgaagggcggtggcccc

SEQ ID NO: 47163 - DNA, 22 bp, synthetic construct
  misc_feature 1..22: note = chemically synthesized
  source 1..22: mol_type = other DNA
aagggcggtggcccctcttctc

SEQ ID NO: 47164 - DNA, 22 bp, synthetic construct
  misc_feature 1..22: note = chemically synthesized
  source 1..22: mol_type = other DNA
ttctcaccacttcaattatgtc

SEQ ID NO: 47165 - DNA, 22 bp, synthetic construct
  misc_feature 1..22: note = chemically synthesized
  source 1..22: mol_type = other DNA
ctcaccacttcaattatgtctt

SEQ ID NO: 47166 - DNA, 22 bp, synthetic construct
  misc_feature 1..22: note = chemically synthesized
  source 1..22: mol_type = other DNA
tcaccacttcaattatgtcttc

SEQ ID NO: 47167 - DNA, 22 bp, synthetic construct
  misc_feature 1..22: note = chemically synthesized
  source 1..22: mol_type = other DNA
accacttcaattatgtcttcat

SEQ ID NO: 47168 - DNA, 22 bp, synthetic construct
  misc_feature 1..22: note = chemically synthesized
  source 1..22: mol_type = other DNA
caattatgtcttcattgaactg

SEQ ID NO: 47169 - DNA, 22 bp, synthetic construct
  misc_feature 1..22: note = chemically synthesized
  source 1..22: mol_type = other DNA
aattatgtcttcattgaactgg

SEQ ID NO: 47170 - DNA, 22 bp, synthetic construct
  misc_feature 1..22: note = chemically synthesized
  source 1..22: mol_type = other DNA
tgtcttcattgaactgggttat

SEQ ID NO: 47171 - DNA, 22 bp, synthetic construct
  misc_feature 1..22: note = chemically synthesized
  source 1..22: mol_type = other DNA
cattgaactgggttatgaaaaa

SEQ ID NO: 47172 - DNA, 22 bp, synthetic construct
  misc_feature 1..22: note = chemically synthesized
  source 1..22: mol_type = other DNA
attgaactgggttatgaaaaag

SEQ ID NO: 47173 - DNA, 22 bp, synthetic construct
  misc_feature 1..22: note = chemically synthesized
  source 1..22: mol_type = other DNA
aactgggttatgaaaaagggaa

SEQ ID NO: 47174 - DNA, 22 bp, synthetic construct
  misc_feature 1..22: note = chemically synthesized
  source 1..22: mol_type = other DNA
ggttatgaaaaagggaagcagg

SEQ ID NO: 47175 - DNA, 22 bp, synthetic construct
  misc_feature 1..22: note = chemically synthesized
  source 1..22: mol_type = other DNA
tgaaaaagggaagcagggattg

SEQ ID NO: 47176 - DNA, 22 bp, synthetic construct
  misc_feature 1..22: note = chemically synthesized
  source 1..22: mol_type = other DNA
aaaatctagccttgtggccata

SEQ ID NO: 47177 - DNA, 22 bp, synthetic construct
  misc_feature 1..22: note = chemically synthesized
  source 1..22: mol_type = other DNA
gccttgtggccataagcctgtg

SEQ ID NO: 47178 - DNA, 22 bp, synthetic construct
  misc_feature 1..22: note = chemically synthesized
  source 1..22: mol_type = other DNA
gtggccataagcctgtgatgac

SEQ ID NO: 47179 - DNA, 22 bp, synthetic construct
  misc_feature 1..22: note = chemically synthesized
  source 1..22: mol_type = other DNA
tggccataagcctgtgatgact

SEQ ID NO: 47180 - DNA, 22 bp, synthetic construct
  misc_feature 1..22: note = chemically synthesized
  source 1..22: mol_type = other DNA
tgatgactcatgccagctttgg

SEQ ID NO: 47181 - DNA, 22 bp, synthetic construct
  misc_feature 1..22: note = chemically synthesized
  source 1..22: mol_type = other DNA
atgccagctttgggtgctctaa

SEQ ID NO: 47182 - DNA, 22 bp, synthetic construct
  misc_feature 1..22: note = chemically synthesized
  source 1..22: mol_type = other DNA
tgggtgctctaagatgctttcc

SEQ ID NO: 47183 - DNA, 22 bp, synthetic construct
  misc_feature 1..22: note = chemically synthesized
  source 1..22: mol_type = other DNA
gggtgctctaagatgctttccc

SEQ ID NO: 47184 - DNA, 22 bp, synthetic construct
  misc_feature 1..22: note = chemically synthesized
  source 1..22: mol_type = other DNA
ggtgctctaagatgctttccca

SEQ ID NO: 47185 - DNA, 22 bp, synthetic construct
  misc_feature 1..22: note = chemically synthesized
  source 1..22: mol_type = other DNA
taagatgctttcccatgtctgt

SEQ ID NO: 47186 - DNA, 22 bp, synthetic construct
  misc_feature 1..22: note = chemically synthesized
  source 1..22: mol_type = other DNA
agatgctttcccatgtctgtaa

SEQ ID NO: 47187 - DNA, 22 bp, synthetic construct
  misc_feature 1..22: note = chemically synthesized
  source 1..22: mol_type = other DNA
tcccatgtctgtaatgcttttc

SEQ ID NO: 47188 - DNA, 22 bp, synthetic construct
  misc_feature 1..22: note = chemically synthesized
  source 1..22: mol_type = other DNA
cccatgtctgtaatgcttttca

SEQ ID NO: 47189 - DNA, 22 bp, synthetic construct
  misc_feature 1..22: note = chemically synthesized
  source 1..22: mol_type = other DNA
ccatgtctgtaatgcttttcat

SEQ ID NO: 47190 - DNA, 22 bp, synthetic construct
  misc_feature 1..22: note = chemically synthesized
  source 1..22: mol_type = other DNA
taatgcttttcatatcatccta

SEQ ID NO: 47191 - DNA, 22 bp, synthetic construct
  misc_feature 1..22: note = chemically synthesized
  source 1..22: mol_type = other DNA
ttcatatcatcctacacactca

SEQ ID NO: 47192 - DNA, 22 bp, synthetic construct
  misc_feature 1..22: note = chemically synthesized
  source 1..22: mol_type = other DNA
tcatatcatcctacacactcac

SEQ ID NO: 47193 - DNA, 22 bp, synthetic construct
  misc_feature 1..22: note = chemically synthesized
  source 1..22: mol_type = other DNA
catatcatcctacacactcact

SEQ ID NO: 47194 - DNA, 22 bp, synthetic construct
  misc_feature 1..22: note = chemically synthesized
  source 1..22: mol_type = other DNA
atatcatcctacacactcactg

SEQ ID NO: 47195 - DNA, 22 bp, synthetic construct
  misc_feature 1..22: note = chemically synthesized
  source 1..22: mol_type = other DNA
cacactcactgtcacctctcct

SEQ ID NO: 47196 - DNA, 22 bp, synthetic construct
  misc_feature 1..22: note = chemically synthesized
  source 1..22: mol_type = other DNA
actgtcacctctcctcacccca

SEQ ID NO: 47197 - DNA, 22 bp, synthetic construct
  misc_feature 1..22: note = chemically synthesized
  source 1..22: mol_type = other DNA
tcacctctcctcaccccagcac

SEQ ID NO: 47198 - DNA, 22 bp, synthetic construct
  misc_feature 1..22: note = chemically synthesized
  source 1..22: mol_type = other DNA
tcctcaccccagcacacagaaa

SEQ ID NO: 47199 - DNA, 22 bp, synthetic construct
  misc_feature 1..22: note = chemically synthesized
  source 1..22: mol_type = other DNA
ctcaccccagcacacagaaaag

SEQ ID NO: 47200 - DNA, 22 bp, synthetic construct
  misc_feature 1..22: note = chemically synthesized
  source 1..22: mol_type = other DNA
accccagcacacagaaaagatg

SEQ ID NO: 47201 - DNA, 22 bp, synthetic construct
  misc_feature 1..22: note = chemically synthesized
  source 1..22: mol_type = other DNA
attatgtgcacttaggttttgt

SEQ ID NO: 47202 - DNA, 22 bp, synthetic construct
  misc_feature 1..22: note = chemically synthesized
  source 1..22: mol_type = other DNA
ttatgtgcacttaggttttgtt

SEQ ID NO: 47203 - DNA, 22 bp, synthetic construct
  misc_feature 1..22: note = chemically synthesized
  source 1..22: mol_type = other DNA
tgtgcacttaggttttgttgta

SEQ ID NO: 47204 - DNA, 22 bp, synthetic construct
  misc_feature 1..22: note = chemically synthesized
  source 1..22: mol_type = other DNA
aggttttgttgtactattaaac

SEQ ID NO: 47205 - DNA, 22 bp, synthetic construct
  misc_feature 1..22: note = chemically synthesized
  source 1..22: mol_type = other DNA
ggttttgttgtactattaaaca

SEQ ID NO: 47206 - DNA, 22 bp, synthetic construct
  misc_feature 1..22: note = chemically synthesized
  source 1..22: mol_type = other DNA
tgttgtactattaaacacaatg

SEQ ID NO: 47207 - DNA, 22 bp, synthetic construct
  misc_feature 1..22: note = chemically synthesized
  source 1..22: mol_type = other DNA
gttgtactattaaacacaatga

SEQ ID NO: 47208 - DNA, 22 bp, synthetic construct
  misc_feature 1..22: note = chemically synthesized
  source 1..22: mol_type = other DNA
ttgtactattaaacacaatgac

SEQ ID NO: 47209 - DNA, 22 bp, synthetic construct
  misc_feature 1..22: note = chemically synthesized
  source 1..22: mol_type = other DNA
tactattaaacacaatgaccca

SEQ ID NO: 47210 - DNA, 22 bp, synthetic construct
  misc_feature 1..22: note = chemically synthesized
  source 1..22: mol_type = other DNA
ttaaacacaatgacccactcct

SEQ ID NO: 47211 - DNA, 22 bp, synthetic construct
  misc_feature 1..22: note = chemically synthesized
  source 1..22: mol_type = other DNA
aacacaatgacccactcctatt

SEQ ID NO: 47212 - DNA, 22 bp, synthetic construct
  misc_feature 1..22: note = chemically synthesized
  source 1..22: mol_type = other DNA
ctattattaaaacacaggtttt

SEQ ID NO: 47213 - DNA, 22 bp, synthetic construct
  misc_feature 1..22: note = chemically synthesized
  source 1..22: mol_type = other DNA
ttattaaaacacaggttttgct

SEQ ID NO: 47214 - DNA, 22 bp, synthetic construct
  misc_feature 1..22: note = chemically synthesized
  source 1..22: mol_type = other DNA
ttaaaacacaggttttgctgga

SEQ ID NO: 47215 - DNA, 22 bp, synthetic construct
  misc_feature 1..22: note = chemically synthesized
  source 1..22: mol_type = other DNA
aaacacaggttttgctggaaac

SEQ ID NO: 47216 - DNA, 22 bp, synthetic construct
  misc_feature 1..22: note = chemically synthesized
  source 1..22: mol_type = other DNA
tgctggaaactcaaaaaagact

SEQ ID NO: 47217 - DNA, 22 bp, synthetic construct
  misc_feature 1..22: note = chemically synthesized
  source 1..22: mol_type = other DNA
gctggaaactcaaaaaagactt

SEQ ID NO: 47218 - DNA, 22 bp, synthetic construct
  misc_feature 1..22: note = chemically synthesized
  source 1..22: mol_type = other DNA
ctggaaactcaaaaaagacttg

SEQ ID NO: 47219 - DNA, 22 bp, synthetic construct
  misc_feature 1..22: note = chemically synthesized
  source 1..22: mol_type = other DNA
gaaactcaaaaaagacttggct

SEQ ID NO: 47220 - DNA, 22 bp, synthetic construct
  misc_feature 1..22: note = chemically synthesized
  source 1..22: mol_type = other DNA
aaaaaagacttggctctgctgg

SEQ ID NO: 47221 - DNA, 22 bp, synthetic construct
  misc_feature 1..22: note = chemically synthesized
  source 1..22: mol_type = other DNA
ggctctgctggctcacagggaa

SEQ ID NO: 47222 - DNA, 22 bp, synthetic construct
  misc_feature 1..22: note = chemically synthesized
  source 1..22: mol_type = other DNA
gctctgctggctcacagggaat

SEQ ID NO: 47223 - DNA, 22 bp, synthetic construct
  misc_feature 1..22: note = chemically synthesized
  source 1..22: mol_type = other DNA
tgctggctcacagggaatctgg

SEQ ID NO: 47224 - DNA, 22 bp, synthetic construct
  misc_feature 1..22: note = chemically synthesized
  source 1..22: mol_type = other DNA
ctggctcacagggaatctgggc

SEQ ID NO: 47225 - DNA, 22 bp, synthetic construct
  misc_feature 1..22: note = chemically synthesized
  source 1..22: mol_type = other DNA
gctcacagggaatctgggctcc

SEQ ID NO: 47226 - DNA, 22 bp, synthetic construct
  misc_feature 1..22: note = chemically synthesized
  source 1..22: mol_type = other DNA
acagggaatctgggctccgctc

SEQ ID NO: 47227 - DNA, 22 bp, synthetic construct
  misc_feature 1..22: note = chemically synthesized
  source 1..22: mol_type = other DNA
ggctccgctcttccaaaacctt

SEQ ID NO: 47228 - DNA, 22 bp, synthetic construct
  misc_feature 1..22: note = chemically synthesized
  source 1..22: mol_type = other DNA
cgctcttccaaaacctttgttc

SEQ ID NO: 47229 - DNA, 22 bp, synthetic construct
  misc_feature 1..22: note = chemically synthesized
  source 1..22: mol_type = other DNA
ttccaaaacctttgttctccag

SEQ ID NO: 47230 - DNA, 22 bp, synthetic construct
  misc_feature 1..22: note = chemically synthesized
  source 1..22: mol_type = other DNA
ccaaaacctttgttctccagat

SEQ ID NO: 47231 - DNA, 22 bp, synthetic construct
  misc_feature 1..22: note = chemically synthesized
  source 1..22: mol_type = other DNA
caaaacctttgttctccagatg

SEQ ID NO: 47232 - DNA, 22 bp, synthetic construct
  misc_feature 1..22: note = chemically synthesized
  source 1..22: mol_type = other DNA
tgttctccagatgtcagtgcaa

SEQ ID NO: 47233 - DNA, 22 bp, synthetic construct
  misc_feature 1..22: note = chemically synthesized
  source 1..22: mol_type = other DNA
gttctccagatgtcagtgcaaa

SEQ ID NO: 47234 - DNA, 22 bp, synthetic construct
  misc_feature 1..22: note = chemically synthesized
  source 1..22: mol_type = other DNA
ttctccagatgtcagtgcaaag

SEQ ID NO: 47235 - DNA, 22 bp, synthetic construct
  misc_feature 1..22: note = chemically synthesized
  source 1..22: mol_type = other DNA
tccagatgtcagtgcaaagtta

SEQ ID NO: 47236 - DNA, 22 bp, synthetic construct
  misc_feature 1..22: note = chemically synthesized
  source 1..22: mol_type = other DNA
cagatgtcagtgcaaagttatg

SEQ ID NO: 47237 - DNA, 22 bp, synthetic construct
  misc_feature 1..22: note = chemically synthesized
  source 1..22: mol_type = other DNA
tgaacagctctccccctgagct

SEQ ID NO: 47238 - DNA, 22 bp, synthetic construct
  misc_feature 1..22: note = chemically synthesized
  source 1..22: mol_type = other DNA
tccccctgagctaacttaccga

SEQ ID NO: 47239 - DNA, 22 bp, synthetic construct
  misc_feature 1..22: note = chemically synthesized
  source 1..22: mol_type = other DNA
cccctgagctaacttaccgagc

SEQ ID NO: 47240 - DNA, 22 bp, synthetic construct
  misc_feature 1..22: note = chemically synthesized
  source 1..22: mol_type = other DNA
agctaacttaccgagcagtaag

SEQ ID NO: 47241 - DNA, 22 bp, synthetic construct
  misc_feature 1..22: note = chemically synthesized
  source 1..22: mol_type = other DNA
acttaccgagcagtaagtgagg

SEQ ID NO: 47242 - DNA, 22 bp, synthetic construct
  misc_feature 1..22: note = chemically synthesized
  source 1..22: mol_type = other DNA
accgagcagtaagtgaggcaag

SEQ ID NO: 47243 - DNA, 22 bp, synthetic construct
  misc_feature 1..22: note = chemically synthesized
  source 1..22: mol_type = other DNA
ccgagcagtaagtgaggcaaga

SEQ ID NO: 47244 - DNA, 22 bp, synthetic construct
  misc_feature 1..22: note = chemically synthesized
  source 1..22: mol_type = other DNA
actatatttctcagcctccatg

SEQ ID NO: 47245 - DNA, 22 bp, synthetic construct
  misc_feature 1..22: note = chemically synthesized
  source 1..22: mol_type = other DNA
tatttctcagcctccatgaagt

SEQ ID NO: 47246 - DNA, 22 bp, synthetic construct
  misc_feature 1..22: note = chemically synthesized
  source 1..22: mol_type = other DNA
ctcagcctccatgaagtcgtca

SEQ ID NO: 47247 - DNA, 22 bp, synthetic construct
  misc_feature 1..22: note = chemically synthesized
  source 1..22: mol_type = other DNA
tcagcctccatgaagtcgtcac

SEQ ID NO: 47248 - DNA, 22 bp, synthetic construct
  misc_feature 1..22: note = chemically synthesized
  source 1..22: mol_type = other DNA
agcctccatgaagtcgtcactg

SEQ ID NO: 47249 - DNA, 22 bp, synthetic construct
  misc_feature 1..22: note = chemically synthesized
  source 1..22: mol_type = other DNA
catgaagtcgtcactgggagag

SEQ ID NO: 47250 - DNA, 22 bp, synthetic construct
  misc_feature 1..22: note = chemically synthesized
  source 1..22: mol_type = other DNA
ggagaggagccaagagggaggg

SEQ ID NO: 47251 - DNA, 22 bp, synthetic construct
  misc_feature 1..22: note = chemically synthesized
  source 1..22: mol_type = other DNA
aggagacaagatcgtaactcac

SEQ ID NO: 47252 - DNA, 22 bp, synthetic construct
  misc_feature 1..22: note = chemically synthesized
  source 1..22: mol_type = other DNA
ggagacaagatcgtaactcacc

SEQ ID NO: 47253 - DNA, 22 bp, synthetic construct
  misc_feature 1..22: note = chemically synthesized
  source 1..22: mol_type = other DNA
accgtcatccggggaagtggag

SEQ ID NO: 47254 - DNA, 22 bp, synthetic construct
  misc_feature 1..22: note = chemically synthesized
  source 1..22: mol_type = other DNA
gtgtcaggagtggagagctaag

SEQ ID NO: 47255 - DNA, 22 bp, synthetic construct
  misc_feature 1..22: note = chemically synthesized
  source 1..22: mol_type = other DNA
agctcaatatggacaaggacag

SEQ ID NO: 47256 - DNA, 22 bp, synthetic construct
  misc_feature 1..22: note = chemically synthesized
  source 1..22: mol_type = other DNA
aatatggacaaggacagagagg

SEQ ID NO: 47257 - DNA, 22 bp, synthetic construct
  misc_feature 1..22: note = chemically synthesized
  source 1..22: mol_type = other DNA
ggatgggagaaatgtggcatca

SEQ ID NO: 47258 - DNA, 22 bp, synthetic construct
  misc_feature 1..22: note = chemically synthesized
  source 1..22: mol_type = other DNA
ggagtgaaagtttaactgccct

SEQ ID NO: 47259 - DNA, 22 bp, synthetic construct
  misc_feature 1..22: note = chemically synthesized
  source 1..22: mol_type = other DNA
aactgccctcaaagatggctga

SEQ ID NO: 47260 - DNA, 22 bp, synthetic construct
  misc_feature 1..22: note = chemically synthesized
  source 1..22: mol_type = other DNA
actgccctcaaagatggctgac

SEQ ID NO: 47261 - DNA, 22 bp, synthetic construct
  misc_feature 1..22: note = chemically synthesized
  source 1..22: mol_type = other DNA
ccctcaaagatggctgacaaag

SEQ ID NO: 47262 - DNA, 22 bp, synthetic construct
  misc_feature 1..22: note = chemically synthesized
  source 1..22: mol_type = other DNA
aaagatggctgacaaagatcta

SEQ ID NO: 47263 - DNA, 22 bp, synthetic construct
  misc_feature 1..22: note = chemically synthesized
  source 1..22: mol_type = other DNA
acaaagatctagcattcctagt

SEQ ID NO: 47264 - DNA, 22 bp, synthetic construct
  misc_feature 1..22: note = chemically synthesized
  source 1..22: mol_type = other DNA
gcattcctagtggacaccaagc

SEQ ID NO: 47265 - DNA, 22 bp, synthetic construct
  misc_feature 1..22: note = chemically synthesized
  source 1..22: mol_type = other DNA
ctagtggacaccaagctgagca

SEQ ID NO: 47266 - DNA, 22 bp, synthetic construct
  misc_feature 1..22: note = chemically synthesized
  source 1..22: mol_type = other DNA
gtggacaccaagctgagcatga

SEQ ID NO: 47267 - DNA, 22 bp, synthetic construct
  misc_feature 1..22: note = chemically synthesized
  source 1..22: mol_type = other DNA
agcatgagtcatcaatgaagca

SEQ ID NO: 47268 - DNA, 22 bp, synthetic construct
  misc_feature 1..22: note = chemically synthesized
  source 1..22: mol_type = other DNA
gtttttaaaaaagcaagcagga

SEQ ID NO: 47269 - DNA, 22 bp, synthetic construct
  misc_feature 1..22: note = chemically synthesized
  source 1..22: mol_type = other DNA
ttaaaaaagcaagcaggacata

SEQ ID NO: 47270 - DNA, 22 bp, synthetic construct
  misc_feature 1..22: note = chemically synthesized
  source 1..22: mol_type = other DNA
taaaaaagcaagcaggacataa

SEQ ID NO: 47271 - DNA, 22 bp, synthetic construct
  misc_feature 1..22: note = chemically synthesized
  source 1..22: mol_type = other DNA
aaaaaagcaagcaggacataag

SEQ ID NO: 47272 - DNA, 22 bp, synthetic construct
  misc_feature 1..22: note = chemically synthesized
  source 1..22: mol_type = other DNA
aaaaagcaagcaggacataaga

SEQ ID NO: 47273 - DNA, 22 bp, synthetic construct
  misc_feature 1..22: note = chemically synthesized
  source 1..22: mol_type = other DNA
aagaatgtggaaaacactaaga

SEQ ID NO: 47274 - DNA, 22 bp, synthetic construct
  misc_feature 1..22: note = chemically synthesized
  source 1..22: mol_type = other DNA
agatatcttgccattggactct

SEQ ID NO: 47275 - DNA, 22 bp, synthetic construct
  misc_feature 1..22: note = chemically synthesized
  source 1..22: mol_type = other DNA
gccattggactctgtagttatc

SEQ ID NO: 47276 - DNA, 22 bp, synthetic construct
  misc_feature 1..22: note = chemically synthesized
  source 1..22: mol_type = other DNA
ccattggactctgtagttatca

SEQ ID NO: 47277 - DNA, 22 bp, synthetic construct
  misc_feature 1..22: note = chemically synthesized
  source 1..22: mol_type = other DNA
gactctgtagttatcagactaa

SEQ ID NO: 47278 - DNA, 22 bp, synthetic construct
  misc_feature 1..22: note = chemically synthesized
  source 1..22: mol_type = other DNA
tgtagttatcagactaatgttt

SEQ ID NO: 47279 - DNA, 22 bp, synthetic construct
  misc_feature 1..22: note = chemically synthesized
  source 1..22: mol_type = other DNA
tagttatcagactaatgtttga

SEQ ID NO: 47280 - DNA, 22 bp, synthetic construct
  misc_feature 1..22: note = chemically synthesized
  source 1..22: mol_type = other DNA
tcagactaatgtttgagtaaaa

SEQ ID NO: 47281 - DNA, 22 bp, synthetic construct
  misc_feature 1..22: note = chemically synthesized
  source 1..22: mol_type = other DNA
atgtttgagtaaaagagctgga

SEQ ID NO: 47282 - DNA, 22 bp, synthetic construct
  misc_feature 1..22: note = chemically synthesized
  source 1..22: mol_type = other DNA
gagtaaaagagctggaaaacca

SEQ ID NO: 47283 - DNA, 22 bp, synthetic construct
  misc_feature 1..22: note = chemically synthesized
  source 1..22: mol_type = other DNA
agtaaaagagctggaaaaccag

SEQ ID NO: 47284 - DNA, 22 bp, synthetic construct
  misc_feature 1..22: note = chemically synthesized
  source 1..22: mol_type = other DNA
gaaaaccagcagattctaaaga

SEQ ID NO: 47285 - DNA, 22 bp, synthetic construct
  misc_feature 1..22: note = chemically synthesized
  source 1..22: mol_type = other DNA
taaagagaggcatagaaacaat

SEQ ID NO: 47286 - DNA, 22 bp, synthetic construct
  misc_feature 1..22: note = chemically synthesized
  source 1..22: mol_type = other DNA
aagagaggcatagaaacaataa

SEQ ID NO: 47287 - DNA, 22 bp, synthetic construct
  misc_feature 1..22: note = chemically synthesized
  source 1..22: mol_type = other DNA
caagataatagatccatgagtt

SEQ ID NO: 47288 - DNA, 22 bp, synthetic construct
  misc_feature 1..22: note = chemically synthesized
  source 1..22: mol_type = other DNA
aggttcaggaaagagattattt

SEQ ID NO: 47289 - DNA, 22 bp, synthetic construct
  misc_feature 1..22: note = chemically synthesized
  source 1..22: mol_type = other DNA
aggaaagagattatttaggaag

SEQ ID NO: 47290 - DNA, 22 bp, synthetic construct
  misc_feature 1..22: note = chemically synthesized
  source 1..22: mol_type = other DNA
tttaggaagaagaagtggcgga

SEQ ID NO: 47291 - DNA, 22 bp, synthetic construct
  misc_feature 1..22: note = chemically synthesized
  source 1..22: mol_type = other DNA
aggaagaagaagtggcggagaa

SEQ ID NO: 47292 - DNA, 22 bp, synthetic construct
  misc_feature 1..22: note = chemically synthesized
  source 1..22: mol_type = other DNA
ggaagaagaagtggcggagaat

SEQ ID NO: 47293 - DNA, 22 bp, synthetic construct
  misc_feature 1..22: note = chemically synthesized
  source 1..22: mol_type = other DNA
cagcccaaagctggtgatgaga

SEQ ID NO: 47294 - DNA, 22 bp, synthetic construct
  misc_feature 1..22: note = chemically synthesized
  source 1..22: mol_type = other DNA
agcccaaagctggtgatgagat

SEQ ID NO: 47295 - DNA, 22 bp, synthetic construct
  misc_feature 1..22: note = chemically synthesized
  source 1..22: mol_type = other DNA
gtgatgagatactttgtcgtct

SEQ ID NO: 47296 - DNA, 22 bp, synthetic construct
  misc_feature 1..22: note = chemically synthesized
  source 1..22: mol_type = other DNA
tgtcgtctctggaatgaagagg

SEQ ID NO: 47297 - DNA, 22 bp, synthetic construct
  misc_feature 1..22: note = chemically synthesized
  source 1..22: mol_type = other DNA
gtcgtctctggaatgaagagga

SEQ ID NO: 47298 - DNA, 22 bp, synthetic construct
  misc_feature 1..22: note = chemically synthesized
  source 1..22: mol_type = other DNA
tcgtctctggaatgaagaggaa

SEQ ID NO: 47299 - DNA, 22 bp, synthetic construct
  misc_feature 1..22: note = chemically synthesized
  source 1..22: mol_type = other DNA
tggaatgaagaggaaatgggtt

SEQ ID NO: 47300 - DNA, 22 bp, synthetic construct
  misc_feature 1..22: note = chemically synthesized
  source 1..22: mol_type = other DNA
gaatgaagaggaaatgggttta

SEQ ID NO: 47301 - DNA, 22 bp, synthetic construct
  misc_feature 1..22: note = chemically synthesized
  source 1..22: mol_type = other DNA
aaaatgaagcataagggatcga

SEQ ID NO: 47302 - DNA, 22 bp, synthetic construct
  misc_feature 1..22: note = chemically synthesized
  source 1..22: mol_type = other DNA
aaatgaagcataagggatcgaa

SEQ ID NO: 47303 - DNA, 22 bp, synthetic construct
  misc_feature 1..22: note = chemically synthesized
  source 1..22: mol_type = other DNA
cctgcgattgagaggtgtcttt

SEQ ID NO: 47304 - DNA, 22 bp, synthetic construct
  misc_feature 1..22: note = chemically synthesized
  source 1..22: mol_type = other DNA
ctgcgattgagaggtgtcttta

SEQ ID NO: 47305 - DNA, 22 bp, synthetic construct
  misc_feature 1..22: note = chemically synthesized
  source 1..22: mol_type = other DNA
cgattgagaggtgtctttaaaa

SEQ ID NO: 47306 - DNA, 22 bp, synthetic construct
  misc_feature 1..22: note = chemically synthesized
  source 1..22: mol_type = other DNA
agaggtgtctttaaaaatagaa

SEQ ID NO: 47307 - DNA, 22 bp, synthetic construct
  misc_feature 1..22: note = chemically synthesized
  source 1..22: mol_type = other DNA
taaaaatagaactagggtggtg

SEQ ID NO: 47308 - DNA, 22 bp, synthetic construct
  misc_feature 1..22: note = chemically synthesized
  source 1..22: mol_type = other DNA
aaaaatagaactagggtggtga

SEQ ID NO: 47309 - DNA, 22 bp, synthetic construct
  misc_feature 1..22: note = chemically synthesized
  source 1..22: mol_type = other DNA
aaaatagaactagggtggtgag

SEQ ID NO: 47310 - DNA, 22 bp, synthetic construct
  misc_feature 1..22: note = chemically synthesized
  source 1..22: mol_type = other DNA
gggtggtgaggaagaggttggg

SEQ ID NO: 47311 - DNA, 22 bp, synthetic construct
  misc_feature 1..22: note = chemically synthesized
  source 1..22: mol_type = other DNA
ggctggccaattctggagggcc

SEQ ID NO: 47312 - DNA, 22 bp, synthetic construct
  misc_feature 1..22: note = chemically synthesized
  source 1..22: mol_type = other DNA
gccaattctggagggccatctg

SEQ ID NO: 47313 - DNA, 22 bp, synthetic construct
  misc_feature 1..22: note = chemically synthesized
  source 1..22: mol_type = other DNA
tggagggccatctgcccctgag

SEQ ID NO: 47314 - DNA, 22 bp, synthetic construct
  misc_feature 1..22: note = chemically synthesized
  source 1..22: mol_type = other DNA
gagggccatctgcccctgagag

SEQ ID NO: 47315 - DNA, 22 bp, synthetic construct
  misc_feature 1..22: note = chemically synthesized
  source 1..22: mol_type = other DNA
cccctgagagggtacacgttcc

SEQ ID NO: 47316 - DNA, 22 bp, synthetic construct
  misc_feature 1..22: note = chemically synthesized
  source 1..22: mol_type = other DNA
agagggtacacgttccttcacc

SEQ ID NO: 47317 - DNA, 22 bp, synthetic construct
  misc_feature 1..22: note = chemically synthesized
  source 1..22: mol_type = other DNA
cttcaccaccccaactccatct

SEQ ID NO: 47318 - DNA, 22 bp, synthetic construct
  misc_feature 1..22: note = chemically synthesized
  source 1..22: mol_type = other DNA
caccaccccaactccatctact

SEQ ID NO: 47319 - DNA, 22 bp, synthetic construct
  misc_feature 1..22: note = chemically synthesized
  source 1..22: mol_type = other DNA
accaccccaactccatctactc

SEQ ID NO: 47320 - DNA, 22 bp, synthetic construct
  misc_feature 1..22: note = chemically synthesized
  source 1..22: mol_type = other DNA
catctactccattatctccagt

SEQ ID NO: 47321 - DNA, 22 bp, synthetic construct
  misc_feature 1..22: note = chemically synthesized
  source 1..22: mol_type = other DNA
ctccattatctccagttatctg

SEQ ID NO: 47322 - DNA, 22 bp, synthetic construct
  misc_feature 1..22: note = chemically synthesized
  source 1..22: mol_type = other DNA
cattatctccagttatctgaat

SEQ ID NO: 47323 - DNA, 22 bp, synthetic construct
  misc_feature 1..22: note = chemically synthesized
  source 1..22: mol_type = other DNA
tctccagttatctgaataaaaa

SEQ ID NO: 47324 - DNA, 22 bp, synthetic construct
  misc_feature 1..22: note = chemically synthesized
  source 1..22: mol_type = other DNA
cagttatctgaataaaaaagcc

SEQ ID NO: 47325 - DNA, 22 bp, synthetic construct
  misc_feature 1..22: note = chemically synthesized
  source 1..22: mol_type = other DNA
tctgaataaaaaagccaagcta

SEQ ID NO: 47326 - DNA, 22 bp, synthetic construct
  misc_feature 1..22: note = chemically synthesized
  source 1..22: mol_type = other DNA
aataaaaaagccaagctattcc

SEQ ID NO: 47327 - DNA, 22 bp, synthetic construct
  misc_feature 1..22: note = chemically synthesized
  source 1..22: mol_type = other DNA
ttccctgggcacaccatgtaaa

SEQ ID NO: 47328 - DNA, 22 bp, synthetic construct
  misc_feature 1..22: note = chemically synthesized
  source 1..22: mol_type = other DNA
cctgggcacaccatgtaaaccc

SEQ ID NO: 47329 - DNA, 22 bp, synthetic construct
  misc_feature 1..22: note = chemically synthesized
  source 1..22: mol_type = other DNA
ggcacaccatgtaaaccccaga

SEQ ID NO: 47330 - DNA, 22 bp, synthetic construct
  misc_feature 1..22: note = chemically synthesized
  source 1..22: mol_type = other DNA
tgggagccctagcaggaaaggt

SEQ ID NO: 47331 - DNA, 22 bp, synthetic construct
  misc_feature 1..22: note = chemically synthesized
  source 1..22: mol_type = other DNA
gggagccctagcaggaaaggtg

SEQ ID NO: 47332 - DNA, 22 bp, synthetic construct
  misc_feature 1..22: note = chemically synthesized
  source 1..22: mol_type = other DNA
ggagccctagcaggaaaggtgg

SEQ ID NO: 47333 - DNA, 22 bp, synthetic construct
  misc_feature 1..22: note = chemically synthesized
  source 1..22: mol_type = other DNA
gcaggaaaggtggtaggaagac

SEQ ID NO: 47334 - DNA, 22 bp, synthetic construct
  misc_feature 1..22: note = chemically synthesized
  source 1..22: mol_type = other DNA
tctgcaacagcacaggtgattg

SEQ ID NO: 47335 - DNA, 22 bp, synthetic construct
  misc_feature 1..22: note = chemically synthesized
  source 1..22: mol_type = other DNA
tgcaacagcacaggtgattggg

SEQ ID NO: 47336 - DNA, 22 bp, synthetic construct
  misc_feature 1..22: note = chemically synthesized
  source 1..22: mol_type = other DNA
caacagcacaggtgattgggtg

SEQ ID NO: 47337 - DNA, 22 bp, synthetic construct
  misc_feature 1..22: note = chemically synthesized
  source 1..22: mol_type = other DNA
ggtggtggttttgttgcttggg

SEQ ID NO: 47338 - DNA, 22 bp, synthetic construct
  misc_feature 1..22: note = chemically synthesized
  source 1..22: mol_type = other DNA
tgttgcttgggttttaccatgg

SEQ ID NO: 47339 - DNA, 22 bp, synthetic construct
  misc_feature 1..22: note = chemically synthesized
  source 1..22: mol_type = other DNA
gttgcttgggttttaccatggg

SEQ ID NO: 47340 - DNA, 22 bp, synthetic construct
  misc_feature 1..22: note = chemically synthesized
  source 1..22: mol_type = other DNA
ttgcttgggttttaccatgggc

SEQ ID NO: 47341 - DNA, 22 bp, synthetic construct
  misc_feature 1..22: note = chemically synthesized
  source 1..22: mol_type = other DNA
cttgggttttaccatgggctcc

SEQ ID NO: 47342 - DNA, 22 bp, synthetic construct
  misc_feature 1..22: note = chemically synthesized
  source 1..22: mol_type = other DNA
gggttttaccatgggctcccca

SEQ ID NO: 47343 - DNA, 22 bp, synthetic construct
  misc_feature 1..22: note = chemically synthesized
  source 1..22: mol_type = other DNA
ggttttaccatgggctccccag

SEQ ID NO: 47344 - DNA, 22 bp, synthetic construct
  misc_feature 1..22: note = chemically synthesized
  source 1..22: mol_type = other DNA
taccatgggctccccaggttag

SEQ ID NO: 47345 - DNA, 22 bp, synthetic construct
  misc_feature 1..22: note = chemically synthesized
  source 1..22: mol_type = other DNA
accatgggctccccaggttagc

SEQ ID NO: 47346 - DNA, 22 bp, synthetic construct
  misc_feature 1..22: note = chemically synthesized
  source 1..22: mol_type = other DNA
ccatgggctccccaggttagca

SEQ ID NO: 47347 - DNA, 22 bp, synthetic construct
  misc_feature 1..22: note = chemically synthesized
  source 1..22: mol_type = other DNA
cccaggttagcactgccacaaa

SEQ ID NO: 47348 - DNA, 22 bp, synthetic construct
  misc_feature 1..22: note = chemically synthesized
  source 1..22: mol_type = other DNA
gcactgccacaaaagcaccagg

SEQ ID NO: 47349 - DNA, 22 bp, synthetic construct
  misc_feature 1..22: note = chemically synthesized
  source 1..22: mol_type = other DNA
ccacaaaagcaccaggctcttc

SEQ ID NO: 47350 - DNA, 22 bp, synthetic construct
  misc_feature 1..22: note = chemically synthesized
  source 1..22: mol_type = other DNA
ttcaacaaagctccagttaaga

SEQ ID NO: 47351 - DNA, 22 bp, synthetic construct
  misc_feature 1..22: note = chemically synthesized
  source 1..22: mol_type = other DNA
caacaaagctccagttaagaaa

SEQ ID NO: 47352 - DNA, 22 bp, synthetic construct
  misc_feature 1..22: note = chemically synthesized
  source 1..22: mol_type = other DNA
aacaaagctccagttaagaaaa

SEQ ID NO: 47353 - DNA, 22 bp, synthetic construct
  misc_feature 1..22: note = chemically synthesized
  source 1..22: mol_type = other DNA
cagttaagaaaagcattccagc

SEQ ID NO: 47354 - DNA, 22 bp, synthetic construct
  misc_feature 1..22: note = chemically synthesized
  source 1..22: mol_type = other DNA
agaaaagcattccagccatcac

SEQ ID NO: 47355 - DNA, 22 bp, synthetic construct
  misc_feature 1..22: note = chemically synthesized
  source 1..22: mol_type = other DNA
cagccatcaccgataaaagcgt

SEQ ID NO: 47356 - DNA, 22 bp, synthetic construct
  misc_feature 1..22: note = chemically synthesized
  source 1..22: mol_type = other DNA
ctctgcaaagcacatgcgggcc

SEQ ID NO: 47357 - DNA, 22 bp, synthetic construct
  misc_feature 1..22: note = chemically synthesized
  source 1..22: mol_type = other DNA
tgcaaagcacatgcgggccacc

SEQ ID NO: 47358 - DNA, 22 bp, synthetic construct
  misc_feature 1..22: note = chemically synthesized
  source 1..22: mol_type = other DNA
caaagcacatgcgggccacctc

SEQ ID NO: 47359 - DNA, 22 bp, synthetic construct
  misc_feature 1..22: note = chemically synthesized
  source 1..22: mol_type = other DNA
tggctcctgctggccatggaga

SEQ ID NO: 47360 - DNA, 22 bp, synthetic construct
  misc_feature 1..22: note = chemically synthesized
  source 1..22: mol_type = other DNA
gctcctgctggccatggagagg

SEQ ID NO: 47361 - DNA, 22 bp, synthetic construct
  misc_feature 1..22: note = chemically synthesized
  source 1..22: mol_type = other DNA
ctgctggccatggagaggccat

SEQ ID NO: 47362 - DNA, 22 bp, synthetic construct
  misc_feature 1..22: note = chemically synthesized
  source 1..22: mol_type = other DNA
ctggccatggagaggccatgtg

SEQ ID NO: 47363 - DNA, 22 bp, synthetic construct
  misc_feature 1..22: note = chemically synthesized
  source 1..22: mol_type = other DNA
gccatggagaggccatgtgcga

SEQ ID NO: 47364 - DNA, 22 bp, synthetic construct
  misc_feature 1..22: note = chemically synthesized
  source 1..22: mol_type = other DNA
gtacagtcagccaggaatgaaa

SEQ ID NO: 47365 - DNA, 22 bp, synthetic construct
  misc_feature 1..22: note = chemically synthesized
  source 1..22: mol_type = other DNA
tgggccaagtctaccactgcct

SEQ ID NO: 47366 - DNA, 22 bp, synthetic construct
  misc_feature 1..22: note = chemically synthesized
  source 1..22: mol_type = other DNA
ggccaagtctaccactgcctag

SEQ ID NO: 47367 - DNA, 22 bp, synthetic construct
  misc_feature 1..22: note = chemically synthesized
  source 1..22: mol_type = other DNA
ccactgcctagcaagtagactc

SEQ ID NO: 47368 - DNA, 22 bp, synthetic construct
  misc_feature 1..22: note = chemically synthesized
  source 1..22: mol_type = other DNA
cctagcaagtagactctggcac

SEQ ID NO: 47369 - DNA, 22 bp, synthetic construct
  misc_feature 1..22: note = chemically synthesized
  source 1..22: mol_type = other DNA
gcaagtagactctggcactcac

SEQ ID NO: 47370 - DNA, 22 bp, synthetic construct
  misc_feature 1..22: note = chemically synthesized
  source 1..22: mol_type = other DNA
tggcactcactcccctcttagc

SEQ ID NO: 47371 - DNA, 22 bp, synthetic construct
  misc_feature 1..22: note = chemically synthesized
  source 1..22: mol_type = other DNA
gcactcactcccctcttagcct

SEQ ID NO: 47372 - DNA, 22 bp, synthetic construct
  misc_feature 1..22: note = chemically synthesized
  source 1..22: mol_type = other DNA
actcccctcttagcctcaacct

SEQ ID NO: 47373 - DNA, 22 bp, synthetic construct
  misc_feature 1..22: note = chemically synthesized
  source 1..22: mol_type = other DNA
ccctcttagcctcaacctttct

SEQ ID NO: 47374 - DNA, 22 bp, synthetic construct
  misc_feature 1..22: note = chemically synthesized
  source 1..22: mol_type = other DNA
ttagcctcaacctttctcatct

SEQ ID NO: 47375 - DNA, 22 bp, synthetic construct
  misc_feature 1..22: note = chemically synthesized
  source 1..22: mol_type = other DNA
agcctcaacctttctcatctgt

SEQ ID NO: 47376 - DNA, 22 bp, synthetic construct
  misc_feature 1..22: note = chemically synthesized
  source 1..22: mol_type = other DNA
gcctcaacctttctcatctgta

SEQ ID NO: 47377 - DNA, 22 bp, synthetic construct
  misc_feature 1..22: note = chemically synthesized
  source 1..22: mol_type = other DNA
aacctttctcatctgtaaaatg

SEQ ID NO: 47378 - DNA, 22 bp, synthetic construct
  misc_feature 1..22: note = chemically synthesized
  source 1..22: mol_type = other DNA
tctcatctgtaaaatgacaggg

SEQ ID NO: 47379 - DNA, 22 bp, synthetic construct
  misc_feature 1..22: note = chemically synthesized
  source 1..22: mol_type = other DNA
ctcatctgtaaaatgacagggt

SEQ ID NO: 47380 - DNA, 22 bp, synthetic construct
  misc_feature 1..22: note = chemically synthesized
  source 1..22: mol_type = other DNA
tcatctgtaaaatgacagggtt

SEQ ID NO: 47381 - DNA, 22 bp, synthetic construct
  misc_feature 1..22: note = chemically synthesized
  source 1..22: mol_type = other DNA
atctgtaaaatgacagggttaa

SEQ ID NO: 47382 - DNA, 22 bp, synthetic construct
  misc_feature 1..22: note = chemically synthesized
  source 1..22: mol_type = other DNA
taaaatgacagggttaatgata

SEQ ID NO: 47383 - DNA, 22 bp, synthetic construct
  misc_feature 1..22: note = chemically synthesized
  source 1..22: mol_type = other DNA
atgatatgacttcacaagtcta

SEQ ID NO: 47384 - DNA, 22 bp, synthetic construct
  misc_feature 1..22: note = chemically synthesized
  source 1..22: mol_type = other DNA
cacaagtctatgtctacataga

SEQ ID NO: 47385 - DNA, 22 bp, synthetic construct
  misc_feature 1..22: note = chemically synthesized
  source 1..22: mol_type = other DNA
acaagtctatgtctacatagaa

SEQ ID NO: 47386 - DNA, 22 bp, synthetic construct
  misc_feature 1..22: note = chemically synthesized
  source 1..22: mol_type = other DNA
tgtctacatagaagatgctcaa

SEQ ID NO: 47387 - DNA, 22 bp, synthetic construct
  misc_feature 1..22: note = chemically synthesized
  source 1..22: mol_type = other DNA
catagaagatgctcaataagta

SEQ ID NO: 47388 - DNA, 22 bp, synthetic construct
  misc_feature 1..22: note = chemically synthesized
  source 1..22: mol_type = other DNA
aataagtattcactttggcttt

SEQ ID NO: 47389 - DNA, 22 bp, synthetic construct
  misc_feature 1..22: note = chemically synthesized
  source 1..22: mol_type = other DNA
actttggctttccacgaaggaa

SEQ ID NO: 47390 - DNA, 22 bp, synthetic construct
  misc_feature 1..22: note = chemically synthesized
  source 1..22: mol_type = other DNA
tggctttccacgaaggaaacta

SEQ ID NO: 47391 - DNA, 22 bp, synthetic construct
  misc_feature 1..22: note = chemically synthesized
  source 1..22: mol_type = other DNA
ggctttccacgaaggaaactat

SEQ ID NO: 47392 - DNA, 22 bp, synthetic construct
  misc_feature 1..22: note = chemically synthesized
  source 1..22: mol_type = other DNA
gctttccacgaaggaaactatc

SEQ ID NO: 47393 - DNA, 22 bp, synthetic construct
  misc_feature 1..22: note = chemically synthesized
  source 1..22: mol_type = other DNA
tccacgaaggaaactatctatg

SEQ ID NO: 47394 - DNA, 22 bp, synthetic construct
  misc_feature 1..22: note = chemically synthesized
  source 1..22: mol_type = other DNA
ccacgaaggaaactatctatgc

SEQ ID NO: 47395 - DNA, 22 bp, synthetic construct
  misc_feature 1..22: note = chemically synthesized
  source 1..22: mol_type = other DNA
cacgaaggaaactatctatgct

SEQ ID NO: 47396 - DNA, 22 bp, synthetic construct
  misc_feature 1..22: note = chemically synthesized
  source 1..22: mol_type = other DNA
tctatgctcaaagagctgtgct

SEQ ID NO: 47397 - DNA, 22 bp, synthetic construct
  misc_feature 1..22: note = chemically synthesized
  source 1..22: mol_type = other DNA
tgctcaaagagctgtgctttct

SEQ ID NO: 47398 - DNA, 22 bp, synthetic construct
  misc_feature 1..22: note = chemically synthesized
  source 1..22: mol_type = other DNA
aaagagctgtgctttcttctat

SEQ ID NO: 47399 - DNA, 22 bp, synthetic construct
  misc_feature 1..22: note = chemically synthesized
  source 1..22: mol_type = other DNA
tgctttcttctatgattcctca

SEQ ID NO: 47400 - DNA, 22 bp, synthetic construct
  misc_feature 1..22: note = chemically synthesized
  source 1..22: mol_type = other DNA
tcttctatgattcctcagaaac

SEQ ID NO: 47401 - DNA, 22 bp, synthetic construct
  misc_feature 1..22: note = chemically synthesized
  source 1..22: mol_type = other DNA
cttctatgattcctcagaaact

SEQ ID NO: 47402 - DNA, 22 bp, synthetic construct
  misc_feature 1..22: note = chemically synthesized
  source 1..22: mol_type = other DNA
ttctatgattcctcagaaactc

SEQ ID NO: 47403 - DNA, 22 bp, synthetic construct
  misc_feature 1..22: note = chemically synthesized
  source 1..22: mol_type = other DNA
ctatgattcctcagaaactctt

SEQ ID NO: 47404 - DNA, 22 bp, synthetic construct
  misc_feature 1..22: note = chemically synthesized
  source 1..22: mol_type = other DNA
tatgattcctcagaaactcttg

SEQ ID NO: 47405 - DNA, 22 bp, synthetic construct
  misc_feature 1..22: note = chemically synthesized
  source 1..22: mol_type = other DNA
tgattcctcagaaactcttgtc

SEQ ID NO: 47406 - DNA, 22 bp, synthetic construct
  misc_feature 1..22: note = chemically synthesized
  source 1..22: mol_type = other DNA
ctcagaaactcttgtcgactag

SEQ ID NO: 47407 - DNA, 22 bp, synthetic construct
  misc_feature 1..22: note = chemically synthesized
  source 1..22: mol_type = other DNA
agaaactcttgtcgactagagg

SEQ ID NO: 47408 - DNA, 22 bp, synthetic construct
  misc_feature 1..22: note = chemically synthesized
  source 1..22: mol_type = other DNA
ttgtcgactagaggaacaagaa

SEQ ID NO: 47409 - DNA, 22 bp, synthetic construct
  misc_feature 1..22: note = chemically synthesized
  source 1..22: mol_type = other DNA
gtcgactagaggaacaagaacc

SEQ ID NO: 47410 - DNA, 22 bp, synthetic construct
  misc_feature 1..22: note = chemically synthesized
  source 1..22: mol_type = other DNA
tcgactagaggaacaagaacct

SEQ ID NO: 47411 - DNA, 22 bp, synthetic construct
  misc_feature 1..22: note = chemically synthesized
  source 1..22: mol_type = other DNA
gaggaacaagaaccttactcta

SEQ ID NO: 47412 - DNA, 22 bp, synthetic construct
  misc_feature 1..22: note = chemically synthesized
  source 1..22: mol_type = other DNA
actctaaaacccaattttaggg

SEQ ID NO: 47413 - DNA, 22 bp, synthetic construct
  misc_feature 1..22: note = chemically synthesized
  source 1..22: mol_type = other DNA
ctctaaaacccaattttagggg

SEQ ID NO: 47414 - DNA, 22 bp, synthetic construct
  misc_feature 1..22: note = chemically synthesized
  source 1..22: mol_type = other DNA
taaaacccaattttaggggagg

SEQ ID NO: 47415 - DNA, 22 bp, synthetic construct
  misc_feature 1..22: note = chemically synthesized
  source 1..22: mol_type = other DNA
aaacccaattttaggggaggag

SEQ ID NO: 47416 - DNA, 22 bp, synthetic construct
  misc_feature 1..22: note = chemically synthesized
  source 1..22: mol_type = other DNA
taggggaggagagaaaattttt

SEQ ID NO: 47417 - DNA, 22 bp, synthetic construct
  misc_feature 1..22: note = chemically synthesized
  source 1..22: mol_type = other DNA
aggggaggagagaaaattttta

SEQ ID NO: 47418 - DNA, 22 bp, synthetic construct
  misc_feature 1..22: note = chemically synthesized
  source 1..22: mol_type = other DNA
ggggaggagagaaaatttttaa

SEQ ID NO: 47419 - DNA, 22 bp, synthetic construct
  misc_feature 1..22: note = chemically synthesized
  source 1..22: mol_type = other DNA
ttaaaagactttaaattaatta

SEQ ID NO: 47420 - DNA, 22 bp, synthetic construct
  misc_feature 1..22: note = chemically synthesized
  source 1..22: mol_type = other DNA
taaaagactttaaattaattac

SEQ ID NO: 47421 - DNA, 22 bp, synthetic construct
  misc_feature 1..22: note = chemically synthesized
  source 1..22: mol_type = other DNA
aaaagactttaaattaattact

SEQ ID NO: 47422 - DNA, 22 bp, synthetic construct
  misc_feature 1..22: note = chemically synthesized
  source 1..22: mol_type = other DNA
aaagactttaaattaattactt

SEQ ID NO: 47423 - DNA, 22 bp, synthetic construct
  misc_feature 1..22: note = chemically synthesized
  source 1..22: mol_type = other DNA
taaattaattacttgaaggcca

SEQ ID NO: 47424 - DNA, 22 bp, synthetic construct
  misc_feature 1..22: note = chemically synthesized
  source 1..22: mol_type = other DNA
aaattaattacttgaaggccag

SEQ ID NO: 47425 - DNA, 22 bp, synthetic construct
  misc_feature 1..22: note = chemically synthesized
  source 1..22: mol_type = other DNA
aattaattacttgaaggccaga

SEQ ID NO: 47426 - DNA, 22 bp, synthetic construct
  misc_feature 1..22: note = chemically synthesized
  source 1..22: mol_type = other DNA
attacttgaaggccagaggcat

SEQ ID NO: 47427 - DNA, 22 bp, synthetic construct
  misc_feature 1..22: note = chemically synthesized
  source 1..22: mol_type = other DNA
cttgaaggccagaggcatttgc

SEQ ID NO: 47428 - DNA, 22 bp, synthetic construct
  misc_feature 1..22: note = chemically synthesized
  source 1..22: mol_type = other DNA
gaaggccagaggcatttgctta

SEQ ID NO: 47429 - DNA, 22 bp, synthetic construct
  misc_feature 1..22: note = chemically synthesized
  source 1..22: mol_type = other DNA
aaggccagaggcatttgcttat

SEQ ID NO: 47430 - DNA, 22 bp, synthetic construct
  misc_feature 1..22: note = chemically synthesized
  source 1..22: mol_type = other DNA
gcttatgcctataatctcagaa

SEQ ID NO: 47431 - DNA, 22 bp, synthetic construct
  misc_feature 1..22: note = chemically synthesized
  source 1..22: mol_type = other DNA
cttatgcctataatctcagaaa

SEQ ID NO: 47432 - DNA, 22 bp, synthetic construct
  misc_feature 1..22: note = chemically synthesized
  source 1..22: mol_type = other DNA
atgcctataatctcagaaattt

SEQ ID NO: 47433 - DNA, 22 bp, synthetic construct
  misc_feature 1..22: note = chemically synthesized
  source 1..22: mol_type = other DNA
tgcctataatctcagaaatttg

SEQ ID NO: 47434 - DNA, 22 bp, synthetic construct
  misc_feature 1..22: note = chemically synthesized
  source 1..22: mol_type = other DNA
taatctcagaaatttggaaggc

SEQ ID NO: 47435 - DNA, 22 bp, synthetic construct
  misc_feature 1..22: note = chemically synthesized
  source 1..22: mol_type = other DNA
agaaatttggaaggccacagag

SEQ ID NO: 47436 - DNA, 22 bp, synthetic construct
  misc_feature 1..22: note = chemically synthesized
  source 1..22: mol_type = other DNA
ggaaggccacagagggaagatt

SEQ ID NO: 47437 - DNA, 22 bp, synthetic construct
  misc_feature 1..22: note = chemically synthesized
  source 1..22: mol_type = other DNA
gaaggccacagagggaagattg

SEQ ID NO: 47438 - DNA, 22 bp, synthetic construct
  misc_feature 1..22: note = chemically synthesized
  source 1..22: mol_type = other DNA
cttgaagctaggagttcaagac

SEQ ID NO: 47439 - DNA, 22 bp, synthetic construct
  misc_feature 1..22: note = chemically synthesized
  source 1..22: mol_type = other DNA
gaagctaggagttcaagaccag

SEQ ID NO: 47440 - DNA, 22 bp, synthetic construct
  misc_feature 1..22: note = chemically synthesized
  source 1..22: mol_type = other DNA
aagctaggagttcaagaccagc

SEQ ID NO: 47441 - DNA, 22 bp, synthetic construct
  misc_feature 1..22: note = chemically synthesized
  source 1..22: mol_type = other DNA
ggagttcaagaccagcctgggc

SEQ ID NO: 47442 - DNA, 22 bp, synthetic construct
  misc_feature 1..22: note = chemically synthesized
  source 1..22: mol_type = other DNA
aagaccagcctgggcaacatag

SEQ ID NO: 47443 - DNA, 22 bp, synthetic construct
  misc_feature 1..22: note = chemically synthesized
  source 1..22: mol_type = other DNA
ggcaacatagcaaaaccctgtc

SEQ ID NO: 47444 - DNA, 22 bp, synthetic construct
  misc_feature 1..22: note = chemically synthesized
  source 1..22: mol_type = other DNA
tctctacaaaaagcttaataaa

SEQ ID NO: 47445 - DNA, 22 bp, synthetic construct
  misc_feature 1..22: note = chemically synthesized
  source 1..22: mol_type = other DNA
tacaaaaagcttaataaataaa

SEQ ID NO: 47446 - DNA, 22 bp, synthetic construct
  misc_feature 1..22: note = chemically synthesized
  source 1..22: mol_type = other DNA
caaaaagcttaataaataaaat

SEQ ID NO: 47447 - DNA, 22 bp, synthetic construct
  misc_feature 1..22: note = chemically synthesized
  source 1..22: mol_type = other DNA
aataaataaaataaaataattg

SEQ ID NO: 47448 - DNA, 22 bp, synthetic construct
  misc_feature 1..22: note = chemically synthesized
  source 1..22: mol_type = other DNA
ataaataaaataaaataattgc

SEQ ID NO: 47449 - DNA, 22 bp, synthetic construct
  misc_feature 1..22: note = chemically synthesized
  source 1..22: mol_type = other DNA
ctgagatttagctatcttttca

SEQ ID NO: 47450 - DNA, 22 bp, synthetic construct
  misc_feature 1..22: note = chemically synthesized
  source 1..22: mol_type = other DNA
agatttagctatcttttcaaag

SEQ ID NO: 47451 - DNA, 22 bp, synthetic construct
  misc_feature 1..22: note = chemically synthesized
  source 1..22: mol_type = other DNA
agctatcttttcaaagaaaata

SEQ ID NO: 47452 - DNA, 22 bp, synthetic construct
  misc_feature 1..22: note = chemically synthesized
  source 1..22: mol_type = other DNA
gctatcttttcaaagaaaatat

SEQ ID NO: 47453 - DNA, 22 bp, synthetic construct
  misc_feature 1..22: note = chemically synthesized
  source 1..22: mol_type = other DNA
tcttttcaaagaaaatataaaa

SEQ ID NO: 47454 - DNA, 22 bp, synthetic construct
  misc_feature 1..22: note = chemically synthesized
  source 1..22: mol_type = other DNA
ttcaaagaaaatataaaatttg

SEQ ID NO: 47455 - DNA, 22 bp, synthetic construct
  misc_feature 1..22: note = chemically synthesized
  source 1..22: mol_type = other DNA
tcaaagaaaatataaaatttgg

SEQ ID NO: 47456 - DNA, 22 bp, synthetic construct
  misc_feature 1..22: note = chemically synthesized
  source 1..22: mol_type = other DNA
caaagaaaatataaaatttggc

SEQ ID NO: 47457 - DNA, 22 bp, synthetic construct
  misc_feature 1..22: note = chemically synthesized
  source 1..22: mol_type = other DNA
aaagaaaatataaaatttggcc

SEQ ID NO: 47458 - DNA, 22 bp, synthetic construct
  misc_feature 1..22: note = chemically synthesized
  source 1..22: mol_type = other DNA
ggcccagttttttatctatcaa

SEQ ID NO: 47459 - DNA, 22 bp, synthetic construct
  misc_feature 1..22: note = chemically synthesized
  source 1..22: mol_type = other DNA
gcccagttttttatctatcaaa

SEQ ID NO: 47460 - DNA, 22 bp, synthetic construct
  misc_feature 1..22: note = chemically synthesized
  source 1..22: mol_type = other DNA
tttatctatcaaacctagacct

SEQ ID NO: 47461 - DNA, 22 bp, synthetic construct
  misc_feature 1..22: note = chemically synthesized
  source 1..22: mol_type = other DNA
ttatctatcaaacctagaccta

SEQ ID NO: 47462 - DNA, 22 bp, synthetic construct
  misc_feature 1..22: note = chemically synthesized
  source 1..22: mol_type = other DNA
tatctatcaaacctagacctaa

SEQ ID NO: 47463 - DNA, 22 bp, synthetic construct
  misc_feature 1..22: note = chemically synthesized
  source 1..22: mol_type = other DNA
atctatcaaacctagacctaaa

SEQ ID NO: 47464 - DNA, 22 bp, synthetic construct
  misc_feature 1..22: note = chemically synthesized
  source 1..22: mol_type = other DNA
tctatcaaacctagacctaaaa

SEQ ID NO: 47465 - DNA, 22 bp, synthetic construct
  misc_feature 1..22: note = chemically synthesized
  source 1..22: mol_type = other DNA
tcaaacctagacctaaaatcat

SEQ ID NO: 47466 - DNA, 22 bp, synthetic construct
  misc_feature 1..22: note = chemically synthesized
  source 1..22: mol_type = other DNA
gacctaaaatcatcttgtctca

SEQ ID NO: 47467 - DNA, 22 bp, synthetic construct
  misc_feature 1..22: note = chemically synthesized
  source 1..22: mol_type = other DNA
aaatcatcttgtctcattccct

SEQ ID NO: 47468 - DNA, 22 bp, synthetic construct
  misc_feature 1..22: note = chemically synthesized
  source 1..22: mol_type = other DNA
gtctcattccctctgtcaacat

SEQ ID NO: 47469 - DNA, 22 bp, synthetic construct
  misc_feature 1..22: note = chemically synthesized
  source 1..22: mol_type = other DNA
tctcattccctctgtcaacatc

SEQ ID NO: 47470 - DNA, 22 bp, synthetic construct
  misc_feature 1..22: note = chemically synthesized
  source 1..22: mol_type = other DNA
attccctctgtcaacatctgct

SEQ ID NO: 47471 - DNA, 22 bp, synthetic construct
  misc_feature 1..22: note = chemically synthesized
  source 1..22: mol_type = other DNA
cctctgtcaacatctgctgagc

SEQ ID NO: 47472 - DNA, 22 bp, synthetic construct
  misc_feature 1..22: note = chemically synthesized
  source 1..22: mol_type = other DNA
tgtcaacatctgctgagctctc

SEQ ID NO: 47473 - DNA, 22 bp, synthetic construct
  misc_feature 1..22: note = chemically synthesized
  source 1..22: mol_type = other DNA
tcaacatctgctgagctctcat

SEQ ID NO: 47474 - DNA, 22 bp, synthetic construct
  misc_feature 1..22: note = chemically synthesized
  source 1..22: mol_type = other DNA
ctgagctctcataatacataaa

SEQ ID NO: 47475 - DNA, 22 bp, synthetic construct
  misc_feature 1..22: note = chemically synthesized
  source 1..22: mol_type = other DNA
agctctcataatacataaaaca

SEQ ID NO: 47476 - DNA, 22 bp, synthetic construct
  misc_feature 1..22: note = chemically synthesized
  source 1..22: mol_type = other DNA
tcataatacataaaacatcata

SEQ ID NO: 47477 - DNA, 22 bp, synthetic construct
  misc_feature 1..22: note = chemically synthesized
  source 1..22: mol_type = other DNA
ataatacataaaacatcataga

SEQ ID NO: 47478 - DNA, 22 bp, synthetic construct
  misc_feature 1..22: note = chemically synthesized
  source 1..22: mol_type = other DNA
gacctaccgttccataccagtg

SEQ ID NO: 47479 - DNA, 22 bp, synthetic construct
  misc_feature 1..22: note = chemically synthesized
  source 1..22: mol_type = other DNA
ccgttccataccagtgtgttac

SEQ ID NO: 47480 - DNA, 22 bp, synthetic construct
  misc_feature 1..22: note = chemically synthesized
  source 1..22: mol_type = other DNA
cataccagtgtgttacagcctg

SEQ ID NO: 47481 - DNA, 22 bp, synthetic construct
  misc_feature 1..22: note = chemically synthesized
  source 1..22: mol_type = other DNA
cagcctgtcatgaagcagactc

SEQ ID NO: 47482 - DNA, 22 bp, synthetic construct
  misc_feature 1..22: note = chemically synthesized
  source 1..22: mol_type = other DNA
tcatgaagcagactcagagaat

SEQ ID NO: 47483 - DNA, 22 bp, synthetic construct
  misc_feature 1..22: note = chemically synthesized
  source 1..22: mol_type = other DNA
agagaatttggctactacttag

SEQ ID NO: 47484 - DNA, 22 bp, synthetic construct
  misc_feature 1..22: note = chemically synthesized
  source 1..22: mol_type = other DNA
ggctactacttagtactaacat

SEQ ID NO: 47485 - DNA, 22 bp, synthetic construct
  misc_feature 1..22: note = chemically synthesized
  source 1..22: mol_type = other DNA
gctactacttagtactaacatt

SEQ ID NO: 47486 - DNA, 22 bp, synthetic construct
  misc_feature 1..22: note = chemically synthesized
  source 1..22: mol_type = other DNA
ctacttagtactaacatttaat

SEQ ID NO: 47487 - DNA, 22 bp, synthetic construct
  misc_feature 1..22: note = chemically synthesized
  source 1..22: mol_type = other DNA
cttagtactaacatttaattta

SEQ ID NO: 47488 - DNA, 22 bp, synthetic construct
  misc_feature 1..22: note = chemically synthesized
  source 1..22: mol_type = other DNA
agtactaacatttaatttagtt

SEQ ID NO: 47489 - DNA, 22 bp, synthetic construct
  misc_feature 1..22: note = chemically synthesized
  source 1..22: mol_type = other DNA
gtactaacatttaatttagttt

SEQ ID NO: 47490 - DNA, 22 bp, synthetic construct
  misc_feature 1..22: note = chemically synthesized
  source 1..22: mol_type = other DNA
acatttaatttagttttaaaat

SEQ ID NO: 47491 - DNA, 22 bp, synthetic construct
  misc_feature 1..22: note = chemically synthesized
  source 1..22: mol_type = other DNA
aatttagttttaaaatgtctgc

SEQ ID NO: 47492 - DNA, 22 bp, synthetic construct
  misc_feature 1..22: note = chemically synthesized
  source 1..22: mol_type = other DNA
atttagttttaaaatgtctgcg

SEQ ID NO: 47493 - DNA, 22 bp, synthetic construct
  misc_feature 1..22: note = chemically synthesized
  source 1..22: mol_type = other DNA
agttttaaaatgtctgcgatag

SEQ ID NO: 47494 - DNA, 22 bp, synthetic construct
  misc_feature 1..22: note = chemically synthesized
  source 1..22: mol_type = other DNA
gttttaaaatgtctgcgataga

SEQ ID NO: 47495 - DNA, 22 bp, synthetic construct
  misc_feature 1..22: note = chemically synthesized
  source 1..22: mol_type = other DNA
taaaatgtctgcgatagagcag

SEQ ID NO: 47496 - DNA, 22 bp, synthetic construct
  misc_feature 1..22: note = chemically synthesized
  source 1..22: mol_type = other DNA
aaaatgtctgcgatagagcaga

SEQ ID NO: 47497 - DNA, 22 bp, synthetic construct
  misc_feature 1..22: note = chemically synthesized
  source 1..22: mol_type = other DNA
aaatgtctgcgatagagcagat

SEQ ID NO: 47498 - DNA, 22 bp, synthetic construct
  misc_feature 1..22: note = chemically synthesized
  source 1..22: mol_type = other DNA
cgatagagcagattcaggatta

SEQ ID NO: 47499 - DNA, 22 bp, synthetic construct
  misc_feature 1..22: note = chemically synthesized
  source 1..22: mol_type = other DNA
aggattatgcctgtaagatgac

SEQ ID NO: 47500 - DNA, 22 bp, synthetic construct
  misc_feature 1..22: note = chemically synthesized
  source 1..22: mol_type = other DNA
tgcctgtaagatgacattccaa

SEQ ID NO: 47501 - DNA, 22 bp, synthetic construct
  misc_feature 1..22: note = chemically synthesized
  source 1..22: mol_type = other DNA
taagatgacattccaactcacc

SEQ ID NO: 47502 - DNA, 22 bp, synthetic construct
  misc_feature 1..22: note = chemically synthesized
  source 1..22: mol_type = other DNA
caactcacctgcatttaaatat

SEQ ID NO: 47503 - DNA, 22 bp, synthetic construct
  misc_feature 1..22: note = chemically synthesized
  source 1..22: mol_type = other DNA
acctgcatttaaatatgaataa

SEQ ID NO: 47504 - DNA, 22 bp, synthetic construct
  misc_feature 1..22: note = chemically synthesized
  source 1..22: mol_type = other DNA
catttaaatatgaataaagagt

SEQ ID NO: 47505 - DNA, 22 bp, synthetic construct
  misc_feature 1..22: note = chemically synthesized
  source 1..22: mol_type = other DNA
aaatatgaataaagagtgagca

SEQ ID NO: 47506 - DNA, 22 bp, synthetic construct
  misc_feature 1..22: note = chemically synthesized
  source 1..22: mol_type = other DNA
aatatgaataaagagtgagcag

SEQ ID NO: 47507 - DNA, 22 bp, synthetic construct
  misc_feature 1..22: note = chemically synthesized
  source 1..22: mol_type = other DNA
tagcttcccacacgcaaaggca

SEQ ID NO: 47508 - DNA, 22 bp, synthetic construct
  misc_feature 1..22: note = chemically synthesized
  source 1..22: mol_type = other DNA
agcttcccacacgcaaaggcat

SEQ ID NO: 47509 - DNA, 22 bp, synthetic construct
  misc_feature 1..22: note = chemically synthesized
  source 1..22: mol_type = other DNA
gcttcccacacgcaaaggcatg

SEQ ID NO: 47510 - DNA, 22 bp, synthetic construct
  misc_feature 1..22: note = chemically synthesized
  source 1..22: mol_type = other DNA
cccacacgcaaaggcatggggg

SEQ ID NO: 47511 - DNA, 22 bp, synthetic construct
  misc_feature 1..22: note = chemically synthesized
  source 1..22: mol_type = other DNA
ccacacgcaaaggcatgggggg

SEQ ID NO: 47512 - DNA, 22 bp, synthetic construct
  misc_feature 1..22: note = chemically synthesized
  source 1..22: mol_type = other DNA
ctctagatctgagaatcaccac

SEQ ID NO: 47513 - DNA, 22 bp, synthetic construct
  misc_feature 1..22: note = chemically synthesized
  source 1..22: mol_type = other DNA
tagatctgagaatcaccacaca

SEQ ID NO: 47514 - DNA, 22 bp, synthetic construct
  misc_feature 1..22: note = chemically synthesized
  source 1..22: mol_type = other DNA
gatctgagaatcaccacacacc

SEQ ID NO: 47515 - DNA, 22 bp, synthetic construct
  misc_feature 1..22: note = chemically synthesized
  source 1..22: mol_type = other DNA
agaatcaccacacaccagagag

SEQ ID NO: 47516 - DNA, 22 bp, synthetic construct
  misc_feature 1..22: note = chemically synthesized
  source 1..22: mol_type = other DNA
agaaagagttttaagagcctac

SEQ ID NO: 47517 - DNA, 22 bp, synthetic construct
  misc_feature 1..22: note = chemically synthesized
  source 1..22: mol_type = other DNA
taagagcctactcatcatcaga

SEQ ID NO: 47518 - DNA, 22 bp, synthetic construct
  misc_feature 1..22: note = chemically synthesized
  source 1..22: mol_type = other DNA
aagagcctactcatcatcagag

SEQ ID NO: 47519 - DNA, 22 bp, synthetic construct
  misc_feature 1..22: note = chemically synthesized
  source 1..22: mol_type = other DNA
agagcctactcatcatcagagt

SEQ ID NO: 47520 - DNA, 22 bp, synthetic construct
  misc_feature 1..22: note = chemically synthesized
  source 1..22: mol_type = other DNA
ctcatcatcagagttcacttaa

SEQ ID NO: 47521 - DNA, 22 bp, synthetic construct
  misc_feature 1..22: note = chemically synthesized
  source 1..22: mol_type = other DNA
atcatcagagttcacttaaaag

SEQ ID NO: 47522 - DNA, 22 bp, synthetic construct
  misc_feature 1..22: note = chemically synthesized
  source 1..22: mol_type = other DNA
acttaaaagtccatccagaatc

SEQ ID NO: 47523 - DNA, 22 bp, synthetic construct
  misc_feature 1..22: note = chemically synthesized
  source 1..22: mol_type = other DNA
aaaagtccatccagaatcagaa

SEQ ID NO: 47524 - DNA, 22 bp, synthetic construct
  misc_feature 1..22: note = chemically synthesized
  source 1..22: mol_type = other DNA
aaagtccatccagaatcagaac

SEQ ID NO: 47525 - DNA, 22 bp, synthetic construct
  misc_feature 1..22: note = chemically synthesized
  source 1..22: mol_type = other DNA
ctgggggccgggcgtggatttt

SEQ ID NO: 47526 - DNA, 22 bp, synthetic construct
  misc_feature 1..22: note = chemically synthesized
  source 1..22: mol_type = other DNA
ggggccgggcgtggattttaag

SEQ ID NO: 47527 - DNA, 22 bp, synthetic construct
  misc_feature 1..22: note = chemically synthesized
  source 1..22: mol_type = other DNA
taaggactcatcaattactgtt

SEQ ID NO: 47528 - DNA, 22 bp, synthetic construct
  misc_feature 1..22: note = chemically synthesized
  source 1..22: mol_type = other DNA
aaggactcatcaattactgttc

SEQ ID NO: 47529 - DNA, 22 bp, synthetic construct
  misc_feature 1..22: note = chemically synthesized
  source 1..22: mol_type = other DNA
aggactcatcaattactgttca

SEQ ID NO: 47530 - DNA, 22 bp, synthetic construct
  misc_feature 1..22: note = chemically synthesized
  source 1..22: mol_type = other DNA
atcaattactgttcaagttcag

SEQ ID NO: 47531 - DNA, 22 bp, synthetic construct
  misc_feature 1..22: note = chemically synthesized
  source 1..22: mol_type = other DNA
ctgttcaagttcaggtcaagct

SEQ ID NO: 47532 - DNA, 22 bp, synthetic construct
  misc_feature 1..22: note = chemically synthesized
  source 1..22: mol_type = other DNA
ttcaagttcaggtcaagctgga

SEQ ID NO: 47533 - DNA, 22 bp, synthetic construct
  misc_feature 1..22: note = chemically synthesized
  source 1..22: mol_type = other DNA
aagttcaggtcaagctggatgg

SEQ ID NO: 47534 - DNA, 22 bp, synthetic construct
  misc_feature 1..22: note = chemically synthesized
  source 1..22: mol_type = other DNA
aggtcaagctggatggacacca

SEQ ID NO: 47535 - DNA, 22 bp, synthetic construct
  misc_feature 1..22: note = chemically synthesized
  source 1..22: mol_type = other DNA
gatggacaccatccacatggtg

SEQ ID NO: 47536 - DNA, 22 bp, synthetic construct
  misc_feature 1..22: note = chemically synthesized
  source 1..22: mol_type = other DNA
ctcgatgggcaaagatcaagag

SEQ ID NO: 47537 - DNA, 22 bp, synthetic construct
  misc_feature 1..22: note = chemically synthesized
  source 1..22: mol_type = other DNA
gatgggcaaagatcaagaggca

SEQ ID NO: 47538 - DNA, 22 bp, synthetic construct
  misc_feature 1..22: note = chemically synthesized
  source 1..22: mol_type = other DNA
accaccagccgtatttcctggg

SEQ ID NO: 47539 - DNA, 22 bp, synthetic construct
  misc_feature 1..22: note = chemically synthesized
  source 1..22: mol_type = other DNA
cctggggctgcttgttactgac

SEQ ID NO: 47540 - DNA, 22 bp, synthetic construct
  misc_feature 1..22: note = chemically synthesized
  source 1..22: mol_type = other DNA
ctggggctgcttgttactgaca

SEQ ID NO: 47541 - DNA, 22 bp, synthetic construct
  misc_feature 1..22: note = chemically synthesized
  source 1..22: mol_type = other DNA
gggctgcttgttactgacattc

SEQ ID NO: 47542 - DNA, 22 bp, synthetic construct
  misc_feature 1..22: note = chemically synthesized
  source 1..22: mol_type = other DNA
cttgttactgacattctgtcat

SEQ ID NO: 47543 - DNA, 22 bp, synthetic construct
  misc_feature 1..22: note = chemically synthesized
  source 1..22: mol_type = other DNA
gttactgacattctgtcattca

SEQ ID NO: 47544 - DNA, 22 bp, synthetic construct
  misc_feature 1..22: note = chemically synthesized
  source 1..22: mol_type = other DNA
ttactgacattctgtcattcaa

SEQ ID NO: 47545 - DNA, 22 bp, synthetic construct
  misc_feature 1..22: note = chemically synthesized
  source 1..22: mol_type = other DNA
ctgacattctgtcattcaaggt

SEQ ID NO: 47546 - DNA, 22 bp, synthetic construct
  misc_feature 1..22: note = chemically synthesized
  source 1..22: mol_type = other DNA
acattctgtcattcaaggtggg

SEQ ID NO: 47547 - DNA, 22 bp, synthetic construct
  misc_feature 1..22: note = chemically synthesized
  source 1..22: mol_type = other DNA
tgtcattcaaggtgggtcctga

SEQ ID NO: 47548 - DNA, 22 bp, synthetic construct
  misc_feature 1..22: note = chemically synthesized
  source 1..22: mol_type = other DNA
tcattcaaggtgggtcctgaag

SEQ ID NO: 47549 - DNA, 22 bp, synthetic construct
  misc_feature 1..22: note = chemically synthesized
  source 1..22: mol_type = other DNA
aaggtgggtcctgaagccacag

SEQ ID NO: 47550 - DNA, 22 bp, synthetic construct
  misc_feature 1..22: note = chemically synthesized
  source 1..22: mol_type = other DNA
aagccacagtaagcaccaaatc

SEQ ID NO: 47551 - DNA, 22 bp, synthetic construct
  misc_feature 1..22: note = chemically synthesized
  source 1..22: mol_type = other DNA
ctccctacaatccacagcaaaa

SEQ ID NO: 47552 - DNA, 22 bp, synthetic construct
  misc_feature 1..22: note = chemically synthesized
  source 1..22: mol_type = other DNA
cctacaatccacagcaaaagga

SEQ ID NO: 47553 - DNA, 22 bp, synthetic construct
  misc_feature 1..22: note = chemically synthesized
  source 1..22: mol_type = other DNA
caatccacagcaaaaggagagt

SEQ ID NO: 47554 - DNA, 22 bp, synthetic construct
  misc_feature 1..22: note = chemically synthesized
  source 1..22: mol_type = other DNA
cttcttttaaagagcgatggca

SEQ ID NO: 47555 - DNA, 22 bp, synthetic construct
  misc_feature 1..22: note = chemically synthesized
  source 1..22: mol_type = other DNA
cttttaaagagcgatggcacac

SEQ ID NO: 47556 - DNA, 22 bp, synthetic construct
  misc_feature 1..22: note = chemically synthesized
  source 1..22: mol_type = other DNA
ttttaaagagcgatggcacaca

SEQ ID NO: 47557 - DNA, 22 bp, synthetic construct
  misc_feature 1..22: note = chemically synthesized
  source 1..22: mol_type = other DNA
ttaaagagcgatggcacacatc

SEQ ID NO: 47558 - DNA, 22 bp, synthetic construct
  misc_feature 1..22: note = chemically synthesized
  source 1..22: mol_type = other DNA
taaagagcgatggcacacatct

SEQ ID NO: 47559 - DNA, 22 bp, synthetic construct
  misc_feature 1..22: note = chemically synthesized
  source 1..22: mol_type = other DNA
aaagagcgatggcacacatctc

SEQ ID NO: 47560 - DNA, 22 bp, synthetic construct
  misc_feature 1..22: note = chemically synthesized
  source 1..22: mol_type = other DNA
aagagcgatggcacacatctct

SEQ ID NO: 47561 - DNA, 22 bp, synthetic construct
  misc_feature 1..22: note = chemically synthesized
  source 1..22: mol_type = other DNA
tcaactcttgagagaaaatgga

SEQ ID NO: 47562 - DNA, 22 bp, synthetic construct
  misc_feature 1..22: note = chemically synthesized
  source 1..22: mol_type = other DNA
aactcttgagagaaaatggaca

SEQ ID NO: 47563 - DNA, 22 bp, synthetic construct
  misc_feature 1..22: note = chemically synthesized
  source 1..22: mol_type = other DNA
ttgagagaaaatggacagaagt

SEQ ID NO: 47564 - DNA, 22 bp, synthetic construct
  misc_feature 1..22: note = chemically synthesized
  source 1..22: mol_type = other DNA
gagagaaaatggacagaagtgg

SEQ ID NO: 47565 - DNA, 22 bp, synthetic construct
  misc_feature 1..22: note = chemically synthesized
  source 1..22: mol_type = other DNA
agagaaaatggacagaagtggg

SEQ ID NO: 47566 - DNA, 22 bp, synthetic construct
  misc_feature 1..22: note = chemically synthesized
  source 1..22: mol_type = other DNA
ttcaatcctgataccagcagga

SEQ ID NO: 47567 - DNA, 22 bp, synthetic construct
  misc_feature 1..22: note = chemically synthesized
  source 1..22: mol_type = other DNA
tcaatcctgataccagcaggaa

SEQ ID NO: 47568 - DNA, 22 bp, synthetic construct
  misc_feature 1..22: note = chemically synthesized
  source 1..22: mol_type = other DNA
caatcctgataccagcaggaaa

SEQ ID NO: 47569 - DNA, 22 bp, synthetic construct
  misc_feature 1..22: note = chemically synthesized
  source 1..22: mol_type = other DNA
aatcctgataccagcaggaaac

SEQ ID NO: 47570 - DNA, 22 bp, synthetic construct
  misc_feature 1..22: note = chemically synthesized
  source 1..22: mol_type = other DNA
ataccagcaggaaacagggagt

SEQ ID NO: 47571 - DNA, 22 bp, synthetic construct
  misc_feature 1..22: note = chemically synthesized
  source 1..22: mol_type = other DNA
tggtaggtactaccaaaccaag

SEQ ID NO: 47572 - DNA, 22 bp, synthetic construct
  misc_feature 1..22: note = chemically synthesized
  source 1..22: mol_type = other DNA
gtaggtactaccaaaccaagaa

SEQ ID NO: 47573 - DNA, 22 bp, synthetic construct
  misc_feature 1..22: note = chemically synthesized
  source 1..22: mol_type = other DNA
ccaaaccaagaagcttcttttc

SEQ ID NO: 47574 - DNA, 22 bp, synthetic construct
  misc_feature 1..22: note = chemically synthesized
  source 1..22: mol_type = other DNA
cttttctcccaagtacaccagg

SEQ ID NO: 47575 - DNA, 22 bp, synthetic construct
  misc_feature 1..22: note = chemically synthesized
  source 1..22: mol_type = other DNA
ttttctcccaagtacaccagga

SEQ ID NO: 47576 - DNA, 22 bp, synthetic construct
  misc_feature 1..22: note = chemically synthesized
  source 1..22: mol_type = other DNA
ttctcccaagtacaccaggaac

SEQ ID NO: 47577 - DNA, 22 bp, synthetic construct
  misc_feature 1..22: note = chemically synthesized
  source 1..22: mol_type = other DNA
tctcccaagtacaccaggaacc

SEQ ID NO: 47578 - DNA, 22 bp, synthetic construct
  misc_feature 1..22: note = chemically synthesized
  source 1..22: mol_type = other DNA
ctcccaagtacaccaggaaccc

SEQ ID NO: 47579 - DNA, 22 bp, synthetic construct
  misc_feature 1..22: note = chemically synthesized
  source 1..22: mol_type = other DNA
tcccaagtacaccaggaacccc

SEQ ID NO: 47580 - DNA, 22 bp, synthetic construct
  misc_feature 1..22: note = chemically synthesized
  source 1..22: mol_type = other DNA
ccaagtacaccaggaacccctt

SEQ ID NO: 47581 - DNA, 22 bp, synthetic construct
  misc_feature 1..22: note = chemically synthesized
  source 1..22: mol_type = other DNA
tcaaatacaggcgctacaaaaa

SEQ ID NO: 47582 - DNA, 22 bp, synthetic construct
  misc_feature 1..22: note = chemically synthesized
  source 1..22: mol_type = other DNA
caaatacaggcgctacaaaaaa

SEQ ID NO: 47583 - DNA, 22 bp, synthetic construct
  misc_feature 1..22: note = chemically synthesized
  source 1..22: mol_type = other DNA
aaatacaggcgctacaaaaaaa

SEQ ID NO: 47584 - DNA, 22 bp, synthetic construct
  misc_feature 1..22: note = chemically synthesized
  source 1..22: mol_type = other DNA
caaaaaaagaaataggtgtgaa

SEQ ID NO: 47585 - DNA, 22 bp, synthetic construct
  misc_feature 1..22: note = chemically synthesized
  source 1..22: mol_type = other DNA
aggactatgcatgctctgtcta

SEQ ID NO: 47586 - DNA, 22 bp, synthetic construct
  misc_feature 1..22: note = chemically synthesized
  source 1..22: mol_type = other DNA
tgcatgctctgtctatgggtat

SEQ ID NO: 47587 - DNA, 22 bp, synthetic construct
  misc_feature 1..22: note = chemically synthesized
  source 1..22: mol_type = other DNA
tgtctatgggtatcaacacctt

SEQ ID NO: 47588 - DNA, 22 bp, synthetic construct
  misc_feature 1..22: note = chemically synthesized
  source 1..22: mol_type = other DNA
tctatgggtatcaacaccttta

SEQ ID NO: 47589 - DNA, 22 bp, synthetic construct
  misc_feature 1..22: note = chemically synthesized
  source 1..22: mol_type = other DNA
tgggtatcaacacctttaaggc

SEQ ID NO: 47590 - DNA, 22 bp, synthetic construct
  misc_feature 1..22: note = chemically synthesized
  source 1..22: mol_type = other DNA
taaggcattttgcggtcttttt

SEQ ID NO: 47591 - DNA, 22 bp, synthetic construct
  misc_feature 1..22: note = chemically synthesized
  source 1..22: mol_type = other DNA
aaggcattttgcggtctttttg

SEQ ID NO: 47592 - DNA, 22 bp, synthetic construct
  misc_feature 1..22: note = chemically synthesized
  source 1..22: mol_type = other DNA
aggcattttgcggtctttttga

SEQ ID NO: 47593 - DNA, 22 bp, synthetic construct
  misc_feature 1..22: note = chemically synthesized
  source 1..22: mol_type = other DNA
tgcggtctttttgattctataa

SEQ ID NO: 47594 - DNA, 22 bp, synthetic construct
  misc_feature 1..22: note = chemically synthesized
  source 1..22: mol_type = other DNA
gcggtctttttgattctataac

SEQ ID NO: 47595 - DNA, 22 bp, synthetic construct
  misc_feature 1..22: note = chemically synthesized
  source 1..22: mol_type = other DNA
cggtctttttgattctataacc

SEQ ID NO: 47596 - DNA, 22 bp, synthetic construct
  misc_feature 1..22: note = chemically synthesized
  source 1..22: mol_type = other DNA
tttgattctataacctccatat

SEQ ID NO: 47597 - DNA, 22 bp, synthetic construct
  misc_feature 1..22: note = chemically synthesized
  source 1..22: mol_type = other DNA
ttgattctataacctccatatt

SEQ ID NO: 47598 - DNA, 22 bp, synthetic construct
  misc_feature 1..22: note = chemically synthesized
  source 1..22: mol_type = other DNA
tgattctataacctccatattg

SEQ ID NO: 47599 - DNA, 22 bp, synthetic construct
  misc_feature 1..22: note = chemically synthesized
  source 1..22: mol_type = other DNA
gattctataacctccatattga

SEQ ID NO: 47600 - DNA, 22 bp, synthetic construct
  misc_feature 1..22: note = chemically synthesized
  source 1..22: mol_type = other DNA
attctataacctccatattgag

SEQ ID NO: 47601 - DNA, 22 bp, synthetic construct
  misc_feature 1..22: note = chemically synthesized
  source 1..22: mol_type = other DNA
tataacctccatattgagagac

SEQ ID NO: 47602 - DNA, 22 bp, synthetic construct
  misc_feature 1..22: note = chemically synthesized
  source 1..22: mol_type = other DNA
taacctccatattgagagacat

SEQ ID NO: 47603 - DNA, 22 bp, synthetic construct
  misc_feature 1..22: note = chemically synthesized
  source 1..22: mol_type = other DNA
catattgagagacataaaacac

SEQ ID NO: 47604 - DNA, 22 bp, synthetic construct
  misc_feature 1..22: note = chemically synthesized
  source 1..22: mol_type = other DNA
agagacataaaacacagaacat

SEQ ID NO: 47605 - DNA, 22 bp, synthetic construct
  misc_feature 1..22: note = chemically synthesized
  source 1..22: mol_type = other DNA
cacctgtcaggtgctgggccct

SEQ ID NO: 47606 - DNA, 22 bp, synthetic construct
  misc_feature 1..22: note = chemically synthesized
  source 1..22: mol_type = other DNA
tcaggtgctgggccctgaacta

SEQ ID NO: 47607 - DNA, 22 bp, synthetic construct
  misc_feature 1..22: note = chemically synthesized
  source 1..22: mol_type = other DNA
ggccctgaactatctccaggca

SEQ ID NO: 47608 - DNA, 22 bp, synthetic construct
  misc_feature 1..22: note = chemically synthesized
  source 1..22: mol_type = other DNA
aactatctccaggcagctgaaa

SEQ ID NO: 47609 - DNA, 22 bp, synthetic construct
  misc_feature 1..22: note = chemically synthesized
  source 1..22: mol_type = other DNA
tctccaggcagctgaaagtcag

SEQ ID NO: 47610 - DNA, 22 bp, synthetic construct
  misc_feature 1..22: note = chemically synthesized
  source 1..22: mol_type = other DNA
caggcagctgaaagtcagtaca

SEQ ID NO: 47611 - DNA, 22 bp, synthetic construct
  misc_feature 1..22: note = chemically synthesized
  source 1..22: mol_type = other DNA
aaagtcagtacatcagcttttt

SEQ ID NO: 47612 - DNA, 22 bp, synthetic construct
  misc_feature 1..22: note = chemically synthesized
  source 1..22: mol_type = other DNA
tttaatgatgtgaaagttaaag

SEQ ID NO: 47613 - DNA, 22 bp, synthetic construct
  misc_feature 1..22: note = chemically synthesized
  source 1..22: mol_type = other DNA
ttaatgatgtgaaagttaaaga

SEQ ID NO: 47614 - DNA, 22 bp, synthetic construct
  misc_feature 1..22: note = chemically synthesized
  source 1..22: mol_type = other DNA
taatgatgtgaaagttaaagat

SEQ ID NO: 47615 - DNA, 22 bp, synthetic construct
  misc_feature 1..22: note = chemically synthesized
  source 1..22: mol_type = other DNA
aatgatgtgaaagttaaagatt

SEQ ID NO: 47616 - DNA, 22 bp, synthetic construct
  misc_feature 1..22: note = chemically synthesized
  source 1..22: mol_type = other DNA
atgatgtgaaagttaaagatta

SEQ ID NO: 47617 - DNA, 22 bp, synthetic construct
  misc_feature 1..22: note = chemically synthesized
  source 1..22: mol_type = other DNA
aagattaaaaacatgttggaac

SEQ ID NO: 47618 - DNA, 22 bp, synthetic construct
  misc_feature 1..22: note = chemically synthesized
  source 1..22: mol_type = other DNA
aaaacatgttggaacgcttact

SEQ ID NO: 47619 - DNA, 22 bp, synthetic construct
  misc_feature 1..22: note = chemically synthesized
  source 1..22: mol_type = other DNA
gaacgcttactttatgcagtgc

SEQ ID NO: 47620 - DNA, 22 bp, synthetic construct
  misc_feature 1..22: note = chemically synthesized
  source 1..22: mol_type = other DNA
actttatgcagtgccaaaaatg

SEQ ID NO: 47621 - DNA, 22 bp, synthetic construct
  misc_feature 1..22: note = chemically synthesized
  source 1..22: mol_type = other DNA
ctttatgcagtgccaaaaatgt

SEQ ID NO: 47622 - DNA, 22 bp, synthetic construct
  misc_feature 1..22: note = chemically synthesized
  source 1..22: mol_type = other DNA
tatgcagtgccaaaaatgtgtc

SEQ ID NO: 47623 - DNA, 22 bp, synthetic construct
  misc_feature 1..22: note = chemically synthesized
  source 1..22: mol_type = other DNA
atgcagtgccaaaaatgtgtct

SEQ ID NO: 47624 - DNA, 22 bp, synthetic construct
  misc_feature 1..22: note = chemically synthesized
  source 1..22: mol_type = other DNA
tgcagtgccaaaaatgtgtcta

SEQ ID NO: 47625 - DNA, 22 bp, synthetic construct
  misc_feature 1..22: note = chemically synthesized
  source 1..22: mol_type = other DNA
taacctgtaaggagagatgggt

SEQ ID NO: 47626 - DNA, 22 bp, synthetic construct
  misc_feature 1..22: note = chemically synthesized
  source 1..22: mol_type = other DNA
taaggagagatgggtgtggaac

SEQ ID NO: 47627 - DNA, 22 bp, synthetic construct
  misc_feature 1..22: note = chemically synthesized
  source 1..22: mol_type = other DNA
cactcatgctgcagagaaaaaa

SEQ ID NO: 47628 - DNA, 22 bp, synthetic construct
  misc_feature 1..22: note = chemically synthesized
  source 1..22: mol_type = other DNA
atgctgcagagaaaaaataagg

SEQ ID NO: 47629 - DNA, 22 bp, synthetic construct
  misc_feature 1..22: note = chemically synthesized
  source 1..22: mol_type = other DNA
cagagaaaaaataaggtcctca

SEQ ID NO: 47630 - DNA, 22 bp, synthetic construct
  misc_feature 1..22: note = chemically synthesized
  source 1..22: mol_type = other DNA
acttgcctgcctgcctgcctgc

SEQ ID NO: 47631 - DNA, 22 bp, synthetic construct
  misc_feature 1..22: note = chemically synthesized
  source 1..22: mol_type = other DNA
gcctgcctgcctgcctgcctgc

SEQ ID NO: 47632 - DNA, 22 bp, synthetic construct
  misc_feature 1..22: note = chemically synthesized
  source 1..22: mol_type = other DNA
cctgcctgcctgcctgcctgcc

SEQ ID NO: 47633 - DNA, 22 bp, synthetic construct
  misc_feature 1..22: note = chemically synthesized
  source 1..22: mol_type = other DNA
cctgcctgcctgcctgcctgcc

SEQ ID NO: 47634 - DNA, 22 bp, synthetic construct
  misc_feature 1..22: note = chemically synthesized
  source 1..22: mol_type = other DNA
cctgcctgcctgcctgcctgcc

SEQ ID NO: 47635 - DNA, 22 bp, synthetic construct
  misc_feature 1..22: note = chemically synthesized
  source 1..22: mol_type = other DNA
cctgcctgcctgcctgcctgcc

SEQ ID NO: 47636 - DNA, 22 bp, synthetic construct
  misc_feature 1..22: note = chemically synthesized
  source 1..22: mol_type = other DNA
cctgcctgcctgcctgcctgcc

SEQ ID NO: 47637 - DNA, 22 bp, synthetic construct
  misc_feature 1..22: note = chemically synthesized
  source 1..22: mol_type = other DNA
cctgcctgcctgcctgcctgcc

SEQ ID NO: 47638 - DNA, 22 bp, synthetic construct
  misc_feature 1..22: note = chemically synthesized
  source 1..22: mol_type = other DNA
cctgcctgcctgcctgccttct

SEQ ID NO: 47639 - DNA, 22 bp, synthetic construct
  misc_feature 1..22: note = chemically synthesized
  source 1..22: mol_type = other DNA
cctgcctgcctgccttctttcc

SEQ ID NO: 47640 - DNA, 22 bp, synthetic construct
  misc_feature 1..22: note = chemically synthesized
  source 1..22: mol_type = other DNA
cctgcctgccttctttccttac

SEQ ID NO: 47641 - DNA, 22 bp, synthetic construct
  misc_feature 1..22: note = chemically synthesized
  source 1..22: mol_type = other DNA
cctgccttctttccttacaaga

SEQ ID NO: 47642 - DNA, 22 bp, synthetic construct
  misc_feature 1..22: note = chemically synthesized
  source 1..22: mol_type = other DNA
ccttctttccttacaagagaaa

SEQ ID NO: 47643 - DNA, 22 bp, synthetic construct
  misc_feature 1..22: note = chemically synthesized
  source 1..22: mol_type = other DNA
ctttccttacaagagaaatcgc

SEQ ID NO: 47644 - DNA, 22 bp, synthetic construct
  misc_feature 1..22: note = chemically synthesized
  source 1..22: mol_type = other DNA
tttccttacaagagaaatcgct

SEQ ID NO: 47645 - DNA, 22 bp, synthetic construct
  misc_feature 1..22: note = chemically synthesized
  source 1..22: mol_type = other DNA
tccttacaagagaaatcgctcc

SEQ ID NO: 47646 - DNA, 22 bp, synthetic construct
  misc_feature 1..22: note = chemically synthesized
  source 1..22: mol_type = other DNA
ccttacaagagaaatcgctcct

SEQ ID NO: 47647 - DNA, 22 bp, synthetic construct
  misc_feature 1..22: note = chemically synthesized
  source 1..22: mol_type = other DNA
cttacaagagaaatcgctcctg

SEQ ID NO: 47648 - DNA, 22 bp, synthetic construct
  misc_feature 1..22: note = chemically synthesized
  source 1..22: mol_type = other DNA
acaagagaaatcgctcctgaaa

SEQ ID NO: 47649 - DNA, 22 bp, synthetic construct
  misc_feature 1..22: note = chemically synthesized
  source 1..22: mol_type = other DNA
caagagaaatcgctcctgaaat

SEQ ID NO: 47650 - DNA, 22 bp, synthetic construct
  misc_feature 1..22: note = chemically synthesized
  source 1..22: mol_type = other DNA
ctgaaatctgacgtgctttgca

SEQ ID NO: 47651 - DNA, 22 bp, synthetic construct
  misc_feature 1..22: note = chemically synthesized
  source 1..22: mol_type = other DNA
aaatctgacgtgctttgcaaca

SEQ ID NO: 47652 - DNA, 22 bp, synthetic construct
  misc_feature 1..22: note = chemically synthesized
  source 1..22: mol_type = other DNA
acgtgctttgcaacagcagtaa

SEQ ID NO: 47653 - DNA, 22 bp, synthetic construct
  misc_feature 1..22: note = chemically synthesized
  source 1..22: mol_type = other DNA
tgcaacagcagtaagttgacca

SEQ ID NO: 47654 - DNA, 22 bp, synthetic construct
  misc_feature 1..22: note = chemically synthesized
  source 1..22: mol_type = other DNA
gcaacagcagtaagttgaccac

SEQ ID NO: 47655 - DNA, 22 bp, synthetic construct
  misc_feature 1..22: note = chemically synthesized
  source 1..22: mol_type = other DNA
caacagcagtaagttgaccact

SEQ ID NO: 47656 - DNA, 22 bp, synthetic construct
  misc_feature 1..22: note = chemically synthesized
  source 1..22: mol_type = other DNA
accactggagaaagtgaggctg

SEQ ID NO: 47657 - DNA, 22 bp, synthetic construct
  misc_feature 1..22: note = chemically synthesized
  source 1..22: mol_type = other DNA
gagaaagtgaggctggaaccac

SEQ ID NO: 47658 - DNA, 22 bp, synthetic construct
  misc_feature 1..22: note = chemically synthesized
  source 1..22: mol_type = other DNA
gaaccactggaatcttgtagat

SEQ ID NO: 47659 - DNA, 22 bp, synthetic construct
  misc_feature 1..22: note = chemically synthesized
  source 1..22: mol_type = other DNA
gaatcttgtagatttctgaggc

SEQ ID NO: 47660 - DNA, 22 bp, synthetic construct
  misc_feature 1..22: note = chemically synthesized
  source 1..22: mol_type = other DNA
gtagatttctgaggccagttct

SEQ ID NO: 47661 - DNA, 22 bp, synthetic construct
  misc_feature 1..22: note = chemically synthesized
  source 1..22: mol_type = other DNA
tagatttctgaggccagttctg

SEQ ID NO: 47662 - DNA, 22 bp, synthetic construct
  misc_feature 1..22: note = chemically synthesized
  source 1..22: mol_type = other DNA
ctgaggccagttctgttctgac

SEQ ID NO: 47663 - DNA, 22 bp, synthetic construct
  misc_feature 1..22: note = chemically synthesized
  source 1..22: mol_type = other DNA
tgaggccagttctgttctgaca

SEQ ID NO: 47664 - DNA, 22 bp, synthetic construct
  misc_feature 1..22: note = chemically synthesized
  source 1..22: mol_type = other DNA
aggccagttctgttctgacaca

SEQ ID NO: 47665 - DNA, 22 bp, synthetic construct
  misc_feature 1..22: note = chemically synthesized
  source 1..22: mol_type = other DNA
tgttctgacacatgcagctggg

SEQ ID NO: 47666 - DNA, 22 bp, synthetic construct
  misc_feature 1..22: note = chemically synthesized
  source 1..22: mol_type = other DNA
ttctgacacatgcagctgggag

SEQ ID NO: 47667 - DNA, 22 bp, synthetic construct
  misc_feature 1..22: note = chemically synthesized
  source 1..22: mol_type = other DNA
tgacacatgcagctgggagcca

SEQ ID NO: 47668 - DNA, 22 bp, synthetic construct
  misc_feature 1..22: note = chemically synthesized
  source 1..22: mol_type = other DNA
acacatgcagctgggagccact

SEQ ID NO: 47669 - DNA, 22 bp, synthetic construct
  misc_feature 1..22: note = chemically synthesized
  source 1..22: mol_type = other DNA
ggagccactggtttaggaattc

SEQ ID NO: 47670 - DNA, 22 bp, synthetic construct
  misc_feature 1..22: note = chemically synthesized
  source 1..22: mol_type = other DNA
gtttaggaattcacgtgggcat

SEQ ID NO: 47671 - DNA, 22 bp, synthetic construct
  misc_feature 1..22: note = chemically synthesized
  source 1..22: mol_type = other DNA
aggaattcacgtgggcatggga

SEQ ID NO: 47672 - DNA, 22 bp, synthetic construct
  misc_feature 1..22: note = chemically synthesized
  source 1..22: mol_type = other DNA
ggaattcacgtgggcatgggac

SEQ ID NO: 47673 - DNA, 22 bp, synthetic construct
  misc_feature 1..22: note = chemically synthesized
  source 1..22: mol_type = other DNA
acgtgggcatgggactgtgctt

SEQ ID NO: 47674 - DNA, 22 bp, synthetic construct
  misc_feature 1..22: note = chemically synthesized
  source 1..22: mol_type = other DNA
tgcttattcagaaagggctccc

SEQ ID NO: 47675 - DNA, 22 bp, synthetic construct
  misc_feature 1..22: note = chemically synthesized
  source 1..22: mol_type = other DNA
attcagaaagggctcccagtca

SEQ ID NO: 47676 - DNA, 22 bp, synthetic construct
  misc_feature 1..22: note = chemically synthesized
  source 1..22: mol_type = other DNA
ttcagaaagggctcccagtcac

SEQ ID NO: 47677 - DNA, 22 bp, synthetic construct
  misc_feature 1..22: note = chemically synthesized
  source 1..22: mol_type = other DNA
agaaagggctcccagtcacatc

SEQ ID NO: 47678 - DNA, 22 bp, synthetic construct
  misc_feature 1..22: note = chemically synthesized
  source 1..22: mol_type = other DNA
ccagtcacatcctgtattctcc

SEQ ID NO: 47679 - DNA, 22 bp, synthetic construct
  misc_feature 1..22: note = chemically synthesized
  source 1..22: mol_type = other DNA
tattctcctaaattactccaat

SEQ ID NO: 47680 - DNA, 22 bp, synthetic construct
  misc_feature 1..22: note = chemically synthesized
  source 1..22: mol_type = other DNA
tcctaaattactccaatgacaa

SEQ ID NO: 47681 - DNA, 22 bp, synthetic construct
  misc_feature 1..22: note = chemically synthesized
  source 1..22: mol_type = other DNA
ctaaattactccaatgacaaag

SEQ ID NO: 47682 - DNA, 22 bp, synthetic construct
  misc_feature 1..22: note = chemically synthesized
  source 1..22: mol_type = other DNA
aattactccaatgacaaagaaa

SEQ ID NO: 47683 - DNA, 22 bp, synthetic construct
  misc_feature 1..22: note = chemically synthesized
  source 1..22: mol_type = other DNA
ctccaatgacaaagaaaactca

SEQ ID NO: 47684 - DNA, 22 bp, synthetic construct
  misc_feature 1..22: note = chemically synthesized
  source 1..22: mol_type = other DNA
caatgacaaagaaaactcagtg

SEQ ID NO: 47685 - DNA, 22 bp, synthetic construct
  misc_feature 1..22: note = chemically synthesized
  source 1..22: mol_type = other DNA
agtgaagacaaagagatcgttt

SEQ ID NO: 47686 - DNA, 22 bp, synthetic construct
  misc_feature 1..22: note = chemically synthesized
  source 1..22: mol_type = other DNA
tcataggcattgtcatttgcca

SEQ ID NO: 47687 - DNA, 22 bp, synthetic construct
  misc_feature 1..22: note = chemically synthesized
  source 1..22: mol_type = other DNA
cataggcattgtcatttgccaa

SEQ ID NO: 47688 - DNA, 22 bp, synthetic construct
  misc_feature 1..22: note = chemically synthesized
  source 1..22: mol_type = other DNA
ataggcattgtcatttgccaat

SEQ ID NO: 47689 - DNA, 22 bp, synthetic construct
  misc_feature 1..22: note = chemically synthesized
  source 1..22: mol_type = other DNA
tcatttgccaatccataactca

SEQ ID NO: 47690 - DNA, 22 bp, synthetic construct
  misc_feature 1..22: note = chemically synthesized
  source 1..22: mol_type = other DNA
gccaatccataactcaggaatt

SEQ ID NO: 47691 - DNA, 22 bp, synthetic construct
  misc_feature 1..22: note = chemically synthesized
  source 1..22: mol_type = other DNA
ccaatccataactcaggaattc

SEQ ID NO: 47692 - DNA, 22 bp, synthetic construct
  misc_feature 1..22: note = chemically synthesized
  source 1..22: mol_type = other DNA
aggaattcatggctatgcttgg

SEQ ID NO: 47693 - DNA, 22 bp, synthetic construct
  misc_feature 1..22: note = chemically synthesized
  source 1..22: mol_type = other DNA
atggctatgcttggataattct

SEQ ID NO: 47694 - DNA, 22 bp, synthetic construct
  misc_feature 1..22: note = chemically synthesized
  source 1..22: mol_type = other DNA
tgcttggataattctctctaga

SEQ ID NO: 47695 - DNA, 22 bp, synthetic construct
  misc_feature 1..22: note = chemically synthesized
  source 1..22: mol_type = other DNA
ggataattctctctagacttgg

SEQ ID NO: 47696 - DNA, 22 bp, synthetic construct
  misc_feature 1..22: note = chemically synthesized
  source 1..22: mol_type = other DNA
gataattctctctagacttgga

SEQ ID NO: 47697 - DNA, 22 bp, synthetic construct
  misc_feature 1..22: note = chemically synthesized
  source 1..22: mol_type = other DNA
tctctagacttggagtgttaaa

SEQ ID NO: 47698 - DNA, 22 bp, synthetic construct
  misc_feature 1..22: note = chemically synthesized
  source 1..22: mol_type = other DNA
tctagacttggagtgttaaaag

SEQ ID NO: 47699 - DNA, 22 bp, synthetic construct
  misc_feature 1..22: note = chemically synthesized
  source 1..22: mol_type = other DNA
tagacttggagtgttaaaagtt

SEQ ID NO: 47700 - DNA, 22 bp, synthetic construct
  misc_feature 1..22: note = chemically synthesized
  source 1..22: mol_type = other DNA
gacttggagtgttaaaagtttg

SEQ ID NO: 47701 - DNA, 22 bp, synthetic construct
  misc_feature 1..22: note = chemically synthesized
  source 1..22: mol_type = other DNA
ggagtgttaaaagtttgcacct

SEQ ID NO: 47702 - DNA, 22 bp, synthetic construct
  misc_feature 1..22: note = chemically synthesized
  source 1..22: mol_type = other DNA
gagtgttaaaagtttgcaccta

SEQ ID NO: 47703 - DNA, 22 bp, synthetic construct
  misc_feature 1..22: note = chemically synthesized
  source 1..22: mol_type = other DNA
aaagtttgcacctagttattct

SEQ ID NO: 47704 - DNA, 22 bp, synthetic construct
  misc_feature 1..22: note = chemically synthesized
  source 1..22: mol_type = other DNA
gcacctagttattctcccctct

SEQ ID NO: 47705 - DNA, 22 bp, synthetic construct
  misc_feature 1..22: note = chemically synthesized
  source 1..22: mol_type = other DNA
cacctagttattctcccctctc

SEQ ID NO: 47706 - DNA, 22 bp, synthetic construct
  misc_feature 1..22: note = chemically synthesized
  source 1..22: mol_type = other DNA
gttattctcccctctctctggc

SEQ ID NO: 47707 - DNA, 22 bp, synthetic construct
  misc_feature 1..22: note = chemically synthesized
  source 1..22: mol_type = other DNA
ttctcccctctctctggcagga

SEQ ID NO: 47708 - DNA, 22 bp, synthetic construct
  misc_feature 1..22: note = chemically synthesized
  source 1..22: mol_type = other DNA
tcccctctctctggcaggagaa

SEQ ID NO: 47709 - DNA, 22 bp, synthetic construct
  misc_feature 1..22: note = chemically synthesized
  source 1..22: mol_type = other DNA
ccctctctctggcaggagaatc

SEQ ID NO: 47710 - DNA, 22 bp, synthetic construct
  misc_feature 1..22: note = chemically synthesized
  source 1..22: mol_type = other DNA
tctctggcaggagaatcatgtc

SEQ ID NO: 47711 - DNA, 22 bp, synthetic construct
  misc_feature 1..22: note = chemically synthesized
  source 1..22: mol_type = other DNA
tctggcaggagaatcatgtcac

SEQ ID NO: 47712 - DNA, 22 bp, synthetic construct
  misc_feature 1..22: note = chemically synthesized
  source 1..22: mol_type = other DNA
tggcaggagaatcatgtcactg

SEQ ID NO: 47713 - DNA, 22 bp, synthetic construct
  misc_feature 1..22: note = chemically synthesized
  source 1..22: mol_type = other DNA
gcaggagaatcatgtcactggc

SEQ ID NO: 47714 - DNA, 22 bp, synthetic construct
  misc_feature 1..22: note = chemically synthesized
  source 1..22: mol_type = other DNA
gcaagcaattattgtatcctct

SEQ ID NO: 47715 - DNA, 22 bp, synthetic construct
  misc_feature 1..22: note = chemically synthesized
  source 1..22: mol_type = other DNA
ttgtatcctcttcaaataattc

SEQ ID NO: 47716 - DNA, 22 bp, synthetic construct
  misc_feature 1..22: note = chemically synthesized
  source 1..22: mol_type = other DNA
tatcctcttcaaataattcggc

SEQ ID NO: 47717 - DNA, 22 bp, synthetic construct
  misc_feature 1..22: note = chemically synthesized
  source 1..22: mol_type = other DNA
ttcaaataattcggcctaaatt

SEQ ID NO: 47718 - DNA, 22 bp, synthetic construct
  misc_feature 1..22: note = chemically synthesized
  source 1..22: mol_type = other DNA
caaataattcggcctaaatttt

SEQ ID NO: 47719 - DNA, 22 bp, synthetic construct
  misc_feature 1..22: note = chemically synthesized
  source 1..22: mol_type = other DNA
aaataattcggcctaaattttc

SEQ ID NO: 47720 - DNA, 22 bp, synthetic construct
  misc_feature 1..22: note = chemically synthesized
  source 1..22: mol_type = other DNA
ggcctaaattttcatttatgcc

SEQ ID NO: 47721 - DNA, 22 bp, synthetic construct
  misc_feature 1..22: note = chemically synthesized
  source 1..22: mol_type = other DNA
aattttcatttatgcctgtgta

SEQ ID NO: 47722 - DNA, 22 bp, synthetic construct
  misc_feature 1..22: note = chemically synthesized
  source 1..22: mol_type = other DNA
tcatttatgcctgtgtatttat

SEQ ID NO: 47723 - DNA, 22 bp, synthetic construct
  misc_feature 1..22: note = chemically synthesized
  source 1..22: mol_type = other DNA
catttatgcctgtgtatttatg

SEQ ID NO: 47724 - DNA, 22 bp, synthetic construct
  misc_feature 1..22: note = chemically synthesized
  source 1..22: mol_type = other DNA
atttatgcctgtgtatttatgc

SEQ ID NO: 47725 - DNA, 22 bp, synthetic construct
  misc_feature 1..22: note = chemically synthesized
  source 1..22: mol_type = other DNA
atgcctgtgtatttatgcacaa

SEQ ID NO: 47726 - DNA, 22 bp, synthetic construct
  misc_feature 1..22: note = chemically synthesized
  source 1..22: mol_type = other DNA
tgcctgtgtatttatgcacaaa

SEQ ID NO: 47727 - DNA, 22 bp, synthetic construct
  misc_feature 1..22: note = chemically synthesized
  source 1..22: mol_type = other DNA
tgtatttatgcacaaatgtgtg

SEQ ID NO: 47728 - DNA, 22 bp, synthetic construct
  misc_feature 1..22: note = chemically synthesized
  source 1..22: mol_type = other DNA
atgcacaaatgtgtgtatgata

SEQ ID NO: 47729 - DNA, 22 bp, synthetic construct
  misc_feature 1..22: note = chemically synthesized
  source 1..22: mol_type = other DNA
tgcacaaatgtgtgtatgatat

SEQ ID NO: 47730 - DNA, 22 bp, synthetic construct
  misc_feature 1..22: note = chemically synthesized
  source 1..22: mol_type = other DNA
tggcttctttttctgaaaattg

SEQ ID NO: 47731 - DNA, 22 bp, synthetic construct
  misc_feature 1..22: note = chemically synthesized
  source 1..22: mol_type = other DNA
ctttttctgaaaattgaaaaat

SEQ ID NO: 47732 - DNA, 22 bp, synthetic construct
  misc_feature 1..22: note = chemically synthesized
  source 1..22: mol_type = other DNA
tttttctgaaaattgaaaaatt

SEQ ID NO: 47733 - DNA, 22 bp, synthetic construct
  misc_feature 1..22: note = chemically synthesized
  source 1..22: mol_type = other DNA
tttctgaaaattgaaaaattca

SEQ ID NO: 47734 - DNA, 22 bp, synthetic construct
  misc_feature 1..22: note = chemically synthesized
  source 1..22: mol_type = other DNA
ttctgaaaattgaaaaattcag

SEQ ID NO: 47735 - DNA, 22 bp, synthetic construct
  misc_feature 1..22: note = chemically synthesized
  source 1..22: mol_type = other DNA
tctgaaaattgaaaaattcaga

SEQ ID NO: 47736 - DNA, 22 bp, synthetic construct
  misc_feature 1..22: note = chemically synthesized
  source 1..22: mol_type = other DNA
ctgaaaattgaaaaattcagaa

SEQ ID NO: 47737 - DNA, 22 bp, synthetic construct
  misc_feature 1..22: note = chemically synthesized
  source 1..22: mol_type = other DNA
tgaaaattgaaaaattcagaaa

SEQ ID NO: 47738 - DNA, 22 bp, synthetic construct
  misc_feature 1..22: note = chemically synthesized
  source 1..22: mol_type = other DNA
aaaattgaaaaattcagaaagc

SEQ ID NO: 47739 - DNA, 22 bp, synthetic construct
  misc_feature 1..22: note = chemically synthesized
  source 1..22: mol_type = other DNA
aaaaattcagaaagccaaagat

SEQ ID NO: 47740 - DNA, 22 bp, synthetic construct
  misc_feature 1..22: note = chemically synthesized
  source 1..22: mol_type = other DNA
agaaagccaaagataatagaat

SEQ ID NO: 47741 - DNA, 22 bp, synthetic construct
  misc_feature 1..22: note = chemically synthesized
  source 1..22: mol_type = other DNA
gcgtggcaaggtatattgatta

SEQ ID NO: 47742 - DNA, 22 bp, synthetic construct
  misc_feature 1..22: note = chemically synthesized
  source 1..22: mol_type = other DNA
cgtggcaaggtatattgattag

SEQ ID NO: 47743 - DNA, 22 bp, synthetic construct
  misc_feature 1..22: note = chemically synthesized
  source 1..22: mol_type = other DNA
attaggtaggaatcaaaaataa

SEQ ID NO: 47744 - DNA, 22 bp, synthetic construct
  misc_feature 1..22: note = chemically synthesized
  source 1..22: mol_type = other DNA
ggtaggaatcaaaaataattgc

SEQ ID NO: 47745 - DNA, 22 bp, synthetic construct
  misc_feature 1..22: note = chemically synthesized
  source 1..22: mol_type = other DNA
caaaattatttatgcaggagta

SEQ ID NO: 47746 - DNA, 22 bp, synthetic construct
  misc_feature 1..22: note = chemically synthesized
  source 1..22: mol_type = other DNA
tttatgcaggagtattaaaatt

SEQ ID NO: 47747 - DNA, 22 bp, synthetic construct
  misc_feature 1..22: note = chemically synthesized
  source 1..22: mol_type = other DNA
atgcaggagtattaaaattttc

SEQ ID NO: 47748 - DNA, 22 bp, synthetic construct
  misc_feature 1..22: note = chemically synthesized
  source 1..22: mol_type = other DNA
tgcaggagtattaaaattttcc

SEQ ID NO: 47749 - DNA, 22 bp, synthetic construct
  misc_feature 1..22: note = chemically synthesized
  source 1..22: mol_type = other DNA
aaattttcctcaaaagttccca

SEQ ID NO: 47750 - DNA, 22 bp, synthetic construct
  misc_feature 1..22: note = chemically synthesized
  source 1..22: mol_type = other DNA
tcctcaaaagttcccaggcaaa

SEQ ID NO: 47751 - DNA, 22 bp, synthetic construct
  misc_feature 1..22: note = chemically synthesized
  source 1..22: mol_type = other DNA
cctcaaaagttcccaggcaaat

SEQ ID NO: 47752 - DNA, 22 bp, synthetic construct
  misc_feature 1..22: note = chemically synthesized
  source 1..22: mol_type = other DNA
ctcaaaagttcccaggcaaatg

SEQ ID NO: 47753 - DNA, 22 bp, synthetic construct
  misc_feature 1..22: note = chemically synthesized
  source 1..22: mol_type = other DNA
aaaagttcccaggcaaatgggt

SEQ ID NO: 47754 - DNA, 22 bp, synthetic construct
  misc_feature 1..22: note = chemically synthesized
  source 1..22: mol_type = other DNA
ccaggcaaatgggttcctcttt

SEQ ID NO: 47755 - DNA, 22 bp, synthetic construct
  misc_feature 1..22: note = chemically synthesized
  source 1..22: mol_type = other DNA
ctctttaattttcacccttaca

SEQ ID NO: 47756 - DNA, 22 bp, synthetic construct
  misc_feature 1..22: note = chemically synthesized
  source 1..22: mol_type = other DNA
tttaattttcacccttacaata

SEQ ID NO: 47757 - DNA, 22 bp, synthetic construct
  misc_feature 1..22: note = chemically synthesized
  source 1..22: mol_type = other DNA
taattttcacccttacaataaa

SEQ ID NO: 47758 - DNA, 22 bp, synthetic construct
  misc_feature 1..22: note = chemically synthesized
  source 1..22: mol_type = other DNA
aattttcacccttacaataaac

SEQ ID NO: 47759 - DNA, 22 bp, synthetic construct
  misc_feature 1..22: note = chemically synthesized
  source 1..22: mol_type = other DNA
attttcacccttacaataaact

SEQ ID NO: 47760 - DNA, 22 bp, synthetic construct
  misc_feature 1..22: note = chemically synthesized
  source 1..22: mol_type = other DNA
tcacccttacaataaactcttc

SEQ ID NO: 47761 - DNA, 22 bp, synthetic construct
  misc_feature 1..22: note = chemically synthesized
  source 1..22: mol_type = other DNA
cacccttacaataaactcttct

SEQ ID NO: 47762 - DNA, 22 bp, synthetic construct
  misc_feature 1..22: note = chemically synthesized
  source 1..22: mol_type = other DNA
acccttacaataaactcttctg

SEQ ID NO: 47763 - DNA, 22 bp, synthetic construct
  misc_feature 1..22: note = chemically synthesized
  source 1..22: mol_type = other DNA
acaataaactcttctgcaggtt

SEQ ID NO: 47764 - DNA, 22 bp, synthetic construct
  misc_feature 1..22: note = chemically synthesized
  source 1..22: mol_type = other DNA
caataaactcttctgcaggttt

SEQ ID NO: 47765 - DNA, 22 bp, synthetic construct
  misc_feature 1..22: note = chemically synthesized
  source 1..22: mol_type = other DNA
ttctgcaggttttgtttatttt

SEQ ID NO: 47766 - DNA, 22 bp, synthetic construct
  misc_feature 1..22: note = chemically synthesized
  source 1..22: mol_type = other DNA
ctgcaggttttgtttattttga

SEQ ID NO: 47767 - DNA, 22 bp, synthetic construct
  misc_feature 1..22: note = chemically synthesized
  source 1..22: mol_type = other DNA
tgcaggttttgtttattttgag

SEQ ID NO: 47768 - DNA, 22 bp, synthetic construct
  misc_feature 1..22: note = chemically synthesized
  source 1..22: mol_type = other DNA
caggttttgtttattttgagga

SEQ ID NO: 47769 - DNA, 22 bp, synthetic construct
  misc_feature 1..22: note = chemically synthesized
  source 1..22: mol_type = other DNA
tgtttattttgaggaaacattt

SEQ ID NO: 47770 - DNA, 22 bp, synthetic construct
  misc_feature 1..22: note = chemically synthesized
  source 1..22: mol_type = other DNA
gtttattttgaggaaacatttc

SEQ ID NO: 47771 - DNA, 22 bp, synthetic construct
  misc_feature 1..22: note = chemically synthesized
  source 1..22: mol_type = other DNA
tttattttgaggaaacatttca

SEQ ID NO: 47772 - DNA, 22 bp, synthetic construct
  misc_feature 1..22: note = chemically synthesized
  source 1..22: mol_type = other DNA
attttgaggaaacatttcactt

SEQ ID NO: 47773 - DNA, 22 bp, synthetic construct
  misc_feature 1..22: note = chemically synthesized
  source 1..22: mol_type = other DNA
ttttgaggaaacatttcacttt

SEQ ID NO: 47774 - DNA, 22 bp, synthetic construct
  misc_feature 1..22: note = chemically synthesized
  source 1..22: mol_type = other DNA
tgaggaaacatttcactttttt

SEQ ID NO: 47775 - DNA, 22 bp, synthetic construct
  misc_feature 1..22: note = chemically synthesized
  source 1..22: mol_type = other DNA
gaggaaacatttcacttttttt

SEQ ID NO: 47776 - DNA, 22 bp, synthetic construct
  misc_feature 1..22: note = chemically synthesized
  source 1..22: mol_type = other DNA
aggaaacatttcactttttttt

SEQ ID NO: 47777 - DNA, 22 bp, synthetic construct
  misc_feature 1..22: note = chemically synthesized
  source 1..22: mol_type = other DNA
cactttttttttcaagacatga

SEQ ID NO: 47778 - DNA, 22 bp, synthetic construct
  misc_feature 1..22: note = chemically synthesized
  source 1..22: mol_type = other DNA
actttttttttcaagacatgag

SEQ ID NO: 47779 - DNA, 22 bp, synthetic construct
  misc_feature 1..22: note = chemically synthesized
  source 1..22: mol_type = other DNA
tttttttcaagacatgaggtgt

SEQ ID NO: 47780 - DNA, 22 bp, synthetic construct
  misc_feature 1..22: note = chemically synthesized
  source 1..22: mol_type = other DNA
ttttttcaagacatgaggtgtg

SEQ ID NO: 47781 - DNA, 22 bp, synthetic construct
  misc_feature 1..22: note = chemically synthesized
  source 1..22: mol_type = other DNA
tttttcaagacatgaggtgtga

SEQ ID NO: 47782 - DNA, 22 bp, synthetic construct
  misc_feature 1..22: note = chemically synthesized
  source 1..22: mol_type = other DNA
ttttcaagacatgaggtgtgaa

SEQ ID NO: 47783 - DNA, 22 bp, synthetic construct
  misc_feature 1..22: note = chemically synthesized
  source 1..22: mol_type = other DNA
tttcaagacatgaggtgtgaat

SEQ ID NO: 47784 - DNA, 22 bp, synthetic construct
  misc_feature 1..22: note = chemically synthesized
  source 1..22: mol_type = other DNA
ttcaagacatgaggtgtgaatg

SEQ ID NO: 47785 - DNA, 22 bp, synthetic construct
  misc_feature 1..22: note = chemically synthesized
  source 1..22: mol_type = other DNA
tcaagacatgaggtgtgaatga

SEQ ID NO: 47786 - DNA, 22 bp, synthetic construct
  misc_feature 1..22: note = chemically synthesized
  source 1..22: mol_type = other DNA
caagacatgaggtgtgaatgat

SEQ ID NO: 47787 - DNA, 22 bp, synthetic construct
  misc_feature 1..22: note = chemically synthesized
  source 1..22: mol_type = other DNA
aagacatgaggtgtgaatgatg

SEQ ID NO: 47788 - DNA, 22 bp, synthetic construct
  misc_feature 1..22: note = chemically synthesized
  source 1..22: mol_type = other DNA
ggatatgtaaactgaattattt

SEQ ID NO: 47789 - DNA, 22 bp, synthetic construct
  misc_feature 1..22: note = chemically synthesized
  source 1..22: mol_type = other DNA
gatatgtaaactgaattatttg

SEQ ID NO: 47790 - DNA, 22 bp, synthetic construct
  misc_feature 1..22: note = chemically synthesized
  source 1..22: mol_type = other DNA
aattatttgcataatgcattac

SEQ ID NO: 47791 - DNA, 22 bp, synthetic construct
  misc_feature 1..22: note = chemically synthesized
  source 1..22: mol_type = other DNA
tttgcataatgcattactaatc

SEQ ID NO: 47792 - DNA, 22 bp, synthetic construct
  misc_feature 1..22: note = chemically synthesized
  source 1..22: mol_type = other DNA
gcataatgcattactaatcagt

SEQ ID NO: 47793 - DNA, 22 bp, synthetic construct
  misc_feature 1..22: note = chemically synthesized
  source 1..22: mol_type = other DNA
cataatgcattactaatcagtg

SEQ ID NO: 47794 - DNA, 22 bp, synthetic construct
  misc_feature 1..22: note = chemically synthesized
  source 1..22: mol_type = other DNA
ctaatcagtgagtataaattct

SEQ ID NO: 47795 - DNA, 22 bp, synthetic construct
  misc_feature 1..22: note = chemically synthesized
  source 1..22: mol_type = other DNA
atcagtgagtataaattctgga

SEQ ID NO: 47796 - DNA, 22 bp, synthetic construct
  misc_feature 1..22: note = chemically synthesized
  source 1..22: mol_type = other DNA
tggagtctgaggacctgaaatc

SEQ ID NO: 47797 - DNA, 22 bp, synthetic construct
  misc_feature 1..22: note = chemically synthesized
  source 1..22: mol_type = other DNA
gagtctgaggacctgaaatcaa

SEQ ID NO: 47798 - DNA, 22 bp, synthetic construct
  misc_feature 1..22: note = chemically synthesized
  source 1..22: mol_type = other DNA
aggacctgaaatcaagtgccac

SEQ ID NO: 47799 - DNA, 22 bp, synthetic construct
  misc_feature 1..22: note = chemically synthesized
  source 1..22: mol_type = other DNA
aaatcaagtgccaccaaatttt

SEQ ID NO: 47800 - DNA, 22 bp, synthetic construct
  misc_feature 1..22: note = chemically synthesized
  source 1..22: mol_type = other DNA
tttaaaatctagattataaaag

SEQ ID NO: 47801 - DNA, 22 bp, synthetic construct
  misc_feature 1..22: note = chemically synthesized
  source 1..22: mol_type = other DNA
ttaaaatctagattataaaagt

SEQ ID NO: 47802 - DNA, 22 bp, synthetic construct
  misc_feature 1..22: note = chemically synthesized
  source 1..22: mol_type = other DNA
taaaatctagattataaaagta

SEQ ID NO: 47803 - DNA, 22 bp, synthetic construct
  misc_feature 1..22: note = chemically synthesized
  source 1..22: mol_type = other DNA
aaaatctagattataaaagtaa

SEQ ID NO: 47804 - DNA, 22 bp, synthetic construct
  misc_feature 1..22: note = chemically synthesized
  source 1..22: mol_type = other DNA
aaatctagattataaaagtaaa

SEQ ID NO: 47805 - DNA, 22 bp, synthetic construct
  misc_feature 1..22: note = chemically synthesized
  source 1..22: mol_type = other DNA
gattataaaagtaaagagcatc

SEQ ID NO: 47806 - DNA, 22 bp, synthetic construct
  misc_feature 1..22: note = chemically synthesized
  source 1..22: mol_type = other DNA
taaaagtaaagagcatcaccct

SEQ ID NO: 47807 - DNA, 22 bp, synthetic construct
  misc_feature 1..22: note = chemically synthesized
  source 1..22: mol_type = other DNA
cggtgggataatgtacacattt

SEQ ID NO: 47808 - DNA, 22 bp, synthetic construct
  misc_feature 1..22: note = chemically synthesized
  source 1..22: mol_type = other DNA
ggtgggataatgtacacatttg

SEQ ID NO: 47809 - DNA, 22 bp, synthetic construct
  misc_feature 1..22: note = chemically synthesized
  source 1..22: mol_type = other DNA
gtgtacacattcgcattccgtt

SEQ ID NO: 47810 - DNA, 22 bp, synthetic construct
  misc_feature 1..22: note = chemically synthesized
  source 1..22: mol_type = other DNA
tgtacacattcgcattccgttt

SEQ ID NO: 47811 - DNA, 22 bp, synthetic construct
  misc_feature 1..22: note = chemically synthesized
  source 1..22: mol_type = other DNA
gcattccgtttataagaaggag

SEQ ID NO: 47812 - DNA, 22 bp, synthetic construct
  misc_feature 1..22: note = chemically synthesized
  source 1..22: mol_type = other DNA
cgtttataagaaggagaaatta

SEQ ID NO: 47813 - DNA, 22 bp, synthetic construct
  misc_feature 1..22: note = chemically synthesized
  source 1..22: mol_type = other DNA
ataagaaggagaaattatcctc

SEQ ID NO: 47814 - DNA, 22 bp, synthetic construct
  misc_feature 1..22: note = chemically synthesized
  source 1..22: mol_type = other DNA
taagaaggagaaattatcctca

SEQ ID NO: 47815 - DNA, 22 bp, synthetic construct
  misc_feature 1..22: note = chemically synthesized
  source 1..22: mol_type = other DNA
tcctcacagagttttctgagga

SEQ ID NO: 47816 - DNA, 22 bp, synthetic construct
  misc_feature 1..22: note = chemically synthesized
  source 1..22: mol_type = other DNA
acagagttttctgaggaaaatt

SEQ ID NO: 47817 - DNA, 22 bp, synthetic construct
  misc_feature 1..22: note = chemically synthesized
  source 1..22: mol_type = other DNA
tctgaggaaaattaaataagtg

SEQ ID NO: 47818 - DNA, 22 bp, synthetic construct
  misc_feature 1..22: note = chemically synthesized
  source 1..22: mol_type = other DNA
ctgaggaaaattaaataagtgg

SEQ ID NO: 47819 - DNA, 22 bp, synthetic construct
  misc_feature 1..22: note = chemically synthesized
  source 1..22: mol_type = other DNA
tgaggaaaattaaataagtggc

SEQ ID NO: 47820 - DNA, 22 bp, synthetic construct
  misc_feature 1..22: note = chemically synthesized
  source 1..22: mol_type = other DNA
aggaaaattaaataagtggcct

SEQ ID NO: 47821 - DNA, 22 bp, synthetic construct
  misc_feature 1..22: note = chemically synthesized
  source 1..22: mol_type = other DNA
aataagtggcctttgatgtaaa

SEQ ID NO: 47822 - DNA, 22 bp, synthetic construct
  misc_feature 1..22: note = chemically synthesized
  source 1..22: mol_type = other DNA
tgatgtaaactgttttgctctg

SEQ ID NO: 47823 - DNA, 22 bp, synthetic construct
  misc_feature 1..22: note = chemically synthesized
  source 1..22: mol_type = other DNA
gatgtaaactgttttgctctga

SEQ ID NO: 47824 - DNA, 22 bp, synthetic construct
  misc_feature 1..22: note = chemically synthesized
  source 1..22: mol_type = other DNA
atgtaaactgttttgctctgac

SEQ ID NO: 47825 - DNA, 22 bp, synthetic construct
  misc_feature 1..22: note = chemically synthesized
  source 1..22: mol_type = other DNA
ttttgctctgactcaacactat

SEQ ID NO: 47826 - DNA, 22 bp, synthetic construct
  misc_feature 1..22: note = chemically synthesized
  source 1..22: mol_type = other DNA
tgctctgactcaacactatgag

SEQ ID NO: 47827 - DNA, 22 bp, synthetic construct
  misc_feature 1..22: note = chemically synthesized
  source 1..22: mol_type = other DNA
gctctgactcaacactatgagg

SEQ ID NO: 47828 - DNA, 22 bp, synthetic construct
  misc_feature 1..22: note = chemically synthesized
  source 1..22: mol_type = other DNA
ctctgactcaacactatgaggc

SEQ ID NO: 47829 - DNA, 22 bp, synthetic construct
  misc_feature 1..22: note = chemically synthesized
  source 1..22: mol_type = other DNA
tgactcaacactatgaggcata

SEQ ID NO: 47830 - DNA, 22 bp, synthetic construct
  misc_feature 1..22: note = chemically synthesized
  source 1..22: mol_type = other DNA
actcaacactatgaggcataag

SEQ ID NO: 47831 - DNA, 22 bp, synthetic construct
  misc_feature 1..22: note = chemically synthesized
  source 1..22: mol_type = other DNA
aacactatgaggcataaggtcc

SEQ ID NO: 47832 - DNA, 22 bp, synthetic construct
  misc_feature 1..22: note = chemically synthesized
  source 1..22: mol_type = other DNA
tgaggcataaggtcctaaattc

SEQ ID NO: 47833 - DNA, 22 bp, synthetic construct
  misc_feature 1..22: note = chemically synthesized
  source 1..22: mol_type = other DNA
aattcataggcacaaccacaga

SEQ ID NO: 47834 - DNA, 22 bp, synthetic construct
  misc_feature 1..22: note = chemically synthesized
  source 1..22: mol_type = other DNA
ataggcacaaccacagaagcac

SEQ ID NO: 47835 - DNA, 22 bp, synthetic construct
  misc_feature 1..22: note = chemically synthesized
  source 1..22: mol_type = other DNA
gcatcaaaaagagcagacagtc

SEQ ID NO: 47836 - DNA, 22 bp, synthetic construct
  misc_feature 1..22: note = chemically synthesized
  source 1..22: mol_type = other DNA
catcaaaaagagcagacagtcc

SEQ ID NO: 47837 - DNA, 22 bp, synthetic construct
  misc_feature 1..22: note = chemically synthesized
  source 1..22: mol_type = other DNA
gtcgcctacggaatctacagga

SEQ ID NO: 47838 - DNA, 22 bp, synthetic construct
  misc_feature 1..22: note = chemically synthesized
  source 1..22: mol_type = other DNA
cggaatctacaggaatctgaag

SEQ ID NO: 47839 - DNA, 22 bp, synthetic construct
  misc_feature 1..22: note = chemically synthesized
  source 1..22: mol_type = other DNA
caggaatctgaaggggcagcca

SEQ ID NO: 47840 - DNA, 22 bp, synthetic construct
  misc_feature 1..22: note = chemically synthesized
  source 1..22: mol_type = other DNA
aaggggcagccagacattctgc

SEQ ID NO: 47841 - DNA, 22 bp, synthetic construct
  misc_feature 1..22: note = chemically synthesized
  source 1..22: mol_type = other DNA
tgcctataccacccatcagatc

SEQ ID NO: 47842 - DNA, 22 bp, synthetic construct
  misc_feature 1..22: note = chemically synthesized
  source 1..22: mol_type = other DNA
cctataccacccatcagatcag

SEQ ID NO: 47843 - DNA, 22 bp, synthetic construct
  misc_feature 1..22: note = chemically synthesized
  source 1..22: mol_type = other DNA
taccacccatcagatcagccac

SEQ ID NO: 47844 - DNA, 22 bp, synthetic construct
  misc_feature 1..22: note = chemically synthesized
  source 1..22: mol_type = other DNA
ctccagtgggttcccaccggtg

SEQ ID NO: 47845 - DNA, 22 bp, synthetic construct
  misc_feature 1..22: note = chemically synthesized
  source 1..22: mol_type = other DNA
tccagtgggttcccaccggtgt

SEQ ID NO: 47846 - DNA, 22 bp, synthetic construct
  misc_feature 1..22: note = chemically synthesized
  source 1..22: mol_type = other DNA
cagtgggttcccaccggtgttt

SEQ ID NO: 47847 - DNA, 22 bp, synthetic construct
  misc_feature 1..22: note = chemically synthesized
  source 1..22: mol_type = other DNA
ccaccggtgttttcgtgcaagc

SEQ ID NO: 47848 - DNA, 22 bp, synthetic construct
  misc_feature 1..22: note = chemically synthesized
  source 1..22: mol_type = other DNA
tcgtgcaagcttagccccttct

SEQ ID NO: 47849 - DNA, 22 bp, synthetic construct
  misc_feature 1..22: note = chemically synthesized
  source 1..22: mol_type = other DNA
cgtgcaagcttagccccttctt

SEQ ID NO: 47850 - DNA, 22 bp, synthetic construct
  misc_feature 1..22: note = chemically synthesized
  source 1..22: mol_type = other DNA
gtgcaagcttagccccttcttt

SEQ ID NO: 47851 - DNA, 22 bp, synthetic construct
  misc_feature 1..22: note = chemically synthesized
  source 1..22: mol_type = other DNA
agccccttctttgcagaaaaaa

SEQ ID NO: 47852 - DNA, 22 bp, synthetic construct
  misc_feature 1..22: note = chemically synthesized
  source 1..22: mol_type = other DNA
gccccttctttgcagaaaaaaa

SEQ ID NO: 47853 - DNA, 22 bp, synthetic construct
  misc_feature 1..22: note = chemically synthesized
  source 1..22: mol_type = other DNA
ctttgcagaaaaaaagatattg

SEQ ID NO: 47854 - DNA, 22 bp, synthetic construct
  misc_feature 1..22: note = chemically synthesized
  source 1..22: mol_type = other DNA
tttgcagaaaaaaagatattga

SEQ ID NO: 47855 - DNA, 22 bp, synthetic construct
  misc_feature 1..22: note = chemically synthesized
  source 1..22: mol_type = other DNA
tgcagaaaaaaagatattgatg

SEQ ID NO: 47856 - DNA, 22 bp, synthetic construct
  misc_feature 1..22: note = chemically synthesized
  source 1..22: mol_type = other DNA
gcagaaaaaaagatattgatgt

SEQ ID NO: 47857 - DNA, 22 bp, synthetic construct
  misc_feature 1..22: note = chemically synthesized
  source 1..22: mol_type = other DNA
cagaaaaaaagatattgatgtg

SEQ ID NO: 47858 - DNA, 22 bp, synthetic construct
  misc_feature 1..22: note = chemically synthesized
  source 1..22: mol_type = other DNA
atgtgccaacagtagaaagaag

SEQ ID NO: 47859 - DNA, 22 bp, synthetic construct
  misc_feature 1..22: note = chemically synthesized
  source 1..22: mol_type = other DNA
ttccagctctgtacacaacctt

SEQ ID NO: 47860 - DNA, 22 bp, synthetic construct
  misc_feature 1..22: note = chemically synthesized
  source 1..22: mol_type = other DNA
cagctctgtacacaacctttgt

SEQ ID NO: 47861 - DNA, 22 bp, synthetic construct
  misc_feature 1..22: note = chemically synthesized
  source 1..22: mol_type = other DNA
tgtacacaacctttgtcaaccc

SEQ ID NO: 47862 - DNA, 22 bp, synthetic construct
  misc_feature 1..22: note = chemically synthesized
  source 1..22: mol_type = other DNA
tacacaacctttgtcaacccag

SEQ ID NO: 47863 - DNA, 22 bp, synthetic construct
  misc_feature 1..22: note = chemically synthesized
  source 1..22: mol_type = other DNA
tgtcaacccagcatgataaaac

SEQ ID NO: 47864 - DNA, 22 bp, synthetic construct
  misc_feature 1..22: note = chemically synthesized
  source 1..22: mol_type = other DNA
gtcaacccagcatgataaaacc

SEQ ID NO: 47865 - DNA, 22 bp, synthetic construct
  misc_feature 1..22: note = chemically synthesized
  source 1..22: mol_type = other DNA
tcaacccagcatgataaaacca

SEQ ID NO: 47866 - DNA, 22 bp, synthetic construct
  misc_feature 1..22: note = chemically synthesized
  source 1..22: mol_type = other DNA
ggaaactatttgtctaaacact

SEQ ID NO: 47867 - DNA, 22 bp, synthetic construct
  misc_feature 1..22: note = chemically synthesized
  source 1..22: mol_type = other DNA
tttgtctaaacactttttggaa

SEQ ID NO: 47868 - DNA, 22 bp, synthetic construct
  misc_feature 1..22: note = chemically synthesized
  source 1..22: mol_type = other DNA
gtctaaacactttttggaaagg

SEQ ID NO: 47869 - DNA, 22 bp, synthetic construct
  misc_feature 1..22: note = chemically synthesized
  source 1..22: mol_type = other DNA
tctaaacactttttggaaaggg

SEQ ID NO: 47870 - DNA, 22 bp, synthetic construct
  misc_feature 1..22: note = chemically synthesized
  source 1..22: mol_type = other DNA
aacactttttggaaagggatga

SEQ ID NO: 47871 - DNA, 22 bp, synthetic construct
  misc_feature 1..22: note = chemically synthesized
  source 1..22: mol_type = other DNA
tttggaaagggatgaaatggag

SEQ ID NO: 47872 - DNA, 22 bp, synthetic construct
  misc_feature 1..22: note = chemically synthesized
  source 1..22: mol_type = other DNA
ttggaaagggatgaaatggaga

SEQ ID NO: 47873 - DNA, 22 bp, synthetic construct
  misc_feature 1..22: note = chemically synthesized
  source 1..22: mol_type = other DNA
tggaaagggatgaaatggagag

SEQ ID NO: 47874 - DNA, 22 bp, synthetic construct
  misc_feature 1..22: note = chemically synthesized
  source 1..22: mol_type = other DNA
ggaaagggatgaaatggagagg

SEQ ID NO: 47875 - DNA, 22 bp, synthetic construct
  misc_feature 1..22: note = chemically synthesized
  source 1..22: mol_type = other DNA
gaaagggatgaaatggagagga

SEQ ID NO: 47876 - DNA, 22 bp, synthetic construct
  misc_feature 1..22: note = chemically synthesized
  source 1..22: mol_type = other DNA
gtggtcagcacacacacacaca

SEQ ID NO: 47877 - DNA, 22 bp, synthetic construct
  misc_feature 1..22: note = chemically synthesized
  source 1..22: mol_type = other DNA
acacacacacacacacacacac

SEQ ID NO: 47878 - DNA, 22 bp, synthetic construct
  misc_feature 1..22: note = chemically synthesized
  source 1..22: mol_type = other DNA
acacaaatccttgagggtgcca

SEQ ID NO: 47879 - DNA, 22 bp, synthetic construct
  misc_feature 1..22: note = chemically synthesized
  source 1..22: mol_type = other DNA
gagggtgccaggttacatttct

SEQ ID NO: 47880 - DNA, 22 bp, synthetic construct
  misc_feature 1..22: note = chemically synthesized
  source 1..22: mol_type = other DNA
agggtgccaggttacatttcta

SEQ ID NO: 47881 - DNA, 22 bp, synthetic construct
  misc_feature 1..22: note = chemically synthesized
  source 1..22: mol_type = other DNA
catttctacaacagctgccttc

SEQ ID NO: 47882 - DNA, 22 bp, synthetic construct
  misc_feature 1..22: note = chemically synthesized
  source 1..22: mol_type = other DNA
ctacaacagctgccttccattg

SEQ ID NO: 47883 - DNA, 22 bp, synthetic construct
  misc_feature 1..22: note = chemically synthesized
  source 1..22: mol_type = other DNA
tacaacagctgccttccattgt

SEQ ID NO: 47884 - DNA, 22 bp, synthetic construct
  misc_feature 1..22: note = chemically synthesized
  source 1..22: mol_type = other DNA
caacagctgccttccattgtct

SEQ ID NO: 47885 - DNA, 22 bp, synthetic construct
  misc_feature 1..22: note = chemically synthesized
  source 1..22: mol_type = other DNA
ccttccattgtctactgccagt

SEQ ID NO: 47886 - DNA, 22 bp, synthetic construct
  misc_feature 1..22: note = chemically synthesized
  source 1..22: mol_type = other DNA
ccattgtctactgccagtgaag

SEQ ID NO: 47887 - DNA, 22 bp, synthetic construct
  misc_feature 1..22: note = chemically synthesized
  source 1..22: mol_type = other DNA
cattgtctactgccagtgaagc

SEQ ID NO: 47888 - DNA, 22 bp, synthetic construct
  misc_feature 1..22: note = chemically synthesized
  source 1..22: mol_type = other DNA
tctactgccagtgaagccaaac

SEQ ID NO: 47889 - DNA, 22 bp, synthetic construct
  misc_feature 1..22: note = chemically synthesized
  source 1..22: mol_type = other DNA
ctgccagtgaagccaaaccagc

SEQ ID NO: 47890 - DNA, 22 bp, synthetic construct
  misc_feature 1..22: note = chemically synthesized
  source 1..22: mol_type = other DNA
ccagtgaagccaaaccagccta

SEQ ID NO: 47891 - DNA, 22 bp, synthetic construct
  misc_feature 1..22: note = chemically synthesized
  source 1..22: mol_type = other DNA
aaatttaatttaatctgctgta

SEQ ID NO: 47892 - DNA, 22 bp, synthetic construct
  misc_feature 1..22: note = chemically synthesized
  source 1..22: mol_type = other DNA
aatttaatctgctgtaaaccca

SEQ ID NO: 47893 - DNA, 22 bp, synthetic construct
  misc_feature 1..22: note = chemically synthesized
  source 1..22: mol_type = other DNA
atttaatctgctgtaaacccaa

SEQ ID NO: 47894 - DNA, 22 bp, synthetic construct
  misc_feature 1..22: note = chemically synthesized
  source 1..22: mol_type = other DNA
aatctgctgtaaacccaagtat

SEQ ID NO: 47895 - DNA, 22 bp, synthetic construct
  misc_feature 1..22: note = chemically synthesized
  source 1..22: mol_type = other DNA
atctgctgtaaacccaagtatc

SEQ ID NO: 47896 - DNA, 22 bp, synthetic construct
  misc_feature 1..22: note = chemically synthesized
  source 1..22: mol_type = other DNA
ctgtaaacccaagtatcaggca

SEQ ID NO: 47897 - DNA, 22 bp, synthetic construct
  misc_feature 1..22: note = chemically synthesized
  source 1..22: mol_type = other DNA
taaacccaagtatcaggcactt

SEQ ID NO: 47898 - DNA, 22 bp, synthetic construct
  misc_feature 1..22: note = chemically synthesized
  source 1..22: mol_type = other DNA
agatggcagctaaaagcgccac

SEQ ID NO: 47899 - DNA, 22 bp, synthetic construct
  misc_feature 1..22: note = chemically synthesized
  source 1..22: mol_type = other DNA
gatggcagctaaaagcgccact

SEQ ID NO: 47900 - DNA, 22 bp, synthetic construct
  misc_feature 1..22: note = chemically synthesized
  source 1..22: mol_type = other DNA
aaagcgccactctcagataact

SEQ ID NO: 47901 - DNA, 22 bp, synthetic construct
  misc_feature 1..22: note = chemically synthesized
  source 1..22: mol_type = other DNA
tcagataactgagtgacacttg

SEQ ID NO: 47902 - DNA, 22 bp, synthetic construct
  misc_feature 1..22: note = chemically synthesized
  source 1..22: mol_type = other DNA
agataactgagtgacacttgct

SEQ ID NO: 47903 - DNA, 22 bp, synthetic construct
  misc_feature 1..22: note = chemically synthesized
  source 1..22: mol_type = other DNA
agtgacacttgctaataatagc

SEQ ID NO: 47904 - DNA, 22 bp, synthetic construct
  misc_feature 1..22: note = chemically synthesized
  source 1..22: mol_type = other DNA
gctaataatagcctctgtgtga

SEQ ID NO: 47905 - DNA, 22 bp, synthetic construct
  misc_feature 1..22: note = chemically synthesized
  source 1..22: mol_type = other DNA
ctaataatagcctctgtgtgaa

SEQ ID NO: 47906 - DNA, 22 bp, synthetic construct
  misc_feature 1..22: note = chemically synthesized
  source 1..22: mol_type = other DNA
ataatagcctctgtgtgaagcg

SEQ ID NO: 47907 - DNA, 22 bp, synthetic construct
  misc_feature 1..22: note = chemically synthesized
  source 1..22: mol_type = other DNA
tgtgtgaagcgagagagagcgg

SEQ ID NO: 47908 - DNA, 22 bp, synthetic construct
  misc_feature 1..22: note = chemically synthesized
  source 1..22: mol_type = other DNA
tgtgaagcgagagagagcggac

SEQ ID NO: 47909 - DNA, 22 bp, synthetic construct
  misc_feature 1..22: note = chemically synthesized
  source 1..22: mol_type = other DNA
tgtaaaaccagagggacccggg

SEQ ID NO: 47910 - DNA, 22 bp, synthetic construct
  misc_feature 1..22: note = chemically synthesized
  source 1..22: mol_type = other DNA
gtaaaaccagagggacccgggc

SEQ ID NO: 47911 - DNA, 22 bp, synthetic construct
  misc_feature 1..22: note = chemically synthesized
  source 1..22: mol_type = other DNA
taaaaccagagggacccgggcc

SEQ ID NO: 47912 - DNA, 22 bp, synthetic construct
  misc_feature 1..22: note = chemically synthesized
  source 1..22: mol_type = other DNA
ggcctgggcctgggtctgggaa

SEQ ID NO: 47913 - DNA, 22 bp, synthetic construct
  misc_feature 1..22: note = chemically synthesized
  source 1..22: mol_type = other DNA
ggcctgggtctgggaatggtgt

SEQ ID NO: 47914 - DNA, 22 bp, synthetic construct
  misc_feature 1..22: note = chemically synthesized
  source 1..22: mol_type = other DNA
ggtctgggaatggtgtgatgtg

SEQ ID NO: 47915 - DNA, 22 bp, synthetic construct
  misc_feature 1..22: note = chemically synthesized
  source 1..22: mol_type = other DNA
ggaatggtgtgatgtggttagg

SEQ ID NO: 47916 - DNA, 22 bp, synthetic construct
  misc_feature 1..22: note = chemically synthesized
  source 1..22: mol_type = other DNA
ggccagtctcagcttccaggca

SEQ ID NO: 47917 - DNA, 22 bp, synthetic construct
  misc_feature 1..22: note = chemically synthesized
  source 1..22: mol_type = other DNA
agcttccaggcagcagatacgg

SEQ ID NO: 47918 - DNA, 22 bp, synthetic construct
  misc_feature 1..22: note = chemically synthesized
  source 1..22: mol_type = other DNA
ccaggcagcagatacggcagag

SEQ ID NO: 47919 - DNA, 22 bp, synthetic construct
  misc_feature 1..22: note = chemically synthesized
  source 1..22: mol_type = other DNA
caggcagcagatacggcagaga

SEQ ID NO: 47920 - DNA, 22 bp, synthetic construct
  misc_feature 1..22: note = chemically synthesized
  source 1..22: mol_type = other DNA
ccctgtgacgggctgcacgaag

SEQ ID NO: 47921 - DNA, 22 bp, synthetic construct
  misc_feature 1..22: note = chemically synthesized
  source 1..22: mol_type = other DNA
tgacgggctgcacgaagcccac

SEQ ID NO: 47922 - DNA, 22 bp, synthetic construct
  misc_feature 1..22: note = chemically synthesized
  source 1..22: mol_type = other DNA
cacgaagcccaccagtgaccta

SEQ ID NO: 47923 - DNA, 22 bp, synthetic construct
  misc_feature 1..22: note = chemically synthesized
  source 1..22: mol_type = other DNA
gctttcaagtcacacagcgaca

SEQ ID NO: 47924 - DNA, 22 bp, synthetic construct
  misc_feature 1..22: note = chemically synthesized
  source 1..22: mol_type = other DNA
tcaagtcacacagcgacagtcc

SEQ ID NO: 47925 - DNA, 22 bp, synthetic construct
  misc_feature 1..22: note = chemically synthesized
  source 1..22: mol_type = other DNA
caagtcacacagcgacagtcct

SEQ ID NO: 47926 - DNA, 22 bp, synthetic construct
  misc_feature 1..22: note = chemically synthesized
  source 1..22: mol_type = other DNA
aagtcacacagcgacagtcctg

SEQ ID NO: 47927 - DNA, 22 bp, synthetic construct
  misc_feature 1..22: note = chemically synthesized
  source 1..22: mol_type = other DNA
gcttttgctatctagaagaaca

SEQ ID NO: 47928 - DNA, 22 bp, synthetic construct
  misc_feature 1..22: note = chemically synthesized
  source 1..22: mol_type = other DNA
ttgctatctagaagaacaaaat

SEQ ID NO: 47929 - DNA, 22 bp, synthetic construct
  misc_feature 1..22: note = chemically synthesized
  source 1..22: mol_type = other DNA
tgctatctagaagaacaaaatt

SEQ ID NO: 47930 - DNA, 22 bp, synthetic construct
  misc_feature 1..22: note = chemically synthesized
  source 1..22: mol_type = other DNA
gctatctagaagaacaaaattc

SEQ ID NO: 47931 - DNA, 22 bp, synthetic construct
  misc_feature 1..22: note = chemically synthesized
  source 1..22: mol_type = other DNA
ctatctagaagaacaaaattcc

SEQ ID NO: 47932 - DNA, 22 bp, synthetic construct
  misc_feature 1..22: note = chemically synthesized
  source 1..22: mol_type = other DNA
tctagaagaacaaaattcccct

SEQ ID NO: 47933 - DNA, 22 bp, synthetic construct
  misc_feature 1..22: note = chemically synthesized
  source 1..22: mol_type = other DNA
gaagaacaaaattcccctttcc

SEQ ID NO: 47934 - DNA, 22 bp, synthetic construct
  misc_feature 1..22: note = chemically synthesized
  source 1..22: mol_type = other DNA
ccctttccagctctgcaattgc

SEQ ID NO: 47935 - DNA, 22 bp, synthetic construct
  misc_feature 1..22: note = chemically synthesized
  source 1..22: mol_type = other DNA
tccagctctgcaattgccactc

SEQ ID NO: 47936 - DNA, 22 bp, synthetic construct
  misc_feature 1..22: note = chemically synthesized
  source 1..22: mol_type = other DNA
ccagctctgcaattgccactct

SEQ ID NO: 47937 - DNA, 22 bp, synthetic construct
  misc_feature 1..22: note = chemically synthesized
  source 1..22: mol_type = other DNA
cagctctgcaattgccactctg

SEQ ID NO: 47938 - DNA, 22 bp, synthetic construct
  misc_feature 1..22: note = chemically synthesized
  source 1..22: mol_type = other DNA
tgcaattgccactctgctccct

SEQ ID NO: 47939 - DNA, 22 bp, synthetic construct
  misc_feature 1..22: note = chemically synthesized
  source 1..22: mol_type = other DNA
caattgccactctgctcccttt

SEQ ID NO: 47940 - DNA, 22 bp, synthetic construct
  misc_feature 1..22: note = chemically synthesized
  source 1..22: mol_type = other DNA
ccactctgctccctttcatctt

SEQ ID NO: 47941 - DNA, 22 bp, synthetic construct
  misc_feature 1..22: note = chemically synthesized
  source 1..22: mol_type = other DNA
tgctccctttcatcttccatct

SEQ ID NO: 47942 - DNA, 22 bp, synthetic construct
  misc_feature 1..22: note = chemically synthesized
  source 1..22: mol_type = other DNA
ctccctttcatcttccatcttg

SEQ ID NO: 47943 - DNA, 22 bp, synthetic construct
  misc_feature 1..22: note = chemically synthesized
  source 1..22: mol_type = other DNA
cctttcatcttccatcttgtgc

SEQ ID NO: 47944 - DNA, 22 bp, synthetic construct
  misc_feature 1..22: note = chemically synthesized
  source 1..22: mol_type = other DNA
tcatcttccatcttgtgcccca

SEQ ID NO: 47945 - DNA, 22 bp, synthetic construct
  misc_feature 1..22: note = chemically synthesized
  source 1..22: mol_type = other DNA
catcttccatcttgtgccccag

SEQ ID NO: 47946 - DNA, 22 bp, synthetic construct
  misc_feature 1..22: note = chemically synthesized
  source 1..22: mol_type = other DNA
atcttccatcttgtgccccagt

SEQ ID NO: 47947 - DNA, 22 bp, synthetic construct
  misc_feature 1..22: note = chemically synthesized
  source 1..22: mol_type = other DNA
ccatcttgtgccccagtcctcc

SEQ ID NO: 47948 - DNA, 22 bp, synthetic construct
  misc_feature 1..22: note = chemically synthesized
  source 1..22: mol_type = other DNA
catcttgtgccccagtcctccc

SEQ ID NO: 47949 - DNA, 22 bp, synthetic construct
  misc_feature 1..22: note = chemically synthesized
  source 1..22: mol_type = other DNA
gtgccccagtcctcccttaaag

SEQ ID NO: 47950 - DNA, 22 bp, synthetic construct
  misc_feature 1..22: note = chemically synthesized
  source 1..22: mol_type = other DNA
tgccccagtcctcccttaaagg

SEQ ID NO: 47951 - DNA, 22 bp, synthetic construct
  misc_feature 1..22: note = chemically synthesized
  source 1..22: mol_type = other DNA
ccttaaagggaaggctgcttaa

SEQ ID NO: 47952 - DNA, 22 bp, synthetic construct
  misc_feature 1..22: note = chemically synthesized
  source 1..22: mol_type = other DNA
aaagggaaggctgcttaaccct

SEQ ID NO: 47953 - DNA, 22 bp, synthetic construct
  misc_feature 1..22: note = chemically synthesized
  source 1..22: mol_type = other DNA
aagggaaggctgcttaaccctt

SEQ ID NO: 47954 - DNA, 22 bp, synthetic construct
  misc_feature 1..22: note = chemically synthesized
  source 1..22: mol_type = other DNA
cttaacccttgacgtgttcttt

SEQ ID NO: 47955 - DNA, 22 bp, synthetic construct
  misc_feature 1..22: note = chemically synthesized
  source 1..22: mol_type = other DNA
aacccttgacgtgttctttgtc

SEQ ID NO: 47956 - DNA, 22 bp, synthetic construct
  misc_feature 1..22: note = chemically synthesized
  source 1..22: mol_type = other DNA
acccttgacgtgttctttgtcc

SEQ ID NO: 47957 - DNA, 22 bp, synthetic construct
  misc_feature 1..22: note = chemically synthesized
  source 1..22: mol_type = other DNA
gacgtgttctttgtccccttct

SEQ ID NO: 47958 - DNA, 22 bp, synthetic construct
  misc_feature 1..22: note = chemically synthesized
  source 1..22: mol_type = other DNA
acgtgttctttgtccccttctt

SEQ ID NO: 47959 - DNA, 22 bp, synthetic construct
  misc_feature 1..22: note = chemically synthesized
  source 1..22: mol_type = other DNA
tttgtccccttctttctgagag

SEQ ID NO: 47960 - DNA, 22 bp, synthetic construct
  misc_feature 1..22: note = chemically synthesized
  source 1..22: mol_type = other DNA
tgtccccttctttctgagagtg

SEQ ID NO: 47961 - DNA, 22 bp, synthetic construct
  misc_feature 1..22: note = chemically synthesized
  source 1..22: mol_type = other DNA
gtccccttctttctgagagtgt

SEQ ID NO: 47962 - DNA, 22 bp, synthetic construct
  misc_feature 1..22: note = chemically synthesized
  source 1..22: mol_type = other DNA
tccccttctttctgagagtgtg

SEQ ID NO: 47963 - DNA, 22 bp, synthetic construct
  misc_feature 1..22: note = chemically synthesized
  source 1..22: mol_type = other DNA
ctttctgagagtgtggtcaatc

SEQ ID NO: 47964 - DNA, 22 bp, synthetic construct
  misc_feature 1..22: note = chemically synthesized
  source 1..22: mol_type = other DNA
tttctgagagtgtggtcaatct

SEQ ID NO: 47965 - DNA, 22 bp, synthetic construct
  misc_feature 1..22: note = chemically synthesized
  source 1..22: mol_type = other DNA
tctgagagtgtggtcaatctcc

SEQ ID NO: 47966 - DNA, 22 bp, synthetic construct
  misc_feature 1..22: note = chemically synthesized
  source 1..22: mol_type = other DNA
ctgagagtgtggtcaatctcct

SEQ ID NO: 47967 - DNA, 22 bp, synthetic construct
  misc_feature 1..22: note = chemically synthesized
  source 1..22: mol_type = other DNA
tgagagtgtggtcaatctcctc

SEQ ID NO: 47968 - DNA, 22 bp, synthetic construct
  misc_feature 1..22: note = chemically synthesized
  source 1..22: mol_type = other DNA
agagtgtggtcaatctcctctc

SEQ ID NO: 47969 - DNA, 22 bp, synthetic construct
  misc_feature 1..22: note = chemically synthesized
  source 1..22: mol_type = other DNA
ctctcaggcaaatcatctttct

SEQ ID NO: 47970 - DNA, 22 bp, synthetic construct
  misc_feature 1..22: note = chemically synthesized
  source 1..22: mol_type = other DNA
tcaggcaaatcatctttctcta

SEQ ID NO: 47971 - DNA, 22 bp, synthetic construct
  misc_feature 1..22: note = chemically synthesized
  source 1..22: mol_type = other DNA
aggcaaatcatctttctctaat

SEQ ID NO: 47972 - DNA, 22 bp, synthetic construct
  misc_feature 1..22: note = chemically synthesized
  source 1..22: mol_type = other DNA
tctctaatagccagggctcaaa

SEQ ID NO: 47973 - DNA, 22 bp, synthetic construct
  misc_feature 1..22: note = chemically synthesized
  source 1..22: mol_type = other DNA
ctctaatagccagggctcaaat

SEQ ID NO: 47974 - DNA, 22 bp, synthetic construct
  misc_feature 1..22: note = chemically synthesized
  source 1..22: mol_type = other DNA
tctaatagccagggctcaaatg

SEQ ID NO: 47975 - DNA, 22 bp, synthetic construct
  misc_feature 1..22: note = chemically synthesized
  source 1..22: mol_type = other DNA
taatagccagggctcaaatggc

SEQ ID NO: 47976 - DNA, 22 bp, synthetic construct
  misc_feature 1..22: note = chemically synthesized
  source 1..22: mol_type = other DNA
atagccagggctcaaatggcca

SEQ ID NO: 47977 - DNA, 22 bp, synthetic construct
  misc_feature 1..22: note = chemically synthesized
  source 1..22: mol_type = other DNA
aaatggccaaagaaaggtccca

SEQ ID NO: 47978 - DNA, 22 bp, synthetic construct
  misc_feature 1..22: note = chemically synthesized
  source 1..22: mol_type = other DNA
gtcttcataacactaccagcca

SEQ ID NO: 47979 - DNA, 22 bp, synthetic construct
  misc_feature 1..22: note = chemically synthesized
  source 1..22: mol_type = other DNA
tcttcataacactaccagccac

SEQ ID NO: 47980 - DNA, 22 bp, synthetic construct
  misc_feature 1..22: note = chemically synthesized
  source 1..22: mol_type = other DNA
cataacactaccagccacgtga

SEQ ID NO: 47981 - DNA, 22 bp, synthetic construct
  misc_feature 1..22: note = chemically synthesized
  source 1..22: mol_type = other DNA
ataacactaccagccacgtgag

SEQ ID NO: 47982 - DNA, 22 bp, synthetic construct
  misc_feature 1..22: note = chemically synthesized
  source 1..22: mol_type = other DNA
ccagccacgtgagcacgtccca

SEQ ID NO: 47983 - DNA, 22 bp, synthetic construct
  misc_feature 1..22: note = chemically synthesized
  source 1..22: mol_type = other DNA
cttcttcctgaccctcaccacg

SEQ ID NO: 47984 - DNA, 22 bp, synthetic construct
  misc_feature 1..22: note = chemically synthesized
  source 1..22: mol_type = other DNA
cttcctgaccctcaccacgagg

SEQ ID NO: 47985 - DNA, 22 bp, synthetic construct
  misc_feature 1..22: note = chemically synthesized
  source 1..22: mol_type = other DNA
ttcctgaccctcaccacgaggc

SEQ ID NO: 47986 - DNA, 22 bp, synthetic construct
  misc_feature 1..22: note = chemically synthesized
  source 1..22: mol_type = other DNA
cctgaccctcaccacgaggcac

SEQ ID NO: 47987 - DNA, 22 bp, synthetic construct
  misc_feature 1..22: note = chemically synthesized
  source 1..22: mol_type = other DNA
ctgaccctcaccacgaggcaca

SEQ ID NO: 47988 - DNA, 22 bp, synthetic construct
  misc_feature 1..22: note = chemically synthesized
  source 1..22: mol_type = other DNA
accctcaccacgaggcacagag

SEQ ID NO: 47989 - DNA, 22 bp, synthetic construct
  misc_feature 1..22: note = chemically synthesized
  source 1..22: mol_type = other DNA
accacgaggcacagaggcacct

SEQ ID NO: 47990 - DNA, 22 bp, synthetic construct
  misc_feature 1..22: note = chemically synthesized
  source 1..22: mol_type = other DNA
tgctgaaactcaagcaaacgcc

SEQ ID NO: 47991 - DNA, 22 bp, synthetic construct
  misc_feature 1..22: note = chemically synthesized
  source 1..22: mol_type = other DNA
aaactcaagcaaacgccacatc

SEQ ID NO: 47992 - DNA, 22 bp, synthetic construct
  misc_feature 1..22: note = chemically synthesized
  source 1..22: mol_type = other DNA
aagcaaacgccacatctgactc

SEQ ID NO: 47993 - DNA, 22 bp, synthetic construct
  misc_feature 1..22: note = chemically synthesized
  source 1..22: mol_type = other DNA
actctgcctcatgcactgaaaa

SEQ ID NO: 47994 - DNA, 22 bp, synthetic construct
  misc_feature 1..22: note = chemically synthesized
  source 1..22: mol_type = other DNA
tgcctcatgcactgaaaaagac

SEQ ID NO: 47995 - DNA, 22 bp, synthetic construct
  misc_feature 1..22: note = chemically synthesized
  source 1..22: mol_type = other DNA
cctcatgcactgaaaaagacaa

SEQ ID NO: 47996 - DNA, 22 bp, synthetic construct
  misc_feature 1..22: note = chemically synthesized
  source 1..22: mol_type = other DNA
atgcactgaaaaagacaaggga

SEQ ID NO: 47997 - DNA, 22 bp, synthetic construct
  misc_feature 1..22: note = chemically synthesized
  source 1..22: mol_type = other DNA
aaaaagacaagggatctctgtt

SEQ ID NO: 47998 - DNA, 22 bp, synthetic construct
  misc_feature 1..22: note = chemically synthesized
  source 1..22: mol_type = other DNA
tgttcttccaggagaatggggg

SEQ ID NO: 47999 - DNA, 22 bp, synthetic construct
  misc_feature 1..22: note = chemically synthesized
  source 1..22: mol_type = other DNA
ttcttccaggagaatgggggac

SEQ ID NO: 48000 - DNA, 22 bp, synthetic construct
  misc_feature 1..22: note = chemically synthesized
  source 1..22: mol_type = other DNA
ttccaggagaatgggggacagt

SEQ ID NO: 48001 - DNA, 22 bp, synthetic construct
  misc_feature 1..22: note = chemically synthesized
  source 1..22: mol_type = other DNA
ccaggagaatgggggacagtgc

SEQ ID NO: 48002 - DNA, 22 bp, synthetic construct
  misc_feature 1..22: note = chemically synthesized
  source 1..22: mol_type = other DNA
caggagaatgggggacagtgca

SEQ ID NO: 48003 - DNA, 22 bp, synthetic construct
  misc_feature 1..22: note = chemically synthesized
  source 1..22: mol_type = other DNA
aaatgaccccttcacaatgaac

SEQ ID NO: 48004 - DNA, 22 bp, synthetic construct
  misc_feature 1..22: note = chemically synthesized
  source 1..22: mol_type = other DNA
aatgaccccttcacaatgaact

SEQ ID NO: 48005 - DNA, 22 bp, synthetic construct
  misc_feature 1..22: note = chemically synthesized
  source 1..22: mol_type = other DNA
cacaatgaacttcccagataca

SEQ ID NO: 48006 - DNA, 22 bp, synthetic construct
  misc_feature 1..22: note = chemically synthesized
  source 1..22: mol_type = other DNA
acaatgaacttcccagatacaa

SEQ ID NO: 48007 - DNA, 22 bp, synthetic construct
  misc_feature 1..22: note = chemically synthesized
  source 1..22: mol_type = other DNA
cccagatacaagacttgagctc

SEQ ID NO: 48008 - DNA, 22 bp, synthetic construct
  misc_feature 1..22: note = chemically synthesized
  source 1..22: mol_type = other DNA
ccagatacaagacttgagctca

SEQ ID NO: 48009 - DNA, 22 bp, synthetic construct
  misc_feature 1..22: note = chemically synthesized
  source 1..22: mol_type = other DNA
gagctcacaggtactttcttgc

SEQ ID NO: 48010 - DNA, 22 bp, synthetic construct
  misc_feature 1..22: note = chemically synthesized
  source 1..22: mol_type = other DNA
agctcacaggtactttcttgcc

SEQ ID NO: 48011 - DNA, 22 bp, synthetic construct
  misc_feature 1..22: note = chemically synthesized
  source 1..22: mol_type = other DNA
acaggtactttcttgcccatag

SEQ ID NO: 48012 - DNA, 22 bp, synthetic construct
  misc_feature 1..22: note = chemically synthesized
  source 1..22: mol_type = other DNA
tcttgcccataggacacttgtc

SEQ ID NO: 48013 - DNA, 22 bp, synthetic construct
  misc_feature 1..22: note = chemically synthesized
  source 1..22: mol_type = other DNA
cttgcccataggacacttgtcc

SEQ ID NO: 48014 - DNA, 22 bp, synthetic construct
  misc_feature 1..22: note = chemically synthesized
  source 1..22: mol_type = other DNA
ttgcccataggacacttgtccc

SEQ ID NO: 48015 - DNA, 22 bp, synthetic construct
  misc_feature 1..22: note = chemically synthesized
  source 1..22: mol_type = other DNA
gcccataggacacttgtcccct

SEQ ID NO: 48016 - DNA, 22 bp, synthetic construct
  misc_feature 1..22: note = chemically synthesized
  source 1..22: mol_type = other DNA
cccataggacacttgtcccctt

SEQ ID NO: 48017 - DNA, 22 bp, synthetic construct
  misc_feature 1..22: note = chemically synthesized
  source 1..22: mol_type = other DNA
gtccccttgctacctctgagcc

SEQ ID NO: 48018 - DNA, 22 bp, synthetic construct
  misc_feature 1..22: note = chemically synthesized
  source 1..22: mol_type = other DNA
tccccttgctacctctgagcca

SEQ ID NO: 48019 - DNA, 22 bp, synthetic construct
  misc_feature 1..22: note = chemically synthesized
  source 1..22: mol_type = other DNA
gctacctctgagccaaaccctt

SEQ ID NO: 48020 - DNA, 22 bp, synthetic construct
  misc_feature 1..22: note = chemically synthesized
  source 1..22: mol_type = other DNA
ctacctctgagccaaacccttg

SEQ ID NO: 48021 - DNA, 22 bp, synthetic construct
  misc_feature 1..22: note = chemically synthesized
  source 1..22: mol_type = other DNA
cctctgagccaaacccttggtg

SEQ ID NO: 48022 - DNA, 22 bp, synthetic construct
  misc_feature 1..22: note = chemically synthesized
  source 1..22: mol_type = other DNA
tgagccaaacccttggtgaaga

SEQ ID NO: 48023 - DNA, 22 bp, synthetic construct
  misc_feature 1..22: note = chemically synthesized
  source 1..22: mol_type = other DNA
agccaaacccttggtgaagaaa

SEQ ID NO: 48024 - DNA, 22 bp, synthetic construct
  misc_feature 1..22: note = chemically synthesized
  source 1..22: mol_type = other DNA
ggtgaagaaacaacaccgacta

SEQ ID NO: 48025 - DNA, 22 bp, synthetic construct
  misc_feature 1..22: note = chemically synthesized
  source 1..22: mol_type = other DNA
gtgaagaaacaacaccgactaa

SEQ ID NO: 48026 - DNA, 22 bp, synthetic construct
  misc_feature 1..22: note = chemically synthesized
  source 1..22: mol_type = other DNA
aacaaggccatactgctctcca

SEQ ID NO: 48027 - DNA, 22 bp, synthetic construct
  misc_feature 1..22: note = chemically synthesized
  source 1..22: mol_type = other DNA
ctctccaccagtcaggcaatac

SEQ ID NO: 48028 - DNA, 22 bp, synthetic construct
  misc_feature 1..22: note = chemically synthesized
  source 1..22: mol_type = other DNA
tccaccagtcaggcaatacctt

SEQ ID NO: 48029 - DNA, 22 bp, synthetic construct
  misc_feature 1..22: note = chemically synthesized
  source 1..22: mol_type = other DNA
caccagtcaggcaataccttta

SEQ ID NO: 48030 - DNA, 22 bp, synthetic construct
  misc_feature 1..22: note = chemically synthesized
  source 1..22: mol_type = other DNA
tattttctggaaaaatctcaaa

SEQ ID NO: 48031 - DNA, 22 bp, synthetic construct
  misc_feature 1..22: note = chemically synthesized
  source 1..22: mol_type = other DNA
attttctggaaaaatctcaaat

SEQ ID NO: 48032 - DNA, 22 bp, synthetic construct
  misc_feature 1..22: note = chemically synthesized
  source 1..22: mol_type = other DNA
ttttctggaaaaatctcaaata

SEQ ID NO: 48033 - DNA, 22 bp, synthetic construct
  misc_feature 1..22: note = chemically synthesized
  source 1..22: mol_type = other DNA
tctggaaaaatctcaaatacta

SEQ ID NO: 48034 - DNA, 22 bp, synthetic construct
  misc_feature 1..22: note = chemically synthesized
  source 1..22: mol_type = other DNA
ctggaaaaatctcaaatactac

SEQ ID NO: 48035 - DNA, 22 bp, synthetic construct
  misc_feature 1..22: note = chemically synthesized
  source 1..22: mol_type = other DNA
tggaaaaatctcaaatactaca

SEQ ID NO: 48036 - DNA, 22 bp, synthetic construct
  misc_feature 1..22: note = chemically synthesized
  source 1..22: mol_type = other DNA
gaaaaatctcaaatactacaaa

SEQ ID NO: 48037 - DNA, 22 bp, synthetic construct
  misc_feature 1..22: note = chemically synthesized
  source 1..22: mol_type = other DNA
aaatactacaaaagtagagaga

SEQ ID NO: 48038 - DNA, 22 bp, synthetic construct
  misc_feature 1..22: note = chemically synthesized
  source 1..22: mol_type = other DNA
caaaagtagagagaatgttata

SEQ ID NO: 48039 - DNA, 22 bp, synthetic construct
  misc_feature 1..22: note = chemically synthesized
  source 1..22: mol_type = other DNA
taaatcagtccccaagtccaca

SEQ ID NO: 48040 - DNA, 22 bp, synthetic construct
  misc_feature 1..22: note = chemically synthesized
  source 1..22: mol_type = other DNA
ccagctccaaccaccacagctc

SEQ ID NO: 48041 - DNA, 22 bp, synthetic construct
  misc_feature 1..22: note = chemically synthesized
  source 1..22: mol_type = other DNA
cagctccaaccaccacagctca

SEQ ID NO: 48042 - DNA, 22 bp, synthetic construct
  misc_feature 1..22: note = chemically synthesized
  source 1..22: mol_type = other DNA
caaccaccacagctcacagtca

SEQ ID NO: 48043 - DNA, 22 bp, synthetic construct
  misc_feature 1..22: note = chemically synthesized
  source 1..22: mol_type = other DNA
acagtcattcttgtcttctgta

SEQ ID NO: 48044 - DNA, 22 bp, synthetic construct
  misc_feature 1..22: note = chemically synthesized
  source 1..22: mol_type = other DNA
ttgtcttctgtaaccctatcgc

SEQ ID NO: 48045 - DNA, 22 bp, synthetic construct
  misc_feature 1..22: note = chemically synthesized
  source 1..22: mol_type = other DNA
gtcttctgtaaccctatcgcct

SEQ ID NO: 48046 - DNA, 22 bp, synthetic construct
  misc_feature 1..22: note = chemically synthesized
  source 1..22: mol_type = other DNA
tcttctgtaaccctatcgcctc

SEQ ID NO: 48047 - DNA, 22 bp, synthetic construct
  misc_feature 1..22: note = chemically synthesized
  source 1..22: mol_type = other DNA
ctgtaaccctatcgcctcccta

SEQ ID NO: 48048 - DNA, 22 bp, synthetic construct
  misc_feature 1..22: note = chemically synthesized
  source 1..22: mol_type = other DNA
tgtaaccctatcgcctccctag

SEQ ID NO: 48049 - DNA, 22 bp, synthetic construct
  misc_feature 1..22: note = chemically synthesized
  source 1..22: mol_type = other DNA
taaccctatcgcctccctagcc

SEQ ID NO: 48050 - DNA, 22 bp, synthetic construct
  misc_feature 1..22: note = chemically synthesized
  source 1..22: mol_type = other DNA
tcgcctccctagcccattttat

SEQ ID NO: 48051 - DNA, 22 bp, synthetic construct
  misc_feature 1..22: note = chemically synthesized
  source 1..22: mol_type = other DNA
cctagcccattttattatttaa

SEQ ID NO: 48052 - DNA, 22 bp, synthetic construct
  misc_feature 1..22: note = chemically synthesized
  source 1..22: mol_type = other DNA
gcccattttattatttaagttg

SEQ ID NO: 48053 - DNA, 22 bp, synthetic construct
  misc_feature 1..22: note = chemically synthesized
  source 1..22: mol_type = other DNA
tattatttaagttgatcccaga

SEQ ID NO: 48054 - DNA, 22 bp, synthetic construct
  misc_feature 1..22: note = chemically synthesized
  source 1..22: mol_type = other DNA
attatttaagttgatcccagac

SEQ ID NO: 48055 - DNA, 22 bp, synthetic construct
  misc_feature 1..22: note = chemically synthesized
  source 1..22: mol_type = other DNA
ttatttaagttgatcccagacg

SEQ ID NO: 48056 - DNA, 22 bp, synthetic construct
  misc_feature 1..22: note = chemically synthesized
  source 1..22: mol_type = other DNA
tttaagttgatcccagacgtca

SEQ ID NO: 48057 - DNA, 22 bp, synthetic construct
  misc_feature 1..22: note = chemically synthesized
  source 1..22: mol_type = other DNA
aagttgatcccagacgtcatat

SEQ ID NO: 48058 - DNA, 22 bp, synthetic construct
  misc_feature 1..22: note = chemically synthesized
  source 1..22: mol_type = other DNA
agttgatcccagacgtcatatc

SEQ ID NO: 48059 - DNA, 22 bp, synthetic construct
  misc_feature 1..22: note = chemically synthesized
  source 1..22: mol_type = other DNA
atcccagacgtcatatcatttc

SEQ ID NO: 48060 - DNA, 22 bp, synthetic construct
  misc_feature 1..22: note = chemically synthesized
  source 1..22: mol_type = other DNA
catcagtaaacacctctgtatg

SEQ ID NO: 48061 - DNA, 22 bp, synthetic construct
  misc_feature 1..22: note = chemically synthesized
  source 1..22: mol_type = other DNA
atcagtaaacacctctgtatgt

SEQ ID NO: 48062 - DNA, 22 bp, synthetic construct
  misc_feature 1..22: note = chemically synthesized
  source 1..22: mol_type = other DNA
tgtatgtattttttaaacatag

SEQ ID NO: 48063 - DNA, 22 bp, synthetic construct
  misc_feature 1..22: note = chemically synthesized
  source 1..22: mol_type = other DNA
tatgtattttttaaacatagga

SEQ ID NO: 48064 - DNA, 22 bp, synthetic construct
  misc_feature 1..22: note = chemically synthesized
  source 1..22: mol_type = other DNA
tttaaacataggaactcgtttt

SEQ ID NO: 48065 - DNA, 22 bp, synthetic construct
  misc_feature 1..22: note = chemically synthesized
  source 1..22: mol_type = other DNA
ttaaacataggaactcgttttt

SEQ ID NO: 48066 - DNA, 22 bp, synthetic construct
  misc_feature 1..22: note = chemically synthesized
  source 1..22: mol_type = other DNA
taaacataggaactcgtttttt

SEQ ID NO: 48067 - DNA, 22 bp, synthetic construct
  misc_feature 1..22: note = chemically synthesized
  source 1..22: mol_type = other DNA
aaacataggaactcgttttttt

SEQ ID NO: 48068 - DNA, 22 bp, synthetic construct
  misc_feature 1..22: note = chemically synthesized
  source 1..22: mol_type = other DNA
aacataggaactcgtttttttt

SEQ ID NO: 48069 - DNA, 22 bp, synthetic construct
  misc_feature 1..22: note = chemically synthesized
  source 1..22: mol_type = other DNA
gttttttttcttttaaatacaa

SEQ ID NO: 48070 - DNA, 22 bp, synthetic construct
  misc_feature 1..22: note = chemically synthesized
  source 1..22: mol_type = other DNA
tttttcttttaaatacaactgc

SEQ ID NO: 48071 - DNA, 22 bp, synthetic construct
  misc_feature 1..22: note = chemically synthesized
  source 1..22: mol_type = other DNA
ttttcttttaaatacaactgca

SEQ ID NO: 48072 - DNA, 22 bp, synthetic construct
  misc_feature 1..22: note = chemically synthesized
  source 1..22: mol_type = other DNA
tttcttttaaatacaactgcaa

SEQ ID NO: 48073 - DNA, 22 bp, synthetic construct
  misc_feature 1..22: note = chemically synthesized
  source 1..22: mol_type = other DNA
ttcttttaaatacaactgcaaa

SEQ ID NO: 48074 - DNA, 22 bp, synthetic construct
  misc_feature 1..22: note = chemically synthesized
  source 1..22: mol_type = other DNA
tcttttaaatacaactgcaaaa

SEQ ID NO: 48075 - DNA, 22 bp, synthetic construct
  misc_feature 1..22: note = chemically synthesized
  source 1..22: mol_type = other DNA
cttttaaatacaactgcaaaac

SEQ ID NO: 48076 - DNA, 22 bp, synthetic construct
  misc_feature 1..22: note = chemically synthesized
  source 1..22: mol_type = other DNA
ttttaaatacaactgcaaaacc

SEQ ID NO: 48077 - DNA, 22 bp, synthetic construct
  misc_feature 1..22: note = chemically synthesized
  source 1..22: mol_type = other DNA
ttaaatacaactgcaaaaccat

SEQ ID NO: 48078 - DNA, 22 bp, synthetic construct
  misc_feature 1..22: note = chemically synthesized
  source 1..22: mol_type = other DNA
taaatacaactgcaaaaccatt

SEQ ID NO: 48079 - DNA, 22 bp, synthetic construct
  misc_feature 1..22: note = chemically synthesized
  source 1..22: mol_type = other DNA
aaatacaactgcaaaaccatta

SEQ ID NO: 48080 - DNA, 22 bp, synthetic construct
  misc_feature 1..22: note = chemically synthesized
  source 1..22: mol_type = other DNA
aatacaactgcaaaaccattat

SEQ ID NO: 48081 - DNA, 22 bp, synthetic construct
  misc_feature 1..22: note = chemically synthesized
  source 1..22: mol_type = other DNA
caaaaccattatcacacctaaa

SEQ ID NO: 48082 - DNA, 22 bp, synthetic construct
  misc_feature 1..22: note = chemically synthesized
  source 1..22: mol_type = other DNA
tcacacctaaaaataataaagt

SEQ ID NO: 48083 - DNA, 22 bp, synthetic construct
  misc_feature 1..22: note = chemically synthesized
  source 1..22: mol_type = other DNA
aaaataataaagtcacaaataa

SEQ ID NO: 48084 - DNA, 22 bp, synthetic construct
  misc_feature 1..22: note = chemically synthesized
  source 1..22: mol_type = other DNA
ccaaataggggagttattttaa

SEQ ID NO: 48085 - DNA, 22 bp, synthetic construct
  misc_feature 1..22: note = chemically synthesized
  source 1..22: mol_type = other DNA
ttttaaactcagaaatacttct

SEQ ID NO: 48086 - DNA, 22 bp, synthetic construct
  misc_feature 1..22: note = chemically synthesized
  source 1..22: mol_type = other DNA
taaactcagaaatacttctttc

SEQ ID NO: 48087 - DNA, 22 bp, synthetic construct
  misc_feature 1..22: note = chemically synthesized
  source 1..22: mol_type = other DNA
aaactcagaaatacttctttcc

SEQ ID NO: 48088 - DNA, 22 bp, synthetic construct
  misc_feature 1..22: note = chemically synthesized
  source 1..22: mol_type = other DNA
aactcagaaatacttctttcca

SEQ ID NO: 48089 - DNA, 22 bp, synthetic construct
  misc_feature 1..22: note = chemically synthesized
  source 1..22: mol_type = other DNA
agaaatacttctttccatctgg

SEQ ID NO: 48090 - DNA, 22 bp, synthetic construct
  misc_feature 1..22: note = chemically synthesized
  source 1..22: mol_type = other DNA
ctttccatctgggtcatgtttt

SEQ ID NO: 48091 - DNA, 22 bp, synthetic construct
  misc_feature 1..22: note = chemically synthesized
  source 1..22: mol_type = other DNA
tttccatctgggtcatgttttg

SEQ ID NO: 48092 - DNA, 22 bp, synthetic construct
  misc_feature 1..22: note = chemically synthesized
  source 1..22: mol_type = other DNA
tccatctgggtcatgttttgga

SEQ ID NO: 48093 - DNA, 22 bp, synthetic construct
  misc_feature 1..22: note = chemically synthesized
  source 1..22: mol_type = other DNA
ccatctgggtcatgttttggag

SEQ ID NO: 48094 - DNA, 22 bp, synthetic construct
  misc_feature 1..22: note = chemically synthesized
  source 1..22: mol_type = other DNA
catctgggtcatgttttggagg

SEQ ID NO: 48095 - DNA, 22 bp, synthetic construct
  misc_feature 1..22: note = chemically synthesized
  source 1..22: mol_type = other DNA
ggtcatgttttggaggatccct

SEQ ID NO: 48096 - DNA, 22 bp, synthetic construct
  misc_feature 1..22: note = chemically synthesized
  source 1..22: mol_type = other DNA
tggaggatcccttccagtgagg

SEQ ID NO: 48097 - DNA, 22 bp, synthetic construct
  misc_feature 1..22: note = chemically synthesized
  source 1..22: mol_type = other DNA
ggaggatcccttccagtgaggt

SEQ ID NO: 48098 - DNA, 22 bp, synthetic construct
  misc_feature 1..22: note = chemically synthesized
  source 1..22: mol_type = other DNA
gaggatcccttccagtgaggtt

SEQ ID NO: 48099 - DNA, 22 bp, synthetic construct
  misc_feature 1..22: note = chemically synthesized
  source 1..22: mol_type = other DNA
ccagtgaggttcaagactgaag

SEQ ID NO: 48100 - DNA, 22 bp, synthetic construct
  misc_feature 1..22: note = chemically synthesized
  source 1..22: mol_type = other DNA
cagtgaggttcaagactgaagc

SEQ ID NO: 48101 - DNA, 22 bp, synthetic construct
  misc_feature 1..22: note = chemically synthesized
  source 1..22: mol_type = other DNA
aagactgaagctgccaagaaaa

SEQ ID NO: 48102 - DNA, 22 bp, synthetic construct
  misc_feature 1..22: note = chemically synthesized
  source 1..22: mol_type = other DNA
aagctgccaagaaaagcttcag

SEQ ID NO: 48103 - DNA, 22 bp, synthetic construct
  misc_feature 1..22: note = chemically synthesized
  source 1..22: mol_type = other DNA
ccaagaaaagcttcagagaatc

SEQ ID NO: 48104 - DNA, 22 bp, synthetic construct
  misc_feature 1..22: note = chemically synthesized
  source 1..22: mol_type = other DNA
cagagaatcacactctctaaaa

SEQ ID NO: 48105 - DNA, 22 bp, synthetic construct
  misc_feature 1..22: note = chemically synthesized
  source 1..22: mol_type = other DNA
agagaatcacactctctaaaaa

SEQ ID NO: 48106 - DNA, 22 bp, synthetic construct
  misc_feature 1..22: note = chemically synthesized
  source 1..22: mol_type = other DNA
tctaaaaagggccttgtgtaaa

SEQ ID NO: 48107 - DNA, 22 bp, synthetic construct
  misc_feature 1..22: note = chemically synthesized
  source 1..22: mol_type = other DNA
taaaaagggccttgtgtaaagc

SEQ ID NO: 48108 - DNA, 22 bp, synthetic construct
  misc_feature 1..22: note = chemically synthesized
  source 1..22: mol_type = other DNA
aaaagggccttgtgtaaagcca

SEQ ID NO: 48109 - DNA, 22 bp, synthetic construct
  misc_feature 1..22: note = chemically synthesized
  source 1..22: mol_type = other DNA
gtgtaaagccaccttgcatgtc

SEQ ID NO: 48110 - DNA, 22 bp, synthetic construct
  misc_feature 1..22: note = chemically synthesized
  source 1..22: mol_type = other DNA
tgtaaagccaccttgcatgtca

SEQ ID NO: 48111 - DNA, 22 bp, synthetic construct
  misc_feature 1..22: note = chemically synthesized
  source 1..22: mol_type = other DNA
gcatgtcagcccaagctcctgc

SEQ ID NO: 48112 - DNA, 22 bp, synthetic construct
  misc_feature 1..22: note = chemically synthesized
  source 1..22: mol_type = other DNA
catgtcagcccaagctcctgcc

SEQ ID NO: 48113 - DNA, 22 bp, synthetic construct
  misc_feature 1..22: note = chemically synthesized
  source 1..22: mol_type = other DNA
ctgccccttgcagtcctttgcc

SEQ ID NO: 48114 - DNA, 22 bp, synthetic construct
  misc_feature 1..22: note = chemically synthesized
  source 1..22: mol_type = other DNA
ccccttgcagtcctttgccctg

SEQ ID NO: 48115 - DNA, 22 bp, synthetic construct
  misc_feature 1..22: note = chemically synthesized
  source 1..22: mol_type = other DNA
gcagtcctttgccctgttcagg

SEQ ID NO: 48116 - DNA, 22 bp, synthetic construct
  misc_feature 1..22: note = chemically synthesized
  source 1..22: mol_type = other DNA
cagtcctttgccctgttcaggg

SEQ ID NO: 48117 - DNA, 22 bp, synthetic construct
  misc_feature 1..22: note = chemically synthesized
  source 1..22: mol_type = other DNA
tgccctgttcagggctgaatgc

SEQ ID NO: 48118 - DNA, 22 bp, synthetic construct
  misc_feature 1..22: note = chemically synthesized
  source 1..22: mol_type = other DNA
gccctgttcagggctgaatgca

SEQ ID NO: 48119 - DNA, 22 bp, synthetic construct
  misc_feature 1..22: note = chemically synthesized
  source 1..22: mol_type = other DNA
ccctgttcagggctgaatgcac

SEQ ID NO: 48120 - DNA, 22 bp, synthetic construct
  misc_feature 1..22: note = chemically synthesized
  source 1..22: mol_type = other DNA
ttcagggctgaatgcaccctct

SEQ ID NO: 48121 - DNA, 22 bp, synthetic construct
  misc_feature 1..22: note = chemically synthesized
  source 1..22: mol_type = other DNA
agggctgaatgcaccctctgag

SEQ ID NO: 48122 - DNA, 22 bp, synthetic construct
  misc_feature 1..22: note = chemically synthesized
  source 1..22: mol_type = other DNA
aatgcaccctctgagagtctct

SEQ ID NO: 48123 - DNA, 22 bp, synthetic construct
  misc_feature 1..22: note = chemically synthesized
  source 1..22: mol_type = other DNA
tgagagtctctgtgacagtcct

SEQ ID NO: 48124 - DNA, 22 bp, synthetic construct
  misc_feature 1..22: note = chemically synthesized
  source 1..22: mol_type = other DNA
agagtctctgtgacagtcctcc

SEQ ID NO: 48125 - DNA, 22 bp, synthetic construct
  misc_feature 1..22: note = chemically synthesized
  source 1..22: mol_type = other DNA
tgtgacagtcctcccacatcga

SEQ ID NO: 48126 - DNA, 22 bp, synthetic construct
  misc_feature 1..22: note = chemically synthesized
  source 1..22: mol_type = other DNA
tgacagtcctcccacatcgact

SEQ ID NO: 48127 - DNA, 22 bp, synthetic construct
  misc_feature 1..22: note = chemically synthesized
  source 1..22: mol_type = other DNA
ccacatcgactgccccacaggc

SEQ ID NO: 48128 - DNA, 22 bp, synthetic construct
  misc_feature 1..22: note = chemically synthesized
  source 1..22: mol_type = other DNA
ccccacaggccctgagtctccc

SEQ ID NO: 48129 - DNA, 22 bp, synthetic construct
  misc_feature 1..22: note = chemically synthesized
  source 1..22: mol_type = other DNA
agtctccctcactccccaccat

SEQ ID NO: 48130 - DNA, 22 bp, synthetic construct
  misc_feature 1..22: note = chemically synthesized
  source 1..22: mol_type = other DNA
cctcactccccaccatgtggcc

SEQ ID NO: 48131 - DNA, 22 bp, synthetic construct
  misc_feature 1..22: note = chemically synthesized
  source 1..22: mol_type = other DNA
actccccaccatgtggcccatc

SEQ ID NO: 48132 - DNA, 22 bp, synthetic construct
  misc_feature 1..22: note = chemically synthesized
  source 1..22: mol_type = other DNA
cccaccatgtggcccatcacca

SEQ ID NO: 48133 - DNA, 22 bp, synthetic construct
  misc_feature 1..22: note = chemically synthesized
  source 1..22: mol_type = other DNA
ccagtgttcagaactggaattc

SEQ ID NO: 48134 - DNA, 22 bp, synthetic construct
  misc_feature 1..22: note = chemically synthesized
  source 1..22: mol_type = other DNA
agaactggaattcatttgtctt

SEQ ID NO: 48135 - DNA, 22 bp, synthetic construct
  misc_feature 1..22: note = chemically synthesized
  source 1..22: mol_type = other DNA
gaattcatttgtcttggaagaa

SEQ ID NO: 48136 - DNA, 22 bp, synthetic construct
  misc_feature 1..22: note = chemically synthesized
  source 1..22: mol_type = other DNA
atttgtcttggaagaaagtgtt

SEQ ID NO: 48137 - DNA, 22 bp, synthetic construct
  misc_feature 1..22: note = chemically synthesized
  source 1..22: mol_type = other DNA
gtcttggaagaaagtgttctcc

SEQ ID NO: 48138 - DNA, 22 bp, synthetic construct
  misc_feature 1..22: note = chemically synthesized
  source 1..22: mol_type = other DNA
tcttggaagaaagtgttctcct

SEQ ID NO: 48139 - DNA, 22 bp, synthetic construct
  misc_feature 1..22: note = chemically synthesized
  source 1..22: mol_type = other DNA
ggaagaaagtgttctcctggac

SEQ ID NO: 48140 - DNA, 22 bp, synthetic construct
  misc_feature 1..22: note = chemically synthesized
  source 1..22: mol_type = other DNA
gaagaaagtgttctcctggacg

SEQ ID NO: 48141 - DNA, 22 bp, synthetic construct
  misc_feature 1..22: note = chemically synthesized
  source 1..22: mol_type = other DNA
tcctggacggttctgcacagaa

SEQ ID NO: 48142 - DNA, 22 bp, synthetic construct
  misc_feature 1..22: note = chemically synthesized
  source 1..22: mol_type = other DNA
ctggacggttctgcacagaatt

SEQ ID NO: 48143 - DNA, 22 bp, synthetic construct
  misc_feature 1..22: note = chemically synthesized
  source 1..22: mol_type = other DNA
gacggttctgcacagaattcat

SEQ ID NO: 48144 - DNA, 22 bp, synthetic construct
  misc_feature 1..22: note = chemically synthesized
  source 1..22: mol_type = other DNA
tgcacagaattcattcacagag

SEQ ID NO: 48145 - DNA, 22 bp, synthetic construct
  misc_feature 1..22: note = chemically synthesized
  source 1..22: mol_type = other DNA
cacagaattcattcacagagca

SEQ ID NO: 48146 - DNA, 22 bp, synthetic construct
  misc_feature 1..22: note = chemically synthesized
  source 1..22: mol_type = other DNA
attcacagagcatgtcttggat

SEQ ID NO: 48147 - DNA, 22 bp, synthetic construct
  misc_feature 1..22: note = chemically synthesized
  source 1..22: mol_type = other DNA
acagagcatgtcttggatatac

SEQ ID NO: 48148 - DNA, 22 bp, synthetic construct
  misc_feature 1..22: note = chemically synthesized
  source 1..22: mol_type = other DNA
ggatatacagctgactagatat

SEQ ID NO: 48149 - DNA, 22 bp, synthetic construct
  misc_feature 1..22: note = chemically synthesized
  source 1..22: mol_type = other DNA
gatatacagctgactagatatg

SEQ ID NO: 48150 - DNA, 22 bp, synthetic construct
  misc_feature 1..22: note = chemically synthesized
  source 1..22: mol_type = other DNA
actagatatgtcagttatgttc

SEQ ID NO: 48151 - DNA, 22 bp, synthetic construct
  misc_feature 1..22: note = chemically synthesized
  source 1..22: mol_type = other DNA
gatatgtcagttatgttccaaa

SEQ ID NO: 48152 - DNA, 22 bp, synthetic construct
  misc_feature 1..22: note = chemically synthesized
  source 1..22: mol_type = other DNA
tgttccaaatgggttttcacag

SEQ ID NO: 48153 - DNA, 22 bp, synthetic construct
  misc_feature 1..22: note = chemically synthesized
  source 1..22: mol_type = other DNA
caaatgggttttcacaggtcaa

SEQ ID NO: 48154 - DNA, 22 bp, synthetic construct
  misc_feature 1..22: note = chemically synthesized
  source 1..22: mol_type = other DNA
tcacaggtcaaggttctgcagg

SEQ ID NO: 48155 - DNA, 22 bp, synthetic construct
  misc_feature 1..22: note = chemically synthesized
  source 1..22: mol_type = other DNA
cacaggtcaaggttctgcaggc

SEQ ID NO: 48156 - DNA, 22 bp, synthetic construct
  misc_feature 1..22: note = chemically synthesized
  source 1..22: mol_type = other DNA
acaggtcaaggttctgcaggca

SEQ ID NO: 48157 - DNA, 22 bp, synthetic construct
  misc_feature 1..22: note = chemically synthesized
  source 1..22: mol_type = other DNA
tgcaggcaagagcaaatactat

SEQ ID NO: 48158 - DNA, 22 bp, synthetic construct
  misc_feature 1..22: note = chemically synthesized
  source 1..22: mol_type = other DNA
caggcaagagcaaatactattt

SEQ ID NO: 48159 - DNA, 22 bp, synthetic construct
  misc_feature 1..22: note = chemically synthesized
  source 1..22: mol_type = other DNA
tttttagacaggataaggtcaa

SEQ ID NO: 48160 - DNA, 22 bp, synthetic construct
  misc_feature 1..22: note = chemically synthesized
  source 1..22: mol_type = other DNA
ttagacaggataaggtcaaaat

SEQ ID NO: 48161 - DNA, 22 bp, synthetic construct
  misc_feature 1..22: note = chemically synthesized
  source 1..22: mol_type = other DNA
tagacaggataaggtcaaaatg

SEQ ID NO: 48162 - DNA, 22 bp, synthetic construct
  misc_feature 1..22: note = chemically synthesized
  source 1..22: mol_type = other DNA
agacaggataaggtcaaaatgc

SEQ ID NO: 48163 - DNA, 22 bp, synthetic construct
  misc_feature 1..22: note = chemically synthesized
  source 1..22: mol_type = other DNA
gacaggataaggtcaaaatgct

SEQ ID NO: 48164 - DNA, 22 bp, synthetic construct
  misc_feature 1..22: note = chemically synthesized
  source 1..22: mol_type = other DNA
ttagagacagtgaggtctacaa

SEQ ID NO: 48165 - DNA, 22 bp, synthetic construct
  misc_feature 1..22: note = chemically synthesized
  source 1..22: mol_type = other DNA
tagagacagtgaggtctacaat

SEQ ID NO: 48166 - DNA, 22 bp, synthetic construct
  misc_feature 1..22: note = chemically synthesized
  source 1..22: mol_type = other DNA
agagacagtgaggtctacaata

SEQ ID NO: 48167 - DNA, 22 bp, synthetic construct
  misc_feature 1..22: note = chemically synthesized
  source 1..22: mol_type = other DNA
gagacagtgaggtctacaataa

SEQ ID NO: 48168 - DNA, 22 bp, synthetic construct
  misc_feature 1..22: note = chemically synthesized
  source 1..22: mol_type = other DNA
caataaaacctattgatcagcc

SEQ ID NO: 48169 - DNA, 22 bp, synthetic construct
  misc_feature 1..22: note = chemically synthesized
  source 1..22: mol_type = other DNA
ttgatcagcctctggaactagt

SEQ ID NO: 48170 - DNA, 22 bp, synthetic construct
  misc_feature 1..22: note = chemically synthesized
  source 1..22: mol_type = other DNA
atcagcctctggaactagtgct

SEQ ID NO: 48171 - DNA, 22 bp, synthetic construct
  misc_feature 1..22: note = chemically synthesized
  source 1..22: mol_type = other DNA
tggaactagtgctccagagaga

SEQ ID NO: 48172 - DNA, 22 bp, synthetic construct
  misc_feature 1..22: note = chemically synthesized
  source 1..22: mol_type = other DNA
gaactagtgctccagagagaca

SEQ ID NO: 48173 - DNA, 22 bp, synthetic construct
  misc_feature 1..22: note = chemically synthesized
  source 1..22: mol_type = other DNA
gtgctccagagagacacagaga

SEQ ID NO: 48174 - DNA, 22 bp, synthetic construct
  misc_feature 1..22: note = chemically synthesized
  source 1..22: mol_type = other DNA
cagagagacacagagattgaaa

SEQ ID NO: 48175 - DNA, 22 bp, synthetic construct
  misc_feature 1..22: note = chemically synthesized
  source 1..22: mol_type = other DNA
aaacaaaaattgcctggccgtt

SEQ ID NO: 48176 - DNA, 22 bp, synthetic construct
  misc_feature 1..22: note = chemically synthesized
  source 1..22: mol_type = other DNA
cctggccgttttctctgtagac

SEQ ID NO: 48177 - DNA, 22 bp, synthetic construct
  misc_feature 1..22: note = chemically synthesized
  source 1..22: mol_type = other DNA
gccgttttctctgtagactctg

SEQ ID NO: 48178 - DNA, 22 bp, synthetic construct
  misc_feature 1..22: note = chemically synthesized
  source 1..22: mol_type = other DNA
tctctgtagactctgtgggtaa

SEQ ID NO: 48179 - DNA, 22 bp, synthetic construct
  misc_feature 1..22: note = chemically synthesized
  source 1..22: mol_type = other DNA
ctctgtagactctgtgggtaaa

SEQ ID NO: 48180 - DNA, 22 bp, synthetic construct
  misc_feature 1..22: note = chemically synthesized
  source 1..22: mol_type = other DNA
tctgtagactctgtgggtaaaa

SEQ ID NO: 48181 - DNA, 22 bp, synthetic construct
  misc_feature 1..22: note = chemically synthesized
  source 1..22: mol_type = other DNA
tgtagactctgtgggtaaaagc

SEQ ID NO: 48182 - DNA, 22 bp, synthetic construct
  misc_feature 1..22: note = chemically synthesized
  source 1..22: mol_type = other DNA
tagactctgtgggtaaaagctt

SEQ ID NO: 48183 - DNA, 22 bp, synthetic construct
  misc_feature 1..22: note = chemically synthesized
  source 1..22: mol_type = other DNA
tgtgggtaaaagcttgttggac

SEQ ID NO: 48184 - DNA, 22 bp, synthetic construct
  misc_feature 1..22: note = chemically synthesized
  source 1..22: mol_type = other DNA
tgggtaaaagcttgttggactt

SEQ ID NO: 48185 - DNA, 22 bp, synthetic construct
  misc_feature 1..22: note = chemically synthesized
  source 1..22: mol_type = other DNA
gttggacttaatatctttcagg

SEQ ID NO: 48186 - DNA, 22 bp, synthetic construct
  misc_feature 1..22: note = chemically synthesized
  source 1..22: mol_type = other DNA
ttggacttaatatctttcagga

SEQ ID NO: 48187 - DNA, 22 bp, synthetic construct
  misc_feature 1..22: note = chemically synthesized
  source 1..22: mol_type = other DNA
gacttaatatctttcaggatat

SEQ ID NO: 48188 - DNA, 22 bp, synthetic construct
  misc_feature 1..22: note = chemically synthesized
  source 1..22: mol_type = other DNA
aatatctttcaggatataaaat

SEQ ID NO: 48189 - DNA, 22 bp, synthetic construct
  misc_feature 1..22: note = chemically synthesized
  source 1..22: mol_type = other DNA
atatctttcaggatataaaata

SEQ ID NO: 48190 - DNA, 22 bp, synthetic construct
  misc_feature 1..22: note = chemically synthesized
  source 1..22: mol_type = other DNA
tcaggatataaaataagtaaga

SEQ ID NO: 48191 - DNA, 22 bp, synthetic construct
  misc_feature 1..22: note = chemically synthesized
  source 1..22: mol_type = other DNA
caggatataaaataagtaagaa

SEQ ID NO: 48192 - DNA, 22 bp, synthetic construct
  misc_feature 1..22: note = chemically synthesized
  source 1..22: mol_type = other DNA
aggatataaaataagtaagaag

SEQ ID NO: 48193 - DNA, 22 bp, synthetic construct
  misc_feature 1..22: note = chemically synthesized
  source 1..22: mol_type = other DNA
tgtacagattactgaagtccat

SEQ ID NO: 48194 - DNA, 22 bp, synthetic construct
  misc_feature 1..22: note = chemically synthesized
  source 1..22: mol_type = other DNA
ctgaagtccatttaaccagatg

SEQ ID NO: 48195 - DNA, 22 bp, synthetic construct
  misc_feature 1..22: note = chemically synthesized
  source 1..22: mol_type = other DNA
aagtccatttaaccagatgcag

SEQ ID NO: 48196 - DNA, 22 bp, synthetic construct
  misc_feature 1..22: note = chemically synthesized
  source 1..22: mol_type = other DNA
aaccagatgcagaggcaggtca

SEQ ID NO: 48197 - DNA, 22 bp, synthetic construct
  misc_feature 1..22: note = chemically synthesized
  source 1..22: mol_type = other DNA
accagatgcagaggcaggtcac

SEQ ID NO: 48198 - DNA, 22 bp, synthetic construct
  misc_feature 1..22: note = chemically synthesized
  source 1..22: mol_type = other DNA
atggcagaaccgtaaagaaggg

SEQ ID NO: 48199 - DNA, 22 bp, synthetic construct
  misc_feature 1..22: note = chemically synthesized
  source 1..22: mol_type = other DNA
caaggcaacacgtgttgcaacc

SEQ ID NO: 48200 - DNA, 22 bp, synthetic construct
  misc_feature 1..22: note = chemically synthesized
  source 1..22: mol_type = other DNA
aaggcaacacgtgttgcaacct

SEQ ID NO: 48201 - DNA, 22 bp, synthetic construct
  misc_feature 1..22: note = chemically synthesized
  source 1..22: mol_type = other DNA
caacctagagaaagaataaaca

SEQ ID NO: 48202 - DNA, 22 bp, synthetic construct
  misc_feature 1..22: note = chemically synthesized
  source 1..22: mol_type = other DNA
gagaaagaataaacaccagtct

SEQ ID NO: 48203 - DNA, 22 bp, synthetic construct
  misc_feature 1..22: note = chemically synthesized
  source 1..22: mol_type = other DNA
ctcaactcaggggaggcacaaa

SEQ ID NO: 48204 - DNA, 22 bp, synthetic construct
  misc_feature 1..22: note = chemically synthesized
  source 1..22: mol_type = other DNA
tcaactcaggggaggcacaaag

SEQ ID NO: 48205 - DNA, 22 bp, synthetic construct
  misc_feature 1..22: note = chemically synthesized
  source 1..22: mol_type = other DNA
aactcaggggaggcacaaagga

SEQ ID NO: 48206 - DNA, 22 bp, synthetic construct
  misc_feature 1..22: note = chemically synthesized
  source 1..22: mol_type = other DNA
aggggaggcacaaaggacagcc

SEQ ID NO: 48207 - DNA, 22 bp, synthetic construct
  misc_feature 1..22: note = chemically synthesized
  source 1..22: mol_type = other DNA
ccatccaggattcctgcttggg

SEQ ID NO: 48208 - DNA, 22 bp, synthetic construct
  misc_feature 1..22: note = chemically synthesized
  source 1..22: mol_type = other DNA
ctgcttgggactgttgctccta

SEQ ID NO: 48209 - DNA, 22 bp, synthetic construct
  misc_feature 1..22: note = chemically synthesized
  source 1..22: mol_type = other DNA
cttgggactgttgctcctaaat

SEQ ID NO: 48210 - DNA, 22 bp, synthetic construct
  misc_feature 1..22: note = chemically synthesized
  source 1..22: mol_type = other DNA
gggactgttgctcctaaatttg

SEQ ID NO: 48211 - DNA, 22 bp, synthetic construct
  misc_feature 1..22: note = chemically synthesized
  source 1..22: mol_type = other DNA
ggactgttgctcctaaatttgc

SEQ ID NO: 48212 - DNA, 22 bp, synthetic construct
  misc_feature 1..22: note = chemically synthesized
  source 1..22: mol_type = other DNA
ttgctcctaaatttgccactat

SEQ ID NO: 48213 - DNA, 22 bp, synthetic construct
  misc_feature 1..22: note = chemically synthesized
  source 1..22: mol_type = other DNA
ctcctaaatttgccactatgat

SEQ ID NO: 48214 - DNA, 22 bp, synthetic construct
  misc_feature 1..22: note = chemically synthesized
  source 1..22: mol_type = other DNA
ctaaatttgccactatgatcct

SEQ ID NO: 48215 - DNA, 22 bp, synthetic construct
  misc_feature 1..22: note = chemically synthesized
  source 1..22: mol_type = other DNA
aatttgccactatgatcctcaa

SEQ ID NO: 48216 - DNA, 22 bp, synthetic construct
  misc_feature 1..22: note = chemically synthesized
  source 1..22: mol_type = other DNA
gccactatgatcctcaatccag

SEQ ID NO: 48217 - DNA, 22 bp, synthetic construct
  misc_feature 1..22: note = chemically synthesized
  source 1..22: mol_type = other DNA
ccactatgatcctcaatccagc

SEQ ID NO: 48218 - DNA, 22 bp, synthetic construct
  misc_feature 1..22: note = chemically synthesized
  source 1..22: mol_type = other DNA
tgatcctcaatccagcgctatg

SEQ ID NO: 48219 - DNA, 22 bp, synthetic construct
  misc_feature 1..22: note = chemically synthesized
  source 1..22: mol_type = other DNA
aatccagcgctatgtgaacaac

SEQ ID NO: 48220 - DNA, 22 bp, synthetic construct
  misc_feature 1..22: note = chemically synthesized
  source 1..22: mol_type = other DNA
tgtgaacaacagactttcagat

SEQ ID NO: 48221 - DNA, 22 bp, synthetic construct
  misc_feature 1..22: note = chemically synthesized
  source 1..22: mol_type = other DNA
tcagataaatagtatggagata

SEQ ID NO: 48222 - DNA, 22 bp, synthetic construct
  misc_feature 1..22: note = chemically synthesized
  source 1..22: mol_type = other DNA
cagataaatagtatggagataa

SEQ ID NO: 48223 - DNA, 22 bp, synthetic construct
  misc_feature 1..22: note = chemically synthesized
  source 1..22: mol_type = other DNA
agataaatagtatggagataat

SEQ ID NO: 48224 - DNA, 22 bp, synthetic construct
  misc_feature 1..22: note = chemically synthesized
  source 1..22: mol_type = other DNA
gcttaagtcagattttgatgaa

SEQ ID NO: 48225 - DNA, 22 bp, synthetic construct
  misc_feature 1..22: note = chemically synthesized
  source 1..22: mol_type = other DNA
cttaagtcagattttgatgaaa

SEQ ID NO: 48226 - DNA, 22 bp, synthetic construct
  misc_feature 1..22: note = chemically synthesized
  source 1..22: mol_type = other DNA
aagtcagattttgatgaaaagt

SEQ ID NO: 48227 - DNA, 22 bp, synthetic construct
  misc_feature 1..22: note = chemically synthesized
  source 1..22: mol_type = other DNA
agtcagattttgatgaaaagtg

SEQ ID NO: 48228 - DNA, 22 bp, synthetic construct
  misc_feature 1..22: note = chemically synthesized
  source 1..22: mol_type = other DNA
tgatgaaaagtggtttctacat

SEQ ID NO: 48229 - DNA, 22 bp, synthetic construct
  misc_feature 1..22: note = chemically synthesized
  source 1..22: mol_type = other DNA
gatgaaaagtggtttctacatg

SEQ ID NO: 48230 - DNA, 22 bp, synthetic construct
  misc_feature 1..22: note = chemically synthesized
  source 1..22: mol_type = other DNA
atgaaaagtggtttctacatgg

SEQ ID NO: 48231 - DNA, 22 bp, synthetic construct
  misc_feature 1..22: note = chemically synthesized
  source 1..22: mol_type = other DNA
ctacatggatagctttcaaaaa

SEQ ID NO: 48232 - DNA, 22 bp, synthetic construct
  misc_feature 1..22: note = chemically synthesized
  source 1..22: mol_type = other DNA
tacatggatagctttcaaaaac

SEQ ID NO: 48233 - DNA, 22 bp, synthetic construct
  misc_feature 1..22: note = chemically synthesized
  source 1..22: mol_type = other DNA
catggatagctttcaaaaactt

SEQ ID NO: 48234 - DNA, 22 bp, synthetic construct
  misc_feature 1..22: note = chemically synthesized
  source 1..22: mol_type = other DNA
tcaaaaacttctatattgattt

SEQ ID NO: 48235 - DNA, 22 bp, synthetic construct
  misc_feature 1..22: note = chemically synthesized
  source 1..22: mol_type = other DNA
caaaaacttctatattgatttg

SEQ ID NO: 48236 - DNA, 22 bp, synthetic construct
  misc_feature 1..22: note = chemically synthesized
  source 1..22: mol_type = other DNA
aaaaacttctatattgatttga

SEQ ID NO: 48237 - DNA, 22 bp, synthetic construct
  misc_feature 1..22: note = chemically synthesized
  source 1..22: mol_type = other DNA
ctatattgatttgatggaatca

SEQ ID NO: 48238 - DNA, 22 bp, synthetic construct
  misc_feature 1..22: note = chemically synthesized
  source 1..22: mol_type = other DNA
tatattgatttgatggaatcat

SEQ ID NO: 48239 - DNA, 22 bp, synthetic construct
  misc_feature 1..22: note = chemically synthesized
  source 1..22: mol_type = other DNA
tattgatttgatggaatcatgg

SEQ ID NO: 48240 - DNA, 22 bp, synthetic construct
  misc_feature 1..22: note = chemically synthesized
  source 1..22: mol_type = other DNA
atttgatggaatcatggtgaat

SEQ ID NO: 48241 - DNA, 22 bp, synthetic construct
  misc_feature 1..22: note = chemically synthesized
  source 1..22: mol_type = other DNA
gatggaatcatggtgaattcta

SEQ ID NO: 48242 - DNA, 22 bp, synthetic construct
  misc_feature 1..22: note = chemically synthesized
  source 1..22: mol_type = other DNA
atggaatcatggtgaattctaa

SEQ ID NO: 48243 - DNA, 22 bp, synthetic construct
  misc_feature 1..22: note = chemically synthesized
  source 1..22: mol_type = other DNA
taaagactttcctattctctct

SEQ ID NO: 48244 - DNA, 22 bp, synthetic construct
  misc_feature 1..22: note = chemically synthesized
  source 1..22: mol_type = other DNA
aagactttcctattctctctct

SEQ ID NO: 48245 - DNA, 22 bp, synthetic construct
  misc_feature 1..22: note = chemically synthesized
  source 1..22: mol_type = other DNA
tcctattctctctctctccctt

SEQ ID NO: 48246 - DNA, 22 bp, synthetic construct
  misc_feature 1..22: note = chemically synthesized
  source 1..22: mol_type = other DNA
cctattctctctctctcccttt

SEQ ID NO: 48247 - DNA, 22 bp, synthetic construct
  misc_feature 1..22: note = chemically synthesized
  source 1..22: mol_type = other DNA
ctattctctctctctccctttc

SEQ ID NO: 48248 - DNA, 22 bp, synthetic construct
  misc_feature 1..22: note = chemically synthesized
  source 1..22: mol_type = other DNA
ttctctctctctccctttctac

SEQ ID NO: 48249 - DNA, 22 bp, synthetic construct
  misc_feature 1..22: note = chemically synthesized
  source 1..22: mol_type = other DNA
tctctctctccctttctacaca

SEQ ID NO: 48250 - DNA, 22 bp, synthetic construct
  misc_feature 1..22: note = chemically synthesized
  source 1..22: mol_type = other DNA
tctctctccctttctacacaca

SEQ ID NO: 48251 - DNA, 22 bp, synthetic construct
  misc_feature 1..22: note = chemically synthesized
  source 1..22: mol_type = other DNA
tctctccctttctacacacaca

SEQ ID NO: 48252 - DNA, 22 bp, synthetic construct
  misc_feature 1..22: note = chemically synthesized
  source 1..22: mol_type = other DNA
tctccctttctacacacacaca

SEQ ID NO: 48253 - DNA, 22 bp, synthetic construct
  misc_feature 1..22: note = chemically synthesized
  source 1..22: mol_type = other DNA
tccctttctacacacacacagg

SEQ ID NO: 48254 - DNA, 22 bp, synthetic construct
  misc_feature 1..22: note = chemically synthesized
  source 1..22: mol_type = other DNA
cctttctacacacacacaggca

SEQ ID NO: 48255 - DNA, 22 bp, synthetic construct
  misc_feature 1..22: note = chemically synthesized
  source 1..22: mol_type = other DNA
tctacacacacacaggcacaca

SEQ ID NO: 48256 - DNA, 22 bp, synthetic construct
  misc_feature 1..22: note = chemically synthesized
  source 1..22: mol_type = other DNA
ctacacacacacaggcacacaa

SEQ ID NO: 48257 - DNA, 22 bp, synthetic construct
  misc_feature 1..22: note = chemically synthesized
  source 1..22: mol_type = other DNA
tacacacacacaggcacacaac

SEQ ID NO: 48258 - DNA, 22 bp, synthetic construct
  misc_feature 1..22: note = chemically synthesized
  source 1..22: mol_type = other DNA
cacacacacaggcacacaacta

SEQ ID NO: 48259 - DNA, 22 bp, synthetic construct
  misc_feature 1..22: note = chemically synthesized
  source 1..22: mol_type = other DNA
tatatatattcatacatgcata

SEQ ID NO: 48260 - DNA, 22 bp, synthetic construct
  misc_feature 1..22: note = chemically synthesized
  source 1..22: mol_type = other DNA
atacatgcatatacgtatgtat

SEQ ID NO: 48261 - DNA, 22 bp, synthetic construct
  misc_feature 1..22: note = chemically synthesized
  source 1..22: mol_type = other DNA
tatcttatgatgacagtgttga

SEQ ID NO: 48262 - DNA, 22 bp, synthetic construct
  misc_feature 1..22: note = chemically synthesized
  source 1..22: mol_type = other DNA
atcttatgatgacagtgttgat

SEQ ID NO: 48263 - DNA, 22 bp, synthetic construct
  misc_feature 1..22: note = chemically synthesized
  source 1..22: mol_type = other DNA
tcttatgatgacagtgttgatg

SEQ ID NO: 48264 - DNA, 22 bp, synthetic construct
  misc_feature 1..22: note = chemically synthesized
  source 1..22: mol_type = other DNA
atgatgacagtgttgatgtgtt

SEQ ID NO: 48265 - DNA, 22 bp, synthetic construct
  misc_feature 1..22: note = chemically synthesized
  source 1..22: mol_type = other DNA
tgatgacagtgttgatgtgttt

SEQ ID NO: 48266 - DNA, 22 bp, synthetic construct
  misc_feature 1..22: note = chemically synthesized
  source 1..22: mol_type = other DNA
atgtgtttggggattttttttt

SEQ ID NO: 48267 - DNA, 22 bp, synthetic construct
  misc_feature 1..22: note = chemically synthesized
  source 1..22: mol_type = other DNA
ggggatttttttttttttcaaa

SEQ ID NO: 48268 - DNA, 22 bp, synthetic construct
  misc_feature 1..22: note = chemically synthesized
  source 1..22: mol_type = other DNA
gggatttttttttttttcaaaa

SEQ ID NO: 48269 - DNA, 22 bp, synthetic construct
  misc_feature 1..22: note = chemically synthesized
  source 1..22: mol_type = other DNA
ttttttttttcaaaaagagtta

SEQ ID NO: 48270 - DNA, 22 bp, synthetic construct
  misc_feature 1..22: note = chemically synthesized
  source 1..22: mol_type = other DNA
tttttttttcaaaaagagttaa

SEQ ID NO: 48271 - DNA, 22 bp, synthetic construct
  misc_feature 1..22: note = chemically synthesized
  source 1..22: mol_type = other DNA
ttttttttcaaaaagagttaat

SEQ ID NO: 48272 - DNA, 22 bp, synthetic construct
  misc_feature 1..22: note = chemically synthesized
  source 1..22: mol_type = other DNA
tttttttcaaaaagagttaata

SEQ ID NO: 48273 - DNA, 22 bp, synthetic construct
  misc_feature 1..22: note = chemically synthesized
  source 1..22: mol_type = other DNA
ttttttcaaaaagagttaataa

SEQ ID NO: 48274 - DNA, 22 bp, synthetic construct
  misc_feature 1..22: note = chemically synthesized
  source 1..22: mol_type = other DNA
tttttcaaaaagagttaataag

SEQ ID NO: 48275 - DNA, 22 bp, synthetic construct
  misc_feature 1..22: note = chemically synthesized
  source 1..22: mol_type = other DNA
ttttcaaaaagagttaataagc

SEQ ID NO: 48276 - DNA, 22 bp, synthetic construct
  misc_feature 1..22: note = chemically synthesized
  source 1..22: mol_type = other DNA
tttcaaaaagagttaataagcc

SEQ ID NO: 48277 - DNA, 22 bp, synthetic construct
  misc_feature 1..22: note = chemically synthesized
  source 1..22: mol_type = other DNA
ttcaaaaagagttaataagcct

SEQ ID NO: 48278 - DNA, 22 bp, synthetic construct
  misc_feature 1..22: note = chemically synthesized
  source 1..22: mol_type = other DNA
tcaaaaagagttaataagcctt

SEQ ID NO: 48279 - DNA, 22 bp, synthetic construct
  misc_feature 1..22: note = chemically synthesized
  source 1..22: mol_type = other DNA
caaaaagagttaataagccttt

SEQ ID NO: 48280 - DNA, 22 bp, synthetic construct
  misc_feature 1..22: note = chemically synthesized
  source 1..22: mol_type = other DNA
aaaaagagttaataagcctttt

SEQ ID NO: 48281 - DNA, 22 bp, synthetic construct
  misc_feature 1..22: note = chemically synthesized
  source 1..22: mol_type = other DNA
ataagccttttataggtgtacc

SEQ ID NO: 48282 - DNA, 22 bp, synthetic construct
  misc_feature 1..22: note = chemically synthesized
  source 1..22: mol_type = other DNA
ttataggtgtaccacacaagac

SEQ ID NO: 48283 - DNA, 22 bp, synthetic construct
  misc_feature 1..22: note = chemically synthesized
  source 1..22: mol_type = other DNA
tataggtgtaccacacaagact

SEQ ID NO: 48284 - DNA, 22 bp, synthetic construct
  misc_feature 1..22: note = chemically synthesized
  source 1..22: mol_type = other DNA
ataggtgtaccacacaagactc

SEQ ID NO: 48285 - DNA, 22 bp, synthetic construct
  misc_feature 1..22: note = chemically synthesized
  source 1..22: mol_type = other DNA
taggtgtaccacacaagactcc

SEQ ID NO: 48286 - DNA, 22 bp, synthetic construct
  misc_feature 1..22: note = chemically synthesized
  source 1..22: mol_type = other DNA
cagtaagcaaaatcattcattg

SEQ ID NO: 48287 - DNA, 22 bp, synthetic construct
  misc_feature 1..22: note = chemically synthesized
  source 1..22: mol_type = other DNA
attgccaggcaaaacttgagaa

SEQ ID NO: 48288 - DNA, 22 bp, synthetic construct
  misc_feature 1..22: note = chemically synthesized
  source 1..22: mol_type = other DNA
ccaggcaaaacttgagaaatac

SEQ ID NO: 48289 - DNA, 22 bp, synthetic construct
  misc_feature 1..22: note = chemically synthesized
  source 1..22: mol_type = other DNA
gagaaatacatttagaaatcat

SEQ ID NO: 48290 - DNA, 22 bp, synthetic construct
  misc_feature 1..22: note = chemically synthesized
  source 1..22: mol_type = other DNA
agaaatacatttagaaatcata

SEQ ID NO: 48291 - DNA, 22 bp, synthetic construct
  misc_feature 1..22: note = chemically synthesized
  source 1..22: mol_type = other DNA
agaaatcatacgagcacacagg

SEQ ID NO: 48292 - DNA, 22 bp, synthetic construct
  misc_feature 1..22: note = chemically synthesized
  source 1..22: mol_type = other DNA
gaaatcatacgagcacacagga

SEQ ID NO: 48293 - DNA, 22 bp, synthetic construct
  misc_feature 1..22: note = chemically synthesized
  source 1..22: mol_type = other DNA
aatcaagtaaatgaatcaccaa

SEQ ID NO: 48294 - DNA, 22 bp, synthetic construct
  misc_feature 1..22: note = chemically synthesized
  source 1..22: mol_type = other DNA
gaaaattacttaactagcccaa

SEQ ID NO: 48295 - DNA, 22 bp, synthetic construct
  misc_feature 1..22: note = chemically synthesized
  source 1..22: mol_type = other DNA
cttaactagcccaaacgttcaa

SEQ ID NO: 48296 - DNA, 22 bp, synthetic construct
  misc_feature 1..22: note = chemically synthesized
  source 1..22: mol_type = other DNA
aactagcccaaacgttcaagaa

SEQ ID NO: 48297 - DNA, 22 bp, synthetic construct
  misc_feature 1..22: note = chemically synthesized
  source 1..22: mol_type = other DNA
actagcccaaacgttcaagaat

SEQ ID NO: 48298 - DNA, 22 bp, synthetic construct
  misc_feature 1..22: note = chemically synthesized
  source 1..22: mol_type = other DNA
gcccaaacgttcaagaattgac

SEQ ID NO: 48299 - DNA, 22 bp, synthetic construct
  misc_feature 1..22: note = chemically synthesized
  source 1..22: mol_type = other DNA
aagaattgaccaaggtttaagc

SEQ ID NO: 48300 - DNA, 22 bp, synthetic construct
  misc_feature 1..22: note = chemically synthesized
  source 1..22: mol_type = other DNA
accaaggtttaagcagtaaacc

SEQ ID NO: 48301 - DNA, 22 bp, synthetic construct
  misc_feature 1..22: note = chemically synthesized
  source 1..22: mol_type = other DNA
aagcagtaaaccctaaataatt

SEQ ID NO: 48302 - DNA, 22 bp, synthetic construct
  misc_feature 1..22: note = chemically synthesized
  source 1..22: mol_type = other DNA
agcagtaaaccctaaataattt

SEQ ID NO: 48303 - DNA, 22 bp, synthetic construct
  misc_feature 1..22: note = chemically synthesized
  source 1..22: mol_type = other DNA
aataatttatttaagccaaata

SEQ ID NO: 48304 - DNA, 22 bp, synthetic construct
  misc_feature 1..22: note = chemically synthesized
  source 1..22: mol_type = other DNA
atttaagccaaataggagcttt

SEQ ID NO: 48305 - DNA, 22 bp, synthetic construct
  misc_feature 1..22: note = chemically synthesized
  source 1..22: mol_type = other DNA
tttaagccaaataggagcttta

SEQ ID NO: 48306 - DNA, 22 bp, synthetic construct
  misc_feature 1..22: note = chemically synthesized
  source 1..22: mol_type = other DNA
aagccaaataggagctttaagc

SEQ ID NO: 48307 - DNA, 22 bp, synthetic construct
  misc_feature 1..22: note = chemically synthesized
  source 1..22: mol_type = other DNA
agccaaataggagctttaagca

SEQ ID NO: 48308 - DNA, 22 bp, synthetic construct
  misc_feature 1..22: note = chemically synthesized
  source 1..22: mol_type = other DNA
taagcacagacattaatgtaat

SEQ ID NO: 48309 - DNA, 22 bp, synthetic construct
  misc_feature 1..22: note = chemically synthesized
  source 1..22: mol_type = other DNA
aagcacagacattaatgtaatg

SEQ ID NO: 48310 - DNA, 22 bp, synthetic construct
  misc_feature 1..22: note = chemically synthesized
  source 1..22: mol_type = other DNA
agcacagacattaatgtaatgg

SEQ ID NO: 48311 - DNA, 22 bp, synthetic construct
  misc_feature 1..22: note = chemically synthesized
  source 1..22: mol_type = other DNA
atgtaatggactatcccatctt

SEQ ID NO: 48312 - DNA, 22 bp, synthetic construct
  misc_feature 1..22: note = chemically synthesized
  source 1..22: mol_type = other DNA
tcccatcttaaacttcagccag

SEQ ID NO: 48313 - DNA, 22 bp, synthetic construct
  misc_feature 1..22: note = chemically synthesized
  source 1..22: mol_type = other DNA
aaacttcagccagagatctaaa

SEQ ID NO: 48314 - DNA, 22 bp, synthetic construct
  misc_feature 1..22: note = chemically synthesized
  source 1..22: mol_type = other DNA
aacttcagccagagatctaaaa

SEQ ID NO: 48315 - DNA, 22 bp, synthetic construct
  misc_feature 1..22: note = chemically synthesized
  source 1..22: mol_type = other DNA
cagccagagatctaaaactttg

SEQ ID NO: 48316 - DNA, 22 bp, synthetic construct
  misc_feature 1..22: note = chemically synthesized
  source 1..22: mol_type = other DNA
agccagagatctaaaactttga

SEQ ID NO: 48317 - DNA, 22 bp, synthetic construct
  misc_feature 1..22: note = chemically synthesized
  source 1..22: mol_type = other DNA
aaactttgaagtcaattatgtt

SEQ ID NO: 48318 - DNA, 22 bp, synthetic construct
  misc_feature 1..22: note = chemically synthesized
  source 1..22: mol_type = other DNA
tgaagtcaattatgttcccata

SEQ ID NO: 48319 - DNA, 22 bp, synthetic construct
  misc_feature 1..22: note = chemically synthesized
  source 1..22: mol_type = other DNA
gaagtcaattatgttcccataa

SEQ ID NO: 48320 - DNA, 22 bp, synthetic construct
  misc_feature 1..22: note = chemically synthesized
  source 1..22: mol_type = other DNA
aagtcaattatgttcccataaa

SEQ ID NO: 48321 - DNA, 22 bp, synthetic construct
  misc_feature 1..22: note = chemically synthesized
  source 1..22: mol_type = other DNA
tgttcccataaatacctctcca

SEQ ID NO: 48322 - DNA, 22 bp, synthetic construct
  misc_feature 1..22: note = chemically synthesized
  source 1..22: mol_type = other DNA
ccataaatacctctccattatc

SEQ ID NO: 48323 - DNA, 22 bp, synthetic construct
  misc_feature 1..22: note = chemically synthesized
  source 1..22: mol_type = other DNA
tccattatcaggggtgctttat

SEQ ID NO: 48324 - DNA, 22 bp, synthetic construct
  misc_feature 1..22: note = chemically synthesized
  source 1..22: mol_type = other DNA
cattatcaggggtgctttattg

SEQ ID NO: 48325 - DNA, 22 bp, synthetic construct
  misc_feature 1..22: note = chemically synthesized
  source 1..22: mol_type = other DNA
tcaggggtgctttattgtttga

SEQ ID NO: 48326 - DNA, 22 bp, synthetic construct
  misc_feature 1..22: note = chemically synthesized
  source 1..22: mol_type = other DNA
tattgtttgagagactccggac

SEQ ID NO: 48327 - DNA, 22 bp, synthetic construct
  misc_feature 1..22: note = chemically synthesized
  source 1..22: mol_type = other DNA
attgtttgagagactccggacc

SEQ ID NO: 48328 - DNA, 22 bp, synthetic construct
  misc_feature 1..22: note = chemically synthesized
  source 1..22: mol_type = other DNA
ttgtttgagagactccggacca

SEQ ID NO: 48329 - DNA, 22 bp, synthetic construct
  misc_feature 1..22: note = chemically synthesized
  source 1..22: mol_type = other DNA
tttgagagactccggaccacag

SEQ ID NO: 48330 - DNA, 22 bp, synthetic construct
  misc_feature 1..22: note = chemically synthesized
  source 1..22: mol_type = other DNA
gagagactccggaccacaggaa

SEQ ID NO: 48331 - DNA, 22 bp, synthetic construct
  misc_feature 1..22: note = chemically synthesized
  source 1..22: mol_type = other DNA
agagactccggaccacaggaac

SEQ ID NO: 48332 - DNA, 22 bp, synthetic construct
  misc_feature 1..22: note = chemically synthesized
  source 1..22: mol_type = other DNA
cggaccacaggaactagtgtga

SEQ ID NO: 48333 - DNA, 22 bp, synthetic construct
  misc_feature 1..22: note = chemically synthesized
  source 1..22: mol_type = other DNA
gtgtgaaaactggagggtatct

SEQ ID NO: 48334 - DNA, 22 bp, synthetic construct
  misc_feature 1..22: note = chemically synthesized
  source 1..22: mol_type = other DNA
gagggtatcttcatttatcatc

SEQ ID NO: 48335 - DNA, 22 bp, synthetic construct
  misc_feature 1..22: note = chemically synthesized
  source 1..22: mol_type = other DNA
catttatcatccgctcccattt

SEQ ID NO: 48336 - DNA, 22 bp, synthetic construct
  misc_feature 1..22: note = chemically synthesized
  source 1..22: mol_type = other DNA
atttatcatccgctcccatttc

SEQ ID NO: 48337 - DNA, 22 bp, synthetic construct
  misc_feature 1..22: note = chemically synthesized
  source 1..22: mol_type = other DNA
atcatccgctcccatttcgcaa

SEQ ID NO: 48338 - DNA, 22 bp, synthetic construct
  misc_feature 1..22: note = chemically synthesized
  source 1..22: mol_type = other DNA
tcatccgctcccatttcgcaaa

SEQ ID NO: 48339 - DNA, 22 bp, synthetic construct
  misc_feature 1..22: note = chemically synthesized
  source 1..22: mol_type = other DNA
ccatttcgcaaacaaaatatgc

SEQ ID NO: 48340 - DNA, 22 bp, synthetic construct
  misc_feature 1..22: note = chemically synthesized
  source 1..22: mol_type = other DNA
cgcaaacaaaatatgccatggt

SEQ ID NO: 48341 - DNA, 22 bp, synthetic construct
  misc_feature 1..22: note = chemically synthesized
  source 1..22: mol_type = other DNA
gcaaacaaaatatgccatggta

SEQ ID NO: 48342 - DNA, 22 bp, synthetic construct
  misc_feature 1..22: note = chemically synthesized
  source 1..22: mol_type = other DNA
tatatcacattgtgacacagct

SEQ ID NO: 48343 - DNA, 22 bp, synthetic construct
  misc_feature 1..22: note = chemically synthesized
  source 1..22: mol_type = other DNA
tgacacagctgaccgcattagt

SEQ ID NO: 48344 - DNA, 22 bp, synthetic construct
  misc_feature 1..22: note = chemically synthesized
  source 1..22: mol_type = other DNA
accgcattagtgagccaagact

SEQ ID NO: 48345 - DNA, 22 bp, synthetic construct
  misc_feature 1..22: note = chemically synthesized
  source 1..22: mol_type = other DNA
gtgagccaagactgtcctagcg

SEQ ID NO: 48346 - DNA, 22 bp, synthetic construct
  misc_feature 1..22: note = chemically synthesized
  source 1..22: mol_type = other DNA
tcctagcggcagcttcctatca

SEQ ID NO: 48347 - DNA, 22 bp, synthetic construct
  misc_feature 1..22: note = chemically synthesized
  source 1..22: mol_type = other DNA
gcggcagcttcctatcatgcat

SEQ ID NO: 48348 - DNA, 22 bp, synthetic construct
  misc_feature 1..22: note = chemically synthesized
  source 1..22: mol_type = other DNA
cctatcatgcattaacaataca

SEQ ID NO: 48349 - DNA, 22 bp, synthetic construct
  misc_feature 1..22: note = chemically synthesized
  source 1..22: mol_type = other DNA
ctatcatgcattaacaatacaa

SEQ ID NO: 48350 - DNA, 22 bp, synthetic construct
  misc_feature 1..22: note = chemically synthesized
  source 1..22: mol_type = other DNA
tcatgcattaacaatacaacgg

SEQ ID NO: 48351 - DNA, 22 bp, synthetic construct
  misc_feature 1..22: note = chemically synthesized
  source 1..22: mol_type = other DNA
acaatacaacggctgatacatt

SEQ ID NO: 48352 - DNA, 22 bp, synthetic construct
  misc_feature 1..22: note = chemically synthesized
  source 1..22: mol_type = other DNA
atacatttgcacaacacaataa

SEQ ID NO: 48353 - DNA, 22 bp, synthetic construct
  misc_feature 1..22: note = chemically synthesized
  source 1..22: mol_type = other DNA
gcacaacacaataagaggtggg

SEQ ID NO: 48354 - DNA, 22 bp, synthetic construct
  misc_feature 1..22: note = chemically synthesized
  source 1..22: mol_type = other DNA
cacaacacaataagaggtgggg

SEQ ID NO: 48355 - DNA, 22 bp, synthetic construct
  misc_feature 1..22: note = chemically synthesized
  source 1..22: mol_type = other DNA
ggctatgaaatcctaaacttca

SEQ ID NO: 48356 - DNA, 22 bp, synthetic construct
  misc_feature 1..22: note = chemically synthesized
  source 1..22: mol_type = other DNA
tgaaatcctaaacttcatgtct

SEQ ID NO: 48357 - DNA, 22 bp, synthetic construct
  misc_feature 1..22: note = chemically synthesized
  source 1..22: mol_type = other DNA
aacttcatgtctgaatacataa

SEQ ID NO: 48358 - DNA, 22 bp, synthetic construct
  misc_feature 1..22: note = chemically synthesized
  source 1..22: mol_type = other DNA
catgtctgaatacataattttg

SEQ ID NO: 48359 - DNA, 22 bp, synthetic construct
  misc_feature 1..22: note = chemically synthesized
  source 1..22: mol_type = other DNA
atgtctgaatacataattttgt

SEQ ID NO: 48360 - DNA, 22 bp, synthetic construct
  misc_feature 1..22: note = chemically synthesized
  source 1..22: mol_type = other DNA
aatacataattttgtcacctat

SEQ ID NO: 48361 - DNA, 22 bp, synthetic construct
  misc_feature 1..22: note = chemically synthesized
  source 1..22: mol_type = other DNA
tgtcacctatctctggcatgaa

SEQ ID NO: 48362 - DNA, 22 bp, synthetic construct
  misc_feature 1..22: note = chemically synthesized
  source 1..22: mol_type = other DNA
gtcacctatctctggcatgaat

SEQ ID NO: 48363 - DNA, 22 bp, synthetic construct
  misc_feature 1..22: note = chemically synthesized
  source 1..22: mol_type = other DNA
tcacctatctctggcatgaatg

SEQ ID NO: 48364 - DNA, 22 bp, synthetic construct
  misc_feature 1..22: note = chemically synthesized
  source 1..22: mol_type = other DNA
tctctggcatgaatgttatcat

SEQ ID NO: 48365 - DNA, 22 bp, synthetic construct
  misc_feature 1..22: note = chemically synthesized
  source 1..22: mol_type = other DNA
tggcatgaatgttatcatgctt

SEQ ID NO: 48366 - DNA, 22 bp, synthetic construct
  misc_feature 1..22: note = chemically synthesized
  source 1..22: mol_type = other DNA
gcatgaatgttatcatgctttt

SEQ ID NO: 48367 - DNA, 22 bp, synthetic construct
  misc_feature 1..22: note = chemically synthesized
  source 1..22: mol_type = other DNA
tcatgcttttatttcaggtaat

SEQ ID NO: 48368 - DNA, 22 bp, synthetic construct
  misc_feature 1..22: note = chemically synthesized
  source 1..22: mol_type = other DNA
ttatttcaggtaataatggaag

SEQ ID NO: 48369 - DNA, 22 bp, synthetic construct
  misc_feature 1..22: note = chemically synthesized
  source 1..22: mol_type = other DNA
tatttcaggtaataatggaagg

SEQ ID NO: 48370 - DNA, 22 bp, synthetic construct
  misc_feature 1..22: note = chemically synthesized
  source 1..22: mol_type = other DNA
atttcaggtaataatggaaggg

SEQ ID NO: 48371 - DNA, 22 bp, synthetic construct
  misc_feature 1..22: note = chemically synthesized
  source 1..22: mol_type = other DNA
tttcaggtaataatggaagggg

SEQ ID NO: 48372 - DNA, 22 bp, synthetic construct
  misc_feature 1..22: note = chemically synthesized
  source 1..22: mol_type = other DNA
caggtaataatggaaggggaaa

SEQ ID NO: 48373 - DNA, 22 bp, synthetic construct
  misc_feature 1..22: note = chemically synthesized
  source 1..22: mol_type = other DNA
aggtaataatggaaggggaaag

SEQ ID NO: 48374 - DNA, 22 bp, synthetic construct
  misc_feature 1..22: note = chemically synthesized
  source 1..22: mol_type = other DNA
tggggggctgccattcattcgg

SEQ ID NO: 48375 - DNA, 22 bp, synthetic construct
  misc_feature 1..22: note = chemically synthesized
  source 1..22: mol_type = other DNA
gggggctgccattcattcggcc

SEQ ID NO: 48376 - DNA, 22 bp, synthetic construct
  misc_feature 1..22: note = chemically synthesized
  source 1..22: mol_type = other DNA
ccattcattcggcctgttattt

SEQ ID NO: 48377 - DNA, 22 bp, synthetic construct
  misc_feature 1..22: note = chemically synthesized
  source 1..22: mol_type = other DNA
attcggcctgttatttgctttt

SEQ ID NO: 48378 - DNA, 22 bp, synthetic construct
  misc_feature 1..22: note = chemically synthesized
  source 1..22: mol_type = other DNA
ggcctgttatttgcttttgggt

SEQ ID NO: 48379 - DNA, 22 bp, synthetic construct
  misc_feature 1..22: note = chemically synthesized
  source 1..22: mol_type = other DNA
ttatttgcttttgggttgggtt

SEQ ID NO: 48380 - DNA, 22 bp, synthetic construct
  misc_feature 1..22: note = chemically synthesized
  source 1..22: mol_type = other DNA
tttgcttttgggttgggttagg

SEQ ID NO: 48381 - DNA, 22 bp, synthetic construct
  misc_feature 1..22: note = chemically synthesized
  source 1..22: mol_type = other DNA
gcttttgggttgggttagggct

SEQ ID NO: 48382 - DNA, 22 bp, synthetic construct
  misc_feature 1..22: note = chemically synthesized
  source 1..22: mol_type = other DNA
cttttgggttgggttagggcta

SEQ ID NO: 48383 - DNA, 22 bp, synthetic construct
  misc_feature 1..22: note = chemically synthesized
  source 1..22: mol_type = other DNA
ttgggttgggttagggctaaac

SEQ ID NO: 48384 - DNA, 22 bp, synthetic construct
  misc_feature 1..22: note = chemically synthesized
  source 1..22: mol_type = other DNA
tgggttgggttagggctaaact

SEQ ID NO: 48385 - DNA, 22 bp, synthetic construct
  misc_feature 1..22: note = chemically synthesized
  source 1..22: mol_type = other DNA
gggttgggttagggctaaactt

SEQ ID NO: 48386 - DNA, 22 bp, synthetic construct
  misc_feature 1..22: note = chemically synthesized
  source 1..22: mol_type = other DNA
ggttgggttagggctaaacttt

SEQ ID NO: 48387 - DNA, 22 bp, synthetic construct
  misc_feature 1..22: note = chemically synthesized
  source 1..22: mol_type = other DNA
ggttagggctaaactttatgtt

SEQ ID NO: 48388 - DNA, 22 bp, synthetic construct
  misc_feature 1..22: note = chemically synthesized
  source 1..22: mol_type = other DNA
gggctaaactttatgttccttg

SEQ ID NO: 48389 - DNA, 22 bp, synthetic construct
  misc_feature 1..22: note = chemically synthesized
  source 1..22: mol_type = other DNA
aactttatgttccttgtttttg

SEQ ID NO: 48390 - DNA, 22 bp, synthetic construct
  misc_feature 1..22: note = chemically synthesized
  source 1..22: mol_type = other DNA
tatgttccttgtttttgttttt

SEQ ID NO: 48391 - DNA, 22 bp, synthetic construct
  misc_feature 1..22: note = chemically synthesized
  source 1..22: mol_type = other DNA
atgttccttgtttttgtttttg

SEQ ID NO: 48392 - DNA, 22 bp, synthetic construct
  misc_feature 1..22: note = chemically synthesized
  source 1..22: mol_type = other DNA
tgttccttgtttttgtttttgt

SEQ ID NO: 48393 - DNA, 22 bp, synthetic construct
  misc_feature 1..22: note = chemically synthesized
  source 1..22: mol_type = other DNA
cttgtttttgtttttgtttttt

SEQ ID NO: 48394 - DNA, 22 bp, synthetic construct
  misc_feature 1..22: note = chemically synthesized
  source 1..22: mol_type = other DNA
gtttttgtttttgttttttttt

SEQ ID NO: 48395 - DNA, 22 bp, synthetic construct
  misc_feature 1..22: note = chemically synthesized
  source 1..22: mol_type = other DNA
tttttgtttttgtttttttttc

SEQ ID NO: 48396 - DNA, 22 bp, synthetic construct
  misc_feature 1..22: note = chemically synthesized
  source 1..22: mol_type = other DNA
ttgtttttgtttttttttcttt

SEQ ID NO: 48397 - DNA, 22 bp, synthetic construct
  misc_feature 1..22: note = chemically synthesized
  source 1..22: mol_type = other DNA
tgtttttgtttttttttctttt

SEQ ID NO: 48398 - DNA, 22 bp, synthetic construct
  misc_feature 1..22: note = chemically synthesized
  source 1..22: mol_type = other DNA
gtttttgtttttttttcttttt

SEQ ID NO: 48399 - DNA, 22 bp, synthetic construct
  misc_feature 1..22: note = chemically synthesized
  source 1..22: mol_type = other DNA
tttttgtttttttttctttttt

SEQ ID NO: 48400 - DNA, 22 bp, synthetic construct
  misc_feature 1..22: note = chemically synthesized
  source 1..22: mol_type = other DNA
ttgtttttttttcttttttctt

SEQ ID NO: 48401 - DNA, 22 bp, synthetic construct
  misc_feature 1..22: note = chemically synthesized
  source 1..22: mol_type = other DNA
tgtttttttttcttttttcttg

SEQ ID NO: 48402 - DNA, 22 bp, synthetic construct
  misc_feature 1..22: note = chemically synthesized
  source 1..22: mol_type = other DNA
gtttttttttcttttttcttgt

SEQ ID NO: 48403 - DNA, 22 bp, synthetic construct
  misc_feature 1..22: note = chemically synthesized
  source 1..22: mol_type = other DNA
tttttttttcttttttcttgtt

SEQ ID NO: 48404 - DNA, 22 bp, synthetic construct
  misc_feature 1..22: note = chemically synthesized
  source 1..22: mol_type = other DNA
ttttttcttttttcttgttttt

SEQ ID NO: 48405 - DNA, 22 bp, synthetic construct
  misc_feature 1..22: note = chemically synthesized
  source 1..22: mol_type = other DNA
tttttcttttttcttgtttttt

SEQ ID NO: 48406 - DNA, 22 bp, synthetic construct
  misc_feature 1..22: note = chemically synthesized
  source 1..22: mol_type = other DNA
ttttcttttttcttgtttttta

SEQ ID NO: 48407 - DNA, 22 bp, synthetic construct
  misc_feature 1..22: note = chemically synthesized
  source 1..22: mol_type = other DNA
tttcttttttcttgttttttaa

SEQ ID NO: 48408 - DNA, 22 bp, synthetic construct
  misc_feature 1..22: note = chemically synthesized
  source 1..22: mol_type = other DNA
ttcttttttcttgttttttaag

SEQ ID NO: 48409 - DNA, 22 bp, synthetic construct
  misc_feature 1..22: note = chemically synthesized
  source 1..22: mol_type = other DNA
tcttttttcttgttttttaaga

SEQ ID NO: 48410 - DNA, 22 bp, synthetic construct
  misc_feature 1..22: note = chemically synthesized
  source 1..22: mol_type = other DNA
cttttttcttgttttttaagat

SEQ ID NO: 48411 - DNA, 22 bp, synthetic construct
  misc_feature 1..22: note = chemically synthesized
  source 1..22: mol_type = other DNA
ttttttcttgttttttaagatt

SEQ ID NO: 48412 - DNA, 22 bp, synthetic construct
  misc_feature 1..22: note = chemically synthesized
  source 1..22: mol_type = other DNA
ttttcttgttttttaagatttt

SEQ ID NO: 48413 - DNA, 22 bp, synthetic construct
  misc_feature 1..22: note = chemically synthesized
  source 1..22: mol_type = other DNA
tttcttgttttttaagatttta

SEQ ID NO: 48414 - DNA, 22 bp, synthetic construct
  misc_feature 1..22: note = chemically synthesized
  source 1..22: mol_type = other DNA
ttcttgttttttaagattttat

SEQ ID NO: 48415 - DNA, 22 bp, synthetic construct
  misc_feature 1..22: note = chemically synthesized
  source 1..22: mol_type = other DNA
tcttgttttttaagattttatt

SEQ ID NO: 48416 - DNA, 22 bp, synthetic construct
  misc_feature 1..22: note = chemically synthesized
  source 1..22: mol_type = other DNA
cttgttttttaagattttattt

SEQ ID NO: 48417 - DNA, 22 bp, synthetic construct
  misc_feature 1..22: note = chemically synthesized
  source 1..22: mol_type = other DNA
ttgttttttaagattttatttt

SEQ ID NO: 48418 - DNA, 22 bp, synthetic construct
  misc_feature 1..22: note = chemically synthesized
  source 1..22: mol_type = other DNA
gttttttaagattttattttgt

SEQ ID NO: 48419 - DNA, 22 bp, synthetic construct
  misc_feature 1..22: note = chemically synthesized
  source 1..22: mol_type = other DNA
ttttttaagattttattttgtt

SEQ ID NO: 48420 - DNA, 22 bp, synthetic construct
  misc_feature 1..22: note = chemically synthesized
  source 1..22: mol_type = other DNA
tttaagattttattttgttacc

SEQ ID NO: 48421 - DNA, 22 bp, synthetic construct
  misc_feature 1..22: note = chemically synthesized
  source 1..22: mol_type = other DNA
ttaagattttattttgttacca

SEQ ID NO: 48422 - DNA, 22 bp, synthetic construct
  misc_feature 1..22: note = chemically synthesized
  source 1..22: mol_type = other DNA
taagattttattttgttaccag

SEQ ID NO: 48423 - DNA, 22 bp, synthetic construct
  misc_feature 1..22: note = chemically synthesized
  source 1..22: mol_type = other DNA
aagattttattttgttaccaga

SEQ ID NO: 48424 - DNA, 22 bp, synthetic construct
  misc_feature 1..22: note = chemically synthesized
  source 1..22: mol_type = other DNA
agattttattttgttaccagag

SEQ ID NO: 48425 - DNA, 22 bp, synthetic construct
  misc_feature 1..22: note = chemically synthesized
  source 1..22: mol_type = other DNA
tattttgttaccagagatagaa

SEQ ID NO: 48426 - DNA, 22 bp, synthetic construct
  misc_feature 1..22: note = chemically synthesized
  source 1..22: mol_type = other DNA
attttgttaccagagatagaag

SEQ ID NO: 48427 - DNA, 22 bp, synthetic construct
  misc_feature 1..22: note = chemically synthesized
  source 1..22: mol_type = other DNA
ttttgttaccagagatagaaga

SEQ ID NO: 48428 - DNA, 22 bp, synthetic construct
  misc_feature 1..22: note = chemically synthesized
  source 1..22: mol_type = other DNA
tgttaccagagatagaagagca

SEQ ID NO: 48429 - DNA, 22 bp, synthetic construct
  misc_feature 1..22: note = chemically synthesized
  source 1..22: mol_type = other DNA
gttaccagagatagaagagcat

SEQ ID NO: 48430 - DNA, 22 bp, synthetic construct
  misc_feature 1..22: note = chemically synthesized
  source 1..22: mol_type = other DNA
ttaccagagatagaagagcatg

SEQ ID NO: 48431 - DNA, 22 bp, synthetic construct
  misc_feature 1..22: note = chemically synthesized
  source 1..22: mol_type = other DNA
ccagagatagaagagcatgcaa

SEQ ID NO: 48432 - DNA, 22 bp, synthetic construct
  misc_feature 1..22: note = chemically synthesized
  source 1..22: mol_type = other DNA
attaccagtgcccttacagagc

SEQ ID NO: 48433 - DNA, 22 bp, synthetic construct
  misc_feature 1..22: note = chemically synthesized
  source 1..22: mol_type = other DNA
ccagtgcccttacagagcatgc

SEQ ID NO: 48434 - DNA, 22 bp, synthetic construct
  misc_feature 1..22: note = chemically synthesized
  source 1..22: mol_type = other DNA
acagagcatgcctattaaaaat

SEQ ID NO: 48435 - DNA, 22 bp, synthetic construct
  misc_feature 1..22: note = chemically synthesized
  source 1..22: mol_type = other DNA
cagagcatgcctattaaaaatc

SEQ ID NO: 48436 - DNA, 22 bp, synthetic construct
  misc_feature 1..22: note = chemically synthesized
  source 1..22: mol_type = other DNA
ttaaaaatccccaaaacattat

SEQ ID NO: 48437 - DNA, 22 bp, synthetic construct
  misc_feature 1..22: note = chemically synthesized
  source 1..22: mol_type = other DNA
aaaatccccaaaacattataaa

SEQ ID NO: 48438 - DNA, 22 bp, synthetic construct
  misc_feature 1..22: note = chemically synthesized
  source 1..22: mol_type = other DNA
taaattaaagaggcagtaattt

SEQ ID NO: 48439 - DNA, 22 bp, synthetic construct
  misc_feature 1..22: note = chemically synthesized
  source 1..22: mol_type = other DNA
aagaggcagtaatttaaataaa

SEQ ID NO: 48440 - DNA, 22 bp, synthetic construct
  misc_feature 1..22: note = chemically synthesized
  source 1..22: mol_type = other DNA
aaataaattacctttttattga

SEQ ID NO: 48441 - DNA, 22 bp, synthetic construct
  misc_feature 1..22: note = chemically synthesized
  source 1..22: mol_type = other DNA
aataaattacctttttattgaa

SEQ ID NO: 48442 - DNA, 22 bp, synthetic construct
  misc_feature 1..22: note = chemically synthesized
  source 1..22: mol_type = other DNA
cctttttattgaagctatagat

SEQ ID NO: 48443 - DNA, 22 bp, synthetic construct
  misc_feature 1..22: note = chemically synthesized
  source 1..22: mol_type = other DNA
tttattgaagctatagatctca

SEQ ID NO: 48444 - DNA, 22 bp, synthetic construct
  misc_feature 1..22: note = chemically synthesized
  source 1..22: mol_type = other DNA
ttattgaagctatagatctcaa

SEQ ID NO: 48445 - DNA, 22 bp, synthetic construct
  misc_feature 1..22: note = chemically synthesized
  source 1..22: mol_type = other DNA
tattgaagctatagatctcaag

SEQ ID NO: 48446 - DNA, 22 bp, synthetic construct
  misc_feature 1..22: note = chemically synthesized
  source 1..22: mol_type = other DNA
attgaagctatagatctcaaga

SEQ ID NO: 48447 - DNA, 22 bp, synthetic construct
  misc_feature 1..22: note = chemically synthesized
  source 1..22: mol_type = other DNA
ttgaagctatagatctcaagag

SEQ ID NO: 48448 - DNA, 22 bp, synthetic construct
  misc_feature 1..22: note = chemically synthesized
  source 1..22: mol_type = other DNA
aagctatagatctcaagagtgc

SEQ ID NO: 48449 - DNA, 22 bp, synthetic construct
  misc_feature 1..22: note = chemically synthesized
  source 1..22: mol_type = other DNA
tagatctcaagagtgcctgtgt

SEQ ID NO: 48450 - DNA, 22 bp, synthetic construct
  misc_feature 1..22: note = chemically synthesized
  source 1..22: mol_type = other DNA
aagagtgcctgtgtcctacaag

SEQ ID NO: 48451 - DNA, 22 bp, synthetic construct
  misc_feature 1..22: note = chemically synthesized
  source 1..22: mol_type = other DNA
tgtcctacaaggaacacatatt

SEQ ID NO: 48452 - DNA, 22 bp, synthetic construct
  misc_feature 1..22: note = chemically synthesized
  source 1..22: mol_type = other DNA
caaggaacacatatttcacaac

SEQ ID NO: 48453 - DNA, 22 bp, synthetic construct
  misc_feature 1..22: note = chemically synthesized
  source 1..22: mol_type = other DNA
cacaactgattcatttgcccct

SEQ ID NO: 48454 - DNA, 22 bp, synthetic construct
  misc_feature 1..22: note = chemically synthesized
  source 1..22: mol_type = other DNA
acaactgattcatttgcccctt

SEQ ID NO: 48455 - DNA, 22 bp, synthetic construct
  misc_feature 1..22: note = chemically synthesized
  source 1..22: mol_type = other DNA
attcatttgccccttactctga

SEQ ID NO: 48456 - DNA, 22 bp, synthetic construct
  misc_feature 1..22: note = chemically synthesized
  source 1..22: mol_type = other DNA
atttgccccttactctgagcac

SEQ ID NO: 48457 - DNA, 22 bp, synthetic construct
  misc_feature 1..22: note = chemically synthesized
  source 1..22: mol_type = other DNA
gccccttactctgagcacatgg

SEQ ID NO: 48458 - DNA, 22 bp, synthetic construct
  misc_feature 1..22: note = chemically synthesized
  source 1..22: mol_type = other DNA
ccccttactctgagcacatggg

SEQ ID NO: 48459 - DNA, 22 bp, synthetic construct
  misc_feature 1..22: note = chemically synthesized
  source 1..22: mol_type = other DNA
actctgagcacatgggataata

SEQ ID NO: 48460 - DNA, 22 bp, synthetic construct
  misc_feature 1..22: note = chemically synthesized
  source 1..22: mol_type = other DNA
ctctgagcacatgggataataa

SEQ ID NO: 48461 - DNA, 22 bp, synthetic construct
  misc_feature 1..22: note = chemically synthesized
  source 1..22: mol_type = other DNA
tgagcacatgggataataaaag

SEQ ID NO: 48462 - DNA, 22 bp, synthetic construct
  misc_feature 1..22: note = chemically synthesized
  source 1..22: mol_type = other DNA
agcacatgggataataaaagaa

SEQ ID NO: 48463 - DNA, 22 bp, synthetic construct
  misc_feature 1..22: note = chemically synthesized
  source 1..22: mol_type = other DNA
tagatcatcattatccaaagga

SEQ ID NO: 48464 - DNA, 22 bp, synthetic construct
  misc_feature 1..22: note = chemically synthesized
  source 1..22: mol_type = other DNA
agatcatcattatccaaaggat

SEQ ID NO: 48465 - DNA, 22 bp, synthetic construct
  misc_feature 1..22: note = chemically synthesized
  source 1..22: mol_type = other DNA
gatcatcattatccaaaggata

SEQ ID NO: 48466 - DNA, 22 bp, synthetic construct
  misc_feature 1..22: note = chemically synthesized
  source 1..22: mol_type = other DNA
tccaaaggataactttgaatgc

SEQ ID NO: 48467 - DNA, 22 bp, synthetic construct
  misc_feature 1..22: note = chemically synthesized
  source 1..22: mol_type = other DNA
tgaatgccctttttcagcatgc

SEQ ID NO: 48468 - DNA, 22 bp, synthetic construct
  misc_feature 1..22: note = chemically synthesized
  source 1..22: mol_type = other DNA
gaatgccctttttcagcatgct

SEQ ID NO: 48469 - DNA, 22 bp, synthetic construct
  misc_feature 1..22: note = chemically synthesized
  source 1..22: mol_type = other DNA
aatgccctttttcagcatgctt

SEQ ID NO: 48470 - DNA, 22 bp, synthetic construct
  misc_feature 1..22: note = chemically synthesized
  source 1..22: mol_type = other DNA
tttcagcatgcttctgaaaaca

SEQ ID NO: 48471 - DNA, 22 bp, synthetic construct
  misc_feature 1..22: note = chemically synthesized
  source 1..22: mol_type = other DNA
ttcagcatgcttctgaaaacat

SEQ ID NO: 48472 - DNA, 22 bp, synthetic construct
  misc_feature 1..22: note = chemically synthesized
  source 1..22: mol_type = other DNA
tcagcatgcttctgaaaacatt

SEQ ID NO: 48473 - DNA, 22 bp, synthetic construct
  misc_feature 1..22: note = chemically synthesized
  source 1..22: mol_type = other DNA
cagcatgcttctgaaaacattt

SEQ ID NO: 48474 - DNA, 22 bp, synthetic construct
  misc_feature 1..22: note = chemically synthesized
  source 1..22: mol_type = other DNA
agcatgcttctgaaaacatttc

SEQ ID NO: 48475 - DNA, 22 bp, synthetic construct
  misc_feature 1..22: note = chemically synthesized
  source 1..22: mol_type = other DNA
ctgaaaacatttcatatctcat

SEQ ID NO: 48476 - DNA, 22 bp, synthetic construct
  misc_feature 1..22: note = chemically synthesized
  source 1..22: mol_type = other DNA
tgaaaacatttcatatctcatt

SEQ ID NO: 48477 - DNA, 22 bp, synthetic construct
  misc_feature 1..22: note = chemically synthesized
  source 1..22: mol_type = other DNA
aaaacatttcatatctcattca

SEQ ID NO: 48478 - DNA, 22 bp, synthetic construct
  misc_feature 1..22: note = chemically synthesized
  source 1..22: mol_type = other DNA
catatctcattcaatgccacat

SEQ ID NO: 48479 - DNA, 22 bp, synthetic construct
  misc_feature 1..22: note = chemically synthesized
  source 1..22: mol_type = other DNA
atatctcattcaatgccacata

SEQ ID NO: 48480 - DNA, 22 bp, synthetic construct
  misc_feature 1..22: note = chemically synthesized
  source 1..22: mol_type = other DNA
attcaatgccacatataaatgg

SEQ ID NO: 48481 - DNA, 22 bp, synthetic construct
  misc_feature 1..22: note = chemically synthesized
  source 1..22: mol_type = other DNA
aatgccacatataaatggtatt

SEQ ID NO: 48482 - DNA, 22 bp, synthetic construct
  misc_feature 1..22: note = chemically synthesized
  source 1..22: mol_type = other DNA
gctggacagtgtggaaaacaga

SEQ ID NO: 48483 - DNA, 22 bp, synthetic construct
  misc_feature 1..22: note = chemically synthesized
  source 1..22: mol_type = other DNA
ctggacagtgtggaaaacagaa

SEQ ID NO: 48484 - DNA, 22 bp, synthetic construct
  misc_feature 1..22: note = chemically synthesized
  source 1..22: mol_type = other DNA
gacagtgtggaaaacagaaaca

SEQ ID NO: 48485 - DNA, 22 bp, synthetic construct
  misc_feature 1..22: note = chemically synthesized
  source 1..22: mol_type = other DNA
aaagccaatggtaaacaccaag

SEQ ID NO: 48486 - DNA, 22 bp, synthetic construct
  misc_feature 1..22: note = chemically synthesized
  source 1..22: mol_type = other DNA
aaaaaatggattgcaaagatcg

SEQ ID NO: 48487 - DNA, 22 bp, synthetic construct
  misc_feature 1..22: note = chemically synthesized
  source 1..22: mol_type = other DNA
aaaaatggattgcaaagatcgc

SEQ ID NO: 48488 - DNA, 22 bp, synthetic construct
  misc_feature 1..22: note = chemically synthesized
  source 1..22: mol_type = other DNA
caaagatcgcatgtcccagaac

SEQ ID NO: 48489 - DNA, 22 bp, synthetic construct
  misc_feature 1..22: note = chemically synthesized
  source 1..22: mol_type = other DNA
ttacctacatgatgaataaaaa

SEQ ID NO: 48490 - DNA, 22 bp, synthetic construct
  misc_feature 1..22: note = chemically synthesized
  source 1..22: mol_type = other DNA
tacctacatgatgaataaaaaa

SEQ ID NO: 48491 - DNA, 22 bp, synthetic construct
  misc_feature 1..22: note = chemically synthesized
  source 1..22: mol_type = other DNA
acctacatgatgaataaaaaaa

SEQ ID NO: 48492 - DNA, 22 bp, synthetic construct
  misc_feature 1..22: note = chemically synthesized
  source 1..22: mol_type = other DNA
cctacatgatgaataaaaaaag

SEQ ID NO: 48493 - DNA, 22 bp, synthetic construct
  misc_feature 1..22: note = chemically synthesized
  source 1..22: mol_type = other DNA
catgatgaataaaaaaagaaca

SEQ ID NO: 48494 - DNA, 22 bp, synthetic construct
  misc_feature 1..22: note = chemically synthesized
  source 1..22: mol_type = other DNA
tccctcaatttatgctgtcttc

SEQ ID NO: 48495 - DNA, 22 bp, synthetic construct
  misc_feature 1..22: note = chemically synthesized
  source 1..22: mol_type = other DNA
ccctcaatttatgctgtcttca

SEQ ID NO: 48496 - DNA, 22 bp, synthetic construct
  misc_feature 1..22: note = chemically synthesized
  source 1..22: mol_type = other DNA
cctcaatttatgctgtcttcaa

SEQ ID NO: 48497 - DNA, 22 bp, synthetic construct
  misc_feature 1..22: note = chemically synthesized
  source 1..22: mol_type = other DNA
aatttatgctgtcttcaacact

SEQ ID NO: 48498 - DNA, 22 bp, synthetic construct
  misc_feature 1..22: note = chemically synthesized
  source 1..22: mol_type = other DNA
atgctgtcttcaacactaacag

SEQ ID NO: 48499 - DNA, 22 bp, synthetic construct
  misc_feature 1..22: note = chemically synthesized
  source 1..22: mol_type = other DNA
tgctgtcttcaacactaacaga

SEQ ID NO: 48500 - DNA, 22 bp, synthetic construct
  misc_feature 1..22: note = chemically synthesized
  source 1..22: mol_type = other DNA
tcttcaacactaacagagggag

SEQ ID NO: 48501 - DNA, 22 bp, synthetic construct
  misc_feature 1..22: note = chemically synthesized
  source 1..22: mol_type = other DNA
caacactaacagagggagagtt

SEQ ID NO: 48502 - DNA, 22 bp, synthetic construct
  misc_feature 1..22: note = chemically synthesized
  source 1..22: mol_type = other DNA
aacactaacagagggagagttc

SEQ ID NO: 48503 - DNA, 22 bp, synthetic construct
  misc_feature 1..22: note = chemically synthesized
  source 1..22: mol_type = other DNA
acagagggagagttcttctaaa

SEQ ID NO: 48504 - DNA, 22 bp, synthetic construct
  misc_feature 1..22: note = chemically synthesized
  source 1..22: mol_type = other DNA
ttctaaacatgttgcatcggat

SEQ ID NO: 48505 - DNA, 22 bp, synthetic construct
  misc_feature 1..22: note = chemically synthesized
  source 1..22: mol_type = other DNA
ctaaacatgttgcatcggatgc

SEQ ID NO: 48506 - DNA, 22 bp, synthetic construct
  misc_feature 1..22: note = chemically synthesized
  source 1..22: mol_type = other DNA
taaacatgttgcatcggatgcc

SEQ ID NO: 48507 - DNA, 22 bp, synthetic construct
  misc_feature 1..22: note = chemically synthesized
  source 1..22: mol_type = other DNA
aacatgttgcatcggatgcctt

SEQ ID NO: 48508 - DNA, 22 bp, synthetic construct
  misc_feature 1..22: note = chemically synthesized
  source 1..22: mol_type = other DNA
catcggatgcctttaacaagca

SEQ ID NO: 48509 - DNA, 22 bp, synthetic construct
  misc_feature 1..22: note = chemically synthesized
  source 1..22: mol_type = other DNA
taacaagcaaaaattcctaact

SEQ ID NO: 48510 - DNA, 22 bp, synthetic construct
  misc_feature 1..22: note = chemically synthesized
  source 1..22: mol_type = other DNA
aacaagcaaaaattcctaactc

SEQ ID NO: 48511 - DNA, 22 bp, synthetic construct
  misc_feature 1..22: note = chemically synthesized
  source 1..22: mol_type = other DNA
acaagcaaaaattcctaactcc

SEQ ID NO: 48512 - DNA, 22 bp, synthetic construct
  misc_feature 1..22: note = chemically synthesized
  source 1..22: mol_type = other DNA
ctaactccagggactcagcata

SEQ ID NO: 48513 - DNA, 22 bp, synthetic construct
  misc_feature 1..22: note = chemically synthesized
  source 1..22: mol_type = other DNA
actccagggactcagcatatgt

SEQ ID NO: 48514 - DNA, 22 bp, synthetic construct
  misc_feature 1..22: note = chemically synthesized
  source 1..22: mol_type = other DNA
cagggactcagcatatgtaggc

SEQ ID NO: 48515 - DNA, 22 bp, synthetic construct
  misc_feature 1..22: note = chemically synthesized
  source 1..22: mol_type = other DNA
agcatatgtaggctatgtccat

SEQ ID NO: 48516 - DNA, 22 bp, synthetic construct
  misc_feature 1..22: note = chemically synthesized
  source 1..22: mol_type = other DNA
tgtccatacagagaaaccagct

SEQ ID NO: 48517 - DNA, 22 bp, synthetic construct
  misc_feature 1..22: note = chemically synthesized
  source 1..22: mol_type = other DNA
ttgggaggaggaaggaggaaaa

SEQ ID NO: 48518 - DNA, 22 bp, synthetic construct
  misc_feature 1..22: note = chemically synthesized
  source 1..22: mol_type = other DNA
tgggaggaggaaggaggaaaat

SEQ ID NO: 48519 - DNA, 22 bp, synthetic construct
  misc_feature 1..22: note = chemically synthesized
  source 1..22: mol_type = other DNA
gggaggaggaaggaggaaaata

SEQ ID NO: 48520 - DNA, 22 bp, synthetic construct
  misc_feature 1..22: note = chemically synthesized
  source 1..22: mol_type = other DNA
ggaggaggaaggaggaaaatat

SEQ ID NO: 48521 - DNA, 22 bp, synthetic construct
  misc_feature 1..22: note = chemically synthesized
  source 1..22: mol_type = other DNA
aattcagtcagttaattgaatt

SEQ ID NO: 48522 - DNA, 22 bp, synthetic construct
  misc_feature 1..22: note = chemically synthesized
  source 1..22: mol_type = other DNA
agtcagttaattgaatttaaaa

SEQ ID NO: 48523 - DNA, 22 bp, synthetic construct
  misc_feature 1..22: note = chemically synthesized
  source 1..22: mol_type = other DNA
attgaatttaaaatacctggtt

SEQ ID NO: 48524 - DNA, 22 bp, synthetic construct
  misc_feature 1..22: note = chemically synthesized
  source 1..22: mol_type = other DNA
aatttaaaatacctggttgttt

SEQ ID NO: 48525 - DNA, 22 bp, synthetic construct
  misc_feature 1..22: note = chemically synthesized
  source 1..22: mol_type = other DNA
aaaatacctggttgtttgaatt

SEQ ID NO: 48526 - DNA, 22 bp, synthetic construct
  misc_feature 1..22: note = chemically synthesized
  source 1..22: mol_type = other DNA
aaatacctggttgtttgaattc

SEQ ID NO: 48527 - DNA, 22 bp, synthetic construct
  misc_feature 1..22: note = chemically synthesized
  source 1..22: mol_type = other DNA
gttgtttgaattcaactatttc

SEQ ID NO: 48528 - DNA, 22 bp, synthetic construct
  misc_feature 1..22: note = chemically synthesized
  source 1..22: mol_type = other DNA
tttgaattcaactatttctttt

SEQ ID NO: 48529 - DNA, 22 bp, synthetic construct
  misc_feature 1..22: note = chemically synthesized
  source 1..22: mol_type = other DNA
gaattcaactatttctttttca

SEQ ID NO: 48530 - DNA, 22 bp, synthetic construct
  misc_feature 1..22: note = chemically synthesized
  source 1..22: mol_type = other DNA
aattcaactatttctttttcaa

SEQ ID NO: 48531 - DNA, 22 bp, synthetic construct
  misc_feature 1..22: note = chemically synthesized
  source 1..22: mol_type = other DNA
aactatttctttttcaaaaacg

SEQ ID NO: 48532 - DNA, 22 bp, synthetic construct
  misc_feature 1..22: note = chemically synthesized
  source 1..22: mol_type = other DNA
tttctttttcaaaaacgtactt

SEQ ID NO: 48533 - DNA, 22 bp, synthetic construct
  misc_feature 1..22: note = chemically synthesized
  source 1..22: mol_type = other DNA
ctttttcaaaaacgtacttcta

SEQ ID NO: 48534 - DNA, 22 bp, synthetic construct
  misc_feature 1..22: note = chemically synthesized
  source 1..22: mol_type = other DNA
tttttcaaaaacgtacttctat

SEQ ID NO: 48535 - DNA, 22 bp, synthetic construct
  misc_feature 1..22: note = chemically synthesized
  source 1..22: mol_type = other DNA
tttcaaaaacgtacttctattt

SEQ ID NO: 48536 - DNA, 22 bp, synthetic construct
  misc_feature 1..22: note = chemically synthesized
  source 1..22: mol_type = other DNA
ttcaaaaacgtacttctatttt

SEQ ID NO: 48537 - DNA, 22 bp, synthetic construct
  misc_feature 1..22: note = chemically synthesized
  source 1..22: mol_type = other DNA
tcaaaaacgtacttctattttg

SEQ ID NO: 48538 - DNA, 22 bp, synthetic construct
  misc_feature 1..22: note = chemically synthesized
  source 1..22: mol_type = other DNA
caaaaacgtacttctattttga

SEQ ID NO: 48539 - DNA, 22 bp, synthetic construct
  misc_feature 1..22: note = chemically synthesized
  source 1..22: mol_type = other DNA
aaaaacgtacttctattttgat

SEQ ID NO: 48540 - DNA, 22 bp, synthetic construct
  misc_feature 1..22: note = chemically synthesized
  source 1..22: mol_type = other DNA
ctattttgatgtagttacattt

SEQ ID NO: 48541 - DNA, 22 bp, synthetic construct
  misc_feature 1..22: note = chemically synthesized
  source 1..22: mol_type = other DNA
tattttgatgtagttacatttg

SEQ ID NO: 48542 - DNA, 22 bp, synthetic construct
  misc_feature 1..22: note = chemically synthesized
  source 1..22: mol_type = other DNA
ttttgatgtagttacatttgcc

SEQ ID NO: 48543 - DNA, 22 bp, synthetic construct
  misc_feature 1..22: note = chemically synthesized
  source 1..22: mol_type = other DNA
tgatgtagttacatttgcccaa

SEQ ID NO: 48544 - DNA, 22 bp, synthetic construct
  misc_feature 1..22: note = chemically synthesized
  source 1..22: mol_type = other DNA
gatgtagttacatttgcccaaa

SEQ ID NO: 48545 - DNA, 22 bp, synthetic construct
  misc_feature 1..22: note = chemically synthesized
  source 1..22: mol_type = other DNA
atgtagttacatttgcccaaaa

SEQ ID NO: 48546 - DNA, 22 bp, synthetic construct
  misc_feature 1..22: note = chemically synthesized
  source 1..22: mol_type = other DNA
catttgcccaaaaaagcaaact

SEQ ID NO: 48547 - DNA, 22 bp, synthetic construct
  misc_feature 1..22: note = chemically synthesized
  source 1..22: mol_type = other DNA
gcccaaaaaagcaaacttggag

SEQ ID NO: 48548 - DNA, 22 bp, synthetic construct
  misc_feature 1..22: note = chemically synthesized
  source 1..22: mol_type = other DNA
cccaaaaaagcaaacttggaga

SEQ ID NO: 48549 - DNA, 22 bp, synthetic construct
  misc_feature 1..22: note = chemically synthesized
  source 1..22: mol_type = other DNA
ggagaaaatacacattacattc

SEQ ID NO: 48550 - DNA, 22 bp, synthetic construct
  misc_feature 1..22: note = chemically synthesized
  source 1..22: mol_type = other DNA
gagaaaatacacattacattct

SEQ ID NO: 48551 - DNA, 22 bp, synthetic construct
  misc_feature 1..22: note = chemically synthesized
  source 1..22: mol_type = other DNA
cattctttggagtttttcaaaa

SEQ ID NO: 48552 - DNA, 22 bp, synthetic construct
  misc_feature 1..22: note = chemically synthesized
  source 1..22: mol_type = other DNA
tttggagtttttcaaaaaaaac

SEQ ID NO: 48553 - DNA, 22 bp, synthetic construct
  misc_feature 1..22: note = chemically synthesized
  source 1..22: mol_type = other DNA
tggagtttttcaaaaaaaacag

SEQ ID NO: 48554 - DNA, 22 bp, synthetic construct
  misc_feature 1..22: note = chemically synthesized
  source 1..22: mol_type = other DNA
ggagtttttcaaaaaaaacagc

SEQ ID NO: 48555 - DNA, 22 bp, synthetic construct
  misc_feature 1..22: note = chemically synthesized
  source 1..22: mol_type = other DNA
gagtttttcaaaaaaaacagct

SEQ ID NO: 48556 - DNA, 22 bp, synthetic construct
  misc_feature 1..22: note = chemically synthesized
  source 1..22: mol_type = other DNA
ttcaaaaaaaacagcttgcaac

SEQ ID NO: 48557 - DNA, 22 bp, synthetic construct
  misc_feature 1..22: note = chemically synthesized
  source 1..22: mol_type = other DNA
tcaaaaaaaacagcttgcaaca

SEQ ID NO: 48558 - DNA, 22 bp, synthetic construct
  misc_feature 1..22: note = chemically synthesized
  source 1..22: mol_type = other DNA
caaaaaaaacagcttgcaacaa

SEQ ID NO: 48559 - DNA, 22 bp, synthetic construct
  misc_feature 1..22: note = chemically synthesized
  source 1..22: mol_type = other DNA
aaaaaaaacagcttgcaacaat

SEQ ID NO: 48560 - DNA, 22 bp, synthetic construct
  misc_feature 1..22: note = chemically synthesized
  source 1..22: mol_type = other DNA
gcaacaattaaaagatggagaa

SEQ ID NO: 48561 - DNA, 22 bp, synthetic construct
  misc_feature 1..22: note = chemically synthesized
  source 1..22: mol_type = other DNA
caacaattaaaagatggagaaa

SEQ ID NO: 48562 - DNA, 22 bp, synthetic construct
  misc_feature 1..22: note = chemically synthesized
  source 1..22: mol_type = other DNA
aaagatggagaaatcttataag

SEQ ID NO: 48563 - DNA, 22 bp, synthetic construct
  misc_feature 1..22: note = chemically synthesized
  source 1..22: mol_type = other DNA
ataaggctggaaacttctgtga

SEQ ID NO: 48564 - DNA, 22 bp, synthetic construct
  misc_feature 1..22: note = chemically synthesized
  source 1..22: mol_type = other DNA
taaggctggaaacttctgtgaa

SEQ ID NO: 48565 - DNA, 22 bp, synthetic construct
  misc_feature 1..22: note = chemically synthesized
  source 1..22: mol_type = other DNA
gaaacttctgtgaattatcacc

SEQ ID NO: 48566 - DNA, 22 bp, synthetic construct
  misc_feature 1..22: note = chemically synthesized
  source 1..22: mol_type = other DNA
ctgtgaattatcaccattccat

SEQ ID NO: 48567 - DNA, 22 bp, synthetic construct
  misc_feature 1..22: note = chemically synthesized
  source 1..22: mol_type = other DNA
tgtgaattatcaccattccatt

SEQ ID NO: 48568 - DNA, 22 bp, synthetic construct
  misc_feature 1..22: note = chemically synthesized
  source 1..22: mol_type = other DNA
tgaattatcaccattccattat

SEQ ID NO: 48569 - DNA, 22 bp, synthetic construct
  misc_feature 1..22: note = chemically synthesized
  source 1..22: mol_type = other DNA
tcaccattccattatactgcac

SEQ ID NO: 48570 - DNA, 22 bp, synthetic construct
  misc_feature 1..22: note = chemically synthesized
  source 1..22: mol_type = other DNA
cattatactgcacttcaatttt

SEQ ID NO: 48571 - DNA, 22 bp, synthetic construct
  misc_feature 1..22: note = chemically synthesized
  source 1..22: mol_type = other DNA
tactgcacttcaattttgcttc

SEQ ID NO: 48572 - DNA, 22 bp, synthetic construct
  misc_feature 1..22: note = chemically synthesized
  source 1..22: mol_type = other DNA
cacttcaattttgcttccagca

SEQ ID NO: 48573 - DNA, 22 bp, synthetic construct
  misc_feature 1..22: note = chemically synthesized
  source 1..22: mol_type = other DNA
caattttgcttccagcaatttg

SEQ ID NO: 48574 - DNA, 22 bp, synthetic construct
  misc_feature 1..22: note = chemically synthesized
  source 1..22: mol_type = other DNA
aattttgcttccagcaatttga

SEQ ID NO: 48575 - DNA, 22 bp, synthetic construct
  misc_feature 1..22: note = chemically synthesized
  source 1..22: mol_type = other DNA
tgcttccagcaatttgaaagat

SEQ ID NO: 48576 - DNA, 22 bp, synthetic construct
  misc_feature 1..22: note = chemically synthesized
  source 1..22: mol_type = other DNA
gcttccagcaatttgaaagatg

SEQ ID NO: 48577 - DNA, 22 bp, synthetic construct
  misc_feature 1..22: note = chemically synthesized
  source 1..22: mol_type = other DNA
cttccagcaatttgaaagatgc

SEQ ID NO: 48578 - DNA, 22 bp, synthetic construct
  misc_feature 1..22: note = chemically synthesized
  source 1..22: mol_type = other DNA
ccagcaatttgaaagatgcctt

SEQ ID NO: 48579 - DNA, 22 bp, synthetic construct
  misc_feature 1..22: note = chemically synthesized
  source 1..22: mol_type = other DNA
cagcaatttgaaagatgccttt

SEQ ID NO: 48580 - DNA, 22 bp, synthetic construct
  misc_feature 1..22: note = chemically synthesized
  source 1..22: mol_type = other DNA
gaaagatgcctttaagctttct

SEQ ID NO: 48581 - DNA, 22 bp, synthetic construct
  misc_feature 1..22: note = chemically synthesized
  source 1..22: mol_type = other DNA
aaagatgcctttaagctttctg

SEQ ID NO: 48582 - DNA, 22 bp, synthetic construct
  misc_feature 1..22: note = chemically synthesized
  source 1..22: mol_type = other DNA
taagctttctgttggggaatca

SEQ ID NO: 48583 - DNA, 22 bp, synthetic construct
  misc_feature 1..22: note = chemically synthesized
  source 1..22: mol_type = other DNA
aagctttctgttggggaatcac

SEQ ID NO: 48584 - DNA, 22 bp, synthetic construct
  misc_feature 1..22: note = chemically synthesized
  source 1..22: mol_type = other DNA
agctttctgttggggaatcacg

SEQ ID NO: 48585 - DNA, 22 bp, synthetic construct
  misc_feature 1..22: note = chemically synthesized
  source 1..22: mol_type = other DNA
tctgttggggaatcacgaatcc

SEQ ID NO: 48586 - DNA, 22 bp, synthetic construct
  misc_feature 1..22: note = chemically synthesized
  source 1..22: mol_type = other DNA
ctgttggggaatcacgaatcca

SEQ ID NO: 48587 - DNA, 22 bp, synthetic construct
  misc_feature 1..22: note = chemically synthesized
  source 1..22: mol_type = other DNA
tgttggggaatcacgaatccaa

SEQ ID NO: 48588 - DNA, 22 bp, synthetic construct
  misc_feature 1..22: note = chemically synthesized
  source 1..22: mol_type = other DNA
ttggggaatcacgaatccaagc

SEQ ID NO: 48589 - DNA, 22 bp, synthetic construct
  misc_feature 1..22: note = chemically synthesized
  source 1..22: mol_type = other DNA
gggaatcacgaatccaagcctt

SEQ ID NO: 48590 - DNA, 22 bp, synthetic construct
  misc_feature 1..22: note = chemically synthesized
  source 1..22: mol_type = other DNA
aatctccaccatagcttccatc

SEQ ID NO: 48591 - DNA, 22 bp, synthetic construct
  misc_feature 1..22: note = chemically synthesized
  source 1..22: mol_type = other DNA
atctccaccatagcttccatct

SEQ ID NO: 48592 - DNA, 22 bp, synthetic construct
  misc_feature 1..22: note = chemically synthesized
  source 1..22: mol_type = other DNA
caccatagcttccatctttgag

SEQ ID NO: 48593 - DNA, 22 bp, synthetic construct
  misc_feature 1..22: note = chemically synthesized
  source 1..22: mol_type = other DNA
ccatctttgaggcaaatcaaga

SEQ ID NO: 48594 - DNA, 22 bp, synthetic construct
  misc_feature 1..22: note = chemically synthesized
  source 1..22: mol_type = other DNA
catctttgaggcaaatcaagaa

SEQ ID NO: 48595 - DNA, 22 bp, synthetic construct
  misc_feature 1..22: note = chemically synthesized
  source 1..22: mol_type = other DNA
tgaggcaaatcaagaaaataat

SEQ ID NO: 48596 - DNA, 22 bp, synthetic construct
  misc_feature 1..22: note = chemically synthesized
  source 1..22: mol_type = other DNA
gaggcaaatcaagaaaataata

SEQ ID NO: 48597 - DNA, 22 bp, synthetic construct
  misc_feature 1..22: note = chemically synthesized
  source 1..22: mol_type = other DNA
aggcaaatcaagaaaataatat

SEQ ID NO: 48598 - DNA, 22 bp, synthetic construct
  misc_feature 1..22: note = chemically synthesized
  source 1..22: mol_type = other DNA
tgctgtctttgcaggtgagccc

SEQ ID NO: 48599 - DNA, 22 bp, synthetic construct
  misc_feature 1..22: note = chemically synthesized
  source 1..22: mol_type = other DNA
ctgtctttgcaggtgagcccca

SEQ ID NO: 48600 - DNA, 22 bp, synthetic construct
  misc_feature 1..22: note = chemically synthesized
  source 1..22: mol_type = other DNA
tctttgcaggtgagccccattc

SEQ ID NO: 48601 - DNA, 22 bp, synthetic construct
  misc_feature 1..22: note = chemically synthesized
  source 1..22: mol_type = other DNA
tgcaggtgagccccattcagca

SEQ ID NO: 48602 - DNA, 22 bp, synthetic construct
  misc_feature 1..22: note = chemically synthesized
  source 1..22: mol_type = other DNA
gcaggtgagccccattcagcaa

SEQ ID NO: 48603 - DNA, 22 bp, synthetic construct
  misc_feature 1..22: note = chemically synthesized
  source 1..22: mol_type = other DNA
caggtgagccccattcagcaac

SEQ ID NO: 48604 - DNA, 22 bp, synthetic construct
  misc_feature 1..22: note = chemically synthesized
  source 1..22: mol_type = other DNA
agcaactagattccaaaaaata

SEQ ID NO: 48605 - DNA, 22 bp, synthetic construct
  misc_feature 1..22: note = chemically synthesized
  source 1..22: mol_type = other DNA
gattccaaaaaatagcagggag

SEQ ID NO: 48606 - DNA, 22 bp, synthetic construct
  misc_feature 1..22: note = chemically synthesized
  source 1..22: mol_type = other DNA
caaaaaatagcagggagaaaac

SEQ ID NO: 48607 - DNA, 22 bp, synthetic construct
  misc_feature 1..22: note = chemically synthesized
  source 1..22: mol_type = other DNA
gtcagtggtgttcatactatgc

SEQ ID NO: 48608 - DNA, 22 bp, synthetic construct
  misc_feature 1..22: note = chemically synthesized
  source 1..22: mol_type = other DNA
atactatgctagaacatcatgg

SEQ ID NO: 48609 - DNA, 22 bp, synthetic construct
  misc_feature 1..22: note = chemically synthesized
  source 1..22: mol_type = other DNA
tgctagaacatcatggggactt

SEQ ID NO: 48610 - DNA, 22 bp, synthetic construct
  misc_feature 1..22: note = chemically synthesized
  source 1..22: mol_type = other DNA
gaacatcatggggacttagaga

SEQ ID NO: 48611 - DNA, 22 bp, synthetic construct
  misc_feature 1..22: note = chemically synthesized
  source 1..22: mol_type = other DNA
agagacccacccagtccaaact

SEQ ID NO: 48612 - DNA, 22 bp, synthetic construct
  misc_feature 1..22: note = chemically synthesized
  source 1..22: mol_type = other DNA
gagacccacccagtccaaacta

SEQ ID NO: 48613 - DNA, 22 bp, synthetic construct
  misc_feature 1..22: note = chemically synthesized
  source 1..22: mol_type = other DNA
tctattttacctactttacaag

SEQ ID NO: 48614 - DNA, 22 bp, synthetic construct
  misc_feature 1..22: note = chemically synthesized
  source 1..22: mol_type = other DNA
ttttacctactttacaagacaa

SEQ ID NO: 48615 - DNA, 22 bp, synthetic construct
  misc_feature 1..22: note = chemically synthesized
  source 1..22: mol_type = other DNA
tacctactttacaagacaagga

SEQ ID NO: 48616 - DNA, 22 bp, synthetic construct
  misc_feature 1..22: note = chemically synthesized
  source 1..22: mol_type = other DNA
acctactttacaagacaaggaa

SEQ ID NO: 48617 - DNA, 22 bp, synthetic construct
  misc_feature 1..22: note = chemically synthesized
  source 1..22: mol_type = other DNA
cctactttacaagacaaggaaa

SEQ ID NO: 48618 - DNA, 22 bp, synthetic construct
  misc_feature 1..22: note = chemically synthesized
  source 1..22: mol_type = other DNA
ctttacaagacaaggaaacaaa

SEQ ID NO: 48619 - DNA, 22 bp, synthetic construct
  misc_feature 1..22: note = chemically synthesized
  source 1..22: mol_type = other DNA
tacaagacaaggaaacaaatgc

SEQ ID NO: 48620 - DNA, 22 bp, synthetic construct
  misc_feature 1..22: note = chemically synthesized
  source 1..22: mol_type = other DNA
acaagacaaggaaacaaatgct

SEQ ID NO: 48621 - DNA, 22 bp, synthetic construct
  misc_feature 1..22: note = chemically synthesized
  source 1..22: mol_type = other DNA
caagacaaggaaacaaatgcta

SEQ ID NO: 48622 - DNA, 22 bp, synthetic construct
  misc_feature 1..22: note = chemically synthesized
  source 1..22: mol_type = other DNA
acaggtgaagggagcccaaaat

SEQ ID NO: 48623 - DNA, 22 bp, synthetic construct
  misc_feature 1..22: note = chemically synthesized
  source 1..22: mol_type = other DNA
acagcatgatacaataagggtc

SEQ ID NO: 48624 - DNA, 22 bp, synthetic construct
  misc_feature 1..22: note = chemically synthesized
  source 1..22: mol_type = other DNA
gttttcagatcagtgtctctct

SEQ ID NO: 48625 - DNA, 22 bp, synthetic construct
  misc_feature 1..22: note = chemically synthesized
  source 1..22: mol_type = other DNA
tcagatcagtgtctctctgtta

SEQ ID NO: 48626 - DNA, 22 bp, synthetic construct
  misc_feature 1..22: note = chemically synthesized
  source 1..22: mol_type = other DNA
cagatcagtgtctctctgttaa

SEQ ID NO: 48627 - DNA, 22 bp, synthetic construct
  misc_feature 1..22: note = chemically synthesized
  source 1..22: mol_type = other DNA
agatcagtgtctctctgttaac

SEQ ID NO: 48628 - DNA, 22 bp, synthetic construct
  misc_feature 1..22: note = chemically synthesized
  source 1..22: mol_type = other DNA
tctgttaacactaaaagtcaaa

SEQ ID NO: 48629 - DNA, 22 bp, synthetic construct
  misc_feature 1..22: note = chemically synthesized
  source 1..22: mol_type = other DNA
tgttaacactaaaagtcaaagt

SEQ ID NO: 48630 - DNA, 22 bp, synthetic construct
  misc_feature 1..22: note = chemically synthesized
  source 1..22: mol_type = other DNA
ttaacactaaaagtcaaagttt

SEQ ID NO: 48631 - DNA, 22 bp, synthetic construct
  misc_feature 1..22: note = chemically synthesized
  source 1..22: mol_type = other DNA
acactaaaagtcaaagtttggt

SEQ ID NO: 48632 - DNA, 22 bp, synthetic construct
  misc_feature 1..22: note = chemically synthesized
  source 1..22: mol_type = other DNA
aaagtcaaagtttggttctgga

SEQ ID NO: 48633 - DNA, 22 bp, synthetic construct
  misc_feature 1..22: note = chemically synthesized
  source 1..22: mol_type = other DNA
ggttctggaaaatctgtaatgc

SEQ ID NO: 48634 - DNA, 22 bp, synthetic construct
  misc_feature 1..22: note = chemically synthesized
  source 1..22: mol_type = other DNA
gttctggaaaatctgtaatgcc

SEQ ID NO: 48635 - DNA, 22 bp, synthetic construct
  misc_feature 1..22: note = chemically synthesized
  source 1..22: mol_type = other DNA
tggaaaatctgtaatgcccaaa

SEQ ID NO: 48636 - DNA, 22 bp, synthetic construct
  misc_feature 1..22: note = chemically synthesized
  source 1..22: mol_type = other DNA
gaaaatctgtaatgcccaaaag

SEQ ID NO: 48637 - DNA, 22 bp, synthetic construct
  misc_feature 1..22: note = chemically synthesized
  source 1..22: mol_type = other DNA
taatgcccaaaagaccttaaat

SEQ ID NO: 48638 - DNA, 22 bp, synthetic construct
  misc_feature 1..22: note = chemically synthesized
  source 1..22: mol_type = other DNA
aaatgccctccccccaaaccag

SEQ ID NO: 48639 - DNA, 22 bp, synthetic construct
  misc_feature 1..22: note = chemically synthesized
  source 1..22: mol_type = other DNA
aatgccctccccccaaaccagt

SEQ ID NO: 48640 - DNA, 22 bp, synthetic construct
  misc_feature 1..22: note = chemically synthesized
  source 1..22: mol_type = other DNA
cccccaaaccagtcttggtaat

SEQ ID NO: 48641 - DNA, 22 bp, synthetic construct
  misc_feature 1..22: note = chemically synthesized
  source 1..22: mol_type = other DNA
ggtaatttctccatggctttca

SEQ ID NO: 48642 - DNA, 22 bp, synthetic construct
  misc_feature 1..22: note = chemically synthesized
  source 1..22: mol_type = other DNA
gtaatttctccatggctttcac

SEQ ID NO: 48643 - DNA, 22 bp, synthetic construct
  misc_feature 1..22: note = chemically synthesized
  source 1..22: mol_type = other DNA
ctccatggctttcacagaaggg

SEQ ID NO: 48644 - DNA, 22 bp, synthetic construct
  misc_feature 1..22: note = chemically synthesized
  source 1..22: mol_type = other DNA
tccatggctttcacagaagggt

SEQ ID NO: 48645 - DNA, 22 bp, synthetic construct
  misc_feature 1..22: note = chemically synthesized
  source 1..22: mol_type = other DNA
catggctttcacagaagggtaa

SEQ ID NO: 48646 - DNA, 22 bp, synthetic construct
  misc_feature 1..22: note = chemically synthesized
  source 1..22: mol_type = other DNA
tcacagaagggtaaatgtctac

SEQ ID NO: 48647 - DNA, 22 bp, synthetic construct
  misc_feature 1..22: note = chemically synthesized
  source 1..22: mol_type = other DNA
cacagaagggtaaatgtctact

SEQ ID NO: 48648 - DNA, 22 bp, synthetic construct
  misc_feature 1..22: note = chemically synthesized
  source 1..22: mol_type = other DNA
acagaagggtaaatgtctactt

SEQ ID NO: 48649 - DNA, 22 bp, synthetic construct
  misc_feature 1..22: note = chemically synthesized
  source 1..22: mol_type = other DNA
cttggaaggcctttactaattt

SEQ ID NO: 48650 - DNA, 22 bp, synthetic construct
  misc_feature 1..22: note = chemically synthesized
  source 1..22: mol_type = other DNA
ggaaggcctttactaattttta

SEQ ID NO: 48651 - DNA, 22 bp, synthetic construct
  misc_feature 1..22: note = chemically synthesized
  source 1..22: mol_type = other DNA
gaaggcctttactaatttttat

SEQ ID NO: 48652 - DNA, 22 bp, synthetic construct
  misc_feature 1..22: note = chemically synthesized
  source 1..22: mol_type = other DNA
tactaatttttatgttatcttc

SEQ ID NO: 48653 - DNA, 22 bp, synthetic construct
  misc_feature 1..22: note = chemically synthesized
  source 1..22: mol_type = other DNA
actaatttttatgttatcttct

SEQ ID NO: 48654 - DNA, 22 bp, synthetic construct
  misc_feature 1..22: note = chemically synthesized
  source 1..22: mol_type = other DNA
ctaatttttatgttatcttctt

SEQ ID NO: 48655 - DNA, 22 bp, synthetic construct
  misc_feature 1..22: note = chemically synthesized
  source 1..22: mol_type = other DNA
atttttatgttatcttcttcct

SEQ ID NO: 48656 - DNA, 22 bp, synthetic construct
  misc_feature 1..22: note = chemically synthesized
  source 1..22: mol_type = other DNA
ttatgttatcttcttccttcat

SEQ ID NO: 48657 - DNA, 22 bp, synthetic construct
  misc_feature 1..22: note = chemically synthesized
  source 1..22: mol_type = other DNA
tatgttatcttcttccttcatt

SEQ ID NO: 48658 - DNA, 22 bp, synthetic construct
  misc_feature 1..22: note = chemically synthesized
  source 1..22: mol_type = other DNA
atgttatcttcttccttcattc

SEQ ID NO: 48659 - DNA, 22 bp, synthetic construct
  misc_feature 1..22: note = chemically synthesized
  source 1..22: mol_type = other DNA
tgttatcttcttccttcattcg

SEQ ID NO: 48660 - DNA, 22 bp, synthetic construct
  misc_feature 1..22: note = chemically synthesized
  source 1..22: mol_type = other DNA
tcttcttccttcattcgtgttt

SEQ ID NO: 48661 - DNA, 22 bp, synthetic construct
  misc_feature 1..22: note = chemically synthesized
  source 1..22: mol_type = other DNA
cttccttcattcgtgtttggta

SEQ ID NO: 48662 - DNA, 22 bp, synthetic construct
  misc_feature 1..22: note = chemically synthesized
  source 1..22: mol_type = other DNA
ttccttcattcgtgtttggtaa

SEQ ID NO: 48663 - DNA, 22 bp, synthetic construct
  misc_feature 1..22: note = chemically synthesized
  source 1..22: mol_type = other DNA
ccttcattcgtgtttggtaatc

SEQ ID NO: 48664 - DNA, 22 bp, synthetic construct
  misc_feature 1..22: note = chemically synthesized
  source 1..22: mol_type = other DNA
cttcattcgtgtttggtaatca

SEQ ID NO: 48665 - DNA, 22 bp, synthetic construct
  misc_feature 1..22: note = chemically synthesized
  source 1..22: mol_type = other DNA
cattcgtgtttggtaatcaaaa

SEQ ID NO: 48666 - DNA, 22 bp, synthetic construct
  misc_feature 1..22: note = chemically synthesized
  source 1..22: mol_type = other DNA
attcgtgtttggtaatcaaaaa

SEQ ID NO: 48667 - DNA, 22 bp, synthetic construct
  misc_feature 1..22: note = chemically synthesized
  source 1..22: mol_type = other DNA
gtgtttggtaatcaaaaatagt

SEQ ID NO: 48668 - DNA, 22 bp, synthetic construct
  misc_feature 1..22: note = chemically synthesized
  source 1..22: mol_type = other DNA
ggtaatcaaaaatagtttatca

SEQ ID NO: 48669 - DNA, 22 bp, synthetic construct
  misc_feature 1..22: note = chemically synthesized
  source 1..22: mol_type = other DNA
gtaatcaaaaatagtttatcat

SEQ ID NO: 48670 - DNA, 22 bp, synthetic construct
  misc_feature 1..22: note = chemically synthesized
  source 1..22: mol_type = other DNA
atcataatgctctcaattggaa

SEQ ID NO: 48671 - DNA, 22 bp, synthetic construct
  misc_feature 1..22: note = chemically synthesized
  source 1..22: mol_type = other DNA
tcataatgctctcaattggaag

SEQ ID NO: 48672 - DNA, 22 bp, synthetic construct
  misc_feature 1..22: note = chemically synthesized
  source 1..22: mol_type = other DNA
tcaattggaaggtcttcatact

SEQ ID NO: 48673 - DNA, 22 bp, synthetic construct
  misc_feature 1..22: note = chemically synthesized
  source 1..22: mol_type = other DNA
aattggaaggtcttcatactac

SEQ ID NO: 48674 - DNA, 22 bp, synthetic construct
  misc_feature 1..22: note = chemically synthesized
  source 1..22: mol_type = other DNA
gaaggtcttcatactacaggca

SEQ ID NO: 48675 - DNA, 22 bp, synthetic construct
  misc_feature 1..22: note = chemically synthesized
  source 1..22: mol_type = other DNA
catactacaggcagatactgtt

SEQ ID NO: 48676 - DNA, 22 bp, synthetic construct
  misc_feature 1..22: note = chemically synthesized
  source 1..22: mol_type = other DNA
atactacaggcagatactgtta

SEQ ID NO: 48677 - DNA, 22 bp, synthetic construct
  misc_feature 1..22: note = chemically synthesized
  source 1..22: mol_type = other DNA
caggcagatactgttattttct

SEQ ID NO: 48678 - DNA, 22 bp, synthetic construct
  misc_feature 1..22: note = chemically synthesized
  source 1..22: mol_type = other DNA
ttattttctggtagaggatggc

SEQ ID NO: 48679 - DNA, 22 bp, synthetic construct
  misc_feature 1..22: note = chemically synthesized
  source 1..22: mol_type = other DNA
ttttctggtagaggatggcagc

SEQ ID NO: 48680 - DNA, 22 bp, synthetic construct
  misc_feature 1..22: note = chemically synthesized
  source 1..22: mol_type = other DNA
tctggtagaggatggcagcagg

SEQ ID NO: 48681 - DNA, 22 bp, synthetic construct
  misc_feature 1..22: note = chemically synthesized
  source 1..22: mol_type = other DNA
ctggtagaggatggcagcaggg

SEQ ID NO: 48682 - DNA, 22 bp, synthetic construct
  misc_feature 1..22: note = chemically synthesized
  source 1..22: mol_type = other DNA
tggtagaggatggcagcagggc

SEQ ID NO: 48683 - DNA, 22 bp, synthetic construct
  misc_feature 1..22: note = chemically synthesized
  source 1..22: mol_type = other DNA
gtagaggatggcagcagggctg

SEQ ID NO: 48684 - DNA, 22 bp, synthetic construct
  misc_feature 1..22: note = chemically synthesized
  source 1..22: mol_type = other DNA
ggaaaaaagaatgtggtttttt

SEQ ID NO: 48685 - DNA, 22 bp, synthetic construct
  misc_feature 1..22: note = chemically synthesized
  source 1..22: mol_type = other DNA
ttttctaaccacagtaggtttt

SEQ ID NO: 48686 - DNA, 22 bp, synthetic construct
  misc_feature 1..22: note = chemically synthesized
  source 1..22: mol_type = other DNA
tttctaaccacagtaggttttt

SEQ ID NO: 48687 - DNA, 22 bp, synthetic construct
  misc_feature 1..22: note = chemically synthesized
  source 1..22: mol_type = other DNA
ttctaaccacagtaggtttttt

SEQ ID NO: 48688 - DNA, 22 bp, synthetic construct
  misc_feature 1..22: note = chemically synthesized
  source 1..22: mol_type = other DNA
tctaaccacagtaggttttttc

SEQ ID NO: 48689 - DNA, 22 bp, synthetic construct
  misc_feature 1..22: note = chemically synthesized
  source 1..22: mol_type = other DNA
ctaaccacagtaggttttttct

SEQ ID NO: 48690 - DNA, 22 bp, synthetic construct
  misc_feature 1..22: note = chemically synthesized
  source 1..22: mol_type = other DNA
taaccacagtaggttttttcta

SEQ ID NO: 48691 - DNA, 22 bp, synthetic construct
  misc_feature 1..22: note = chemically synthesized
  source 1..22: mol_type = other DNA
accacagtaggttttttctata

SEQ ID NO: 48692 - DNA, 22 bp, synthetic construct
  misc_feature 1..22: note = chemically synthesized
  source 1..22: mol_type = other DNA
tttctataacaatgatttcact

SEQ ID NO: 48693 - DNA, 22 bp, synthetic construct
  misc_feature 1..22: note = chemically synthesized
  source 1..22: mol_type = other DNA
ttctataacaatgatttcactt

SEQ ID NO: 48694 - DNA, 22 bp, synthetic construct
  misc_feature 1..22: note = chemically synthesized
  source 1..22: mol_type = other DNA
tctataacaatgatttcacttt

SEQ ID NO: 48695 - DNA, 22 bp, synthetic construct
  misc_feature 1..22: note = chemically synthesized
  source 1..22: mol_type = other DNA
ctataacaatgatttcactttc

SEQ ID NO: 48696 - DNA, 22 bp, synthetic construct
  misc_feature 1..22: note = chemically synthesized
  source 1..22: mol_type = other DNA
tataacaatgatttcactttct

SEQ ID NO: 48697 - DNA, 22 bp, synthetic construct
  misc_feature 1..22: note = chemically synthesized
  source 1..22: mol_type = other DNA
taacaatgatttcactttctag

SEQ ID NO: 48698 - DNA, 22 bp, synthetic construct
  misc_feature 1..22: note = chemically synthesized
  source 1..22: mol_type = other DNA
cactttctagatataaaacagg

SEQ ID NO: 48699 - DNA, 22 bp, synthetic construct
  misc_feature 1..22: note = chemically synthesized
  source 1..22: mol_type = other DNA
actttctagatataaaacaggc

SEQ ID NO: 48700 - DNA, 22 bp, synthetic construct
  misc_feature 1..22: note = chemically synthesized
  source 1..22: mol_type = other DNA
tctagatataaaacaggcatgg

SEQ ID NO: 48701 - DNA, 22 bp, synthetic construct
  misc_feature 1..22: note = chemically synthesized
  source 1..22: mol_type = other DNA
ctagatataaaacaggcatggt

SEQ ID NO: 48702 - DNA, 22 bp, synthetic construct
  misc_feature 1..22: note = chemically synthesized
  source 1..22: mol_type = other DNA
tagatataaaacaggcatggtt

SEQ ID NO: 48703 - DNA, 22 bp, synthetic construct
  misc_feature 1..22: note = chemically synthesized
  source 1..22: mol_type = other DNA
gatataaaacaggcatggtttc

SEQ ID NO: 48704 - DNA, 22 bp, synthetic construct
  misc_feature 1..22: note = chemically synthesized
  source 1..22: mol_type = other DNA
ctctcaccctgaacttctgcaa

SEQ ID NO: 48705 - DNA, 22 bp, synthetic construct
  misc_feature 1..22: note = chemically synthesized
  source 1..22: mol_type = other DNA
tctcaccctgaacttctgcaaa

SEQ ID NO: 48706 - DNA, 22 bp, synthetic construct
  misc_feature 1..22: note = chemically synthesized
  source 1..22: mol_type = other DNA
tcaccctgaacttctgcaaaat

SEQ ID NO: 48707 - DNA, 22 bp, synthetic construct
  misc_feature 1..22: note = chemically synthesized
  source 1..22: mol_type = other DNA
accctgaacttctgcaaaatct

SEQ ID NO: 48708 - DNA, 22 bp, synthetic construct
  misc_feature 1..22: note = chemically synthesized
  source 1..22: mol_type = other DNA
aacttctgcaaaatctagattt

SEQ ID NO: 48709 - DNA, 22 bp, synthetic construct
  misc_feature 1..22: note = chemically synthesized
  source 1..22: mol_type = other DNA
ctgcaaaatctagatttgatca

SEQ ID NO: 48710 - DNA, 22 bp, synthetic construct
  misc_feature 1..22: note = chemically synthesized
  source 1..22: mol_type = other DNA
tgcaaaatctagatttgatcaa

SEQ ID NO: 48711 - DNA, 22 bp, synthetic construct
  misc_feature 1..22: note = chemically synthesized
  source 1..22: mol_type = other DNA
caaaatctagatttgatcaaat

SEQ ID NO: 48712 - DNA, 22 bp, synthetic construct
  misc_feature 1..22: note = chemically synthesized
  source 1..22: mol_type = other DNA
gatttgatcaaattcagaaact

SEQ ID NO: 48713 - DNA, 22 bp, synthetic construct
  misc_feature 1..22: note = chemically synthesized
  source 1..22: mol_type = other DNA
gatcaaattcagaaactggtga

SEQ ID NO: 48714 - DNA, 22 bp, synthetic construct
  misc_feature 1..22: note = chemically synthesized
  source 1..22: mol_type = other DNA
atcaaattcagaaactggtgat

SEQ ID NO: 48715 - DNA, 22 bp, synthetic construct
  misc_feature 1..22: note = chemically synthesized
  source 1..22: mol_type = other DNA
agaaactggtgatttgatcaaa

SEQ ID NO: 48716 - DNA, 22 bp, synthetic construct
  misc_feature 1..22: note = chemically synthesized
  source 1..22: mol_type = other DNA
gtgatttgatcaaattcagaat

SEQ ID NO: 48717 - DNA, 22 bp, synthetic construct
  misc_feature 1..22: note = chemically synthesized
  source 1..22: mol_type = other DNA
gatcaaattcagaatcccatat

SEQ ID NO: 48718 - DNA, 22 bp, synthetic construct
  misc_feature 1..22: note = chemically synthesized
  source 1..22: mol_type = other DNA
atcaaattcagaatcccatatt

SEQ ID NO: 48719 - DNA, 22 bp, synthetic construct
  misc_feature 1..22: note = chemically synthesized
  source 1..22: mol_type = other DNA
agaatcccatattttgggatga

SEQ ID NO: 48720 - DNA, 22 bp, synthetic construct
  misc_feature 1..22: note = chemically synthesized
  source 1..22: mol_type = other DNA
tgggatgatgtgttctagcaga

SEQ ID NO: 48721 - DNA, 22 bp, synthetic construct
  misc_feature 1..22: note = chemically synthesized
  source 1..22: mol_type = other DNA
gggatgatgtgttctagcagaa

SEQ ID NO: 48722 - DNA, 22 bp, synthetic construct
  misc_feature 1..22: note = chemically synthesized
  source 1..22: mol_type = other DNA
ggatgatgtgttctagcagaaa

SEQ ID NO: 48723 - DNA, 22 bp, synthetic construct
  misc_feature 1..22: note = chemically synthesized
  source 1..22: mol_type = other DNA
tagcagaaagctattggttggc

SEQ ID NO: 48724 - DNA, 22 bp, synthetic construct
  misc_feature 1..22: note = chemically synthesized
  source 1..22: mol_type = other DNA
gcagaaagctattggttggcta

SEQ ID NO: 48725 - DNA, 22 bp, synthetic construct
  misc_feature 1..22: note = chemically synthesized
  source 1..22: mol_type = other DNA
ttggttggctatattttgctct

SEQ ID NO: 48726 - DNA, 22 bp, synthetic construct
  misc_feature 1..22: note = chemically synthesized
  source 1..22: mol_type = other DNA
gttggctatattttgctctttc

SEQ ID NO: 48727 - DNA, 22 bp, synthetic construct
  misc_feature 1..22: note = chemically synthesized
  source 1..22: mol_type = other DNA
gctatattttgctctttcttcc

SEQ ID NO: 48728 - DNA, 22 bp, synthetic construct
  misc_feature 1..22: note = chemically synthesized
  source 1..22: mol_type = other DNA
tattttgctctttcttccccaa

SEQ ID NO: 48729 - DNA, 22 bp, synthetic construct
  misc_feature 1..22: note = chemically synthesized
  source 1..22: mol_type = other DNA
tgctctttcttccccaaaagat

SEQ ID NO: 48730 - DNA, 22 bp, synthetic construct
  misc_feature 1..22: note = chemically synthesized
  source 1..22: mol_type = other DNA
gctctttcttccccaaaagatt

SEQ ID NO: 48731 - DNA, 22 bp, synthetic construct
  misc_feature 1..22: note = chemically synthesized
  source 1..22: mol_type = other DNA
ctctttcttccccaaaagattt

SEQ ID NO: 48732 - DNA, 22 bp, synthetic construct
  misc_feature 1..22: note = chemically synthesized
  source 1..22: mol_type = other DNA
tttcttccccaaaagattttta

SEQ ID NO: 48733 - DNA, 22 bp, synthetic construct
  misc_feature 1..22: note = chemically synthesized
  source 1..22: mol_type = other DNA
tcttccccaaaagatttttaaa

SEQ ID NO: 48734 - DNA, 22 bp, synthetic construct
  misc_feature 1..22: note = chemically synthesized
  source 1..22: mol_type = other DNA
cttccccaaaagatttttaaat

SEQ ID NO: 48735 - DNA, 22 bp, synthetic construct
  misc_feature 1..22: note = chemically synthesized
  source 1..22: mol_type = other DNA
ttccccaaaagatttttaaata

SEQ ID NO: 48736 - DNA, 22 bp, synthetic construct
  misc_feature 1..22: note = chemically synthesized
  source 1..22: mol_type = other DNA
ccccaaaagatttttaaatagt

SEQ ID NO: 48737 - DNA, 22 bp, synthetic construct
  misc_feature 1..22: note = chemically synthesized
  source 1..22: mol_type = other DNA
cccaaaagatttttaaatagtt

SEQ ID NO: 48738 - DNA, 22 bp, synthetic construct
  misc_feature 1..22: note = chemically synthesized
  source 1..22: mol_type = other DNA
ttaaatagttttcatctttaaa

SEQ ID NO: 48739 - DNA, 22 bp, synthetic construct
  misc_feature 1..22: note = chemically synthesized
  source 1..22: mol_type = other DNA
taaatagttttcatctttaaaa

SEQ ID NO: 48740 - DNA, 22 bp, synthetic construct
  misc_feature 1..22: note = chemically synthesized
  source 1..22: mol_type = other DNA
aaatagttttcatctttaaaag

SEQ ID NO: 48741 - DNA, 22 bp, synthetic construct
  misc_feature 1..22: note = chemically synthesized
  source 1..22: mol_type = other DNA
aatagttttcatctttaaaagg

SEQ ID NO: 48742 - DNA, 22 bp, synthetic construct
  misc_feature 1..22: note = chemically synthesized
  source 1..22: mol_type = other DNA
tcatctttaaaaggatttcaac

SEQ ID NO: 48743 - DNA, 22 bp, synthetic construct
  misc_feature 1..22: note = chemically synthesized
  source 1..22: mol_type = other DNA
catctttaaaaggatttcaact

SEQ ID NO: 48744 - DNA, 22 bp, synthetic construct
  misc_feature 1..22: note = chemically synthesized
  source 1..22: mol_type = other DNA
atctttaaaaggatttcaactt

SEQ ID NO: 48745 - DNA, 22 bp, synthetic construct
  misc_feature 1..22: note = chemically synthesized
  source 1..22: mol_type = other DNA
taaaaggatttcaacttcagat

SEQ ID NO: 48746 - DNA, 22 bp, synthetic construct
  misc_feature 1..22: note = chemically synthesized
  source 1..22: mol_type = other DNA
aaaaggatttcaacttcagatt

SEQ ID NO: 48747 - DNA, 22 bp, synthetic construct
  misc_feature 1..22: note = chemically synthesized
  source 1..22: mol_type = other DNA
aaaggatttcaacttcagattg

SEQ ID NO: 48748 - DNA, 22 bp, synthetic construct
  misc_feature 1..22: note = chemically synthesized
  source 1..22: mol_type = other DNA
caacttcagattgtgcccacgc

SEQ ID NO: 48749 - DNA, 22 bp, synthetic construct
  misc_feature 1..22: note = chemically synthesized
  source 1..22: mol_type = other DNA
aacttcagattgtgcccacgcc

SEQ ID NO: 48750 - DNA, 22 bp, synthetic construct
  misc_feature 1..22: note = chemically synthesized
  source 1..22: mol_type = other DNA
cagattgtgcccacgccaaagt

SEQ ID NO: 48751 - DNA, 22 bp, synthetic construct
  misc_feature 1..22: note = chemically synthesized
  source 1..22: mol_type = other DNA
agattgtgcccacgccaaagtc

SEQ ID NO: 48752 - DNA, 22 bp, synthetic construct
  misc_feature 1..22: note = chemically synthesized
  source 1..22: mol_type = other DNA
tgcccacgccaaagtctctata

SEQ ID NO: 48753 - DNA, 22 bp, synthetic construct
  misc_feature 1..22: note = chemically synthesized
  source 1..22: mol_type = other DNA
tatacatctaatcaataaataa

SEQ ID NO: 48754 - DNA, 22 bp, synthetic construct
  misc_feature 1..22: note = chemically synthesized
  source 1..22: mol_type = other DNA
tacatctaatcaataaataaat

SEQ ID NO: 48755 - DNA, 22 bp, synthetic construct
  misc_feature 1..22: note = chemically synthesized
  source 1..22: mol_type = other DNA
atcaataaataaataagacaaa

SEQ ID NO: 48756 - DNA, 22 bp, synthetic construct
  misc_feature 1..22: note = chemically synthesized
  source 1..22: mol_type = other DNA
atcctttaccatttgggaagtg

SEQ ID NO: 48757 - DNA, 22 bp, synthetic construct
  misc_feature 1..22: note = chemically synthesized
  source 1..22: mol_type = other DNA
tcctttaccatttgggaagtgt

SEQ ID NO: 48758 - DNA, 22 bp, synthetic construct
  misc_feature 1..22: note = chemically synthesized
  source 1..22: mol_type = other DNA
taccatttgggaagtgtacatt

SEQ ID NO: 48759 - DNA, 22 bp, synthetic construct
  misc_feature 1..22: note = chemically synthesized
  source 1..22: mol_type = other DNA
accatttgggaagtgtacatta

SEQ ID NO: 48760 - DNA, 22 bp, synthetic construct
  misc_feature 1..22: note = chemically synthesized
  source 1..22: mol_type = other DNA
ccatttgggaagtgtacattaa

SEQ ID NO: 48761 - DNA, 22 bp, synthetic construct
  misc_feature 1..22: note = chemically synthesized
  source 1..22: mol_type = other DNA
gggaagtgtacattaattactg

SEQ ID NO: 48762 - DNA, 22 bp, synthetic construct
  misc_feature 1..22: note = chemically synthesized
  source 1..22: mol_type = other DNA
ggaagtgtacattaattactgc

SEQ ID NO: 48763 - DNA, 22 bp, synthetic construct
  misc_feature 1..22: note = chemically synthesized
  source 1..22: mol_type = other DNA
attactgcagattgtctcctat

SEQ ID NO: 48764 - DNA, 22 bp, synthetic construct
  misc_feature 1..22: note = chemically synthesized
  source 1..22: mol_type = other DNA
ctgcagattgtctcctatgcat

SEQ ID NO: 48765 - DNA, 22 bp, synthetic construct
  misc_feature 1..22: note = chemically synthesized
  source 1..22: mol_type = other DNA
cagattgtctcctatgcatctc

SEQ ID NO: 48766 - DNA, 22 bp, synthetic construct
  misc_feature 1..22: note = chemically synthesized
  source 1..22: mol_type = other DNA
tctcctatgcatctccccccac

SEQ ID NO: 48767 - DNA, 22 bp, synthetic construct
  misc_feature 1..22: note = chemically synthesized
  source 1..22: mol_type = other DNA
ctatgcatctccccccaccccc

SEQ ID NO: 48768 - DNA, 22 bp, synthetic construct
  misc_feature 1..22: note = chemically synthesized
  source 1..22: mol_type = other DNA
tgcatctccccccaccccctct

SEQ ID NO: 48769 - DNA, 22 bp, synthetic construct
  misc_feature 1..22: note = chemically synthesized
  source 1..22: mol_type = other DNA
cccccaccccctctgcatcgca

SEQ ID NO: 48770 - DNA, 22 bp, synthetic construct
  misc_feature 1..22: note = chemically synthesized
  source 1..22: mol_type = other DNA
tgcatcgcagacagcagtgctc

SEQ ID NO: 48771 - DNA, 22 bp, synthetic construct
  misc_feature 1..22: note = chemically synthesized
  source 1..22: mol_type = other DNA
catcgcagacagcagtgctcaa

SEQ ID NO: 48772 - DNA, 22 bp, synthetic construct
  misc_feature 1..22: note = chemically synthesized
  source 1..22: mol_type = other DNA
aaaagggtccgcaaaataaaaa

SEQ ID NO: 48773 - DNA, 22 bp, synthetic construct
  misc_feature 1..22: note = chemically synthesized
  source 1..22: mol_type = other DNA
aatgggtatttataattagaac

SEQ ID NO: 48774 - DNA, 22 bp, synthetic construct
  misc_feature 1..22: note = chemically synthesized
  source 1..22: mol_type = other DNA
ataattagaacttaataatttg

SEQ ID NO: 48775 - DNA, 22 bp, synthetic construct
  misc_feature 1..22: note = chemically synthesized
  source 1..22: mol_type = other DNA
taattagaacttaataatttgc

SEQ ID NO: 48776 - DNA, 22 bp, synthetic construct
  misc_feature 1..22: note = chemically synthesized
  source 1..22: mol_type = other DNA
gaacttaataatttgcatcagg

SEQ ID NO: 48777 - DNA, 22 bp, synthetic construct
  misc_feature 1..22: note = chemically synthesized
  source 1..22: mol_type = other DNA
aataatttgcatcagggacaaa

SEQ ID NO: 48778 - DNA, 22 bp, synthetic construct
  misc_feature 1..22: note = chemically synthesized
  source 1..22: mol_type = other DNA
ataatttgcatcagggacaaat

SEQ ID NO: 48779 - DNA, 22 bp, synthetic construct
  misc_feature 1..22: note = chemically synthesized
  source 1..22: mol_type = other DNA
gcatcagggacaaatgagctct

SEQ ID NO: 48780 - DNA, 22 bp, synthetic construct
  misc_feature 1..22: note = chemically synthesized
  source 1..22: mol_type = other DNA
catcagggacaaatgagctctg

SEQ ID NO: 48781 - DNA, 22 bp, synthetic construct
  misc_feature 1..22: note = chemically synthesized
  source 1..22: mol_type = other DNA
tgattttaatctgcagcgcatt

SEQ ID NO: 48782 - DNA, 22 bp, synthetic construct
  misc_feature 1..22: note = chemically synthesized
  source 1..22: mol_type = other DNA
attttaatctgcagcgcattta

SEQ ID NO: 48783 - DNA, 22 bp, synthetic construct
  misc_feature 1..22: note = chemically synthesized
  source 1..22: mol_type = other DNA
taatctgcagcgcatttagatt

SEQ ID NO: 48784 - DNA, 22 bp, synthetic construct
  misc_feature 1..22: note = chemically synthesized
  source 1..22: mol_type = other DNA
aatctgcagcgcatttagatta

SEQ ID NO: 48785 - DNA, 22 bp, synthetic construct
  misc_feature 1..22: note = chemically synthesized
  source 1..22: mol_type = other DNA
atctgcagcgcatttagattag

SEQ ID NO: 48786 - DNA, 22 bp, synthetic construct
  misc_feature 1..22: note = chemically synthesized
  source 1..22: mol_type = other DNA
cagcgcatttagattagcccaa

SEQ ID NO: 48787 - DNA, 22 bp, synthetic construct
  misc_feature 1..22: note = chemically synthesized
  source 1..22: mol_type = other DNA
agattagcccaaagatagtgta

SEQ ID NO: 48788 - DNA, 22 bp, synthetic construct
  misc_feature 1..22: note = chemically synthesized
  source 1..22: mol_type = other DNA
gattagcccaaagatagtgtaa

SEQ ID NO: 48789 - DNA, 22 bp, synthetic construct
  misc_feature 1..22: note = chemically synthesized
  source 1..22: mol_type = other DNA
gcccaaagatagtgtaatttga

SEQ ID NO: 48790 - DNA, 22 bp, synthetic construct
  misc_feature 1..22: note = chemically synthesized
  source 1..22: mol_type = other DNA
gatggtttataggcctcctctc

SEQ ID NO: 48791 - DNA, 22 bp, synthetic construct
  misc_feature 1..22: note = chemically synthesized
  source 1..22: mol_type = other DNA
atggtttataggcctcctctcg

SEQ ID NO: 48792 - DNA, 22 bp, synthetic construct
  misc_feature 1..22: note = chemically synthesized
  source 1..22: mol_type = other DNA
ataggcctcctctcggattatg

SEQ ID NO: 48793 - DNA, 22 bp, synthetic construct
  misc_feature 1..22: note = chemically synthesized
  source 1..22: mol_type = other DNA
taggcctcctctcggattatga

SEQ ID NO: 48794 - DNA, 22 bp, synthetic construct
  misc_feature 1..22: note = chemically synthesized
  source 1..22: mol_type = other DNA
ctctcggattatgaaacaatac

SEQ ID NO: 48795 - DNA, 22 bp, synthetic construct
  misc_feature 1..22: note = chemically synthesized
  source 1..22: mol_type = other DNA
tcggattatgaaacaataccaa

SEQ ID NO: 48796 - DNA, 22 bp, synthetic construct
  misc_feature 1..22: note = chemically synthesized
  source 1..22: mol_type = other DNA
ggattatgaaacaataccaagc

SEQ ID NO: 48797 - DNA, 22 bp, synthetic construct
  misc_feature 1..22: note = chemically synthesized
  source 1..22: mol_type = other DNA
tgaaacaataccaagccttcaa

SEQ ID NO: 48798 - DNA, 22 bp, synthetic construct
  misc_feature 1..22: note = chemically synthesized
  source 1..22: mol_type = other DNA
caagtgcagtgtgtctatgtca

SEQ ID NO: 48799 - DNA, 22 bp, synthetic construct
  misc_feature 1..22: note = chemically synthesized
  source 1..22: mol_type = other DNA
aagtgcagtgtgtctatgtcag

SEQ ID NO: 48800 - DNA, 22 bp, synthetic construct
  misc_feature 1..22: note = chemically synthesized
  source 1..22: mol_type = other DNA
tgtcaggagggtgttaaagaag

SEQ ID NO: 48801 - DNA, 22 bp, synthetic construct
  misc_feature 1..22: note = chemically synthesized
  source 1..22: mol_type = other DNA
aagaagaagatgcaatgaaaat

SEQ ID NO: 48802 - DNA, 22 bp, synthetic construct
  misc_feature 1..22: note = chemically synthesized
  source 1..22: mol_type = other DNA
gacaacgtgaaagcagccataa

SEQ ID NO: 48803 - DNA, 22 bp, synthetic construct
  misc_feature 1..22: note = chemically synthesized
  source 1..22: mol_type = other DNA
acaacgtgaaagcagccataaa

SEQ ID NO: 48804 - DNA, 22 bp, synthetic construct
  misc_feature 1..22: note = chemically synthesized
  source 1..22: mol_type = other DNA
catgacaactgtgtaaaagtca

SEQ ID NO: 48805 - DNA, 22 bp, synthetic construct
  misc_feature 1..22: note = chemically synthesized
  source 1..22: mol_type = other DNA
tgtaaaagtcatgatgaaacaa

SEQ ID NO: 48806 - DNA, 22 bp, synthetic construct
  misc_feature 1..22: note = chemically synthesized
  source 1..22: mol_type = other DNA
acctataatgcgtctgattcat

SEQ ID NO: 48807 - DNA, 22 bp, synthetic construct
  misc_feature 1..22: note = chemically synthesized
  source 1..22: mol_type = other DNA
taatgcgtctgattcattgtga

SEQ ID NO: 48808 - DNA, 22 bp, synthetic construct
  misc_feature 1..22: note = chemically synthesized
  source 1..22: mol_type = other DNA
attcattgtgacacacacaact

SEQ ID NO: 48809 - DNA, 22 bp, synthetic construct
  misc_feature 1..22: note = chemically synthesized
  source 1..22: mol_type = other DNA
attgtgacacacacaactccct

SEQ ID NO: 48810 - DNA, 22 bp, synthetic construct
  misc_feature 1..22: note = chemically synthesized
  source 1..22: mol_type = other DNA
tgacacacacaactccctgcgc

SEQ ID NO: 48811 - DNA, 22 bp, synthetic construct
  misc_feature 1..22: note = chemically synthesized
  source 1..22: mol_type = other DNA
cctgcgctaatctctgcccagc

SEQ ID NO: 48812 - DNA, 22 bp, synthetic construct
  misc_feature 1..22: note = chemically synthesized
  source 1..22: mol_type = other DNA
cgctaatctctgcccagccaac

SEQ ID NO: 48813 - DNA, 22 bp, synthetic construct
  misc_feature 1..22: note = chemically synthesized
  source 1..22: mol_type = other DNA
atctctgcccagccaacgcatt

SEQ ID NO: 48814 - DNA, 22 bp, synthetic construct
  misc_feature 1..22: note = chemically synthesized
  source 1..22: mol_type = other DNA
tgcccagccaacgcattcttaa

SEQ ID NO: 48815 - DNA, 22 bp, synthetic construct
  misc_feature 1..22: note = chemically synthesized
  source 1..22: mol_type = other DNA
cccagccaacgcattcttaagc

SEQ ID NO: 48816 - DNA, 22 bp, synthetic construct
  misc_feature 1..22: note = chemically synthesized
  source 1..22: mol_type = other DNA
ttaagcggggaactacttagca

SEQ ID NO: 48817 - DNA, 22 bp, synthetic construct
  misc_feature 1..22: note = chemically synthesized
  source 1..22: mol_type = other DNA
aagcggggaactacttagcacc

SEQ ID NO: 48818 - DNA, 22 bp, synthetic construct
  misc_feature 1..22: note = chemically synthesized
  source 1..22: mol_type = other DNA
agcggggaactacttagcacca

SEQ ID NO: 48819 - DNA, 22 bp, synthetic construct
  misc_feature 1..22: note = chemically synthesized
  source 1..22: mol_type = other DNA
cttagcaccaggaacgttgtaa

SEQ ID NO: 48820 - DNA, 22 bp, synthetic construct
  misc_feature 1..22: note = chemically synthesized
  source 1..22: mol_type = other DNA
agcaccaggaacgttgtaaatt

SEQ ID NO: 48821 - DNA, 22 bp, synthetic construct
  misc_feature 1..22: note = chemically synthesized
  source 1..22: mol_type = other DNA
gcaccaggaacgttgtaaatta

SEQ ID NO: 48822 - DNA, 22 bp, synthetic construct
  misc_feature 1..22: note = chemically synthesized
  source 1..22: mol_type = other DNA
taaattatcactagtcaacagc

SEQ ID NO: 48823 - DNA, 22 bp, synthetic construct
  misc_feature 1..22: note = chemically synthesized
  source 1..22: mol_type = other DNA
tcactagtcaacagcattgatt

SEQ ID NO: 48824 - DNA, 22 bp, synthetic construct
  misc_feature 1..22: note = chemically synthesized
  source 1..22: mol_type = other DNA
gtcaacagcattgatttttagt

SEQ ID NO: 48825 - DNA, 22 bp, synthetic construct
  misc_feature 1..22: note = chemically synthesized
  source 1..22: mol_type = other DNA
atttttagtcgacatttcaatc

SEQ ID NO: 48826 - DNA, 22 bp, synthetic construct
  misc_feature 1..22: note = chemically synthesized
  source 1..22: mol_type = other DNA
ttagtcgacatttcaatcaggt

SEQ ID NO: 48827 - DNA, 22 bp, synthetic construct
  misc_feature 1..22: note = chemically synthesized
  source 1..22: mol_type = other DNA
tagtcgacatttcaatcaggtt

SEQ ID NO: 48828 - DNA, 22 bp, synthetic construct
  misc_feature 1..22: note = chemically synthesized
  source 1..22: mol_type = other DNA
agtcgacatttcaatcaggttg

SEQ ID NO: 48829 - DNA, 22 bp, synthetic construct
  misc_feature 1..22: note = chemically synthesized
  source 1..22: mol_type = other DNA
gtcgacatttcaatcaggttga

SEQ ID NO: 48830 - DNA, 22 bp, synthetic construct
  misc_feature 1..22: note = chemically synthesized
  source 1..22: mol_type = other DNA
caatcaggttgaagtagaaata

SEQ ID NO: 48831 - DNA, 22 bp, synthetic construct
  misc_feature 1..22: note = chemically synthesized
  source 1..22: mol_type = other DNA
aatcaggttgaagtagaaatac

SEQ ID NO: 48832 - DNA, 22 bp, synthetic construct
  misc_feature 1..22: note = chemically synthesized
  source 1..22: mol_type = other DNA
aagtagaaatactacccggctc

SEQ ID NO: 48833 - DNA, 22 bp, synthetic construct
  misc_feature 1..22: note = chemically synthesized
  source 1..22: mol_type = other DNA
cccggctcatccaacagcctct

SEQ ID NO: 48834 - DNA, 22 bp, synthetic construct
  misc_feature 1..22: note = chemically synthesized
  source 1..22: mol_type = other DNA
atccaacagcctcttaaccagt

SEQ ID NO: 48835 - DNA, 22 bp, synthetic construct
  misc_feature 1..22: note = chemically synthesized
  source 1..22: mol_type = other DNA
ttaaccagtccactgcccctct

SEQ ID NO: 48836 - DNA, 22 bp, synthetic construct
  misc_feature 1..22: note = chemically synthesized
  source 1..22: mol_type = other DNA
aaccagtccactgcccctctga

SEQ ID NO: 48837 - DNA, 22 bp, synthetic construct
  misc_feature 1..22: note = chemically synthesized
  source 1..22: mol_type = other DNA
accagtccactgcccctctgag

SEQ ID NO: 48838 - DNA, 22 bp, synthetic construct
  misc_feature 1..22: note = chemically synthesized
  source 1..22: mol_type = other DNA
cccctctgaggtctccccggtt

SEQ ID NO: 48839 - DNA, 22 bp, synthetic construct
  misc_feature 1..22: note = chemically synthesized
  source 1..22: mol_type = other DNA
tgaggtctccccggttatggct

SEQ ID NO: 48840 - DNA, 22 bp, synthetic construct
  misc_feature 1..22: note = chemically synthesized
  source 1..22: mol_type = other DNA
aggtctccccggttatggcttt

SEQ ID NO: 48841 - DNA, 22 bp, synthetic construct
  misc_feature 1..22: note = chemically synthesized
  source 1..22: mol_type = other DNA
cccggttatggctttgctaaat

SEQ ID NO: 48842 - DNA, 22 bp, synthetic construct
  misc_feature 1..22: note = chemically synthesized
  source 1..22: mol_type = other DNA
tggctttgctaaatttccattg

SEQ ID NO: 48843 - DNA, 22 bp, synthetic construct
  misc_feature 1..22: note = chemically synthesized
  source 1..22: mol_type = other DNA
tgctaaatttccattgctctca

SEQ ID NO: 48844 - DNA, 22 bp, synthetic construct
  misc_feature 1..22: note = chemically synthesized
  source 1..22: mol_type = other DNA
gctaaatttccattgctctcac

SEQ ID NO: 48845 - DNA, 22 bp, synthetic construct
  misc_feature 1..22: note = chemically synthesized
  source 1..22: mol_type = other DNA
ctaaatttccattgctctcacc

SEQ ID NO: 48846 - DNA, 22 bp, synthetic construct
  misc_feature 1..22: note = chemically synthesized
  source 1..22: mol_type = other DNA
aatttccattgctctcaccatt

SEQ ID NO: 48847 - DNA, 22 bp, synthetic construct
  misc_feature 1..22: note = chemically synthesized
  source 1..22: mol_type = other DNA
ccattgctctcaccattcgata

SEQ ID NO: 48848 - DNA, 22 bp, synthetic construct
  misc_feature 1..22: note = chemically synthesized
  source 1..22: mol_type = other DNA
cattgctctcaccattcgatat

SEQ ID NO: 48849 - DNA, 22 bp, synthetic construct
  misc_feature 1..22: note = chemically synthesized
  source 1..22: mol_type = other DNA
ctctcaccattcgatatttatt

SEQ ID NO: 48850 - DNA, 22 bp, synthetic construct
  misc_feature 1..22: note = chemically synthesized
  source 1..22: mol_type = other DNA
tcaccattcgatatttattgta

SEQ ID NO: 48851 - DNA, 22 bp, synthetic construct
  misc_feature 1..22: note = chemically synthesized
  source 1..22: mol_type = other DNA
accattcgatatttattgtagc

SEQ ID NO: 48852 - DNA, 22 bp, synthetic construct
  misc_feature 1..22: note = chemically synthesized
  source 1..22: mol_type = other DNA
gatatttattgtagctttgcca

SEQ ID NO: 48853 - DNA, 22 bp, synthetic construct
  misc_feature 1..22: note = chemically synthesized
  source 1..22: mol_type = other DNA
attgtagctttgccacatccag

SEQ ID NO: 48854 - DNA, 22 bp, synthetic construct
  misc_feature 1..22: note = chemically synthesized
  source 1..22: mol_type = other DNA
ttgtagctttgccacatccagg

SEQ ID NO: 48855 - DNA, 22 bp, synthetic construct
  misc_feature 1..22: note = chemically synthesized
  source 1..22: mol_type = other DNA
tagctttgccacatccaggcac

SEQ ID NO: 48856 - DNA, 22 bp, synthetic construct
  misc_feature 1..22: note = chemically synthesized
  source 1..22: mol_type = other DNA
tgccacatccaggcacttggcc

SEQ ID NO: 48857 - DNA, 22 bp, synthetic construct
  misc_feature 1..22: note = chemically synthesized
  source 1..22: mol_type = other DNA
gccacatccaggcacttggcct

SEQ ID NO: 48858 - DNA, 22 bp, synthetic construct
  misc_feature 1..22: note = chemically synthesized
  source 1..22: mol_type = other DNA
ccacatccaggcacttggcctg

SEQ ID NO: 48859 - DNA, 22 bp, synthetic construct
  misc_feature 1..22: note = chemically synthesized
  source 1..22: mol_type = other DNA
ggcctgaagggtcaccggcctg

SEQ ID NO: 48860 - DNA, 22 bp, synthetic construct
  misc_feature 1..22: note = chemically synthesized
  source 1..22: mol_type = other DNA
gcctgaagggtcaccggcctgc

SEQ ID NO: 48861 - DNA, 22 bp, synthetic construct
  misc_feature 1..22: note = chemically synthesized
  source 1..22: mol_type = other DNA
aagggtcaccggcctgcctctt

SEQ ID NO: 48862 - DNA, 22 bp, synthetic construct
  misc_feature 1..22: note = chemically synthesized
  source 1..22: mol_type = other DNA
cctcttgggacatcaaatttgt

SEQ ID NO: 48863 - DNA, 22 bp, synthetic construct
  misc_feature 1..22: note = chemically synthesized
  source 1..22: mol_type = other DNA
ttgggacatcaaatttgtgctt

SEQ ID NO: 48864 - DNA, 22 bp, synthetic construct
  misc_feature 1..22: note = chemically synthesized
  source 1..22: mol_type = other DNA
gggacatcaaatttgtgcttac

SEQ ID NO: 48865 - DNA, 22 bp, synthetic construct
  misc_feature 1..22: note = chemically synthesized
  source 1..22: mol_type = other DNA
ggacatcaaatttgtgcttacc

SEQ ID NO: 48866 - DNA, 22 bp, synthetic construct
  misc_feature 1..22: note = chemically synthesized
  source 1..22: mol_type = other DNA
gtgcttacctaacgaaggcaga

SEQ ID NO: 48867 - DNA, 22 bp, synthetic construct
  misc_feature 1..22: note = chemically synthesized
  source 1..22: mol_type = other DNA
tgcttacctaacgaaggcagaa

SEQ ID NO: 48868 - DNA, 22 bp, synthetic construct
  misc_feature 1..22: note = chemically synthesized
  source 1..22: mol_type = other DNA
acctaacgaaggcagaaacaga

SEQ ID NO: 48869 - DNA, 22 bp, synthetic construct
  misc_feature 1..22: note = chemically synthesized
  source 1..22: mol_type = other DNA
cctaacgaaggcagaaacagaa

SEQ ID NO: 48870 - DNA, 22 bp, synthetic construct
  misc_feature 1..22: note = chemically synthesized
  source 1..22: mol_type = other DNA
acgaaggcagaaacagaaaaag

SEQ ID NO: 48871 - DNA, 22 bp, synthetic construct
  misc_feature 1..22: note = chemically synthesized
  source 1..22: mol_type = other DNA
attttcactgattttcaaggga

SEQ ID NO: 48872 - DNA, 22 bp, synthetic construct
  misc_feature 1..22: note = chemically synthesized
  source 1..22: mol_type = other DNA
tcactgattttcaagggaagag

SEQ ID NO: 48873 - DNA, 22 bp, synthetic construct
  misc_feature 1..22: note = chemically synthesized
  source 1..22: mol_type = other DNA
cactgattttcaagggaagaga

SEQ ID NO: 48874 - DNA, 22 bp, synthetic construct
  misc_feature 1..22: note = chemically synthesized
  source 1..22: mol_type = other DNA
actgattttcaagggaagagaa

SEQ ID NO: 48875 - DNA, 22 bp, synthetic construct
  misc_feature 1..22: note = chemically synthesized
  source 1..22: mol_type = other DNA
attttcaagggaagagaaggaa

SEQ ID NO: 48876 - DNA, 22 bp, synthetic construct
  misc_feature 1..22: note = chemically synthesized
  source 1..22: mol_type = other DNA
tcaagggaagagaaggaaaact

SEQ ID NO: 48877 - DNA, 22 bp, synthetic construct
  misc_feature 1..22: note = chemically synthesized
  source 1..22: mol_type = other DNA
caagggaagagaaggaaaacta

SEQ ID NO: 48878 - DNA, 22 bp, synthetic construct
  misc_feature 1..22: note = chemically synthesized
  source 1..22: mol_type = other DNA
aagggaagagaaggaaaactag

SEQ ID NO: 48879 - DNA, 22 bp, synthetic construct
  misc_feature 1..22: note = chemically synthesized
  source 1..22: mol_type = other DNA
gggggtgcgagcgagggaaata

SEQ ID NO: 48880 - DNA, 22 bp, synthetic construct
  misc_feature 1..22: note = chemically synthesized
  source 1..22: mol_type = other DNA
taaagccatgatacgcctttta

SEQ ID NO: 48881 - DNA, 22 bp, synthetic construct
  misc_feature 1..22: note = chemically synthesized
  source 1..22: mol_type = other DNA
aagccatgatacgccttttatc

SEQ ID NO: 48882 - DNA, 22 bp, synthetic construct
  misc_feature 1..22: note = chemically synthesized
  source 1..22: mol_type = other DNA
ttatcatttcagctttatcatt

SEQ ID NO: 48883 - DNA, 22 bp, synthetic construct
  misc_feature 1..22: note = chemically synthesized
  source 1..22: mol_type = other DNA
tatcatttcagctttatcattt

SEQ ID NO: 48884 - DNA, 22 bp, synthetic construct
  misc_feature 1..22: note = chemically synthesized
  source 1..22: mol_type = other DNA
atcatttcagctttatcatttc

SEQ ID NO: 48885 - DNA, 22 bp, synthetic construct
  misc_feature 1..22: note = chemically synthesized
  source 1..22: mol_type = other DNA
tcatttcagctttatcatttca

SEQ ID NO: 48886 - DNA, 22 bp, synthetic construct
  misc_feature 1..22: note = chemically synthesized
  source 1..22: mol_type = other DNA
cagctttatcatttcagtctag

SEQ ID NO: 48887 - DNA, 22 bp, synthetic construct
  misc_feature 1..22: note = chemically synthesized
  source 1..22: mol_type = other DNA
agctttatcatttcagtctagg

SEQ ID NO: 48888 - DNA, 22 bp, synthetic construct
  misc_feature 1..22: note = chemically synthesized
  source 1..22: mol_type = other DNA
tatcatttcagtctaggagacc

SEQ ID NO: 48889 - DNA, 22 bp, synthetic construct
  misc_feature 1..22: note = chemically synthesized
  source 1..22: mol_type = other DNA
atcatttcagtctaggagaccc

SEQ ID NO: 48890 - DNA, 22 bp, synthetic construct
  misc_feature 1..22: note = chemically synthesized
  source 1..22: mol_type = other DNA
tcatttcagtctaggagaccca

SEQ ID NO: 48891 - DNA, 22 bp, synthetic construct
  misc_feature 1..22: note = chemically synthesized
  source 1..22: mol_type = other DNA
cagtctaggagacccagcaaat

SEQ ID NO: 48892 - DNA, 22 bp, synthetic construct
  misc_feature 1..22: note = chemically synthesized
  source 1..22: mol_type = other DNA
agtctaggagacccagcaaata

SEQ ID NO: 48893 - DNA, 22 bp, synthetic construct
  misc_feature 1..22: note = chemically synthesized
  source 1..22: mol_type = other DNA
ggagacccagcaaataaaacta

SEQ ID NO: 48894 - DNA, 22 bp, synthetic construct
  misc_feature 1..22: note = chemically synthesized
  source 1..22: mol_type = other DNA
agagcttctcttccagggtgac

SEQ ID NO: 48895 - DNA, 22 bp, synthetic construct
  misc_feature 1..22: note = chemically synthesized
  source 1..22: mol_type = other DNA
ctcttccagggtgacaagggag

SEQ ID NO: 48896 - DNA, 22 bp, synthetic construct
  misc_feature 1..22: note = chemically synthesized
  source 1..22: mol_type = other DNA
tcttccagggtgacaagggaga

SEQ ID NO: 48897 - DNA, 22 bp, synthetic construct
  misc_feature 1..22: note = chemically synthesized
  source 1..22: mol_type = other DNA
ttccagggtgacaagggagaac

SEQ ID NO: 48898 - DNA, 22 bp, synthetic construct
  misc_feature 1..22: note = chemically synthesized
  source 1..22: mol_type = other DNA
ccagggtgacaagggagaacca

SEQ ID NO: 48899 - DNA, 22 bp, synthetic construct
  misc_feature 1..22: note = chemically synthesized
  source 1..22: mol_type = other DNA
cagggtgacaagggagaaccac

SEQ ID NO: 48900 - DNA, 22 bp, synthetic construct
  misc_feature 1..22: note = chemically synthesized
  source 1..22: mol_type = other DNA
cactcttgacccaagggtatgt

SEQ ID NO: 48901 - DNA, 22 bp, synthetic construct
  misc_feature 1..22: note = chemically synthesized
  source 1..22: mol_type = other DNA
ttgacccaagggtatgtagaga

SEQ ID NO: 48902 - DNA, 22 bp, synthetic construct
  misc_feature 1..22: note = chemically synthesized
  source 1..22: mol_type = other DNA
gacccaagggtatgtagagaca

SEQ ID NO: 48903 - DNA, 22 bp, synthetic construct
  misc_feature 1..22: note = chemically synthesized
  source 1..22: mol_type = other DNA
acccaagggtatgtagagacaa

SEQ ID NO: 48904 - DNA, 22 bp, synthetic construct
  misc_feature 1..22: note = chemically synthesized
  source 1..22: mol_type = other DNA
gcatgacctccattgaggacgt

SEQ ID NO: 48905 - DNA, 22 bp, synthetic construct
  misc_feature 1..22: note = chemically synthesized
  source 1..22: mol_type = other DNA
catgacctccattgaggacgtc

SEQ ID NO: 48906 - DNA, 22 bp, synthetic construct
  misc_feature 1..22: note = chemically synthesized
  source 1..22: mol_type = other DNA
cattgaggacgtccatgccccg

SEQ ID NO: 48907 - DNA, 22 bp, synthetic construct
  misc_feature 1..22: note = chemically synthesized
  source 1..22: mol_type = other DNA
aggacgtccatgccccgggaca

SEQ ID NO: 48908 - DNA, 22 bp, synthetic construct
  misc_feature 1..22: note = chemically synthesized
  source 1..22: mol_type = other DNA
tggagctcttgacccacatgga

SEQ ID NO: 48909 - DNA, 22 bp, synthetic construct
  misc_feature 1..22: note = chemically synthesized
  source 1..22: mol_type = other DNA
ggagctcttgacccacatggat

SEQ ID NO: 48910 - DNA, 22 bp, synthetic construct
  misc_feature 1..22: note = chemically synthesized
  source 1..22: mol_type = other DNA
gagctcttgacccacatggatt

SEQ ID NO: 48911 - DNA, 22 bp, synthetic construct
  misc_feature 1..22: note = chemically synthesized
  source 1..22: mol_type = other DNA
ttgacccacatggattctcagc

SEQ ID NO: 48912 - DNA, 22 bp, synthetic construct
  misc_feature 1..22: note = chemically synthesized
  source 1..22: mol_type = other DNA
gacccacatggattctcagcag

SEQ ID NO: 48913 - DNA, 22 bp, synthetic construct
  misc_feature 1..22: note = chemically synthesized
  source 1..22: mol_type = other DNA
acccacatggattctcagcagc

SEQ ID NO: 48914 - DNA, 22 bp, synthetic construct
  misc_feature 1..22: note = chemically synthesized
  source 1..22: mol_type = other DNA
tcagcagccacctccatcccac

SEQ ID NO: 48915 - DNA, 22 bp, synthetic construct
  misc_feature 1..22: note = chemically synthesized
  source 1..22: mol_type = other DNA
agcagccacctccatcccacct

SEQ ID NO: 48916 - DNA, 22 bp, synthetic construct
  misc_feature 1..22: note = chemically synthesized
  source 1..22: mol_type = other DNA
catcccacctcaaactcagaag

SEQ ID NO: 48917 - DNA, 22 bp, synthetic construct
  misc_feature 1..22: note = chemically synthesized
  source 1..22: mol_type = other DNA
aaactcagaagacaacctggat

SEQ ID NO: 48918 - DNA, 22 bp, synthetic construct
  misc_feature 1..22: note = chemically synthesized
  source 1..22: mol_type = other DNA
agaagacaacctggatgtgacc

SEQ ID NO: 48919 - DNA, 22 bp, synthetic construct
  misc_feature 1..22: note = chemically synthesized
  source 1..22: mol_type = other DNA
gatgtgaccgacaacttctttg

SEQ ID NO: 48920 - DNA, 22 bp, synthetic construct
  misc_feature 1..22: note = chemically synthesized
  source 1..22: mol_type = other DNA
ctttgtgatggatctgaacagc

SEQ ID NO: 48921 - DNA, 22 bp, synthetic construct
  misc_feature 1..22: note = chemically synthesized
  source 1..22: mol_type = other DNA
tttgtgatggatctgaacagcc

SEQ ID NO: 48922 - DNA, 22 bp, synthetic construct
  misc_feature 1..22: note = chemically synthesized
  source 1..22: mol_type = other DNA
tgtgatggatctgaacagcctc

SEQ ID NO: 48923 - DNA, 22 bp, synthetic construct
  misc_feature 1..22: note = chemically synthesized
  source 1..22: mol_type = other DNA
gtgatggatctgaacagcctcc

SEQ ID NO: 48924 - DNA, 22 bp, synthetic construct
  misc_feature 1..22: note = chemically synthesized
  source 1..22: mol_type = other DNA
tgatggatctgaacagcctccc

SEQ ID NO: 48925 - DNA, 22 bp, synthetic construct
  misc_feature 1..22: note = chemically synthesized
  source 1..22: mol_type = other DNA
aacagcctcccttggttctagc

SEQ ID NO: 48926 - DNA, 22 bp, synthetic construct
  misc_feature 1..22: note = chemically synthesized
  source 1..22: mol_type = other DNA
ccttggttctagcagaaggact

SEQ ID NO: 48927 - DNA, 22 bp, synthetic construct
  misc_feature 1..22: note = chemically synthesized
  source 1..22: mol_type = other DNA
ggttctagcagaaggacttacc

SEQ ID NO: 48928 - DNA, 22 bp, synthetic construct
  misc_feature 1..22: note = chemically synthesized
  source 1..22: mol_type = other DNA
gttctagcagaaggacttacca

SEQ ID NO: 48929 - DNA, 22 bp, synthetic construct
  misc_feature 1..22: note = chemically synthesized
  source 1..22: mol_type = other DNA
tagcagaaggacttaccaagtg

SEQ ID NO: 48930 - DNA, 22 bp, synthetic construct
  misc_feature 1..22: note = chemically synthesized
  source 1..22: mol_type = other DNA
gcagaaggacttaccaagtgag

SEQ ID NO: 48931 - DNA, 22 bp, synthetic construct
  misc_feature 1..22: note = chemically synthesized
  source 1..22: mol_type = other DNA
accaagtgagcagagctcccat

SEQ ID NO: 48932 - DNA, 22 bp, synthetic construct
  misc_feature 1..22: note = chemically synthesized
  source 1..22: mol_type = other DNA
ccaagtgagcagagctcccatc

SEQ ID NO: 48933 - DNA, 22 bp, synthetic construct
  misc_feature 1..22: note = chemically synthesized
  source 1..22: mol_type = other DNA
ccatccgatactcgccagtgct

SEQ ID NO: 48934 - DNA, 22 bp, synthetic construct
  misc_feature 1..22: note = chemically synthesized
  source 1..22: mol_type = other DNA
gccagtgctgaggccaactctt

SEQ ID NO: 48935 - DNA, 22 bp, synthetic construct
  misc_feature 1..22: note = chemically synthesized
  source 1..22: mol_type = other DNA
aggccaactcttccactcctcc

SEQ ID NO: 48936 - DNA, 22 bp, synthetic construct
  misc_feature 1..22: note = chemically synthesized
  source 1..22: mol_type = other DNA
ttccactcctcccacggggcct

SEQ ID NO: 48937 - DNA, 22 bp, synthetic construct
  misc_feature 1..22: note = chemically synthesized
  source 1..22: mol_type = other DNA
ccactcctcccacggggcctcc

SEQ ID NO: 48938 - DNA, 22 bp, synthetic construct
  misc_feature 1..22: note = chemically synthesized
  source 1..22: mol_type = other DNA
cactcctcccacggggcctccg

SEQ ID NO: 48939 - DNA, 22 bp, synthetic construct
  misc_feature 1..22: note = chemically synthesized
  source 1..22: mol_type = other DNA
ctcccacggggcctccgcatga

SEQ ID NO: 48940 - DNA, 22 bp, synthetic construct
  misc_feature 1..22: note = chemically synthesized
  source 1..22: mol_type = other DNA
ccacggggcctccgcatgaagt

SEQ ID NO: 48941 - DNA, 22 bp, synthetic construct
  misc_feature 1..22: note = chemically synthesized
  source 1..22: mol_type = other DNA
cgcatgaagtaggcgcttctca

SEQ ID NO: 48942 - DNA, 22 bp, synthetic construct
  misc_feature 1..22: note = chemically synthesized
  source 1..22: mol_type = other DNA
ctcaactaccaaatgattctga

SEQ ID NO: 48943 - DNA, 22 bp, synthetic construct
  misc_feature 1..22: note = chemically synthesized
  source 1..22: mol_type = other DNA
tcaactaccaaatgattctgaa

SEQ ID NO: 48944 - DNA, 22 bp, synthetic construct
  misc_feature 1..22: note = chemically synthesized
  source 1..22: mol_type = other DNA
aactaccaaatgattctgaaat

SEQ ID NO: 48945 - DNA, 22 bp, synthetic construct
  misc_feature 1..22: note = chemically synthesized
  source 1..22: mol_type = other DNA
ccaaatgattctgaaattctct

SEQ ID NO: 48946 - DNA, 22 bp, synthetic construct
  misc_feature 1..22: note = chemically synthesized
  source 1..22: mol_type = other DNA
tgaaattctctcagtggaggtc

SEQ ID NO: 48947 - DNA, 22 bp, synthetic construct
  misc_feature 1..22: note = chemically synthesized
  source 1..22: mol_type = other DNA
aaattctctcagtggaggtcta

SEQ ID NO: 48948 - DNA, 22 bp, synthetic construct
  misc_feature 1..22: note = chemically synthesized
  source 1..22: mol_type = other DNA
tctcagtggaggtctatgttag

SEQ ID NO: 48949 - DNA, 22 bp, synthetic construct
  misc_feature 1..22: note = chemically synthesized
  source 1..22: mol_type = other DNA
tcagtggaggtctatgttagcc

SEQ ID NO: 48950 - DNA, 22 bp, synthetic construct
  misc_feature 1..22: note = chemically synthesized
  source 1..22: mol_type = other DNA
agtggaggtctatgttagcctg

SEQ ID NO: 48951 - DNA, 22 bp, synthetic construct
  misc_feature 1..22: note = chemically synthesized
  source 1..22: mol_type = other DNA
tgttagcctggccaatttgaaa

SEQ ID NO: 48952 - DNA, 22 bp, synthetic construct
  misc_feature 1..22: note = chemically synthesized
  source 1..22: mol_type = other DNA
gcctggccaatttgaaaggatg

SEQ ID NO: 48953 - DNA, 22 bp, synthetic construct
  misc_feature 1..22: note = chemically synthesized
  source 1..22: mol_type = other DNA
gccaatttgaaaggatggagaa

SEQ ID NO: 48954 - DNA, 22 bp, synthetic construct
  misc_feature 1..22: note = chemically synthesized
  source 1..22: mol_type = other DNA
gaaaggatggagaatacaggaa

SEQ ID NO: 48955 - DNA, 22 bp, synthetic construct
  misc_feature 1..22: note = chemically synthesized
  source 1..22: mol_type = other DNA
aaaggatggagaatacaggaaa

SEQ ID NO: 48956 - DNA, 22 bp, synthetic construct
  misc_feature 1..22: note = chemically synthesized
  source 1..22: mol_type = other DNA
ggttttggaatacattgtgtaa

SEQ ID NO: 48957 - DNA, 22 bp, synthetic construct
  misc_feature 1..22: note = chemically synthesized
  source 1..22: mol_type = other DNA
gttttggaatacattgtgtaat

SEQ ID NO: 48958 - DNA, 22 bp, synthetic construct
  misc_feature 1..22: note = chemically synthesized
  source 1..22: mol_type = other DNA
tggaatacattgtgtaatccat

SEQ ID NO: 48959 - DNA, 22 bp, synthetic construct
  misc_feature 1..22: note = chemically synthesized
  source 1..22: mol_type = other DNA
ggaatacattgtgtaatccatc

SEQ ID NO: 48960 - DNA, 22 bp, synthetic construct
  misc_feature 1..22: note = chemically synthesized
  source 1..22: mol_type = other DNA
gaatacattgtgtaatccatct

SEQ ID NO: 48961 - DNA, 22 bp, synthetic construct
  misc_feature 1..22: note = chemically synthesized
  source 1..22: mol_type = other DNA
tgtaatccatctgcaacgaacc

SEQ ID NO: 48962 - DNA, 22 bp, synthetic construct
  misc_feature 1..22: note = chemically synthesized
  source 1..22: mol_type = other DNA
caacgaacctcaggtcttgctt

SEQ ID NO: 48963 - DNA, 22 bp, synthetic construct
  misc_feature 1..22: note = chemically synthesized
  source 1..22: mol_type = other DNA
aggtcttgcttcagcaaatatt

SEQ ID NO: 48964 - DNA, 22 bp, synthetic construct
  misc_feature 1..22: note = chemically synthesized
  source 1..22: mol_type = other DNA
gcttcagcaaatattaatagcg

SEQ ID NO: 48965 - DNA, 22 bp, synthetic construct
  misc_feature 1..22: note = chemically synthesized
  source 1..22: mol_type = other DNA
cttcagcaaatattaatagcgt

SEQ ID NO: 48966 - DNA, 22 bp, synthetic construct
  misc_feature 1..22: note = chemically synthesized
  source 1..22: mol_type = other DNA
cagcaaatattaatagcgtcag

SEQ ID NO: 48967 - DNA, 22 bp, synthetic construct
  misc_feature 1..22: note = chemically synthesized
  source 1..22: mol_type = other DNA
agcaaatattaatagcgtcagg

SEQ ID NO: 48968 - DNA, 22 bp, synthetic construct
  misc_feature 1..22: note = chemically synthesized
  source 1..22: mol_type = other DNA
atagcgtcagggcagcctgtgg

SEQ ID NO: 48969 - DNA, 22 bp, synthetic construct
  misc_feature 1..22: note = chemically synthesized
  source 1..22: mol_type = other DNA
tggagtgactgggagaggccac

SEQ ID NO: 48970 - DNA, 22 bp, synthetic construct
  misc_feature 1..22: note = chemically synthesized
  source 1..22: mol_type = other DNA
ggagaggccaccacgcagctga

SEQ ID NO: 48971 - DNA, 22 bp, synthetic construct
  misc_feature 1..22: note = chemically synthesized
  source 1..22: mol_type = other DNA
aaaacttgcctctggggaagcc

SEQ ID NO: 48972 - DNA, 22 bp, synthetic construct
  misc_feature 1..22: note = chemically synthesized
  source 1..22: mol_type = other DNA
gcctctggggaagccacatgcg

SEQ ID NO: 48973 - DNA, 22 bp, synthetic construct
  misc_feature 1..22: note = chemically synthesized
  source 1..22: mol_type = other DNA
cctctggggaagccacatgcgg

SEQ ID NO: 48974 - DNA, 22 bp, synthetic construct
  misc_feature 1..22: note = chemically synthesized
  source 1..22: mol_type = other DNA
tggggaagccacatgcggatca

SEQ ID NO: 48975 - DNA, 22 bp, synthetic construct
  misc_feature 1..22: note = chemically synthesized
  source 1..22: mol_type = other DNA
gggaagccacatgcggatcata

SEQ ID NO: 48976 - DNA, 22 bp, synthetic construct
  misc_feature 1..22: note = chemically synthesized
  source 1..22: mol_type = other DNA
ttgactgcagtttccattcaaa

SEQ ID NO: 48977 - DNA, 22 bp, synthetic construct
  misc_feature 1..22: note = chemically synthesized
  source 1..22: mol_type = other DNA
actgcagtttccattcaaaact

SEQ ID NO: 48978 - DNA, 22 bp, synthetic construct
  misc_feature 1..22: note = chemically synthesized
  source 1..22: mol_type = other DNA
cagtttccattcaaaacttccc

SEQ ID NO: 48979 - DNA, 22 bp, synthetic construct
  misc_feature 1..22: note = chemically synthesized
  source 1..22: mol_type = other DNA
ccattcaaaacttccctcaagt

SEQ ID NO: 48980 - DNA, 22 bp, synthetic construct
  misc_feature 1..22: note = chemically synthesized
  source 1..22: mol_type = other DNA
cattcaaaacttccctcaagtt

SEQ ID NO: 48981 - DNA, 22 bp, synthetic construct
  misc_feature 1..22: note = chemically synthesized
  source 1..22: mol_type = other DNA
aaaacttccctcaagtttccag

SEQ ID NO: 48982 - DNA, 22 bp, synthetic construct
  misc_feature 1..22: note = chemically synthesized
  source 1..22: mol_type = other DNA
ccctcaagtttccagcatgcct

SEQ ID NO: 48983 - DNA, 22 bp, synthetic construct
  misc_feature 1..22: note = chemically synthesized
  source 1..22: mol_type = other DNA
cctcaagtttccagcatgcctt

SEQ ID NO: 48984 - DNA, 22 bp, synthetic construct
  misc_feature 1..22: note = chemically synthesized
  source 1..22: mol_type = other DNA
aagtttccagcatgccttccgg

SEQ ID NO: 48985 - DNA, 22 bp, synthetic construct
  misc_feature 1..22: note = chemically synthesized
  source 1..22: mol_type = other DNA
ccagcatgccttccggacttgc

SEQ ID NO: 48986 - DNA, 22 bp, synthetic construct
  misc_feature 1..22: note = chemically synthesized
  source 1..22: mol_type = other DNA
cagcatgccttccggacttgcc

SEQ ID NO: 48987 - DNA, 22 bp, synthetic construct
  misc_feature 1..22: note = chemically synthesized
  source 1..22: mol_type = other DNA
ccggacttgccttaccacagcc

SEQ ID NO: 48988 - DNA, 22 bp, synthetic construct
  misc_feature 1..22: note = chemically synthesized
  source 1..22: mol_type = other DNA
cggacttgccttaccacagcct

SEQ ID NO: 48989 - DNA, 22 bp, synthetic construct
  misc_feature 1..22: note = chemically synthesized
  source 1..22: mol_type = other DNA
gccttaccacagccttgttcag

SEQ ID NO: 48990 - DNA, 22 bp, synthetic construct
  misc_feature 1..22: note = chemically synthesized
  source 1..22: mol_type = other DNA
ccttaccacagccttgttcagc

SEQ ID NO: 48991 - DNA, 22 bp, synthetic construct
  misc_feature 1..22: note = chemically synthesized
  source 1..22: mol_type = other DNA
accacagccttgttcagccaga

SEQ ID NO: 48992 - DNA, 22 bp, synthetic construct
  misc_feature 1..22: note = chemically synthesized
  source 1..22: mol_type = other DNA
ccacagccttgttcagccagaa

SEQ ID NO: 48993 - DNA, 22 bp, synthetic construct
  misc_feature 1..22: note = chemically synthesized
  source 1..22: mol_type = other DNA
gttcagccagaaatgaaaacct

SEQ ID NO: 48994 - DNA, 22 bp, synthetic construct
  misc_feature 1..22: note = chemically synthesized
  source 1..22: mol_type = other DNA
ttcagccagaaatgaaaacctc

SEQ ID NO: 48995 - DNA, 22 bp, synthetic construct
  misc_feature 1..22: note = chemically synthesized
  source 1..22: mol_type = other DNA
agccagaaatgaaaacctcctc

SEQ ID NO: 48996 - DNA, 22 bp, synthetic construct
  misc_feature 1..22: note = chemically synthesized
  source 1..22: mol_type = other DNA
ctcgaagcagattatgaccccc

SEQ ID NO: 48997 - DNA, 22 bp, synthetic construct
  misc_feature 1..22: note = chemically synthesized
  source 1..22: mol_type = other DNA
gaagcagattatgaccccccag

SEQ ID NO: 48998 - DNA, 22 bp, synthetic construct
  misc_feature 1..22: note = chemically synthesized
  source 1..22: mol_type = other DNA
tgaccccccagaacccatcgtc

SEQ ID NO: 48999 - DNA, 22 bp, synthetic construct
  misc_feature 1..22: note = chemically synthesized
  source 1..22: mol_type = other DNA
agaaacaccactgccacgcaca

SEQ ID NO: 49000 - DNA, 22 bp, synthetic construct
  misc_feature 1..22: note = chemically synthesized
  source 1..22: mol_type = other DNA
ccacgcacactcactcacactc

SEQ ID NO: 49001 - DNA, 22 bp, synthetic construct
  misc_feature 1..22: note = chemically synthesized
  source 1..22: mol_type = other DNA
actcacactcagtctctccctc

SEQ ID NO: 49002 - DNA, 22 bp, synthetic construct
  misc_feature 1..22: note = chemically synthesized
  source 1..22: mol_type = other DNA
acactcagtctctccctccctg

SEQ ID NO: 49003 - DNA, 22 bp, synthetic construct
  misc_feature 1..22: note = chemically synthesized
  source 1..22: mol_type = other DNA
agtctctccctccctgtataat

SEQ ID NO: 49004 - DNA, 22 bp, synthetic construct
  misc_feature 1..22: note = chemically synthesized
  source 1..22: mol_type = other DNA
tccctccctgtataattctgat

SEQ ID NO: 49005 - DNA, 22 bp, synthetic construct
  misc_feature 1..22: note = chemically synthesized
  source 1..22: mol_type = other DNA
cctccctgtataattctgattc

SEQ ID NO: 49006 - DNA, 22 bp, synthetic construct
  misc_feature 1..22: note = chemically synthesized
  source 1..22: mol_type = other DNA
cctgtataattctgattctccc

SEQ ID NO: 49007 - DNA, 22 bp, synthetic construct
  misc_feature 1..22: note = chemically synthesized
  source 1..22: mol_type = other DNA
tataattctgattctccccagc

SEQ ID NO: 49008 - DNA, 22 bp, synthetic construct
  misc_feature 1..22: note = chemically synthesized
  source 1..22: mol_type = other DNA
tgattctccccagcctttgaag

SEQ ID NO: 49009 - DNA, 22 bp, synthetic construct
  misc_feature 1..22: note = chemically synthesized
  source 1..22: mol_type = other DNA
attctccccagcctttgaaggt

SEQ ID NO: 49010 - DNA, 22 bp, synthetic construct
  misc_feature 1..22: note = chemically synthesized
  source 1..22: mol_type = other DNA
tccccagcctttgaaggtacga

SEQ ID NO: 49011 - DNA, 22 bp, synthetic construct
  misc_feature 1..22: note = chemically synthesized
  source 1..22: mol_type = other DNA
cccagcctttgaaggtacgatc

SEQ ID NO: 49012 - DNA, 22 bp, synthetic construct
  misc_feature 1..22: note = chemically synthesized
  source 1..22: mol_type = other DNA
tgaaggtacgatccgagaagta

SEQ ID NO: 49013 - DNA, 22 bp, synthetic construct
  misc_feature 1..22: note = chemically synthesized
  source 1..22: mol_type = other DNA
gaaggtacgatccgagaagtaa

SEQ ID NO: 49014 - DNA, 22 bp, synthetic construct
  misc_feature 1..22: note = chemically synthesized
  source 1..22: mol_type = other DNA
aaggtacgatccgagaagtaaa

SEQ ID NO: 49015 - DNA, 22 bp, synthetic construct
  misc_feature 1..22: note = chemically synthesized
  source 1..22: mol_type = other DNA
ctgcaggccaagcctcaccact

SEQ ID NO: 49016 - DNA, 22 bp, synthetic construct
  misc_feature 1..22: note = chemically synthesized
  source 1..22: mol_type = other DNA
caggccaagcctcaccacttct

SEQ ID NO: 49017 - DNA, 22 bp, synthetic construct
  misc_feature 1..22: note = chemically synthesized
  source 1..22: mol_type = other DNA
accacttcttaaaagtccgagc

SEQ ID NO: 49018 - DNA, 22 bp, synthetic construct
  misc_feature 1..22: note = chemically synthesized
  source 1..22: mol_type = other DNA
cttaaaagtccgagcttagttt

SEQ ID NO: 49019 - DNA, 22 bp, synthetic construct
  misc_feature 1..22: note = chemically synthesized
  source 1..22: mol_type = other DNA
ttaaaagtccgagcttagtttc

SEQ ID NO: 49020 - DNA, 22 bp, synthetic construct
  misc_feature 1..22: note = chemically synthesized
  source 1..22: mol_type = other DNA
aaaagtccgagcttagtttctc

SEQ ID NO: 49021 - DNA, 22 bp, synthetic construct
  misc_feature 1..22: note = chemically synthesized
  source 1..22: mol_type = other DNA
aaagtccgagcttagtttctca

SEQ ID NO: 49022 - DNA, 22 bp, synthetic construct
  misc_feature 1..22: note = chemically synthesized
  source 1..22: mol_type = other DNA
agtttctcattcagcccactgc

SEQ ID NO: 49023 - DNA, 22 bp, synthetic construct
  misc_feature 1..22: note = chemically synthesized
  source 1..22: mol_type = other DNA
gtttctcattcagcccactgca

SEQ ID NO: 49024 - DNA, 22 bp, synthetic construct
  misc_feature 1..22: note = chemically synthesized
  source 1..22: mol_type = other DNA
ctcattcagcccactgcagtct

SEQ ID NO: 49025 - DNA, 22 bp, synthetic construct
  misc_feature 1..22: note = chemically synthesized
  source 1..22: mol_type = other DNA
tcattcagcccactgcagtctc

SEQ ID NO: 49026 - DNA, 22 bp, synthetic construct
  misc_feature 1..22: note = chemically synthesized
  source 1..22: mol_type = other DNA
attcagcccactgcagtctcct

SEQ ID NO: 49027 - DNA, 22 bp, synthetic construct
  misc_feature 1..22: note = chemically synthesized
  source 1..22: mol_type = other DNA
agcccactgcagtctcctgacc

SEQ ID NO: 49028 - DNA, 22 bp, synthetic construct
  misc_feature 1..22: note = chemically synthesized
  source 1..22: mol_type = other DNA
cagtctcctgaccaagccacac

SEQ ID NO: 49029 - DNA, 22 bp, synthetic construct
  misc_feature 1..22: note = chemically synthesized
  source 1..22: mol_type = other DNA
ctgaccaagccacacacaaaca

SEQ ID NO: 49030 - DNA, 22 bp, synthetic construct
  misc_feature 1..22: note = chemically synthesized
  source 1..22: mol_type = other DNA
accaagccacacacaaacagta

SEQ ID NO: 49031 - DNA, 22 bp, synthetic construct
  misc_feature 1..22: note = chemically synthesized
  source 1..22: mol_type = other DNA
ctccctctgtttctcaggaccc

SEQ ID NO: 49032 - DNA, 22 bp, synthetic construct
  misc_feature 1..22: note = chemically synthesized
  source 1..22: mol_type = other DNA
cctctgtttctcaggaccctca

SEQ ID NO: 49033 - DNA, 22 bp, synthetic construct
  misc_feature 1..22: note = chemically synthesized
  source 1..22: mol_type = other DNA
tgtttctcaggaccctcacttg

SEQ ID NO: 49034 - DNA, 22 bp, synthetic construct
  misc_feature 1..22: note = chemically synthesized
  source 1..22: mol_type = other DNA
tttctcaggaccctcacttgat

SEQ ID NO: 49035 - DNA, 22 bp, synthetic construct
  misc_feature 1..22: note = chemically synthesized
  source 1..22: mol_type = other DNA
ctcaggaccctcacttgatttc

SEQ ID NO: 49036 - DNA, 22 bp, synthetic construct
  misc_feature 1..22: note = chemically synthesized
  source 1..22: mol_type = other DNA
tcaggaccctcacttgatttca

SEQ ID NO: 49037 - DNA, 22 bp, synthetic construct
  misc_feature 1..22: note = chemically synthesized
  source 1..22: mol_type = other DNA
aggaccctcacttgatttcagg

SEQ ID NO: 49038 - DNA, 22 bp, synthetic construct
  misc_feature 1..22: note = chemically synthesized
  source 1..22: mol_type = other DNA
acttgatttcaggctcattctg

SEQ ID NO: 49039 - DNA, 22 bp, synthetic construct
  misc_feature 1..22: note = chemically synthesized
  source 1..22: mol_type = other DNA
gatttcaggctcattctggaca

SEQ ID NO: 49040 - DNA, 22 bp, synthetic construct
  misc_feature 1..22: note = chemically synthesized
  source 1..22: mol_type = other DNA
atttcaggctcattctggacag

SEQ ID NO: 49041 - DNA, 22 bp, synthetic construct
  misc_feature 1..22: note = chemically synthesized
  source 1..22: mol_type = other DNA
caggctcattctggacagatgg

SEQ ID NO: 49042 - DNA, 22 bp, synthetic construct
  misc_feature 1..22: note = chemically synthesized
  source 1..22: mol_type = other DNA
aggctcattctggacagatggg

SEQ ID NO: 49043 - DNA, 22 bp, synthetic construct
  misc_feature 1..22: note = chemically synthesized
  source 1..22: mol_type = other DNA
attctggacagatggggaaatg

SEQ ID NO: 49044 - DNA, 22 bp, synthetic construct
  misc_feature 1..22: note = chemically synthesized
  source 1..22: mol_type = other DNA
tggacagatggggaaatgacta

SEQ ID NO: 49045 - DNA, 22 bp, synthetic construct
  misc_feature 1..22: note = chemically synthesized
  source 1..22: mol_type = other DNA
gacagatggggaaatgactact

SEQ ID NO: 49046 - DNA, 22 bp, synthetic construct
  misc_feature 1..22: note = chemically synthesized
  source 1..22: mol_type = other DNA
cttgcaaagcaggattccttac

SEQ ID NO: 49047 - DNA, 22 bp, synthetic construct
  misc_feature 1..22: note = chemically synthesized
  source 1..22: mol_type = other DNA
gcaaagcaggattccttacatt

SEQ ID NO: 49048 - DNA, 22 bp, synthetic construct
  misc_feature 1..22: note = chemically synthesized
  source 1..22: mol_type = other DNA
caaagcaggattccttacattg

SEQ ID NO: 49049 - DNA, 22 bp, synthetic construct
  misc_feature 1..22: note = chemically synthesized
  source 1..22: mol_type = other DNA
cttacattgcaacttttcccaa

SEQ ID NO: 49050 - DNA, 22 bp, synthetic construct
  misc_feature 1..22: note = chemically synthesized
  source 1..22: mol_type = other DNA
acattgcaacttttcccaacag

SEQ ID NO: 49051 - DNA, 22 bp, synthetic construct
  misc_feature 1..22: note = chemically synthesized
  source 1..22: mol_type = other DNA
cattgcaacttttcccaacagc

SEQ ID NO: 49052 - DNA, 22 bp, synthetic construct
  misc_feature 1..22: note = chemically synthesized
  source 1..22: mol_type = other DNA
caacttttcccaacagctccgt

SEQ ID NO: 49053 - DNA, 22 bp, synthetic construct
  misc_feature 1..22: note = chemically synthesized
  source 1..22: mol_type = other DNA
ttcccaacagctccgtgctcct

SEQ ID NO: 49054 - DNA, 22 bp, synthetic construct
  misc_feature 1..22: note = chemically synthesized
  source 1..22: mol_type = other DNA
tcccaacagctccgtgctcctt

SEQ ID NO: 49055 - DNA, 22 bp, synthetic construct
  misc_feature 1..22: note = chemically synthesized
  source 1..22: mol_type = other DNA
cccaacagctccgtgctccttc

SEQ ID NO: 49056 - DNA, 22 bp, synthetic construct
  misc_feature 1..22: note = chemically synthesized
  source 1..22: mol_type = other DNA
ccaacagctccgtgctccttca

SEQ ID NO: 49057 - DNA, 22 bp, synthetic construct
  misc_feature 1..22: note = chemically synthesized
  source 1..22: mol_type = other DNA
cgtgctccttcaatatgcccag

SEQ ID NO: 49058 - DNA, 22 bp, synthetic construct
  misc_feature 1..22: note = chemically synthesized
  source 1..22: mol_type = other DNA
cttcaatatgcccagaactgga

SEQ ID NO: 49059 - DNA, 22 bp, synthetic construct
  misc_feature 1..22: note = chemically synthesized
  source 1..22: mol_type = other DNA
caatatgcccagaactggaggg

SEQ ID NO: 49060 - DNA, 22 bp, synthetic construct
  misc_feature 1..22: note = chemically synthesized
  source 1..22: mol_type = other DNA
aatatgcccagaactggagggg

SEQ ID NO: 49061 - DNA, 22 bp, synthetic construct
  misc_feature 1..22: note = chemically synthesized
  source 1..22: mol_type = other DNA
gaggggaacattcttctctttc

SEQ ID NO: 49062 - DNA, 22 bp, synthetic construct
  misc_feature 1..22: note = chemically synthesized
  source 1..22: mol_type = other DNA
ttctctttcccagaagattgaa

SEQ ID NO: 49063 - DNA, 22 bp, synthetic construct
  misc_feature 1..22: note = chemically synthesized
  source 1..22: mol_type = other DNA
ctctttcccagaagattgaaaa

SEQ ID NO: 49064 - DNA, 22 bp, synthetic construct
  misc_feature 1..22: note = chemically synthesized
  source 1..22: mol_type = other DNA
tctttcccagaagattgaaaaa

SEQ ID NO: 49065 - DNA, 22 bp, synthetic construct
  misc_feature 1..22: note = chemically synthesized
  source 1..22: mol_type = other DNA
tttcccagaagattgaaaaact

SEQ ID NO: 49066 - DNA, 22 bp, synthetic construct
  misc_feature 1..22: note = chemically synthesized
  source 1..22: mol_type = other DNA
tcccagaagattgaaaaacttg

SEQ ID NO: 49067 - DNA, 22 bp, synthetic construct
  misc_feature 1..22: note = chemically synthesized
  source 1..22: mol_type = other DNA
cccagaagattgaaaaacttga

SEQ ID NO: 49068 - DNA, 22 bp, synthetic construct
  misc_feature 1..22: note = chemically synthesized
  source 1..22: mol_type = other DNA
ccagaagattgaaaaacttgac

SEQ ID NO: 49069 - DNA, 22 bp, synthetic construct
  misc_feature 1..22: note = chemically synthesized
  source 1..22: mol_type = other DNA
aaaaacttgaccacagaaccca

SEQ ID NO: 49070 - DNA, 22 bp, synthetic construct
  misc_feature 1..22: note = chemically synthesized
  source 1..22: mol_type = other DNA
gaccacagaacccatgggaggg

SEQ ID NO: 49071 - DNA, 22 bp, synthetic construct
  misc_feature 1..22: note = chemically synthesized
  source 1..22: mol_type = other DNA
accacagaacccatgggaggga

SEQ ID NO: 49072 - DNA, 22 bp, synthetic construct
  misc_feature 1..22: note = chemically synthesized
  source 1..22: mol_type = other DNA
tccagcaccagagcttcctgcc

SEQ ID NO: 49073 - DNA, 22 bp, synthetic construct
  misc_feature 1..22: note = chemically synthesized
  source 1..22: mol_type = other DNA
cctgcccagttgttgcctggca

SEQ ID NO: 49074 - DNA, 22 bp, synthetic construct
  misc_feature 1..22: note = chemically synthesized
  source 1..22: mol_type = other DNA
ctgcccagttgttgcctggcac

SEQ ID NO: 49075 - DNA, 22 bp, synthetic construct
  misc_feature 1..22: note = chemically synthesized
  source 1..22: mol_type = other DNA
cccagttgttgcctggcaccgc

SEQ ID NO: 49076 - DNA, 22 bp, synthetic construct
  misc_feature 1..22: note = chemically synthesized
  source 1..22: mol_type = other DNA
ttgcctggcaccgctgaagaaa

SEQ ID NO: 49077 - DNA, 22 bp, synthetic construct
  misc_feature 1..22: note = chemically synthesized
  source 1..22: mol_type = other DNA
cctggcaccgctgaagaaagct

SEQ ID NO: 49078 - DNA, 22 bp, synthetic construct
  misc_feature 1..22: note = chemically synthesized
  source 1..22: mol_type = other DNA
gcaccgctgaagaaagctgcaa

SEQ ID NO: 49079 - DNA, 22 bp, synthetic construct
  misc_feature 1..22: note = chemically synthesized
  source 1..22: mol_type = other DNA
aagaaagctgcaaacgtactga

SEQ ID NO: 49080 - DNA, 22 bp, synthetic construct
  misc_feature 1..22: note = chemically synthesized
  source 1..22: mol_type = other DNA
caaacgtactgaagaggtagca

SEQ ID NO: 49081 - DNA, 22 bp, synthetic construct
  misc_feature 1..22: note = chemically synthesized
  source 1..22: mol_type = other DNA
aagaggtagcagagggtggcgg

SEQ ID NO: 49082 - DNA, 22 bp, synthetic construct
  misc_feature 1..22: note = chemically synthesized
  source 1..22: mol_type = other DNA
aacaactgtggaccctcaggga

SEQ ID NO: 49083 - DNA, 22 bp, synthetic construct
  misc_feature 1..22: note = chemically synthesized
  source 1..22: mol_type = other DNA
tggaccctcagggaagtcattt

SEQ ID NO: 49084 - DNA, 22 bp, synthetic construct
  misc_feature 1..22: note = chemically synthesized
  source 1..22: mol_type = other DNA
agggaagtcatttaacccttga

SEQ ID NO: 49085 - DNA, 22 bp, synthetic construct
  misc_feature 1..22: note = chemically synthesized
  source 1..22: mol_type = other DNA
aacccttgatgaaccccaattt

SEQ ID NO: 49086 - DNA, 22 bp, synthetic construct
  misc_feature 1..22: note = chemically synthesized
  source 1..22: mol_type = other DNA
acccttgatgaaccccaatttc

SEQ ID NO: 49087 - DNA, 22 bp, synthetic construct
  misc_feature 1..22: note = chemically synthesized
  source 1..22: mol_type = other DNA
gatgaaccccaatttcctcctc

SEQ ID NO: 49088 - DNA, 22 bp, synthetic construct
  misc_feature 1..22: note = chemically synthesized
  source 1..22: mol_type = other DNA
atgaaccccaatttcctcctct

SEQ ID NO: 49089 - DNA, 22 bp, synthetic construct
  misc_feature 1..22: note = chemically synthesized
  source 1..22: mol_type = other DNA
cctcctctaccaaatgaggcta

SEQ ID NO: 49090 - DNA, 22 bp, synthetic construct
  misc_feature 1..22: note = chemically synthesized
  source 1..22: mol_type = other DNA
ctcctctaccaaatgaggctaa

SEQ ID NO: 49091 - DNA, 22 bp, synthetic construct
  misc_feature 1..22: note = chemically synthesized
  source 1..22: mol_type = other DNA
ctctaccaaatgaggctaatgg

SEQ ID NO: 49092 - DNA, 22 bp, synthetic construct
  misc_feature 1..22: note = chemically synthesized
  source 1..22: mol_type = other DNA
taccaaatgaggctaatgggag

SEQ ID NO: 49093 - DNA, 22 bp, synthetic construct
  misc_feature 1..22: note = chemically synthesized
  source 1..22: mol_type = other DNA
ccaaatgaggctaatgggagtg

SEQ ID NO: 49094 - DNA, 22 bp, synthetic construct
  misc_feature 1..22: note = chemically synthesized
  source 1..22: mol_type = other DNA
atgggagtgtttcctttccgag

SEQ ID NO: 49095 - DNA, 22 bp, synthetic construct
  misc_feature 1..22: note = chemically synthesized
  source 1..22: mol_type = other DNA
cctttccgaggttgttgtggga

SEQ ID NO: 49096 - DNA, 22 bp, synthetic construct
  misc_feature 1..22: note = chemically synthesized
  source 1..22: mol_type = other DNA
ctttccgaggttgttgtgggat

SEQ ID NO: 49097 - DNA, 22 bp, synthetic construct
  misc_feature 1..22: note = chemically synthesized
  source 1..22: mol_type = other DNA
tccgaggttgttgtgggatgga

SEQ ID NO: 49098 - DNA, 22 bp, synthetic construct
  misc_feature 1..22: note = chemically synthesized
  source 1..22: mol_type = other DNA
ccgaggttgttgtgggatggaa

SEQ ID NO: 49099 - DNA, 22 bp, synthetic construct
  misc_feature 1..22: note = chemically synthesized
  source 1..22: mol_type = other DNA
cgaggttgttgtgggatggaat

SEQ ID NO: 49100 - DNA, 22 bp, synthetic construct
  misc_feature 1..22: note = chemically synthesized
  source 1..22: mol_type = other DNA
ttgtgggatggaatatcaatgt

SEQ ID NO: 49101 - DNA, 22 bp, synthetic construct
  misc_feature 1..22: note = chemically synthesized
  source 1..22: mol_type = other DNA
tgggatggaatatcaatgtgtc

SEQ ID NO: 49102 - DNA, 22 bp, synthetic construct
  misc_feature 1..22: note = chemically synthesized
  source 1..22: mol_type = other DNA
tggaggtgcagcccccggagcg

SEQ ID NO: 49103 - DNA, 22 bp, synthetic construct
  misc_feature 1..22: note = chemically synthesized
  source 1..22: mol_type = other DNA
gaggtgcagcccccggagcgag

SEQ ID NO: 49104 - DNA, 22 bp, synthetic construct
  misc_feature 1..22: note = chemically synthesized
  source 1..22: mol_type = other DNA
tgctttccctcatttacttctc

SEQ ID NO: 49105 - DNA, 22 bp, synthetic construct
  misc_feature 1..22: note = chemically synthesized
  source 1..22: mol_type = other DNA
tccctcatttacttctcacatg

SEQ ID NO: 49106 - DNA, 22 bp, synthetic construct
  misc_feature 1..22: note = chemically synthesized
  source 1..22: mol_type = other DNA
ccctcatttacttctcacatgg

SEQ ID NO: 49107 - DNA, 22 bp, synthetic construct
  misc_feature 1..22: note = chemically synthesized
  source 1..22: mol_type = other DNA
cctcatttacttctcacatgga

SEQ ID NO: 49108 - DNA, 22 bp, synthetic construct
  misc_feature 1..22: note = chemically synthesized
  source 1..22: mol_type = other DNA
atttacttctcacatggactct

SEQ ID NO: 49109 - DNA, 22 bp, synthetic construct
  misc_feature 1..22: note = chemically synthesized
  source 1..22: mol_type = other DNA
acttctcacatggactctatga

SEQ ID NO: 49110 - DNA, 22 bp, synthetic construct
  misc_feature 1..22: note = chemically synthesized
  source 1..22: mol_type = other DNA
cttctcacatggactctatgag

SEQ ID NO: 49111 - DNA, 22 bp, synthetic construct
  misc_feature 1..22: note = chemically synthesized
  source 1..22: mol_type = other DNA
ctcacatggactctatgaggta

SEQ ID NO: 49112 - DNA, 22 bp, synthetic construct
  misc_feature 1..22: note = chemically synthesized
  source 1..22: mol_type = other DNA
tcacatggactctatgaggtaa

SEQ ID NO: 49113 - DNA, 22 bp, synthetic construct
  misc_feature 1..22: note = chemically synthesized
  source 1..22: mol_type = other DNA
acatggactctatgaggtaagg

SEQ ID NO: 49114 - DNA, 22 bp, synthetic construct
  misc_feature 1..22: note = chemically synthesized
  source 1..22: mol_type = other DNA
tatgaggtaagggaccttgagt

SEQ ID NO: 49115 - DNA, 22 bp, synthetic construct
  misc_feature 1..22: note = chemically synthesized
  source 1..22: mol_type = other DNA
tgaggtaagggaccttgagtta

SEQ ID NO: 49116 - DNA, 22 bp, synthetic construct
  misc_feature 1..22: note = chemically synthesized
  source 1..22: mol_type = other DNA
gagttatctccatttcacagag

SEQ ID NO: 49117 - DNA, 22 bp, synthetic construct
  misc_feature 1..22: note = chemically synthesized
  source 1..22: mol_type = other DNA
agttatctccatttcacagaga

SEQ ID NO: 49118 - DNA, 22 bp, synthetic construct
  misc_feature 1..22: note = chemically synthesized
  source 1..22: mol_type = other DNA
tctccatttcacagagaggtga

SEQ ID NO: 49119 - DNA, 22 bp, synthetic construct
  misc_feature 1..22: note = chemically synthesized
  source 1..22: mol_type = other DNA
catttcacagagaggtgaaatg

SEQ ID NO: 49120 - DNA, 22 bp, synthetic construct
  misc_feature 1..22: note = chemically synthesized
  source 1..22: mol_type = other DNA
cacagagaggtgaaatgattcc

SEQ ID NO: 49121 - DNA, 22 bp, synthetic construct
  misc_feature 1..22: note = chemically synthesized
  source 1..22: mol_type = other DNA
acagagaggtgaaatgattccc

SEQ ID NO: 49122 - DNA, 22 bp, synthetic construct
  misc_feature 1..22: note = chemically synthesized
  source 1..22: mol_type = other DNA
cctcagactctcccaaccagct

SEQ ID NO: 49123 - DNA, 22 bp, synthetic construct
  misc_feature 1..22: note = chemically synthesized
  source 1..22: mol_type = other DNA
agactctcccaaccagctagca

SEQ ID NO: 49124 - DNA, 22 bp, synthetic construct
  misc_feature 1..22: note = chemically synthesized
  source 1..22: mol_type = other DNA
tcccaaccagctagcagtaaca

SEQ ID NO: 49125 - DNA, 22 bp, synthetic construct
  misc_feature 1..22: note = chemically synthesized
  source 1..22: mol_type = other DNA
ccaaccagctagcagtaacata

SEQ ID NO: 49126 - DNA, 22 bp, synthetic construct
  misc_feature 1..22: note = chemically synthesized
  source 1..22: mol_type = other DNA
gcagtaacatagaaatctgaac

SEQ ID NO: 49127 - DNA, 22 bp, synthetic construct
  misc_feature 1..22: note = chemically synthesized
  source 1..22: mol_type = other DNA
aacccagagtaactgtgtcaca

SEQ ID NO: 49128 - DNA, 22 bp, synthetic construct
  misc_feature 1..22: note = chemically synthesized
  source 1..22: mol_type = other DNA
tgtcacacacccaggcaggcac

SEQ ID NO: 49129 - DNA, 22 bp, synthetic construct
  misc_feature 1..22: note = chemically synthesized
  source 1..22: mol_type = other DNA
tcgtaaggcaacacacgtctat

SEQ ID NO: 49130 - DNA, 22 bp, synthetic construct
  misc_feature 1..22: note = chemically synthesized
  source 1..22: mol_type = other DNA
gtaaggcaacacacgtctatgg

SEQ ID NO: 49131 - DNA, 22 bp, synthetic construct
  misc_feature 1..22: note = chemically synthesized
  source 1..22: mol_type = other DNA
tggggagaggggactcccaccc

SEQ ID NO: 49132 - DNA, 22 bp, synthetic construct
  misc_feature 1..22: note = chemically synthesized
  source 1..22: mol_type = other DNA
ccacccacgagggagctgccac

SEQ ID NO: 49133 - DNA, 22 bp, synthetic construct
  misc_feature 1..22: note = chemically synthesized
  source 1..22: mol_type = other DNA
ccaccagaaacataatgagacc

SEQ ID NO: 49134 - DNA, 22 bp, synthetic construct
  misc_feature 1..22: note = chemically synthesized
  source 1..22: mol_type = other DNA
agctctttagacccccacctgc

SEQ ID NO: 49135 - DNA, 22 bp, synthetic construct
  misc_feature 1..22: note = chemically synthesized
  source 1..22: mol_type = other DNA
tttagacccccacctgccctgc

SEQ ID NO: 49136 - DNA, 22 bp, synthetic construct
  misc_feature 1..22: note = chemically synthesized
  source 1..22: mol_type = other DNA
tagacccccacctgccctgctc

SEQ ID NO: 49137 - DNA, 22 bp, synthetic construct
  misc_feature 1..22: note = chemically synthesized
  source 1..22: mol_type = other DNA
agacccccacctgccctgctct

SEQ ID NO: 49138 - DNA, 22 bp, synthetic construct
  misc_feature 1..22: note = chemically synthesized
  source 1..22: mol_type = other DNA
gacccccacctgccctgctctt

SEQ ID NO: 49139 - DNA, 22 bp, synthetic construct
  misc_feature 1..22: note = chemically synthesized
  source 1..22: mol_type = other DNA
ccctgctcttctctcatcccaa

SEQ ID NO: 49140 - DNA, 22 bp, synthetic construct
  misc_feature 1..22: note = chemically synthesized
  source 1..22: mol_type = other DNA
ctcttctctcatcccaacctgc

SEQ ID NO: 49141 - DNA, 22 bp, synthetic construct
  misc_feature 1..22: note = chemically synthesized
  source 1..22: mol_type = other DNA
ttctctcatcccaacctgctca

SEQ ID NO: 49142 - DNA, 22 bp, synthetic construct
  misc_feature 1..22: note = chemically synthesized
  source 1..22: mol_type = other DNA
ctctcatcccaacctgctcacc

SEQ ID NO: 49143 - DNA, 22 bp, synthetic construct
  misc_feature 1..22: note = chemically synthesized
  source 1..22: mol_type = other DNA
tctcatcccaacctgctcaccc

SEQ ID NO: 49144 - DNA, 22 bp, synthetic construct
  misc_feature 1..22: note = chemically synthesized
  source 1..22: mol_type = other DNA
tcatcccaacctgctcacccca

SEQ ID NO: 49145 - DNA, 22 bp, synthetic construct
  misc_feature 1..22: note = chemically synthesized
  source 1..22: mol_type = other DNA
atcccaacctgctcaccccata

SEQ ID NO: 49146 - DNA, 22 bp, synthetic construct
  misc_feature 1..22: note = chemically synthesized
  source 1..22: mol_type = other DNA
ctcaccccataatgggggaact

SEQ ID NO: 49147 - DNA, 22 bp, synthetic construct
  misc_feature 1..22: note = chemically synthesized
  source 1..22: mol_type = other DNA
accccataatgggggaactact

SEQ ID NO: 49148 - DNA, 22 bp, synthetic construct
  misc_feature 1..22: note = chemically synthesized
  source 1..22: mol_type = other DNA
ctttgagaccccaggagcacac

SEQ ID NO: 49149 - DNA, 22 bp, synthetic construct
  misc_feature 1..22: note = chemically synthesized
  source 1..22: mol_type = other DNA
tgagaccccaggagcacacagt

SEQ ID NO: 49150 - DNA, 22 bp, synthetic construct
  misc_feature 1..22: note = chemically synthesized
  source 1..22: mol_type = other DNA
gagaccccaggagcacacagtt

SEQ ID NO: 49151 - DNA, 22 bp, synthetic construct
  misc_feature 1..22: note = chemically synthesized
  source 1..22: mol_type = other DNA
agaccccaggagcacacagttc

SEQ ID NO: 49152 - DNA, 22 bp, synthetic construct
  misc_feature 1..22: note = chemically synthesized
  source 1..22: mol_type = other DNA
caagccatgagtcataaccgta

SEQ ID NO: 49153 - DNA, 22 bp, synthetic construct
  misc_feature 1..22: note = chemically synthesized
  source 1..22: mol_type = other DNA
ttgtgacatgttttaccatgtg

SEQ ID NO: 49154 - DNA, 22 bp, synthetic construct
  misc_feature 1..22: note = chemically synthesized
  source 1..22: mol_type = other DNA
tgtgacatgttttaccatgtgc

SEQ ID NO: 49155 - DNA, 22 bp, synthetic construct
  misc_feature 1..22: note = chemically synthesized
  source 1..22: mol_type = other DNA
gtgacatgttttaccatgtgcc

SEQ ID NO: 49156 - DNA, 22 bp, synthetic construct
  misc_feature 1..22: note = chemically synthesized
  source 1..22: mol_type = other DNA
tgacatgttttaccatgtgccc

SEQ ID NO: 49157 - DNA, 22 bp, synthetic construct
  misc_feature 1..22: note = chemically synthesized
  source 1..22: mol_type = other DNA
taccatgtgcccagcactgagc

SEQ ID NO: 49158 - DNA, 22 bp, synthetic construct
  misc_feature 1..22: note = chemically synthesized
  source 1..22: mol_type = other DNA
accatgtgcccagcactgagcc

SEQ ID NO: 49159 - DNA, 22 bp, synthetic construct
  misc_feature 1..22: note = chemically synthesized
  source 1..22: mol_type = other DNA
ccatgtgcccagcactgagccc

SEQ ID NO: 49160 - DNA, 22 bp, synthetic construct
  misc_feature 1..22: note = chemically synthesized
  source 1..22: mol_type = other DNA
agcccagcgcccccacatgctc

SEQ ID NO: 49161 - DNA, 22 bp, synthetic construct
  misc_feature 1..22: note = chemically synthesized
  source 1..22: mol_type = other DNA
tcataggatgctcaaaggccct

SEQ ID NO: 49162 - DNA, 22 bp, synthetic construct
  misc_feature 1..22: note = chemically synthesized
  source 1..22: mol_type = other DNA
ataggatgctcaaaggccctat

SEQ ID NO: 49163 - DNA, 22 bp, synthetic construct
  misc_feature 1..22: note = chemically synthesized
  source 1..22: mol_type = other DNA
aaaggccctatgaggcaagccc

SEQ ID NO: 49164 - DNA, 22 bp, synthetic construct
  misc_feature 1..22: note = chemically synthesized
  source 1..22: mol_type = other DNA
tgaggcaagccccgtgattctc

SEQ ID NO: 49165 - DNA, 22 bp, synthetic construct
  misc_feature 1..22: note = chemically synthesized
  source 1..22: mol_type = other DNA
tccccactttacagattgagga

SEQ ID NO: 49166 - DNA, 22 bp, synthetic construct
  misc_feature 1..22: note = chemically synthesized
  source 1..22: mol_type = other DNA
cccactttacagattgaggaag

SEQ ID NO: 49167 - DNA, 22 bp, synthetic construct
  misc_feature 1..22: note = chemically synthesized
  source 1..22: mol_type = other DNA
tacagattgaggaagcggaggc

SEQ ID NO: 49168 - DNA, 22 bp, synthetic construct
  misc_feature 1..22: note = chemically synthesized
  source 1..22: mol_type = other DNA
acagattgaggaagcggaggct

SEQ ID NO: 49169 - DNA, 22 bp, synthetic construct
  misc_feature 1..22: note = chemically synthesized
  source 1..22: mol_type = other DNA
cagattgaggaagcggaggctt

SEQ ID NO: 49170 - DNA, 22 bp, synthetic construct
  misc_feature 1..22: note = chemically synthesized
  source 1..22: mol_type = other DNA
aggaagcggaggcttagggaat

SEQ ID NO: 49171 - DNA, 22 bp, synthetic construct
  misc_feature 1..22: note = chemically synthesized
  source 1..22: mol_type = other DNA
agggaatgaaatctgcccaagg

SEQ ID NO: 49172 - DNA, 22 bp, synthetic construct
  misc_feature 1..22: note = chemically synthesized
  source 1..22: mol_type = other DNA
gggaatgaaatctgcccaaggt

SEQ ID NO: 49173 - DNA, 22 bp, synthetic construct
  misc_feature 1..22: note = chemically synthesized
  source 1..22: mol_type = other DNA
cccaaggttgcacaactagaaa

SEQ ID NO: 49174 - DNA, 22 bp, synthetic construct
  misc_feature 1..22: note = chemically synthesized
  source 1..22: mol_type = other DNA
cacaactagaaatggtattact

SEQ ID NO: 49175 - DNA, 22 bp, synthetic construct
  misc_feature 1..22: note = chemically synthesized
  source 1..22: mol_type = other DNA
gaaatggtattacttctttacc

SEQ ID NO: 49176 - DNA, 22 bp, synthetic construct
  misc_feature 1..22: note = chemically synthesized
  source 1..22: mol_type = other DNA
cttctttaccctcagcctaaac

SEQ ID NO: 49177 - DNA, 22 bp, synthetic construct
  misc_feature 1..22: note = chemically synthesized
  source 1..22: mol_type = other DNA
ctttaccctcagcctaaaccat

SEQ ID NO: 49178 - DNA, 22 bp, synthetic construct
  misc_feature 1..22: note = chemically synthesized
  source 1..22: mol_type = other DNA
tttaccctcagcctaaaccatt

SEQ ID NO: 49179 - DNA, 22 bp, synthetic construct
  misc_feature 1..22: note = chemically synthesized
  source 1..22: mol_type = other DNA
taccctcagcctaaaccatttt

SEQ ID NO: 49180 - DNA, 22 bp, synthetic construct
  misc_feature 1..22: note = chemically synthesized
  source 1..22: mol_type = other DNA
accctcagcctaaaccatttta

SEQ ID NO: 49181 - DNA, 22 bp, synthetic construct
  misc_feature 1..22: note = chemically synthesized
  source 1..22: mol_type = other DNA
ccctcagcctaaaccattttat

SEQ ID NO: 49182 - DNA, 22 bp, synthetic construct
  misc_feature 1..22: note = chemically synthesized
  source 1..22: mol_type = other DNA
agcctaaaccattttatttcgt

SEQ ID NO: 49183 - DNA, 22 bp, synthetic construct
  misc_feature 1..22: note = chemically synthesized
  source 1..22: mol_type = other DNA
aaccattttatttcgtgtaatc

SEQ ID NO: 49184 - DNA, 22 bp, synthetic construct
  misc_feature 1..22: note = chemically synthesized
  source 1..22: mol_type = other DNA
tatttcgtgtaatcaaagagaa

SEQ ID NO: 49185 - DNA, 22 bp, synthetic construct
  misc_feature 1..22: note = chemically synthesized
  source 1..22: mol_type = other DNA
atttcgtgtaatcaaagagaag

SEQ ID NO: 49186 - DNA, 22 bp, synthetic construct
  misc_feature 1..22: note = chemically synthesized
  source 1..22: mol_type = other DNA
tttcgtgtaatcaaagagaaga

SEQ ID NO: 49187 - DNA, 22 bp, synthetic construct
  misc_feature 1..22: note = chemically synthesized
  source 1..22: mol_type = other DNA
cgtgtaatcaaagagaagaaga

SEQ ID NO: 49188 - DNA, 22 bp, synthetic construct
  misc_feature 1..22: note = chemically synthesized
  source 1..22: mol_type = other DNA
gtgtaatcaaagagaagaagaa

SEQ ID NO: 49189 - DNA, 22 bp, synthetic construct
  misc_feature 1..22: note = chemically synthesized
  source 1..22: mol_type = other DNA
cccctctttctgtccctcctcc

SEQ ID NO: 49190 - DNA, 22 bp, synthetic construct
  misc_feature 1..22: note = chemically synthesized
  source 1..22: mol_type = other DNA
ccctctttctgtccctcctccc

SEQ ID NO: 49191 - DNA, 22 bp, synthetic construct
  misc_feature 1..22: note = chemically synthesized
  source 1..22: mol_type = other DNA
tttctgtccctcctccctttct

SEQ ID NO: 49192 - DNA, 22 bp, synthetic construct
  misc_feature 1..22: note = chemically synthesized
  source 1..22: mol_type = other DNA
tctgtccctcctccctttctta

SEQ ID NO: 49193 - DNA, 22 bp, synthetic construct
  misc_feature 1..22: note = chemically synthesized
  source 1..22: mol_type = other DNA
ctgtccctcctccctttcttac

SEQ ID NO: 49194 - DNA, 22 bp, synthetic construct
  misc_feature 1..22: note = chemically synthesized
  source 1..22: mol_type = other DNA
tgtccctcctccctttcttacc

SEQ ID NO: 49195 - DNA, 22 bp, synthetic construct
  misc_feature 1..22: note = chemically synthesized
  source 1..22: mol_type = other DNA
tccctcctccctttcttaccag

SEQ ID NO: 49196 - DNA, 22 bp, synthetic construct
  misc_feature 1..22: note = chemically synthesized
  source 1..22: mol_type = other DNA
ctccctttcttaccagctcagg

SEQ ID NO: 49197 - DNA, 22 bp, synthetic construct
  misc_feature 1..22: note = chemically synthesized
  source 1..22: mol_type = other DNA
cctttcttaccagctcaggtta

SEQ ID NO: 49198 - DNA, 22 bp, synthetic construct
  misc_feature 1..22: note = chemically synthesized
  source 1..22: mol_type = other DNA
tcttaccagctcaggttacaaa

SEQ ID NO: 49199 - DNA, 22 bp, synthetic construct
  misc_feature 1..22: note = chemically synthesized
  source 1..22: mol_type = other DNA
cttaccagctcaggttacaaag

SEQ ID NO: 49200 - DNA, 22 bp, synthetic construct
  misc_feature 1..22: note = chemically synthesized
  source 1..22: mol_type = other DNA
ttaccagctcaggttacaaaga

SEQ ID NO: 49201 - DNA, 22 bp, synthetic construct
  misc_feature 1..22: note = chemically synthesized
  source 1..22: mol_type = other DNA
accagctcaggttacaaagaca

SEQ ID NO: 49202 - DNA, 22 bp, synthetic construct
  misc_feature 1..22: note = chemically synthesized
  source 1..22: mol_type = other DNA
ccagctcaggttacaaagacat

SEQ ID NO: 49203 - DNA, 22 bp, synthetic construct
  misc_feature 1..22: note = chemically synthesized
  source 1..22: mol_type = other DNA
aggttacaaagacatctaggtg

SEQ ID NO: 49204 - DNA, 22 bp, synthetic construct
  misc_feature 1..22: note = chemically synthesized
  source 1..22: mol_type = other DNA
caaagacatctaggtgggagag

SEQ ID NO: 49205 - DNA, 22 bp, synthetic construct
  misc_feature 1..22: note = chemically synthesized
  source 1..22: mol_type = other DNA
ggtgggagagaagactgcctct

SEQ ID NO: 49206 - DNA, 22 bp, synthetic construct
  misc_feature 1..22: note = chemically synthesized
  source 1..22: mol_type = other DNA
cctctaagggcttggctgagtt

SEQ ID NO: 49207 - DNA, 22 bp, synthetic construct
  misc_feature 1..22: note = chemically synthesized
  source 1..22: mol_type = other DNA
taagggcttggctgagttggcg

SEQ ID NO: 49208 - DNA, 22 bp, synthetic construct
  misc_feature 1..22: note = chemically synthesized
  source 1..22: mol_type = other DNA
agggcttggctgagttggcggg

SEQ ID NO: 49209 - DNA, 22 bp, synthetic construct
  misc_feature 1..22: note = chemically synthesized
  source 1..22: mol_type = other DNA
ggctgagttggcgggcgggagc

SEQ ID NO: 49210 - DNA, 22 bp, synthetic construct
  misc_feature 1..22: note = chemically synthesized
  source 1..22: mol_type = other DNA
gctgagttggcgggcgggagcg

SEQ ID NO: 49211 - DNA, 22 bp, synthetic construct
  misc_feature 1..22: note = chemically synthesized
  source 1..22: mol_type = other DNA
agttggcgggcgggagcggggg

SEQ ID NO: 49212 - DNA, 22 bp, synthetic construct
  misc_feature 1..22: note = chemically synthesized
  source 1..22: mol_type = other DNA
gcgggcgggagcgggggcaggt

SEQ ID NO: 49213 - DNA, 22 bp, synthetic construct
  misc_feature 1..22: note = chemically synthesized
  source 1..22: mol_type = other DNA
tcccagtttttatttgctacta

SEQ ID NO: 49214 - DNA, 22 bp, synthetic construct
  misc_feature 1..22: note = chemically synthesized
  source 1..22: mol_type = other DNA
cccagtttttatttgctactag

SEQ ID NO: 49215 - DNA, 22 bp, synthetic construct
  misc_feature 1..22: note = chemically synthesized
  source 1..22: mol_type = other DNA
ccagtttttatttgctactaga

SEQ ID NO: 49216 - DNA, 22 bp, synthetic construct
  misc_feature 1..22: note = chemically synthesized
  source 1..22: mol_type = other DNA
ttatttgctactagaaaaggag

SEQ ID NO: 49217 - DNA, 22 bp, synthetic construct
  misc_feature 1..22: note = chemically synthesized
  source 1..22: mol_type = other DNA
tatttgctactagaaaaggaga

SEQ ID NO: 49218 - DNA, 22 bp, synthetic construct
  misc_feature 1..22: note = chemically synthesized
  source 1..22: mol_type = other DNA
atttgctactagaaaaggagaa

SEQ ID NO: 49219 - DNA, 22 bp, synthetic construct
  misc_feature 1..22: note = chemically synthesized
  source 1..22: mol_type = other DNA
tttgctactagaaaaggagaag

SEQ ID NO: 49220 - DNA, 22 bp, synthetic construct
  misc_feature 1..22: note = chemically synthesized
  source 1..22: mol_type = other DNA
gctactagaaaaggagaaggaa

SEQ ID NO: 49221 - DNA, 22 bp, synthetic construct
  misc_feature 1..22: note = chemically synthesized
  source 1..22: mol_type = other DNA
ctactagaaaaggagaaggaaa

SEQ ID NO: 49222 - DNA, 22 bp, synthetic construct
  misc_feature 1..22: note = chemically synthesized
  source 1..22: mol_type = other DNA
ctagaaaaggagaaggaaatcc

SEQ ID NO: 49223 - DNA, 22 bp, synthetic construct
  misc_feature 1..22: note = chemically synthesized
  source 1..22: mol_type = other DNA
gaaaaggagaaggaaatcctgc

SEQ ID NO: 49224 - DNA, 22 bp, synthetic construct
  misc_feature 1..22: note = chemically synthesized
  source 1..22: mol_type = other DNA
cctcccttatgaggcctagcca

SEQ ID NO: 49225 - DNA, 22 bp, synthetic construct
  misc_feature 1..22: note = chemically synthesized
  source 1..22: mol_type = other DNA
ccttatgaggcctagccagggg

SEQ ID NO: 49226 - DNA, 22 bp, synthetic construct
  misc_feature 1..22: note = chemically synthesized
  source 1..22: mol_type = other DNA
atgaggcctagccaggggaagt

SEQ ID NO: 49227 - DNA, 22 bp, synthetic construct
  misc_feature 1..22: note = chemically synthesized
  source 1..22: mol_type = other DNA
tgaggcctagccaggggaagta

SEQ ID NO: 49228 - DNA, 22 bp, synthetic construct
  misc_feature 1..22: note = chemically synthesized
  source 1..22: mol_type = other DNA
gccaggggaagtaaatgtgatt

SEQ ID NO: 49229 - DNA, 22 bp, synthetic construct
  misc_feature 1..22: note = chemically synthesized
  source 1..22: mol_type = other DNA
tatcacattttatatagatgtg

SEQ ID NO: 49230 - DNA, 22 bp, synthetic construct
  misc_feature 1..22: note = chemically synthesized
  source 1..22: mol_type = other DNA
atcacattttatatagatgtgc

SEQ ID NO: 49231 - DNA, 22 bp, synthetic construct
  misc_feature 1..22: note = chemically synthesized
  source 1..22: mol_type = other DNA
tcacattttatatagatgtgca

SEQ ID NO: 49232 - DNA, 22 bp, synthetic construct
  misc_feature 1..22: note = chemically synthesized
  source 1..22: mol_type = other DNA
tatatagatgtgcacaatggtg

SEQ ID NO: 49233 - DNA, 22 bp, synthetic construct
  misc_feature 1..22: note = chemically synthesized
  source 1..22: mol_type = other DNA
atatagatgtgcacaatggtgc

SEQ ID NO: 49234 - DNA, 22 bp, synthetic construct
  misc_feature 1..22: note = chemically synthesized
  source 1..22: mol_type = other DNA
tatagatgtgcacaatggtgcc

SEQ ID NO: 49235 - DNA, 22 bp, synthetic construct
  misc_feature 1..22: note = chemically synthesized
  source 1..22: mol_type = other DNA
ttcaagtctatgatgggaaaaa

SEQ ID NO: 49236 - DNA, 22 bp, synthetic construct
  misc_feature 1..22: note = chemically synthesized
  source 1..22: mol_type = other DNA
tcaagtctatgatgggaaaaat

SEQ ID NO: 49237 - DNA, 22 bp, synthetic construct
  misc_feature 1..22: note = chemically synthesized
  source 1..22: mol_type = other DNA
caagtctatgatgggaaaaata

SEQ ID NO: 49238 - DNA, 22 bp, synthetic construct
  misc_feature 1..22: note = chemically synthesized
  source 1..22: mol_type = other DNA
aagtctatgatgggaaaaatat

SEQ ID NO: 49239 - DNA, 22 bp, synthetic construct
  misc_feature 1..22: note = chemically synthesized
  source 1..22: mol_type = other DNA
tgatgggaaaaatattttttat

SEQ ID NO: 49240 - DNA, 22 bp, synthetic construct
  misc_feature 1..22: note = chemically synthesized
  source 1..22: mol_type = other DNA
tttattgtgtgaatatcatttc

SEQ ID NO: 49241 - DNA, 22 bp, synthetic construct
  misc_feature 1..22: note = chemically synthesized
  source 1..22: mol_type = other DNA
ttattgtgtgaatatcatttca

SEQ ID NO: 49242 - DNA, 22 bp, synthetic construct
  misc_feature 1..22: note = chemically synthesized
  source 1..22: mol_type = other DNA
tattgtgtgaatatcatttcag

SEQ ID NO: 49243 - DNA, 22 bp, synthetic construct
  misc_feature 1..22: note = chemically synthesized
  source 1..22: mol_type = other DNA
attgtgtgaatatcatttcaga

SEQ ID NO: 49244 - DNA, 22 bp, synthetic construct
  misc_feature 1..22: note = chemically synthesized
  source 1..22: mol_type = other DNA
ttgtgtgaatatcatttcagac

SEQ ID NO: 49245 - DNA, 22 bp, synthetic construct
  misc_feature 1..22: note = chemically synthesized
  source 1..22: mol_type = other DNA
tgtgaatatcatttcagacagg

SEQ ID NO: 49246 - DNA, 22 bp, synthetic construct
  misc_feature 1..22: note = chemically synthesized
  source 1..22: mol_type = other DNA
cagacaggtccccaaaccactt

SEQ ID NO: 49247 - DNA, 22 bp, synthetic construct
  misc_feature 1..22: note = chemically synthesized
  source 1..22: mol_type = other DNA
agacaggtccccaaaccacttg

SEQ ID NO: 49248 - DNA, 22 bp, synthetic construct
  misc_feature 1..22: note = chemically synthesized
  source 1..22: mol_type = other DNA
gaaagccctggtgtcccctagg

SEQ ID NO: 49249 - DNA, 22 bp, synthetic construct
  misc_feature 1..22: note = chemically synthesized
  source 1..22: mol_type = other DNA
aaagccctggtgtcccctaggt

SEQ ID NO: 49250 - DNA, 22 bp, synthetic construct
  misc_feature 1..22: note = chemically synthesized
  source 1..22: mol_type = other DNA
gtgtcccctaggtgggattcta

SEQ ID NO: 49251 - DNA, 22 bp, synthetic construct
  misc_feature 1..22: note = chemically synthesized
  source 1..22: mol_type = other DNA
ggtgggattctatgaacccagc

SEQ ID NO: 49252 - DNA, 22 bp, synthetic construct
  misc_feature 1..22: note = chemically synthesized
  source 1..22: mol_type = other DNA
tatgaacccagctttagcccca

SEQ ID NO: 49253 - DNA, 22 bp, synthetic construct
  misc_feature 1..22: note = chemically synthesized
  source 1..22: mol_type = other DNA
tgaacccagctttagccccagc

SEQ ID NO: 49254 - DNA, 22 bp, synthetic construct
  misc_feature 1..22: note = chemically synthesized
  source 1..22: mol_type = other DNA
tagccccagcagctcctctggt

SEQ ID NO: 49255 - DNA, 22 bp, synthetic construct
  misc_feature 1..22: note = chemically synthesized
  source 1..22: mol_type = other DNA
agccccagcagctcctctggtg

SEQ ID NO: 49256 - DNA, 22 bp, synthetic construct
  misc_feature 1..22: note = chemically synthesized
  source 1..22: mol_type = other DNA
gccccagcagctcctctggtgg

SEQ ID NO: 49257 - DNA, 22 bp, synthetic construct
  misc_feature 1..22: note = chemically synthesized
  source 1..22: mol_type = other DNA
ctctggtgggaactagaacatg

SEQ ID NO: 49258 - DNA, 22 bp, synthetic construct
  misc_feature 1..22: note = chemically synthesized
  source 1..22: mol_type = other DNA
tggtgggaactagaacatgcct

SEQ ID NO: 49259 - DNA, 22 bp, synthetic construct
  misc_feature 1..22: note = chemically synthesized
  source 1..22: mol_type = other DNA
gtgggaactagaacatgcctcc

SEQ ID NO: 49260 - DNA, 22 bp, synthetic construct
  misc_feature 1..22: note = chemically synthesized
  source 1..22: mol_type = other DNA
gaacatgcctcctgccagttag

SEQ ID NO: 49261 - DNA, 22 bp, synthetic construct
  misc_feature 1..22: note = chemically synthesized
  source 1..22: mol_type = other DNA
ctgccagttagtaacagggaaa

SEQ ID NO: 49262 - DNA, 22 bp, synthetic construct
  misc_feature 1..22: note = chemically synthesized
  source 1..22: mol_type = other DNA
ccagttagtaacagggaaattc

SEQ ID NO: 49263 - DNA, 22 bp, synthetic construct
  misc_feature 1..22: note = chemically synthesized
  source 1..22: mol_type = other DNA
gtaacagggaaattcaattact

SEQ ID NO: 49264 - DNA, 22 bp, synthetic construct
  misc_feature 1..22: note = chemically synthesized
  source 1..22: mol_type = other DNA
aattacttcgccacttgtggca

SEQ ID NO: 49265 - DNA, 22 bp, synthetic construct
  misc_feature 1..22: note = chemically synthesized
  source 1..22: mol_type = other DNA
cttcgccacttgtggcaggagg

SEQ ID NO: 49266 - DNA, 22 bp, synthetic construct
  misc_feature 1..22: note = chemically synthesized
  source 1..22: mol_type = other DNA
cgccacttgtggcaggagggca

SEQ ID NO: 49267 - DNA, 22 bp, synthetic construct
  misc_feature 1..22: note = chemically synthesized
  source 1..22: mol_type = other DNA
gccacttgtggcaggagggcaa

SEQ ID NO: 49268 - DNA, 22 bp, synthetic construct
  misc_feature 1..22: note = chemically synthesized
  source 1..22: mol_type = other DNA
gtggcaggagggcaaagactgc

SEQ ID NO: 49269 - DNA, 22 bp, synthetic construct
  misc_feature 1..22: note = chemically synthesized
  source 1..22: mol_type = other DNA
tggcaggagggcaaagactgca

SEQ ID NO: 49270 - DNA, 22 bp, synthetic construct
  misc_feature 1..22: note = chemically synthesized
  source 1..22: mol_type = other DNA
cacattaaaagagctaaaaatg

SEQ ID NO: 49271 - DNA, 22 bp, synthetic construct
  misc_feature 1..22: note = chemically synthesized
  source 1..22: mol_type = other DNA
aaagagctaaaaatgtcaggaa

SEQ ID NO: 49272 - DNA, 22 bp, synthetic construct
  misc_feature 1..22: note = chemically synthesized
  source 1..22: mol_type = other DNA
aaaatgtcaggaagttattggg

SEQ ID NO: 49273 - DNA, 22 bp, synthetic construct
  misc_feature 1..22: note = chemically synthesized
  source 1..22: mol_type = other DNA
ttgggatgatgactcctgcttg

SEQ ID NO: 49274 - DNA, 22 bp, synthetic construct
  misc_feature 1..22: note = chemically synthesized
  source 1..22: mol_type = other DNA
ggatgatgactcctgcttgcca

SEQ ID NO: 49275 - DNA, 22 bp, synthetic construct
  misc_feature 1..22: note = chemically synthesized
  source 1..22: mol_type = other DNA
ctgcttgccaacattcatatat

SEQ ID NO: 49276 - DNA, 22 bp, synthetic construct
  misc_feature 1..22: note = chemically synthesized
  source 1..22: mol_type = other DNA
cttgccaacattcatatatgaa

SEQ ID NO: 49277 - DNA, 22 bp, synthetic construct
  misc_feature 1..22: note = chemically synthesized
  source 1..22: mol_type = other DNA
gccaacattcatatatgaatgc

SEQ ID NO: 49278 - DNA, 22 bp, synthetic construct
  misc_feature 1..22: note = chemically synthesized
  source 1..22: mol_type = other DNA
ccaacattcatatatgaatgca

SEQ ID NO: 49279 - DNA, 22 bp, synthetic construct
  misc_feature 1..22: note = chemically synthesized
  source 1..22: mol_type = other DNA
atatatgaatgcataatgtcac

SEQ ID NO: 49280 - DNA, 22 bp, synthetic construct
  misc_feature 1..22: note = chemically synthesized
  source 1..22: mol_type = other DNA
aaaaacacaggaagaggccaag

SEQ ID NO: 49281 - DNA, 22 bp, synthetic construct
  misc_feature 1..22: note = chemically synthesized
  source 1..22: mol_type = other DNA
gccatcggtcctgggtcctgcc

SEQ ID NO: 49282 - DNA, 22 bp, synthetic construct
  misc_feature 1..22: note = chemically synthesized
  source 1..22: mol_type = other DNA
ccatcggtcctgggtcctgccc

SEQ ID NO: 49283 - DNA, 22 bp, synthetic construct
  misc_feature 1..22: note = chemically synthesized
  source 1..22: mol_type = other DNA
ggtcctgcccaggaaaggctgc

SEQ ID NO: 49284 - DNA, 22 bp, synthetic construct
  misc_feature 1..22: note = chemically synthesized
  source 1..22: mol_type = other DNA
cccaggaaaggctgcgcctcta

SEQ ID NO: 49285 - DNA, 22 bp, synthetic construct
  misc_feature 1..22: note = chemically synthesized
  source 1..22: mol_type = other DNA
cgcctctaacaagagcaccttt

SEQ ID NO: 49286 - DNA, 22 bp, synthetic construct
  misc_feature 1..22: note = chemically synthesized
  source 1..22: mol_type = other DNA
taacaagagcaccttttcccca

SEQ ID NO: 49287 - DNA, 22 bp, synthetic construct
  misc_feature 1..22: note = chemically synthesized
  source 1..22: mol_type = other DNA
acaagagcaccttttccccacc

SEQ ID NO: 49288 - DNA, 22 bp, synthetic construct
  misc_feature 1..22: note = chemically synthesized
  source 1..22: mol_type = other DNA
ttccccacccctggcctttctt

SEQ ID NO: 49289 - DNA, 22 bp, synthetic construct
  misc_feature 1..22: note = chemically synthesized
  source 1..22: mol_type = other DNA
tccccacccctggcctttcttg

SEQ ID NO: 49290 - DNA, 22 bp, synthetic construct
  misc_feature 1..22: note = chemically synthesized
  source 1..22: mol_type = other DNA
ccccacccctggcctttcttga

SEQ ID NO: 49291 - DNA, 22 bp, synthetic construct
  misc_feature 1..22: note = chemically synthesized
  source 1..22: mol_type = other DNA
cccacccctggcctttcttgag

SEQ ID NO: 49292 - DNA, 22 bp, synthetic construct
  misc_feature 1..22: note = chemically synthesized
  source 1..22: mol_type = other DNA
gcctttcttgagccttccttga

SEQ ID NO: 49293 - DNA, 22 bp, synthetic construct
  misc_feature 1..22: note = chemically synthesized
  source 1..22: mol_type = other DNA
tcttgagccttccttgagcctt

SEQ ID NO: 49294 - DNA, 22 bp, synthetic construct
  misc_feature 1..22: note = chemically synthesized
  source 1..22: mol_type = other DNA
cttgagccttccttgagccttc

SEQ ID NO: 49295 - DNA, 22 bp, synthetic construct
  misc_feature 1..22: note = chemically synthesized
  source 1..22: mol_type = other DNA
ttgagccttccttgagccttcc

SEQ ID NO: 49296 - DNA, 22 bp, synthetic construct
  misc_feature 1..22: note = chemically synthesized
  source 1..22: mol_type = other DNA
gagccttccttgagccttcctt

SEQ ID NO: 49297 - DNA, 22 bp, synthetic construct
  misc_feature 1..22: note = chemically synthesized
  source 1..22: mol_type = other DNA
agccttccttgagccttccttg

SEQ ID NO: 49298 - DNA, 22 bp, synthetic construct
  misc_feature 1..22: note = chemically synthesized
  source 1..22: mol_type = other DNA
ccttgagccttccttgcatatt

SEQ ID NO: 49299 - DNA, 22 bp, synthetic construct
  misc_feature 1..22: note = chemically synthesized
  source 1..22: mol_type = other DNA
cttgagccttccttgcatatta

SEQ ID NO: 49300 - DNA, 22 bp, synthetic construct
  misc_feature 1..22: note = chemically synthesized
  source 1..22: mol_type = other DNA
gagccttccttgcatattatcg

SEQ ID NO: 49301 - DNA, 22 bp, synthetic construct
  misc_feature 1..22: note = chemically synthesized
  source 1..22: mol_type = other DNA
agccttccttgcatattatcgt

SEQ ID NO: 49302 - DNA, 22 bp, synthetic construct
  misc_feature 1..22: note = chemically synthesized
  source 1..22: mol_type = other DNA
ccttgcatattatcgttctcag

SEQ ID NO: 49303 - DNA, 22 bp, synthetic construct
  misc_feature 1..22: note = chemically synthesized
  source 1..22: mol_type = other DNA
cttgcatattatcgttctcagc

SEQ ID NO: 49304 - DNA, 22 bp, synthetic construct
  misc_feature 1..22: note = chemically synthesized
  source 1..22: mol_type = other DNA
gcatattatcgttctcagccac

SEQ ID NO: 49305 - DNA, 22 bp, synthetic construct
  misc_feature 1..22: note = chemically synthesized
  source 1..22: mol_type = other DNA
catattatcgttctcagccacc

SEQ ID NO: 49306 - DNA, 22 bp, synthetic construct
  misc_feature 1..22: note = chemically synthesized
  source 1..22: mol_type = other DNA
tcgttctcagccaccgacagct

SEQ ID NO: 49307 - DNA, 22 bp, synthetic construct
  misc_feature 1..22: note = chemically synthesized
  source 1..22: mol_type = other DNA
tcagccaccgacagcttaattc

SEQ ID NO: 49308 - DNA, 22 bp, synthetic construct
  misc_feature 1..22: note = chemically synthesized
  source 1..22: mol_type = other DNA
agccaccgacagcttaattcac

SEQ ID NO: 49309 - DNA, 22 bp, synthetic construct
  misc_feature 1..22: note = chemically synthesized
  source 1..22: mol_type = other DNA
aattcacaggcccttccaacaa

SEQ ID NO: 49310 - DNA, 22 bp, synthetic construct
  misc_feature 1..22: note = chemically synthesized
  source 1..22: mol_type = other DNA
attcacaggcccttccaacaag

SEQ ID NO: 49311 - DNA, 22 bp, synthetic construct
  misc_feature 1..22: note = chemically synthesized
  source 1..22: mol_type = other DNA
acaggcccttccaacaagttaa

SEQ ID NO: 49312 - DNA, 22 bp, synthetic construct
  misc_feature 1..22: note = chemically synthesized
  source 1..22: mol_type = other DNA
ccaacaagttaaacttcagcca

SEQ ID NO: 49313 - DNA, 22 bp, synthetic construct
  misc_feature 1..22: note = chemically synthesized
  source 1..22: mol_type = other DNA
caacaagttaaacttcagccat

SEQ ID NO: 49314 - DNA, 22 bp, synthetic construct
  misc_feature 1..22: note = chemically synthesized
  source 1..22: mol_type = other DNA
aacttcagccatttaaaaaaaa

SEQ ID NO: 49315 - DNA, 22 bp, synthetic construct
  misc_feature 1..22: note = chemically synthesized
  source 1..22: mol_type = other DNA
cagccatttaaaaaaaaaaaaa

SEQ ID NO: 49316 - DNA, 22 bp, synthetic construct
  misc_feature 1..22: note = chemically synthesized
  source 1..22: mol_type = other DNA
agccatttaaaaaaaaaaaaaa

SEQ ID NO: 49317 - DNA, 22 bp, synthetic construct
  misc_feature 1..22: note = chemically synthesized
  source 1..22: mol_type = other DNA
aaaaaaaaaaaaaaaaaagagt

SEQ ID NO: 49318 - DNA, 22 bp, synthetic construct
  misc_feature 1..22: note = chemically synthesized
  source 1..22: mol_type = other DNA
aaaaaaaaaaaaaaaaagagtt

SEQ ID NO: 49319 - DNA, 22 bp, synthetic construct
  misc_feature 1..22: note = chemically synthesized
  source 1..22: mol_type = other DNA
ccactgatttcttacctgcaca

SEQ ID NO: 49320 - DNA, 22 bp, synthetic construct
  misc_feature 1..22: note = chemically synthesized
  source 1..22: mol_type = other DNA
cactgatttcttacctgcacac

SEQ ID NO: 49321 - DNA, 22 bp, synthetic construct
  misc_feature 1..22: note = chemically synthesized
  source 1..22: mol_type = other DNA
atttcttacctgcacacgcagg

SEQ ID NO: 49322 - DNA, 22 bp, synthetic construct
  misc_feature 1..22: note = chemically synthesized
  source 1..22: mol_type = other DNA
cttacctgcacacgcaggcacg

SEQ ID NO: 49323 - DNA, 22 bp, synthetic construct
  misc_feature 1..22: note = chemically synthesized
  source 1..22: mol_type = other DNA
ttacctgcacacgcaggcacgc

SEQ ID NO: 49324 - DNA, 22 bp, synthetic construct
  misc_feature 1..22: note = chemically synthesized
  source 1..22: mol_type = other DNA
acctgcacacgcaggcacgccg

SEQ ID NO: 49325 - DNA, 22 bp, synthetic construct
  misc_feature 1..22: note = chemically synthesized
  source 1..22: mol_type = other DNA
cctgcacacgcaggcacgccgg

SEQ ID NO: 49326 - DNA, 22 bp, synthetic construct
  misc_feature 1..22: note = chemically synthesized
  source 1..22: mol_type = other DNA
cacacgcaggcacgccggccac

SEQ ID NO: 49327 - DNA, 22 bp, synthetic construct
  misc_feature 1..22: note = chemically synthesized
  source 1..22: mol_type = other DNA
caccacgagctctcacacctgg

SEQ ID NO: 49328 - DNA, 22 bp, synthetic construct
  misc_feature 1..22: note = chemically synthesized
  source 1..22: mol_type = other DNA
tcacacctggtcgcctgaacac

SEQ ID NO: 49329 - DNA, 22 bp, synthetic construct
  misc_feature 1..22: note = chemically synthesized
  source 1..22: mol_type = other DNA
acacctggtcgcctgaacacaa

SEQ ID NO: 49330 - DNA, 22 bp, synthetic construct
  misc_feature 1..22: note = chemically synthesized
  source 1..22: mol_type = other DNA
gtcgcctgaacacaaccaaacc

SEQ ID NO: 49331 - DNA, 22 bp, synthetic construct
  misc_feature 1..22: note = chemically synthesized
  source 1..22: mol_type = other DNA
aacacaaccaaacccttcccat

SEQ ID NO: 49332 - DNA, 22 bp, synthetic construct
  misc_feature 1..22: note = chemically synthesized
  source 1..22: mol_type = other DNA
cccatctggccctcgggttact

SEQ ID NO: 49333 - DNA, 22 bp, synthetic construct
  misc_feature 1..22: note = chemically synthesized
  source 1..22: mol_type = other DNA
ccatctggccctcgggttactg

SEQ ID NO: 49334 - DNA, 22 bp, synthetic construct
  misc_feature 1..22: note = chemically synthesized
  source 1..22: mol_type = other DNA
gccctcgggttactggcgttat

SEQ ID NO: 49335 - DNA, 22 bp, synthetic construct
  misc_feature 1..22: note = chemically synthesized
  source 1..22: mol_type = other DNA
gggttactggcgttatcacaac

SEQ ID NO: 49336 - DNA, 22 bp, synthetic construct
  misc_feature 1..22: note = chemically synthesized
  source 1..22: mol_type = other DNA
ctggcgttatcacaactttttt

SEQ ID NO: 49337 - DNA, 22 bp, synthetic construct
  misc_feature 1..22: note = chemically synthesized
  source 1..22: mol_type = other DNA
gcgttatcacaactttttttcc

SEQ ID NO: 49338 - DNA, 22 bp, synthetic construct
  misc_feature 1..22: note = chemically synthesized
  source 1..22: mol_type = other DNA
tcacaactttttttcccaacgg

SEQ ID NO: 49339 - DNA, 22 bp, synthetic construct
  misc_feature 1..22: note = chemically synthesized
  source 1..22: mol_type = other DNA
tttttcccaacggcaagccagg

SEQ ID NO: 49340 - DNA, 22 bp, synthetic construct
  misc_feature 1..22: note = chemically synthesized
  source 1..22: mol_type = other DNA
ttttcccaacggcaagccagga

SEQ ID NO: 49341 - DNA, 22 bp, synthetic construct
  misc_feature 1..22: note = chemically synthesized
  source 1..22: mol_type = other DNA
tttcccaacggcaagccaggaa

SEQ ID NO: 49342 - DNA, 22 bp, synthetic construct
  misc_feature 1..22: note = chemically synthesized
  source 1..22: mol_type = other DNA
ttcccaacggcaagccaggaaa

SEQ ID NO: 49343 - DNA, 22 bp, synthetic construct
  misc_feature 1..22: note = chemically synthesized
  source 1..22: mol_type = other DNA
tcccaacggcaagccaggaaag

SEQ ID NO: 49344 - DNA, 22 bp, synthetic construct
  misc_feature 1..22: note = chemically synthesized
  source 1..22: mol_type = other DNA
cccaacggcaagccaggaaaga

SEQ ID NO: 49345 - DNA, 22 bp, synthetic construct
  misc_feature 1..22: note = chemically synthesized
  source 1..22: mol_type = other DNA
ccaacggcaagccaggaaagat

SEQ ID NO: 49346 - DNA, 22 bp, synthetic construct
  misc_feature 1..22: note = chemically synthesized
  source 1..22: mol_type = other DNA
gcctcaactggttcagaggagg

SEQ ID NO: 49347 - DNA, 22 bp, synthetic construct
  misc_feature 1..22: note = chemically synthesized
  source 1..22: mol_type = other DNA
aactggttcagaggagggaaaa

SEQ ID NO: 49348 - DNA, 22 bp, synthetic construct
  misc_feature 1..22: note = chemically synthesized
  source 1..22: mol_type = other DNA
gttcagaggagggaaaaaattg

SEQ ID NO: 49349 - DNA, 22 bp, synthetic construct
  misc_feature 1..22: note = chemically synthesized
  source 1..22: mol_type = other DNA
agaggagggaaaaaattgagct

SEQ ID NO: 49350 - DNA, 22 bp, synthetic construct
  misc_feature 1..22: note = chemically synthesized
  source 1..22: mol_type = other DNA
agctgtgcgtctcttttttttt

SEQ ID NO: 49351 - DNA, 22 bp, synthetic construct
  misc_feature 1..22: note = chemically synthesized
  source 1..22: mol_type = other DNA
tgcgtctctttttttttttatt

SEQ ID NO: 49352 - DNA, 22 bp, synthetic construct
  misc_feature 1..22: note = chemically synthesized
  source 1..22: mol_type = other DNA
tttttttttttattttttattt

SEQ ID NO: 49353 - DNA, 22 bp, synthetic construct
  misc_feature 1..22: note = chemically synthesized
  source 1..22: mol_type = other DNA
tttttttttattttttattttt

SEQ ID NO: 49354 - DNA, 22 bp, synthetic construct
  misc_feature 1..22: note = chemically synthesized
  source 1..22: mol_type = other DNA
ttttttttattttttatttttt

SEQ ID NO: 49355 - DNA, 22 bp, synthetic construct
  misc_feature 1..22: note = chemically synthesized
  source 1..22: mol_type = other DNA
tttttttattttttattttttt

SEQ ID NO: 49356 - DNA, 22 bp, synthetic construct
  misc_feature 1..22: note = chemically synthesized
  source 1..22: mol_type = other DNA
ttttttattttttatttttttg

SEQ ID NO: 49357 - DNA, 22 bp, synthetic construct
  misc_feature 1..22: note = chemically synthesized
  source 1..22: mol_type = other DNA
tttttattttttatttttttgc

SEQ ID NO: 49358 - DNA, 22 bp, synthetic construct
  misc_feature 1..22: note = chemically synthesized
  source 1..22: mol_type = other DNA
ttttattttttatttttttgcc

SEQ ID NO: 49359 - DNA, 22 bp, synthetic construct
  misc_feature 1..22: note = chemically synthesized
  source 1..22: mol_type = other DNA
tttattttttatttttttgcct

SEQ ID NO: 49360 - DNA, 22 bp, synthetic construct
  misc_feature 1..22: note = chemically synthesized
  source 1..22: mol_type = other DNA
ttattttttatttttttgcctt

SEQ ID NO: 49361 - DNA, 22 bp, synthetic construct
  misc_feature 1..22: note = chemically synthesized
  source 1..22: mol_type = other DNA
tattttttatttttttgccttt

SEQ ID NO: 49362 - DNA, 22 bp, synthetic construct
  misc_feature 1..22: note = chemically synthesized
  source 1..22: mol_type = other DNA
attttttatttttttgccttta

SEQ ID NO: 49363 - DNA, 22 bp, synthetic construct
  misc_feature 1..22: note = chemically synthesized
  source 1..22: mol_type = other DNA
ttttttatttttttgcctttag

SEQ ID NO: 49364 - DNA, 22 bp, synthetic construct
  misc_feature 1..22: note = chemically synthesized
  source 1..22: mol_type = other DNA
tttatttttttgcctttagcca

SEQ ID NO: 49365 - DNA, 22 bp, synthetic construct
  misc_feature 1..22: note = chemically synthesized
  source 1..22: mol_type = other DNA
ttatttttttgcctttagccaa

SEQ ID NO: 49366 - DNA, 22 bp, synthetic construct
  misc_feature 1..22: note = chemically synthesized
  source 1..22: mol_type = other DNA
tatttttttgcctttagccaaa

SEQ ID NO: 49367 - DNA, 22 bp, synthetic construct
  misc_feature 1..22: note = chemically synthesized
  source 1..22: mol_type = other DNA
atttttttgcctttagccaaaa

SEQ ID NO: 49368 - DNA, 22 bp, synthetic construct
  misc_feature 1..22: note = chemically synthesized
  source 1..22: mol_type = other DNA
tttttttgcctttagccaaaag

SEQ ID NO: 49369 - DNA, 22 bp, synthetic construct
  misc_feature 1..22: note = chemically synthesized
  source 1..22: mol_type = other DNA
ttttgcctttagccaaaagacc

SEQ ID NO: 49370 - DNA, 22 bp, synthetic construct
  misc_feature 1..22: note = chemically synthesized
  source 1..22: mol_type = other DNA
tttgcctttagccaaaagacca

SEQ ID NO: 49371 - DNA, 22 bp, synthetic construct
  misc_feature 1..22: note = chemically synthesized
  source 1..22: mol_type = other DNA
ttgcctttagccaaaagaccag

SEQ ID NO: 49372 - DNA, 22 bp, synthetic construct
  misc_feature 1..22: note = chemically synthesized
  source 1..22: mol_type = other DNA
tgcctttagccaaaagaccagg

SEQ ID NO: 49373 - DNA, 22 bp, synthetic construct
  misc_feature 1..22: note = chemically synthesized
  source 1..22: mol_type = other DNA
gcctttagccaaaagaccaggg

SEQ ID NO: 49374 - DNA, 22 bp, synthetic construct
  misc_feature 1..22: note = chemically synthesized
  source 1..22: mol_type = other DNA
cctttagccaaaagaccaggga

SEQ ID NO: 49375 - DNA, 22 bp, synthetic construct
  misc_feature 1..22: note = chemically synthesized
  source 1..22: mol_type = other DNA
tagccaaaagaccagggagcat

SEQ ID NO: 49376 - DNA, 22 bp, synthetic construct
  misc_feature 1..22: note = chemically synthesized
  source 1..22: mol_type = other DNA
agccaaaagaccagggagcatt

SEQ ID NO: 49377 - DNA, 22 bp, synthetic construct
  misc_feature 1..22: note = chemically synthesized
  source 1..22: mol_type = other DNA
gccaaaagaccagggagcattt

SEQ ID NO: 49378 - DNA, 22 bp, synthetic construct
  misc_feature 1..22: note = chemically synthesized
  source 1..22: mol_type = other DNA
gatgtacagtcagcaggtattt

SEQ ID NO: 49379 - DNA, 22 bp, synthetic construct
  misc_feature 1..22: note = chemically synthesized
  source 1..22: mol_type = other DNA
atgtacagtcagcaggtattta

SEQ ID NO: 49380 - DNA, 22 bp, synthetic construct
  misc_feature 1..22: note = chemically synthesized
  source 1..22: mol_type = other DNA
aaaaaagaaagaaagaaaaagg

SEQ ID NO: 49381 - DNA, 22 bp, synthetic construct
  misc_feature 1..22: note = chemically synthesized
  source 1..22: mol_type = other DNA
aaaaagaaagaaagaaaaagga

SEQ ID NO: 49382 - DNA, 22 bp, synthetic construct
  misc_feature 1..22: note = chemically synthesized
  source 1..22: mol_type = other DNA
aaaaggcttggctgcactgggg

SEQ ID NO: 49383 - DNA, 22 bp, synthetic construct
  misc_feature 1..22: note = chemically synthesized
  source 1..22: mol_type = other DNA
ggctgcactggggccctgacac

SEQ ID NO: 49384 - DNA, 22 bp, synthetic construct
  misc_feature 1..22: note = chemically synthesized
  source 1..22: mol_type = other DNA
gctgcactggggccctgacacg

SEQ ID NO: 49385 - DNA, 22 bp, synthetic construct
  misc_feature 1..22: note = chemically synthesized
  source 1..22: mol_type = other DNA
cactggggccctgacacgctct

SEQ ID NO: 49386 - DNA, 22 bp, synthetic construct
  misc_feature 1..22: note = chemically synthesized
  source 1..22: mol_type = other DNA
gggccctgacacgctctcatct

SEQ ID NO: 49387 - DNA, 22 bp, synthetic construct
  misc_feature 1..22: note = chemically synthesized
  source 1..22: mol_type = other DNA
acacgctctcatctaaagcctg

SEQ ID NO: 49388 - DNA, 22 bp, synthetic construct
  misc_feature 1..22: note = chemically synthesized
  source 1..22: mol_type = other DNA
tcatctaaagcctggccctcgg

SEQ ID NO: 49389 - DNA, 22 bp, synthetic construct
  misc_feature 1..22: note = chemically synthesized
  source 1..22: mol_type = other DNA
atctaaagcctggccctcggcc

SEQ ID NO: 49390 - DNA, 22 bp, synthetic construct
  misc_feature 1..22: note = chemically synthesized
  source 1..22: mol_type = other DNA
aagcctggccctcggccaagtt

SEQ ID NO: 49391 - DNA, 22 bp, synthetic construct
  misc_feature 1..22: note = chemically synthesized
  source 1..22: mol_type = other DNA
gccctcggccaagttcatctgt

SEQ ID NO: 49392 - DNA, 22 bp, synthetic construct
  misc_feature 1..22: note = chemically synthesized
  source 1..22: mol_type = other DNA
ggccaagttcatctgttaatgg

SEQ ID NO: 49393 - DNA, 22 bp, synthetic construct
  misc_feature 1..22: note = chemically synthesized
  source 1..22: mol_type = other DNA
atctgttaatggacaaccacaa

SEQ ID NO: 49394 - DNA, 22 bp, synthetic construct
  misc_feature 1..22: note = chemically synthesized
  source 1..22: mol_type = other DNA
ttaatggacaaccacaaccagg

SEQ ID NO: 49395 - DNA, 22 bp, synthetic construct
  misc_feature 1..22: note = chemically synthesized
  source 1..22: mol_type = other DNA
atggacaaccacaaccagggcc

SEQ ID NO: 49396 - DNA, 22 bp, synthetic construct
  misc_feature 1..22: note = chemically synthesized
  source 1..22: mol_type = other DNA
cacctcccccacctcccactac

SEQ ID NO: 49397 - DNA, 22 bp, synthetic construct
  misc_feature 1..22: note = chemically synthesized
  source 1..22: mol_type = other DNA
ccccacctcccactacccctcc

SEQ ID NO: 49398 - DNA, 22 bp, synthetic construct
  misc_feature 1..22: note = chemically synthesized
  source 1..22: mol_type = other DNA
ccactacccctcctgagtcttc

SEQ ID NO: 49399 - DNA, 22 bp, synthetic construct
  misc_feature 1..22: note = chemically synthesized
  source 1..22: mol_type = other DNA
cccctcctgagtcttctctgtt

SEQ ID NO: 49400 - DNA, 22 bp, synthetic construct
  misc_feature 1..22: note = chemically synthesized
  source 1..22: mol_type = other DNA
ctgagtcttctctgttctccta

SEQ ID NO: 49401 - DNA, 22 bp, synthetic construct
  misc_feature 1..22: note = chemically synthesized
  source 1..22: mol_type = other DNA
agtcttctctgttctcctacct

SEQ ID NO: 49402 - DNA, 22 bp, synthetic construct
  misc_feature 1..22: note = chemically synthesized
  source 1..22: mol_type = other DNA
ctctgttctcctacctctttcg

SEQ ID NO: 49403 - DNA, 22 bp, synthetic construct
  misc_feature 1..22: note = chemically synthesized
  source 1..22: mol_type = other DNA
tctgttctcctacctctttcga

SEQ ID NO: 49404 - DNA, 22 bp, synthetic construct
  misc_feature 1..22: note = chemically synthesized
  source 1..22: mol_type = other DNA
tgttctcctacctctttcgagc

SEQ ID NO: 49405 - DNA, 22 bp, synthetic construct
  misc_feature 1..22: note = chemically synthesized
  source 1..22: mol_type = other DNA
ttctcctacctctttcgagctc

SEQ ID NO: 49406 - DNA, 22 bp, synthetic construct
  misc_feature 1..22: note = chemically synthesized
  source 1..22: mol_type = other DNA
tcctacctctttcgagctccta

SEQ ID NO: 49407 - DNA, 22 bp, synthetic construct
  misc_feature 1..22: note = chemically synthesized
  source 1..22: mol_type = other DNA
ctacctctttcgagctcctaaa

SEQ ID NO: 49408 - DNA, 22 bp, synthetic construct
  misc_feature 1..22: note = chemically synthesized
  source 1..22: mol_type = other DNA
cctctttcgagctcctaaaaac

SEQ ID NO: 49409 - DNA, 22 bp, synthetic construct
  misc_feature 1..22: note = chemically synthesized
  source 1..22: mol_type = other DNA
tttcgagctcctaaaaactaga

SEQ ID NO: 49410 - DNA, 22 bp, synthetic construct
  misc_feature 1..22: note = chemically synthesized
  source 1..22: mol_type = other DNA
tcgagctcctaaaaactagaca

SEQ ID NO: 49411 - DNA, 22 bp, synthetic construct
  misc_feature 1..22: note = chemically synthesized
  source 1..22: mol_type = other DNA
cgagctcctaaaaactagacat

SEQ ID NO: 49412 - DNA, 22 bp, synthetic construct
  misc_feature 1..22: note = chemically synthesized
  source 1..22: mol_type = other DNA
gagctcctaaaaactagacatc

SEQ ID NO: 49413 - DNA, 22 bp, synthetic construct
  misc_feature 1..22: note = chemically synthesized
  source 1..22: mol_type = other DNA
ctaaaaactagacatcgattat

SEQ ID NO: 49414 - DNA, 22 bp, synthetic construct
  misc_feature 1..22: note = chemically synthesized
  source 1..22: mol_type = other DNA
aaaactagacatcgattatgtc

SEQ ID NO: 49415 - DNA, 22 bp, synthetic construct
  misc_feature 1..22: note = chemically synthesized
  source 1..22: mol_type = other DNA
gacatcgattatgtctgcgctt

SEQ ID NO: 49416 - DNA, 22 bp, synthetic construct
  misc_feature 1..22: note = chemically synthesized
  source 1..22: mol_type = other DNA
tgtctgcgcttttccctttcta

SEQ ID NO: 49417 - DNA, 22 bp, synthetic construct
  misc_feature 1..22: note = chemically synthesized
  source 1..22: mol_type = other DNA
cgcttttccctttctattcaag

SEQ ID NO: 49418 - DNA, 22 bp, synthetic construct
  misc_feature 1..22: note = chemically synthesized
  source 1..22: mol_type = other DNA
ttccctttctattcaagataaa

SEQ ID NO: 49419 - DNA, 22 bp, synthetic construct
  misc_feature 1..22: note = chemically synthesized
  source 1..22: mol_type = other DNA
tccctttctattcaagataaac

SEQ ID NO: 49420 - DNA, 22 bp, synthetic construct
  misc_feature 1..22: note = chemically synthesized
  source 1..22: mol_type = other DNA
ccctttctattcaagataaaca

SEQ ID NO: 49421 - DNA, 22 bp, synthetic construct
  misc_feature 1..22: note = chemically synthesized
  source 1..22: mol_type = other DNA
cctttctattcaagataaacaa

SEQ ID NO: 49422 - DNA, 22 bp, synthetic construct
  misc_feature 1..22: note = chemically synthesized
  source 1..22: mol_type = other DNA
tctattcaagataaacaaagtg

SEQ ID NO: 49423 - DNA, 22 bp, synthetic construct
  misc_feature 1..22: note = chemically synthesized
  source 1..22: mol_type = other DNA
ctattcaagataaacaaagtgc

SEQ ID NO: 49424 - DNA, 22 bp, synthetic construct
  misc_feature 1..22: note = chemically synthesized
  source 1..22: mol_type = other DNA
tattcaagataaacaaagtgct

SEQ ID NO: 49425 - DNA, 22 bp, synthetic construct
  misc_feature 1..22: note = chemically synthesized
  source 1..22: mol_type = other DNA
ttcaagataaacaaagtgcttc

SEQ ID NO: 49426 - DNA, 22 bp, synthetic construct
  misc_feature 1..22: note = chemically synthesized
  source 1..22: mol_type = other DNA
aagataaacaaagtgcttcaag

SEQ ID NO: 49427 - DNA, 22 bp, synthetic construct
  misc_feature 1..22: note = chemically synthesized
  source 1..22: mol_type = other DNA
caagttcagggcgcaccctggg

SEQ ID NO: 49428 - DNA, 22 bp, synthetic construct
  misc_feature 1..22: note = chemically synthesized
  source 1..22: mol_type = other DNA
aagttcagggcgcaccctggga

SEQ ID NO: 49429 - DNA, 22 bp, synthetic construct
  misc_feature 1..22: note = chemically synthesized
  source 1..22: mol_type = other DNA
agggcgcaccctgggacccctg

SEQ ID NO: 49430 - DNA, 22 bp, synthetic construct
  misc_feature 1..22: note = chemically synthesized
  source 1..22: mol_type = other DNA
ggacccctgacaaaacaatcta

SEQ ID NO: 49431 - DNA, 22 bp, synthetic construct
  misc_feature 1..22: note = chemically synthesized
  source 1..22: mol_type = other DNA
acaaaacaatctatcattctgt

SEQ ID NO: 49432 - DNA, 22 bp, synthetic construct
  misc_feature 1..22: note = chemically synthesized
  source 1..22: mol_type = other DNA
tcattctgtctgctaaaccagt

SEQ ID NO: 49433 - DNA, 22 bp, synthetic construct
  misc_feature 1..22: note = chemically synthesized
  source 1..22: mol_type = other DNA
tgtctgctaaaccagtctggct

SEQ ID NO: 49434 - DNA, 22 bp, synthetic construct
  misc_feature 1..22: note = chemically synthesized
  source 1..22: mol_type = other DNA
tctgctaaaccagtctggctac

SEQ ID NO: 49435 - DNA, 22 bp, synthetic construct
  misc_feature 1..22: note = chemically synthesized
  source 1..22: mol_type = other DNA
ctaaaccagtctggctacacca

SEQ ID NO: 49436 - DNA, 22 bp, synthetic construct
  misc_feature 1..22: note = chemically synthesized
  source 1..22: mol_type = other DNA
aaccagtctggctacaccatgg

SEQ ID NO: 49437 - DNA, 22 bp, synthetic construct
  misc_feature 1..22: note = chemically synthesized
  source 1..22: mol_type = other DNA
gctacaccatggccagggagag

SEQ ID NO: 49438 - DNA, 22 bp, synthetic construct
  misc_feature 1..22: note = chemically synthesized
  source 1..22: mol_type = other DNA
caccatggccagggagagtaac

SEQ ID NO: 49439 - DNA, 22 bp, synthetic construct
  misc_feature 1..22: note = chemically synthesized
  source 1..22: mol_type = other DNA
ccaatgtacaattttccctttg

SEQ ID NO: 49440 - DNA, 22 bp, synthetic construct
  misc_feature 1..22: note = chemically synthesized
  source 1..22: mol_type = other DNA
tccctttgtgctccttccctct

SEQ ID NO: 49441 - DNA, 22 bp, synthetic construct
  misc_feature 1..22: note = chemically synthesized
  source 1..22: mol_type = other DNA
ccctttgtgctccttccctctt

SEQ ID NO: 49442 - DNA, 22 bp, synthetic construct
  misc_feature 1..22: note = chemically synthesized
  source 1..22: mol_type = other DNA
cctttgtgctccttccctcttg

SEQ ID NO: 49443 - DNA, 22 bp, synthetic construct
  misc_feature 1..22: note = chemically synthesized
  source 1..22: mol_type = other DNA
tgtgctccttccctcttgccac

SEQ ID NO: 49444 - DNA, 22 bp, synthetic construct
  misc_feature 1..22: note = chemically synthesized
  source 1..22: mol_type = other DNA
gtgctccttccctcttgccact

SEQ ID NO: 49445 - DNA, 22 bp, synthetic construct
  misc_feature 1..22: note = chemically synthesized
  source 1..22: mol_type = other DNA
tgctccttccctcttgccacta

SEQ ID NO: 49446 - DNA, 22 bp, synthetic construct
  misc_feature 1..22: note = chemically synthesized
  source 1..22: mol_type = other DNA
cttccctcttgccactaacctc

SEQ ID NO: 49447 - DNA, 22 bp, synthetic construct
  misc_feature 1..22: note = chemically synthesized
  source 1..22: mol_type = other DNA
ccctcttgccactaacctcttt

SEQ ID NO: 49448 - DNA, 22 bp, synthetic construct
  misc_feature 1..22: note = chemically synthesized
  source 1..22: mol_type = other DNA
cctcttgccactaacctctttt

SEQ ID NO: 49449 - DNA, 22 bp, synthetic construct
  misc_feature 1..22: note = chemically synthesized
  source 1..22: mol_type = other DNA
ttgccactaacctcttttcttt

SEQ ID NO: 49450 - DNA, 22 bp, synthetic construct
  misc_feature 1..22: note = chemically synthesized
  source 1..22: mol_type = other DNA
gccactaacctcttttctttac

SEQ ID NO: 49451 - DNA, 22 bp, synthetic construct
  misc_feature 1..22: note = chemically synthesized
  source 1..22: mol_type = other DNA
ccactaacctcttttctttacc

SEQ ID NO: 49452 - DNA, 22 bp, synthetic construct
  misc_feature 1..22: note = chemically synthesized
  source 1..22: mol_type = other DNA
acctcttttctttaccaccttc

SEQ ID NO: 49453 - DNA, 22 bp, synthetic construct
  misc_feature 1..22: note = chemically synthesized
  source 1..22: mol_type = other DNA
ttttctttaccaccttctccgg

SEQ ID NO: 49454 - DNA, 22 bp, synthetic construct
  misc_feature 1..22: note = chemically synthesized
  source 1..22: mol_type = other DNA
ttctttaccaccttctccggag

SEQ ID NO: 49455 - DNA, 22 bp, synthetic construct
  misc_feature 1..22: note = chemically synthesized
  source 1..22: mol_type = other DNA
tctttaccaccttctccggagc

SEQ ID NO: 49456 - DNA, 22 bp, synthetic construct
  misc_feature 1..22: note = chemically synthesized
  source 1..22: mol_type = other DNA
ctttaccaccttctccggagca

SEQ ID NO: 49457 - DNA, 22 bp, synthetic construct
  misc_feature 1..22: note = chemically synthesized
  source 1..22: mol_type = other DNA
tttaccaccttctccggagcag

SEQ ID NO: 49458 - DNA, 22 bp, synthetic construct
  misc_feature 1..22: note = chemically synthesized
  source 1..22: mol_type = other DNA
taccaccttctccggagcagat

SEQ ID NO: 49459 - DNA, 22 bp, synthetic construct
  misc_feature 1..22: note = chemically synthesized
  source 1..22: mol_type = other DNA
accaccttctccggagcagatg

SEQ ID NO: 49460 - DNA, 22 bp, synthetic construct
  misc_feature 1..22: note = chemically synthesized
  source 1..22: mol_type = other DNA
ccaccttctccggagcagatgg

SEQ ID NO: 49461 - DNA, 22 bp, synthetic construct
  misc_feature 1..22: note = chemically synthesized
  source 1..22: mol_type = other DNA
ctccggagcagatggacttgac

SEQ ID NO: 49462 - DNA, 22 bp, synthetic construct
  misc_feature 1..22: note = chemically synthesized
  source 1..22: mol_type = other DNA
tccggagcagatggacttgacc

SEQ ID NO: 49463 - DNA, 22 bp, synthetic construct
  misc_feature 1..22: note = chemically synthesized
  source 1..22: mol_type = other DNA
cggagcagatggacttgaccac

SEQ ID NO: 49464 - DNA, 22 bp, synthetic construct
  misc_feature 1..22: note = chemically synthesized
  source 1..22: mol_type = other DNA
gaccactttgcttaagcccctc

SEQ ID NO: 49465 - DNA, 22 bp, synthetic construct
  misc_feature 1..22: note = chemically synthesized
  source 1..22: mol_type = other DNA
accactttgcttaagcccctcc

SEQ ID NO: 49466 - DNA, 22 bp, synthetic construct
  misc_feature 1..22: note = chemically synthesized
  source 1..22: mol_type = other DNA
tgcttaagcccctcctggcaac

SEQ ID NO: 49467 - DNA, 22 bp, synthetic construct
  misc_feature 1..22: note = chemically synthesized
  source 1..22: mol_type = other DNA
gcttaagcccctcctggcaacc

SEQ ID NO: 49468 - DNA, 22 bp, synthetic construct
  misc_feature 1..22: note = chemically synthesized
  source 1..22: mol_type = other DNA
cttaagcccctcctggcaacct

SEQ ID NO: 49469 - DNA, 22 bp, synthetic construct
  misc_feature 1..22: note = chemically synthesized
  source 1..22: mol_type = other DNA
aagcccctcctggcaacctcag

SEQ ID NO: 49470 - DNA, 22 bp, synthetic construct
  misc_feature 1..22: note = chemically synthesized
  source 1..22: mol_type = other DNA
agcccctcctggcaacctcaga

SEQ ID NO: 49471 - DNA, 22 bp, synthetic construct
  misc_feature 1..22: note = chemically synthesized
  source 1..22: mol_type = other DNA
ctggcaacctcagaaattagag

SEQ ID NO: 49472 - DNA, 22 bp, synthetic construct
  misc_feature 1..22: note = chemically synthesized
  source 1..22: mol_type = other DNA
gcaacctcagaaattagagaaa

SEQ ID NO: 49473 - DNA, 22 bp, synthetic construct
  misc_feature 1..22: note = chemically synthesized
  source 1..22: mol_type = other DNA
agaaattagagaaaaaaaaaaa

SEQ ID NO: 49474 - DNA, 22 bp, synthetic construct
  misc_feature 1..22: note = chemically synthesized
  source 1..22: mol_type = other DNA
gagaaaaaaaaaaaaagagctc

SEQ ID NO: 49475 - DNA, 22 bp, synthetic construct
  misc_feature 1..22: note = chemically synthesized
  source 1..22: mol_type = other DNA
ctggctaccctactccggtcca

SEQ ID NO: 49476 - DNA, 22 bp, synthetic construct
  misc_feature 1..22: note = chemically synthesized
  source 1..22: mol_type = other DNA
gctaccctactccggtccaggt

SEQ ID NO: 49477 - DNA, 22 bp, synthetic construct
  misc_feature 1..22: note = chemically synthesized
  source 1..22: mol_type = other DNA
ccctactccggtccaggttttt

SEQ ID NO: 49478 - DNA, 22 bp, synthetic construct
  misc_feature 1..22: note = chemically synthesized
  source 1..22: mol_type = other DNA
ctccggtccaggtttttctcct

SEQ ID NO: 49479 - DNA, 22 bp, synthetic construct
  misc_feature 1..22: note = chemically synthesized
  source 1..22: mol_type = other DNA
cggtccaggtttttctcctccc

SEQ ID NO: 49480 - DNA, 22 bp, synthetic construct
  misc_feature 1..22: note = chemically synthesized
  source 1..22: mol_type = other DNA
ttctcctccctctgtgttgccc

SEQ ID NO: 49481 - DNA, 22 bp, synthetic construct
  misc_feature 1..22: note = chemically synthesized
  source 1..22: mol_type = other DNA
tctcctccctctgtgttgcccg

SEQ ID NO: 49482 - DNA, 22 bp, synthetic construct
  misc_feature 1..22: note = chemically synthesized
  source 1..22: mol_type = other DNA
ctcctccctctgtgttgcccga

SEQ ID NO: 49483 - DNA, 22 bp, synthetic construct
  misc_feature 1..22: note = chemically synthesized
  source 1..22: mol_type = other DNA
tcctccctctgtgttgcccgac

SEQ ID NO: 49484 - DNA, 22 bp, synthetic construct
  misc_feature 1..22: note = chemically synthesized
  source 1..22: mol_type = other DNA
ctccctctgtgttgcccgacgg

SEQ ID NO: 49485 - DNA, 22 bp, synthetic construct
  misc_feature 1..22: note = chemically synthesized
  source 1..22: mol_type = other DNA
cctctgtgttgcccgacggtcc

SEQ ID NO: 49486 - DNA, 22 bp, synthetic construct
  misc_feature 1..22: note = chemically synthesized
  source 1..22: mol_type = other DNA
tgtgttgcccgacggtcctgca

SEQ ID NO: 49487 - DNA, 22 bp, synthetic construct
  misc_feature 1..22: note = chemically synthesized
  source 1..22: mol_type = other DNA
tgttgcccgacggtcctgcaca

SEQ ID NO: 49488 - DNA, 22 bp, synthetic construct
  misc_feature 1..22: note = chemically synthesized
  source 1..22: mol_type = other DNA
cccgacggtcctgcacacacag

SEQ ID NO: 49489 - DNA, 22 bp, synthetic construct
  misc_feature 1..22: note = chemically synthesized
  source 1..22: mol_type = other DNA
cacacacagacacaaatcccgt

SEQ ID NO: 49490 - DNA, 22 bp, synthetic construct
  misc_feature 1..22: note = chemically synthesized
  source 1..22: mol_type = other DNA
gacccacagaatcttttcgacc

SEQ ID NO: 49491 - DNA, 22 bp, synthetic construct
  misc_feature 1..22: note = chemically synthesized
  source 1..22: mol_type = other DNA
ttcgaccctctcacactaacac

SEQ ID NO: 49492 - DNA, 22 bp, synthetic construct
  misc_feature 1..22: note = chemically synthesized
  source 1..22: mol_type = other DNA
tcgaccctctcacactaacact

SEQ ID NO: 49493 - DNA, 22 bp, synthetic construct
  misc_feature 1..22: note = chemically synthesized
  source 1..22: mol_type = other DNA
cgaccctctcacactaacacta

SEQ ID NO: 49494 - DNA, 22 bp, synthetic construct
  misc_feature 1..22: note = chemically synthesized
  source 1..22: mol_type = other DNA
gaccctctcacactaacactaa

SEQ ID NO: 49495 - DNA, 22 bp, synthetic construct
  misc_feature 1..22: note = chemically synthesized
  source 1..22: mol_type = other DNA
tcacactaacactaaaccagaa

SEQ ID NO: 49496 - DNA, 22 bp, synthetic construct
  misc_feature 1..22: note = chemically synthesized
  source 1..22: mol_type = other DNA
acactaacactaaaccagaaaa

SEQ ID NO: 49497 - DNA, 22 bp, synthetic construct
  misc_feature 1..22: note = chemically synthesized
  source 1..22: mol_type = other DNA
acactaaaccagaaaataaatt

SEQ ID NO: 49498 - DNA, 22 bp, synthetic construct
  misc_feature 1..22: note = chemically synthesized
  source 1..22: mol_type = other DNA
aaccagaaaataaattaaatac

SEQ ID NO: 49499 - DNA, 22 bp, synthetic construct
  misc_feature 1..22: note = chemically synthesized
  source 1..22: mol_type = other DNA
aatactgggactgccccctcct

SEQ ID NO: 49500 - DNA, 22 bp, synthetic construct
  misc_feature 1..22: note = chemically synthesized
  source 1..22: mol_type = other DNA
ggactgccccctcctttgcgtt

SEQ ID NO: 49501 - DNA, 22 bp, synthetic construct
  misc_feature 1..22: note = chemically synthesized
  source 1..22: mol_type = other DNA
ccccctcctttgcgttctgcaa

SEQ ID NO: 49502 - DNA, 22 bp, synthetic construct
  misc_feature 1..22: note = chemically synthesized
  source 1..22: mol_type = other DNA
ctttgcgttctgcaagaatatt

SEQ ID NO: 49503 - DNA, 22 bp, synthetic construct
  misc_feature 1..22: note = chemically synthesized
  source 1..22: mol_type = other DNA
tgcgttctgcaagaatatttta

SEQ ID NO: 49504 - DNA, 22 bp, synthetic construct
  misc_feature 1..22: note = chemically synthesized
  source 1..22: mol_type = other DNA
gcgttctgcaagaatattttaa

SEQ ID NO: 49505 - DNA, 22 bp, synthetic construct
  misc_feature 1..22: note = chemically synthesized
  source 1..22: mol_type = other DNA
cgttctgcaagaatattttaag

SEQ ID NO: 49506 - DNA, 22 bp, synthetic construct
  misc_feature 1..22: note = chemically synthesized
  source 1..22: mol_type = other DNA
tgcaagaatattttaagtgagt

SEQ ID NO: 49507 - DNA, 22 bp, synthetic construct
  misc_feature 1..22: note = chemically synthesized
  source 1..22: mol_type = other DNA
caagaatattttaagtgagttt

SEQ ID NO: 49508 - DNA, 22 bp, synthetic construct
  misc_feature 1..22: note = chemically synthesized
  source 1..22: mol_type = other DNA
taagtgagttttgttttaaatc

SEQ ID NO: 49509 - DNA, 22 bp, synthetic construct
  misc_feature 1..22: note = chemically synthesized
  source 1..22: mol_type = other DNA
aagtgagttttgttttaaatca

SEQ ID NO: 49510 - DNA, 22 bp, synthetic construct
  misc_feature 1..22: note = chemically synthesized
  source 1..22: mol_type = other DNA
agtgagttttgttttaaatcat

SEQ ID NO: 49511 - DNA, 22 bp, synthetic construct
  misc_feature 1..22: note = chemically synthesized
  source 1..22: mol_type = other DNA
tgttttaaatcatatccattaa

SEQ ID NO: 49512 - DNA, 22 bp, synthetic construct
  misc_feature 1..22: note = chemically synthesized
  source 1..22: mol_type = other DNA
gttttaaatcatatccattaat

SEQ ID NO: 49513 - DNA, 22 bp, synthetic construct
  misc_feature 1..22: note = chemically synthesized
  source 1..22: mol_type = other DNA
ttttaaatcatatccattaatt

SEQ ID NO: 49514 - DNA, 22 bp, synthetic construct
  misc_feature 1..22: note = chemically synthesized
  source 1..22: mol_type = other DNA
taaatcatatccattaatttac

SEQ ID NO: 49515 - DNA, 22 bp, synthetic construct
  misc_feature 1..22: note = chemically synthesized
  source 1..22: mol_type = other DNA
aaatcatatccattaatttacc

SEQ ID NO: 49516 - DNA, 22 bp, synthetic construct
  misc_feature 1..22: note = chemically synthesized
  source 1..22: mol_type = other DNA
aatcatatccattaatttaccc

SEQ ID NO: 49517 - DNA, 22 bp, synthetic construct
  misc_feature 1..22: note = chemically synthesized
  source 1..22: mol_type = other DNA
atttaccctgacttgcaattaa

SEQ ID NO: 49518 - DNA, 22 bp, synthetic construct
  misc_feature 1..22: note = chemically synthesized
  source 1..22: mol_type = other DNA
accctgacttgcaattaaatgc

SEQ ID NO: 49519 - DNA, 22 bp, synthetic construct
  misc_feature 1..22: note = chemically synthesized
  source 1..22: mol_type = other DNA
ccctgacttgcaattaaatgca

SEQ ID NO: 49520 - DNA, 22 bp, synthetic construct
  misc_feature 1..22: note = chemically synthesized
  source 1..22: mol_type = other DNA
acttgcaattaaatgcaagcac

SEQ ID NO: 49521 - DNA, 22 bp, synthetic construct
  misc_feature 1..22: note = chemically synthesized
  source 1..22: mol_type = other DNA
gcaattaaatgcaagcacactt

SEQ ID NO: 49522 - DNA, 22 bp, synthetic construct
  misc_feature 1..22: note = chemically synthesized
  source 1..22: mol_type = other DNA
caattaaatgcaagcacacttt

SEQ ID NO: 49523 - DNA, 22 bp, synthetic construct
  misc_feature 1..22: note = chemically synthesized
  source 1..22: mol_type = other DNA
aatgcaagcacactttttacaa

SEQ ID NO: 49524 - DNA, 22 bp, synthetic construct
  misc_feature 1..22: note = chemically synthesized
  source 1..22: mol_type = other DNA
tttacaaccagtacggaatgca

SEQ ID NO: 49525 - DNA, 22 bp, synthetic construct
  misc_feature 1..22: note = chemically synthesized
  source 1..22: mol_type = other DNA
ttacaaccagtacggaatgcat

SEQ ID NO: 49526 - DNA, 22 bp, synthetic construct
  misc_feature 1..22: note = chemically synthesized
  source 1..22: mol_type = other DNA
tacaaccagtacggaatgcatt

SEQ ID NO: 49527 - DNA, 22 bp, synthetic construct
  misc_feature 1..22: note = chemically synthesized
  source 1..22: mol_type = other DNA
acaaccagtacggaatgcatta

SEQ ID NO: 49528 - DNA, 22 bp, synthetic construct
  misc_feature 1..22: note = chemically synthesized
  source 1..22: mol_type = other DNA
caaccagtacggaatgcattaa

SEQ ID NO: 49529 - DNA, 22 bp, synthetic construct
  misc_feature 1..22: note = chemically synthesized
  source 1..22: mol_type = other DNA
attataactacaaatggtcaaa

SEQ ID NO: 49530 - DNA, 22 bp, synthetic construct
  misc_feature 1..22: note = chemically synthesized
  source 1..22: mol_type = other DNA
taactacaaatggtcaaatgag

SEQ ID NO: 49531 - DNA, 22 bp, synthetic construct
  misc_feature 1..22: note = chemically synthesized
  source 1..22: mol_type = other DNA
caaatggtcaaatgagagcaag

SEQ ID NO: 49532 - DNA, 22 bp, synthetic construct
  misc_feature 1..22: note = chemically synthesized
  source 1..22: mol_type = other DNA
caaaaaatattaataaaataca

SEQ ID NO: 49533 - DNA, 22 bp, synthetic construct
  misc_feature 1..22: note = chemically synthesized
  source 1..22: mol_type = other DNA
ataaaatacataataaataata

SEQ ID NO: 49534 - DNA, 22 bp, synthetic construct
  misc_feature 1..22: note = chemically synthesized
  source 1..22: mol_type = other DNA
atgaaacaaaaatagattcata

SEQ ID NO: 49535 - DNA, 22 bp, synthetic construct
  misc_feature 1..22: note = chemically synthesized
  source 1..22: mol_type = other DNA
ataagccttggccagggctttt

SEQ ID NO: 49536 - DNA, 22 bp, synthetic construct
  misc_feature 1..22: note = chemically synthesized
  source 1..22: mol_type = other DNA
ggccagggcttttattatttca

SEQ ID NO: 49537 - DNA, 22 bp, synthetic construct
  misc_feature 1..22: note = chemically synthesized
  source 1..22: mol_type = other DNA
gccagggcttttattatttcat

SEQ ID NO: 49538 - DNA, 22 bp, synthetic construct
  misc_feature 1..22: note = chemically synthesized
  source 1..22: mol_type = other DNA
ttattatttcatgcaaggggaa

SEQ ID NO: 49539 - DNA, 22 bp, synthetic construct
  misc_feature 1..22: note = chemically synthesized
  source 1..22: mol_type = other DNA
tattatttcatgcaaggggaaa

SEQ ID NO: 49540 - DNA, 22 bp, synthetic construct
  misc_feature 1..22: note = chemically synthesized
  source 1..22: mol_type = other DNA
attatttcatgcaaggggaaag

SEQ ID NO: 49541 - DNA, 22 bp, synthetic construct
  misc_feature 1..22: note = chemically synthesized
  source 1..22: mol_type = other DNA
ttatttcatgcaaggggaaagt

SEQ ID NO: 49542 - DNA, 22 bp, synthetic construct
  misc_feature 1..22: note = chemically synthesized
  source 1..22: mol_type = other DNA
tttcatgcaaggggaaagtcca

SEQ ID NO: 49543 - DNA, 22 bp, synthetic construct
  misc_feature 1..22: note = chemically synthesized
  source 1..22: mol_type = other DNA
catgcaaggggaaagtccagcc

SEQ ID NO: 49544 - DNA, 22 bp, synthetic construct
  misc_feature 1..22: note = chemically synthesized
  source 1..22: mol_type = other DNA
atgcaaggggaaagtccagcca

SEQ ID NO: 49545 - DNA, 22 bp, synthetic construct
  misc_feature 1..22: note = chemically synthesized
  source 1..22: mol_type = other DNA
gctccatacactttggcaggac

SEQ ID NO: 49546 - DNA, 22 bp, synthetic construct
  misc_feature 1..22: note = chemically synthesized
  source 1..22: mol_type = other DNA
ctccatacactttggcaggact

SEQ ID NO: 49547 - DNA, 22 bp, synthetic construct
  misc_feature 1..22: note = chemically synthesized
  source 1..22: mol_type = other DNA
catacactttggcaggactcag

SEQ ID NO: 49548 - DNA, 22 bp, synthetic construct
  misc_feature 1..22: note = chemically synthesized
  source 1..22: mol_type = other DNA
tggcaggactcagaccaaccac

SEQ ID NO: 49549 - DNA, 22 bp, synthetic construct
  misc_feature 1..22: note = chemically synthesized
  source 1..22: mol_type = other DNA
ggcaggactcagaccaaccact

SEQ ID NO: 49550 - DNA, 22 bp, synthetic construct
  misc_feature 1..22: note = chemically synthesized
  source 1..22: mol_type = other DNA
gcaggactcagaccaaccacta

SEQ ID NO: 49551 - DNA, 22 bp, synthetic construct
  misc_feature 1..22: note = chemically synthesized
  source 1..22: mol_type = other DNA
agaccaaccactaccattaaac

SEQ ID NO: 49552 - DNA, 22 bp, synthetic construct
  misc_feature 1..22: note = chemically synthesized
  source 1..22: mol_type = other DNA
ccattaaactcaagagcgtgtt

SEQ ID NO: 49553 - DNA, 22 bp, synthetic construct
  misc_feature 1..22: note = chemically synthesized
  source 1..22: mol_type = other DNA
aactcaagagcgtgttttggca

SEQ ID NO: 49554 - DNA, 22 bp, synthetic construct
  misc_feature 1..22: note = chemically synthesized
  source 1..22: mol_type = other DNA
aagagcgtgttttggcagtgcc

SEQ ID NO: 49555 - DNA, 22 bp, synthetic construct
  misc_feature 1..22: note = chemically synthesized
  source 1..22: mol_type = other DNA
tggcagtgccctggcattgggg

SEQ ID NO: 49556 - DNA, 22 bp, synthetic construct
  misc_feature 1..22: note = chemically synthesized
  source 1..22: mol_type = other DNA
ggcagtgccctggcattggggg

SEQ ID NO: 49557 - DNA, 22 bp, synthetic construct
  misc_feature 1..22: note = chemically synthesized
  source 1..22: mol_type = other DNA
gcagtgccctggcattgggggg

SEQ ID NO: 49558 - DNA, 22 bp, synthetic construct
  misc_feature 1..22: note = chemically synthesized
  source 1..22: mol_type = other DNA
gcattggggggccctgtgcaga

SEQ ID NO: 49559 - DNA, 22 bp, synthetic construct
  misc_feature 1..22: note = chemically synthesized
  source 1..22: mol_type = other DNA
gggggccctgtgcagacaccac

SEQ ID NO: 49560 - DNA, 22 bp, synthetic construct
  misc_feature 1..22: note = chemically synthesized
  source 1..22: mol_type = other DNA
tgcagacaccaccaggagacgc

SEQ ID NO: 49561 - DNA, 22 bp, synthetic construct
  misc_feature 1..22: note = chemically synthesized
  source 1..22: mol_type = other DNA
accccagtacccaaggcagggt

SEQ ID NO: 49562 - DNA, 22 bp, synthetic construct
  misc_feature 1..22: note = chemically synthesized
  source 1..22: mol_type = other DNA
attcagcctttccatgtggtcg

SEQ ID NO: 49563 - DNA, 22 bp, synthetic construct
  misc_feature 1..22: note = chemically synthesized
  source 1..22: mol_type = other DNA
ttcagcctttccatgtggtcgg

SEQ ID NO: 49564 - DNA, 22 bp, synthetic construct
  misc_feature 1..22: note = chemically synthesized
  source 1..22: mol_type = other DNA
agcctttccatgtggtcgggaa

SEQ ID NO: 49565 - DNA, 22 bp, synthetic construct
  misc_feature 1..22: note = chemically synthesized
  source 1..22: mol_type = other DNA
tccatgtggtcgggaagttacc

SEQ ID NO: 49566 - DNA, 22 bp, synthetic construct
  misc_feature 1..22: note = chemically synthesized
  source 1..22: mol_type = other DNA
ccatgtggtcgggaagttaccc

SEQ ID NO: 49567 - DNA, 22 bp, synthetic construct
  misc_feature 1..22: note = chemically synthesized
  source 1..22: mol_type = other DNA
catgtggtcgggaagttaccca

SEQ ID NO: 49568 - DNA, 22 bp, synthetic construct
  misc_feature 1..22: note = chemically synthesized
  source 1..22: mol_type = other DNA
cccacaggctgcttccctcttc

SEQ ID NO: 49569 - DNA, 22 bp, synthetic construct
  misc_feature 1..22: note = chemically synthesized
  source 1..22: mol_type = other DNA
cttccctcttcctaaccaccct

SEQ ID NO: 49570 - DNA, 22 bp, synthetic construct
  misc_feature 1..22: note = chemically synthesized
  source 1..22: mol_type = other DNA
ccctcttcctaaccaccctctc

SEQ ID NO: 49571 - DNA, 22 bp, synthetic construct
  misc_feature 1..22: note = chemically synthesized
  source 1..22: mol_type = other DNA
cctcttcctaaccaccctctct

SEQ ID NO: 49572 - DNA, 22 bp, synthetic construct
  misc_feature 1..22: note = chemically synthesized
  source 1..22: mol_type = other DNA
ttcctaaccaccctctctgccg

SEQ ID NO: 49573 - DNA, 22 bp, synthetic construct
  misc_feature 1..22: note = chemically synthesized
  source 1..22: mol_type = other DNA
cctaaccaccctctctgccggc

SEQ ID NO: 49574 - DNA, 22 bp, synthetic construct
  misc_feature 1..22: note = chemically synthesized
  source 1..22: mol_type = other DNA
ctaaccaccctctctgccggcc

SEQ ID NO: 49575 - DNA, 22 bp, synthetic construct
  misc_feature 1..22: note = chemically synthesized
  source 1..22: mol_type = other DNA
accaccctctctgccggccgca

SEQ ID NO: 49576 - DNA, 22 bp, synthetic construct
  misc_feature 1..22: note = chemically synthesized
  source 1..22: mol_type = other DNA
tctgccggccgcagctgttctg

SEQ ID NO: 49577 - DNA, 22 bp, synthetic construct
  misc_feature 1..22: note = chemically synthesized
  source 1..22: mol_type = other DNA
tgccggccgcagctgttctgtc

SEQ ID NO: 49578 - DNA, 22 bp, synthetic construct
  misc_feature 1..22: note = chemically synthesized
  source 1..22: mol_type = other DNA
ccggccgcagctgttctgtcag

SEQ ID NO: 49579 - DNA, 22 bp, synthetic construct
  misc_feature 1..22: note = chemically synthesized
  source 1..22: mol_type = other DNA
ttctgtcagtgtccaccctgcc

SEQ ID NO: 49580 - DNA, 22 bp, synthetic construct
  misc_feature 1..22: note = chemically synthesized
  source 1..22: mol_type = other DNA
tgtcagtgtccaccctgcccct

SEQ ID NO: 49581 - DNA, 22 bp, synthetic construct
  misc_feature 1..22: note = chemically synthesized
  source 1..22: mol_type = other DNA
tcagtgtccaccctgcccctca

SEQ ID NO: 49582 - DNA, 22 bp, synthetic construct
  misc_feature 1..22: note = chemically synthesized
  source 1..22: mol_type = other DNA
cccctcaaaggacaaatgaaat

SEQ ID NO: 49583 - DNA, 22 bp, synthetic construct
  misc_feature 1..22: note = chemically synthesized
  source 1..22: mol_type = other DNA
aaaggacaaatgaaatccccca

SEQ ID NO: 49584 - DNA, 22 bp, synthetic construct
  misc_feature 1..22: note = chemically synthesized
  source 1..22: mol_type = other DNA
aatgaagaactcaagactaggg

SEQ ID NO: 49585 - DNA, 22 bp, synthetic construct
  misc_feature 1..22: note = chemically synthesized
  source 1..22: mol_type = other DNA
aagactagggcaccatgagcat

SEQ ID NO: 49586 - DNA, 22 bp, synthetic construct
  misc_feature 1..22: note = chemically synthesized
  source 1..22: mol_type = other DNA
gggcaccatgagcatctgggtt

SEQ ID NO: 49587 - DNA, 22 bp, synthetic construct
  misc_feature 1..22: note = chemically synthesized
  source 1..22: mol_type = other DNA
ggttaaggctcggaatcctgca

SEQ ID NO: 49588 - DNA, 22 bp, synthetic construct
  misc_feature 1..22: note = chemically synthesized
  source 1..22: mol_type = other DNA
aggctcggaatcctgcaccagc

SEQ ID NO: 49589 - DNA, 22 bp, synthetic construct
  misc_feature 1..22: note = chemically synthesized
  source 1..22: mol_type = other DNA
ggaatcctgcaccagcgttgga

SEQ ID NO: 49590 - DNA, 22 bp, synthetic construct
  misc_feature 1..22: note = chemically synthesized
  source 1..22: mol_type = other DNA
caccagcgttggaagctgcctt

SEQ ID NO: 49591 - DNA, 22 bp, synthetic construct
  misc_feature 1..22: note = chemically synthesized
  source 1..22: mol_type = other DNA
gaagctgcctttgttcctgcca

SEQ ID NO: 49592 - DNA, 22 bp, synthetic construct
  misc_feature 1..22: note = chemically synthesized
  source 1..22: mol_type = other DNA
cctttgttcctgccacaccgcc

SEQ ID NO: 49593 - DNA, 22 bp, synthetic construct
  misc_feature 1..22: note = chemically synthesized
  source 1..22: mol_type = other DNA
tgttcctgccacaccgccgggc

SEQ ID NO: 49594 - DNA, 22 bp, synthetic construct
  misc_feature 1..22: note = chemically synthesized
  source 1..22: mol_type = other DNA
gttcctgccacaccgccgggcc

SEQ ID NO: 49595 - DNA, 22 bp, synthetic construct
  misc_feature 1..22: note = chemically synthesized
  source 1..22: mol_type = other DNA
ttcctgccacaccgccgggccc

SEQ ID NO: 49596 - DNA, 22 bp, synthetic construct
  misc_feature 1..22: note = chemically synthesized
  source 1..22: mol_type = other DNA
ctgccacaccgccgggcccctg

SEQ ID NO: 49597 - DNA, 22 bp, synthetic construct
  misc_feature 1..22: note = chemically synthesized
  source 1..22: mol_type = other DNA
ccacaccgccgggcccctgcta

SEQ ID NO: 49598 - DNA, 22 bp, synthetic construct
  misc_feature 1..22: note = chemically synthesized
  source 1..22: mol_type = other DNA
ctaacctgtctccacaacactc

SEQ ID NO: 49599 - DNA, 22 bp, synthetic construct
  misc_feature 1..22: note = chemically synthesized
  source 1..22: mol_type = other DNA
acctgtctccacaacactcagc

SEQ ID NO: 49600 - DNA, 22 bp, synthetic construct
  misc_feature 1..22: note = chemically synthesized
  source 1..22: mol_type = other DNA
tctccacaacactcagcctcac

SEQ ID NO: 49601 - DNA, 22 bp, synthetic construct
  misc_feature 1..22: note = chemically synthesized
  source 1..22: mol_type = other DNA
cacaacactcagcctcacgcct

SEQ ID NO: 49602 - DNA, 22 bp, synthetic construct
  misc_feature 1..22: note = chemically synthesized
  source 1..22: mol_type = other DNA
agcctcacgcctcaccccagca

SEQ ID NO: 49603 - DNA, 22 bp, synthetic construct
  misc_feature 1..22: note = chemically synthesized
  source 1..22: mol_type = other DNA
acgcctcaccccagcactccct

SEQ ID NO: 49604 - DNA, 22 bp, synthetic construct
  misc_feature 1..22: note = chemically synthesized
  source 1..22: mol_type = other DNA
accccagcactccctgcctctg

SEQ ID NO: 49605 - DNA, 22 bp, synthetic construct
  misc_feature 1..22: note = chemically synthesized
  source 1..22: mol_type = other DNA
cctgcctctgcccctcccccca

SEQ ID NO: 49606 - DNA, 22 bp, synthetic construct
  misc_feature 1..22: note = chemically synthesized
  source 1..22: mol_type = other DNA
cctctgcccctccccccaaatc

SEQ ID NO: 49607 - DNA, 22 bp, synthetic construct
  misc_feature 1..22: note = chemically synthesized
  source 1..22: mol_type = other DNA
tgcccctccccccaaatccaac

SEQ ID NO: 49608 - DNA, 22 bp, synthetic construct
  misc_feature 1..22: note = chemically synthesized
  source 1..22: mol_type = other DNA
cccctccccccaaatccaacac

SEQ ID NO: 49609 - DNA, 22 bp, synthetic construct
  misc_feature 1..22: note = chemically synthesized
  source 1..22: mol_type = other DNA
cccccaaatccaacacacccac

SEQ ID NO: 49610 - DNA, 22 bp, synthetic construct
  misc_feature 1..22: note = chemically synthesized
  source 1..22: mol_type = other DNA
attaagatcaggaagaaatttg

SEQ ID NO: 49611 - DNA, 22 bp, synthetic construct
  misc_feature 1..22: note = chemically synthesized
  source 1..22: mol_type = other DNA
agatcaggaagaaatttgcatt

SEQ ID NO: 49612 - DNA, 22 bp, synthetic construct
  misc_feature 1..22: note = chemically synthesized
  source 1..22: mol_type = other DNA
gcattttcttttcactgtaccc

SEQ ID NO: 49613 - DNA, 22 bp, synthetic construct
  misc_feature 1..22: note = chemically synthesized
  source 1..22: mol_type = other DNA
cattttcttttcactgtacccc

SEQ ID NO: 49614 - DNA, 22 bp, synthetic construct
  misc_feature 1..22: note = chemically synthesized
  source 1..22: mol_type = other DNA
tcttttcactgtacccccagta

SEQ ID NO: 49615 - DNA, 22 bp, synthetic construct
  misc_feature 1..22: note = chemically synthesized
  source 1..22: mol_type = other DNA
cttttcactgtacccccagtaa

SEQ ID NO: 49616 - DNA, 22 bp, synthetic construct
  misc_feature 1..22: note = chemically synthesized
  source 1..22: mol_type = other DNA
ttttcactgtacccccagtaat

SEQ ID NO: 49617 - DNA, 22 bp, synthetic construct
  misc_feature 1..22: note = chemically synthesized
  source 1..22: mol_type = other DNA
ttcactgtacccccagtaatca

SEQ ID NO: 49618 - DNA, 22 bp, synthetic construct
  misc_feature 1..22: note = chemically synthesized
  source 1..22: mol_type = other DNA
tcactgtacccccagtaatcac

SEQ ID NO: 49619 - DNA, 22 bp, synthetic construct
  misc_feature 1..22: note = chemically synthesized
  source 1..22: mol_type = other DNA
cactgtacccccagtaatcaca

SEQ ID NO: 49620 - DNA, 22 bp, synthetic construct
  misc_feature 1..22: note = chemically synthesized
  source 1..22: mol_type = other DNA
actgtacccccagtaatcacag

SEQ ID NO: 49621 - DNA, 22 bp, synthetic construct
  misc_feature 1..22: note = chemically synthesized
  source 1..22: mol_type = other DNA
tacccccagtaatcacagaagt

SEQ ID NO: 49622 - DNA, 22 bp, synthetic construct
  misc_feature 1..22: note = chemically synthesized
  source 1..22: mol_type = other DNA
ttcaaattttgagaattttgtt

SEQ ID NO: 49623 - DNA, 22 bp, synthetic construct
  misc_feature 1..22: note = chemically synthesized
  source 1..22: mol_type = other DNA
caaattttgagaattttgttcc

SEQ ID NO: 49624 - DNA, 22 bp, synthetic construct
  misc_feature 1..22: note = chemically synthesized
  source 1..22: mol_type = other DNA
aaattttgagaattttgttcct

SEQ ID NO: 49625 - DNA, 22 bp, synthetic construct
  misc_feature 1..22: note = chemically synthesized
  source 1..22: mol_type = other DNA
tgagaattttgttcctctgcta

SEQ ID NO: 49626 - DNA, 22 bp, synthetic construct
  misc_feature 1..22: note = chemically synthesized
  source 1..22: mol_type = other DNA
gagaattttgttcctctgctaa

SEQ ID NO: 49627 - DNA, 22 bp, synthetic construct
  misc_feature 1..22: note = chemically synthesized
  source 1..22: mol_type = other DNA
agaattttgttcctctgctaat

SEQ ID NO: 49628 - DNA, 22 bp, synthetic construct
  misc_feature 1..22: note = chemically synthesized
  source 1..22: mol_type = other DNA
tgttcctctgctaattatttcc

SEQ ID NO: 49629 - DNA, 22 bp, synthetic construct
  misc_feature 1..22: note = chemically synthesized
  source 1..22: mol_type = other DNA
gttcctctgctaattatttccc

SEQ ID NO: 49630 - DNA, 22 bp, synthetic construct
  misc_feature 1..22: note = chemically synthesized
  source 1..22: mol_type = other DNA
ttcctctgctaattatttccct

SEQ ID NO: 49631 - DNA, 22 bp, synthetic construct
  misc_feature 1..22: note = chemically synthesized
  source 1..22: mol_type = other DNA
ctctgctaattatttccctcat

SEQ ID NO: 49632 - DNA, 22 bp, synthetic construct
  misc_feature 1..22: note = chemically synthesized
  source 1..22: mol_type = other DNA
tgctaattatttccctcatttt

SEQ ID NO: 49633 - DNA, 22 bp, synthetic construct
  misc_feature 1..22: note = chemically synthesized
  source 1..22: mol_type = other DNA
ctaattatttccctcattttgc

SEQ ID NO: 49634 - DNA, 22 bp, synthetic construct
  misc_feature 1..22: note = chemically synthesized
  source 1..22: mol_type = other DNA
attatttccctcattttgcatt

SEQ ID NO: 49635 - DNA, 22 bp, synthetic construct
  misc_feature 1..22: note = chemically synthesized
  source 1..22: mol_type = other DNA
tttccctcattttgcatttcaa

SEQ ID NO: 49636 - DNA, 22 bp, synthetic construct
  misc_feature 1..22: note = chemically synthesized
  source 1..22: mol_type = other DNA
ccctcattttgcatttcaaggc

SEQ ID NO: 49637 - DNA, 22 bp, synthetic construct
  misc_feature 1..22: note = chemically synthesized
  source 1..22: mol_type = other DNA
cctcattttgcatttcaaggca

SEQ ID NO: 49638 - DNA, 22 bp, synthetic construct
  misc_feature 1..22: note = chemically synthesized
  source 1..22: mol_type = other DNA
attttgcatttcaaggcacaaa

SEQ ID NO: 49639 - DNA, 22 bp, synthetic construct
  misc_feature 1..22: note = chemically synthesized
  source 1..22: mol_type = other DNA
tgcatttcaaggcacaaagaca

SEQ ID NO: 49640 - DNA, 22 bp, synthetic construct
  misc_feature 1..22: note = chemically synthesized
  source 1..22: mol_type = other DNA
gcatttcaaggcacaaagacag

SEQ ID NO: 49641 - DNA, 22 bp, synthetic construct
  misc_feature 1..22: note = chemically synthesized
  source 1..22: mol_type = other DNA
catttcaaggcacaaagacagt

SEQ ID NO: 49642 - DNA, 22 bp, synthetic construct
  misc_feature 1..22: note = chemically synthesized
  source 1..22: mol_type = other DNA
caaggcacaaagacagtctatc

SEQ ID NO: 49643 - DNA, 22 bp, synthetic construct
  misc_feature 1..22: note = chemically synthesized
  source 1..22: mol_type = other DNA
aaggcacaaagacagtctatct

SEQ ID NO: 49644 - DNA, 22 bp, synthetic construct
  misc_feature 1..22: note = chemically synthesized
  source 1..22: mol_type = other DNA
tctcactggtggtctattaata

SEQ ID NO: 49645 - DNA, 22 bp, synthetic construct
  misc_feature 1..22: note = chemically synthesized
  source 1..22: mol_type = other DNA
actggtggtctattaatagttt

SEQ ID NO: 49646 - DNA, 22 bp, synthetic construct
  misc_feature 1..22: note = chemically synthesized
  source 1..22: mol_type = other DNA
gtggtctattaatagtttgaag

SEQ ID NO: 49647 - DNA, 22 bp, synthetic construct
  misc_feature 1..22: note = chemically synthesized
  source 1..22: mol_type = other DNA
ttaatagtttgaagttttgagc

SEQ ID NO: 49648 - DNA, 22 bp, synthetic construct
  misc_feature 1..22: note = chemically synthesized
  source 1..22: mol_type = other DNA
atagtttgaagttttgagcgtc

SEQ ID NO: 49649 - DNA, 22 bp, synthetic construct
  misc_feature 1..22: note = chemically synthesized
  source 1..22: mol_type = other DNA
gaagttttgagcgtcagaaggt

SEQ ID NO: 49650 - DNA, 22 bp, synthetic construct
  misc_feature 1..22: note = chemically synthesized
  source 1..22: mol_type = other DNA
aagttttgagcgtcagaaggtg

SEQ ID NO: 49651 - DNA, 22 bp, synthetic construct
  misc_feature 1..22: note = chemically synthesized
  source 1..22: mol_type = other DNA
tgagcgtcagaaggtggttgtt

SEQ ID NO: 49652 - DNA, 22 bp, synthetic construct
  misc_feature 1..22: note = chemically synthesized
  source 1..22: mol_type = other DNA
gagcgtcagaaggtggttgttg

SEQ ID NO: 49653 - DNA, 22 bp, synthetic construct
  misc_feature 1..22: note = chemically synthesized
  source 1..22: mol_type = other DNA
agcgtcagaaggtggttgttgc

SEQ ID NO: 49654 - DNA, 22 bp, synthetic construct
  misc_feature 1..22: note = chemically synthesized
  source 1..22: mol_type = other DNA
ttgctttttggtttttgggttt

SEQ ID NO: 49655 - DNA, 22 bp, synthetic construct
  misc_feature 1..22: note = chemically synthesized
  source 1..22: mol_type = other DNA
ctttttggtttttgggtttttt

SEQ ID NO: 49656 - DNA, 22 bp, synthetic construct
  misc_feature 1..22: note = chemically synthesized
  source 1..22: mol_type = other DNA
tttggtttttgggttttttttt

SEQ ID NO: 49657 - DNA, 22 bp, synthetic construct
  misc_feature 1..22: note = chemically synthesized
  source 1..22: mol_type = other DNA
ttggtttttgggtttttttttt

SEQ ID NO: 49658 - DNA, 22 bp, synthetic construct
  misc_feature 1..22: note = chemically synthesized
  source 1..22: mol_type = other DNA
tggtttttgggttttttttttt

SEQ ID NO: 49659 - DNA, 22 bp, synthetic construct
  misc_feature 1..22: note = chemically synthesized
  source 1..22: mol_type = other DNA
ggtttttgggtttttttttttt

SEQ ID NO: 49660 - DNA, 22 bp, synthetic construct
  misc_feature 1..22: note = chemically synthesized
  source 1..22: mol_type = other DNA
gtttttgggttttttttttttt

SEQ ID NO: 49661 - DNA, 22 bp, synthetic construct
  misc_feature 1..22: note = chemically synthesized
  source 1..22: mol_type = other DNA
ttgggtttttttttttttcctt

SEQ ID NO: 49662 - DNA, 22 bp, synthetic construct
  misc_feature 1..22: note = chemically synthesized
  source 1..22: mol_type = other DNA
tgggtttttttttttttccttt

SEQ ID NO: 49663 - DNA, 22 bp, synthetic construct
  misc_feature 1..22: note = chemically synthesized
  source 1..22: mol_type = other DNA
gggtttttttttttttcctttt

SEQ ID NO: 49664 - DNA, 22 bp, synthetic construct
  misc_feature 1..22: note = chemically synthesized
  source 1..22: mol_type = other DNA
ggtttttttttttttcctttta

SEQ ID NO: 49665 - DNA, 22 bp, synthetic construct
  misc_feature 1..22: note = chemically synthesized
  source 1..22: mol_type = other DNA
ttttttttttccttttaaaact

SEQ ID NO: 49666 - DNA, 22 bp, synthetic construct
  misc_feature 1..22: note = chemically synthesized
  source 1..22: mol_type = other DNA
tttttttttccttttaaaacta

SEQ ID NO: 49667 - DNA, 22 bp, synthetic construct
  misc_feature 1..22: note = chemically synthesized
  source 1..22: mol_type = other DNA
ttttttttccttttaaaactat

SEQ ID NO: 49668 - DNA, 22 bp, synthetic construct
  misc_feature 1..22: note = chemically synthesized
  source 1..22: mol_type = other DNA
tttttttccttttaaaactatt

SEQ ID NO: 49669 - DNA, 22 bp, synthetic construct
  misc_feature 1..22: note = chemically synthesized
  source 1..22: mol_type = other DNA
ttttttccttttaaaactattc

SEQ ID NO: 49670 - DNA, 22 bp, synthetic construct
  misc_feature 1..22: note = chemically synthesized
  source 1..22: mol_type = other DNA
tttttccttttaaaactattct

SEQ ID NO: 49671 - DNA, 22 bp, synthetic construct
  misc_feature 1..22: note = chemically synthesized
  source 1..22: mol_type = other DNA
ttttccttttaaaactattctg

SEQ ID NO: 49672 - DNA, 22 bp, synthetic construct
  misc_feature 1..22: note = chemically synthesized
  source 1..22: mol_type = other DNA
tttccttttaaaactattctgt

SEQ ID NO: 49673 - DNA, 22 bp, synthetic construct
  misc_feature 1..22: note = chemically synthesized
  source 1..22: mol_type = other DNA
ttccttttaaaactattctgtc

SEQ ID NO: 49674 - DNA, 22 bp, synthetic construct
  misc_feature 1..22: note = chemically synthesized
  source 1..22: mol_type = other DNA
tccttttaaaactattctgtca

SEQ ID NO: 49675 - DNA, 22 bp, synthetic construct
  misc_feature 1..22: note = chemically synthesized
  source 1..22: mol_type = other DNA
ccttttaaaactattctgtcat

SEQ ID NO: 49676 - DNA, 22 bp, synthetic construct
  misc_feature 1..22: note = chemically synthesized
  source 1..22: mol_type = other DNA
cttttaaaactattctgtcatt

SEQ ID NO: 49677 - DNA, 22 bp, synthetic construct
  misc_feature 1..22: note = chemically synthesized
  source 1..22: mol_type = other DNA
ttaaaactattctgtcatttcc

SEQ ID NO: 49678 - DNA, 22 bp, synthetic construct
  misc_feature 1..22: note = chemically synthesized
  source 1..22: mol_type = other DNA
taaaactattctgtcatttcca

SEQ ID NO: 49679 - DNA, 22 bp, synthetic construct
  misc_feature 1..22: note = chemically synthesized
  source 1..22: mol_type = other DNA
aaaactattctgtcatttccag

SEQ ID NO: 49680 - DNA, 22 bp, synthetic construct
  misc_feature 1..22: note = chemically synthesized
  source 1..22: mol_type = other DNA
aaactattctgtcatttccagt

SEQ ID NO: 49681 - DNA, 22 bp, synthetic construct
  misc_feature 1..22: note = chemically synthesized
  source 1..22: mol_type = other DNA
ttctgtcatttccagtttttta

SEQ ID NO: 49682 - DNA, 22 bp, synthetic construct
  misc_feature 1..22: note = chemically synthesized
  source 1..22: mol_type = other DNA
tgtcatttccagttttttaaaa

SEQ ID NO: 49683 - DNA, 22 bp, synthetic construct
  misc_feature 1..22: note = chemically synthesized
  source 1..22: mol_type = other DNA
tcatttccagttttttaaaaag

SEQ ID NO: 49684 - DNA, 22 bp, synthetic construct
  misc_feature 1..22: note = chemically synthesized
  source 1..22: mol_type = other DNA
ccagttttttaaaaaggttttg

SEQ ID NO: 49685 - DNA, 22 bp, synthetic construct
  misc_feature 1..22: note = chemically synthesized
  source 1..22: mol_type = other DNA
cagttttttaaaaaggttttgt

SEQ ID NO: 49686 - DNA, 22 bp, synthetic construct
  misc_feature 1..22: note = chemically synthesized
  source 1..22: mol_type = other DNA
tttaaaaaggttttgttttgtt

SEQ ID NO: 49687 - DNA, 22 bp, synthetic construct
  misc_feature 1..22: note = chemically synthesized
  source 1..22: mol_type = other DNA
ttaaaaaggttttgttttgttt

SEQ ID NO: 49688 - DNA, 22 bp, synthetic construct
  misc_feature 1..22: note = chemically synthesized
  source 1..22: mol_type = other DNA
taaaaaggttttgttttgtttt

SEQ ID NO: 49689 - DNA, 22 bp, synthetic construct
  misc_feature 1..22: note = chemically synthesized
  source 1..22: mol_type = other DNA
aaaaaggttttgttttgttttg

SEQ ID NO: 49690 - DNA, 22 bp, synthetic construct
  misc_feature 1..22: note = chemically synthesized
  source 1..22: mol_type = other DNA
aaaaggttttgttttgttttgc

SEQ ID NO: 49691 - DNA, 22 bp, synthetic construct
  misc_feature 1..22: note = chemically synthesized
  source 1..22: mol_type = other DNA
tgttttgttttgctttgttttt

SEQ ID NO: 49692 - DNA, 22 bp, synthetic construct
  misc_feature 1..22: note = chemically synthesized
  source 1..22: mol_type = other DNA
gttttgttttgctttgtttttt

SEQ ID NO: 49693 - DNA, 22 bp, synthetic construct
  misc_feature 1..22: note = chemically synthesized
  source 1..22: mol_type = other DNA
ttttgttttgctttgttttttg

SEQ ID NO: 49694 - DNA, 22 bp, synthetic construct
  misc_feature 1..22: note = chemically synthesized
  source 1..22: mol_type = other DNA
tgttttgctttgttttttgttt

SEQ ID NO: 49695 - DNA, 22 bp, synthetic construct
  misc_feature 1..22: note = chemically synthesized
  source 1..22: mol_type = other DNA
gttttgctttgttttttgtttt

SEQ ID NO: 49696 - DNA, 22 bp, synthetic construct
  misc_feature 1..22: note = chemically synthesized
  source 1..22: mol_type = other DNA
ttttgctttgttttttgttttt

SEQ ID NO: 49697 - DNA, 22 bp, synthetic construct
  misc_feature 1..22: note = chemically synthesized
  source 1..22: mol_type = other DNA
tgctttgttttttgtttttttg

SEQ ID NO: 49698 - DNA, 22 bp, synthetic construct
  misc_feature 1..22: note = chemically synthesized
  source 1..22: mol_type = other DNA
gctttgttttttgtttttttgt

SEQ ID NO: 49699 - DNA, 22 bp, synthetic construct
  misc_feature 1..22: note = chemically synthesized
  source 1..22: mol_type = other DNA
ctttgttttttgtttttttgtt

SEQ ID NO: 49700 - DNA, 22 bp, synthetic construct
  misc_feature 1..22: note = chemically synthesized
  source 1..22: mol_type = other DNA
tgttttttgtttttttgttttt

SEQ ID NO: 49701 - DNA, 22 bp, synthetic construct
  misc_feature 1..22: note = chemically synthesized
  source 1..22: mol_type = other DNA
gttttttgtttttttgtttttc

SEQ ID NO: 49702 - DNA, 22 bp, synthetic construct
  misc_feature 1..22: note = chemically synthesized
  source 1..22: mol_type = other DNA
ttttttgtttttttgtttttct

SEQ ID NO: 49703 - DNA, 22 bp, synthetic construct
  misc_feature 1..22: note = chemically synthesized
  source 1..22: mol_type = other DNA
tttgtttttttgtttttctttt

SEQ ID NO: 49704 - DNA, 22 bp, synthetic construct
  misc_feature 1..22: note = chemically synthesized
  source 1..22: mol_type = other DNA
ttgtttttttgtttttcttttt

SEQ ID NO: 49705 - DNA, 22 bp, synthetic construct
  misc_feature 1..22: note = chemically synthesized
  source 1..22: mol_type = other DNA
tgtttttttgtttttctttttt

SEQ ID NO: 49706 - DNA, 22 bp, synthetic construct
  misc_feature 1..22: note = chemically synthesized
  source 1..22: mol_type = other DNA
gtttttttgtttttcttttttt

SEQ ID NO: 49707 - DNA, 22 bp, synthetic construct
  misc_feature 1..22: note = chemically synthesized
  source 1..22: mol_type = other DNA
tttttttgtttttctttttttg

SEQ ID NO: 49708 - DNA, 22 bp, synthetic construct
  misc_feature 1..22: note = chemically synthesized
  source 1..22: mol_type = other DNA
ttttgtttttctttttttggtg

SEQ ID NO: 49709 - DNA, 22 bp, synthetic construct
  misc_feature 1..22: note = chemically synthesized
  source 1..22: mol_type = other DNA
tttgtttttctttttttggtgg

SEQ ID NO: 49710 - DNA, 22 bp, synthetic construct
  misc_feature 1..22: note = chemically synthesized
  source 1..22: mol_type = other DNA
ttgtttttctttttttggtggt

SEQ ID NO: 49711 - DNA, 22 bp, synthetic construct
  misc_feature 1..22: note = chemically synthesized
  source 1..22: mol_type = other DNA
tgtttttctttttttggtggtg

SEQ ID NO: 49712 - DNA, 22 bp, synthetic construct
  misc_feature 1..22: note = chemically synthesized
  source 1..22: mol_type = other DNA
gtttttctttttttggtggtgg

SEQ ID NO: 49713 - DNA, 22 bp, synthetic construct
  misc_feature 1..22: note = chemically synthesized
  source 1..22: mol_type = other DNA
tttttctttttttggtggtggt

SEQ ID NO: 49714 - DNA, 22 bp, synthetic construct
  misc_feature 1..22: note = chemically synthesized
  source 1..22: mol_type = other DNA
ttctttttttggtggtggtggc

SEQ ID NO: 49715 - DNA, 22 bp, synthetic construct
  misc_feature 1..22: note = chemically synthesized
  source 1..22: mol_type = other DNA
tctttttttggtggtggtggcg

SEQ ID NO: 49716 - DNA, 22 bp, synthetic construct
  misc_feature 1..22: note = chemically synthesized
  source 1..22: mol_type = other DNA
ctttttttggtggtggtggcgt

SEQ ID NO: 49717 - DNA, 22 bp, synthetic construct
  misc_feature 1..22: note = chemically synthesized
  source 1..22: mol_type = other DNA
tttttttggtggtggtggcgtt

SEQ ID NO: 49718 - DNA, 22 bp, synthetic construct
  misc_feature 1..22: note = chemically synthesized
  source 1..22: mol_type = other DNA
tttttggtggtggtggcgttaa

SEQ ID NO: 49719 - DNA, 22 bp, synthetic construct
  misc_feature 1..22: note = chemically synthesized
  source 1..22: mol_type = other DNA
ttttggtggtggtggcgttaat

SEQ ID NO: 49720 - DNA, 22 bp, synthetic construct
  misc_feature 1..22: note = chemically synthesized
  source 1..22: mol_type = other DNA
tttggtggtggtggcgttaatg

SEQ ID NO: 49721 - DNA, 22 bp, synthetic construct
  misc_feature 1..22: note = chemically synthesized
  source 1..22: mol_type = other DNA
ttggtggtggtggcgttaatgt

SEQ ID NO: 49722 - DNA, 22 bp, synthetic construct
  misc_feature 1..22: note = chemically synthesized
  source 1..22: mol_type = other DNA
tggtggtggtggcgttaatgtt

SEQ ID NO: 49723 - DNA, 22 bp, synthetic construct
  misc_feature 1..22: note = chemically synthesized
  source 1..22: mol_type = other DNA
ggtggtggtggcgttaatgttt

SEQ ID NO: 49724 - DNA, 22 bp, synthetic construct
  misc_feature 1..22: note = chemically synthesized
  source 1..22: mol_type = other DNA
gtggtggtggcgttaatgtttc

SEQ ID NO: 49725 - DNA, 22 bp, synthetic construct
  misc_feature 1..22: note = chemically synthesized
  source 1..22: mol_type = other DNA
atgtttcttcagaaagacagct

SEQ ID NO: 49726 - DNA, 22 bp, synthetic construct
  misc_feature 1..22: note = chemically synthesized
  source 1..22: mol_type = other DNA
cttcagaaagacagcttctggg

SEQ ID NO: 49727 - DNA, 22 bp, synthetic construct
  misc_feature 1..22: note = chemically synthesized
  source 1..22: mol_type = other DNA
ttcagaaagacagcttctgggc

SEQ ID NO: 49728 - DNA, 22 bp, synthetic construct
  misc_feature 1..22: note = chemically synthesized
  source 1..22: mol_type = other DNA
cagaaagacagcttctgggcca

SEQ ID NO: 49729 - DNA, 22 bp, synthetic construct
  misc_feature 1..22: note = chemically synthesized
  source 1..22: mol_type = other DNA
agaaagacagcttctgggccac

SEQ ID NO: 49730 - DNA, 22 bp, synthetic construct
  misc_feature 1..22: note = chemically synthesized
  source 1..22: mol_type = other DNA
ctgggccactctgggtattatg

SEQ ID NO: 49731 - DNA, 22 bp, synthetic construct
  misc_feature 1..22: note = chemically synthesized
  source 1..22: mol_type = other DNA
tgggccactctgggtattatga

SEQ ID NO: 49732 - DNA, 22 bp, synthetic construct
  misc_feature 1..22: note = chemically synthesized
  source 1..22: mol_type = other DNA
ggccactctgggtattatgatt

SEQ ID NO: 49733 - DNA, 22 bp, synthetic construct
  misc_feature 1..22: note = chemically synthesized
  source 1..22: mol_type = other DNA
tgggtattatgatttggtttcc

SEQ ID NO: 49734 - DNA, 22 bp, synthetic construct
  misc_feature 1..22: note = chemically synthesized
  source 1..22: mol_type = other DNA
ggtattatgatttggtttcccc

SEQ ID NO: 49735 - DNA, 22 bp, synthetic construct
  misc_feature 1..22: note = chemically synthesized
  source 1..22: mol_type = other DNA
tgatttggtttcccccttacaa

SEQ ID NO: 49736 - DNA, 22 bp, synthetic construct
  misc_feature 1..22: note = chemically synthesized
  source 1..22: mol_type = other DNA
ggtttcccccttacaatagtta

SEQ ID NO: 49737 - DNA, 22 bp, synthetic construct
  misc_feature 1..22: note = chemically synthesized
  source 1..22: mol_type = other DNA
gtttcccccttacaatagttac

SEQ ID NO: 49738 - DNA, 22 bp, synthetic construct
  misc_feature 1..22: note = chemically synthesized
  source 1..22: mol_type = other DNA
cccccttacaatagttactctc

SEQ ID NO: 49739 - DNA, 22 bp, synthetic construct
  misc_feature 1..22: note = chemically synthesized
  source 1..22: mol_type = other DNA
ccccttacaatagttactctct

SEQ ID NO: 49740 - DNA, 22 bp, synthetic construct
  misc_feature 1..22: note = chemically synthesized
  source 1..22: mol_type = other DNA
acaatagttactctctgcctgg

SEQ ID NO: 49741 - DNA, 22 bp, synthetic construct
  misc_feature 1..22: note = chemically synthesized
  source 1..22: mol_type = other DNA
caatagttactctctgcctggt

SEQ ID NO: 49742 - DNA, 22 bp, synthetic construct
  misc_feature 1..22: note = chemically synthesized
  source 1..22: mol_type = other DNA
ctctctgcctggtttactgatt

SEQ ID NO: 49743 - DNA, 22 bp, synthetic construct
  misc_feature 1..22: note = chemically synthesized
  source 1..22: mol_type = other DNA
tctgcctggtttactgatttac

SEQ ID NO: 49744 - DNA, 22 bp, synthetic construct
  misc_feature 1..22: note = chemically synthesized
  source 1..22: mol_type = other DNA
tgcctggtttactgatttacag

SEQ ID NO: 49745 - DNA, 22 bp, synthetic construct
  misc_feature 1..22: note = chemically synthesized
  source 1..22: mol_type = other DNA
cctggtttactgatttacagaa

SEQ ID NO: 49746 - DNA, 22 bp, synthetic construct
  misc_feature 1..22: note = chemically synthesized
  source 1..22: mol_type = other DNA
gtttactgatttacagaacctt

SEQ ID NO: 49747 - DNA, 22 bp, synthetic construct
  misc_feature 1..22: note = chemically synthesized
  source 1..22: mol_type = other DNA
actgatttacagaaccttggta

SEQ ID NO: 49748 - DNA, 22 bp, synthetic construct
  misc_feature 1..22: note = chemically synthesized
  source 1..22: mol_type = other DNA
ctgatttacagaaccttggtat

SEQ ID NO: 49749 - DNA, 22 bp, synthetic construct
  misc_feature 1..22: note = chemically synthesized
  source 1..22: mol_type = other DNA
atttacagaaccttggtatgtg

SEQ ID NO: 49750 - DNA, 22 bp, synthetic construct
  misc_feature 1..22: note = chemically synthesized
  source 1..22: mol_type = other DNA
acagaaccttggtatgtgaatg

SEQ ID NO: 49751 - DNA, 22 bp, synthetic construct
  misc_feature 1..22: note = chemically synthesized
  source 1..22: mol_type = other DNA
cagaaccttggtatgtgaatgg

SEQ ID NO: 49752 - DNA, 22 bp, synthetic construct
  misc_feature 1..22: note = chemically synthesized
  source 1..22: mol_type = other DNA
ggtatgtgaatggcgaaaaaga

SEQ ID NO: 49753 - DNA, 22 bp, synthetic construct
  misc_feature 1..22: note = chemically synthesized
  source 1..22: mol_type = other DNA
gtatgtgaatggcgaaaaagaa

SEQ ID NO: 49754 - DNA, 22 bp, synthetic construct
  misc_feature 1..22: note = chemically synthesized
  source 1..22: mol_type = other DNA
cttggcataaggatatgtttgc

SEQ ID NO: 49755 - DNA, 22 bp, synthetic construct
  misc_feature 1..22: note = chemically synthesized
  source 1..22: mol_type = other DNA
ggcataaggatatgtttgctga

SEQ ID NO: 49756 - DNA, 22 bp, synthetic construct
  misc_feature 1..22: note = chemically synthesized
  source 1..22: mol_type = other DNA
gcataaggatatgtttgctgat

SEQ ID NO: 49757 - DNA, 22 bp, synthetic construct
  misc_feature 1..22: note = chemically synthesized
  source 1..22: mol_type = other DNA
gctgatcaaatttcagatcatg

SEQ ID NO: 49758 - DNA, 22 bp, synthetic construct
  misc_feature 1..22: note = chemically synthesized
  source 1..22: mol_type = other DNA
ctgatcaaatttcagatcatgt

SEQ ID NO: 49759 - DNA, 22 bp, synthetic construct
  misc_feature 1..22: note = chemically synthesized
  source 1..22: mol_type = other DNA
atcaaatttcagatcatgtgtt

SEQ ID NO: 49760 - DNA, 22 bp, synthetic construct
  misc_feature 1..22: note = chemically synthesized
  source 1..22: mol_type = other DNA
cagatcatgtgttgttcattat

SEQ ID NO: 49761 - DNA, 22 bp, synthetic construct
  misc_feature 1..22: note = chemically synthesized
  source 1..22: mol_type = other DNA
agatcatgtgttgttcattatt

SEQ ID NO: 49762 - DNA, 22 bp, synthetic construct
  misc_feature 1..22: note = chemically synthesized
  source 1..22: mol_type = other DNA
ttcattattatgactttacttg

SEQ ID NO: 49763 - DNA, 22 bp, synthetic construct
  misc_feature 1..22: note = chemically synthesized
  source 1..22: mol_type = other DNA
attattatgactttacttgaaa

SEQ ID NO: 49764 - DNA, 22 bp, synthetic construct
  misc_feature 1..22: note = chemically synthesized
  source 1..22: mol_type = other DNA
ttatgactttacttgaaaaaca

SEQ ID NO: 49765 - DNA, 22 bp, synthetic construct
  misc_feature 1..22: note = chemically synthesized
  source 1..22: mol_type = other DNA
tgactttacttgaaaaacagtt

SEQ ID NO: 49766 - DNA, 22 bp, synthetic construct
  misc_feature 1..22: note = chemically synthesized
  source 1..22: mol_type = other DNA
tacttgaaaaacagtttgccac

SEQ ID NO: 49767 - DNA, 22 bp, synthetic construct
  misc_feature 1..22: note = chemically synthesized
  source 1..22: mol_type = other DNA
acttgaaaaacagtttgccaca

SEQ ID NO: 49768 - DNA, 22 bp, synthetic construct
  misc_feature 1..22: note = chemically synthesized
  source 1..22: mol_type = other DNA
cttgaaaaacagtttgccacag

SEQ ID NO: 49769 - DNA, 22 bp, synthetic construct
  misc_feature 1..22: note = chemically synthesized
  source 1..22: mol_type = other DNA
gaaaaacagtttgccacagtga

SEQ ID NO: 49770 - DNA, 22 bp, synthetic construct
  misc_feature 1..22: note = chemically synthesized
  source 1..22: mol_type = other DNA
aaaaacagtttgccacagtgag

SEQ ID NO: 49771 - DNA, 22 bp, synthetic construct
  misc_feature 1..22: note = chemically synthesized
  source 1..22: mol_type = other DNA
gccacagtgagatggattcact

SEQ ID NO: 49772 - DNA, 22 bp, synthetic construct
  misc_feature 1..22: note = chemically synthesized
  source 1..22: mol_type = other DNA
ccacagtgagatggattcactt

SEQ ID NO: 49773 - DNA, 22 bp, synthetic construct
  misc_feature 1..22: note = chemically synthesized
  source 1..22: mol_type = other DNA
acttatatgctttctacccctc

SEQ ID NO: 49774 - DNA, 22 bp, synthetic construct
  misc_feature 1..22: note = chemically synthesized
  source 1..22: mol_type = other DNA
atatgctttctacccctccact

SEQ ID NO: 49775 - DNA, 22 bp, synthetic construct
  misc_feature 1..22: note = chemically synthesized
  source 1..22: mol_type = other DNA
tatgctttctacccctccactc

SEQ ID NO: 49776 - DNA, 22 bp, synthetic construct
  misc_feature 1..22: note = chemically synthesized
  source 1..22: mol_type = other DNA
tctacccctccactccctttaa

SEQ ID NO: 49777 - DNA, 22 bp, synthetic construct
  misc_feature 1..22: note = chemically synthesized
  source 1..22: mol_type = other DNA
ctacccctccactccctttaag

SEQ ID NO: 49778 - DNA, 22 bp, synthetic construct
  misc_feature 1..22: note = chemically synthesized
  source 1..22: mol_type = other DNA
tacccctccactccctttaagt

SEQ ID NO: 49779 - DNA, 22 bp, synthetic construct
  misc_feature 1..22: note = chemically synthesized
  source 1..22: mol_type = other DNA
cccctccactccctttaagtac

SEQ ID NO: 49780 - DNA, 22 bp, synthetic construct
  misc_feature 1..22: note = chemically synthesized
  source 1..22: mol_type = other DNA
cactccctttaagtacttcgaa

SEQ ID NO: 49781 - DNA, 22 bp, synthetic construct
  misc_feature 1..22: note = chemically synthesized
  source 1..22: mol_type = other DNA
cctttaagtacttcgaaaaaca

SEQ ID NO: 49782 - DNA, 22 bp, synthetic construct
  misc_feature 1..22: note = chemically synthesized
  source 1..22: mol_type = other DNA
taagtacttcgaaaaacagtac

SEQ ID NO: 49783 - DNA, 22 bp, synthetic construct
  misc_feature 1..22: note = chemically synthesized
  source 1..22: mol_type = other DNA
aagtacttcgaaaaacagtaca

SEQ ID NO: 49784 - DNA, 22 bp, synthetic construct
  misc_feature 1..22: note = chemically synthesized
  source 1..22: mol_type = other DNA
agtacttcgaaaaacagtacaa

SEQ ID NO: 49785 - DNA, 22 bp, synthetic construct
  misc_feature 1..22: note = chemically synthesized
  source 1..22: mol_type = other DNA
cgaaaaacagtacaattttttt

SEQ ID NO: 49786 - DNA, 22 bp, synthetic construct
  misc_feature 1..22: note = chemically synthesized
  source 1..22: mol_type = other DNA
gaaaaacagtacaattttttta

SEQ ID NO: 49787 - DNA, 22 bp, synthetic construct
  misc_feature 1..22: note = chemically synthesized
  source 1..22: mol_type = other DNA
ttttaaaggtagatttaaagca

SEQ ID NO: 49788 - DNA, 22 bp, synthetic construct
  misc_feature 1..22: note = chemically synthesized
  source 1..22: mol_type = other DNA
tttaaaggtagatttaaagcat

SEQ ID NO: 49789 - DNA, 22 bp, synthetic construct
  misc_feature 1..22: note = chemically synthesized
  source 1..22: mol_type = other DNA
ttaaaggtagatttaaagcatt

SEQ ID NO: 49790 - DNA, 22 bp, synthetic construct
  misc_feature 1..22: note = chemically synthesized
  source 1..22: mol_type = other DNA
taaaggtagatttaaagcatta

SEQ ID NO: 49791 - DNA, 22 bp, synthetic construct
  misc_feature 1..22: note = chemically synthesized
  source 1..22: mol_type = other DNA
aaaggtagatttaaagcattaa

SEQ ID NO: 49792 - DNA, 22 bp, synthetic construct
  misc_feature 1..22: note = chemically synthesized
  source 1..22: mol_type = other DNA
aaggtagatttaaagcattaac

SEQ ID NO: 49793 - DNA, 22 bp, synthetic construct
  misc_feature 1..22: note = chemically synthesized
  source 1..22: mol_type = other DNA
aaagcattaactggtttggatt

SEQ ID NO: 49794 - DNA, 22 bp, synthetic construct
  misc_feature 1..22: note = chemically synthesized
  source 1..22: mol_type = other DNA
aagcattaactggtttggatta

SEQ ID NO: 49795 - DNA, 22 bp, synthetic construct
  misc_feature 1..22: note = chemically synthesized
  source 1..22: mol_type = other DNA
actggtttggattaaaacaatg

SEQ ID NO: 49796 - DNA, 22 bp, synthetic construct
  misc_feature 1..22: note = chemically synthesized
  source 1..22: mol_type = other DNA
gtttggattaaaacaatgtttc

SEQ ID NO: 49797 - DNA, 22 bp, synthetic construct
  misc_feature 1..22: note = chemically synthesized
  source 1..22: mol_type = other DNA
ggattaaaacaatgtttcacca

SEQ ID NO: 49798 - DNA, 22 bp, synthetic construct
  misc_feature 1..22: note = chemically synthesized
  source 1..22: mol_type = other DNA
gattaaaacaatgtttcaccat

SEQ ID NO: 49799 - DNA, 22 bp, synthetic construct
  misc_feature 1..22: note = chemically synthesized
  source 1..22: mol_type = other DNA
aaacaatgtttcaccatctgta

SEQ ID NO: 49800 - DNA, 22 bp, synthetic construct
  misc_feature 1..22: note = chemically synthesized
  source 1..22: mol_type = other DNA
caccatctgtaaattccctgaa

SEQ ID NO: 49801 - DNA, 22 bp, synthetic construct
  misc_feature 1..22: note = chemically synthesized
  source 1..22: mol_type = other DNA
accatctgtaaattccctgaaa

SEQ ID NO: 49802 - DNA, 22 bp, synthetic construct
  misc_feature 1..22: note = chemically synthesized
  source 1..22: mol_type = other DNA
taaattccctgaaaatacattt

SEQ ID NO: 49803 - DNA, 22 bp, synthetic construct
  misc_feature 1..22: note = chemically synthesized
  source 1..22: mol_type = other DNA
cctgaaaatacattttcaaaag

SEQ ID NO: 49804 - DNA, 22 bp, synthetic construct
  misc_feature 1..22: note = chemically synthesized
  source 1..22: mol_type = other DNA
aaaatacattttcaaaagactt

SEQ ID NO: 49805 - DNA, 22 bp, synthetic construct
  misc_feature 1..22: note = chemically synthesized
  source 1..22: mol_type = other DNA
tcaaaagacttatgcaaagcca

SEQ ID NO: 49806 - DNA, 22 bp, synthetic construct
  misc_feature 1..22: note = chemically synthesized
  source 1..22: mol_type = other DNA
caaaagacttatgcaaagccac

SEQ ID NO: 49807 - DNA, 22 bp, synthetic construct
  misc_feature 1..22: note = chemically synthesized
  source 1..22: mol_type = other DNA
aaaagacttatgcaaagccaca

SEQ ID NO: 49808 - DNA, 22 bp, synthetic construct
  misc_feature 1..22: note = chemically synthesized
  source 1..22: mol_type = other DNA
atgcaaagccacatgattttga

SEQ ID NO: 49809 - DNA, 22 bp, synthetic construct
  misc_feature 1..22: note = chemically synthesized
  source 1..22: mol_type = other DNA
tgcaaagccacatgattttgaa

SEQ ID NO: 49810 - DNA, 22 bp, synthetic construct
  misc_feature 1..22: note = chemically synthesized
  source 1..22: mol_type = other DNA
tgaaggagctaatgagattgtc

SEQ ID NO: 49811 - DNA, 22 bp, synthetic construct
  misc_feature 1..22: note = chemically synthesized
  source 1..22: mol_type = other DNA
gaaggagctaatgagattgtcc

SEQ ID NO: 49812 - DNA, 22 bp, synthetic construct
  misc_feature 1..22: note = chemically synthesized
  source 1..22: mol_type = other DNA
aaggagctaatgagattgtccc

SEQ ID NO: 49813 - DNA, 22 bp, synthetic construct
  misc_feature 1..22: note = chemically synthesized
  source 1..22: mol_type = other DNA
atgagattgtcccaccaccaaa

SEQ ID NO: 49814 - DNA, 22 bp, synthetic construct
  misc_feature 1..22: note = chemically synthesized
  source 1..22: mol_type = other DNA
tcccaccaccaaaatttaatgg

SEQ ID NO: 49815 - DNA, 22 bp, synthetic construct
  misc_feature 1..22: note = chemically synthesized
  source 1..22: mol_type = other DNA
aatggtgacttaagaaattcta

SEQ ID NO: 49816 - DNA, 22 bp, synthetic construct
  misc_feature 1..22: note = chemically synthesized
  source 1..22: mol_type = other DNA
atggtgacttaagaaattctaa

SEQ ID NO: 49817 - DNA, 22 bp, synthetic construct
  misc_feature 1..22: note = chemically synthesized
  source 1..22: mol_type = other DNA
aagaaattctaatactttttat

SEQ ID NO: 49818 - DNA, 22 bp, synthetic construct
  misc_feature 1..22: note = chemically synthesized
  source 1..22: mol_type = other DNA
agaaattctaatactttttatt

SEQ ID NO: 49819 - DNA, 22 bp, synthetic construct
  misc_feature 1..22: note = chemically synthesized
  source 1..22: mol_type = other DNA
taatactttttatttacttcct

SEQ ID NO: 49820 - DNA, 22 bp, synthetic construct
  misc_feature 1..22: note = chemically synthesized
  source 1..22: mol_type = other DNA
atactttttatttacttcctgt

SEQ ID NO: 49821 - DNA, 22 bp, synthetic construct
  misc_feature 1..22: note = chemically synthesized
  source 1..22: mol_type = other DNA
tttatttacttcctgtagaatt

SEQ ID NO: 49822 - DNA, 22 bp, synthetic construct
  misc_feature 1..22: note = chemically synthesized
  source 1..22: mol_type = other DNA
ttatttacttcctgtagaatta

SEQ ID NO: 49823 - DNA, 22 bp, synthetic construct
  misc_feature 1..22: note = chemically synthesized
  source 1..22: mol_type = other DNA
tatttacttcctgtagaattat

SEQ ID NO: 49824 - DNA, 22 bp, synthetic construct
  misc_feature 1..22: note = chemically synthesized
  source 1..22: mol_type = other DNA
atttacttcctgtagaattatt

SEQ ID NO: 49825 - DNA, 22 bp, synthetic construct
  misc_feature 1..22: note = chemically synthesized
  source 1..22: mol_type = other DNA
tttacttcctgtagaattattt

SEQ ID NO: 49826 - DNA, 22 bp, synthetic construct
  misc_feature 1..22: note = chemically synthesized
  source 1..22: mol_type = other DNA
acttcctgtagaattatttgtg

SEQ ID NO: 49827 - DNA, 22 bp, synthetic construct
  misc_feature 1..22: note = chemically synthesized
  source 1..22: mol_type = other DNA
cttcctgtagaattatttgtgt

SEQ ID NO: 49828 - DNA, 22 bp, synthetic construct
  misc_feature 1..22: note = chemically synthesized
  source 1..22: mol_type = other DNA
cctgtagaattatttgtgtact

SEQ ID NO: 49829 - DNA, 22 bp, synthetic construct
  misc_feature 1..22: note = chemically synthesized
  source 1..22: mol_type = other DNA
ctgtagaattatttgtgtactt

SEQ ID NO: 49830 - DNA, 22 bp, synthetic construct
  misc_feature 1..22: note = chemically synthesized
  source 1..22: mol_type = other DNA
tagaattatttgtgtacttgac

SEQ ID NO: 49831 - DNA, 22 bp, synthetic construct
  misc_feature 1..22: note = chemically synthesized
  source 1..22: mol_type = other DNA
tttgtgtacttgacatttatac

SEQ ID NO: 49832 - DNA, 22 bp, synthetic construct
  misc_feature 1..22: note = chemically synthesized
  source 1..22: mol_type = other DNA
gtgtacttgacatttatacagt

SEQ ID NO: 49833 - DNA, 22 bp, synthetic construct
  misc_feature 1..22: note = chemically synthesized
  source 1..22: mol_type = other DNA
tgtacttgacatttatacagtt

SEQ ID NO: 49834 - DNA, 22 bp, synthetic construct
  misc_feature 1..22: note = chemically synthesized
  source 1..22: mol_type = other DNA
gacatttatacagtttctccat

SEQ ID NO: 49835 - DNA, 22 bp, synthetic construct
  misc_feature 1..22: note = chemically synthesized
  source 1..22: mol_type = other DNA
acatttatacagtttctccatt

SEQ ID NO: 49836 - DNA, 22 bp, synthetic construct
  misc_feature 1..22: note = chemically synthesized
  source 1..22: mol_type = other DNA
atacagtttctccattatataa

SEQ ID NO: 49837 - DNA, 22 bp, synthetic construct
  misc_feature 1..22: note = chemically synthesized
  source 1..22: mol_type = other DNA
tacagtttctccattatataac

SEQ ID NO: 49838 - DNA, 22 bp, synthetic construct
  misc_feature 1..22: note = chemically synthesized
  source 1..22: mol_type = other DNA
ctccattatataacaatctacc

SEQ ID NO: 49839 - DNA, 22 bp, synthetic construct
  misc_feature 1..22: note = chemically synthesized
  source 1..22: mol_type = other DNA
tccattatataacaatctaccc

SEQ ID NO: 49840 - DNA, 22 bp, synthetic construct
  misc_feature 1..22: note = chemically synthesized
  source 1..22: mol_type = other DNA
cattatataacaatctaccctg

SEQ ID NO: 49841 - DNA, 22 bp, synthetic construct
  misc_feature 1..22: note = chemically synthesized
  source 1..22: mol_type = other DNA
tataacaatctaccctgggtac

SEQ ID NO: 49842 - DNA, 22 bp, synthetic construct
  misc_feature 1..22: note = chemically synthesized
  source 1..22: mol_type = other DNA
ccctgggtacactagattatgc

SEQ ID NO: 49843 - DNA, 22 bp, synthetic construct
  misc_feature 1..22: note = chemically synthesized
  source 1..22: mol_type = other DNA
ggtacactagattatgccaatc

SEQ ID NO: 49844 - DNA, 22 bp, synthetic construct
  misc_feature 1..22: note = chemically synthesized
  source 1..22: mol_type = other DNA
gattatgccaatctattagaat

SEQ ID NO: 49845 - DNA, 22 bp, synthetic construct
  misc_feature 1..22: note = chemically synthesized
  source 1..22: mol_type = other DNA
tgccaatctattagaatgaaat

SEQ ID NO: 49846 - DNA, 22 bp, synthetic construct
  misc_feature 1..22: note = chemically synthesized
  source 1..22: mol_type = other DNA
ttagaatgaaatttgtactcca

SEQ ID NO: 49847 - DNA, 22 bp, synthetic construct
  misc_feature 1..22: note = chemically synthesized
  source 1..22: mol_type = other DNA
gaatgaaatttgtactccatat

SEQ ID NO: 49848 - DNA, 22 bp, synthetic construct
  misc_feature 1..22: note = chemically synthesized
  source 1..22: mol_type = other DNA
gtactccatataagcagaagtt

SEQ ID NO: 49849 - DNA, 22 bp, synthetic construct
  misc_feature 1..22: note = chemically synthesized
  source 1..22: mol_type = other DNA
tactccatataagcagaagttt

SEQ ID NO: 49850 - DNA, 22 bp, synthetic construct
  misc_feature 1..22: note = chemically synthesized
  source 1..22: mol_type = other DNA
catataagcagaagtttccagt

SEQ ID NO: 49851 - DNA, 22 bp, synthetic construct
  misc_feature 1..22: note = chemically synthesized
  source 1..22: mol_type = other DNA
ccagtcacttttgacttaccat

SEQ ID NO: 49852 - DNA, 22 bp, synthetic construct
  misc_feature 1..22: note = chemically synthesized
  source 1..22: mol_type = other DNA
cagtcacttttgacttaccatt

SEQ ID NO: 49853 - DNA, 22 bp, synthetic construct
  misc_feature 1..22: note = chemically synthesized
  source 1..22: mol_type = other DNA
ttgacttaccattatgtttcaa

SEQ ID NO: 49854 - DNA, 22 bp, synthetic construct
  misc_feature 1..22: note = chemically synthesized
  source 1..22: mol_type = other DNA
tgacttaccattatgtttcaat

SEQ ID NO: 49855 - DNA, 22 bp, synthetic construct
  misc_feature 1..22: note = chemically synthesized
  source 1..22: mol_type = other DNA
gacttaccattatgtttcaatg

SEQ ID NO: 49856 - DNA, 22 bp, synthetic construct
  misc_feature 1..22: note = chemically synthesized
  source 1..22: mol_type = other DNA
acttaccattatgtttcaatgt

SEQ ID NO: 49857 - DNA, 22 bp, synthetic construct
  misc_feature 1..22: note = chemically synthesized
  source 1..22: mol_type = other DNA
accattatgtttcaatgtaaag

SEQ ID NO: 49858 - DNA, 22 bp, synthetic construct
  misc_feature 1..22: note = chemically synthesized
  source 1..22: mol_type = other DNA
ccattatgtttcaatgtaaagt

SEQ ID NO: 49859 - DNA, 22 bp, synthetic construct
  misc_feature 1..22: note = chemically synthesized
  source 1..22: mol_type = other DNA
tgtttcaatgtaaagtgttatt

SEQ ID NO: 49860 - DNA, 22 bp, synthetic construct
  misc_feature 1..22: note = chemically synthesized
  source 1..22: mol_type = other DNA
caatgtaaagtgttattatagc

SEQ ID NO: 49861 - DNA, 22 bp, synthetic construct
  misc_feature 1..22: note = chemically synthesized
  source 1..22: mol_type = other DNA
aatgtaaagtgttattatagca

SEQ ID NO: 49862 - DNA, 22 bp, synthetic construct
  misc_feature 1..22: note = chemically synthesized
  source 1..22: mol_type = other DNA
ttatagcagagtataaagcaca

SEQ ID NO: 49863 - DNA, 22 bp, synthetic construct
  misc_feature 1..22: note = chemically synthesized
  source 1..22: mol_type = other DNA
tagcagagtataaagcacagct

SEQ ID NO: 49864 - DNA, 22 bp, synthetic construct
  misc_feature 1..22: note = chemically synthesized
  source 1..22: mol_type = other DNA
ctccatgctcacgtttttaact

SEQ ID NO: 49865 - DNA, 22 bp, synthetic construct
  misc_feature 1..22: note = chemically synthesized
  source 1..22: mol_type = other DNA
catgctcacgtttttaactcta

SEQ ID NO: 49866 - DNA, 22 bp, synthetic construct
  misc_feature 1..22: note = chemically synthesized
  source 1..22: mol_type = other DNA
acgtttttaactctaatactgt

SEQ ID NO: 49867 - DNA, 22 bp, synthetic construct
  misc_feature 1..22: note = chemically synthesized
  source 1..22: mol_type = other DNA
ttaactctaatactgtaatctt

SEQ ID NO: 49868 - DNA, 22 bp, synthetic construct
  misc_feature 1..22: note = chemically synthesized
  source 1..22: mol_type = other DNA
taactctaatactgtaatcttt

SEQ ID NO: 49869 - DNA, 22 bp, synthetic construct
  misc_feature 1..22: note = chemically synthesized
  source 1..22: mol_type = other DNA
aactctaatactgtaatctttc

SEQ ID NO: 49870 - DNA, 22 bp, synthetic construct
  misc_feature 1..22: note = chemically synthesized
  source 1..22: mol_type = other DNA
actctaatactgtaatctttct

SEQ ID NO: 49871 - DNA, 22 bp, synthetic construct
  misc_feature 1..22: note = chemically synthesized
  source 1..22: mol_type = other DNA
taatactgtaatctttcttgct

SEQ ID NO: 49872 - DNA, 22 bp, synthetic construct
  misc_feature 1..22: note = chemically synthesized
  source 1..22: mol_type = other DNA
atactgtaatctttcttgctgc

SEQ ID NO: 49873 - DNA, 22 bp, synthetic construct
  misc_feature 1..22: note = chemically synthesized
  source 1..22: mol_type = other DNA
taatctttcttgctgcttctag

SEQ ID NO: 49874 - DNA, 22 bp, synthetic construct
  misc_feature 1..22: note = chemically synthesized
  source 1..22: mol_type = other DNA
tcttgctgcttctagggctgtg

SEQ ID NO: 49875 - DNA, 22 bp, synthetic construct
  misc_feature 1..22: note = chemically synthesized
  source 1..22: mol_type = other DNA
cttgctgcttctagggctgtgt

SEQ ID NO: 49876 - DNA, 22 bp, synthetic construct
  misc_feature 1..22: note = chemically synthesized
  source 1..22: mol_type = other DNA
ttgctgcttctagggctgtgtc

SEQ ID NO: 49877 - DNA, 22 bp, synthetic construct
  misc_feature 1..22: note = chemically synthesized
  source 1..22: mol_type = other DNA
gctgcttctagggctgtgtcag

SEQ ID NO: 49878 - DNA, 22 bp, synthetic construct
  misc_feature 1..22: note = chemically synthesized
  source 1..22: mol_type = other DNA
ctgcttctagggctgtgtcagt

SEQ ID NO: 49879 - DNA, 22 bp, synthetic construct
  misc_feature 1..22: note = chemically synthesized
  source 1..22: mol_type = other DNA
cttctagggctgtgtcagtgtt

SEQ ID NO: 49880 - DNA, 22 bp, synthetic construct
  misc_feature 1..22: note = chemically synthesized
  source 1..22: mol_type = other DNA
ctagggctgtgtcagtgtttac

SEQ ID NO: 49881 - DNA, 22 bp, synthetic construct
  misc_feature 1..22: note = chemically synthesized
  source 1..22: mol_type = other DNA
tagggctgtgtcagtgtttaca

SEQ ID NO: 49882 - DNA, 22 bp, synthetic construct
  misc_feature 1..22: note = chemically synthesized
  source 1..22: mol_type = other DNA
gggctgtgtcagtgtttacatt

SEQ ID NO: 49883 - DNA, 22 bp, synthetic construct
  misc_feature 1..22: note = chemically synthesized
  source 1..22: mol_type = other DNA
tgtcagtgtttacattcctgga

SEQ ID NO: 49884 - DNA, 22 bp, synthetic construct
  misc_feature 1..22: note = chemically synthesized
  source 1..22: mol_type = other DNA
acattcctggaagttaaataaa

SEQ ID NO: 49885 - DNA, 22 bp, synthetic construct
  misc_feature 1..22: note = chemically synthesized
  source 1..22: mol_type = other DNA
cattcctggaagttaaataaac

SEQ ID NO: 49886 - DNA, 22 bp, synthetic construct
  misc_feature 1..22: note = chemically synthesized
  source 1..22: mol_type = other DNA
ctggaagttaaataaaccgaca

SEQ ID NO: 49887 - DNA, 22 bp, synthetic construct
  misc_feature 1..22: note = chemically synthesized
  source 1..22: mol_type = other DNA
gaagttaaataaaccgacatgg

SEQ ID NO: 49888 - DNA, 22 bp, synthetic construct
  misc_feature 1..22: note = chemically synthesized
  source 1..22: mol_type = other DNA
aataaaccgacatggcaaaact

SEQ ID NO: 49889 - DNA, 22 bp, synthetic construct
  misc_feature 1..22: note = chemically synthesized
  source 1..22: mol_type = other DNA
ctggatagactgaataataagg

SEQ ID NO: 49890 - DNA, 22 bp, synthetic construct
  misc_feature 1..22: note = chemically synthesized
  source 1..22: mol_type = other DNA
gatagactgaataataaggctt

SEQ ID NO: 49891 - DNA, 22 bp, synthetic construct
  misc_feature 1..22: note = chemically synthesized
  source 1..22: mol_type = other DNA
aataataaggcttgtgatgact

SEQ ID NO: 49892 - DNA, 22 bp, synthetic construct
  misc_feature 1..22: note = chemically synthesized
  source 1..22: mol_type = other DNA
gtgatgactaaattgtttactt

SEQ ID NO: 49893 - DNA, 22 bp, synthetic construct
  misc_feature 1..22: note = chemically synthesized
  source 1..22: mol_type = other DNA
tgatgactaaattgtttacttt

SEQ ID NO: 49894 - DNA, 22 bp, synthetic construct
  misc_feature 1..22: note = chemically synthesized
  source 1..22: mol_type = other DNA
aattgtttactttttaccttgt

SEQ ID NO: 49895 - DNA, 22 bp, synthetic construct
  misc_feature 1..22: note = chemically synthesized
  source 1..22: mol_type = other DNA
tttactttttaccttgttagga

SEQ ID NO: 49896 - DNA, 22 bp, synthetic construct
  misc_feature 1..22: note = chemically synthesized
  source 1..22: mol_type = other DNA
actttttaccttgttaggatcc

SEQ ID NO: 49897 - DNA, 22 bp, synthetic construct
  misc_feature 1..22: note = chemically synthesized
  source 1..22: mol_type = other DNA
ctttttaccttgttaggatccc

SEQ ID NO: 49898 - DNA, 22 bp, synthetic construct
  misc_feature 1..22: note = chemically synthesized
  source 1..22: mol_type = other DNA
tttaccttgttaggatcccttt

SEQ ID NO: 49899 - DNA, 22 bp, synthetic construct
  misc_feature 1..22: note = chemically synthesized
  source 1..22: mol_type = other DNA
ttaccttgttaggatccctttc

SEQ ID NO: 49900 - DNA, 22 bp, synthetic construct
  misc_feature 1..22: note = chemically synthesized
  source 1..22: mol_type = other DNA
taccttgttaggatccctttct

SEQ ID NO: 49901 - DNA, 22 bp, synthetic construct
  misc_feature 1..22: note = chemically synthesized
  source 1..22: mol_type = other DNA
accttgttaggatccctttctt

SEQ ID NO: 49902 - DNA, 22 bp, synthetic construct
  misc_feature 1..22: note = chemically synthesized
  source 1..22: mol_type = other DNA
ccttgttaggatccctttcttg

SEQ ID NO: 49903 - DNA, 22 bp, synthetic construct
  misc_feature 1..22: note = chemically synthesized
  source 1..22: mol_type = other DNA
gttaggatccctttcttgtaaa

SEQ ID NO: 49904 - DNA, 22 bp, synthetic construct
  misc_feature 1..22: note = chemically synthesized
  source 1..22: mol_type = other DNA
ttaggatccctttcttgtaaag

SEQ ID NO: 49905 - DNA, 22 bp, synthetic construct
  misc_feature 1..22: note = chemically synthesized
  source 1..22: mol_type = other DNA
ggatccctttcttgtaaagttt

SEQ ID NO: 49906 - DNA, 22 bp, synthetic construct
  misc_feature 1..22: note = chemically synthesized
  source 1..22: mol_type = other DNA
tcttgtaaagtttgggggagag

SEQ ID NO: 49907 - DNA, 22 bp, synthetic construct
  misc_feature 1..22: note = chemically synthesized
  source 1..22: mol_type = other DNA
cttgtaaagtttgggggagaga

SEQ ID NO: 49908 - DNA, 22 bp, synthetic construct
  misc_feature 1..22: note = chemically synthesized
  source 1..22: mol_type = other DNA
ttgtaaagtttgggggagagag

SEQ ID NO: 49909 - DNA, 22 bp, synthetic construct
  misc_feature 1..22: note = chemically synthesized
  source 1..22: mol_type = other DNA
gtaaagtttgggggagagagag

SEQ ID NO: 49910 - DNA, 22 bp, synthetic construct
  misc_feature 1..22: note = chemically synthesized
  source 1..22: mol_type = other DNA
taaagtttgggggagagagaga

SEQ ID NO: 49911 - DNA, 22 bp, synthetic construct
  misc_feature 1..22: note = chemically synthesized
  source 1..22: mol_type = other DNA
gggggagagagagaggagagaa

SEQ ID NO: 49912 - DNA, 22 bp, synthetic construct
  misc_feature 1..22: note = chemically synthesized
  source 1..22: mol_type = other DNA
ggggagagagagaggagagaaa

SEQ ID NO: 49913 - DNA, 22 bp, synthetic construct
  misc_feature 1..22: note = chemically synthesized
  source 1..22: mol_type = other DNA
atacactggcttccatatgtca

SEQ ID NO: 49914 - DNA, 22 bp, synthetic construct
  misc_feature 1..22: note = chemically synthesized
  source 1..22: mol_type = other DNA
tacactggcttccatatgtcac

SEQ ID NO: 49915 - DNA, 22 bp, synthetic construct
  misc_feature 1..22: note = chemically synthesized
  source 1..22: mol_type = other DNA
gcttccatatgtcacaaagacc

SEQ ID NO: 49916 - DNA, 22 bp, synthetic construct
  misc_feature 1..22: note = chemically synthesized
  source 1..22: mol_type = other DNA
ccatatgtcacaaagaccttcc

SEQ ID NO: 49917 - DNA, 22 bp, synthetic construct
  misc_feature 1..22: note = chemically synthesized
  source 1..22: mol_type = other DNA
catatgtcacaaagaccttcct

SEQ ID NO: 49918 - DNA, 22 bp, synthetic construct
  misc_feature 1..22: note = chemically synthesized
  source 1..22: mol_type = other DNA
cctatccacagccaacgcgact

SEQ ID NO: 49919 - DNA, 22 bp, synthetic construct
  misc_feature 1..22: note = chemically synthesized
  source 1..22: mol_type = other DNA
ctatccacagccaacgcgactg

SEQ ID NO: 49920 - DNA, 22 bp, synthetic construct
  misc_feature 1..22: note = chemically synthesized
  source 1..22: mol_type = other DNA
tccacagccaacgcgactgaag

SEQ ID NO: 49921 - DNA, 22 bp, synthetic construct
  misc_feature 1..22: note = chemically synthesized
  source 1..22: mol_type = other DNA
aagcagcatgcataagttagtg

SEQ ID NO: 49922 - DNA, 22 bp, synthetic construct
  misc_feature 1..22: note = chemically synthesized
  source 1..22: mol_type = other DNA
gtgttgcttgttttgttttctt

SEQ ID NO: 49923 - DNA, 22 bp, synthetic construct
  misc_feature 1..22: note = chemically synthesized
  source 1..22: mol_type = other DNA
cttgttttgttttcttaaatac

SEQ ID NO: 49924 - DNA, 22 bp, synthetic construct
  misc_feature 1..22: note = chemically synthesized
  source 1..22: mol_type = other DNA
gttttgttttcttaaataccgg

SEQ ID NO: 49925 - DNA, 22 bp, synthetic construct
  misc_feature 1..22: note = chemically synthesized
  source 1..22: mol_type = other DNA
ttttgttttcttaaataccggg

SEQ ID NO: 49926 - DNA, 22 bp, synthetic construct
  misc_feature 1..22: note = chemically synthesized
  source 1..22: mol_type = other DNA
tgttttcttaaataccgggtca

SEQ ID NO: 49927 - DNA, 22 bp, synthetic construct
  misc_feature 1..22: note = chemically synthesized
  source 1..22: mol_type = other DNA
gttttcttaaataccgggtcag

SEQ ID NO: 49928 - DNA, 22 bp, synthetic construct
  misc_feature 1..22: note = chemically synthesized
  source 1..22: mol_type = other DNA
ttttcttaaataccgggtcagc

SEQ ID NO: 49929 - DNA, 22 bp, synthetic construct
  misc_feature 1..22: note = chemically synthesized
  source 1..22: mol_type = other DNA
tcttaaataccgggtcagctga

SEQ ID NO: 49930 - DNA, 22 bp, synthetic construct
  misc_feature 1..22: note = chemically synthesized
  source 1..22: mol_type = other DNA
cttaaataccgggtcagctgaa

SEQ ID NO: 49931 - DNA, 22 bp, synthetic construct
  misc_feature 1..22: note = chemically synthesized
  source 1..22: mol_type = other DNA
ttaaataccgggtcagctgaat

SEQ ID NO: 49932 - DNA, 22 bp, synthetic construct
  misc_feature 1..22: note = chemically synthesized
  source 1..22: mol_type = other DNA
aaataccgggtcagctgaatac

SEQ ID NO: 49933 - DNA, 22 bp, synthetic construct
  misc_feature 1..22: note = chemically synthesized
  source 1..22: mol_type = other DNA
aataccgggtcagctgaatacc

SEQ ID NO: 49934 - DNA, 22 bp, synthetic construct
  misc_feature 1..22: note = chemically synthesized
  source 1..22: mol_type = other DNA
aatacccctttctccactgccc

SEQ ID NO: 49935 - DNA, 22 bp, synthetic construct
  misc_feature 1..22: note = chemically synthesized
  source 1..22: mol_type = other DNA
tctccactgcccactcagcccc

SEQ ID NO: 49936 - DNA, 22 bp, synthetic construct
  misc_feature 1..22: note = chemically synthesized
  source 1..22: mol_type = other DNA
ctccactgcccactcagcccca

SEQ ID NO: 49937 - DNA, 22 bp, synthetic construct
  misc_feature 1..22: note = chemically synthesized
  source 1..22: mol_type = other DNA
tccactgcccactcagccccac

SEQ ID NO: 49938 - DNA, 22 bp, synthetic construct
  misc_feature 1..22: note = chemically synthesized
  source 1..22: mol_type = other DNA
cactgcccactcagccccacat

SEQ ID NO: 49939 - DNA, 22 bp, synthetic construct
  misc_feature 1..22: note = chemically synthesized
  source 1..22: mol_type = other DNA
cccactcagccccacataaagt

SEQ ID NO: 49940 - DNA, 22 bp, synthetic construct
  misc_feature 1..22: note = chemically synthesized
  source 1..22: mol_type = other DNA
agccccacataaagtatgaaga

SEQ ID NO: 49941 - DNA, 22 bp, synthetic construct
  misc_feature 1..22: note = chemically synthesized
  source 1..22: mol_type = other DNA
tttttgaccattttcaaatagc

SEQ ID NO: 49942 - DNA, 22 bp, synthetic construct
  misc_feature 1..22: note = chemically synthesized
  source 1..22: mol_type = other DNA
ttttgaccattttcaaatagca

SEQ ID NO: 49943 - DNA, 22 bp, synthetic construct
  misc_feature 1..22: note = chemically synthesized
  source 1..22: mol_type = other DNA
tttgaccattttcaaatagcaa

SEQ ID NO: 49944 - DNA, 22 bp, synthetic construct
  misc_feature 1..22: note = chemically synthesized
  source 1..22: mol_type = other DNA
ttgaccattttcaaatagcaaa

SEQ ID NO: 49945 - DNA, 22 bp, synthetic construct
  misc_feature 1..22: note = chemically synthesized
  source 1..22: mol_type = other DNA
tgaccattttcaaatagcaaat

SEQ ID NO: 49946 - DNA, 22 bp, synthetic construct
  misc_feature 1..22: note = chemically synthesized
  source 1..22: mol_type = other DNA
gaccattttcaaatagcaaatt

SEQ ID NO: 49947 - DNA, 22 bp, synthetic construct
  misc_feature 1..22: note = chemically synthesized
  source 1..22: mol_type = other DNA
accattttcaaatagcaaatta

SEQ ID NO: 49948 - DNA, 22 bp, synthetic construct
  misc_feature 1..22: note = chemically synthesized
  source 1..22: mol_type = other DNA
tcaaatagcaaattatccatta

SEQ ID NO: 49949 - DNA, 22 bp, synthetic construct
  misc_feature 1..22: note = chemically synthesized
  source 1..22: mol_type = other DNA
caaatagcaaattatccattag

SEQ ID NO: 49950 - DNA, 22 bp, synthetic construct
  misc_feature 1..22: note = chemically synthesized
  source 1..22: mol_type = other DNA
aaatagcaaattatccattaga

SEQ ID NO: 49951 - DNA, 22 bp, synthetic construct
  misc_feature 1..22: note = chemically synthesized
  source 1..22: mol_type = other DNA
tccattagatttcatcatatct

SEQ ID NO: 49952 - DNA, 22 bp, synthetic construct
  misc_feature 1..22: note = chemically synthesized
  source 1..22: mol_type = other DNA
gatttcatcatatcttagtaaa

SEQ ID NO: 49953 - DNA, 22 bp, synthetic construct
  misc_feature 1..22: note = chemically synthesized
  source 1..22: mol_type = other DNA
catcatatcttagtaaagcaat

SEQ ID NO: 49954 - DNA, 22 bp, synthetic construct
  misc_feature 1..22: note = chemically synthesized
  source 1..22: mol_type = other DNA
atcatatcttagtaaagcaatt

SEQ ID NO: 49955 - DNA, 22 bp, synthetic construct
  misc_feature 1..22: note = chemically synthesized
  source 1..22: mol_type = other DNA
agtaaagcaattacatcaagaa

SEQ ID NO: 49956 - DNA, 22 bp, synthetic construct
  misc_feature 1..22: note = chemically synthesized
  source 1..22: mol_type = other DNA
gtaaagcaattacatcaagaaa

SEQ ID NO: 49957 - DNA, 22 bp, synthetic construct
  misc_feature 1..22: note = chemically synthesized
  source 1..22: mol_type = other DNA
catcaagaaaatgatagtgcgt

SEQ ID NO: 49958 - DNA, 22 bp, synthetic construct
  misc_feature 1..22: note = chemically synthesized
  source 1..22: mol_type = other DNA
tgcatgcagttggccggagacc

SEQ ID NO: 49959 - DNA, 22 bp, synthetic construct
  misc_feature 1..22: note = chemically synthesized
  source 1..22: mol_type = other DNA
gccggagaccaaaggctgtgaa

SEQ ID NO: 49960 - DNA, 22 bp, synthetic construct
  misc_feature 1..22: note = chemically synthesized
  source 1..22: mol_type = other DNA
tgaagtcggagagggcagaatc

SEQ ID NO: 49961 - DNA, 22 bp, synthetic construct
  misc_feature 1..22: note = chemically synthesized
  source 1..22: mol_type = other DNA
gacacacacaaataaaaagccc

SEQ ID NO: 49962 - DNA, 22 bp, synthetic construct
  misc_feature 1..22: note = chemically synthesized
  source 1..22: mol_type = other DNA
gatctcacagatggaccccatc

SEQ ID NO: 49963 - DNA, 22 bp, synthetic construct
  misc_feature 1..22: note = chemically synthesized
  source 1..22: mol_type = other DNA
acagatggaccccatcagttca

SEQ ID NO: 49964 - DNA, 22 bp, synthetic construct
  misc_feature 1..22: note = chemically synthesized
  source 1..22: mol_type = other DNA
atcttactgcctaaaaagttca

SEQ ID NO: 49965 - DNA, 22 bp, synthetic construct
  misc_feature 1..22: note = chemically synthesized
  source 1..22: mol_type = other DNA
actgcctaaaaagttcatgcac

SEQ ID NO: 49966 - DNA, 22 bp, synthetic construct
  misc_feature 1..22: note = chemically synthesized
  source 1..22: mol_type = other DNA
ctgcctaaaaagttcatgcact

SEQ ID NO: 49967 - DNA, 22 bp, synthetic construct
  misc_feature 1..22: note = chemically synthesized
  source 1..22: mol_type = other DNA
cctaaaaagttcatgcacttaa

SEQ ID NO: 49968 - DNA, 22 bp, synthetic construct
  misc_feature 1..22: note = chemically synthesized
  source 1..22: mol_type = other DNA
aaaagttcatgcacttaataat

SEQ ID NO: 49969 - DNA, 22 bp, synthetic construct
  misc_feature 1..22: note = chemically synthesized
  source 1..22: mol_type = other DNA
atgcacttaataatttatttgt

SEQ ID NO: 49970 - DNA, 22 bp, synthetic construct
  misc_feature 1..22: note = chemically synthesized
  source 1..22: mol_type = other DNA
aataatttatttgtgttctgga

SEQ ID NO: 49971 - DNA, 22 bp, synthetic construct
  misc_feature 1..22: note = chemically synthesized
  source 1..22: mol_type = other DNA
ataatttatttgtgttctggat

SEQ ID NO: 49972 - DNA, 22 bp, synthetic construct
  misc_feature 1..22: note = chemically synthesized
  source 1..22: mol_type = other DNA
atttgtgttctggatactgttt

SEQ ID NO: 49973 - DNA, 22 bp, synthetic construct
  misc_feature 1..22: note = chemically synthesized
  source 1..22: mol_type = other DNA
tttgtgttctggatactgtttc

SEQ ID NO: 49974 - DNA, 22 bp, synthetic construct
  misc_feature 1..22: note = chemically synthesized
  source 1..22: mol_type = other DNA
gtgttctggatactgtttccca

SEQ ID NO: 49975 - DNA, 22 bp, synthetic construct
  misc_feature 1..22: note = chemically synthesized
  source 1..22: mol_type = other DNA
tgttctggatactgtttcccag

SEQ ID NO: 49976 - DNA, 22 bp, synthetic construct
  misc_feature 1..22: note = chemically synthesized
  source 1..22: mol_type = other DNA
tggatactgtttcccagctgaa

SEQ ID NO: 49977 - DNA, 22 bp, synthetic construct
  misc_feature 1..22: note = chemically synthesized
  source 1..22: mol_type = other DNA
gatactgtttcccagctgaata

SEQ ID NO: 49978 - DNA, 22 bp, synthetic construct
  misc_feature 1..22: note = chemically synthesized
  source 1..22: mol_type = other DNA
tttcccagctgaatattaacaa

SEQ ID NO: 49979 - DNA, 22 bp, synthetic construct
  misc_feature 1..22: note = chemically synthesized
  source 1..22: mol_type = other DNA
cccagctgaatattaacaactt

SEQ ID NO: 49980 - DNA, 22 bp, synthetic construct
  misc_feature 1..22: note = chemically synthesized
  source 1..22: mol_type = other DNA
ccagctgaatattaacaacttt

SEQ ID NO: 49981 - DNA, 22 bp, synthetic construct
  misc_feature 1..22: note = chemically synthesized
  source 1..22: mol_type = other DNA
aatattaacaactttaaactga

SEQ ID NO: 49982 - DNA, 22 bp, synthetic construct
  misc_feature 1..22: note = chemically synthesized
  source 1..22: mol_type = other DNA
acaactttaaactgaagcatgc

SEQ ID NO: 49983 - DNA, 22 bp, synthetic construct
  misc_feature 1..22: note = chemically synthesized
  source 1..22: mol_type = other DNA
taaactgaagcatgcttttagc

SEQ ID NO: 49984 - DNA, 22 bp, synthetic construct
  misc_feature 1..22: note = chemically synthesized
  source 1..22: mol_type = other DNA
aaactgaagcatgcttttagca

SEQ ID NO: 49985 - DNA, 22 bp, synthetic construct
  misc_feature 1..22: note = chemically synthesized
  source 1..22: mol_type = other DNA
aactgaagcatgcttttagcat

SEQ ID NO: 49986 - DNA, 22 bp, synthetic construct
  misc_feature 1..22: note = chemically synthesized
  source 1..22: mol_type = other DNA
aagcatgcttttagcatggtat

SEQ ID NO: 49987 - DNA, 22 bp, synthetic construct
  misc_feature 1..22: note = chemically synthesized
  source 1..22: mol_type = other DNA
ttagcatggtatggatggaagt

SEQ ID NO: 49988 - DNA, 22 bp, synthetic construct
  misc_feature 1..22: note = chemically synthesized
  source 1..22: mol_type = other DNA
tagcatggtatggatggaagtc

SEQ ID NO: 49989 - DNA, 22 bp, synthetic construct
  misc_feature 1..22: note = chemically synthesized
  source 1..22: mol_type = other DNA
agcatggtatggatggaagtca

SEQ ID NO: 49990 - DNA, 22 bp, synthetic construct
  misc_feature 1..22: note = chemically synthesized
  source 1..22: mol_type = other DNA
gcatggtatggatggaagtcac

SEQ ID NO: 49991 - DNA, 22 bp, synthetic construct
  misc_feature 1..22: note = chemically synthesized
  source 1..22: mol_type = other DNA
ggtccctcggaggttaaaatta

SEQ ID NO: 49992 - DNA, 22 bp, synthetic construct
  misc_feature 1..22: note = chemically synthesized
  source 1..22: mol_type = other DNA
ggaggttaaaattatagttatg

SEQ ID NO: 49993 - DNA, 22 bp, synthetic construct
  misc_feature 1..22: note = chemically synthesized
  source 1..22: mol_type = other DNA
aaattatagttatgtttcttac

SEQ ID NO: 49994 - DNA, 22 bp, synthetic construct
  misc_feature 1..22: note = chemically synthesized
  source 1..22: mol_type = other DNA
tagttatgtttcttacacactg

SEQ ID NO: 49995 - DNA, 22 bp, synthetic construct
  misc_feature 1..22: note = chemically synthesized
  source 1..22: mol_type = other DNA
tgtttcttacacactgttcatt

SEQ ID NO: 49996 - DNA, 22 bp, synthetic construct
  misc_feature 1..22: note = chemically synthesized
  source 1..22: mol_type = other DNA
cttacacactgttcattttcca

SEQ ID NO: 49997 - DNA, 22 bp, synthetic construct
  misc_feature 1..22: note = chemically synthesized
  source 1..22: mol_type = other DNA
ttacacactgttcattttccat

SEQ ID NO: 49998 - DNA, 22 bp, synthetic construct
  misc_feature 1..22: note = chemically synthesized
  source 1..22: mol_type = other DNA
acacactgttcattttccatca

SEQ ID NO: 49999 - DNA, 22 bp, synthetic construct
  misc_feature 1..22: note = chemically synthesized
  source 1..22: mol_type = other DNA
cacactgttcattttccatcac

SEQ ID NO: 50000 - DNA, 22 bp, synthetic construct
  misc_feature 1..22: note = chemically synthesized
  source 1..22: mol_type = other DNA
ttcattttccatcacaatttat

SEQ ID NO: 50001 - DNA, 22 bp, synthetic construct
  misc_feature 1..22: note = chemically synthesized
  source 1..22: mol_type = other DNA
attttccatcacaatttatttt

SEQ ID NO: 50002 - DNA, 22 bp, synthetic construct
  misc_feature 1..22: note = chemically synthesized
  source 1..22: mol_type = other DNA
tccatcacaatttattttcttt

SEQ ID NO: 50003 - DNA, 22 bp, synthetic construct
  misc_feature 1..22: note = chemically synthesized
  source 1..22: mol_type = other DNA
ccatcacaatttattttctttc

SEQ ID NO: 50004 - DNA, 22 bp, synthetic construct
  misc_feature 1..22: note = chemically synthesized
  source 1..22: mol_type = other DNA
catcacaatttattttctttca

SEQ ID NO: 50005 - DNA, 22 bp, synthetic construct
  misc_feature 1..22: note = chemically synthesized
  source 1..22: mol_type = other DNA
attttctttcattaaacattcg

SEQ ID NO: 50006 - DNA, 22 bp, synthetic construct
  misc_feature 1..22: note = chemically synthesized
  source 1..22: mol_type = other DNA
ttttctttcattaaacattcgt

SEQ ID NO: 50007 - DNA, 22 bp, synthetic construct
  misc_feature 1..22: note = chemically synthesized
  source 1..22: mol_type = other DNA
tctttcattaaacattcgtttt

SEQ ID NO: 50008 - DNA, 22 bp, synthetic construct
  misc_feature 1..22: note = chemically synthesized
  source 1..22: mol_type = other DNA
ctttcattaaacattcgtttta

SEQ ID NO: 50009 - DNA, 22 bp, synthetic construct
  misc_feature 1..22: note = chemically synthesized
  source 1..22: mol_type = other DNA
tttcattaaacattcgttttaa

SEQ ID NO: 50010 - DNA, 22 bp, synthetic construct
  misc_feature 1..22: note = chemically synthesized
  source 1..22: mol_type = other DNA
tcattaaacattcgttttaatc

SEQ ID NO: 50011 - DNA, 22 bp, synthetic construct
  misc_feature 1..22: note = chemically synthesized
  source 1..22: mol_type = other DNA
cattaaacattcgttttaatca

SEQ ID NO: 50012 - DNA, 22 bp, synthetic construct
  misc_feature 1..22: note = chemically synthesized
  source 1..22: mol_type = other DNA
attaaacattcgttttaatcag

SEQ ID NO: 50013 - DNA, 22 bp, synthetic construct
  misc_feature 1..22: note = chemically synthesized
  source 1..22: mol_type = other DNA
aacattcgttttaatcagaata

SEQ ID NO: 50014 - DNA, 22 bp, synthetic construct
  misc_feature 1..22: note = chemically synthesized
  source 1..22: mol_type = other DNA
gttttaatcagaatatcagtta

SEQ ID NO: 50015 - DNA, 22 bp, synthetic construct
  misc_feature 1..22: note = chemically synthesized
  source 1..22: mol_type = other DNA
taatcagaatatcagttacact

SEQ ID NO: 50016 - DNA, 22 bp, synthetic construct
  misc_feature 1..22: note = chemically synthesized
  source 1..22: mol_type = other DNA
aatcagaatatcagttacactg

SEQ ID NO: 50017 - DNA, 22 bp, synthetic construct
  misc_feature 1..22: note = chemically synthesized
  source 1..22: mol_type = other DNA
atcagaatatcagttacactgt

SEQ ID NO: 50018 - DNA, 22 bp, synthetic construct
  misc_feature 1..22: note = chemically synthesized
  source 1..22: mol_type = other DNA
cactgttctgattctgcttgtt

SEQ ID NO: 50019 - DNA, 22 bp, synthetic construct
  misc_feature 1..22: note = chemically synthesized
  source 1..22: mol_type = other DNA
ttctgattctgcttgttaacca

SEQ ID NO: 50020 - DNA, 22 bp, synthetic construct
  misc_feature 1..22: note = chemically synthesized
  source 1..22: mol_type = other DNA
tgattctgcttgttaaccagtg

SEQ ID NO: 50021 - DNA, 22 bp, synthetic construct
  misc_feature 1..22: note = chemically synthesized
  source 1..22: mol_type = other DNA
attctgcttgttaaccagtgat

SEQ ID NO: 50022 - DNA, 22 bp, synthetic construct
  misc_feature 1..22: note = chemically synthesized
  source 1..22: mol_type = other DNA
tgcttgttaaccagtgataaac

SEQ ID NO: 50023 - DNA, 22 bp, synthetic construct
  misc_feature 1..22: note = chemically synthesized
  source 1..22: mol_type = other DNA
cttgttaaccagtgataaactc

SEQ ID NO: 50024 - DNA, 22 bp, synthetic construct
  misc_feature 1..22: note = chemically synthesized
  source 1..22: mol_type = other DNA
gttaaccagtgataaactcata

SEQ ID NO: 50025 - DNA, 22 bp, synthetic construct
  misc_feature 1..22: note = chemically synthesized
  source 1..22: mol_type = other DNA
ttaaccagtgataaactcataa

SEQ ID NO: 50026 - DNA, 22 bp, synthetic construct
  misc_feature 1..22: note = chemically synthesized
  source 1..22: mol_type = other DNA
accagtgataaactcataaacc

SEQ ID NO: 50027 - DNA, 22 bp, synthetic construct
  misc_feature 1..22: note = chemically synthesized
  source 1..22: mol_type = other DNA
ataaaccaaagatgaacatcaa

SEQ ID NO: 50028 - DNA, 22 bp, synthetic construct
  misc_feature 1..22: note = chemically synthesized
  source 1..22: mol_type = other DNA
ttcaacagcaaaggcaaacacc

SEQ ID NO: 50029 - DNA, 22 bp, synthetic construct
  misc_feature 1..22: note = chemically synthesized
  source 1..22: mol_type = other DNA
aacagcaaaggcaaacaccaaa

SEQ ID NO: 50030 - DNA, 22 bp, synthetic construct
  misc_feature 1..22: note = chemically synthesized
  source 1..22: mol_type = other DNA
tcaaaaatcggaaaccgttagt

SEQ ID NO: 50031 - DNA, 22 bp, synthetic construct
  misc_feature 1..22: note = chemically synthesized
  source 1..22: mol_type = other DNA
aaaaatcggaaaccgttagtta

SEQ ID NO: 50032 - DNA, 22 bp, synthetic construct
  misc_feature 1..22: note = chemically synthesized
  source 1..22: mol_type = other DNA
gttagcaccttgttttcaccac

SEQ ID NO: 50033 - DNA, 22 bp, synthetic construct
  misc_feature 1..22: note = chemically synthesized
  source 1..22: mol_type = other DNA
gcaccttgttttcaccaccagg

SEQ ID NO: 50034 - DNA, 22 bp, synthetic construct
  misc_feature 1..22: note = chemically synthesized
  source 1..22: mol_type = other DNA
gttttcaccaccagggcactcg

SEQ ID NO: 50035 - DNA, 22 bp, synthetic construct
  misc_feature 1..22: note = chemically synthesized
  source 1..22: mol_type = other DNA
ttttcaccaccagggcactcgt

SEQ ID NO: 50036 - DNA, 22 bp, synthetic construct
  misc_feature 1..22: note = chemically synthesized
  source 1..22: mol_type = other DNA
tcaccaccagggcactcgtgta

SEQ ID NO: 50037 - DNA, 22 bp, synthetic construct
  misc_feature 1..22: note = chemically synthesized
  source 1..22: mol_type = other DNA
caccaccagggcactcgtgtac

SEQ ID NO: 50038 - DNA, 22 bp, synthetic construct
  misc_feature 1..22: note = chemically synthesized
  source 1..22: mol_type = other DNA
accaccagggcactcgtgtacc

SEQ ID NO: 50039 - DNA, 22 bp, synthetic construct
  misc_feature 1..22: note = chemically synthesized
  source 1..22: mol_type = other DNA
gtgtaccttgagggagacactg

SEQ ID NO: 50040 - DNA, 22 bp, synthetic construct
  misc_feature 1..22: note = chemically synthesized
  source 1..22: mol_type = other DNA
gagggagacactgggagcccag

SEQ ID NO: 50041 - DNA, 22 bp, synthetic construct
  misc_feature 1..22: note = chemically synthesized
  source 1..22: mol_type = other DNA
agggagacactgggagcccagg

SEQ ID NO: 50042 - DNA, 22 bp, synthetic construct
  misc_feature 1..22: note = chemically synthesized
  source 1..22: mol_type = other DNA
ggagcccagggagcctggagac

SEQ ID NO: 50043 - DNA, 22 bp, synthetic construct
  misc_feature 1..22: note = chemically synthesized
  source 1..22: mol_type = other DNA
gagaccaggatatactttggtg

SEQ ID NO: 50044 - DNA, 22 bp, synthetic construct
  misc_feature 1..22: note = chemically synthesized
  source 1..22: mol_type = other DNA
tggtgatgaggggaggacacat

SEQ ID NO: 50045 - DNA, 22 bp, synthetic construct
  misc_feature 1..22: note = chemically synthesized
  source 1..22: mol_type = other DNA
ggtgatgaggggaggacacatt

SEQ ID NO: 50046 - DNA, 22 bp, synthetic construct
  misc_feature 1..22: note = chemically synthesized
  source 1..22: mol_type = other DNA
gtgatgaggggaggacacattg

SEQ ID NO: 50047 - DNA, 22 bp, synthetic construct
  misc_feature 1..22: note = chemically synthesized
  source 1..22: mol_type = other DNA
tagctcagagcagcagctgaat

SEQ ID NO: 50048 - DNA, 22 bp, synthetic construct
  misc_feature 1..22: note = chemically synthesized
  source 1..22: mol_type = other DNA
agagcagcagctgaatgagaaa

SEQ ID NO: 50049 - DNA, 22 bp, synthetic construct
  misc_feature 1..22: note = chemically synthesized
  source 1..22: mol_type = other DNA
aatgagaaaacttacttgatct

SEQ ID NO: 50050 - DNA, 22 bp, synthetic construct
  misc_feature 1..22: note = chemically synthesized
  source 1..22: mol_type = other DNA
acttgatctaaaagataaaaga

SEQ ID NO: 50051 - DNA, 22 bp, synthetic construct
  misc_feature 1..22: note = chemically synthesized
  source 1..22: mol_type = other DNA
cttgatctaaaagataaaagag

SEQ ID NO: 50052 - DNA, 22 bp, synthetic construct
  misc_feature 1..22: note = chemically synthesized
  source 1..22: mol_type = other DNA
gatctaaaagataaaagagtca

SEQ ID NO: 50053 - DNA, 22 bp, synthetic construct
  misc_feature 1..22: note = chemically synthesized
  source 1..22: mol_type = other DNA
atctaaaagataaaagagtcag

SEQ ID NO: 50054 - DNA, 22 bp, synthetic construct
  misc_feature 1..22: note = chemically synthesized
  source 1..22: mol_type = other DNA
aaagataaaagagtcagccaaa

SEQ ID NO: 50055 - DNA, 22 bp, synthetic construct
  misc_feature 1..22: note = chemically synthesized
  source 1..22: mol_type = other DNA
taggtgccagccatctatctaa

SEQ ID NO: 50056 - DNA, 22 bp, synthetic construct
  misc_feature 1..22: note = chemically synthesized
  source 1..22: mol_type = other DNA
aggtgccagccatctatctaaa

SEQ ID NO: 50057 - DNA, 22 bp, synthetic construct
  misc_feature 1..22: note = chemically synthesized
  source 1..22: mol_type = other DNA
ggtgccagccatctatctaaag

SEQ ID NO: 50058 - DNA, 22 bp, synthetic construct
  misc_feature 1..22: note = chemically synthesized
  source 1..22: mol_type = other DNA
tctaaagaagaaacctaaagca

SEQ ID NO: 50059 - DNA, 22 bp, synthetic construct
  misc_feature 1..22: note = chemically synthesized
  source 1..22: mol_type = other DNA
aagaagaaacctaaagcattgt

SEQ ID NO: 50060 - DNA, 22 bp, synthetic construct
  misc_feature 1..22: note = chemically synthesized
  source 1..22: mol_type = other DNA
aagcattgttagaaaggtttgt

SEQ ID NO: 50061 - DNA, 22 bp, synthetic construct
  misc_feature 1..22: note = chemically synthesized
  source 1..22: mol_type = other DNA
ttagaaaggtttgtagttctgt

SEQ ID NO: 50062 - DNA, 22 bp, synthetic construct
  misc_feature 1..22: note = chemically synthesized
  source 1..22: mol_type = other DNA
gaaaggtttgtagttctgtagc

SEQ ID NO: 50063 - DNA, 22 bp, synthetic construct
  misc_feature 1..22: note = chemically synthesized
  source 1..22: mol_type = other DNA
gtagttctgtagccttccctcc

SEQ ID NO: 50064 - DNA, 22 bp, synthetic construct
  misc_feature 1..22: note = chemically synthesized
  source 1..22: mol_type = other DNA
tagttctgtagccttccctcct

SEQ ID NO: 50065 - DNA, 22 bp, synthetic construct
  misc_feature 1..22: note = chemically synthesized
  source 1..22: mol_type = other DNA
tgtagccttccctcctccaaag

SEQ ID NO: 50066 - DNA, 22 bp, synthetic construct
  misc_feature 1..22: note = chemically synthesized
  source 1..22: mol_type = other DNA
tagccttccctcctccaaagga

SEQ ID NO: 50067 - DNA, 22 bp, synthetic construct
  misc_feature 1..22: note = chemically synthesized
  source 1..22: mol_type = other DNA
ccctcctccaaaggaggaacct

SEQ ID NO: 50068 - DNA, 22 bp, synthetic construct
  misc_feature 1..22: note = chemically synthesized
  source 1..22: mol_type = other DNA
cctcctccaaaggaggaacctg

SEQ ID NO: 50069 - DNA, 22 bp, synthetic construct
  misc_feature 1..22: note = chemically synthesized
  source 1..22: mol_type = other DNA
ctccaaaggaggaacctgatgt

SEQ ID NO: 50070 - DNA, 22 bp, synthetic construct
  misc_feature 1..22: note = chemically synthesized
  source 1..22: mol_type = other DNA
caaaggaggaacctgatgtctt

SEQ ID NO: 50071 - DNA, 22 bp, synthetic construct
  misc_feature 1..22: note = chemically synthesized
  source 1..22: mol_type = other DNA
atgtcttaatacactataatag

SEQ ID NO: 50072 - DNA, 22 bp, synthetic construct
  misc_feature 1..22: note = chemically synthesized
  source 1..22: mol_type = other DNA
aatacactataatagccaaggc

SEQ ID NO: 50073 - DNA, 22 bp, synthetic construct
  misc_feature 1..22: note = chemically synthesized
  source 1..22: mol_type = other DNA
atacactataatagccaaggct

SEQ ID NO: 50074 - DNA, 22 bp, synthetic construct
  misc_feature 1..22: note = chemically synthesized
  source 1..22: mol_type = other DNA
taatagccaaggcttcctgcca

SEQ ID NO: 50075 - DNA, 22 bp, synthetic construct
  misc_feature 1..22: note = chemically synthesized
  source 1..22: mol_type = other DNA
cctgccatcaaactgctaacaa

SEQ ID NO: 50076 - DNA, 22 bp, synthetic construct
  misc_feature 1..22: note = chemically synthesized
  source 1..22: mol_type = other DNA
ctgccatcaaactgctaacaat

SEQ ID NO: 50077 - DNA, 22 bp, synthetic construct
  misc_feature 1..22: note = chemically synthesized
  source 1..22: mol_type = other DNA
ccatcaaactgctaacaataaa

SEQ ID NO: 50078 - DNA, 22 bp, synthetic construct
  misc_feature 1..22: note = chemically synthesized
  source 1..22: mol_type = other DNA
ctaacaataaaactgccctgca

SEQ ID NO: 50079 - DNA, 22 bp, synthetic construct
  misc_feature 1..22: note = chemically synthesized
  source 1..22: mol_type = other DNA
acaataaaactgccctgcaatg

SEQ ID NO: 50080 - DNA, 22 bp, synthetic construct
  misc_feature 1..22: note = chemically synthesized
  source 1..22: mol_type = other DNA
ccctgcaatgttcgtggggaac

SEQ ID NO: 50081 - DNA, 22 bp, synthetic construct
  misc_feature 1..22: note = chemically synthesized
  source 1..22: mol_type = other DNA
caatgttcgtggggaacagaaa

SEQ ID NO: 50082 - DNA, 22 bp, synthetic construct
  misc_feature 1..22: note = chemically synthesized
  source 1..22: mol_type = other DNA
gtggggaacagaaacaggcaat

SEQ ID NO: 50083 - DNA, 22 bp, synthetic construct
  misc_feature 1..22: note = chemically synthesized
  source 1..22: mol_type = other DNA
ctctatgtatctggaagtgcct

SEQ ID NO: 50084 - DNA, 22 bp, synthetic construct
  misc_feature 1..22: note = chemically synthesized
  source 1..22: mol_type = other DNA
tctatgtatctggaagtgcctc

SEQ ID NO: 50085 - DNA, 22 bp, synthetic construct
  misc_feature 1..22: note = chemically synthesized
  source 1..22: mol_type = other DNA
tatgtatctggaagtgcctcaa

SEQ ID NO: 50086 - DNA, 22 bp, synthetic construct
  misc_feature 1..22: note = chemically synthesized
  source 1..22: mol_type = other DNA
tgtatctggaagtgcctcaatc

SEQ ID NO: 50087 - DNA, 22 bp, synthetic construct
  misc_feature 1..22: note = chemically synthesized
  source 1..22: mol_type = other DNA
gaagtgcctcaatcatatactt

SEQ ID NO: 50088 - DNA, 22 bp, synthetic construct
  misc_feature 1..22: note = chemically synthesized
  source 1..22: mol_type = other DNA
aatcatatacttaaattttaca

SEQ ID NO: 50089 - DNA, 22 bp, synthetic construct
  misc_feature 1..22: note = chemically synthesized
  source 1..22: mol_type = other DNA
aaattttacagtcttctcccca

SEQ ID NO: 50090 - DNA, 22 bp, synthetic construct
  misc_feature 1..22: note = chemically synthesized
  source 1..22: mol_type = other DNA
aattttacagtcttctccccaa

SEQ ID NO: 50091 - DNA, 22 bp, synthetic construct
  misc_feature 1..22: note = chemically synthesized
  source 1..22: mol_type = other DNA
tacagtcttctccccaaatgag

SEQ ID NO: 50092 - DNA, 22 bp, synthetic construct
  misc_feature 1..22: note = chemically synthesized
  source 1..22: mol_type = other DNA
acagtcttctccccaaatgaga

SEQ ID NO: 50093 - DNA, 22 bp, synthetic construct
  misc_feature 1..22: note = chemically synthesized
  source 1..22: mol_type = other DNA
cagtcttctccccaaatgagaa

SEQ ID NO: 50094 - DNA, 22 bp, synthetic construct
  misc_feature 1..22: note = chemically synthesized
  source 1..22: mol_type = other DNA
ctccccaaatgagaacgatttc

SEQ ID NO: 50095 - DNA, 22 bp, synthetic construct
  misc_feature 1..22: note = chemically synthesized
  source 1..22: mol_type = other DNA
tccccaaatgagaacgatttcc

SEQ ID NO: 50096 - DNA, 22 bp, synthetic construct
  misc_feature 1..22: note = chemically synthesized
  source 1..22: mol_type = other DNA
cccaaatgagaacgatttccag

SEQ ID NO: 50097 - DNA, 22 bp, synthetic construct
  misc_feature 1..22: note = chemically synthesized
  source 1..22: mol_type = other DNA
ccagccaacacgttcacaaact

SEQ ID NO: 50098 - DNA, 22 bp, synthetic construct
  misc_feature 1..22: note = chemically synthesized
  source 1..22: mol_type = other DNA
cagccaacacgttcacaaactg

SEQ ID NO: 50099 - DNA, 22 bp, synthetic construct
  misc_feature 1..22: note = chemically synthesized
  source 1..22: mol_type = other DNA
acaaactgtacttaacgttaaa

SEQ ID NO: 50100 - DNA, 22 bp, synthetic construct
  misc_feature 1..22: note = chemically synthesized
  source 1..22: mol_type = other DNA
tacttaacgttaaaagaaaacg

SEQ ID NO: 50101 - DNA, 22 bp, synthetic construct
  misc_feature 1..22: note = chemically synthesized
  source 1..22: mol_type = other DNA
aacgttaaaagaaaacggataa

SEQ ID NO: 50102 - DNA, 22 bp, synthetic construct
  misc_feature 1..22: note = chemically synthesized
  source 1..22: mol_type = other DNA
acgttaaaagaaaacggataaa

SEQ ID NO: 50103 - DNA, 22 bp, synthetic construct
  misc_feature 1..22: note = chemically synthesized
  source 1..22: mol_type = other DNA
aaagaaaacggataaaacatat

SEQ ID NO: 50104 - DNA, 22 bp, synthetic construct
  misc_feature 1..22: note = chemically synthesized
  source 1..22: mol_type = other DNA
ctcaaggttagacttctaattc

SEQ ID NO: 50105 - DNA, 22 bp, synthetic construct
  misc_feature 1..22: note = chemically synthesized
  source 1..22: mol_type = other DNA
aaggttagacttctaattcctc

SEQ ID NO: 50106 - DNA, 22 bp, synthetic construct
  misc_feature 1..22: note = chemically synthesized
  source 1..22: mol_type = other DNA
gacttctaattcctcaattcac

SEQ ID NO: 50107 - DNA, 22 bp, synthetic construct
  misc_feature 1..22: note = chemically synthesized
  source 1..22: mol_type = other DNA
ctaattcctcaattcactaaag

SEQ ID NO: 50108 - DNA, 22 bp, synthetic construct
  misc_feature 1..22: note = chemically synthesized
  source 1..22: mol_type = other DNA
taattcctcaattcactaaagg

SEQ ID NO: 50109 - DNA, 22 bp, synthetic construct
  misc_feature 1..22: note = chemically synthesized
  source 1..22: mol_type = other DNA
attcctcaattcactaaaggaa

SEQ ID NO: 50110 - DNA, 22 bp, synthetic construct
  misc_feature 1..22: note = chemically synthesized
  source 1..22: mol_type = other DNA
ctcaattcactaaaggaaactt

SEQ ID NO: 50111 - DNA, 22 bp, synthetic construct
  misc_feature 1..22: note = chemically synthesized
  source 1..22: mol_type = other DNA
aattcactaaaggaaacttggc

SEQ ID NO: 50112 - DNA, 22 bp, synthetic construct
  misc_feature 1..22: note = chemically synthesized
  source 1..22: mol_type = other DNA
actaaaggaaacttggcaagaa

SEQ ID NO: 50113 - DNA, 22 bp, synthetic construct
  misc_feature 1..22: note = chemically synthesized
  source 1..22: mol_type = other DNA
aaggaaacttggcaagaagatg

SEQ ID NO: 50114 - DNA, 22 bp, synthetic construct
  misc_feature 1..22: note = chemically synthesized
  source 1..22: mol_type = other DNA
ggcaagaagatgcatcattttg

SEQ ID NO: 50115 - DNA, 22 bp, synthetic construct
  misc_feature 1..22: note = chemically synthesized
  source 1..22: mol_type = other DNA
gcaagaagatgcatcattttgc

SEQ ID NO: 50116 - DNA, 22 bp, synthetic construct
  misc_feature 1..22: note = chemically synthesized
  source 1..22: mol_type = other DNA
tgctcctttctactggggcatc

SEQ ID NO: 50117 - DNA, 22 bp, synthetic construct
  misc_feature 1..22: note = chemically synthesized
  source 1..22: mol_type = other DNA
gctcctttctactggggcatct

SEQ ID NO: 50118 - DNA, 22 bp, synthetic construct
  misc_feature 1..22: note = chemically synthesized
  source 1..22: mol_type = other DNA
ctcctttctactggggcatctg

SEQ ID NO: 50119 - DNA, 22 bp, synthetic construct
  misc_feature 1..22: note = chemically synthesized
  source 1..22: mol_type = other DNA
ctttctactggggcatctgagg

SEQ ID NO: 50120 - DNA, 22 bp, synthetic construct
  misc_feature 1..22: note = chemically synthesized
  source 1..22: mol_type = other DNA
tctactggggcatctgaggagg

SEQ ID NO: 50121 - DNA, 22 bp, synthetic construct
  misc_feature 1..22: note = chemically synthesized
  source 1..22: mol_type = other DNA
ctactggggcatctgaggagga

SEQ ID NO: 50122 - DNA, 22 bp, synthetic construct
  misc_feature 1..22: note = chemically synthesized
  source 1..22: mol_type = other DNA
tactggggcatctgaggaggag

SEQ ID NO: 50123 - DNA, 22 bp, synthetic construct
  misc_feature 1..22: note = chemically synthesized
  source 1..22: mol_type = other DNA
ctggggcatctgaggaggagag

SEQ ID NO: 50124 - DNA, 22 bp, synthetic construct
  misc_feature 1..22: note = chemically synthesized
  source 1..22: mol_type = other DNA
gggcatctgaggaggagagcca

SEQ ID NO: 50125 - DNA, 22 bp, synthetic construct
  misc_feature 1..22: note = chemically synthesized
  source 1..22: mol_type = other DNA
aggaggagagccactgaggcag

SEQ ID NO: 50126 - DNA, 22 bp, synthetic construct
  misc_feature 1..22: note = chemically synthesized
  source 1..22: mol_type = other DNA
aggcagctaatacacaaaacat

SEQ ID NO: 50127 - DNA, 22 bp, synthetic construct
  misc_feature 1..22: note = chemically synthesized
  source 1..22: mol_type = other DNA
atacacaaaacatgatcaaaag

SEQ ID NO: 50128 - DNA, 22 bp, synthetic construct
  misc_feature 1..22: note = chemically synthesized
  source 1..22: mol_type = other DNA
acaacagcttcatatgcaaatt

SEQ ID NO: 50129 - DNA, 22 bp, synthetic construct
  misc_feature 1..22: note = chemically synthesized
  source 1..22: mol_type = other DNA
catatgcaaattacattaatga

SEQ ID NO: 50130 - DNA, 22 bp, synthetic construct
  misc_feature 1..22: note = chemically synthesized
  source 1..22: mol_type = other DNA
atatgcaaattacattaatgaa

SEQ ID NO: 50131 - DNA, 22 bp, synthetic construct
  misc_feature 1..22: note = chemically synthesized
  source 1..22: mol_type = other DNA
cattaatgaaggagtgcaaagt

SEQ ID NO: 50132 - DNA, 22 bp, synthetic construct
  misc_feature 1..22: note = chemically synthesized
  source 1..22: mol_type = other DNA
atgaaggagtgcaaagtcatca

SEQ ID NO: 50133 - DNA, 22 bp, synthetic construct
  misc_feature 1..22: note = chemically synthesized
  source 1..22: mol_type = other DNA
aatatgtcaaatctcttggtga

SEQ ID NO: 50134 - DNA, 22 bp, synthetic construct
  misc_feature 1..22: note = chemically synthesized
  source 1..22: mol_type = other DNA
ttggtgaacttttaatcttgag

SEQ ID NO: 50135 - DNA, 22 bp, synthetic construct
  misc_feature 1..22: note = chemically synthesized
  source 1..22: mol_type = other DNA
ggtgaacttttaatcttgagaa

SEQ ID NO: 50136 - DNA, 22 bp, synthetic construct
  misc_feature 1..22: note = chemically synthesized
  source 1..22: mol_type = other DNA
gtgaacttttaatcttgagaag

SEQ ID NO: 50137 - DNA, 22 bp, synthetic construct
  misc_feature 1..22: note = chemically synthesized
  source 1..22: mol_type = other DNA
ttaatcttgagaagaaaaaaca

SEQ ID NO: 50138 - DNA, 22 bp, synthetic construct
  misc_feature 1..22: note = chemically synthesized
  source 1..22: mol_type = other DNA
taatcttgagaagaaaaaacac

SEQ ID NO: 50139 - DNA, 22 bp, synthetic construct
  misc_feature 1..22: note = chemically synthesized
  source 1..22: mol_type = other DNA
aatcttgagaagaaaaaacact

SEQ ID NO: 50140 - DNA, 22 bp, synthetic construct
  misc_feature 1..22: note = chemically synthesized
  source 1..22: mol_type = other DNA
atcttgagaagaaaaaacactg

SEQ ID NO: 50141 - DNA, 22 bp, synthetic construct
  misc_feature 1..22: note = chemically synthesized
  source 1..22: mol_type = other DNA
gagaagaaaaaacactgcttta

SEQ ID NO: 50142 - DNA, 22 bp, synthetic construct
  misc_feature 1..22: note = chemically synthesized
  source 1..22: mol_type = other DNA
agaagaaaaaacactgctttaa

SEQ ID NO: 50143 - DNA, 22 bp, synthetic construct
  misc_feature 1..22: note = chemically synthesized
  source 1..22: mol_type = other DNA
ctttaatttttttacatcatca

SEQ ID NO: 50144 - DNA, 22 bp, synthetic construct
  misc_feature 1..22: note = chemically synthesized
  source 1..22: mol_type = other DNA
taatttttttacatcatcaatt

SEQ ID NO: 50145 - DNA, 22 bp, synthetic construct
  misc_feature 1..22: note = chemically synthesized
  source 1..22: mol_type = other DNA
aatttttttacatcatcaattt

SEQ ID NO: 50146 - DNA, 22 bp, synthetic construct
  misc_feature 1..22: note = chemically synthesized
  source 1..22: mol_type = other DNA
atttttttacatcatcaatttt

SEQ ID NO: 50147 - DNA, 22 bp, synthetic construct
  misc_feature 1..22: note = chemically synthesized
  source 1..22: mol_type = other DNA
ttttacatcatcaattttgcaa

SEQ ID NO: 50148 - DNA, 22 bp, synthetic construct
  misc_feature 1..22: note = chemically synthesized
  source 1..22: mol_type = other DNA
tttacatcatcaattttgcaag

SEQ ID NO: 50149 - DNA, 22 bp, synthetic construct
  misc_feature 1..22: note = chemically synthesized
  source 1..22: mol_type = other DNA
ttacatcatcaattttgcaaga

SEQ ID NO: 50150 - DNA, 22 bp, synthetic construct
  misc_feature 1..22: note = chemically synthesized
  source 1..22: mol_type = other DNA
tacatcatcaattttgcaagat

SEQ ID NO: 50151 - DNA, 22 bp, synthetic construct
  misc_feature 1..22: note = chemically synthesized
  source 1..22: mol_type = other DNA
acatcatcaattttgcaagatt

SEQ ID NO: 50152 - DNA, 22 bp, synthetic construct
  misc_feature 1..22: note = chemically synthesized
  source 1..22: mol_type = other DNA
catcatcaattttgcaagattg

SEQ ID NO: 50153 - DNA, 22 bp, synthetic construct
  misc_feature 1..22: note = chemically synthesized
  source 1..22: mol_type = other DNA
tgcaagattgaaaatctaagaa

SEQ ID NO: 50154 - DNA, 22 bp, synthetic construct
  misc_feature 1..22: note = chemically synthesized
  source 1..22: mol_type = other DNA
gcaagattgaaaatctaagaat

SEQ ID NO: 50155 - DNA, 22 bp, synthetic construct
  misc_feature 1..22: note = chemically synthesized
  source 1..22: mol_type = other DNA
caagattgaaaatctaagaatc

SEQ ID NO: 50156 - DNA, 22 bp, synthetic construct
  misc_feature 1..22: note = chemically synthesized
  source 1..22: mol_type = other DNA
aaaatctaagaatcttggtgct

SEQ ID NO: 50157 - DNA, 22 bp, synthetic construct
  misc_feature 1..22: note = chemically synthesized
  source 1..22: mol_type = other DNA
agaatcttggtgctataaacaa

SEQ ID NO: 50158 - DNA, 22 bp, synthetic construct
  misc_feature 1..22: note = chemically synthesized
  source 1..22: mol_type = other DNA
ggtgctataaacaattttcacc

SEQ ID NO: 50159 - DNA, 22 bp, synthetic construct
  misc_feature 1..22: note = chemically synthesized
  source 1..22: mol_type = other DNA
gtgctataaacaattttcacct

SEQ ID NO: 50160 - DNA, 22 bp, synthetic construct
  misc_feature 1..22: note = chemically synthesized
  source 1..22: mol_type = other DNA
taaacaattttcaccttttttt

SEQ ID NO: 50161 - DNA, 22 bp, synthetic construct
  misc_feature 1..22: note = chemically synthesized
  source 1..22: mol_type = other DNA
tcaccttttttttctccttcag

SEQ ID NO: 50162 - DNA, 22 bp, synthetic construct
  misc_feature 1..22: note = chemically synthesized
  source 1..22: mol_type = other DNA
caccttttttttctccttcagc

SEQ ID NO: 50163 - DNA, 22 bp, synthetic construct
  misc_feature 1..22: note = chemically synthesized
  source 1..22: mol_type = other DNA
accttttttttctccttcagca

SEQ ID NO: 50164 - DNA, 22 bp, synthetic construct
  misc_feature 1..22: note = chemically synthesized
  source 1..22: mol_type = other DNA
ttttttctccttcagcaggctg

SEQ ID NO: 50165 - DNA, 22 bp, synthetic construct
  misc_feature 1..22: note = chemically synthesized
  source 1..22: mol_type = other DNA
tttttctccttcagcaggctga

SEQ ID NO: 50166 - DNA, 22 bp, synthetic construct
  misc_feature 1..22: note = chemically synthesized
  source 1..22: mol_type = other DNA
ttttctccttcagcaggctgac

SEQ ID NO: 50167 - DNA, 22 bp, synthetic construct
  misc_feature 1..22: note = chemically synthesized
  source 1..22: mol_type = other DNA
tttctccttcagcaggctgaca

SEQ ID NO: 50168 - DNA, 22 bp, synthetic construct
  misc_feature 1..22: note = chemically synthesized
  source 1..22: mol_type = other DNA
ttctccttcagcaggctgacag

SEQ ID NO: 50169 - DNA, 22 bp, synthetic construct
  misc_feature 1..22: note = chemically synthesized
  source 1..22: mol_type = other DNA
tctccttcagcaggctgacagg

SEQ ID NO: 50170 - DNA, 22 bp, synthetic construct
  misc_feature 1..22: note = chemically synthesized
  source 1..22: mol_type = other DNA
ctccttcagcaggctgacaggc

SEQ ID NO: 50171 - DNA, 22 bp, synthetic construct
  misc_feature 1..22: note = chemically synthesized
  source 1..22: mol_type = other DNA
tccttcagcaggctgacaggcc

SEQ ID NO: 50172 - DNA, 22 bp, synthetic construct
  misc_feature 1..22: note = chemically synthesized
  source 1..22: mol_type = other DNA
cttcagcaggctgacaggccag

SEQ ID NO: 50173 - DNA, 22 bp, synthetic construct
  misc_feature 1..22: note = chemically synthesized
  source 1..22: mol_type = other DNA
cagcaggctgacaggccagcct

SEQ ID NO: 50174 - DNA, 22 bp, synthetic construct
  misc_feature 1..22: note = chemically synthesized
  source 1..22: mol_type = other DNA
agcaggctgacaggccagcctg

SEQ ID NO: 50175 - DNA, 22 bp, synthetic construct
  misc_feature 1..22: note = chemically synthesized
  source 1..22: mol_type = other DNA
acaggccagcctgatgtgcacc

SEQ ID NO: 50176 - DNA, 22 bp, synthetic construct
  misc_feature 1..22: note = chemically synthesized
  source 1..22: mol_type = other DNA
atgtgcaccgaatgtacatgtt

SEQ ID NO: 50177 - DNA, 22 bp, synthetic construct
  misc_feature 1..22: note = chemically synthesized
  source 1..22: mol_type = other DNA
ataggccaatcaaaaatgcaaa

SEQ ID NO: 50178 - DNA, 22 bp, synthetic construct
  misc_feature 1..22: note = chemically synthesized
  source 1..22: mol_type = other DNA
gcaattactggaaggacctaat

SEQ ID NO: 50179 - DNA, 22 bp, synthetic construct
  misc_feature 1..22: note = chemically synthesized
  source 1..22: mol_type = other DNA
ctggaaggacctaatggtcatt

SEQ ID NO: 50180 - DNA, 22 bp, synthetic construct
  misc_feature 1..22: note = chemically synthesized
  source 1..22: mol_type = other DNA
gaaggacctaatggtcattaga

SEQ ID NO: 50181 - DNA, 22 bp, synthetic construct
  misc_feature 1..22: note = chemically synthesized
  source 1..22: mol_type = other DNA
atggtcattagaatttacaact

SEQ ID NO: 50182 - DNA, 22 bp, synthetic construct
  misc_feature 1..22: note = chemically synthesized
  source 1..22: mol_type = other DNA
gaatttacaactaggtaatgaa

SEQ ID NO: 50183 - DNA, 22 bp, synthetic construct
  misc_feature 1..22: note = chemically synthesized
  source 1..22: mol_type = other DNA
acaactaggtaatgaactgaag

SEQ ID NO: 50184 - DNA, 22 bp, synthetic construct
  misc_feature 1..22: note = chemically synthesized
  source 1..22: mol_type = other DNA
caactaggtaatgaactgaagt

SEQ ID NO: 50185 - DNA, 22 bp, synthetic construct
  misc_feature 1..22: note = chemically synthesized
  source 1..22: mol_type = other DNA
ggtaatgaactgaagtctgccc

SEQ ID NO: 50186 - DNA, 22 bp, synthetic construct
  misc_feature 1..22: note = chemically synthesized
  source 1..22: mol_type = other DNA
aagtctgcccacaccatgcata

SEQ ID NO: 50187 - DNA, 22 bp, synthetic construct
  misc_feature 1..22: note = chemically synthesized
  source 1..22: mol_type = other DNA
cccacaccatgcatattcataa

SEQ ID NO: 50188 - DNA, 22 bp, synthetic construct
  misc_feature 1..22: note = chemically synthesized
  source 1..22: mol_type = other DNA
ataaagcaatttagcctttgaa

SEQ ID NO: 50189 - DNA, 22 bp, synthetic construct
  misc_feature 1..22: note = chemically synthesized
  source 1..22: mol_type = other DNA
agcctttgaagattaaagaagt

SEQ ID NO: 50190 - DNA, 22 bp, synthetic construct
  misc_feature 1..22: note = chemically synthesized
  source 1..22: mol_type = other DNA
gcctttgaagattaaagaagtg

SEQ ID NO: 50191 - DNA, 22 bp, synthetic construct
  misc_feature 1..22: note = chemically synthesized
  source 1..22: mol_type = other DNA
tgaagattaaagaagtgcttaa

SEQ ID NO: 50192 - DNA, 22 bp, synthetic construct
  misc_feature 1..22: note = chemically synthesized
  source 1..22: mol_type = other DNA
gaagattaaagaagtgcttaaa

SEQ ID NO: 50193 - DNA, 22 bp, synthetic construct
  misc_feature 1..22: note = chemically synthesized
  source 1..22: mol_type = other DNA
aagattaaagaagtgcttaaaa

SEQ ID NO: 50194 - DNA, 22 bp, synthetic construct
  misc_feature 1..22: note = chemically synthesized
  source 1..22: mol_type = other DNA
aagaagtgcttaaaattcaaat

SEQ ID NO: 50195 - DNA, 22 bp, synthetic construct
  misc_feature 1..22: note = chemically synthesized
  source 1..22: mol_type = other DNA
aaaattcaaatgagctttagca

SEQ ID NO: 50196 - DNA, 22 bp, synthetic construct
  misc_feature 1..22: note = chemically synthesized
  source 1..22: mol_type = other DNA
aaattcaaatgagctttagcaa

SEQ ID NO: 50197 - DNA, 22 bp, synthetic construct
  misc_feature 1..22: note = chemically synthesized
  source 1..22: mol_type = other DNA
aaatgagctttagcaaattatc

SEQ ID NO: 50198 - DNA, 22 bp, synthetic construct
  misc_feature 1..22: note = chemically synthesized
  source 1..22: mol_type = other DNA
tagcaaattatcagtaagattc

SEQ ID NO: 50199 - DNA, 22 bp, synthetic construct
  misc_feature 1..22: note = chemically synthesized
  source 1..22: mol_type = other DNA
agcaaattatcagtaagattca

SEQ ID NO: 50200 - DNA, 22 bp, synthetic construct
  misc_feature 1..22: note = chemically synthesized
  source 1..22: mol_type = other DNA
gcaaattatcagtaagattcat

SEQ ID NO: 50201 - DNA, 22 bp, synthetic construct
  misc_feature 1..22: note = chemically synthesized
  source 1..22: mol_type = other DNA
tcagtaagattcatccaaaaag

SEQ ID NO: 50202 - DNA, 22 bp, synthetic construct
  misc_feature 1..22: note = chemically synthesized
  source 1..22: mol_type = other DNA
atccaaaaagcaaagggttttt

SEQ ID NO: 50203 - DNA, 22 bp, synthetic construct
  misc_feature 1..22: note = chemically synthesized
  source 1..22: mol_type = other DNA
ttcttcctatgatttcctcatt

SEQ ID NO: 50204 - DNA, 22 bp, synthetic construct
  misc_feature 1..22: note = chemically synthesized
  source 1..22: mol_type = other DNA
tcttcctatgatttcctcattt

SEQ ID NO: 50205 - DNA, 22 bp, synthetic construct
  misc_feature 1..22: note = chemically synthesized
  source 1..22: mol_type = other DNA
cttcctatgatttcctcatttt

SEQ ID NO: 50206 - DNA, 22 bp, synthetic construct
  misc_feature 1..22: note = chemically synthesized
  source 1..22: mol_type = other DNA
ttcctatgatttcctcattttt

SEQ ID NO: 50207 - DNA, 22 bp, synthetic construct
  misc_feature 1..22: note = chemically synthesized
  source 1..22: mol_type = other DNA
cctatgatttcctcattttttt

SEQ ID NO: 50208 - DNA, 22 bp, synthetic construct
  misc_feature 1..22: note = chemically synthesized
  source 1..22: mol_type = other DNA
ctatgatttcctcattttttta

SEQ ID NO: 50209 - DNA, 22 bp, synthetic construct
  misc_feature 1..22: note = chemically synthesized
  source 1..22: mol_type = other DNA
tgatttcctcatttttttaatg

SEQ ID NO: 50210 - DNA, 22 bp, synthetic construct
  misc_feature 1..22: note = chemically synthesized
  source 1..22: mol_type = other DNA
cctcatttttttaatgcaaaat

SEQ ID NO: 50211 - DNA, 22 bp, synthetic construct
  misc_feature 1..22: note = chemically synthesized
  source 1..22: mol_type = other DNA
ctcatttttttaatgcaaaatt

SEQ ID NO: 50212 - DNA, 22 bp, synthetic construct
  misc_feature 1..22: note = chemically synthesized
  source 1..22: mol_type = other DNA
atttttttaatgcaaaattgta

SEQ ID NO: 50213 - DNA, 22 bp, synthetic construct
  misc_feature 1..22: note = chemically synthesized
  source 1..22: mol_type = other DNA
ttttaatgcaaaattgtaatat

SEQ ID NO: 50214 - DNA, 22 bp, synthetic construct
  misc_feature 1..22: note = chemically synthesized
  source 1..22: mol_type = other DNA
tttaatgcaaaattgtaatatc

SEQ ID NO: 50215 - DNA, 22 bp, synthetic construct
  misc_feature 1..22: note = chemically synthesized
  source 1..22: mol_type = other DNA
ttaatgcaaaattgtaatatct

SEQ ID NO: 50216 - DNA, 22 bp, synthetic construct
  misc_feature 1..22: note = chemically synthesized
  source 1..22: mol_type = other DNA
taatgcaaaattgtaatatctt

SEQ ID NO: 50217 - DNA, 22 bp, synthetic construct
  misc_feature 1..22: note = chemically synthesized
  source 1..22: mol_type = other DNA
aatgcaaaattgtaatatcttc

SEQ ID NO: 50218 - DNA, 22 bp, synthetic construct
  misc_feature 1..22: note = chemically synthesized
  source 1..22: mol_type = other DNA
atgcaaaattgtaatatcttcc

SEQ ID NO: 50219 - DNA, 22 bp, synthetic construct
  misc_feature 1..22: note = chemically synthesized
  source 1..22: mol_type = other DNA
taatatcttccagactgagctt

SEQ ID NO: 50220 - DNA, 22 bp, synthetic construct
  misc_feature 1..22: note = chemically synthesized
  source 1..22: mol_type = other DNA
ccagactgagcttaaactaaac

SEQ ID NO: 50221 - DNA, 22 bp, synthetic construct
  misc_feature 1..22: note = chemically synthesized
  source 1..22: mol_type = other DNA
cagactgagcttaaactaaaca

SEQ ID NO: 50222 - DNA, 22 bp, synthetic construct
  misc_feature 1..22: note = chemically synthesized
  source 1..22: mol_type = other DNA
agcttaaactaaacatagagct

SEQ ID NO: 50223 - DNA, 22 bp, synthetic construct
  misc_feature 1..22: note = chemically synthesized
  source 1..22: mol_type = other DNA
aaactaaacatagagcttctag

SEQ ID NO: 50224 - DNA, 22 bp, synthetic construct
  misc_feature 1..22: note = chemically synthesized
  source 1..22: mol_type = other DNA
aactaaacatagagcttctagt

SEQ ID NO: 50225 - DNA, 22 bp, synthetic construct
  misc_feature 1..22: note = chemically synthesized
  source 1..22: mol_type = other DNA
aacatagagcttctagtcaagc

SEQ ID NO: 50226 - DNA, 22 bp, synthetic construct
  misc_feature 1..22: note = chemically synthesized
  source 1..22: mol_type = other DNA
ctagtcaagccaaaggggctaa

SEQ ID NO: 50227 - DNA, 22 bp, synthetic construct
  misc_feature 1..22: note = chemically synthesized
  source 1..22: mol_type = other DNA
tagtcaagccaaaggggctaag

SEQ ID NO: 50228 - DNA, 22 bp, synthetic construct
  misc_feature 1..22: note = chemically synthesized
  source 1..22: mol_type = other DNA
gtcaagccaaaggggctaagat

SEQ ID NO: 50229 - DNA, 22 bp, synthetic construct
  misc_feature 1..22: note = chemically synthesized
  source 1..22: mol_type = other DNA
agatacaaacagaggctgcaaa

SEQ ID NO: 50230 - DNA, 22 bp, synthetic construct
  misc_feature 1..22: note = chemically synthesized
  source 1..22: mol_type = other DNA
caaacatcgtcacggactttgt

SEQ ID NO: 50231 - DNA, 22 bp, synthetic construct
  misc_feature 1..22: note = chemically synthesized
  source 1..22: mol_type = other DNA
tgttcataaaactaagccctta

SEQ ID NO: 50232 - DNA, 22 bp, synthetic construct
  misc_feature 1..22: note = chemically synthesized
  source 1..22: mol_type = other DNA
gttcataaaactaagcccttaa

SEQ ID NO: 50233 - DNA, 22 bp, synthetic construct
  misc_feature 1..22: note = chemically synthesized
  source 1..22: mol_type = other DNA
ttcataaaactaagcccttaag

SEQ ID NO: 50234 - DNA, 22 bp, synthetic construct
  misc_feature 1..22: note = chemically synthesized
  source 1..22: mol_type = other DNA
ataaaactaagcccttaagagc

SEQ ID NO: 50235 - DNA, 22 bp, synthetic construct
  misc_feature 1..22: note = chemically synthesized
  source 1..22: mol_type = other DNA
agcccttaagagccaaacctat

SEQ ID NO: 50236 - DNA, 22 bp, synthetic construct
  misc_feature 1..22: note = chemically synthesized
  source 1..22: mol_type = other DNA
aagagccaaacctatctctaaa

SEQ ID NO: 50237 - DNA, 22 bp, synthetic construct
  misc_feature 1..22: note = chemically synthesized
  source 1..22: mol_type = other DNA
agagccaaacctatctctaaac

SEQ ID NO: 50238 - DNA, 22 bp, synthetic construct
  misc_feature 1..22: note = chemically synthesized
  source 1..22: mol_type = other DNA
tctctaaacatggtaatttatc

SEQ ID NO: 50239 - DNA, 22 bp, synthetic construct
  misc_feature 1..22: note = chemically synthesized
  source 1..22: mol_type = other DNA
taaacatggtaatttatcaaaa

SEQ ID NO: 50240 - DNA, 22 bp, synthetic construct
  misc_feature 1..22: note = chemically synthesized
  source 1..22: mol_type = other DNA
aacatggtaatttatcaaaaac

SEQ ID NO: 50241 - DNA, 22 bp, synthetic construct
  misc_feature 1..22: note = chemically synthesized
  source 1..22: mol_type = other DNA
atcaaaaacagcccagagtcgc

SEQ ID NO: 50242 - DNA, 22 bp, synthetic construct
  misc_feature 1..22: note = chemically synthesized
  source 1..22: mol_type = other DNA
tcaaaaacagcccagagtcgct

SEQ ID NO: 50243 - DNA, 22 bp, synthetic construct
  misc_feature 1..22: note = chemically synthesized
  source 1..22: mol_type = other DNA
ataggcaatactgcatagtcct

SEQ ID NO: 50244 - DNA, 22 bp, synthetic construct
  misc_feature 1..22: note = chemically synthesized
  source 1..22: mol_type = other DNA
catagtcctccaacagaacaga

SEQ ID NO: 50245 - DNA, 22 bp, synthetic construct
  misc_feature 1..22: note = chemically synthesized
  source 1..22: mol_type = other DNA
caacagaacagattaacacgag

SEQ ID NO: 50246 - DNA, 22 bp, synthetic construct
  misc_feature 1..22: note = chemically synthesized
  source 1..22: mol_type = other DNA
acacgagtccctccacccttcc

SEQ ID NO: 50247 - DNA, 22 bp, synthetic construct
  misc_feature 1..22: note = chemically synthesized
  source 1..22: mol_type = other DNA
cacccttccaaaaagccttttc

SEQ ID NO: 50248 - DNA, 22 bp, synthetic construct
  misc_feature 1..22: note = chemically synthesized
  source 1..22: mol_type = other DNA
ccaaaaagccttttccccctca

SEQ ID NO: 50249 - DNA, 22 bp, synthetic construct
  misc_feature 1..22: note = chemically synthesized
  source 1..22: mol_type = other DNA
caaaaagccttttccccctcaa

SEQ ID NO: 50250 - DNA, 22 bp, synthetic construct
  misc_feature 1..22: note = chemically synthesized
  source 1..22: mol_type = other DNA
ttccccctcaagttgtctctcc

SEQ ID NO: 50251 - DNA, 22 bp, synthetic construct
  misc_feature 1..22: note = chemically synthesized
  source 1..22: mol_type = other DNA
tccccctcaagttgtctctcct

SEQ ID NO: 50252 - DNA, 22 bp, synthetic construct
  misc_feature 1..22: note = chemically synthesized
  source 1..22: mol_type = other DNA
ccccctcaagttgtctctcctg

SEQ ID NO: 50253 - DNA, 22 bp, synthetic construct
  misc_feature 1..22: note = chemically synthesized
  source 1..22: mol_type = other DNA
cccctcaagttgtctctcctgt

SEQ ID NO: 50254 - DNA, 22 bp, synthetic construct
  misc_feature 1..22: note = chemically synthesized
  source 1..22: mol_type = other DNA
aagttgtctctcctgtgtaaac

SEQ ID NO: 50255 - DNA, 22 bp, synthetic construct
  misc_feature 1..22: note = chemically synthesized
  source 1..22: mol_type = other DNA
tctctcctgtgtaaacatccac

SEQ ID NO: 50256 - DNA, 22 bp, synthetic construct
  misc_feature 1..22: note = chemically synthesized
  source 1..22: mol_type = other DNA
tcctgtgtaaacatccactgtg

SEQ ID NO: 50257 - DNA, 22 bp, synthetic construct
  misc_feature 1..22: note = chemically synthesized
  source 1..22: mol_type = other DNA
ctgtgtaaacatccactgtggt

SEQ ID NO: 50258 - DNA, 22 bp, synthetic construct
  misc_feature 1..22: note = chemically synthesized
  source 1..22: mol_type = other DNA
tgtaaacatccactgtggtata

SEQ ID NO: 50259 - DNA, 22 bp, synthetic construct
  misc_feature 1..22: note = chemically synthesized
  source 1..22: mol_type = other DNA
tggtataaaaacagctttttca

SEQ ID NO: 50260 - DNA, 22 bp, synthetic construct
  misc_feature 1..22: note = chemically synthesized
  source 1..22: mol_type = other DNA
tttcattggcttggagtggcat

SEQ ID NO: 50261 - DNA, 22 bp, synthetic construct
  misc_feature 1..22: note = chemically synthesized
  source 1..22: mol_type = other DNA
ttcattggcttggagtggcatt

SEQ ID NO: 50262 - DNA, 22 bp, synthetic construct
  misc_feature 1..22: note = chemically synthesized
  source 1..22: mol_type = other DNA
tcattggcttggagtggcatta

SEQ ID NO: 50263 - DNA, 22 bp, synthetic construct
  misc_feature 1..22: note = chemically synthesized
  source 1..22: mol_type = other DNA
cattggcttggagtggcattaa

SEQ ID NO: 50264 - DNA, 22 bp, synthetic construct
  misc_feature 1..22: note = chemically synthesized
  source 1..22: mol_type = other DNA
attggcttggagtggcattaat

SEQ ID NO: 50265 - DNA, 22 bp, synthetic construct
  misc_feature 1..22: note = chemically synthesized
  source 1..22: mol_type = other DNA
gcttggagtggcattaatttta

SEQ ID NO: 50266 - DNA, 22 bp, synthetic construct
  misc_feature 1..22: note = chemically synthesized
  source 1..22: mol_type = other DNA
ggagtggcattaattttagaag

SEQ ID NO: 50267 - DNA, 22 bp, synthetic construct
  misc_feature 1..22: note = chemically synthesized
  source 1..22: mol_type = other DNA
gagtggcattaattttagaagt

SEQ ID NO: 50268 - DNA, 22 bp, synthetic construct
  misc_feature 1..22: note = chemically synthesized
  source 1..22: mol_type = other DNA
attttagaagtttctgcttcca

SEQ ID NO: 50269 - DNA, 22 bp, synthetic construct
  misc_feature 1..22: note = chemically synthesized
  source 1..22: mol_type = other DNA
tagaagtttctgcttccaaagg

SEQ ID NO: 50270 - DNA, 22 bp, synthetic construct
  misc_feature 1..22: note = chemically synthesized
  source 1..22: mol_type = other DNA
agaagtttctgcttccaaaggg

SEQ ID NO: 50271 - DNA, 22 bp, synthetic construct
  misc_feature 1..22: note = chemically synthesized
  source 1..22: mol_type = other DNA
gaagtttctgcttccaaaggga

SEQ ID NO: 50272 - DNA, 22 bp, synthetic construct
  misc_feature 1..22: note = chemically synthesized
  source 1..22: mol_type = other DNA
ctgcttccaaagggaaaccagc

SEQ ID NO: 50273 - DNA, 22 bp, synthetic construct
  misc_feature 1..22: note = chemically synthesized
  source 1..22: mol_type = other DNA
tgcttccaaagggaaaccagca

SEQ ID NO: 50274 - DNA, 22 bp, synthetic construct
  misc_feature 1..22: note = chemically synthesized
  source 1..22: mol_type = other DNA
cttccaaagggaaaccagcaag

SEQ ID NO: 50275 - DNA, 22 bp, synthetic construct
  misc_feature 1..22: note = chemically synthesized
  source 1..22: mol_type = other DNA
ccaaagggaaaccagcaagaaa

SEQ ID NO: 50276 - DNA, 22 bp, synthetic construct
  misc_feature 1..22: note = chemically synthesized
  source 1..22: mol_type = other DNA
caaagggaaaccagcaagaaag

SEQ ID NO: 50277 - DNA, 22 bp, synthetic construct
  misc_feature 1..22: note = chemically synthesized
  source 1..22: mol_type = other DNA
gtttacttctgaggagtgcaaa

SEQ ID NO: 50278 - DNA, 22 bp, synthetic construct
  misc_feature 1..22: note = chemically synthesized
  source 1..22: mol_type = other DNA
acttctgaggagtgcaaatcct

SEQ ID NO: 50279 - DNA, 22 bp, synthetic construct
  misc_feature 1..22: note = chemically synthesized
  source 1..22: mol_type = other DNA
cttctgaggagtgcaaatcctg

SEQ ID NO: 50280 - DNA, 22 bp, synthetic construct
  misc_feature 1..22: note = chemically synthesized
  source 1..22: mol_type = other DNA
ctgaggagtgcaaatcctgttg

SEQ ID NO: 50281 - DNA, 22 bp, synthetic construct
  misc_feature 1..22: note = chemically synthesized
  source 1..22: mol_type = other DNA
tgaggagtgcaaatcctgttgc

SEQ ID NO: 50282 - DNA, 22 bp, synthetic construct
  misc_feature 1..22: note = chemically synthesized
  source 1..22: mol_type = other DNA
aggagtgcaaatcctgttgctt

SEQ ID NO: 50283 - DNA, 22 bp, synthetic construct
  misc_feature 1..22: note = chemically synthesized
  source 1..22: mol_type = other DNA
ttgcttgagatttgcctttctg

SEQ ID NO: 50284 - DNA, 22 bp, synthetic construct
  misc_feature 1..22: note = chemically synthesized
  source 1..22: mol_type = other DNA
cttgagatttgcctttctgatt

SEQ ID NO: 50285 - DNA, 22 bp, synthetic construct
  misc_feature 1..22: note = chemically synthesized
  source 1..22: mol_type = other DNA
gagatttgcctttctgatttcc

SEQ ID NO: 50286 - DNA, 22 bp, synthetic construct
  misc_feature 1..22: note = chemically synthesized
  source 1..22: mol_type = other DNA
agatttgcctttctgatttcct

SEQ ID NO: 50287 - DNA, 22 bp, synthetic construct
  misc_feature 1..22: note = chemically synthesized
  source 1..22: mol_type = other DNA
gcctttctgatttcctccattc

SEQ ID NO: 50288 - DNA, 22 bp, synthetic construct
  misc_feature 1..22: note = chemically synthesized
  source 1..22: mol_type = other DNA
cctttctgatttcctccattcg

SEQ ID NO: 50289 - DNA, 22 bp, synthetic construct
  misc_feature 1..22: note = chemically synthesized
  source 1..22: mol_type = other DNA
tctgatttcctccattcggcac

SEQ ID NO: 50290 - DNA, 22 bp, synthetic construct
  misc_feature 1..22: note = chemically synthesized
  source 1..22: mol_type = other DNA
ctgatttcctccattcggcacc

SEQ ID NO: 50291 - DNA, 22 bp, synthetic construct
  misc_feature 1..22: note = chemically synthesized
  source 1..22: mol_type = other DNA
tgatttcctccattcggcacca

SEQ ID NO: 50292 - DNA, 22 bp, synthetic construct
  misc_feature 1..22: note = chemically synthesized
  source 1..22: mol_type = other DNA
atttcctccattcggcaccagc

SEQ ID NO: 50293 - DNA, 22 bp, synthetic construct
  misc_feature 1..22: note = chemically synthesized
  source 1..22: mol_type = other DNA
cctccattcggcaccagccgca

SEQ ID NO: 50294 - DNA, 22 bp, synthetic construct
  misc_feature 1..22: note = chemically synthesized
  source 1..22: mol_type = other DNA
ctccattcggcaccagccgcat

SEQ ID NO: 50295 - DNA, 22 bp, synthetic construct
  misc_feature 1..22: note = chemically synthesized
  source 1..22: mol_type = other DNA
cattcggcaccagccgcattta

SEQ ID NO: 50296 - DNA, 22 bp, synthetic construct
  misc_feature 1..22: note = chemically synthesized
  source 1..22: mol_type = other DNA
ggcaccagccgcatttaatcca

SEQ ID NO: 50297 - DNA, 22 bp, synthetic construct
  misc_feature 1..22: note = chemically synthesized
  source 1..22: mol_type = other DNA
aatccatggtgaacgggtcatg

SEQ ID NO: 50298 - DNA, 22 bp, synthetic construct
  misc_feature 1..22: note = chemically synthesized
  source 1..22: mol_type = other DNA
atccatggtgaacgggtcatgc

SEQ ID NO: 50299 - DNA, 22 bp, synthetic construct
  misc_feature 1..22: note = chemically synthesized
  source 1..22: mol_type = other DNA
acattcagaaagttgtggtgtc

SEQ ID NO: 50300 - DNA, 22 bp, synthetic construct
  misc_feature 1..22: note = chemically synthesized
  source 1..22: mol_type = other DNA
agaaagttgtggtgtccaccca

SEQ ID NO: 50301 - DNA, 22 bp, synthetic construct
  misc_feature 1..22: note = chemically synthesized
  source 1..22: mol_type = other DNA
tggtgtccacccaccaccacca

SEQ ID NO: 50302 - DNA, 22 bp, synthetic construct
  misc_feature 1..22: note = chemically synthesized
  source 1..22: mol_type = other DNA
ttagagagtatcgtgggaacct

SEQ ID NO: 50303 - DNA, 22 bp, synthetic construct
  misc_feature 1..22: note = chemically synthesized
  source 1..22: mol_type = other DNA
gagagtatcgtgggaacctgga

SEQ ID NO: 50304 - DNA, 22 bp, synthetic construct
  misc_feature 1..22: note = chemically synthesized
  source 1..22: mol_type = other DNA
gatttgcaggctttccaattac

SEQ ID NO: 50305 - DNA, 22 bp, synthetic construct
  misc_feature 1..22: note = chemically synthesized
  source 1..22: mol_type = other DNA
gcaggctttccaattactagtc

SEQ ID NO: 50306 - DNA, 22 bp, synthetic construct
  misc_feature 1..22: note = chemically synthesized
  source 1..22: mol_type = other DNA
caggctttccaattactagtct

SEQ ID NO: 50307 - DNA, 22 bp, synthetic construct
  misc_feature 1..22: note = chemically synthesized
  source 1..22: mol_type = other DNA
tccaattactagtctggagaag

SEQ ID NO: 50308 - DNA, 22 bp, synthetic construct
  misc_feature 1..22: note = chemically synthesized
  source 1..22: mol_type = other DNA
ccaattactagtctggagaaga

SEQ ID NO: 50309 - DNA, 22 bp, synthetic construct
  misc_feature 1..22: note = chemically synthesized
  source 1..22: mol_type = other DNA
caattactagtctggagaagaa

SEQ ID NO: 50310 - DNA, 22 bp, synthetic construct
  misc_feature 1..22: note = chemically synthesized
  source 1..22: mol_type = other DNA
ctagtctggagaagaatccttt

SEQ ID NO: 50311 - DNA, 22 bp, synthetic construct
  misc_feature 1..22: note = chemically synthesized
  source 1..22: mol_type = other DNA
gtctggagaagaatcctttgct

SEQ ID NO: 50312 - DNA, 22 bp, synthetic construct
  misc_feature 1..22: note = chemically synthesized
  source 1..22: mol_type = other DNA
gagaagaatcctttgcttgaat

SEQ ID NO: 50313 - DNA, 22 bp, synthetic construct
  misc_feature 1..22: note = chemically synthesized
  source 1..22: mol_type = other DNA
tgcttgaatgctaactcacacc

SEQ ID NO: 50314 - DNA, 22 bp, synthetic construct
  misc_feature 1..22: note = chemically synthesized
  source 1..22: mol_type = other DNA
gcttgaatgctaactcacacct

SEQ ID NO: 50315 - DNA, 22 bp, synthetic construct
  misc_feature 1..22: note = chemically synthesized
  source 1..22: mol_type = other DNA
cttgaatgctaactcacacctt

SEQ ID NO: 50316 - DNA, 22 bp, synthetic construct
  misc_feature 1..22: note = chemically synthesized
  source 1..22: mol_type = other DNA
gaatgctaactcacaccttgct

SEQ ID NO: 50317 - DNA, 22 bp, synthetic construct
  misc_feature 1..22: note = chemically synthesized
  source 1..22: mol_type = other DNA
aatgctaactcacaccttgcta

SEQ ID NO: 50318 - DNA, 22 bp, synthetic construct
  misc_feature 1..22: note = chemically synthesized
  source 1..22: mol_type = other DNA
actcacaccttgctaacctcct

SEQ ID NO: 50319 - DNA, 22 bp, synthetic construct
  misc_feature 1..22: note = chemically synthesized
  source 1..22: mol_type = other DNA
acaccttgctaacctcctgaca

SEQ ID NO: 50320 - DNA, 22 bp, synthetic construct
  misc_feature 1..22: note = chemically synthesized
  source 1..22: mol_type = other DNA
gctaacctcctgacatttaaaa

SEQ ID NO: 50321 - DNA, 22 bp, synthetic construct
  misc_feature 1..22: note = chemically synthesized
  source 1..22: mol_type = other DNA
ctaacctcctgacatttaaaaa

SEQ ID NO: 50322 - DNA, 22 bp, synthetic construct
  misc_feature 1..22: note = chemically synthesized
  source 1..22: mol_type = other DNA
acctcctgacatttaaaaaatt

SEQ ID NO: 50323 - DNA, 22 bp, synthetic construct
  misc_feature 1..22: note = chemically synthesized
  source 1..22: mol_type = other DNA
ctgacatttaaaaaattctagt

SEQ ID NO: 50324 - DNA, 22 bp, synthetic construct
  misc_feature 1..22: note = chemically synthesized
  source 1..22: mol_type = other DNA
acatttaaaaaattctagtgac

SEQ ID NO: 50325 - DNA, 22 bp, synthetic construct
  misc_feature 1..22: note = chemically synthesized
  source 1..22: mol_type = other DNA
aaaaaattctagtgacagaatt

SEQ ID NO: 50326 - DNA, 22 bp, synthetic construct
  misc_feature 1..22: note = chemically synthesized
  source 1..22: mol_type = other DNA
aaaaattctagtgacagaattc

SEQ ID NO: 50327 - DNA, 22 bp, synthetic construct
  misc_feature 1..22: note = chemically synthesized
  source 1..22: mol_type = other DNA
tagtgacagaattcccaatgaa

SEQ ID NO: 50328 - DNA, 22 bp, synthetic construct
  misc_feature 1..22: note = chemically synthesized
  source 1..22: mol_type = other DNA
gtgacagaattcccaatgaact

SEQ ID NO: 50329 - DNA, 22 bp, synthetic construct
  misc_feature 1..22: note = chemically synthesized
  source 1..22: mol_type = other DNA
ccaatgaactcctcctcttcct

SEQ ID NO: 50330 - DNA, 22 bp, synthetic construct
  misc_feature 1..22: note = chemically synthesized
  source 1..22: mol_type = other DNA
ctcctcttcctcccaaccccaa

SEQ ID NO: 50331 - DNA, 22 bp, synthetic construct
  misc_feature 1..22: note = chemically synthesized
  source 1..22: mol_type = other DNA
ctcttcctcccaaccccaacct

SEQ ID NO: 50332 - DNA, 22 bp, synthetic construct
  misc_feature 1..22: note = chemically synthesized
  source 1..22: mol_type = other DNA
ttcctcccaaccccaacctctc

SEQ ID NO: 50333 - DNA, 22 bp, synthetic construct
  misc_feature 1..22: note = chemically synthesized
  source 1..22: mol_type = other DNA
cctcccaaccccaacctctcca

SEQ ID NO: 50334 - DNA, 22 bp, synthetic construct
  misc_feature 1..22: note = chemically synthesized
  source 1..22: mol_type = other DNA
ctcccaaccccaacctctccaa

SEQ ID NO: 50335 - DNA, 22 bp, synthetic construct
  misc_feature 1..22: note = chemically synthesized
  source 1..22: mol_type = other DNA
ccaaccccaacctctccaaccc

SEQ ID NO: 50336 - DNA, 22 bp, synthetic construct
  misc_feature 1..22: note = chemically synthesized
  source 1..22: mol_type = other DNA
tccaacccaggtgaaagcaaga

SEQ ID NO: 50337 - DNA, 22 bp, synthetic construct
  misc_feature 1..22: note = chemically synthesized
  source 1..22: mol_type = other DNA
caacccaggtgaaagcaagaaa

SEQ ID NO: 50338 - DNA, 22 bp, synthetic construct
  misc_feature 1..22: note = chemically synthesized
  source 1..22: mol_type = other DNA
agtcctatctcagctggtgtgc

SEQ ID NO: 50339 - DNA, 22 bp, synthetic construct
  misc_feature 1..22: note = chemically synthesized
  source 1..22: mol_type = other DNA
tctcagctggtgtgcaagtcag

SEQ ID NO: 50340 - DNA, 22 bp, synthetic construct
  misc_feature 1..22: note = chemically synthesized
  source 1..22: mol_type = other DNA
agctggtgtgcaagtcagactg

SEQ ID NO: 50341 - DNA, 22 bp, synthetic construct
  misc_feature 1..22: note = chemically synthesized
  source 1..22: mol_type = other DNA
gtgtgcaagtcagactgagaat

SEQ ID NO: 50342 - DNA, 22 bp, synthetic construct
  misc_feature 1..22: note = chemically synthesized
  source 1..22: mol_type = other DNA
agaataacagcttcgaaaggcc

SEQ ID NO: 50343 - DNA, 22 bp, synthetic construct
  misc_feature 1..22: note = chemically synthesized
  source 1..22: mol_type = other DNA
cgaaaggccacgtgtcccagct

SEQ ID NO: 50344 - DNA, 22 bp, synthetic construct
  misc_feature 1..22: note = chemically synthesized
  source 1..22: mol_type = other DNA
gaaaggccacgtgtcccagctt

SEQ ID NO: 50345 - DNA, 22 bp, synthetic construct
  misc_feature 1..22: note = chemically synthesized
  source 1..22: mol_type = other DNA
accgctccactgctagacccaa

SEQ ID NO: 50346 - DNA, 22 bp, synthetic construct
  misc_feature 1..22: note = chemically synthesized
  source 1..22: mol_type = other DNA
ccgctccactgctagacccaaa

SEQ ID NO: 50347 - DNA, 22 bp, synthetic construct
  misc_feature 1..22: note = chemically synthesized
  source 1..22: mol_type = other DNA
cactgctagacccaaaagctct

SEQ ID NO: 50348 - DNA, 22 bp, synthetic construct
  misc_feature 1..22: note = chemically synthesized
  source 1..22: mol_type = other DNA
ctagacccaaaagctctctgct

SEQ ID NO: 50349 - DNA, 22 bp, synthetic construct
  misc_feature 1..22: note = chemically synthesized
  source 1..22: mol_type = other DNA
gacccaaaagctctctgctgtg

SEQ ID NO: 50350 - DNA, 22 bp, synthetic construct
  misc_feature 1..22: note = chemically synthesized
  source 1..22: mol_type = other DNA
tctgctgtggggatttcatttg

SEQ ID NO: 50351 - DNA, 22 bp, synthetic construct
  misc_feature 1..22: note = chemically synthesized
  source 1..22: mol_type = other DNA
tgctgtggggatttcatttgaa

SEQ ID NO: 50352 - DNA, 22 bp, synthetic construct
  misc_feature 1..22: note = chemically synthesized
  source 1..22: mol_type = other DNA
ctgtggggatttcatttgaact

SEQ ID NO: 50353 - DNA, 22 bp, synthetic construct
  misc_feature 1..22: note = chemically synthesized
  source 1..22: mol_type = other DNA
tggggatttcatttgaactgct

SEQ ID NO: 50354 - DNA, 22 bp, synthetic construct
  misc_feature 1..22: note = chemically synthesized
  source 1..22: mol_type = other DNA
catttgaactgctatcgaagaa

SEQ ID NO: 50355 - DNA, 22 bp, synthetic construct
  misc_feature 1..22: note = chemically synthesized
  source 1..22: mol_type = other DNA
atttgaactgctatcgaagaat

SEQ ID NO: 50356 - DNA, 22 bp, synthetic construct
  misc_feature 1..22: note = chemically synthesized
  source 1..22: mol_type = other DNA
gaactgctatcgaagaatattc

SEQ ID NO: 50357 - DNA, 22 bp, synthetic construct
  misc_feature 1..22: note = chemically synthesized
  source 1..22: mol_type = other DNA
aactgctatcgaagaatattcc

SEQ ID NO: 50358 - DNA, 22 bp, synthetic construct
  misc_feature 1..22: note = chemically synthesized
  source 1..22: mol_type = other DNA
ctatcgaagaatattccaagaa

SEQ ID NO: 50359 - DNA, 22 bp, synthetic construct
  misc_feature 1..22: note = chemically synthesized
  source 1..22: mol_type = other DNA
tcgaagaatattccaagaacct

SEQ ID NO: 50360 - DNA, 22 bp, synthetic construct
  misc_feature 1..22: note = chemically synthesized
  source 1..22: mol_type = other DNA
caagaacctctctccgcaccct

SEQ ID NO: 50361 - DNA, 22 bp, synthetic construct
  misc_feature 1..22: note = chemically synthesized
  source 1..22: mol_type = other DNA
tctccgcacccttctccccctc

SEQ ID NO: 50362 - DNA, 22 bp, synthetic construct
  misc_feature 1..22: note = chemically synthesized
  source 1..22: mol_type = other DNA
tccgcacccttctccccctctc

SEQ ID NO: 50363 - DNA, 22 bp, synthetic construct
  misc_feature 1..22: note = chemically synthesized
  source 1..22: mol_type = other DNA
cgcacccttctccccctctctc

SEQ ID NO: 50364 - DNA, 22 bp, synthetic construct
  misc_feature 1..22: note = chemically synthesized
  source 1..22: mol_type = other DNA
ctccccctctctcccccagcct

SEQ ID NO: 50365 - DNA, 22 bp, synthetic construct
  misc_feature 1..22: note = chemically synthesized
  source 1..22: mol_type = other DNA
tccccctctctcccccagcctc

SEQ ID NO: 50366 - DNA, 22 bp, synthetic construct
  misc_feature 1..22: note = chemically synthesized
  source 1..22: mol_type = other DNA
cccctctctcccccagcctcag

SEQ ID NO: 50367 - DNA, 22 bp, synthetic construct
  misc_feature 1..22: note = chemically synthesized
  source 1..22: mol_type = other DNA
tctcccccagcctcagactttc

SEQ ID NO: 50368 - DNA, 22 bp, synthetic construct
  misc_feature 1..22: note = chemically synthesized
  source 1..22: mol_type = other DNA
tcccccagcctcagactttctc

SEQ ID NO: 50369 - DNA, 22 bp, synthetic construct
  misc_feature 1..22: note = chemically synthesized
  source 1..22: mol_type = other DNA
ccccagcctcagactttctcct

SEQ ID NO: 50370 - DNA, 22 bp, synthetic construct
  misc_feature 1..22: note = chemically synthesized
  source 1..22: mol_type = other DNA
agactttctcctagagttgatc

SEQ ID NO: 50371 - DNA, 22 bp, synthetic construct
  misc_feature 1..22: note = chemically synthesized
  source 1..22: mol_type = other DNA
tctcctagagttgatcttaccg

SEQ ID NO: 50372 - DNA, 22 bp, synthetic construct
  misc_feature 1..22: note = chemically synthesized
  source 1..22: mol_type = other DNA
ctcctagagttgatcttaccgg

SEQ ID NO: 50373 - DNA, 22 bp, synthetic construct
  misc_feature 1..22: note = chemically synthesized
  source 1..22: mol_type = other DNA
tcctagagttgatcttaccgga

SEQ ID NO: 50374 - DNA, 22 bp, synthetic construct
  misc_feature 1..22: note = chemically synthesized
  source 1..22: mol_type = other DNA
ctagagttgatcttaccggaaa

SEQ ID NO: 50375 - DNA, 22 bp, synthetic construct
  misc_feature 1..22: note = chemically synthesized
  source 1..22: mol_type = other DNA
gagttgatcttaccggaaatgt

SEQ ID NO: 50376 - DNA, 22 bp, synthetic construct
  misc_feature 1..22: note = chemically synthesized
  source 1..22: mol_type = other DNA
atcttaccggaaatgtggatgt

SEQ ID NO: 50377 - DNA, 22 bp, synthetic construct
  misc_feature 1..22: note = chemically synthesized
  source 1..22: mol_type = other DNA
accggaaatgtggatgttatca

SEQ ID NO: 50378 - DNA, 22 bp, synthetic construct
  misc_feature 1..22: note = chemically synthesized
  source 1..22: mol_type = other DNA
ccggaaatgtggatgttatcaa

SEQ ID NO: 50379 - DNA, 22 bp, synthetic construct
  misc_feature 1..22: note = chemically synthesized
  source 1..22: mol_type = other DNA
tcaaggaaatcggaaagagaag

SEQ ID NO: 50380 - DNA, 22 bp, synthetic construct
  misc_feature 1..22: note = chemically synthesized
  source 1..22: mol_type = other DNA
aggtactaccccctgatttctt

SEQ ID NO: 50381 - DNA, 22 bp, synthetic construct
  misc_feature 1..22: note = chemically synthesized
  source 1..22: mol_type = other DNA
ccccctgatttcttaactctct

SEQ ID NO: 50382 - DNA, 22 bp, synthetic construct
  misc_feature 1..22: note = chemically synthesized
  source 1..22: mol_type = other DNA
atttcttaactctcttatcctt

SEQ ID NO: 50383 - DNA, 22 bp, synthetic construct
  misc_feature 1..22: note = chemically synthesized
  source 1..22: mol_type = other DNA
cttaactctcttatccttgggc

SEQ ID NO: 50384 - DNA, 22 bp, synthetic construct
  misc_feature 1..22: note = chemically synthesized
  source 1..22: mol_type = other DNA
ttaactctcttatccttgggcc

SEQ ID NO: 50385 - DNA, 22 bp, synthetic construct
  misc_feature 1..22: note = chemically synthesized
  source 1..22: mol_type = other DNA
aactctcttatccttgggccct

SEQ ID NO: 50386 - DNA, 22 bp, synthetic construct
  misc_feature 1..22: note = chemically synthesized
  source 1..22: mol_type = other DNA
actctcttatccttgggccctg

SEQ ID NO: 50387 - DNA, 22 bp, synthetic construct
  misc_feature 1..22: note = chemically synthesized
  source 1..22: mol_type = other DNA
tcttatccttgggccctgctca

SEQ ID NO: 50388 - DNA, 22 bp, synthetic construct
  misc_feature 1..22: note = chemically synthesized
  source 1..22: mol_type = other DNA
ttatccttgggccctgctcaga

SEQ ID NO: 50389 - DNA, 22 bp, synthetic construct
  misc_feature 1..22: note = chemically synthesized
  source 1..22: mol_type = other DNA
atccttgggccctgctcagaaa

SEQ ID NO: 50390 - DNA, 22 bp, synthetic construct
  misc_feature 1..22: note = chemically synthesized
  source 1..22: mol_type = other DNA
tccttgggccctgctcagaaat

SEQ ID NO: 50391 - DNA, 22 bp, synthetic construct
  misc_feature 1..22: note = chemically synthesized
  source 1..22: mol_type = other DNA
gggccctgctcagaaatgtgcc

SEQ ID NO: 50392 - DNA, 22 bp, synthetic construct
  misc_feature 1..22: note = chemically synthesized
  source 1..22: mol_type = other DNA
ggccctgctcagaaatgtgcca

SEQ ID NO: 50393 - DNA, 22 bp, synthetic construct
  misc_feature 1..22: note = chemically synthesized
  source 1..22: mol_type = other DNA
ctcagaaatgtgccacatttta

SEQ ID NO: 50394 - DNA, 22 bp, synthetic construct
  misc_feature 1..22: note = chemically synthesized
  source 1..22: mol_type = other DNA
agaaatgtgccacattttaaca

SEQ ID NO: 50395 - DNA, 22 bp, synthetic construct
  misc_feature 1..22: note = chemically synthesized
  source 1..22: mol_type = other DNA
taacatttattagaaaggatag

SEQ ID NO: 50396 - DNA, 22 bp, synthetic construct
  misc_feature 1..22: note = chemically synthesized
  source 1..22: mol_type = other DNA
aacatttattagaaaggatagg

SEQ ID NO: 50397 - DNA, 22 bp, synthetic construct
  misc_feature 1..22: note = chemically synthesized
  source 1..22: mol_type = other DNA
acatttattagaaaggatagga

SEQ ID NO: 50398 - DNA, 22 bp, synthetic construct
  misc_feature 1..22: note = chemically synthesized
  source 1..22: mol_type = other DNA
attagaaaggataggatgcaga

SEQ ID NO: 50399 - DNA, 22 bp, synthetic construct
  misc_feature 1..22: note = chemically synthesized
  source 1..22: mol_type = other DNA
ttagaaaggataggatgcagag

SEQ ID NO: 50400 - DNA, 22 bp, synthetic construct
  misc_feature 1..22: note = chemically synthesized
  source 1..22: mol_type = other DNA
gaaaggataggatgcagagctg

SEQ ID NO: 50401 - DNA, 22 bp, synthetic construct
  misc_feature 1..22: note = chemically synthesized
  source 1..22: mol_type = other DNA
catggaacccacatccacaacc

SEQ ID NO: 50402 - DNA, 22 bp, synthetic construct
  misc_feature 1..22: note = chemically synthesized
  source 1..22: mol_type = other DNA
tatgagccacaggtccacagtc

SEQ ID NO: 50403 - DNA, 22 bp, synthetic construct
  misc_feature 1..22: note = chemically synthesized
  source 1..22: mol_type = other DNA
accaattccgtttgacactaat

SEQ ID NO: 50404 - DNA, 22 bp, synthetic construct
  misc_feature 1..22: note = chemically synthesized
  source 1..22: mol_type = other DNA
cgtttgacactaatgttactct

SEQ ID NO: 50405 - DNA, 22 bp, synthetic construct
  misc_feature 1..22: note = chemically synthesized
  source 1..22: mol_type = other DNA
gacactaatgttactctacatg

SEQ ID NO: 50406 - DNA, 22 bp, synthetic construct
  misc_feature 1..22: note = chemically synthesized
  source 1..22: mol_type = other DNA
acactaatgttactctacatga

SEQ ID NO: 50407 - DNA, 22 bp, synthetic construct
  misc_feature 1..22: note = chemically synthesized
  source 1..22: mol_type = other DNA
atgttactctacatgagtagag

SEQ ID NO: 50408 - DNA, 22 bp, synthetic construct
  misc_feature 1..22: note = chemically synthesized
  source 1..22: mol_type = other DNA
ctctacatgagtagagttcaat

SEQ ID NO: 50409 - DNA, 22 bp, synthetic construct
  misc_feature 1..22: note = chemically synthesized
  source 1..22: mol_type = other DNA
tacatgagtagagttcaatgag

SEQ ID NO: 50410 - DNA, 22 bp, synthetic construct
  misc_feature 1..22: note = chemically synthesized
  source 1..22: mol_type = other DNA
catgagtagagttcaatgaggg

SEQ ID NO: 50411 - DNA, 22 bp, synthetic construct
  misc_feature 1..22: note = chemically synthesized
  source 1..22: mol_type = other DNA
aatgagggttgatatgggatgt

SEQ ID NO: 50412 - DNA, 22 bp, synthetic construct
  misc_feature 1..22: note = chemically synthesized
  source 1..22: mol_type = other DNA
atatgggatgtgacagggcaaa

SEQ ID NO: 50413 - DNA, 22 bp, synthetic construct
  misc_feature 1..22: note = chemically synthesized
  source 1..22: mol_type = other DNA
gattaaaaacaaaagtttagaa

SEQ ID NO: 50414 - DNA, 22 bp, synthetic construct
  misc_feature 1..22: note = chemically synthesized
  source 1..22: mol_type = other DNA
aaaacaaaagtttagaaaccaa

SEQ ID NO: 50415 - DNA, 22 bp, synthetic construct
  misc_feature 1..22: note = chemically synthesized
  source 1..22: mol_type = other DNA
agaaaccaatgctacactacag

SEQ ID NO: 50416 - DNA, 22 bp, synthetic construct
  misc_feature 1..22: note = chemically synthesized
  source 1..22: mol_type = other DNA
gaaaccaatgctacactacaga

SEQ ID NO: 50417 - DNA, 22 bp, synthetic construct
  misc_feature 1..22: note = chemically synthesized
  source 1..22: mol_type = other DNA
cactacagagcaaatgggactt

SEQ ID NO: 50418 - DNA, 22 bp, synthetic construct
  misc_feature 1..22: note = chemically synthesized
  source 1..22: mol_type = other DNA
cagagcaaatgggacttgaagg

SEQ ID NO: 50419 - DNA, 22 bp, synthetic construct
  misc_feature 1..22: note = chemically synthesized
  source 1..22: mol_type = other DNA
gaaggccaaatttcccctaact

SEQ ID NO: 50420 - DNA, 22 bp, synthetic construct
  misc_feature 1..22: note = chemically synthesized
  source 1..22: mol_type = other DNA
aaggccaaatttcccctaactg

SEQ ID NO: 50421 - DNA, 22 bp, synthetic construct
  misc_feature 1..22: note = chemically synthesized
  source 1..22: mol_type = other DNA
cccctaactgccttcaagtgat

SEQ ID NO: 50422 - DNA, 22 bp, synthetic construct
  misc_feature 1..22: note = chemically synthesized
  source 1..22: mol_type = other DNA
ccctaactgccttcaagtgatt

SEQ ID NO: 50423 - DNA, 22 bp, synthetic construct
  misc_feature 1..22: note = chemically synthesized
  source 1..22: mol_type = other DNA
actgccttcaagtgattttccc

SEQ ID NO: 50424 - DNA, 22 bp, synthetic construct
  misc_feature 1..22: note = chemically synthesized
  source 1..22: mol_type = other DNA
ccttcaagtgattttccctatt

SEQ ID NO: 50425 - DNA, 22 bp, synthetic construct
  misc_feature 1..22: note = chemically synthesized
  source 1..22: mol_type = other DNA
caagtgattttccctattagag

SEQ ID NO: 50426 - DNA, 22 bp, synthetic construct
  misc_feature 1..22: note = chemically synthesized
  source 1..22: mol_type = other DNA
aagtgattttccctattagagc

SEQ ID NO: 50427 - DNA, 22 bp, synthetic construct
  misc_feature 1..22: note = chemically synthesized
  source 1..22: mol_type = other DNA
tccctattagagcgtttgcctg

SEQ ID NO: 50428 - DNA, 22 bp, synthetic construct
  misc_feature 1..22: note = chemically synthesized
  source 1..22: mol_type = other DNA
ccctattagagcgtttgcctgc

SEQ ID NO: 50429 - DNA, 22 bp, synthetic construct
  misc_feature 1..22: note = chemically synthesized
  source 1..22: mol_type = other DNA
cctattagagcgtttgcctgcc

SEQ ID NO: 50430 - DNA, 22 bp, synthetic construct
  misc_feature 1..22: note = chemically synthesized
  source 1..22: mol_type = other DNA
ttagagcgtttgcctgccaccc

SEQ ID NO: 50431 - DNA, 22 bp, synthetic construct
  misc_feature 1..22: note = chemically synthesized
  source 1..22: mol_type = other DNA
gagcgtttgcctgccacccccc

SEQ ID NO: 50432 - DNA, 22 bp, synthetic construct
  misc_feature 1..22: note = chemically synthesized
  source 1..22: mol_type = other DNA
gcctgccacccccctgctggca

SEQ ID NO: 50433 - DNA, 22 bp, synthetic construct
  misc_feature 1..22: note = chemically synthesized
  source 1..22: mol_type = other DNA
cctgccacccccctgctggcaa

SEQ ID NO: 50434 - DNA, 22 bp, synthetic construct
  misc_feature 1..22: note = chemically synthesized
  source 1..22: mol_type = other DNA
ccacccccctgctggcaacacc

SEQ ID NO: 50435 - DNA, 22 bp, synthetic construct
  misc_feature 1..22: note = chemically synthesized
  source 1..22: mol_type = other DNA
ctggcaacaccgcaatcacatc

SEQ ID NO: 50436 - DNA, 22 bp, synthetic construct
  misc_feature 1..22: note = chemically synthesized
  source 1..22: mol_type = other DNA
gcaacaccgcaatcacatcaga

SEQ ID NO: 50437 - DNA, 22 bp, synthetic construct
  misc_feature 1..22: note = chemically synthesized
  source 1..22: mol_type = other DNA
gagatattcctctttaaataca

SEQ ID NO: 50438 - DNA, 22 bp, synthetic construct
  misc_feature 1..22: note = chemically synthesized
  source 1..22: mol_type = other DNA
agatattcctctttaaatacaa

SEQ ID NO: 50439 - DNA, 22 bp, synthetic construct
  misc_feature 1..22: note = chemically synthesized
  source 1..22: mol_type = other DNA
ctctttaaatacaatacctata

SEQ ID NO: 50440 - DNA, 22 bp, synthetic construct
  misc_feature 1..22: note = chemically synthesized
  source 1..22: mol_type = other DNA
tttaaatacaatacctatatac

SEQ ID NO: 50441 - DNA, 22 bp, synthetic construct
  misc_feature 1..22: note = chemically synthesized
  source 1..22: mol_type = other DNA
taaatacaatacctatatactt

SEQ ID NO: 50442 - DNA, 22 bp, synthetic construct
  misc_feature 1..22: note = chemically synthesized
  source 1..22: mol_type = other DNA
aaatacaatacctatatactta

SEQ ID NO: 50443 - DNA, 22 bp, synthetic construct
  misc_feature 1..22: note = chemically synthesized
  source 1..22: mol_type = other DNA
aatacaatacctatatacttaa

SEQ ID NO: 50444 - DNA, 22 bp, synthetic construct
  misc_feature 1..22: note = chemically synthesized
  source 1..22: mol_type = other DNA
tatacttaatatatagcaatta

SEQ ID NO: 50445 - DNA, 22 bp, synthetic construct
  misc_feature 1..22: note = chemically synthesized
  source 1..22: mol_type = other DNA
aatatatagcaattaacttctg

SEQ ID NO: 50446 - DNA, 22 bp, synthetic construct
  misc_feature 1..22: note = chemically synthesized
  source 1..22: mol_type = other DNA
atatatagcaattaacttctgg

SEQ ID NO: 50447 - DNA, 22 bp, synthetic construct
  misc_feature 1..22: note = chemically synthesized
  source 1..22: mol_type = other DNA
acttctggtcagcagtgtgcag

SEQ ID NO: 50448 - DNA, 22 bp, synthetic construct
  misc_feature 1..22: note = chemically synthesized
  source 1..22: mol_type = other DNA
ctggtcagcagtgtgcaggcag

SEQ ID NO: 50449 - DNA, 22 bp, synthetic construct
  misc_feature 1..22: note = chemically synthesized
  source 1..22: mol_type = other DNA
tggtcagcagtgtgcaggcagc

SEQ ID NO: 50450 - DNA, 22 bp, synthetic construct
  misc_feature 1..22: note = chemically synthesized
  source 1..22: mol_type = other DNA
gtcagcagtgtgcaggcagcag

SEQ ID NO: 50451 - DNA, 22 bp, synthetic construct
  misc_feature 1..22: note = chemically synthesized
  source 1..22: mol_type = other DNA
ccccaagcagataggaggggag

SEQ ID NO: 50452 - DNA, 22 bp, synthetic construct
  misc_feature 1..22: note = chemically synthesized
  source 1..22: mol_type = other DNA
ggacaagcacaaaagacaggtc

SEQ ID NO: 50453 - DNA, 22 bp, synthetic construct
  misc_feature 1..22: note = chemically synthesized
  source 1..22: mol_type = other DNA
ctgtcagcagctgaattatttt

SEQ ID NO: 50454 - DNA, 22 bp, synthetic construct
  misc_feature 1..22: note = chemically synthesized
  source 1..22: mol_type = other DNA
tcagcagctgaattatttttat

SEQ ID NO: 50455 - DNA, 22 bp, synthetic construct
  misc_feature 1..22: note = chemically synthesized
  source 1..22: mol_type = other DNA
aattatttttatacaggaattt

SEQ ID NO: 50456 - DNA, 22 bp, synthetic construct
  misc_feature 1..22: note = chemically synthesized
  source 1..22: mol_type = other DNA
tttttatacaggaatttttatc

SEQ ID NO: 50457 - DNA, 22 bp, synthetic construct
  misc_feature 1..22: note = chemically synthesized
  source 1..22: mol_type = other DNA
ttatacaggaatttttatctct

SEQ ID NO: 50458 - DNA, 22 bp, synthetic construct
  misc_feature 1..22: note = chemically synthesized
  source 1..22: mol_type = other DNA
tatacaggaatttttatctcta

SEQ ID NO: 50459 - DNA, 22 bp, synthetic construct
  misc_feature 1..22: note = chemically synthesized
  source 1..22: mol_type = other DNA
atacaggaatttttatctctat

SEQ ID NO: 50460 - DNA, 22 bp, synthetic construct
  misc_feature 1..22: note = chemically synthesized
  source 1..22: mol_type = other DNA
tacaggaatttttatctctatt

SEQ ID NO: 50461 - DNA, 22 bp, synthetic construct
  misc_feature 1..22: note = chemically synthesized
  source 1..22: mol_type = other DNA
ttatctctattgtacaaacaag

SEQ ID NO: 50462 - DNA, 22 bp, synthetic construct
  misc_feature 1..22: note = chemically synthesized
  source 1..22: mol_type = other DNA
tatctctattgtacaaacaagt

SEQ ID NO: 50463 - DNA, 22 bp, synthetic construct
  misc_feature 1..22: note = chemically synthesized
  source 1..22: mol_type = other DNA
atctctattgtacaaacaagta

SEQ ID NO: 50464 - DNA, 22 bp, synthetic construct
  misc_feature 1..22: note = chemically synthesized
  source 1..22: mol_type = other DNA
tctctattgtacaaacaagtac

SEQ ID NO: 50465 - DNA, 22 bp, synthetic construct
  misc_feature 1..22: note = chemically synthesized
  source 1..22: mol_type = other DNA
tattgtacaaacaagtacgtgt

SEQ ID NO: 50466 - DNA, 22 bp, synthetic construct
  misc_feature 1..22: note = chemically synthesized
  source 1..22: mol_type = other DNA
ttgtacaaacaagtacgtgtct

SEQ ID NO: 50467 - DNA, 22 bp, synthetic construct
  misc_feature 1..22: note = chemically synthesized
  source 1..22: mol_type = other DNA
tacaaacaagtacgtgtctgtg

SEQ ID NO: 50468 - DNA, 22 bp, synthetic construct
  misc_feature 1..22: note = chemically synthesized
  source 1..22: mol_type = other DNA
tgctgacttgttaagcaatcca

SEQ ID NO: 50469 - DNA, 22 bp, synthetic construct
  misc_feature 1..22: note = chemically synthesized
  source 1..22: mol_type = other DNA
acttgttaagcaatccacttgt

SEQ ID NO: 50470 - DNA, 22 bp, synthetic construct
  misc_feature 1..22: note = chemically synthesized
  source 1..22: mol_type = other DNA
gttaagcaatccacttgtatgt

SEQ ID NO: 50471 - DNA, 22 bp, synthetic construct
  misc_feature 1..22: note = chemically synthesized
  source 1..22: mol_type = other DNA
ttaagcaatccacttgtatgta

SEQ ID NO: 50472 - DNA, 22 bp, synthetic construct
  misc_feature 1..22: note = chemically synthesized
  source 1..22: mol_type = other DNA
agcaatccacttgtatgtagaa

SEQ ID NO: 50473 - DNA, 22 bp, synthetic construct
  misc_feature 1..22: note = chemically synthesized
  source 1..22: mol_type = other DNA
gtatgtagaataagattttttt

SEQ ID NO: 50474 - DNA, 22 bp, synthetic construct
  misc_feature 1..22: note = chemically synthesized
  source 1..22: mol_type = other DNA
tatgtagaataagatttttttt

SEQ ID NO: 50475 - DNA, 22 bp, synthetic construct
  misc_feature 1..22: note = chemically synthesized
  source 1..22: mol_type = other DNA
tttttctttcttgctaccagtc

SEQ ID NO: 50476 - DNA, 22 bp, synthetic construct
  misc_feature 1..22: note = chemically synthesized
  source 1..22: mol_type = other DNA
ttttctttcttgctaccagtca

SEQ ID NO: 50477 - DNA, 22 bp, synthetic construct
  misc_feature 1..22: note = chemically synthesized
  source 1..22: mol_type = other DNA
tttctttcttgctaccagtcac

SEQ ID NO: 50478 - DNA, 22 bp, synthetic construct
  misc_feature 1..22: note = chemically synthesized
  source 1..22: mol_type = other DNA
ttctttcttgctaccagtcaca

SEQ ID NO: 50479 - DNA, 22 bp, synthetic construct
  misc_feature 1..22: note = chemically synthesized
  source 1..22: mol_type = other DNA
tctttcttgctaccagtcacac

SEQ ID NO: 50480 - DNA, 22 bp, synthetic construct
  misc_feature 1..22: note = chemically synthesized
  source 1..22: mol_type = other DNA
ctttcttgctaccagtcacaca

SEQ ID NO: 50481 - DNA, 22 bp, synthetic construct
  misc_feature 1..22: note = chemically synthesized
  source 1..22: mol_type = other DNA
tttcttgctaccagtcacacag

SEQ ID NO: 50482 - DNA, 22 bp, synthetic construct
  misc_feature 1..22: note = chemically synthesized
  source 1..22: mol_type = other DNA
tcttgctaccagtcacacagct

SEQ ID NO: 50483 - DNA, 22 bp, synthetic construct
  misc_feature 1..22: note = chemically synthesized
  source 1..22: mol_type = other DNA
cttgctaccagtcacacagctc

SEQ ID NO: 50484 - DNA, 22 bp, synthetic construct
  misc_feature 1..22: note = chemically synthesized
  source 1..22: mol_type = other DNA
ttgctaccagtcacacagctcc

SEQ ID NO: 50485 - DNA, 22 bp, synthetic construct
  misc_feature 1..22: note = chemically synthesized
  source 1..22: mol_type = other DNA
gctaccagtcacacagctccaa

SEQ ID NO: 50486 - DNA, 22 bp, synthetic construct
  misc_feature 1..22: note = chemically synthesized
  source 1..22: mol_type = other DNA
ctaccagtcacacagctccaag

SEQ ID NO: 50487 - DNA, 22 bp, synthetic construct
  misc_feature 1..22: note = chemically synthesized
  source 1..22: mol_type = other DNA
ccagtcacacagctccaagatc

SEQ ID NO: 50488 - DNA, 22 bp, synthetic construct
  misc_feature 1..22: note = chemically synthesized
  source 1..22: mol_type = other DNA
caagatcagaagaaatacatag

SEQ ID NO: 50489 - DNA, 22 bp, synthetic construct
  misc_feature 1..22: note = chemically synthesized
  source 1..22: mol_type = other DNA
tgaagctgctcaaatgttttag

SEQ ID NO: 50490 - DNA, 22 bp, synthetic construct
  misc_feature 1..22: note = chemically synthesized
  source 1..22: mol_type = other DNA
gaagctgctcaaatgttttagt

SEQ ID NO: 50491 - DNA, 22 bp, synthetic construct
  misc_feature 1..22: note = chemically synthesized
  source 1..22: mol_type = other DNA
aagctgctcaaatgttttagtt

SEQ ID NO: 50492 - DNA, 22 bp, synthetic construct
  misc_feature 1..22: note = chemically synthesized
  source 1..22: mol_type = other DNA
ctcaaatgttttagttaaaagg

SEQ ID NO: 50493 - DNA, 22 bp, synthetic construct
  misc_feature 1..22: note = chemically synthesized
  source 1..22: mol_type = other DNA
aaatgttttagttaaaaggaca

SEQ ID NO: 50494 - DNA, 22 bp, synthetic construct
  misc_feature 1..22: note = chemically synthesized
  source 1..22: mol_type = other DNA
tagttaaaaggacagcagttgt

SEQ ID NO: 50495 - DNA, 22 bp, synthetic construct
  misc_feature 1..22: note = chemically synthesized
  source 1..22: mol_type = other DNA
agttaaaaggacagcagttgtt

SEQ ID NO: 50496 - DNA, 22 bp, synthetic construct
  misc_feature 1..22: note = chemically synthesized
  source 1..22: mol_type = other DNA
gttaaaaggacagcagttgttt

SEQ ID NO: 50497 - DNA, 22 bp, synthetic construct
  misc_feature 1..22: note = chemically synthesized
  source 1..22: mol_type = other DNA
aaaggacagcagttgttttcaa

SEQ ID NO: 50498 - DNA, 22 bp, synthetic construct
  misc_feature 1..22: note = chemically synthesized
  source 1..22: mol_type = other DNA
ttttcaaagatccaagagtatc

SEQ ID NO: 50499 - DNA, 22 bp, synthetic construct
  misc_feature 1..22: note = chemically synthesized
  source 1..22: mol_type = other DNA
tcaaagatccaagagtatcttt

SEQ ID NO: 50500 - DNA, 22 bp, synthetic construct
  misc_feature 1..22: note = chemically synthesized
  source 1..22: mol_type = other DNA
caaagatccaagagtatcttta

SEQ ID NO: 50501 - DNA, 22 bp, synthetic construct
  misc_feature 1..22: note = chemically synthesized
  source 1..22: mol_type = other DNA
aaagatccaagagtatctttat

SEQ ID NO: 50502 - DNA, 22 bp, synthetic construct
  misc_feature 1..22: note = chemically synthesized
  source 1..22: mol_type = other DNA
tatcagaattaaatttttcctt

SEQ ID NO: 50503 - DNA, 22 bp, synthetic construct
  misc_feature 1..22: note = chemically synthesized
  source 1..22: mol_type = other DNA
atcagaattaaatttttcctta

SEQ ID NO: 50504 - DNA, 22 bp, synthetic construct
  misc_feature 1..22: note = chemically synthesized
  source 1..22: mol_type = other DNA
tcagaattaaatttttccttat

SEQ ID NO: 50505 - DNA, 22 bp, synthetic construct
  misc_feature 1..22: note = chemically synthesized
  source 1..22: mol_type = other DNA
aatttttccttattgatttttt

SEQ ID NO: 50506 - DNA, 22 bp, synthetic construct
  misc_feature 1..22: note = chemically synthesized
  source 1..22: mol_type = other DNA
ttccttattgatttttttctcc

SEQ ID NO: 50507 - DNA, 22 bp, synthetic construct
  misc_feature 1..22: note = chemically synthesized
  source 1..22: mol_type = other DNA
tccttattgatttttttctcct

SEQ ID NO: 50508 - DNA, 22 bp, synthetic construct
  misc_feature 1..22: note = chemically synthesized
  source 1..22: mol_type = other DNA
ccttattgatttttttctcctt

SEQ ID NO: 50509 - DNA, 22 bp, synthetic construct
  misc_feature 1..22: note = chemically synthesized
  source 1..22: mol_type = other DNA
cttattgatttttttctcctta

SEQ ID NO: 50510 - DNA, 22 bp, synthetic construct
  misc_feature 1..22: note = chemically synthesized
  source 1..22: mol_type = other DNA
attgatttttttctccttaaca

SEQ ID NO: 50511 - DNA, 22 bp, synthetic construct
  misc_feature 1..22: note = chemically synthesized
  source 1..22: mol_type = other DNA
ttgatttttttctccttaacat

SEQ ID NO: 50512 - DNA, 22 bp, synthetic construct
  misc_feature 1..22: note = chemically synthesized
  source 1..22: mol_type = other DNA
atttttttctccttaacataac

SEQ ID NO: 50513 - DNA, 22 bp, synthetic construct
  misc_feature 1..22: note = chemically synthesized
  source 1..22: mol_type = other DNA
ttttctccttaacataacaaaa

SEQ ID NO: 50514 - DNA, 22 bp, synthetic construct
  misc_feature 1..22: note = chemically synthesized
  source 1..22: mol_type = other DNA
tttctccttaacataacaaaaa

SEQ ID NO: 50515 - DNA, 22 bp, synthetic construct
  misc_feature 1..22: note = chemically synthesized
  source 1..22: mol_type = other DNA
ttctccttaacataacaaaaac

SEQ ID NO: 50516 - DNA, 22 bp, synthetic construct
  misc_feature 1..22: note = chemically synthesized
  source 1..22: mol_type = other DNA
tctccttaacataacaaaaaca

SEQ ID NO: 50517 - DNA, 22 bp, synthetic construct
  misc_feature 1..22: note = chemically synthesized
  source 1..22: mol_type = other DNA
ctccttaacataacaaaaacat

SEQ ID NO: 50518 - DNA, 22 bp, synthetic construct
  misc_feature 1..22: note = chemically synthesized
  source 1..22: mol_type = other DNA
tccttaacataacaaaaacata

SEQ ID NO: 50519 - DNA, 22 bp, synthetic construct
  misc_feature 1..22: note = chemically synthesized
  source 1..22: mol_type = other DNA
cttaacataacaaaaacataac

SEQ ID NO: 50520 - DNA, 22 bp, synthetic construct
  misc_feature 1..22: note = chemically synthesized
  source 1..22: mol_type = other DNA
aacataacaaaaacataacatg

SEQ ID NO: 50521 - DNA, 22 bp, synthetic construct
  misc_feature 1..22: note = chemically synthesized
  source 1..22: mol_type = other DNA
acataacaaaaacataacatga

SEQ ID NO: 50522 - DNA, 22 bp, synthetic construct
  misc_feature 1..22: note = chemically synthesized
  source 1..22: mol_type = other DNA
cgatttattattaaaatttttt

SEQ ID NO: 50523 - DNA, 22 bp, synthetic construct
  misc_feature 1..22: note = chemically synthesized
  source 1..22: mol_type = other DNA
attattaaaatttttttcagcc

SEQ ID NO: 50524 - DNA, 22 bp, synthetic construct
  misc_feature 1..22: note = chemically synthesized
  source 1..22: mol_type = other DNA
ttattaaaatttttttcagcct

SEQ ID NO: 50525 - DNA, 22 bp, synthetic construct
  misc_feature 1..22: note = chemically synthesized
  source 1..22: mol_type = other DNA
ttaaaatttttttcagccttta

SEQ ID NO: 50526 - DNA, 22 bp, synthetic construct
  misc_feature 1..22: note = chemically synthesized
  source 1..22: mol_type = other DNA
aaatttttttcagcctttaaat

SEQ ID NO: 50527 - DNA, 22 bp, synthetic construct
  misc_feature 1..22: note = chemically synthesized
  source 1..22: mol_type = other DNA
ttttcagcctttaaatcattct

SEQ ID NO: 50528 - DNA, 22 bp, synthetic construct
  misc_feature 1..22: note = chemically synthesized
  source 1..22: mol_type = other DNA
tttcagcctttaaatcattctt

SEQ ID NO: 50529 - DNA, 22 bp, synthetic construct
  misc_feature 1..22: note = chemically synthesized
  source 1..22: mol_type = other DNA
ttcagcctttaaatcattcttc

SEQ ID NO: 50530 - DNA, 22 bp, synthetic construct
  misc_feature 1..22: note = chemically synthesized
  source 1..22: mol_type = other DNA
tcagcctttaaatcattcttca

SEQ ID NO: 50531 - DNA, 22 bp, synthetic construct
  misc_feature 1..22: note = chemically synthesized
  source 1..22: mol_type = other DNA
cagcctttaaatcattcttcag

SEQ ID NO: 50532 - DNA, 22 bp, synthetic construct
  misc_feature 1..22: note = chemically synthesized
  source 1..22: mol_type = other DNA
agcctttaaatcattcttcagt

SEQ ID NO: 50533 - DNA, 22 bp, synthetic construct
  misc_feature 1..22: note = chemically synthesized
  source 1..22: mol_type = other DNA
taaatcattcttcagtagccaa

SEQ ID NO: 50534 - DNA, 22 bp, synthetic construct
  misc_feature 1..22: note = chemically synthesized
  source 1..22: mol_type = other DNA
aaatcattcttcagtagccaat

SEQ ID NO: 50535 - DNA, 22 bp, synthetic construct
  misc_feature 1..22: note = chemically synthesized
  source 1..22: mol_type = other DNA
aatcattcttcagtagccaatg

SEQ ID NO: 50536 - DNA, 22 bp, synthetic construct
  misc_feature 1..22: note = chemically synthesized
  source 1..22: mol_type = other DNA
ttcagtagccaatgttcagttt

SEQ ID NO: 50537 - DNA, 22 bp, synthetic construct
  misc_feature 1..22: note = chemically synthesized
  source 1..22: mol_type = other DNA
cagtagccaatgttcagtttta

SEQ ID NO: 50538 - DNA, 22 bp, synthetic construct
  misc_feature 1..22: note = chemically synthesized
  source 1..22: mol_type = other DNA
agtagccaatgttcagttttaa

SEQ ID NO: 50539 - DNA, 22 bp, synthetic construct
  misc_feature 1..22: note = chemically synthesized
  source 1..22: mol_type = other DNA
agttttaaatgtaaaggaataa

SEQ ID NO: 50540 - DNA, 22 bp, synthetic construct
  misc_feature 1..22: note = chemically synthesized
  source 1..22: mol_type = other DNA
taaatgtaaaggaataattttt

SEQ ID NO: 50541 - DNA, 22 bp, synthetic construct
  misc_feature 1..22: note = chemically synthesized
  source 1..22: mol_type = other DNA
aaatgtaaaggaataatttttt

SEQ ID NO: 50542 - DNA, 22 bp, synthetic construct
  misc_feature 1..22: note = chemically synthesized
  source 1..22: mol_type = other DNA
aatgtaaaggaataattttttt

SEQ ID NO: 50543 - DNA, 22 bp, synthetic construct
  misc_feature 1..22: note = chemically synthesized
  source 1..22: mol_type = other DNA
ttttaaaatattagggtgtgat

SEQ ID NO: 50544 - DNA, 22 bp, synthetic construct
  misc_feature 1..22: note = chemically synthesized
  source 1..22: mol_type = other DNA
tttaaaatattagggtgtgatg

SEQ ID NO: 50545 - DNA, 22 bp, synthetic construct
  misc_feature 1..22: note = chemically synthesized
  source 1..22: mol_type = other DNA
ttaaaatattagggtgtgatgg

SEQ ID NO: 50546 - DNA, 22 bp, synthetic construct
  misc_feature 1..22: note = chemically synthesized
  source 1..22: mol_type = other DNA
taaaatattagggtgtgatgga

SEQ ID NO: 50547 - DNA, 22 bp, synthetic construct
  misc_feature 1..22: note = chemically synthesized
  source 1..22: mol_type = other DNA
aaaatattagggtgtgatggag

SEQ ID NO: 50548 - DNA, 22 bp, synthetic construct
  misc_feature 1..22: note = chemically synthesized
  source 1..22: mol_type = other DNA
aaatattagggtgtgatggaga

SEQ ID NO: 50549 - DNA, 22 bp, synthetic construct
  misc_feature 1..22: note = chemically synthesized
  source 1..22: mol_type = other DNA
gggtgtgatggagagaaactca

SEQ ID NO: 50550 - DNA, 22 bp, synthetic construct
  misc_feature 1..22: note = chemically synthesized
  source 1..22: mol_type = other DNA
acgagatttaagatttaacatt

SEQ ID NO: 50551 - DNA, 22 bp, synthetic construct
  misc_feature 1..22: note = chemically synthesized
  source 1..22: mol_type = other DNA
aagatttaacattggttaatgc

SEQ ID NO: 50552 - DNA, 22 bp, synthetic construct
  misc_feature 1..22: note = chemically synthesized
  source 1..22: mol_type = other DNA
agatttaacattggttaatgca

SEQ ID NO: 50553 - DNA, 22 bp, synthetic construct
  misc_feature 1..22: note = chemically synthesized
  source 1..22: mol_type = other DNA
aacattggttaatgcattgttt

SEQ ID NO: 50554 - DNA, 22 bp, synthetic construct
  misc_feature 1..22: note = chemically synthesized
  source 1..22: mol_type = other DNA
acattggttaatgcattgtttt

SEQ ID NO: 50555 - DNA, 22 bp, synthetic construct
  misc_feature 1..22: note = chemically synthesized
  source 1..22: mol_type = other DNA
gttaatgcattgttttaactgg

SEQ ID NO: 50556 - DNA, 22 bp, synthetic construct
  misc_feature 1..22: note = chemically synthesized
  source 1..22: mol_type = other DNA
atgcattgttttaactggaaac

SEQ ID NO: 50557 - DNA, 22 bp, synthetic construct
  misc_feature 1..22: note = chemically synthesized
  source 1..22: mol_type = other DNA
ttttaactggaaactgaaagga

SEQ ID NO: 50558 - DNA, 22 bp, synthetic construct
  misc_feature 1..22: note = chemically synthesized
  source 1..22: mol_type = other DNA
taactggaaactgaaaggatcg

SEQ ID NO: 50559 - DNA, 22 bp, synthetic construct
  misc_feature 1..22: note = chemically synthesized
  source 1..22: mol_type = other DNA
aactggaaactgaaaggatcgg

SEQ ID NO: 50560 - DNA, 22 bp, synthetic construct
  misc_feature 1..22: note = chemically synthesized
  source 1..22: mol_type = other DNA
actggaaactgaaaggatcggg

SEQ ID NO: 50561 - DNA, 22 bp, synthetic construct
  misc_feature 1..22: note = chemically synthesized
  source 1..22: mol_type = other DNA
gaaactgaaaggatcggggcag

SEQ ID NO: 50562 - DNA, 22 bp, synthetic construct
  misc_feature 1..22: note = chemically synthesized
  source 1..22: mol_type = other DNA
aaaggatcggggcaggggagtt

SEQ ID NO: 50563 - DNA, 22 bp, synthetic construct
  misc_feature 1..22: note = chemically synthesized
  source 1..22: mol_type = other DNA
aaatggggagtaaatggttcac

SEQ ID NO: 50564 - DNA, 22 bp, synthetic construct
  misc_feature 1..22: note = chemically synthesized
  source 1..22: mol_type = other DNA
actgaggggttcccccctaaat

SEQ ID NO: 50565 - DNA, 22 bp, synthetic construct
  misc_feature 1..22: note = chemically synthesized
  source 1..22: mol_type = other DNA
aggggttcccccctaaatgtaa

SEQ ID NO: 50566 - DNA, 22 bp, synthetic construct
  misc_feature 1..22: note = chemically synthesized
  source 1..22: mol_type = other DNA
ccccctaaatgtaaataaatca

SEQ ID NO: 50567 - DNA, 22 bp, synthetic construct
  misc_feature 1..22: note = chemically synthesized
  source 1..22: mol_type = other DNA
aatgtaaataaatcataaaatc

SEQ ID NO: 50568 - DNA, 22 bp, synthetic construct
  misc_feature 1..22: note = chemically synthesized
  source 1..22: mol_type = other DNA
gagttggtgaaggagaatactt

SEQ ID NO: 50569 - DNA, 22 bp, synthetic construct
  misc_feature 1..22: note = chemically synthesized
  source 1..22: mol_type = other DNA
agttggtgaaggagaatacttc

SEQ ID NO: 50570 - DNA, 22 bp, synthetic construct
  misc_feature 1..22: note = chemically synthesized
  source 1..22: mol_type = other DNA
gtgaaggagaatacttcaggtt

SEQ ID NO: 50571 - DNA, 22 bp, synthetic construct
  misc_feature 1..22: note = chemically synthesized
  source 1..22: mol_type = other DNA
caggtttggttctcttagtttt

SEQ ID NO: 50572 - DNA, 22 bp, synthetic construct
  misc_feature 1..22: note = chemically synthesized
  source 1..22: mol_type = other DNA
aggtttggttctcttagttttt

SEQ ID NO: 50573 - DNA, 22 bp, synthetic construct
  misc_feature 1..22: note = chemically synthesized
  source 1..22: mol_type = other DNA
ggttctcttagttttttgaggt

SEQ ID NO: 50574 - DNA, 22 bp, synthetic construct
  misc_feature 1..22: note = chemically synthesized
  source 1..22: mol_type = other DNA
gttctcttagttttttgaggtt

SEQ ID NO: 50575 - DNA, 22 bp, synthetic construct
  misc_feature 1..22: note = chemically synthesized
  source 1..22: mol_type = other DNA
tcttagttttttgaggtttgtt

SEQ ID NO: 50576 - DNA, 22 bp, synthetic construct
  misc_feature 1..22: note = chemically synthesized
  source 1..22: mol_type = other DNA
ttagttttttgaggtttgtttt

SEQ ID NO: 50577 - DNA, 22 bp, synthetic construct
  misc_feature 1..22: note = chemically synthesized
  source 1..22: mol_type = other DNA
agttttttgaggtttgtttttg

SEQ ID NO: 50578 - DNA, 22 bp, synthetic construct
  misc_feature 1..22: note = chemically synthesized
  source 1..22: mol_type = other DNA
gttttttgaggtttgtttttgt

SEQ ID NO: 50579 - DNA, 22 bp, synthetic construct
  misc_feature 1..22: note = chemically synthesized
  source 1..22: mol_type = other DNA
tttgaggtttgtttttgtttga

SEQ ID NO: 50580 - DNA, 22 bp, synthetic construct
  misc_feature 1..22: note = chemically synthesized
  source 1..22: mol_type = other DNA
ttgaggtttgtttttgtttgag

SEQ ID NO: 50581 - DNA, 22 bp, synthetic construct
  misc_feature 1..22: note = chemically synthesized
  source 1..22: mol_type = other DNA
tgaggtttgtttttgtttgagg

SEQ ID NO: 50582 - DNA, 22 bp, synthetic construct
  misc_feature 1..22: note = chemically synthesized
  source 1..22: mol_type = other DNA
gaggtttgtttttgtttgagga

SEQ ID NO: 50583 - DNA, 22 bp, synthetic construct
  misc_feature 1..22: note = chemically synthesized
  source 1..22: mol_type = other DNA
aggtttgtttttgtttgaggag

SEQ ID NO: 50584 - DNA, 22 bp, synthetic construct
  misc_feature 1..22: note = chemically synthesized
  source 1..22: mol_type = other DNA
gtttttgtttgaggaggtgcag

SEQ ID NO: 50585 - DNA, 22 bp, synthetic construct
  misc_feature 1..22: note = chemically synthesized
  source 1..22: mol_type = other DNA
tttttgtttgaggaggtgcagg

SEQ ID NO: 50586 - DNA, 22 bp, synthetic construct
  misc_feature 1..22: note = chemically synthesized
  source 1..22: mol_type = other DNA
ttgtttgaggaggtgcagggat

SEQ ID NO: 50587 - DNA, 22 bp, synthetic construct
  misc_feature 1..22: note = chemically synthesized
  source 1..22: mol_type = other DNA
tgtttgaggaggtgcagggatt

SEQ ID NO: 50588 - DNA, 22 bp, synthetic construct
  misc_feature 1..22: note = chemically synthesized
  source 1..22: mol_type = other DNA
gtttgaggaggtgcagggattg

SEQ ID NO: 50589 - DNA, 22 bp, synthetic construct
  misc_feature 1..22: note = chemically synthesized
  source 1..22: mol_type = other DNA
tttgaggaggtgcagggattgg

SEQ ID NO: 50590 - DNA, 22 bp, synthetic construct
  misc_feature 1..22: note = chemically synthesized
  source 1..22: mol_type = other DNA
gaggaggtgcagggattggcca

SEQ ID NO: 50591 - DNA, 22 bp, synthetic construct
  misc_feature 1..22: note = chemically synthesized
  source 1..22: mol_type = other DNA
aggaggtgcagggattggccaa

SEQ ID NO: 50592 - DNA, 22 bp, synthetic construct
  misc_feature 1..22: note = chemically synthesized
  source 1..22: mol_type = other DNA
gccaaatattaaaactctatat

SEQ ID NO: 50593 - DNA, 22 bp, synthetic construct
  misc_feature 1..22: note = chemically synthesized
  source 1..22: mol_type = other DNA
aaactctatatttaaaatgtac

SEQ ID NO: 50594 - DNA, 22 bp, synthetic construct
  misc_feature 1..22: note = chemically synthesized
  source 1..22: mol_type = other DNA
tatatttaaaatgtacaggaac

SEQ ID NO: 50595 - DNA, 22 bp, synthetic construct
  misc_feature 1..22: note = chemically synthesized
  source 1..22: mol_type = other DNA
tatttaaaatgtacaggaacag

SEQ ID NO: 50596 - DNA, 22 bp, synthetic construct
  misc_feature 1..22: note = chemically synthesized
  source 1..22: mol_type = other DNA
aaaatgtacaggaacagacttg

SEQ ID NO: 50597 - DNA, 22 bp, synthetic construct
  misc_feature 1..22: note = chemically synthesized
  source 1..22: mol_type = other DNA
aaatgtacaggaacagacttgg

SEQ ID NO: 50598 - DNA, 22 bp, synthetic construct
  misc_feature 1..22: note = chemically synthesized
  source 1..22: mol_type = other DNA
ggcacatagtgctttgtgctcc

SEQ ID NO: 50599 - DNA, 22 bp, synthetic construct
  misc_feature 1..22: note = chemically synthesized
  source 1..22: mol_type = other DNA
gcacatagtgctttgtgctcca

SEQ ID NO: 50600 - DNA, 22 bp, synthetic construct
  misc_feature 1..22: note = chemically synthesized
  source 1..22: mol_type = other DNA
tgtgctccaacataagaatcca

SEQ ID NO: 50601 - DNA, 22 bp, synthetic construct
  misc_feature 1..22: note = chemically synthesized
  source 1..22: mol_type = other DNA
gtgctccaacataagaatccaa

SEQ ID NO: 50602 - DNA, 22 bp, synthetic construct
  misc_feature 1..22: note = chemically synthesized
  source 1..22: mol_type = other DNA
tgctccaacataagaatccaag

SEQ ID NO: 50603 - DNA, 22 bp, synthetic construct
  misc_feature 1..22: note = chemically synthesized
  source 1..22: mol_type = other DNA
caacataagaatccaagctaca

SEQ ID NO: 50604 - DNA, 22 bp, synthetic construct
  misc_feature 1..22: note = chemically synthesized
  source 1..22: mol_type = other DNA
cactttatttccctaaaaatta

SEQ ID NO: 50605 - DNA, 22 bp, synthetic construct
  misc_feature 1..22: note = chemically synthesized
  source 1..22: mol_type = other DNA
tatttccctaaaaattaacaga

SEQ ID NO: 50606 - DNA, 22 bp, synthetic construct
  misc_feature 1..22: note = chemically synthesized
  source 1..22: mol_type = other DNA
atttccctaaaaattaacagat

SEQ ID NO: 50607 - DNA, 22 bp, synthetic construct
  misc_feature 1..22: note = chemically synthesized
  source 1..22: mol_type = other DNA
tttccctaaaaattaacagatg

SEQ ID NO: 50608 - DNA, 22 bp, synthetic construct
  misc_feature 1..22: note = chemically synthesized
  source 1..22: mol_type = other DNA
ccctaaaaattaacagatgtga

SEQ ID NO: 50609 - DNA, 22 bp, synthetic construct
  misc_feature 1..22: note = chemically synthesized
  source 1..22: mol_type = other DNA
cctaaaaattaacagatgtgat

SEQ ID NO: 50610 - DNA, 22 bp, synthetic construct
  misc_feature 1..22: note = chemically synthesized
  source 1..22: mol_type = other DNA
aaaattaacagatgtgatttcc

SEQ ID NO: 50611 - DNA, 22 bp, synthetic construct
  misc_feature 1..22: note = chemically synthesized
  source 1..22: mol_type = other DNA
acagatgtgatttccttgcagc

SEQ ID NO: 50612 - DNA, 22 bp, synthetic construct
  misc_feature 1..22: note = chemically synthesized
  source 1..22: mol_type = other DNA
ccttgcagcctttttatgcatc

SEQ ID NO: 50613 - DNA, 22 bp, synthetic construct
  misc_feature 1..22: note = chemically synthesized
  source 1..22: mol_type = other DNA
cttgcagcctttttatgcatca

SEQ ID NO: 50614 - DNA, 22 bp, synthetic construct
  misc_feature 1..22: note = chemically synthesized
  source 1..22: mol_type = other DNA
gcagcctttttatgcatcatta

SEQ ID NO: 50615 - DNA, 22 bp, synthetic construct
  misc_feature 1..22: note = chemically synthesized
  source 1..22: mol_type = other DNA
cagcctttttatgcatcattac

SEQ ID NO: 50616 - DNA, 22 bp, synthetic construct
  misc_feature 1..22: note = chemically synthesized
  source 1..22: mol_type = other DNA
tttatgcatcattacatattaa

SEQ ID NO: 50617 - DNA, 22 bp, synthetic construct
  misc_feature 1..22: note = chemically synthesized
  source 1..22: mol_type = other DNA
ttatgcatcattacatattaag

SEQ ID NO: 50618 - DNA, 22 bp, synthetic construct
  misc_feature 1..22: note = chemically synthesized
  source 1..22: mol_type = other DNA
tatgcatcattacatattaaga

SEQ ID NO: 50619 - DNA, 22 bp, synthetic construct
  misc_feature 1..22: note = chemically synthesized
  source 1..22: mol_type = other DNA
atgcatcattacatattaagaa

SEQ ID NO: 50620 - DNA, 22 bp, synthetic construct
  misc_feature 1..22: note = chemically synthesized
  source 1..22: mol_type = other DNA
tgcatcattacatattaagaaa

SEQ ID NO: 50621 - DNA, 22 bp, synthetic construct
  misc_feature 1..22: note = chemically synthesized
  source 1..22: mol_type = other DNA
catattaagaaaatgaacaact

SEQ ID NO: 50622 - DNA, 22 bp, synthetic construct
  misc_feature 1..22: note = chemically synthesized
  source 1..22: mol_type = other DNA
agaaaatgaacaactgatgaat

SEQ ID NO: 50623 - DNA, 22 bp, synthetic construct
  misc_feature 1..22: note = chemically synthesized
  source 1..22: mol_type = other DNA
atgaatataaatttaaatgccc

SEQ ID NO: 50624 - DNA, 22 bp, synthetic construct
  misc_feature 1..22: note = chemically synthesized
  source 1..22: mol_type = other DNA
aaatgccctgatgcttagcaaa

SEQ ID NO: 50625 - DNA, 22 bp, synthetic construct
  misc_feature 1..22: note = chemically synthesized
  source 1..22: mol_type = other DNA
aatgccctgatgcttagcaaaa

SEQ ID NO: 50626 - DNA, 22 bp, synthetic construct
  misc_feature 1..22: note = chemically synthesized
  source 1..22: mol_type = other DNA
atgcttagcaaaaagcttcctt

SEQ ID NO: 50627 - DNA, 22 bp, synthetic construct
  misc_feature 1..22: note = chemically synthesized
  source 1..22: mol_type = other DNA
agcaaaaagcttccttgtgttt

SEQ ID NO: 50628 - DNA, 22 bp, synthetic construct
  misc_feature 1..22: note = chemically synthesized
  source 1..22: mol_type = other DNA
gcaaaaagcttccttgtgtttt

SEQ ID NO: 50629 - DNA, 22 bp, synthetic construct
  misc_feature 1..22: note = chemically synthesized
  source 1..22: mol_type = other DNA
ccttgtgttttttagaaagttc

SEQ ID NO: 50630 - DNA, 22 bp, synthetic construct
  misc_feature 1..22: note = chemically synthesized
  source 1..22: mol_type = other DNA
cttgtgttttttagaaagttca

SEQ ID NO: 50631 - DNA, 22 bp, synthetic construct
  misc_feature 1..22: note = chemically synthesized
  source 1..22: mol_type = other DNA
gtgttttttagaaagttcaaaa

SEQ ID NO: 50632 - DNA, 22 bp, synthetic construct
  misc_feature 1..22: note = chemically synthesized
  source 1..22: mol_type = other DNA
tgttttttagaaagttcaaaaa

SEQ ID NO: 50633 - DNA, 22 bp, synthetic construct
  misc_feature 1..22: note = chemically synthesized
  source 1..22: mol_type = other DNA
tttagaaagttcaaaaagcaaa

SEQ ID NO: 50634 - DNA, 22 bp, synthetic construct
  misc_feature 1..22: note = chemically synthesized
  source 1..22: mol_type = other DNA
ttagaaagttcaaaaagcaaat

SEQ ID NO: 50635 - DNA, 22 bp, synthetic construct
  misc_feature 1..22: note = chemically synthesized
  source 1..22: mol_type = other DNA
tagaaagttcaaaaagcaaata

SEQ ID NO: 50636 - DNA, 22 bp, synthetic construct
  misc_feature 1..22: note = chemically synthesized
  source 1..22: mol_type = other DNA
agaaagttcaaaaagcaaatag

SEQ ID NO: 50637 - DNA, 22 bp, synthetic construct
  misc_feature 1..22: note = chemically synthesized
  source 1..22: mol_type = other DNA
gaaagttcaaaaagcaaataga

SEQ ID NO: 50638 - DNA, 22 bp, synthetic construct
  misc_feature 1..22: note = chemically synthesized
  source 1..22: mol_type = other DNA
aaaaagcaaatagaaaggcgag

SEQ ID NO: 50639 - DNA, 22 bp, synthetic construct
  misc_feature 1..22: note = chemically synthesized
  source 1..22: mol_type = other DNA
gttttctttttgaaggcaccct

SEQ ID NO: 50640 - DNA, 22 bp, synthetic construct
  misc_feature 1..22: note = chemically synthesized
  source 1..22: mol_type = other DNA
tctttttgaaggcacccttgca

SEQ ID NO: 50641 - DNA, 22 bp, synthetic construct
  misc_feature 1..22: note = chemically synthesized
  source 1..22: mol_type = other DNA
ctttttgaaggcacccttgcag

SEQ ID NO: 50642 - DNA, 22 bp, synthetic construct
  misc_feature 1..22: note = chemically synthesized
  source 1..22: mol_type = other DNA
tttttgaaggcacccttgcagg

SEQ ID NO: 50643 - DNA, 22 bp, synthetic construct
  misc_feature 1..22: note = chemically synthesized
  source 1..22: mol_type = other DNA
tttgaaggcacccttgcaggtt

SEQ ID NO: 50644 - DNA, 22 bp, synthetic construct
  misc_feature 1..22: note = chemically synthesized
  source 1..22: mol_type = other DNA
ttgaaggcacccttgcaggttt

SEQ ID NO: 50645 - DNA, 22 bp, synthetic construct
  misc_feature 1..22: note = chemically synthesized
  source 1..22: mol_type = other DNA
tgaaggcacccttgcaggtttc

SEQ ID NO: 50646 - DNA, 22 bp, synthetic construct
  misc_feature 1..22: note = chemically synthesized
  source 1..22: mol_type = other DNA
gaaggcacccttgcaggtttca

SEQ ID NO: 50647 - DNA, 22 bp, synthetic construct
  misc_feature 1..22: note = chemically synthesized
  source 1..22: mol_type = other DNA
aaggcacccttgcaggtttcac

SEQ ID NO: 50648 - DNA, 22 bp, synthetic construct
  misc_feature 1..22: note = chemically synthesized
  source 1..22: mol_type = other DNA
gcaggtttcacaataattccat

SEQ ID NO: 50649 - DNA, 22 bp, synthetic construct
  misc_feature 1..22: note = chemically synthesized
  source 1..22: mol_type = other DNA
caggtttcacaataattccatt

SEQ ID NO: 50650 - DNA, 22 bp, synthetic construct
  misc_feature 1..22: note = chemically synthesized
  source 1..22: mol_type = other DNA
cacaataattccattctttatt

SEQ ID NO: 50651 - DNA, 22 bp, synthetic construct
  misc_feature 1..22: note = chemically synthesized
  source 1..22: mol_type = other DNA
acaataattccattctttattt

SEQ ID NO: 50652 - DNA, 22 bp, synthetic construct
  misc_feature 1..22: note = chemically synthesized
  source 1..22: mol_type = other DNA
cattctttattttaatgggagt

SEQ ID NO: 50653 - DNA, 22 bp, synthetic construct
  misc_feature 1..22: note = chemically synthesized
  source 1..22: mol_type = other DNA
tttattttaatgggagttttta

SEQ ID NO: 50654 - DNA, 22 bp, synthetic construct
  misc_feature 1..22: note = chemically synthesized
  source 1..22: mol_type = other DNA
tattttaatgggagtttttaat

SEQ ID NO: 50655 - DNA, 22 bp, synthetic construct
  misc_feature 1..22: note = chemically synthesized
  source 1..22: mol_type = other DNA
attttaatgggagtttttaatc

SEQ ID NO: 50656 - DNA, 22 bp, synthetic construct
  misc_feature 1..22: note = chemically synthesized
  source 1..22: mol_type = other DNA
ttttaatgggagtttttaatca

SEQ ID NO: 50657 - DNA, 22 bp, synthetic construct
  misc_feature 1..22: note = chemically synthesized
  source 1..22: mol_type = other DNA
taatgggagtttttaatcagtg

SEQ ID NO: 50658 - DNA, 22 bp, synthetic construct
  misc_feature 1..22: note = chemically synthesized
  source 1..22: mol_type = other DNA
aatgggagtttttaatcagtgg

SEQ ID NO: 50659 - DNA, 22 bp, synthetic construct
  misc_feature 1..22: note = chemically synthesized
  source 1..22: mol_type = other DNA
atgggagtttttaatcagtgga

SEQ ID NO: 50660 - DNA, 22 bp, synthetic construct
  misc_feature 1..22: note = chemically synthesized
  source 1..22: mol_type = other DNA
ttaatcagtggattcgcctcta

SEQ ID NO: 50661 - DNA, 22 bp, synthetic construct
  misc_feature 1..22: note = chemically synthesized
  source 1..22: mol_type = other DNA
taatcagtggattcgcctctat

SEQ ID NO: 50662 - DNA, 22 bp, synthetic construct
  misc_feature 1..22: note = chemically synthesized
  source 1..22: mol_type = other DNA
aatcagtggattcgcctctatc

SEQ ID NO: 50663 - DNA, 22 bp, synthetic construct
  misc_feature 1..22: note = chemically synthesized
  source 1..22: mol_type = other DNA
atcagtggattcgcctctatct

SEQ ID NO: 50664 - DNA, 22 bp, synthetic construct
  misc_feature 1..22: note = chemically synthesized
  source 1..22: mol_type = other DNA
gcctctatctaaaactaaaatc

SEQ ID NO: 50665 - DNA, 22 bp, synthetic construct
  misc_feature 1..22: note = chemically synthesized
  source 1..22: mol_type = other DNA
tatctaaaactaaaatcaaatt

SEQ ID NO: 50666 - DNA, 22 bp, synthetic construct
  misc_feature 1..22: note = chemically synthesized
  source 1..22: mol_type = other DNA
tctaaaactaaaatcaaattgt

SEQ ID NO: 50667 - DNA, 22 bp, synthetic construct
  misc_feature 1..22: note = chemically synthesized
  source 1..22: mol_type = other DNA
aaactaaaatcaaattgtaggt

SEQ ID NO: 50668 - DNA, 22 bp, synthetic construct
  misc_feature 1..22: note = chemically synthesized
  source 1..22: mol_type = other DNA
aaatcaaattgtaggtgcaatt

SEQ ID NO: 50669 - DNA, 22 bp, synthetic construct
  misc_feature 1..22: note = chemically synthesized
  source 1..22: mol_type = other DNA
taggtgcaattgttcattggca

SEQ ID NO: 50670 - DNA, 22 bp, synthetic construct
  misc_feature 1..22: note = chemically synthesized
  source 1..22: mol_type = other DNA
ttcattggcaatgctaacaaca

SEQ ID NO: 50671 - DNA, 22 bp, synthetic construct
  misc_feature 1..22: note = chemically synthesized
  source 1..22: mol_type = other DNA
attggcaatgctaacaacagtg

SEQ ID NO: 50672 - DNA, 22 bp, synthetic construct
  misc_feature 1..22: note = chemically synthesized
  source 1..22: mol_type = other DNA
gcaatgctaacaacagtgagaa

SEQ ID NO: 50673 - DNA, 22 bp, synthetic construct
  misc_feature 1..22: note = chemically synthesized
  source 1..22: mol_type = other DNA
acaacagtgagaatacaaacaa

SEQ ID NO: 50674 - DNA, 22 bp, synthetic construct
  misc_feature 1..22: note = chemically synthesized
  source 1..22: mol_type = other DNA
attgtgagtgaccaaaggtccc

SEQ ID NO: 50675 - DNA, 22 bp, synthetic construct
  misc_feature 1..22: note = chemically synthesized
  source 1..22: mol_type = other DNA
tgagtgaccaaaggtccccagg

SEQ ID NO: 50676 - DNA, 22 bp, synthetic construct
  misc_feature 1..22: note = chemically synthesized
  source 1..22: mol_type = other DNA
catcaacatacctgctccaggt

SEQ ID NO: 50677 - DNA, 22 bp, synthetic construct
  misc_feature 1..22: note = chemically synthesized
  source 1..22: mol_type = other DNA
atcaacatacctgctccaggtt

SEQ ID NO: 50678 - DNA, 22 bp, synthetic construct
  misc_feature 1..22: note = chemically synthesized
  source 1..22: mol_type = other DNA
ctccaggttcccactgggaatt

SEQ ID NO: 50679 - DNA, 22 bp, synthetic construct
  misc_feature 1..22: note = chemically synthesized
  source 1..22: mol_type = other DNA
caggttcccactgggaattctc

SEQ ID NO: 50680 - DNA, 22 bp, synthetic construct
  misc_feature 1..22: note = chemically synthesized
  source 1..22: mol_type = other DNA
ccactgggaattctctggcaga

SEQ ID NO: 50681 - DNA, 22 bp, synthetic construct
  misc_feature 1..22: note = chemically synthesized
  source 1..22: mol_type = other DNA
ggaattctctggcagagactga

SEQ ID NO: 50682 - DNA, 22 bp, synthetic construct
  misc_feature 1..22: note = chemically synthesized
  source 1..22: mol_type = other DNA
tctggcagagactgattcagtt

SEQ ID NO: 50683 - DNA, 22 bp, synthetic construct
  misc_feature 1..22: note = chemically synthesized
  source 1..22: mol_type = other DNA
tggcagagactgattcagttct

SEQ ID NO: 50684 - DNA, 22 bp, synthetic construct
  misc_feature 1..22: note = chemically synthesized
  source 1..22: mol_type = other DNA
gcagagactgattcagttctga

SEQ ID NO: 50685 - DNA, 22 bp, synthetic construct
  misc_feature 1..22: note = chemically synthesized
  source 1..22: mol_type = other DNA
attcagttctgaataacatgct

SEQ ID NO: 50686 - DNA, 22 bp, synthetic construct
  misc_feature 1..22: note = chemically synthesized
  source 1..22: mol_type = other DNA
agttctgaataacatgctgcca

SEQ ID NO: 50687 - DNA, 22 bp, synthetic construct
  misc_feature 1..22: note = chemically synthesized
  source 1..22: mol_type = other DNA
tgaataacatgctgccagccct

SEQ ID NO: 50688 - DNA, 22 bp, synthetic construct
  misc_feature 1..22: note = chemically synthesized
  source 1..22: mol_type = other DNA
aataacatgctgccagccctat

SEQ ID NO: 50689 - DNA, 22 bp, synthetic construct
  misc_feature 1..22: note = chemically synthesized
  source 1..22: mol_type = other DNA
ccagccctatctggaaaagggt

SEQ ID NO: 50690 - DNA, 22 bp, synthetic construct
  misc_feature 1..22: note = chemically synthesized
  source 1..22: mol_type = other DNA
tctggaaaagggtgtgcaaggc

SEQ ID NO: 50691 - DNA, 22 bp, synthetic construct
  misc_feature 1..22: note = chemically synthesized
  source 1..22: mol_type = other DNA
gaaaagggtgtgcaaggcgcct

SEQ ID NO: 50692 - DNA, 22 bp, synthetic construct
  misc_feature 1..22: note = chemically synthesized
  source 1..22: mol_type = other DNA
ctcgcctcttttacaggaagtt

SEQ ID NO: 50693 - DNA, 22 bp, synthetic construct
  misc_feature 1..22: note = chemically synthesized
  source 1..22: mol_type = other DNA
tcgcctcttttacaggaagttt

SEQ ID NO: 50694 - DNA, 22 bp, synthetic construct
  misc_feature 1..22: note = chemically synthesized
  source 1..22: mol_type = other DNA
gcctcttttacaggaagtttaa

SEQ ID NO: 50695 - DNA, 22 bp, synthetic construct
  misc_feature 1..22: note = chemically synthesized
  source 1..22: mol_type = other DNA
ttttacaggaagtttaaacctg

SEQ ID NO: 50696 - DNA, 22 bp, synthetic construct
  misc_feature 1..22: note = chemically synthesized
  source 1..22: mol_type = other DNA
ttacaggaagtttaaacctgat

SEQ ID NO: 50697 - DNA, 22 bp, synthetic construct
  misc_feature 1..22: note = chemically synthesized
  source 1..22: mol_type = other DNA
tacaggaagtttaaacctgatc

SEQ ID NO: 50698 - DNA, 22 bp, synthetic construct
  misc_feature 1..22: note = chemically synthesized
  source 1..22: mol_type = other DNA
acaggaagtttaaacctgatca

SEQ ID NO: 50699 - DNA, 22 bp, synthetic construct
  misc_feature 1..22: note = chemically synthesized
  source 1..22: mol_type = other DNA
caggaagtttaaacctgatcat

SEQ ID NO: 50700 - DNA, 22 bp, synthetic construct
  misc_feature 1..22: note = chemically synthesized
  source 1..22: mol_type = other DNA
aaacctgatcatctcaccttta

SEQ ID NO: 50701 - DNA, 22 bp, synthetic construct
  misc_feature 1..22: note = chemically synthesized
  source 1..22: mol_type = other DNA
aacctgatcatctcacctttag

SEQ ID NO: 50702 - DNA, 22 bp, synthetic construct
  misc_feature 1..22: note = chemically synthesized
  source 1..22: mol_type = other DNA
atcatctcacctttaggtatat

SEQ ID NO: 50703 - DNA, 22 bp, synthetic construct
  misc_feature 1..22: note = chemically synthesized
  source 1..22: mol_type = other DNA
acctttaggtatatataatttg

SEQ ID NO: 50704 - DNA, 22 bp, synthetic construct
  misc_feature 1..22: note = chemically synthesized
  source 1..22: mol_type = other DNA
taggtatatataatttgttgtt

SEQ ID NO: 50705 - DNA, 22 bp, synthetic construct
  misc_feature 1..22: note = chemically synthesized
  source 1..22: mol_type = other DNA
aggtatatataatttgttgttt

SEQ ID NO: 50706 - DNA, 22 bp, synthetic construct
  misc_feature 1..22: note = chemically synthesized
  source 1..22: mol_type = other DNA
ggtatatataatttgttgttta

SEQ ID NO: 50707 - DNA, 22 bp, synthetic construct
  misc_feature 1..22: note = chemically synthesized
  source 1..22: mol_type = other DNA
gttgtttagcactctgagaact

SEQ ID NO: 50708 - DNA, 22 bp, synthetic construct
  misc_feature 1..22: note = chemically synthesized
  source 1..22: mol_type = other DNA
ttgtttagcactctgagaactt

SEQ ID NO: 50709 - DNA, 22 bp, synthetic construct
  misc_feature 1..22: note = chemically synthesized
  source 1..22: mol_type = other DNA
tttagcactctgagaacttggt

SEQ ID NO: 50710 - DNA, 22 bp, synthetic construct
  misc_feature 1..22: note = chemically synthesized
  source 1..22: mol_type = other DNA
agcactctgagaacttggtatt

SEQ ID NO: 50711 - DNA, 22 bp, synthetic construct
  misc_feature 1..22: note = chemically synthesized
  source 1..22: mol_type = other DNA
gcactctgagaacttggtattt

SEQ ID NO: 50712 - DNA, 22 bp, synthetic construct
  misc_feature 1..22: note = chemically synthesized
  source 1..22: mol_type = other DNA
tgagaacttggtattttatcta

SEQ ID NO: 50713 - DNA, 22 bp, synthetic construct
  misc_feature 1..22: note = chemically synthesized
  source 1..22: mol_type = other DNA
agaacttggtattttatctatc

SEQ ID NO: 50714 - DNA, 22 bp, synthetic construct
  misc_feature 1..22: note = chemically synthesized
  source 1..22: mol_type = other DNA
ggtattttatctatctaaagag

SEQ ID NO: 50715 - DNA, 22 bp, synthetic construct
  misc_feature 1..22: note = chemically synthesized
  source 1..22: mol_type = other DNA
gtattttatctatctaaagaga

SEQ ID NO: 50716 - DNA, 22 bp, synthetic construct
  misc_feature 1..22: note = chemically synthesized
  source 1..22: mol_type = other DNA
tatctatctaaagagatcaaaa

SEQ ID NO: 50717 - DNA, 22 bp, synthetic construct
  misc_feature 1..22: note = chemically synthesized
  source 1..22: mol_type = other DNA
atctatctaaagagatcaaaaa

SEQ ID NO: 50718 - DNA, 22 bp, synthetic construct
  misc_feature 1..22: note = chemically synthesized
  source 1..22: mol_type = other DNA
tctatctaaagagatcaaaaag

SEQ ID NO: 50719 - DNA, 22 bp, synthetic construct
  misc_feature 1..22: note = chemically synthesized
  source 1..22: mol_type = other DNA
tctaaagagatcaaaaagggca

SEQ ID NO: 50720 - DNA, 22 bp, synthetic construct
  misc_feature 1..22: note = chemically synthesized
  source 1..22: mol_type = other DNA
aagagatcaaaaagggcaaaag

SEQ ID NO: 50721 - DNA, 22 bp, synthetic construct
  misc_feature 1..22: note = chemically synthesized
  source 1..22: mol_type = other DNA
aggcccagcctagctctggtgc

SEQ ID NO: 50722 - DNA, 22 bp, synthetic construct
  misc_feature 1..22: note = chemically synthesized
  source 1..22: mol_type = other DNA
gctctggtgcatacgtcaatcg

SEQ ID NO: 50723 - DNA, 22 bp, synthetic construct
  misc_feature 1..22: note = chemically synthesized
  source 1..22: mol_type = other DNA
tggtgcatacgtcaatcgtgca

SEQ ID NO: 50724 - DNA, 22 bp, synthetic construct
  misc_feature 1..22: note = chemically synthesized
  source 1..22: mol_type = other DNA
gtgcatacgtcaatcgtgcact

SEQ ID NO: 50725 - DNA, 22 bp, synthetic construct
  misc_feature 1..22: note = chemically synthesized
  source 1..22: mol_type = other DNA
cgcgttgccttagaggagcaac

SEQ ID NO: 50726 - DNA, 22 bp, synthetic construct
  misc_feature 1..22: note = chemically synthesized
  source 1..22: mol_type = other DNA
ccttagaggagcaacctgtgca

SEQ ID NO: 50727 - DNA, 22 bp, synthetic construct
  misc_feature 1..22: note = chemically synthesized
  source 1..22: mol_type = other DNA
agaggagcaacctgtgcaggta

SEQ ID NO: 50728 - DNA, 22 bp, synthetic construct
  misc_feature 1..22: note = chemically synthesized
  source 1..22: mol_type = other DNA
gaggagcaacctgtgcaggtaa

SEQ ID NO: 50729 - DNA, 22 bp, synthetic construct
  misc_feature 1..22: note = chemically synthesized
  source 1..22: mol_type = other DNA
tgcaggtaaatcttccagcagc

SEQ ID NO: 50730 - DNA, 22 bp, synthetic construct
  misc_feature 1..22: note = chemically synthesized
  source 1..22: mol_type = other DNA
ccagcagcattgcatcagatcc

SEQ ID NO: 50731 - DNA, 22 bp, synthetic construct
  misc_feature 1..22: note = chemically synthesized
  source 1..22: mol_type = other DNA
cagcagcattgcatcagatcca

SEQ ID NO: 50732 - DNA, 22 bp, synthetic construct
  misc_feature 1..22: note = chemically synthesized
  source 1..22: mol_type = other DNA
catcagatccactcacatcagt

SEQ ID NO: 50733 - DNA, 22 bp, synthetic construct
  misc_feature 1..22: note = chemically synthesized
  source 1..22: mol_type = other DNA
acatcagtctccagggtgaacc

SEQ ID NO: 50734 - DNA, 22 bp, synthetic construct
  misc_feature 1..22: note = chemically synthesized
  source 1..22: mol_type = other DNA
cagggtgaaccaagagatgaca

SEQ ID NO: 50735 - DNA, 22 bp, synthetic construct
  misc_feature 1..22: note = chemically synthesized
  source 1..22: mol_type = other DNA
cagttccctgtctgcaaacttc

SEQ ID NO: 50736 - DNA, 22 bp, synthetic construct
  misc_feature 1..22: note = chemically synthesized
  source 1..22: mol_type = other DNA
agttccctgtctgcaaacttct

SEQ ID NO: 50737 - DNA, 22 bp, synthetic construct
  misc_feature 1..22: note = chemically synthesized
  source 1..22: mol_type = other DNA
cctgtctgcaaacttctaattc

SEQ ID NO: 50738 - DNA, 22 bp, synthetic construct
  misc_feature 1..22: note = chemically synthesized
  source 1..22: mol_type = other DNA
tctgcaaacttctaattcgcca

SEQ ID NO: 50739 - DNA, 22 bp, synthetic construct
  misc_feature 1..22: note = chemically synthesized
  source 1..22: mol_type = other DNA
caaacttctaattcgccagttc

SEQ ID NO: 50740 - DNA, 22 bp, synthetic construct
  misc_feature 1..22: note = chemically synthesized
  source 1..22: mol_type = other DNA
ctaattcgccagttcttagcag

SEQ ID NO: 50741 - DNA, 22 bp, synthetic construct
  misc_feature 1..22: note = chemically synthesized
  source 1..22: mol_type = other DNA
taattcgccagttcttagcagc

SEQ ID NO: 50742 - DNA, 22 bp, synthetic construct
  misc_feature 1..22: note = chemically synthesized
  source 1..22: mol_type = other DNA
attcgccagttcttagcagctt

SEQ ID NO: 50743 - DNA, 22 bp, synthetic construct
  misc_feature 1..22: note = chemically synthesized
  source 1..22: mol_type = other DNA
gccagttcttagcagcttattt

SEQ ID NO: 50744 - DNA, 22 bp, synthetic construct
  misc_feature 1..22: note = chemically synthesized
  source 1..22: mol_type = other DNA
ttagcagcttatttttccaagt

SEQ ID NO: 50745 - DNA, 22 bp, synthetic construct
  misc_feature 1..22: note = chemically synthesized
  source 1..22: mol_type = other DNA
agcagcttatttttccaagtgt

SEQ ID NO: 50746 - DNA, 22 bp, synthetic construct
  misc_feature 1..22: note = chemically synthesized
  source 1..22: mol_type = other DNA
gcagcttatttttccaagtgtt

SEQ ID NO: 50747 - DNA, 22 bp, synthetic construct
  misc_feature 1..22: note = chemically synthesized
  source 1..22: mol_type = other DNA
atttttccaagtgttttgtttc

SEQ ID NO: 50748 - DNA, 22 bp, synthetic construct
  misc_feature 1..22: note = chemically synthesized
  source 1..22: mol_type = other DNA
tttttccaagtgttttgtttca

SEQ ID NO: 50749 - DNA, 22 bp, synthetic construct
  misc_feature 1..22: note = chemically synthesized
  source 1..22: mol_type = other DNA
ttccaagtgttttgtttcagga

SEQ ID NO: 50750 - DNA, 22 bp, synthetic construct
  misc_feature 1..22: note = chemically synthesized
  source 1..22: mol_type = other DNA
tccaagtgttttgtttcaggaa

SEQ ID NO: 50751 - DNA, 22 bp, synthetic construct
  misc_feature 1..22: note = chemically synthesized
  source 1..22: mol_type = other DNA
ccaagtgttttgtttcaggaaa

SEQ ID NO: 50752 - DNA, 22 bp, synthetic construct
  misc_feature 1..22: note = chemically synthesized
  source 1..22: mol_type = other DNA
caagtgttttgtttcaggaaac

SEQ ID NO: 50753 - DNA, 22 bp, synthetic construct
  misc_feature 1..22: note = chemically synthesized
  source 1..22: mol_type = other DNA
tgtttcaggaaacgtgtatttt

SEQ ID NO: 50754 - DNA, 22 bp, synthetic construct
  misc_feature 1..22: note = chemically synthesized
  source 1..22: mol_type = other DNA
gtttcaggaaacgtgtattttt

SEQ ID NO: 50755 - DNA, 22 bp, synthetic construct
  misc_feature 1..22: note = chemically synthesized
  source 1..22: mol_type = other DNA
tttcaggaaacgtgtatttttc

SEQ ID NO: 50756 - DNA, 22 bp, synthetic construct
  misc_feature 1..22: note = chemically synthesized
  source 1..22: mol_type = other DNA
caggaaacgtgtatttttcttt

SEQ ID NO: 50757 - DNA, 22 bp, synthetic construct
  misc_feature 1..22: note = chemically synthesized
  source 1..22: mol_type = other DNA
aggaaacgtgtatttttcttta

SEQ ID NO: 50758 - DNA, 22 bp, synthetic construct
  misc_feature 1..22: note = chemically synthesized
  source 1..22: mol_type = other DNA
ttctttatacgttttgtggatc

SEQ ID NO: 50759 - DNA, 22 bp, synthetic construct
  misc_feature 1..22: note = chemically synthesized
  source 1..22: mol_type = other DNA
tctttatacgttttgtggatct

SEQ ID NO: 50760 - DNA, 22 bp, synthetic construct
  misc_feature 1..22: note = chemically synthesized
  source 1..22: mol_type = other DNA
ctttatacgttttgtggatcta

SEQ ID NO: 50761 - DNA, 22 bp, synthetic construct
  misc_feature 1..22: note = chemically synthesized
  source 1..22: mol_type = other DNA
tttatacgttttgtggatctac

SEQ ID NO: 50762 - DNA, 22 bp, synthetic construct
  misc_feature 1..22: note = chemically synthesized
  source 1..22: mol_type = other DNA
tatacgttttgtggatctacca

SEQ ID NO: 50763 - DNA, 22 bp, synthetic construct
  misc_feature 1..22: note = chemically synthesized
  source 1..22: mol_type = other DNA
atacgttttgtggatctaccac

SEQ ID NO: 50764 - DNA, 22 bp, synthetic construct
  misc_feature 1..22: note = chemically synthesized
  source 1..22: mol_type = other DNA
tacgttttgtggatctaccaca

SEQ ID NO: 50765 - DNA, 22 bp, synthetic construct
  misc_feature 1..22: note = chemically synthesized
  source 1..22: mol_type = other DNA
tgtggatctaccacaactgctt

SEQ ID NO: 50766 - DNA, 22 bp, synthetic construct
  misc_feature 1..22: note = chemically synthesized
  source 1..22: mol_type = other DNA
gtggatctaccacaactgcttc

SEQ ID NO: 50767 - DNA, 22 bp, synthetic construct
  misc_feature 1..22: note = chemically synthesized
  source 1..22: mol_type = other DNA
tggatctaccacaactgcttct

SEQ ID NO: 50768 - DNA, 22 bp, synthetic construct
  misc_feature 1..22: note = chemically synthesized
  source 1..22: mol_type = other DNA
ccacaactgcttctgacagctg

SEQ ID NO: 50769 - DNA, 22 bp, synthetic construct
  misc_feature 1..22: note = chemically synthesized
  source 1..22: mol_type = other DNA
cttctgacagctgttgattctg

SEQ ID NO: 50770 - DNA, 22 bp, synthetic construct
  misc_feature 1..22: note = chemically synthesized
  source 1..22: mol_type = other DNA
ctgacagctgttgattctgtta

SEQ ID NO: 50771 - DNA, 22 bp, synthetic construct
  misc_feature 1..22: note = chemically synthesized
  source 1..22: mol_type = other DNA
tgacagctgttgattctgttaa

SEQ ID NO: 50772 - DNA, 22 bp, synthetic construct
  misc_feature 1..22: note = chemically synthesized
  source 1..22: mol_type = other DNA
acagctgttgattctgttaaag

SEQ ID NO: 50773 - DNA, 22 bp, synthetic construct
  misc_feature 1..22: note = chemically synthesized
  source 1..22: mol_type = other DNA
ttgattctgttaaaggaacaca

SEQ ID NO: 50774 - DNA, 22 bp, synthetic construct
  misc_feature 1..22: note = chemically synthesized
  source 1..22: mol_type = other DNA
attctgttaaaggaacacatta

SEQ ID NO: 50775 - DNA, 22 bp, synthetic construct
  misc_feature 1..22: note = chemically synthesized
  source 1..22: mol_type = other DNA
tgttaaaggaacacattataaa

SEQ ID NO: 50776 - DNA, 22 bp, synthetic construct
  misc_feature 1..22: note = chemically synthesized
  source 1..22: mol_type = other DNA
ttaaaggaacacattataaaaa

SEQ ID NO: 50777 - DNA, 22 bp, synthetic construct
  misc_feature 1..22: note = chemically synthesized
  source 1..22: mol_type = other DNA
aaggaacacattataaaaatct

SEQ ID NO: 50778 - DNA, 22 bp, synthetic construct
  misc_feature 1..22: note = chemically synthesized
  source 1..22: mol_type = other DNA
taaaaatcttctttaaaacctc

SEQ ID NO: 50779 - DNA, 22 bp, synthetic construct
  misc_feature 1..22: note = chemically synthesized
  source 1..22: mol_type = other DNA
ctttaaaacctcaagcaatgtg

SEQ ID NO: 50780 - DNA, 22 bp, synthetic construct
  misc_feature 1..22: note = chemically synthesized
  source 1..22: mol_type = other DNA
tttaaaacctcaagcaatgtgg

SEQ ID NO: 50781 - DNA, 22 bp, synthetic construct
  misc_feature 1..22: note = chemically synthesized
  source 1..22: mol_type = other DNA
taaaacctcaagcaatgtggac

SEQ ID NO: 50782 - DNA, 22 bp, synthetic construct
  misc_feature 1..22: note = chemically synthesized
  source 1..22: mol_type = other DNA
aaaacctcaagcaatgtggact

SEQ ID NO: 50783 - DNA, 22 bp, synthetic construct
  misc_feature 1..22: note = chemically synthesized
  source 1..22: mol_type = other DNA
aaacctcaagcaatgtggactc

SEQ ID NO: 50784 - DNA, 22 bp, synthetic construct
  misc_feature 1..22: note = chemically synthesized
  source 1..22: mol_type = other DNA
aagcaatgtggactcaaaaata

SEQ ID NO: 50785 - DNA, 22 bp, synthetic construct
  misc_feature 1..22: note = chemically synthesized
  source 1..22: mol_type = other DNA
aaaaatataatggtgaaatatt

SEQ ID NO: 50786 - DNA, 22 bp, synthetic construct
  misc_feature 1..22: note = chemically synthesized
  source 1..22: mol_type = other DNA
taatggaattccagttgaaagt

SEQ ID NO: 50787 - DNA, 22 bp, synthetic construct
  misc_feature 1..22: note = chemically synthesized
  source 1..22: mol_type = other DNA
aatggaattccagttgaaagtt

SEQ ID NO: 50788 - DNA, 22 bp, synthetic construct
  misc_feature 1..22: note = chemically synthesized
  source 1..22: mol_type = other DNA
atggaattccagttgaaagttg

SEQ ID NO: 50789 - DNA, 22 bp, synthetic construct
  misc_feature 1..22: note = chemically synthesized
  source 1..22: mol_type = other DNA
cagttgaaagttgttttttaaa

SEQ ID NO: 50790 - DNA, 22 bp, synthetic construct
  misc_feature 1..22: note = chemically synthesized
  source 1..22: mol_type = other DNA
aaagttgttttttaaaaaaagt

SEQ ID NO: 50791 - DNA, 22 bp, synthetic construct
  misc_feature 1..22: note = chemically synthesized
  source 1..22: mol_type = other DNA
ttttttaaaaaaagtacaaatg

SEQ ID NO: 50792 - DNA, 22 bp, synthetic construct
  misc_feature 1..22: note = chemically synthesized
  source 1..22: mol_type = other DNA
tttaaaaaaagtacaaatgaag

SEQ ID NO: 50793 - DNA, 22 bp, synthetic construct
  misc_feature 1..22: note = chemically synthesized
  source 1..22: mol_type = other DNA
ttaaaaaaagtacaaatgaagg

SEQ ID NO: 50794 - DNA, 22 bp, synthetic construct
  misc_feature 1..22: note = chemically synthesized
  source 1..22: mol_type = other DNA
taaaaaaagtacaaatgaaggt

SEQ ID NO: 50795 - DNA, 22 bp, synthetic construct
  misc_feature 1..22: note = chemically synthesized
  source 1..22: mol_type = other DNA
aaaaaaagtacaaatgaaggta

SEQ ID NO: 50796 - DNA, 22 bp, synthetic construct
  misc_feature 1..22: note = chemically synthesized
  source 1..22: mol_type = other DNA
aaaaaagtacaaatgaaggtac

SEQ ID NO: 50797 - DNA, 22 bp, synthetic construct
  misc_feature 1..22: note = chemically synthesized
  source 1..22: mol_type = other DNA
tagatcagtactagatttaaac

SEQ ID NO: 50798 - DNA, 22 bp, synthetic construct
  misc_feature 1..22: note = chemically synthesized
  source 1..22: mol_type = other DNA
agatcagtactagatttaaact

SEQ ID NO: 50799 - DNA, 22 bp, synthetic construct
  misc_feature 1..22: note = chemically synthesized
  source 1..22: mol_type = other DNA
gatcagtactagatttaaactg

SEQ ID NO: 50800 - DNA, 22 bp, synthetic construct
  misc_feature 1..22: note = chemically synthesized
  source 1..22: mol_type = other DNA
gatttaaactgaatgtctctct

SEQ ID NO: 50801 - DNA, 22 bp, synthetic construct
  misc_feature 1..22: note = chemically synthesized
  source 1..22: mol_type = other DNA
aaactgaatgtctctctctctc

SEQ ID NO: 50802 - DNA, 22 bp, synthetic construct
  misc_feature 1..22: note = chemically synthesized
  source 1..22: mol_type = other DNA
aactgaatgtctctctctctct

SEQ ID NO: 50803 - DNA, 22 bp, synthetic construct
  misc_feature 1..22: note = chemically synthesized
  source 1..22: mol_type = other DNA
aatgtctctctctctctctctc

SEQ ID NO: 50804 - DNA, 22 bp, synthetic construct
  misc_feature 1..22: note = chemically synthesized
  source 1..22: mol_type = other DNA
tctctctctctctctctgtgtg

SEQ ID NO: 50805 - DNA, 22 bp, synthetic construct
  misc_feature 1..22: note = chemically synthesized
  source 1..22: mol_type = other DNA
tctctctctctctctgtgtgtg

SEQ ID NO: 50806 - DNA, 22 bp, synthetic construct
  misc_feature 1..22: note = chemically synthesized
  source 1..22: mol_type = other DNA
tctctctctctctgtgtgtgtg

SEQ ID NO: 50807 - DNA, 22 bp, synthetic construct
  misc_feature 1..22: note = chemically synthesized
  source 1..22: mol_type = other DNA
tctctctctctgtgtgtgtgtg

SEQ ID NO: 50808 - DNA, 22 bp, synthetic construct
  misc_feature 1..22: note = chemically synthesized
  source 1..22: mol_type = other DNA
tctctctctgtgtgtgtgtgtg

SEQ ID NO: 50809 - DNA, 22 bp, synthetic construct
  misc_feature 1..22: note = chemically synthesized
  source 1..22: mol_type = other DNA
tctctctgtgtgtgtgtgtgtg

SEQ ID NO: 50810 - DNA, 22 bp, synthetic construct
  misc_feature 1..22: note = chemically synthesized
  source 1..22: mol_type = other DNA
tctctgtgtgtgtgtgtgtgtg

SEQ ID NO: 50811 - DNA, 22 bp, synthetic construct
  misc_feature 1..22: note = chemically synthesized
  source 1..22: mol_type = other DNA
tctgtgtgtgtgtgtgtgtgtg

SEQ ID NO: 50812 - DNA, 22 bp, synthetic construct
  misc_feature 1..22: note = chemically synthesized
  source 1..22: mol_type = other DNA
tgtgtgtgtgtgtgtgtgtgtg

SEQ ID NO: 50813 - DNA, 22 bp, synthetic construct
  misc_feature 1..22: note = chemically synthesized
  source 1..22: mol_type = other DNA
tgtgtgtgtgtgtgtgtgtgtg

SEQ ID NO: 50814 - DNA, 22 bp, synthetic construct
  misc_feature 1..22: note = chemically synthesized
  source 1..22: mol_type = other DNA
caaatcaccacaaatatttaca

SEQ ID NO: 50815 - DNA, 22 bp, synthetic construct
  misc_feature 1..22: note = chemically synthesized
  source 1..22: mol_type = other DNA
acactgtactccctttgttcaa

SEQ ID NO: 50816 - DNA, 22 bp, synthetic construct
  misc_feature 1..22: note = chemically synthesized
  source 1..22: mol_type = other DNA
cactgtactccctttgttcaaa

SEQ ID NO: 50817 - DNA, 22 bp, synthetic construct
  misc_feature 1..22: note = chemically synthesized
  source 1..22: mol_type = other DNA
tactccctttgttcaaatcaca

SEQ ID NO: 50818 - DNA, 22 bp, synthetic construct
  misc_feature 1..22: note = chemically synthesized
  source 1..22: mol_type = other DNA
cctttgttcaaatcacatactt

SEQ ID NO: 50819 - DNA, 22 bp, synthetic construct
  misc_feature 1..22: note = chemically synthesized
  source 1..22: mol_type = other DNA
tgttcaaatcacatacttttaa

SEQ ID NO: 50820 - DNA, 22 bp, synthetic construct
  misc_feature 1..22: note = chemically synthesized
  source 1..22: mol_type = other DNA
gttcaaatcacatacttttaac

SEQ ID NO: 50821 - DNA, 22 bp, synthetic construct
  misc_feature 1..22: note = chemically synthesized
  source 1..22: mol_type = other DNA
ttcaaatcacatacttttaacg

SEQ ID NO: 50822 - DNA, 22 bp, synthetic construct
  misc_feature 1..22: note = chemically synthesized
  source 1..22: mol_type = other DNA
aaatcacatacttttaacggga

SEQ ID NO: 50823 - DNA, 22 bp, synthetic construct
  misc_feature 1..22: note = chemically synthesized
  source 1..22: mol_type = other DNA
ttaacgggaaaagctggaactg

SEQ ID NO: 50824 - DNA, 22 bp, synthetic construct
  misc_feature 1..22: note = chemically synthesized
  source 1..22: mol_type = other DNA
taacgggaaaagctggaactgt

SEQ ID NO: 50825 - DNA, 22 bp, synthetic construct
  misc_feature 1..22: note = chemically synthesized
  source 1..22: mol_type = other DNA
aacgggaaaagctggaactgtg

SEQ ID NO: 50826 - DNA, 22 bp, synthetic construct
  misc_feature 1..22: note = chemically synthesized
  source 1..22: mol_type = other DNA
acgggaaaagctggaactgtgg

SEQ ID NO: 50827 - DNA, 22 bp, synthetic construct
  misc_feature 1..22: note = chemically synthesized
  source 1..22: mol_type = other DNA
gaactgtggctatttaaaattt

SEQ ID NO: 50828 - DNA, 22 bp, synthetic construct
  misc_feature 1..22: note = chemically synthesized
  source 1..22: mol_type = other DNA
tggctatttaaaattttaaata

SEQ ID NO: 50829 - DNA, 22 bp, synthetic construct
  misc_feature 1..22: note = chemically synthesized
  source 1..22: mol_type = other DNA
tttaaaattttaaatattcaaa

SEQ ID NO: 50830 - DNA, 22 bp, synthetic construct
  misc_feature 1..22: note = chemically synthesized
  source 1..22: mol_type = other DNA
aaaattttaaatattcaaacgc

SEQ ID NO: 50831 - DNA, 22 bp, synthetic construct
  misc_feature 1..22: note = chemically synthesized
  source 1..22: mol_type = other DNA
aaattttaaatattcaaacgcc

SEQ ID NO: 50832 - DNA, 22 bp, synthetic construct
  misc_feature 1..22: note = chemically synthesized
  source 1..22: mol_type = other DNA
taaatattcaaacgcctgtaat

SEQ ID NO: 50833 - DNA, 22 bp, synthetic construct
  misc_feature 1..22: note = chemically synthesized
  source 1..22: mol_type = other DNA
aaatattcaaacgcctgtaatt

SEQ ID NO: 50834 - DNA, 22 bp, synthetic construct
  misc_feature 1..22: note = chemically synthesized
  source 1..22: mol_type = other DNA
aatattcaaacgcctgtaatta

SEQ ID NO: 50835 - DNA, 22 bp, synthetic construct
  misc_feature 1..22: note = chemically synthesized
  source 1..22: mol_type = other DNA
aaacgcctgtaattaaccatat

SEQ ID NO: 50836 - DNA, 22 bp, synthetic construct
  misc_feature 1..22: note = chemically synthesized
  source 1..22: mol_type = other DNA
taattaaccatatgaaacaaat

SEQ ID NO: 50837 - DNA, 22 bp, synthetic construct
  misc_feature 1..22: note = chemically synthesized
  source 1..22: mol_type = other DNA
accatatgaaacaaattatgtt

SEQ ID NO: 50838 - DNA, 22 bp, synthetic construct
  misc_feature 1..22: note = chemically synthesized
  source 1..22: mol_type = other DNA
tgttgcatttctccataccagc

SEQ ID NO: 50839 - DNA, 22 bp, synthetic construct
  misc_feature 1..22: note = chemically synthesized
  source 1..22: mol_type = other DNA
catttctccataccagcacatg

SEQ ID NO: 50840 - DNA, 22 bp, synthetic construct
  misc_feature 1..22: note = chemically synthesized
  source 1..22: mol_type = other DNA
ctccataccagcacatgcaaaa

SEQ ID NO: 50841 - DNA, 22 bp, synthetic construct
  misc_feature 1..22: note = chemically synthesized
  source 1..22: mol_type = other DNA
tccataccagcacatgcaaaaa

SEQ ID NO: 50842 - DNA, 22 bp, synthetic construct
  misc_feature 1..22: note = chemically synthesized
  source 1..22: mol_type = other DNA
cataccagcacatgcaaaaaaa

SEQ ID NO: 50843 - DNA, 22 bp, synthetic construct
  misc_feature 1..22: note = chemically synthesized
  source 1..22: mol_type = other DNA
tggtggtgaattgggaggtggc

SEQ ID NO: 50844 - DNA, 22 bp, synthetic construct
  misc_feature 1..22: note = chemically synthesized
  source 1..22: mol_type = other DNA
gtggtgaattgggaggtggcag

SEQ ID NO: 50845 - DNA, 22 bp, synthetic construct
  misc_feature 1..22: note = chemically synthesized
  source 1..22: mol_type = other DNA
ggaggtggcagagttggggaga

SEQ ID NO: 50846 - DNA, 22 bp, synthetic construct
  misc_feature 1..22: note = chemically synthesized
  source 1..22: mol_type = other DNA
gggagacaactccaagagaaga

SEQ ID NO: 50847 - DNA, 22 bp, synthetic construct
  misc_feature 1..22: note = chemically synthesized
  source 1..22: mol_type = other DNA
caagagaagaaaaggatgatgt

SEQ ID NO: 50848 - DNA, 22 bp, synthetic construct
  misc_feature 1..22: note = chemically synthesized
  source 1..22: mol_type = other DNA
tcatttcgctatagatcaaagg

SEQ ID NO: 50849 - DNA, 22 bp, synthetic construct
  misc_feature 1..22: note = chemically synthesized
  source 1..22: mol_type = other DNA
catttcgctatagatcaaagga

SEQ ID NO: 50850 - DNA, 22 bp, synthetic construct
  misc_feature 1..22: note = chemically synthesized
  source 1..22: mol_type = other DNA
atttcgctatagatcaaaggag

SEQ ID NO: 50851 - DNA, 22 bp, synthetic construct
  misc_feature 1..22: note = chemically synthesized
  source 1..22: mol_type = other DNA
cgctatagatcaaaggagaaca

SEQ ID NO: 50852 - DNA, 22 bp, synthetic construct
  misc_feature 1..22: note = chemically synthesized
  source 1..22: mol_type = other DNA
gctatagatcaaaggagaacaa

SEQ ID NO: 50853 - DNA, 22 bp, synthetic construct
  misc_feature 1..22: note = chemically synthesized
  source 1..22: mol_type = other DNA
tagatcaaaggagaacaagaat

SEQ ID NO: 50854 - DNA, 22 bp, synthetic construct
  misc_feature 1..22: note = chemically synthesized
  source 1..22: mol_type = other DNA
tggcatatcgagcatttttcca

SEQ ID NO: 50855 - DNA, 22 bp, synthetic construct
  misc_feature 1..22: note = chemically synthesized
  source 1..22: mol_type = other DNA
ttccattgctgtctttcacact

SEQ ID NO: 50856 - DNA, 22 bp, synthetic construct
  misc_feature 1..22: note = chemically synthesized
  source 1..22: mol_type = other DNA
tccattgctgtctttcacactg

SEQ ID NO: 50857 - DNA, 22 bp, synthetic construct
  misc_feature 1..22: note = chemically synthesized
  source 1..22: mol_type = other DNA
ccattgctgtctttcacactgg

SEQ ID NO: 50858 - DNA, 22 bp, synthetic construct
  misc_feature 1..22: note = chemically synthesized
  source 1..22: mol_type = other DNA
cattgctgtctttcacactggg

SEQ ID NO: 50859 - DNA, 22 bp, synthetic construct
  misc_feature 1..22: note = chemically synthesized
  source 1..22: mol_type = other DNA
ctgtctttcacactgggctatc

SEQ ID NO: 50860 - DNA, 22 bp, synthetic construct
  misc_feature 1..22: note = chemically synthesized
  source 1..22: mol_type = other DNA
tctttcacactgggctatctaa

SEQ ID NO: 50861 - DNA, 22 bp, synthetic construct
  misc_feature 1..22: note = chemically synthesized
  source 1..22: mol_type = other DNA
tcacactgggctatctaagttt

SEQ ID NO: 50862 - DNA, 22 bp, synthetic construct
  misc_feature 1..22: note = chemically synthesized
  source 1..22: mol_type = other DNA
cacactgggctatctaagttta

SEQ ID NO: 50863 - DNA, 22 bp, synthetic construct
  misc_feature 1..22: note = chemically synthesized
  source 1..22: mol_type = other DNA
acactgggctatctaagtttat

SEQ ID NO: 50864 - DNA, 22 bp, synthetic construct
  misc_feature 1..22: note = chemically synthesized
  source 1..22: mol_type = other DNA
ggctatctaagtttatacaatt

SEQ ID NO: 50865 - DNA, 22 bp, synthetic construct
  misc_feature 1..22: note = chemically synthesized
  source 1..22: mol_type = other DNA
tctaagtttatacaattcccca

SEQ ID NO: 50866 - DNA, 22 bp, synthetic construct
  misc_feature 1..22: note = chemically synthesized
  source 1..22: mol_type = other DNA
agtttatacaattccccagact

SEQ ID NO: 50867 - DNA, 22 bp, synthetic construct
  misc_feature 1..22: note = chemically synthesized
  source 1..22: mol_type = other DNA
atacaattccccagactagctg

SEQ ID NO: 50868 - DNA, 22 bp, synthetic construct
  misc_feature 1..22: note = chemically synthesized
  source 1..22: mol_type = other DNA
tacaattccccagactagctgc

SEQ ID NO: 50869 - DNA, 22 bp, synthetic construct
  misc_feature 1..22: note = chemically synthesized
  source 1..22: mol_type = other DNA
cccagactagctgcatattaag

SEQ ID NO: 50870 - DNA, 22 bp, synthetic construct
  misc_feature 1..22: note = chemically synthesized
  source 1..22: mol_type = other DNA
gctgcatattaagcttgctgtg

SEQ ID NO: 50871 - DNA, 22 bp, synthetic construct
  misc_feature 1..22: note = chemically synthesized
  source 1..22: mol_type = other DNA
catattaagcttgctgtgtaca

SEQ ID NO: 50872 - DNA, 22 bp, synthetic construct
  misc_feature 1..22: note = chemically synthesized
  source 1..22: mol_type = other DNA
agcttgctgtgtacagctttat

SEQ ID NO: 50873 - DNA, 22 bp, synthetic construct
  misc_feature 1..22: note = chemically synthesized
  source 1..22: mol_type = other DNA
gctgtgtacagctttattatgg

SEQ ID NO: 50874 - DNA, 22 bp, synthetic construct
  misc_feature 1..22: note = chemically synthesized
  source 1..22: mol_type = other DNA
ctgtgtacagctttattatggt

SEQ ID NO: 50875 - DNA, 22 bp, synthetic construct
  misc_feature 1..22: note = chemically synthesized
  source 1..22: mol_type = other DNA
tgtacagctttattatggtgtg

SEQ ID NO: 50876 - DNA, 22 bp, synthetic construct
  misc_feature 1..22: note = chemically synthesized
  source 1..22: mol_type = other DNA
tattatggtgtggtggtggaag

SEQ ID NO: 50877 - DNA, 22 bp, synthetic construct
  misc_feature 1..22: note = chemically synthesized
  source 1..22: mol_type = other DNA
attatggtgtggtggtggaaga

SEQ ID NO: 50878 - DNA, 22 bp, synthetic construct
  misc_feature 1..22: note = chemically synthesized
  source 1..22: mol_type = other DNA
ttatggtgtggtggtggaagaa

SEQ ID NO: 50879 - DNA, 22 bp, synthetic construct
  misc_feature 1..22: note = chemically synthesized
  source 1..22: mol_type = other DNA
tggtgtggtggtggaagaagca

SEQ ID NO: 50880 - DNA, 22 bp, synthetic construct
  misc_feature 1..22: note = chemically synthesized
  source 1..22: mol_type = other DNA
atattccagctccgcatctgac

SEQ ID NO: 50881 - DNA, 22 bp, synthetic construct
  misc_feature 1..22: note = chemically synthesized
  source 1..22: mol_type = other DNA
cagctccgcatctgacagggca

SEQ ID NO: 50882 - DNA, 22 bp, synthetic construct
  misc_feature 1..22: note = chemically synthesized
  source 1..22: mol_type = other DNA
cgcatctgacagggcatttaca

SEQ ID NO: 50883 - DNA, 22 bp, synthetic construct
  misc_feature 1..22: note = chemically synthesized
  source 1..22: mol_type = other DNA
acagggcatttacatgcgccca

SEQ ID NO: 50884 - DNA, 22 bp, synthetic construct
  misc_feature 1..22: note = chemically synthesized
  source 1..22: mol_type = other DNA
acatgcgcccatctgagcggca

SEQ ID NO: 50885 - DNA, 22 bp, synthetic construct
  misc_feature 1..22: note = chemically synthesized
  source 1..22: mol_type = other DNA
catgcgcccatctgagcggcac

SEQ ID NO: 50886 - DNA, 22 bp, synthetic construct
  misc_feature 1..22: note = chemically synthesized
  source 1..22: mol_type = other DNA
agcggcacctgagagctcctcc

SEQ ID NO: 50887 - DNA, 22 bp, synthetic construct
  misc_feature 1..22: note = chemically synthesized
  source 1..22: mol_type = other DNA
agagctcctccaaggtgcagta

SEQ ID NO: 50888 - DNA, 22 bp, synthetic construct
  misc_feature 1..22: note = chemically synthesized
  source 1..22: mol_type = other DNA
ctccaaggtgcagtaactgtgc

SEQ ID NO: 50889 - DNA, 22 bp, synthetic construct
  misc_feature 1..22: note = chemically synthesized
  source 1..22: mol_type = other DNA
caaggtgcagtaactgtgcgcc

SEQ ID NO: 50890 - DNA, 22 bp, synthetic construct
  misc_feature 1..22: note = chemically synthesized
  source 1..22: mol_type = other DNA
tgcgcctattgtaaaggcaaat

SEQ ID NO: 50891 - DNA, 22 bp, synthetic construct
  misc_feature 1..22: note = chemically synthesized
  source 1..22: mol_type = other DNA
ttgtaaaggcaaatgaagctca

SEQ ID NO: 50892 - DNA, 22 bp, synthetic construct
  misc_feature 1..22: note = chemically synthesized
  source 1..22: mol_type = other DNA
taaaggcaaatgaagctcacct

SEQ ID NO: 50893 - DNA, 22 bp, synthetic construct
  misc_feature 1..22: note = chemically synthesized
  source 1..22: mol_type = other DNA
acctattccctgctgggatcag

SEQ ID NO: 50894 - DNA, 22 bp, synthetic construct
  misc_feature 1..22: note = chemically synthesized
  source 1..22: mol_type = other DNA
ttccctgctgggatcagaagtg

SEQ ID NO: 50895 - DNA, 22 bp, synthetic construct
  misc_feature 1..22: note = chemically synthesized
  source 1..22: mol_type = other DNA
cctgctgggatcagaagtgacc

SEQ ID NO: 50896 - DNA, 22 bp, synthetic construct
  misc_feature 1..22: note = chemically synthesized
  source 1..22: mol_type = other DNA
ctgggatcagaagtgacctcac

SEQ ID NO: 50897 - DNA, 22 bp, synthetic construct
  misc_feature 1..22: note = chemically synthesized
  source 1..22: mol_type = other DNA
ggatcagaagtgacctcaccac

SEQ ID NO: 50898 - DNA, 22 bp, synthetic construct
  misc_feature 1..22: note = chemically synthesized
  source 1..22: mol_type = other DNA
accaccccccatgcctcaaatc

SEQ ID NO: 50899 - DNA, 22 bp, synthetic construct
  misc_feature 1..22: note = chemically synthesized
  source 1..22: mol_type = other DNA
aaatccttcccttgccaaccta

SEQ ID NO: 50900 - DNA, 22 bp, synthetic construct
  misc_feature 1..22: note = chemically synthesized
  source 1..22: mol_type = other DNA
cccttgccaacctaactcaatg

SEQ ID NO: 50901 - DNA, 22 bp, synthetic construct
  misc_feature 1..22: note = chemically synthesized
  source 1..22: mol_type = other DNA
ccttgccaacctaactcaatgc

SEQ ID NO: 50902 - DNA, 22 bp, synthetic construct
  misc_feature 1..22: note = chemically synthesized
  source 1..22: mol_type = other DNA
gccaacctaactcaatgccatt

SEQ ID NO: 50903 - DNA, 22 bp, synthetic construct
  misc_feature 1..22: note = chemically synthesized
  source 1..22: mol_type = other DNA
ccaacctaactcaatgccattg

SEQ ID NO: 50904 - DNA, 22 bp, synthetic construct
  misc_feature 1..22: note = chemically synthesized
  source 1..22: mol_type = other DNA
actcaatgccattgcagaatga

SEQ ID NO: 50905 - DNA, 22 bp, synthetic construct
  misc_feature 1..22: note = chemically synthesized
  source 1..22: mol_type = other DNA
aatgccattgcagaatgacgaa

SEQ ID NO: 50906 - DNA, 22 bp, synthetic construct
  misc_feature 1..22: note = chemically synthesized
  source 1..22: mol_type = other DNA
cagaatgacgaatgagctcaga

SEQ ID NO: 50907 - DNA, 22 bp, synthetic construct
  misc_feature 1..22: note = chemically synthesized
  source 1..22: mol_type = other DNA
agaaatagaccccaagttacta

SEQ ID NO: 50908 - DNA, 22 bp, synthetic construct
  misc_feature 1..22: note = chemically synthesized
  source 1..22: mol_type = other DNA
ctaaccctgctaagaacagcaa

SEQ ID NO: 50909 - DNA, 22 bp, synthetic construct
  misc_feature 1..22: note = chemically synthesized
  source 1..22: mol_type = other DNA
accctgctaagaacagcaaaag

SEQ ID NO: 50910 - DNA, 22 bp, synthetic construct
  misc_feature 1..22: note = chemically synthesized
  source 1..22: mol_type = other DNA
ctaagaacagcaaaagcctttg

SEQ ID NO: 50911 - DNA, 22 bp, synthetic construct
  misc_feature 1..22: note = chemically synthesized
  source 1..22: mol_type = other DNA
agaacagcaaaagcctttgctg

SEQ ID NO: 50912 - DNA, 22 bp, synthetic construct
  misc_feature 1..22: note = chemically synthesized
  source 1..22: mol_type = other DNA
tgctgaaatgttttaaaaatgc

SEQ ID NO: 50913 - DNA, 22 bp, synthetic construct
  misc_feature 1..22: note = chemically synthesized
  source 1..22: mol_type = other DNA
gctgaaatgttttaaaaatgca

SEQ ID NO: 50914 - DNA, 22 bp, synthetic construct
  misc_feature 1..22: note = chemically synthesized
  source 1..22: mol_type = other DNA
ctgaaatgttttaaaaatgcat

SEQ ID NO: 50915 - DNA, 22 bp, synthetic construct
  misc_feature 1..22: note = chemically synthesized
  source 1..22: mol_type = other DNA
aaatgttttaaaaatgcatagg

SEQ ID NO: 50916 - DNA, 22 bp, synthetic construct
  misc_feature 1..22: note = chemically synthesized
  source 1..22: mol_type = other DNA
taaaaatgcatagggagtgcag

SEQ ID NO: 50917 - DNA, 22 bp, synthetic construct
  misc_feature 1..22: note = chemically synthesized
  source 1..22: mol_type = other DNA
aaaaatgcatagggagtgcagc

SEQ ID NO: 50918 - DNA, 22 bp, synthetic construct
  misc_feature 1..22: note = chemically synthesized
  source 1..22: mol_type = other DNA
aaaatgcatagggagtgcagct

SEQ ID NO: 50919 - DNA, 22 bp, synthetic construct
  misc_feature 1..22: note = chemically synthesized
  source 1..22: mol_type = other DNA
gccagtaaaaagcagggagaca

SEQ ID NO: 50920 - DNA, 22 bp, synthetic construct
  misc_feature 1..22: note = chemically synthesized
  source 1..22: mol_type = other DNA
caatgaacccaatatggaataa

SEQ ID NO: 50921 - DNA, 22 bp, synthetic construct
  misc_feature 1..22: note = chemically synthesized
  source 1..22: mol_type = other DNA
cattttaaaactgattagaaat

SEQ ID NO: 50922 - DNA, 22 bp, synthetic construct
  misc_feature 1..22: note = chemically synthesized
  source 1..22: mol_type = other DNA
taaaactgattagaaatacagt

SEQ ID NO: 50923 - DNA, 22 bp, synthetic construct
  misc_feature 1..22: note = chemically synthesized
  source 1..22: mol_type = other DNA
aaaactgattagaaatacagtc

SEQ ID NO: 50924 - DNA, 22 bp, synthetic construct
  misc_feature 1..22: note = chemically synthesized
  source 1..22: mol_type = other DNA
aaactgattagaaatacagtct

SEQ ID NO: 50925 - DNA, 22 bp, synthetic construct
  misc_feature 1..22: note = chemically synthesized
  source 1..22: mol_type = other DNA
attagaaatacagtctgatgtt

SEQ ID NO: 50926 - DNA, 22 bp, synthetic construct
  misc_feature 1..22: note = chemically synthesized
  source 1..22: mol_type = other DNA
gaaatacagtctgatgtttact

SEQ ID NO: 50927 - DNA, 22 bp, synthetic construct
  misc_feature 1..22: note = chemically synthesized
  source 1..22: mol_type = other DNA
atgtttactggcttcaaattga

SEQ ID NO: 50928 - DNA, 22 bp, synthetic construct
  misc_feature 1..22: note = chemically synthesized
  source 1..22: mol_type = other DNA
actggcttcaaattgagtttgg

SEQ ID NO: 50929 - DNA, 22 bp, synthetic construct
  misc_feature 1..22: note = chemically synthesized
  source 1..22: mol_type = other DNA
ctggcttcaaattgagtttggc

SEQ ID NO: 50930 - DNA, 22 bp, synthetic construct
  misc_feature 1..22: note = chemically synthesized
  source 1..22: mol_type = other DNA
gcttcaaattgagtttggcatc

SEQ ID NO: 50931 - DNA, 22 bp, synthetic construct
  misc_feature 1..22: note = chemically synthesized
  source 1..22: mol_type = other DNA
caaattgagtttggcatcaagt

SEQ ID NO: 50932 - DNA, 22 bp, synthetic construct
  misc_feature 1..22: note = chemically synthesized
  source 1..22: mol_type = other DNA
aaattgagtttggcatcaagta

SEQ ID NO: 50933 - DNA, 22 bp, synthetic construct
  misc_feature 1..22: note = chemically synthesized
  source 1..22: mol_type = other DNA
agtttggcatcaagtatactgg

SEQ ID NO: 50934 - DNA, 22 bp, synthetic construct
  misc_feature 1..22: note = chemically synthesized
  source 1..22: mol_type = other DNA
ggcatcaagtatactggcttta

SEQ ID NO: 50935 - DNA, 22 bp, synthetic construct
  misc_feature 1..22: note = chemically synthesized
  source 1..22: mol_type = other DNA
gcatcaagtatactggctttaa

SEQ ID NO: 50936 - DNA, 22 bp, synthetic construct
  misc_feature 1..22: note = chemically synthesized
  source 1..22: mol_type = other DNA
gctttaataatgctggcacttt

SEQ ID NO: 50937 - DNA, 22 bp, synthetic construct
  misc_feature 1..22: note = chemically synthesized
  source 1..22: mol_type = other DNA
taataatgctggcacttttaaa

SEQ ID NO: 50938 - DNA, 22 bp, synthetic construct
  misc_feature 1..22: note = chemically synthesized
  source 1..22: mol_type = other DNA
aataatgctggcacttttaaaa

SEQ ID NO: 50939 - DNA, 22 bp, synthetic construct
  misc_feature 1..22: note = chemically synthesized
  source 1..22: mol_type = other DNA
ataatgctggcacttttaaaat

SEQ ID NO: 50940 - DNA, 22 bp, synthetic construct
  misc_feature 1..22: note = chemically synthesized
  source 1..22: mol_type = other DNA
gcacttttaaaattattattat

SEQ ID NO: 50941 - DNA, 22 bp, synthetic construct
  misc_feature 1..22: note = chemically synthesized
  source 1..22: mol_type = other DNA
ttaaaattattattattttaaa

SEQ ID NO: 50942 - DNA, 22 bp, synthetic construct
  misc_feature 1..22: note = chemically synthesized
  source 1..22: mol_type = other DNA
taaaattattattattttaaat

SEQ ID NO: 50943 - DNA, 22 bp, synthetic construct
  misc_feature 1..22: note = chemically synthesized
  source 1..22: mol_type = other DNA
aaaattattattattttaaatc

SEQ ID NO: 50944 - DNA, 22 bp, synthetic construct
  misc_feature 1..22: note = chemically synthesized
  source 1..22: mol_type = other DNA
aaattattattattttaaatct

SEQ ID NO: 50945 - DNA, 22 bp, synthetic construct
  misc_feature 1..22: note = chemically synthesized
  source 1..22: mol_type = other DNA
ttattattttaaatctgccttt

SEQ ID NO: 50946 - DNA, 22 bp, synthetic construct
  misc_feature 1..22: note = chemically synthesized
  source 1..22: mol_type = other DNA
ttattttaaatctgcctttggt

SEQ ID NO: 50947 - DNA, 22 bp, synthetic construct
  misc_feature 1..22: note = chemically synthesized
  source 1..22: mol_type = other DNA
ttttaaatctgcctttggtctc

SEQ ID NO: 50948 - DNA, 22 bp, synthetic construct
  misc_feature 1..22: note = chemically synthesized
  source 1..22: mol_type = other DNA
taaatctgcctttggtctctag

SEQ ID NO: 50949 - DNA, 22 bp, synthetic construct
  misc_feature 1..22: note = chemically synthesized
  source 1..22: mol_type = other DNA
aaatctgcctttggtctctagg

SEQ ID NO: 50950 - DNA, 22 bp, synthetic construct
  misc_feature 1..22: note = chemically synthesized
  source 1..22: mol_type = other DNA
aatctgcctttggtctctagga

SEQ ID NO: 50951 - DNA, 22 bp, synthetic construct
  misc_feature 1..22: note = chemically synthesized
  source 1..22: mol_type = other DNA
cctttggtctctaggagcacat

SEQ ID NO: 50952 - DNA, 22 bp, synthetic construct
  misc_feature 1..22: note = chemically synthesized
  source 1..22: mol_type = other DNA
tggtctctaggagcacatgtag

SEQ ID NO: 50953 - DNA, 22 bp, synthetic construct
  misc_feature 1..22: note = chemically synthesized
  source 1..22: mol_type = other DNA
ggtctctaggagcacatgtaga

SEQ ID NO: 50954 - DNA, 22 bp, synthetic construct
  misc_feature 1..22: note = chemically synthesized
  source 1..22: mol_type = other DNA
gtctctaggagcacatgtagag

SEQ ID NO: 50955 - DNA, 22 bp, synthetic construct
  misc_feature 1..22: note = chemically synthesized
  source 1..22: mol_type = other DNA
taggagcacatgtagagagcta

SEQ ID NO: 50956 - DNA, 22 bp, synthetic construct
  misc_feature 1..22: note = chemically synthesized
  source 1..22: mol_type = other DNA
ggagcacatgtagagagctaaa

SEQ ID NO: 50957 - DNA, 22 bp, synthetic construct
  misc_feature 1..22: note = chemically synthesized
  source 1..22: mol_type = other DNA
aagaattcttatttgtcaggtt

SEQ ID NO: 50958 - DNA, 22 bp, synthetic construct
  misc_feature 1..22: note = chemically synthesized
  source 1..22: mol_type = other DNA
ttatttgtcaggttacatttcc

SEQ ID NO: 50959 - DNA, 22 bp, synthetic construct
  misc_feature 1..22: note = chemically synthesized
  source 1..22: mol_type = other DNA
atttgtcaggttacatttcctg

SEQ ID NO: 50960 - DNA, 22 bp, synthetic construct
  misc_feature 1..22: note = chemically synthesized
  source 1..22: mol_type = other DNA
tttgtcaggttacatttcctgg

SEQ ID NO: 50961 - DNA, 22 bp, synthetic construct
  misc_feature 1..22: note = chemically synthesized
  source 1..22: mol_type = other DNA
gtcaggttacatttcctggaaa

SEQ ID NO: 50962 - DNA, 22 bp, synthetic construct
  misc_feature 1..22: note = chemically synthesized
  source 1..22: mol_type = other DNA
tcaggttacatttcctggaaat

SEQ ID NO: 50963 - DNA, 22 bp, synthetic construct
  misc_feature 1..22: note = chemically synthesized
  source 1..22: mol_type = other DNA
catttcctggaaattaagtttg

SEQ ID NO: 50964 - DNA, 22 bp, synthetic construct
  misc_feature 1..22: note = chemically synthesized
  source 1..22: mol_type = other DNA
cctggaaattaagtttgtgaca

SEQ ID NO: 50965 - DNA, 22 bp, synthetic construct
  misc_feature 1..22: note = chemically synthesized
  source 1..22: mol_type = other DNA
ctggaaattaagtttgtgacag

SEQ ID NO: 50966 - DNA, 22 bp, synthetic construct
  misc_feature 1..22: note = chemically synthesized
  source 1..22: mol_type = other DNA
gaaattaagtttgtgacagaaa

SEQ ID NO: 50967 - DNA, 22 bp, synthetic construct
  misc_feature 1..22: note = chemically synthesized
  source 1..22: mol_type = other DNA
agtttgtgacagaaaatgactc

SEQ ID NO: 50968 - DNA, 22 bp, synthetic construct
  misc_feature 1..22: note = chemically synthesized
  source 1..22: mol_type = other DNA
gtgacagaaaatgactccagta

SEQ ID NO: 50969 - DNA, 22 bp, synthetic construct
  misc_feature 1..22: note = chemically synthesized
  source 1..22: mol_type = other DNA
tgacagaaaatgactccagtag

SEQ ID NO: 50970 - DNA, 22 bp, synthetic construct
  misc_feature 1..22: note = chemically synthesized
  source 1..22: mol_type = other DNA
cagtagcaataatatggttcgt

SEQ ID NO: 50971 - DNA, 22 bp, synthetic construct
  misc_feature 1..22: note = chemically synthesized
  source 1..22: mol_type = other DNA
gtgctcaaattaattaggtcat

SEQ ID NO: 50972 - DNA, 22 bp, synthetic construct
  misc_feature 1..22: note = chemically synthesized
  source 1..22: mol_type = other DNA
aaattaattaggtcatgttgta

SEQ ID NO: 50973 - DNA, 22 bp, synthetic construct
  misc_feature 1..22: note = chemically synthesized
  source 1..22: mol_type = other DNA
attaggtcatgttgtaaaaact

SEQ ID NO: 50974 - DNA, 22 bp, synthetic construct
  misc_feature 1..22: note = chemically synthesized
  source 1..22: mol_type = other DNA
ggtcatgttgtaaaaactacgt

SEQ ID NO: 50975 - DNA, 22 bp, synthetic construct
  misc_feature 1..22: note = chemically synthesized
  source 1..22: mol_type = other DNA
taaaaactacgtggcaaattac

SEQ ID NO: 50976 - DNA, 22 bp, synthetic construct
  misc_feature 1..22: note = chemically synthesized
  source 1..22: mol_type = other DNA
cgtggcaaattacaaaggtaaa

SEQ ID NO: 50977 - DNA, 22 bp, synthetic construct
  misc_feature 1..22: note = chemically synthesized
  source 1..22: mol_type = other DNA
caaaggtaaatttactgatatt

SEQ ID NO: 50978 - DNA, 22 bp, synthetic construct
  misc_feature 1..22: note = chemically synthesized
  source 1..22: mol_type = other DNA
actgatattggccagtgctcta

SEQ ID NO: 50979 - DNA, 22 bp, synthetic construct
  misc_feature 1..22: note = chemically synthesized
  source 1..22: mol_type = other DNA
ctgatattggccagtgctctat

SEQ ID NO: 50980 - DNA, 22 bp, synthetic construct
  misc_feature 1..22: note = chemically synthesized
  source 1..22: mol_type = other DNA
atattggccagtgctctatacc

SEQ ID NO: 50981 - DNA, 22 bp, synthetic construct
  misc_feature 1..22: note = chemically synthesized
  source 1..22: mol_type = other DNA
gccagtgctctataccctggtc

SEQ ID NO: 50982 - DNA, 22 bp, synthetic construct
  misc_feature 1..22: note = chemically synthesized
  source 1..22: mol_type = other DNA
tataccctggtcgtaaagggga

SEQ ID NO: 50983 - DNA, 22 bp, synthetic construct
  misc_feature 1..22: note = chemically synthesized
  source 1..22: mol_type = other DNA
taccctggtcgtaaaggggaga

SEQ ID NO: 50984 - DNA, 22 bp, synthetic construct
  misc_feature 1..22: note = chemically synthesized
  source 1..22: mol_type = other DNA
gtcgtaaaggggagaagctgtt

SEQ ID NO: 50985 - DNA, 22 bp, synthetic construct
  misc_feature 1..22: note = chemically synthesized
  source 1..22: mol_type = other DNA
tttaaggatgcccatttaccta

SEQ ID NO: 50986 - DNA, 22 bp, synthetic construct
  misc_feature 1..22: note = chemically synthesized
  source 1..22: mol_type = other DNA
aaggatgcccatttacctaggt

SEQ ID NO: 50987 - DNA, 22 bp, synthetic construct
  misc_feature 1..22: note = chemically synthesized
  source 1..22: mol_type = other DNA
aggatgcccatttacctaggta

SEQ ID NO: 50988 - DNA, 22 bp, synthetic construct
  misc_feature 1..22: note = chemically synthesized
  source 1..22: mol_type = other DNA
acctaggtaggagaaaagaacc

SEQ ID NO: 50989 - DNA, 22 bp, synthetic construct
  misc_feature 1..22: note = chemically synthesized
  source 1..22: mol_type = other DNA
cctaggtaggagaaaagaacca

SEQ ID NO: 50990 - DNA, 22 bp, synthetic construct
  misc_feature 1..22: note = chemically synthesized
  source 1..22: mol_type = other DNA
ggtaggagaaaagaaccaagga

SEQ ID NO: 50991 - DNA, 22 bp, synthetic construct
  misc_feature 1..22: note = chemically synthesized
  source 1..22: mol_type = other DNA
cctatttgtattacaaataaaa

SEQ ID NO: 50992 - DNA, 22 bp, synthetic construct
  misc_feature 1..22: note = chemically synthesized
  source 1..22: mol_type = other DNA
ctatttgtattacaaataaaaa

SEQ ID NO: 50993 - DNA, 22 bp, synthetic construct
  misc_feature 1..22: note = chemically synthesized
  source 1..22: mol_type = other DNA
tttgtattacaaataaaaatag

SEQ ID NO: 50994 - DNA, 22 bp, synthetic construct
  misc_feature 1..22: note = chemically synthesized
  source 1..22: mol_type = other DNA
gtattacaaataaaaatagtag

SEQ ID NO: 50995 - DNA, 22 bp, synthetic construct
  misc_feature 1..22: note = chemically synthesized
  source 1..22: mol_type = other DNA
tattacaaataaaaatagtagt

SEQ ID NO: 50996 - DNA, 22 bp, synthetic construct
  misc_feature 1..22: note = chemically synthesized
  source 1..22: mol_type = other DNA
caaataaaaatagtagtcatta

SEQ ID NO: 50997 - DNA, 22 bp, synthetic construct
  misc_feature 1..22: note = chemically synthesized
  source 1..22: mol_type = other DNA
tccattaaattatatagtctga

SEQ ID NO: 50998 - DNA, 22 bp, synthetic construct
  misc_feature 1..22: note = chemically synthesized
  source 1..22: mol_type = other DNA
aattatatagtctgaacatatt

SEQ ID NO: 50999 - DNA, 22 bp, synthetic construct
  misc_feature 1..22: note = chemically synthesized
  source 1..22: mol_type = other DNA
tatagtctgaacatattttatg

SEQ ID NO: 51000 - DNA, 22 bp, synthetic construct
  misc_feature 1..22: note = chemically synthesized
  source 1..22: mol_type = other DNA
aacatattttatgaacttcatt

SEQ ID NO: 51001 - DNA, 22 bp, synthetic construct
  misc_feature 1..22: note = chemically synthesized
  source 1..22: mol_type = other DNA
tatgaacttcattaatgtcatc

SEQ ID NO: 51002 - DNA, 22 bp, synthetic construct
  misc_feature 1..22: note = chemically synthesized
  source 1..22: mol_type = other DNA
atgaacttcattaatgtcatcc

SEQ ID NO: 51003 - DNA, 22 bp, synthetic construct
  misc_feature 1..22: note = chemically synthesized
  source 1..22: mol_type = other DNA
tgaacttcattaatgtcatcca

SEQ ID NO: 51004 - DNA, 22 bp, synthetic construct
  misc_feature 1..22: note = chemically synthesized
  source 1..22: mol_type = other DNA
cattaatgtcatccaaattgat

SEQ ID NO: 51005 - DNA, 22 bp, synthetic construct
  misc_feature 1..22: note = chemically synthesized
  source 1..22: mol_type = other DNA
attaatgtcatccaaattgata

SEQ ID NO: 51006 - DNA, 22 bp, synthetic construct
  misc_feature 1..22: note = chemically synthesized
  source 1..22: mol_type = other DNA
atgtcatccaaattgatacata

SEQ ID NO: 51007 - DNA, 22 bp, synthetic construct
  misc_feature 1..22: note = chemically synthesized
  source 1..22: mol_type = other DNA
atacataacataaaaacctgct

SEQ ID NO: 51008 - DNA, 22 bp, synthetic construct
  misc_feature 1..22: note = chemically synthesized
  source 1..22: mol_type = other DNA
cttgatttgaaataatgttaaa

SEQ ID NO: 51009 - DNA, 22 bp, synthetic construct
  misc_feature 1..22: note = chemically synthesized
  source 1..22: mol_type = other DNA
gatttgaaataatgttaaaagt

SEQ ID NO: 51010 - DNA, 22 bp, synthetic construct
  misc_feature 1..22: note = chemically synthesized
  source 1..22: mol_type = other DNA
atttgaaataatgttaaaagtg

SEQ ID NO: 51011 - DNA, 22 bp, synthetic construct
  misc_feature 1..22: note = chemically synthesized
  source 1..22: mol_type = other DNA
gaaataatgttaaaagtgggct

SEQ ID NO: 51012 - DNA, 22 bp, synthetic construct
  misc_feature 1..22: note = chemically synthesized
  source 1..22: mol_type = other DNA
aaataatgttaaaagtgggctc

SEQ ID NO: 51013 - DNA, 22 bp, synthetic construct
  misc_feature 1..22: note = chemically synthesized
  source 1..22: mol_type = other DNA
aaagtgggctctaagttagaat

SEQ ID NO: 51014 - DNA, 22 bp, synthetic construct
  misc_feature 1..22: note = chemically synthesized
  source 1..22: mol_type = other DNA
taagttagaatcttttttttta

SEQ ID NO: 51015 - DNA, 22 bp, synthetic construct
  misc_feature 1..22: note = chemically synthesized
  source 1..22: mol_type = other DNA
agttagaatctttttttttaat

SEQ ID NO: 51016 - DNA, 22 bp, synthetic construct
  misc_feature 1..22: note = chemically synthesized
  source 1..22: mol_type = other DNA
gaatctttttttttaatccttg

SEQ ID NO: 51017 - DNA, 22 bp, synthetic construct
  misc_feature 1..22: note = chemically synthesized
  source 1..22: mol_type = other DNA
tttttttaatccttgaaataac

SEQ ID NO: 51018 - DNA, 22 bp, synthetic construct
  misc_feature 1..22: note = chemically synthesized
  source 1..22: mol_type = other DNA
ttttttaatccttgaaataaca

SEQ ID NO: 51019 - DNA, 22 bp, synthetic construct
  misc_feature 1..22: note = chemically synthesized
  source 1..22: mol_type = other DNA
tttttaatccttgaaataacaa

SEQ ID NO: 51020 - DNA, 22 bp, synthetic construct
  misc_feature 1..22: note = chemically synthesized
  source 1..22: mol_type = other DNA
ttttaatccttgaaataacaac

SEQ ID NO: 51021 - DNA, 22 bp, synthetic construct
  misc_feature 1..22: note = chemically synthesized
  source 1..22: mol_type = other DNA
tttaatccttgaaataacaaca

SEQ ID NO: 51022 - DNA, 22 bp, synthetic construct
  misc_feature 1..22: note = chemically synthesized
  source 1..22: mol_type = other DNA
ttaatccttgaaataacaacac

SEQ ID NO: 51023 - DNA, 22 bp, synthetic construct
  misc_feature 1..22: note = chemically synthesized
  source 1..22: mol_type = other DNA
taatccttgaaataacaacact

SEQ ID NO: 51024 - DNA, 22 bp, synthetic construct
  misc_feature 1..22: note = chemically synthesized
  source 1..22: mol_type = other DNA
aatccttgaaataacaacactg

SEQ ID NO: 51025 - DNA, 22 bp, synthetic construct
  misc_feature 1..22: note = chemically synthesized
  source 1..22: mol_type = other DNA
atccttgaaataacaacactgc

SEQ ID NO: 51026 - DNA, 22 bp, synthetic construct
  misc_feature 1..22: note = chemically synthesized
  source 1..22: mol_type = other DNA
gaaataacaacactgctgacat

SEQ ID NO: 51027 - DNA, 22 bp, synthetic construct
  misc_feature 1..22: note = chemically synthesized
  source 1..22: mol_type = other DNA
aaataacaacactgctgacata

SEQ ID NO: 51028 - DNA, 22 bp, synthetic construct
  misc_feature 1..22: note = chemically synthesized
  source 1..22: mol_type = other DNA
ctgacatagccatgacccaaat

SEQ ID NO: 51029 - DNA, 22 bp, synthetic construct
  misc_feature 1..22: note = chemically synthesized
  source 1..22: mol_type = other DNA
acatagccatgacccaaatgaa

SEQ ID NO: 51030 - DNA, 22 bp, synthetic construct
  misc_feature 1..22: note = chemically synthesized
  source 1..22: mol_type = other DNA
aacaagcagaaaggtactaaag

SEQ ID NO: 51031 - DNA, 22 bp, synthetic construct
  misc_feature 1..22: note = chemically synthesized
  source 1..22: mol_type = other DNA
aagatgcttggtgattaaatct

SEQ ID NO: 51032 - DNA, 22 bp, synthetic construct
  misc_feature 1..22: note = chemically synthesized
  source 1..22: mol_type = other DNA
ggtgattaaatctcatgctaaa

SEQ ID NO: 51033 - DNA, 22 bp, synthetic construct
  misc_feature 1..22: note = chemically synthesized
  source 1..22: mol_type = other DNA
gtgattaaatctcatgctaaaa

SEQ ID NO: 51034 - DNA, 22 bp, synthetic construct
  misc_feature 1..22: note = chemically synthesized
  source 1..22: mol_type = other DNA
aatctcatgctaaaaaagtggc

SEQ ID NO: 51035 - DNA, 22 bp, synthetic construct
  misc_feature 1..22: note = chemically synthesized
  source 1..22: mol_type = other DNA
atgctaaaaaagtggcaaggtg

SEQ ID NO: 51036 - DNA, 22 bp, synthetic construct
  misc_feature 1..22: note = chemically synthesized
  source 1..22: mol_type = other DNA
aaaaagtggcaaggtgccaggc

SEQ ID NO: 51037 - DNA, 22 bp, synthetic construct
  misc_feature 1..22: note = chemically synthesized
  source 1..22: mol_type = other DNA
ggtccagcttgatgctaagtgc

SEQ ID NO: 51038 - DNA, 22 bp, synthetic construct
  misc_feature 1..22: note = chemically synthesized
  source 1..22: mol_type = other DNA
gatgctaagtgctttttattgc

SEQ ID NO: 51039 - DNA, 22 bp, synthetic construct
  misc_feature 1..22: note = chemically synthesized
  source 1..22: mol_type = other DNA
atgctaagtgctttttattgca

SEQ ID NO: 51040 - DNA, 22 bp, synthetic construct
  misc_feature 1..22: note = chemically synthesized
  source 1..22: mol_type = other DNA
agtgctttttattgcacaaagc

SEQ ID NO: 51041 - DNA, 22 bp, synthetic construct
  misc_feature 1..22: note = chemically synthesized
  source 1..22: mol_type = other DNA
tttattgcacaaagctggtact

SEQ ID NO: 51042 - DNA, 22 bp, synthetic construct
  misc_feature 1..22: note = chemically synthesized
  source 1..22: mol_type = other DNA
ttattgcacaaagctggtacta

SEQ ID NO: 51043 - DNA, 22 bp, synthetic construct
  misc_feature 1..22: note = chemically synthesized
  source 1..22: mol_type = other DNA
tattgcacaaagctggtactac

SEQ ID NO: 51044 - DNA, 22 bp, synthetic construct
  misc_feature 1..22: note = chemically synthesized
  source 1..22: mol_type = other DNA
attgcacaaagctggtactact

SEQ ID NO: 51045 - DNA, 22 bp, synthetic construct
  misc_feature 1..22: note = chemically synthesized
  source 1..22: mol_type = other DNA
ttgcacaaagctggtactactg

SEQ ID NO: 51046 - DNA, 22 bp, synthetic construct
  misc_feature 1..22: note = chemically synthesized
  source 1..22: mol_type = other DNA
cacaaagctggtactactgtat

SEQ ID NO: 51047 - DNA, 22 bp, synthetic construct
  misc_feature 1..22: note = chemically synthesized
  source 1..22: mol_type = other DNA
gtactactgtatgtaaaaacag

SEQ ID NO: 51048 - DNA, 22 bp, synthetic construct
  misc_feature 1..22: note = chemically synthesized
  source 1..22: mol_type = other DNA
ctgtatgtaaaaacagacttgg

SEQ ID NO: 51049 - DNA, 22 bp, synthetic construct
  misc_feature 1..22: note = chemically synthesized
  source 1..22: mol_type = other DNA
tatgtaaaaacagacttgggct

SEQ ID NO: 51050 - DNA, 22 bp, synthetic construct
  misc_feature 1..22: note = chemically synthesized
  source 1..22: mol_type = other DNA
gggcttggggtaaattttgtca

SEQ ID NO: 51051 - DNA, 22 bp, synthetic construct
  misc_feature 1..22: note = chemically synthesized
  source 1..22: mol_type = other DNA
ggcttggggtaaattttgtcaa

SEQ ID NO: 51052 - DNA, 22 bp, synthetic construct
  misc_feature 1..22: note = chemically synthesized
  source 1..22: mol_type = other DNA
ggggtaaattttgtcaaatgac

SEQ ID NO: 51053 - DNA, 22 bp, synthetic construct
  misc_feature 1..22: note = chemically synthesized
  source 1..22: mol_type = other DNA
gggtaaattttgtcaaatgact

SEQ ID NO: 51054 - DNA, 22 bp, synthetic construct
  misc_feature 1..22: note = chemically synthesized
  source 1..22: mol_type = other DNA
tgtcaaatgacttctttgtgca

SEQ ID NO: 51055 - DNA, 22 bp, synthetic construct
  misc_feature 1..22: note = chemically synthesized
  source 1..22: mol_type = other DNA
gtcaaatgacttctttgtgcaa

SEQ ID NO: 51056 - DNA, 22 bp, synthetic construct
  misc_feature 1..22: note = chemically synthesized
  source 1..22: mol_type = other DNA
tcaaatgacttctttgtgcaat

SEQ ID NO: 51057 - DNA, 22 bp, synthetic construct
  misc_feature 1..22: note = chemically synthesized
  source 1..22: mol_type = other DNA
ctttgtgcaataaagggtgtga

SEQ ID NO: 51058 - DNA, 22 bp, synthetic construct
  misc_feature 1..22: note = chemically synthesized
  source 1..22: mol_type = other DNA
tttgtgcaataaagggtgtgaa

SEQ ID NO: 51059 - DNA, 22 bp, synthetic construct
  misc_feature 1..22: note = chemically synthesized
  source 1..22: mol_type = other DNA
tgtgcaataaagggtgtgaaca

SEQ ID NO: 51060 - DNA, 22 bp, synthetic construct
  misc_feature 1..22: note = chemically synthesized
  source 1..22: mol_type = other DNA
gtgcaataaagggtgtgaacag

SEQ ID NO: 51061 - DNA, 22 bp, synthetic construct
  misc_feature 1..22: note = chemically synthesized
  source 1..22: mol_type = other DNA
tgcaataaagggtgtgaacaga

SEQ ID NO: 51062 - DNA, 22 bp, synthetic construct
  misc_feature 1..22: note = chemically synthesized
  source 1..22: mol_type = other DNA
aattaacatccagtgacgcaat

SEQ ID NO: 51063 - DNA, 22 bp, synthetic construct
  misc_feature 1..22: note = chemically synthesized
  source 1..22: mol_type = other DNA
acatccagtgacgcaatcttgg

SEQ ID NO: 51064 - DNA, 22 bp, synthetic construct
  misc_feature 1..22: note = chemically synthesized
  source 1..22: mol_type = other DNA
ggtgcatctccctagctgtgct

SEQ ID NO: 51065 - DNA, 22 bp, synthetic construct
  misc_feature 1..22: note = chemically synthesized
  source 1..22: mol_type = other DNA
gtgcatctccctagctgtgctt

SEQ ID NO: 51066 - DNA, 22 bp, synthetic construct
  misc_feature 1..22: note = chemically synthesized
  source 1..22: mol_type = other DNA
cctagctgtgctttctacttcg

SEQ ID NO: 51067 - DNA, 22 bp, synthetic construct
  misc_feature 1..22: note = chemically synthesized
  source 1..22: mol_type = other DNA
gctgtgctttctacttcggtta

SEQ ID NO: 51068 - DNA, 22 bp, synthetic construct
  misc_feature 1..22: note = chemically synthesized
  source 1..22: mol_type = other DNA
tgctttctacttcggttaaatt

SEQ ID NO: 51069 - DNA, 22 bp, synthetic construct
  misc_feature 1..22: note = chemically synthesized
  source 1..22: mol_type = other DNA
tctacttcggttaaatttaata

SEQ ID NO: 51070 - DNA, 22 bp, synthetic construct
  misc_feature 1..22: note = chemically synthesized
  source 1..22: mol_type = other DNA
ctacttcggttaaatttaatat

SEQ ID NO: 51071 - DNA, 22 bp, synthetic construct
  misc_feature 1..22: note = chemically synthesized
  source 1..22: mol_type = other DNA
tacttcggttaaatttaatatt

SEQ ID NO: 51072 - DNA, 22 bp, synthetic construct
  misc_feature 1..22: note = chemically synthesized
  source 1..22: mol_type = other DNA
cttcggttaaatttaatatttc

SEQ ID NO: 51073 - DNA, 22 bp, synthetic construct
  misc_feature 1..22: note = chemically synthesized
  source 1..22: mol_type = other DNA
cggttaaatttaatatttcccc

SEQ ID NO: 51074 - DNA, 22 bp, synthetic construct
  misc_feature 1..22: note = chemically synthesized
  source 1..22: mol_type = other DNA
ggttaaatttaatatttccccc

SEQ ID NO: 51075 - DNA, 22 bp, synthetic construct
  misc_feature 1..22: note = chemically synthesized
  source 1..22: mol_type = other DNA
aatttaatatttccccccaaag

SEQ ID NO: 51076 - DNA, 22 bp, synthetic construct
  misc_feature 1..22: note = chemically synthesized
  source 1..22: mol_type = other DNA
aatatttccccccaaaggaaag

SEQ ID NO: 51077 - DNA, 22 bp, synthetic construct
  misc_feature 1..22: note = chemically synthesized
  source 1..22: mol_type = other DNA
atatttccccccaaaggaaagc

SEQ ID NO: 51078 - DNA, 22 bp, synthetic construct
  misc_feature 1..22: note = chemically synthesized
  source 1..22: mol_type = other DNA
ccccccaaaggaaagccaaaat

SEQ ID NO: 51079 - DNA, 22 bp, synthetic construct
  misc_feature 1..22: note = chemically synthesized
  source 1..22: mol_type = other DNA
cccccaaaggaaagccaaaatt

SEQ ID NO: 51080 - DNA, 22 bp, synthetic construct
  misc_feature 1..22: note = chemically synthesized
  source 1..22: mol_type = other DNA
gtttcctttcttactgaccagc

SEQ ID NO: 51081 - DNA, 22 bp, synthetic construct
  misc_feature 1..22: note = chemically synthesized
  source 1..22: mol_type = other DNA
tttcctttcttactgaccagca

SEQ ID NO: 51082 - DNA, 22 bp, synthetic construct
  misc_feature 1..22: note = chemically synthesized
  source 1..22: mol_type = other DNA
cctttcttactgaccagcacgc

SEQ ID NO: 51083 - DNA, 22 bp, synthetic construct
  misc_feature 1..22: note = chemically synthesized
  source 1..22: mol_type = other DNA
ctttcttactgaccagcacgca

SEQ ID NO: 51084 - DNA, 22 bp, synthetic construct
  misc_feature 1..22: note = chemically synthesized
  source 1..22: mol_type = other DNA
tcttactgaccagcacgcaaag

SEQ ID NO: 51085 - DNA, 22 bp, synthetic construct
  misc_feature 1..22: note = chemically synthesized
  source 1..22: mol_type = other DNA
cttactgaccagcacgcaaagc

SEQ ID NO: 51086 - DNA, 22 bp, synthetic construct
  misc_feature 1..22: note = chemically synthesized
  source 1..22: mol_type = other DNA
ttactgaccagcacgcaaagcc

SEQ ID NO: 51087 - DNA, 22 bp, synthetic construct
  misc_feature 1..22: note = chemically synthesized
  source 1..22: mol_type = other DNA
actgaccagcacgcaaagccac

SEQ ID NO: 51088 - DNA, 22 bp, synthetic construct
  misc_feature 1..22: note = chemically synthesized
  source 1..22: mol_type = other DNA
ctgaccagcacgcaaagccacc

SEQ ID NO: 51089 - DNA, 22 bp, synthetic construct
  misc_feature 1..22: note = chemically synthesized
  source 1..22: mol_type = other DNA
accagcacgcaaagccaccatt

SEQ ID NO: 51090 - DNA, 22 bp, synthetic construct
  misc_feature 1..22: note = chemically synthesized
  source 1..22: mol_type = other DNA
acctattctcctttattaaaca

SEQ ID NO: 51091 - DNA, 22 bp, synthetic construct
  misc_feature 1..22: note = chemically synthesized
  source 1..22: mol_type = other DNA
ttctcctttattaaacattttc

SEQ ID NO: 51092 - DNA, 22 bp, synthetic construct
  misc_feature 1..22: note = chemically synthesized
  source 1..22: mol_type = other DNA
tcctttattaaacattttcatt

SEQ ID NO: 51093 - DNA, 22 bp, synthetic construct
  misc_feature 1..22: note = chemically synthesized
  source 1..22: mol_type = other DNA
ctttattaaacattttcattga

SEQ ID NO: 51094 - DNA, 22 bp, synthetic construct
  misc_feature 1..22: note = chemically synthesized
  source 1..22: mol_type = other DNA
tattaaacattttcattgagaa

SEQ ID NO: 51095 - DNA, 22 bp, synthetic construct
  misc_feature 1..22: note = chemically synthesized
  source 1..22: mol_type = other DNA
attaaacattttcattgagaaa

SEQ ID NO: 51096 - DNA, 22 bp, synthetic construct
  misc_feature 1..22: note = chemically synthesized
  source 1..22: mol_type = other DNA
ttaaacattttcattgagaaat

SEQ ID NO: 51097 - DNA, 22 bp, synthetic construct
  misc_feature 1..22: note = chemically synthesized
  source 1..22: mol_type = other DNA
aacattttcattgagaaatcac

SEQ ID NO: 51098 - DNA, 22 bp, synthetic construct
  misc_feature 1..22: note = chemically synthesized
  source 1..22: mol_type = other DNA
tcattgagaaatcacaaaaatc

SEQ ID NO: 51099 - DNA, 22 bp, synthetic construct
  misc_feature 1..22: note = chemically synthesized
  source 1..22: mol_type = other DNA
cattgagaaatcacaaaaatct

SEQ ID NO: 51100 - DNA, 22 bp, synthetic construct
  misc_feature 1..22: note = chemically synthesized
  source 1..22: mol_type = other DNA
attgagaaatcacaaaaatcta

SEQ ID NO: 51101 - DNA, 22 bp, synthetic construct
  misc_feature 1..22: note = chemically synthesized
  source 1..22: mol_type = other DNA
agaaatcacaaaaatctaaaaa

SEQ ID NO: 51102 - DNA, 22 bp, synthetic construct
  misc_feature 1..22: note = chemically synthesized
  source 1..22: mol_type = other DNA
aaaaatgtttccctaggatttg

SEQ ID NO: 51103 - DNA, 22 bp, synthetic construct
  misc_feature 1..22: note = chemically synthesized
  source 1..22: mol_type = other DNA
ccctaggatttgcatgtttttt

SEQ ID NO: 51104 - DNA, 22 bp, synthetic construct
  misc_feature 1..22: note = chemically synthesized
  source 1..22: mol_type = other DNA
cctaggatttgcatgtttttta

SEQ ID NO: 51105 - DNA, 22 bp, synthetic construct
  misc_feature 1..22: note = chemically synthesized
  source 1..22: mol_type = other DNA
ggatttgcatgttttttatgta

SEQ ID NO: 51106 - DNA, 22 bp, synthetic construct
  misc_feature 1..22: note = chemically synthesized
  source 1..22: mol_type = other DNA
gcatgttttttatgtaccccaa

SEQ ID NO: 51107 - DNA, 22 bp, synthetic construct
  misc_feature 1..22: note = chemically synthesized
  source 1..22: mol_type = other DNA
catgttttttatgtaccccaat

SEQ ID NO: 51108 - DNA, 22 bp, synthetic construct
  misc_feature 1..22: note = chemically synthesized
  source 1..22: mol_type = other DNA
tttatgtaccccaatttagtac

SEQ ID NO: 51109 - DNA, 22 bp, synthetic construct
  misc_feature 1..22: note = chemically synthesized
  source 1..22: mol_type = other DNA
ttatgtaccccaatttagtact

SEQ ID NO: 51110 - DNA, 22 bp, synthetic construct
  misc_feature 1..22: note = chemically synthesized
  source 1..22: mol_type = other DNA
tatgtaccccaatttagtactc

SEQ ID NO: 51111 - DNA, 22 bp, synthetic construct
  misc_feature 1..22: note = chemically synthesized
  source 1..22: mol_type = other DNA
atgtaccccaatttagtactcc

SEQ ID NO: 51112 - DNA, 22 bp, synthetic construct
  misc_feature 1..22: note = chemically synthesized
  source 1..22: mol_type = other DNA
tgtaccccaatttagtactccc

SEQ ID NO: 51113 - DNA, 22 bp, synthetic construct
  misc_feature 1..22: note = chemically synthesized
  source 1..22: mol_type = other DNA
agtactcccacattagccaaac

SEQ ID NO: 51114 - DNA, 22 bp, synthetic construct
  misc_feature 1..22: note = chemically synthesized
  source 1..22: mol_type = other DNA
gtactcccacattagccaaact

SEQ ID NO: 51115 - DNA, 22 bp, synthetic construct
  misc_feature 1..22: note = chemically synthesized
  source 1..22: mol_type = other DNA
ccacattagccaaactacatgg

SEQ ID NO: 51116 - DNA, 22 bp, synthetic construct
  misc_feature 1..22: note = chemically synthesized
  source 1..22: mol_type = other DNA
gccaaactacatggaagctgca

SEQ ID NO: 51117 - DNA, 22 bp, synthetic construct
  misc_feature 1..22: note = chemically synthesized
  source 1..22: mol_type = other DNA
catggaagctgcagtgtgaaat

SEQ ID NO: 51118 - DNA, 22 bp, synthetic construct
  misc_feature 1..22: note = chemically synthesized
  source 1..22: mol_type = other DNA
cagtgtgaaattaatgattttc

SEQ ID NO: 51119 - DNA, 22 bp, synthetic construct
  misc_feature 1..22: note = chemically synthesized
  source 1..22: mol_type = other DNA
atgattttccaggactctaaaa

SEQ ID NO: 51120 - DNA, 22 bp, synthetic construct
  misc_feature 1..22: note = chemically synthesized
  source 1..22: mol_type = other DNA
tccaggactctaaaagatgcca

SEQ ID NO: 51121 - DNA, 22 bp, synthetic construct
  misc_feature 1..22: note = chemically synthesized
  source 1..22: mol_type = other DNA
ccaggactctaaaagatgccat

SEQ ID NO: 51122 - DNA, 22 bp, synthetic construct
  misc_feature 1..22: note = chemically synthesized
  source 1..22: mol_type = other DNA
caggactctaaaagatgccatt

SEQ ID NO: 51123 - DNA, 22 bp, synthetic construct
  misc_feature 1..22: note = chemically synthesized
  source 1..22: mol_type = other DNA
taaaagatgccattaataagca

SEQ ID NO: 51124 - DNA, 22 bp, synthetic construct
  misc_feature 1..22: note = chemically synthesized
  source 1..22: mol_type = other DNA
aaagatgccattaataagcatc

SEQ ID NO: 51125 - DNA, 22 bp, synthetic construct
  misc_feature 1..22: note = chemically synthesized
  source 1..22: mol_type = other DNA
ataagcatccaactcgcctcct

SEQ ID NO: 51126 - DNA, 22 bp, synthetic construct
  misc_feature 1..22: note = chemically synthesized
  source 1..22: mol_type = other DNA
gcctcctccctgagctgaaggt

SEQ ID NO: 51127 - DNA, 22 bp, synthetic construct
  misc_feature 1..22: note = chemically synthesized
  source 1..22: mol_type = other DNA
ctccctgagctgaaggttgcct

SEQ ID NO: 51128 - DNA, 22 bp, synthetic construct
  misc_feature 1..22: note = chemically synthesized
  source 1..22: mol_type = other DNA
cctgagctgaaggttgcctgtc

SEQ ID NO: 51129 - DNA, 22 bp, synthetic construct
  misc_feature 1..22: note = chemically synthesized
  source 1..22: mol_type = other DNA
agctgaaggttgcctgtcctga

SEQ ID NO: 51130 - DNA, 22 bp, synthetic construct
  misc_feature 1..22: note = chemically synthesized
  source 1..22: mol_type = other DNA
aaggttgcctgtcctgaccctg

SEQ ID NO: 51131 - DNA, 22 bp, synthetic construct
  misc_feature 1..22: note = chemically synthesized
  source 1..22: mol_type = other DNA
cctgtcctgaccctgcctgcac

SEQ ID NO: 51132 - DNA, 22 bp, synthetic construct
  misc_feature 1..22: note = chemically synthesized
  source 1..22: mol_type = other DNA
tcctgaccctgcctgcacgttt

SEQ ID NO: 51133 - DNA, 22 bp, synthetic construct
  misc_feature 1..22: note = chemically synthesized
  source 1..22: mol_type = other DNA
accctgcctgcacgtttctaca

SEQ ID NO: 51134 - DNA, 22 bp, synthetic construct
  misc_feature 1..22: note = chemically synthesized
  source 1..22: mol_type = other DNA
cctgcacgtttctacacccagt

SEQ ID NO: 51135 - DNA, 22 bp, synthetic construct
  misc_feature 1..22: note = chemically synthesized
  source 1..22: mol_type = other DNA
cacgtttctacacccagttgca

SEQ ID NO: 51136 - DNA, 22 bp, synthetic construct
  misc_feature 1..22: note = chemically synthesized
  source 1..22: mol_type = other DNA
ctacacccagttgcattttcca

SEQ ID NO: 51137 - DNA, 22 bp, synthetic construct
  misc_feature 1..22: note = chemically synthesized
  source 1..22: mol_type = other DNA
tacacccagttgcattttccag

SEQ ID NO: 51138 - DNA, 22 bp, synthetic construct
  misc_feature 1..22: note = chemically synthesized
  source 1..22: mol_type = other DNA
cacccagttgcattttccagcc

SEQ ID NO: 51139 - DNA, 22 bp, synthetic construct
  misc_feature 1..22: note = chemically synthesized
  source 1..22: mol_type = other DNA
cattttccagcccatgtgcagc

SEQ ID NO: 51140 - DNA, 22 bp, synthetic construct
  misc_feature 1..22: note = chemically synthesized
  source 1..22: mol_type = other DNA
tccagcccatgtgcagctccac

SEQ ID NO: 51141 - DNA, 22 bp, synthetic construct
  misc_feature 1..22: note = chemically synthesized
  source 1..22: mol_type = other DNA
ccagcccatgtgcagctccaca

SEQ ID NO: 51142 - DNA, 22 bp, synthetic construct
  misc_feature 1..22: note = chemically synthesized
  source 1..22: mol_type = other DNA
cagcccatgtgcagctccacaa

SEQ ID NO: 51143 - DNA, 22 bp, synthetic construct
  misc_feature 1..22: note = chemically synthesized
  source 1..22: mol_type = other DNA
cacaattatatgccacattcac

SEQ ID NO: 51144 - DNA, 22 bp, synthetic construct
  misc_feature 1..22: note = chemically synthesized
  source 1..22: mol_type = other DNA
tatgccacattcactaagagaa

SEQ ID NO: 51145 - DNA, 22 bp, synthetic construct
  misc_feature 1..22: note = chemically synthesized
  source 1..22: mol_type = other DNA
actaagagaaaggtgtgcaaaa

SEQ ID NO: 51146 - DNA, 22 bp, synthetic construct
  misc_feature 1..22: note = chemically synthesized
  source 1..22: mol_type = other DNA
agagaaaggtgtgcaaaacata

SEQ ID NO: 51147 - DNA, 22 bp, synthetic construct
  misc_feature 1..22: note = chemically synthesized
  source 1..22: mol_type = other DNA
cagatcctttatagtaaaggca

SEQ ID NO: 51148 - DNA, 22 bp, synthetic construct
  misc_feature 1..22: note = chemically synthesized
  source 1..22: mol_type = other DNA
agatcctttatagtaaaggcac

SEQ ID NO: 51149 - DNA, 22 bp, synthetic construct
  misc_feature 1..22: note = chemically synthesized
  source 1..22: mol_type = other DNA
tatagtaaaggcacaacttgca

SEQ ID NO: 51150 - DNA, 22 bp, synthetic construct
  misc_feature 1..22: note = chemically synthesized
  source 1..22: mol_type = other DNA
atagtaaaggcacaacttgcaa

SEQ ID NO: 51151 - DNA, 22 bp, synthetic construct
  misc_feature 1..22: note = chemically synthesized
  source 1..22: mol_type = other DNA
tagtaaaggcacaacttgcaac

SEQ ID NO: 51152 - DNA, 22 bp, synthetic construct
  misc_feature 1..22: note = chemically synthesized
  source 1..22: mol_type = other DNA
gcaacacaacaaggaatggggt

SEQ ID NO: 51153 - DNA, 22 bp, synthetic construct
  misc_feature 1..22: note = chemically synthesized
  source 1..22: mol_type = other DNA
caacacaacaaggaatggggtg

SEQ ID NO: 51154 - DNA, 22 bp, synthetic construct
  misc_feature 1..22: note = chemically synthesized
  source 1..22: mol_type = other DNA
aagaaattacagcactggtttt

SEQ ID NO: 51155 - DNA, 22 bp, synthetic construct
  misc_feature 1..22: note = chemically synthesized
  source 1..22: mol_type = other DNA
agaaattacagcactggttttg

SEQ ID NO: 51156 - DNA, 22 bp, synthetic construct
  misc_feature 1..22: note = chemically synthesized
  source 1..22: mol_type = other DNA
cagcactggttttgtgtgtgtg

SEQ ID NO: 51157 - DNA, 22 bp, synthetic construct
  misc_feature 1..22: note = chemically synthesized
  source 1..22: mol_type = other DNA
gttttgtgtgtgtgtgtgtgtg

SEQ ID NO: 51158 - DNA, 22 bp, synthetic construct
  misc_feature 1..22: note = chemically synthesized
  source 1..22: mol_type = other DNA
tgtgtgtgtgtgtgtgtgtgtg

SEQ ID NO: 51159 - DNA, 22 bp, synthetic construct
  misc_feature 1..22: note = chemically synthesized
  source 1..22: mol_type = other DNA
gtgtgtgtgtgtgtgtgtgtgt

SEQ ID NO: 51160 - DNA, 22 bp, synthetic construct
  misc_feature 1..22: note = chemically synthesized
  source 1..22: mol_type = other DNA
tgtgtgtgtgtgtgtgtgtgtg

SEQ ID NO: 51161 - DNA, 22 bp, synthetic construct
  misc_feature 1..22: note = chemically synthesized
  source 1..22: mol_type = other DNA
ttttgtttttttgtttttttaa

SEQ ID NO: 51162 - DNA, 22 bp, synthetic construct
  misc_feature 1..22: note = chemically synthesized
  source 1..22: mol_type = other DNA
tgtttttttgtttttttaagct

SEQ ID NO: 51163 - DNA, 22 bp, synthetic construct
  misc_feature 1..22: note = chemically synthesized
  source 1..22: mol_type = other DNA
gtttttttgtttttttaagctt

SEQ ID NO: 51164 - DNA, 22 bp, synthetic construct
  misc_feature 1..22: note = chemically synthesized
  source 1..22: mol_type = other DNA
tttttttgtttttttaagcttt

SEQ ID NO: 51165 - DNA, 22 bp, synthetic construct
  misc_feature 1..22: note = chemically synthesized
  source 1..22: mol_type = other DNA
ttttgtttttttaagctttcac

SEQ ID NO: 51166 - DNA, 22 bp, synthetic construct
  misc_feature 1..22: note = chemically synthesized
  source 1..22: mol_type = other DNA
tttgtttttttaagctttcaca

SEQ ID NO: 51167 - DNA, 22 bp, synthetic construct
  misc_feature 1..22: note = chemically synthesized
  source 1..22: mol_type = other DNA
ttgtttttttaagctttcacag

SEQ ID NO: 51168 - DNA, 22 bp, synthetic construct
  misc_feature 1..22: note = chemically synthesized
  source 1..22: mol_type = other DNA
tgtttttttaagctttcacaga

SEQ ID NO: 51169 - DNA, 22 bp, synthetic construct
  misc_feature 1..22: note = chemically synthesized
  source 1..22: mol_type = other DNA
gtttttttaagctttcacagaa

SEQ ID NO: 51170 - DNA, 22 bp, synthetic construct
  misc_feature 1..22: note = chemically synthesized
  source 1..22: mol_type = other DNA
tttttttaagctttcacagaat

SEQ ID NO: 51171 - DNA, 22 bp, synthetic construct
  misc_feature 1..22: note = chemically synthesized
  source 1..22: mol_type = other DNA
ttttaagctttcacagaataaa

SEQ ID NO: 51172 - DNA, 22 bp, synthetic construct
  misc_feature 1..22: note = chemically synthesized
  source 1..22: mol_type = other DNA
tttaagctttcacagaataaac

SEQ ID NO: 51173 - DNA, 22 bp, synthetic construct
  misc_feature 1..22: note = chemically synthesized
  source 1..22: mol_type = other DNA
ttaagctttcacagaataaaca

SEQ ID NO: 51174 - DNA, 22 bp, synthetic construct
  misc_feature 1..22: note = chemically synthesized
  source 1..22: mol_type = other DNA
taagctttcacagaataaacac

SEQ ID NO: 51175 - DNA, 22 bp, synthetic construct
  misc_feature 1..22: note = chemically synthesized
  source 1..22: mol_type = other DNA
aagctttcacagaataaacaca

SEQ ID NO: 51176 - DNA, 22 bp, synthetic construct
  misc_feature 1..22: note = chemically synthesized
  source 1..22: mol_type = other DNA
agctttcacagaataaacacag

SEQ ID NO: 51177 - DNA, 22 bp, synthetic construct
  misc_feature 1..22: note = chemically synthesized
  source 1..22: mol_type = other DNA
tcacagaataaacacagagaac

SEQ ID NO: 51178 - DNA, 22 bp, synthetic construct
  misc_feature 1..22: note = chemically synthesized
  source 1..22: mol_type = other DNA
cacagaataaacacagagaacg

SEQ ID NO: 51179 - DNA, 22 bp, synthetic construct
  misc_feature 1..22: note = chemically synthesized
  source 1..22: mol_type = other DNA
acagaataaacacagagaacgg

SEQ ID NO: 51180 - DNA, 22 bp, synthetic construct
  misc_feature 1..22: note = chemically synthesized
  source 1..22: mol_type = other DNA
tgtccccctctgctcctgttct

SEQ ID NO: 51181 - DNA, 22 bp, synthetic construct
  misc_feature 1..22: note = chemically synthesized
  source 1..22: mol_type = other DNA
gtccccctctgctcctgttctt

SEQ ID NO: 51182 - DNA, 22 bp, synthetic construct
  misc_feature 1..22: note = chemically synthesized
  source 1..22: mol_type = other DNA
tccccctctgctcctgttcttg

SEQ ID NO: 51183 - DNA, 22 bp, synthetic construct
  misc_feature 1..22: note = chemically synthesized
  source 1..22: mol_type = other DNA
tgctcctgttcttgaagtgaat

SEQ ID NO: 51184 - DNA, 22 bp, synthetic construct
  misc_feature 1..22: note = chemically synthesized
  source 1..22: mol_type = other DNA
ctcctgttcttgaagtgaatac

SEQ ID NO: 51185 - DNA, 22 bp, synthetic construct
  misc_feature 1..22: note = chemically synthesized
  source 1..22: mol_type = other DNA
ctgttcttgaagtgaatacata

SEQ ID NO: 51186 - DNA, 22 bp, synthetic construct
  misc_feature 1..22: note = chemically synthesized
  source 1..22: mol_type = other DNA
ttcttgaagtgaatacatattt

SEQ ID NO: 51187 - DNA, 22 bp, synthetic construct
  misc_feature 1..22: note = chemically synthesized
  source 1..22: mol_type = other DNA
ttgaagtgaatacatatttgtg

SEQ ID NO: 51188 - DNA, 22 bp, synthetic construct
  misc_feature 1..22: note = chemically synthesized
  source 1..22: mol_type = other DNA
gaagtgaatacatatttgtgtt

SEQ ID NO: 51189 - DNA, 22 bp, synthetic construct
  misc_feature 1..22: note = chemically synthesized
  source 1..22: mol_type = other DNA
aagtgaatacatatttgtgttt

SEQ ID NO: 51190 - DNA, 22 bp, synthetic construct
  misc_feature 1..22: note = chemically synthesized
  source 1..22: mol_type = other DNA
gtgtttccaataaaaggccatt

SEQ ID NO: 51191 - DNA, 22 bp, synthetic construct
  misc_feature 1..22: note = chemically synthesized
  source 1..22: mol_type = other DNA
tgtttccaataaaaggccattt

SEQ ID NO: 51192 - DNA, 22 bp, synthetic construct
  misc_feature 1..22: note = chemically synthesized
  source 1..22: mol_type = other DNA
ccaataaaaggccatttttaca

SEQ ID NO: 51193 - DNA, 22 bp, synthetic construct
  misc_feature 1..22: note = chemically synthesized
  source 1..22: mol_type = other DNA
caataaaaggccatttttacat

SEQ ID NO: 51194 - DNA, 22 bp, synthetic construct
  misc_feature 1..22: note = chemically synthesized
  source 1..22: mol_type = other DNA
ttacattaactgtctgtaacag

SEQ ID NO: 51195 - DNA, 22 bp, synthetic construct
  misc_feature 1..22: note = chemically synthesized
  source 1..22: mol_type = other DNA
tacattaactgtctgtaacagc

SEQ ID NO: 51196 - DNA, 22 bp, synthetic construct
  misc_feature 1..22: note = chemically synthesized
  source 1..22: mol_type = other DNA
acattaactgtctgtaacagca

SEQ ID NO: 51197 - DNA, 22 bp, synthetic construct
  misc_feature 1..22: note = chemically synthesized
  source 1..22: mol_type = other DNA
cattaactgtctgtaacagcag

SEQ ID NO: 51198 - DNA, 22 bp, synthetic construct
  misc_feature 1..22: note = chemically synthesized
  source 1..22: mol_type = other DNA
actgtctgtaacagcaggagac

SEQ ID NO: 51199 - DNA, 22 bp, synthetic construct
  misc_feature 1..22: note = chemically synthesized
  source 1..22: mol_type = other DNA
tctgtaacagcaggagacagaa

SEQ ID NO: 51200 - DNA, 22 bp, synthetic construct
  misc_feature 1..22: note = chemically synthesized
  source 1..22: mol_type = other DNA
taacagcaggagacagaaaaac

SEQ ID NO: 51201 - DNA, 22 bp, synthetic construct
  misc_feature 1..22: note = chemically synthesized
  source 1..22: mol_type = other DNA
acacaatctccacatcacacac

SEQ ID NO: 51202 - DNA, 22 bp, synthetic construct
  misc_feature 1..22: note = chemically synthesized
  source 1..22: mol_type = other DNA
cacatcacacacaggatgatct

SEQ ID NO: 51203 - DNA, 22 bp, synthetic construct
  misc_feature 1..22: note = chemically synthesized
  source 1..22: mol_type = other DNA
catatcacgtggacctattctc

SEQ ID NO: 51204 - DNA, 22 bp, synthetic construct
  misc_feature 1..22: note = chemically synthesized
  source 1..22: mol_type = other DNA
atatcacgtggacctattctca

SEQ ID NO: 51205 - DNA, 22 bp, synthetic construct
  misc_feature 1..22: note = chemically synthesized
  source 1..22: mol_type = other DNA
ttctcaaaacattatttataaa

SEQ ID NO: 51206 - DNA, 22 bp, synthetic construct
  misc_feature 1..22: note = chemically synthesized
  source 1..22: mol_type = other DNA
tcaaaacattatttataaaaga

SEQ ID NO: 51207 - DNA, 22 bp, synthetic construct
  misc_feature 1..22: note = chemically synthesized
  source 1..22: mol_type = other DNA
aaaacattatttataaaagatg

SEQ ID NO: 51208 - DNA, 22 bp, synthetic construct
  misc_feature 1..22: note = chemically synthesized
  source 1..22: mol_type = other DNA
tttataaaagatgactaggaaa

SEQ ID NO: 51209 - DNA, 22 bp, synthetic construct
  misc_feature 1..22: note = chemically synthesized
  source 1..22: mol_type = other DNA
ataaaagatgactaggaaaatg

SEQ ID NO: 51210 - DNA, 22 bp, synthetic construct
  misc_feature 1..22: note = chemically synthesized
  source 1..22: mol_type = other DNA
taaaagatgactaggaaaatgc

SEQ ID NO: 51211 - DNA, 22 bp, synthetic construct
  misc_feature 1..22: note = chemically synthesized
  source 1..22: mol_type = other DNA
ggaaaatgcacaatgcatcttt

SEQ ID NO: 51212 - DNA, 22 bp, synthetic construct
  misc_feature 1..22: note = chemically synthesized
  source 1..22: mol_type = other DNA
ttctgtgtcaccacaagggtaa

SEQ ID NO: 51213 - DNA, 22 bp, synthetic construct
  misc_feature 1..22: note = chemically synthesized
  source 1..22: mol_type = other DNA
tctgtgtcaccacaagggtaat

SEQ ID NO: 51214 - DNA, 22 bp, synthetic construct
  misc_feature 1..22: note = chemically synthesized
  source 1..22: mol_type = other DNA
ctgtgtcaccacaagggtaatg

SEQ ID NO: 51215 - DNA, 22 bp, synthetic construct
  misc_feature 1..22: note = chemically synthesized
  source 1..22: mol_type = other DNA
tgtgtcaccacaagggtaatgt

SEQ ID NO: 51216 - DNA, 22 bp, synthetic construct
  misc_feature 1..22: note = chemically synthesized
  source 1..22: mol_type = other DNA
tgtcaccacaagggtaatgtct

SEQ ID NO: 51217 - DNA, 22 bp, synthetic construct
  misc_feature 1..22: note = chemically synthesized
  source 1..22: mol_type = other DNA
aagaagtttgggatctttagga

SEQ ID NO: 51218 - DNA, 22 bp, synthetic construct
  misc_feature 1..22: note = chemically synthesized
  source 1..22: mol_type = other DNA
gggatctttaggatcttctaca

SEQ ID NO: 51219 - DNA, 22 bp, synthetic construct
  misc_feature 1..22: note = chemically synthesized
  source 1..22: mol_type = other DNA
ggatctttaggatcttctacat

SEQ ID NO: 51220 - DNA, 22 bp, synthetic construct
  misc_feature 1..22: note = chemically synthesized
  source 1..22: mol_type = other DNA
taggatcttctacattttagat

SEQ ID NO: 51221 - DNA, 22 bp, synthetic construct
  misc_feature 1..22: note = chemically synthesized
  source 1..22: mol_type = other DNA
aggatcttctacattttagata

SEQ ID NO: 51222 - DNA, 22 bp, synthetic construct
  misc_feature 1..22: note = chemically synthesized
  source 1..22: mol_type = other DNA
ggatcttctacattttagatat

SEQ ID NO: 51223 - DNA, 22 bp, synthetic construct
  misc_feature 1..22: note = chemically synthesized
  source 1..22: mol_type = other DNA
ctacattttagatatatttttt

SEQ ID NO: 51224 - DNA, 22 bp, synthetic construct
  misc_feature 1..22: note = chemically synthesized
  source 1..22: mol_type = other DNA
tacattttagatatattttttt

SEQ ID NO: 51225 - DNA, 22 bp, synthetic construct
  misc_feature 1..22: note = chemically synthesized
  source 1..22: mol_type = other DNA
cattttagatatattttttttt

SEQ ID NO: 51226 - DNA, 22 bp, synthetic construct
  misc_feature 1..22: note = chemically synthesized
  source 1..22: mol_type = other DNA
tagatatattttttttttcctt

SEQ ID NO: 51227 - DNA, 22 bp, synthetic construct
  misc_feature 1..22: note = chemically synthesized
  source 1..22: mol_type = other DNA
agatatattttttttttccttt

SEQ ID NO: 51228 - DNA, 22 bp, synthetic construct
  misc_feature 1..22: note = chemically synthesized
  source 1..22: mol_type = other DNA
gatatattttttttttcctttt

SEQ ID NO: 51229 - DNA, 22 bp, synthetic construct
  misc_feature 1..22: note = chemically synthesized
  source 1..22: mol_type = other DNA
tttttttccttttggctttcct

SEQ ID NO: 51230 - DNA, 22 bp, synthetic construct
  misc_feature 1..22: note = chemically synthesized
  source 1..22: mol_type = other DNA
ttttttccttttggctttcctt

SEQ ID NO: 51231 - DNA, 22 bp, synthetic construct
  misc_feature 1..22: note = chemically synthesized
  source 1..22: mol_type = other DNA
tttttccttttggctttcctta

SEQ ID NO: 51232 - DNA, 22 bp, synthetic construct
  misc_feature 1..22: note = chemically synthesized
  source 1..22: mol_type = other DNA
ttttccttttggctttccttag

SEQ ID NO: 51233 - DNA, 22 bp, synthetic construct
  misc_feature 1..22: note = chemically synthesized
  source 1..22: mol_type = other DNA
tttccttttggctttccttagt

SEQ ID NO: 51234 - DNA, 22 bp, synthetic construct
  misc_feature 1..22: note = chemically synthesized
  source 1..22: mol_type = other DNA
ttccttttggctttccttagta

SEQ ID NO: 51235 - DNA, 22 bp, synthetic construct
  misc_feature 1..22: note = chemically synthesized
  source 1..22: mol_type = other DNA
tccttttggctttccttagtaa

SEQ ID NO: 51236 - DNA, 22 bp, synthetic construct
  misc_feature 1..22: note = chemically synthesized
  source 1..22: mol_type = other DNA
ccttttggctttccttagtaag

SEQ ID NO: 51237 - DNA, 22 bp, synthetic construct
  misc_feature 1..22: note = chemically synthesized
  source 1..22: mol_type = other DNA
cttttggctttccttagtaagt

SEQ ID NO: 51238 - DNA, 22 bp, synthetic construct
  misc_feature 1..22: note = chemically synthesized
  source 1..22: mol_type = other DNA
ttggctttccttagtaagttta

SEQ ID NO: 51239 - DNA, 22 bp, synthetic construct
  misc_feature 1..22: note = chemically synthesized
  source 1..22: mol_type = other DNA
tggctttccttagtaagtttag

SEQ ID NO: 51240 - DNA, 22 bp, synthetic construct
  misc_feature 1..22: note = chemically synthesized
  source 1..22: mol_type = other DNA
ggctttccttagtaagtttagc

SEQ ID NO: 51241 - DNA, 22 bp, synthetic construct
  misc_feature 1..22: note = chemically synthesized
  source 1..22: mol_type = other DNA
gctttccttagtaagtttagca

SEQ ID NO: 51242 - DNA, 22 bp, synthetic construct
  misc_feature 1..22: note = chemically synthesized
  source 1..22: mol_type = other DNA
tccttagtaagtttagcagcca

SEQ ID NO: 51243 - DNA, 22 bp, synthetic construct
  misc_feature 1..22: note = chemically synthesized
  source 1..22: mol_type = other DNA
ccttagtaagtttagcagccat

SEQ ID NO: 51244 - DNA, 22 bp, synthetic construct
  misc_feature 1..22: note = chemically synthesized
  source 1..22: mol_type = other DNA
cttagtaagtttagcagccatg

SEQ ID NO: 51245 - DNA, 22 bp, synthetic construct
  misc_feature 1..22: note = chemically synthesized
  source 1..22: mol_type = other DNA
agtaagtttagcagccatgcgg

SEQ ID NO: 51246 - DNA, 22 bp, synthetic construct
  misc_feature 1..22: note = chemically synthesized
  source 1..22: mol_type = other DNA
gtaagtttagcagccatgcggg

SEQ ID NO: 51247 - DNA, 22 bp, synthetic construct
  misc_feature 1..22: note = chemically synthesized
  source 1..22: mol_type = other DNA
agcagccatgcgggccactgtg

SEQ ID NO: 51248 - DNA, 22 bp, synthetic construct
  misc_feature 1..22: note = chemically synthesized
  source 1..22: mol_type = other DNA
gcagccatgcgggccactgtgt

SEQ ID NO: 51249 - DNA, 22 bp, synthetic construct
  misc_feature 1..22: note = chemically synthesized
  source 1..22: mol_type = other DNA
tgtttaattaagctttcaaaag

SEQ ID NO: 51250 - DNA, 22 bp, synthetic construct
  misc_feature 1..22: note = chemically synthesized
  source 1..22: mol_type = other DNA
aattaagctttcaaaagtcctg

SEQ ID NO: 51251 - DNA, 22 bp, synthetic construct
  misc_feature 1..22: note = chemically synthesized
  source 1..22: mol_type = other DNA
attaagctttcaaaagtcctga

SEQ ID NO: 51252 - DNA, 22 bp, synthetic construct
  misc_feature 1..22: note = chemically synthesized
  source 1..22: mol_type = other DNA
agctttcaaaagtcctgacaat

SEQ ID NO: 51253 - DNA, 22 bp, synthetic construct
  misc_feature 1..22: note = chemically synthesized
  source 1..22: mol_type = other DNA
tcaaaagtcctgacaatgccaa

SEQ ID NO: 51254 - DNA, 22 bp, synthetic construct
  misc_feature 1..22: note = chemically synthesized
  source 1..22: mol_type = other DNA
caaaagtcctgacaatgccaac

SEQ ID NO: 51255 - DNA, 22 bp, synthetic construct
  misc_feature 1..22: note = chemically synthesized
  source 1..22: mol_type = other DNA
aaaagtcctgacaatgccaaca

SEQ ID NO: 51256 - DNA, 22 bp, synthetic construct
  misc_feature 1..22: note = chemically synthesized
  source 1..22: mol_type = other DNA
acaatgccaacaattgtaggac

SEQ ID NO: 51257 - DNA, 22 bp, synthetic construct
  misc_feature 1..22: note = chemically synthesized
  source 1..22: mol_type = other DNA
taggacacttctgcggctcaat

SEQ ID NO: 51258 - DNA, 22 bp, synthetic construct
  misc_feature 1..22: note = chemically synthesized
  source 1..22: mol_type = other DNA
ctgcggctcaatcatgcaatca

SEQ ID NO: 51259 - DNA, 22 bp, synthetic construct
  misc_feature 1..22: note = chemically synthesized
  source 1..22: mol_type = other DNA
tgcggctcaatcatgcaatcac

SEQ ID NO: 51260 - DNA, 22 bp, synthetic construct
  misc_feature 1..22: note = chemically synthesized
  source 1..22: mol_type = other DNA
cggctcaatcatgcaatcactg

SEQ ID NO: 51261 - DNA, 22 bp, synthetic construct
  misc_feature 1..22: note = chemically synthesized
  source 1..22: mol_type = other DNA
aatcatgcaatcactgtgacag

SEQ ID NO: 51262 - DNA, 22 bp, synthetic construct
  misc_feature 1..22: note = chemically synthesized
  source 1..22: mol_type = other DNA
tgacagttctatttacaatttg

SEQ ID NO: 51263 - DNA, 22 bp, synthetic construct
  misc_feature 1..22: note = chemically synthesized
  source 1..22: mol_type = other DNA
tatttacaatttgtcttagaaa

SEQ ID NO: 51264 - DNA, 22 bp, synthetic construct
  misc_feature 1..22: note = chemically synthesized
  source 1..22: mol_type = other DNA
tttacaatttgtcttagaaaga

SEQ ID NO: 51265 - DNA, 22 bp, synthetic construct
  misc_feature 1..22: note = chemically synthesized
  source 1..22: mol_type = other DNA
acaatttgtcttagaaagagtt

SEQ ID NO: 51266 - DNA, 22 bp, synthetic construct
  misc_feature 1..22: note = chemically synthesized
  source 1..22: mol_type = other DNA
caatttgtcttagaaagagttt

SEQ ID NO: 51267 - DNA, 22 bp, synthetic construct
  misc_feature 1..22: note = chemically synthesized
  source 1..22: mol_type = other DNA
gtcttagaaagagtttctctga

SEQ ID NO: 51268 - DNA, 22 bp, synthetic construct
  misc_feature 1..22: note = chemically synthesized
  source 1..22: mol_type = other DNA
tcttagaaagagtttctctgac

SEQ ID NO: 51269 - DNA, 22 bp, synthetic construct
  misc_feature 1..22: note = chemically synthesized
  source 1..22: mol_type = other DNA
agaaagagtttctctgacattg

SEQ ID NO: 51270 - DNA, 22 bp, synthetic construct
  misc_feature 1..22: note = chemically synthesized
  source 1..22: mol_type = other DNA
gaaagagtttctctgacattgt

SEQ ID NO: 51271 - DNA, 22 bp, synthetic construct
  misc_feature 1..22: note = chemically synthesized
  source 1..22: mol_type = other DNA
ctctgacattgtactttgacaa

SEQ ID NO: 51272 - DNA, 22 bp, synthetic construct
  misc_feature 1..22: note = chemically synthesized
  source 1..22: mol_type = other DNA
tctgacattgtactttgacaaa

SEQ ID NO: 51273 - DNA, 22 bp, synthetic construct
  misc_feature 1..22: note = chemically synthesized
  source 1..22: mol_type = other DNA
tgacattgtactttgacaaaac

SEQ ID NO: 51274 - DNA, 22 bp, synthetic construct
  misc_feature 1..22: note = chemically synthesized
  source 1..22: mol_type = other DNA
acattgtactttgacaaaacat

SEQ ID NO: 51275 - DNA, 22 bp, synthetic construct
  misc_feature 1..22: note = chemically synthesized
  source 1..22: mol_type = other DNA
tactttgacaaaacatccaagc

SEQ ID NO: 51276 - DNA, 22 bp, synthetic construct
  misc_feature 1..22: note = chemically synthesized
  source 1..22: mol_type = other DNA
tgacaaaacatccaagctgcca

SEQ ID NO: 51277 - DNA, 22 bp, synthetic construct
  misc_feature 1..22: note = chemically synthesized
  source 1..22: mol_type = other DNA
gacaaaacatccaagctgccag

SEQ ID NO: 51278 - DNA, 22 bp, synthetic construct
  misc_feature 1..22: note = chemically synthesized
  source 1..22: mol_type = other DNA
acaaaacatccaagctgccagt

SEQ ID NO: 51279 - DNA, 22 bp, synthetic construct
  misc_feature 1..22: note = chemically synthesized
  source 1..22: mol_type = other DNA
ccagttcacaacctttctctgt

SEQ ID NO: 51280 - DNA, 22 bp, synthetic construct
  misc_feature 1..22: note = chemically synthesized
  source 1..22: mol_type = other DNA
acaacctttctctgtcttattt

SEQ ID NO: 51281 - DNA, 22 bp, synthetic construct
  misc_feature 1..22: note = chemically synthesized
  source 1..22: mol_type = other DNA
tctctgtcttatttacaaatac

SEQ ID NO: 51282 - DNA, 22 bp, synthetic construct
  misc_feature 1..22: note = chemically synthesized
  source 1..22: mol_type = other DNA
ctctgtcttatttacaaataca

SEQ ID NO: 51283 - DNA, 22 bp, synthetic construct
  misc_feature 1..22: note = chemically synthesized
  source 1..22: mol_type = other DNA
tctgtcttatttacaaatacag

SEQ ID NO: 51284 - DNA, 22 bp, synthetic construct
  misc_feature 1..22: note = chemically synthesized
  source 1..22: mol_type = other DNA
tgtcttatttacaaatacagct

SEQ ID NO: 51285 - DNA, 22 bp, synthetic construct
  misc_feature 1..22: note = chemically synthesized
  source 1..22: mol_type = other DNA
tcttatttacaaatacagcttg

SEQ ID NO: 51286 - DNA, 22 bp, synthetic construct
  misc_feature 1..22: note = chemically synthesized
  source 1..22: mol_type = other DNA
atttacaaatacagcttgtata

SEQ ID NO: 51287 - DNA, 22 bp, synthetic construct
  misc_feature 1..22: note = chemically synthesized
  source 1..22: mol_type = other DNA
tttacaaatacagcttgtatat

SEQ ID NO: 51288 - DNA, 22 bp, synthetic construct
  misc_feature 1..22: note = chemically synthesized
  source 1..22: mol_type = other DNA
acaaatacagcttgtatatagg

SEQ ID NO: 51289 - DNA, 22 bp, synthetic construct
  misc_feature 1..22: note = chemically synthesized
  source 1..22: mol_type = other DNA
caaatacagcttgtatatagga

SEQ ID NO: 51290 - DNA, 22 bp, synthetic construct
  misc_feature 1..22: note = chemically synthesized
  source 1..22: mol_type = other DNA
gtatataggactcccagtttca

SEQ ID NO: 51291 - DNA, 22 bp, synthetic construct
  misc_feature 1..22: note = chemically synthesized
  source 1..22: mol_type = other DNA
tatataggactcccagtttcat

SEQ ID NO: 51292 - DNA, 22 bp, synthetic construct
  misc_feature 1..22: note = chemically synthesized
  source 1..22: mol_type = other DNA
ccagtttcatgaacattagtct

SEQ ID NO: 51293 - DNA, 22 bp, synthetic construct
  misc_feature 1..22: note = chemically synthesized
  source 1..22: mol_type = other DNA
catgaacattagtctttggata

SEQ ID NO: 51294 - DNA, 22 bp, synthetic construct
  misc_feature 1..22: note = chemically synthesized
  source 1..22: mol_type = other DNA
atgaacattagtctttggatag

SEQ ID NO: 51295 - DNA, 22 bp, synthetic construct
  misc_feature 1..22: note = chemically synthesized
  source 1..22: mol_type = other DNA
gtctttggatagtggcctcaca

SEQ ID NO: 51296 - DNA, 22 bp, synthetic construct
  misc_feature 1..22: note = chemically synthesized
  source 1..22: mol_type = other DNA
tggatagtggcctcacaaacat

SEQ ID NO: 51297 - DNA, 22 bp, synthetic construct
  misc_feature 1..22: note = chemically synthesized
  source 1..22: mol_type = other DNA
ggatagtggcctcacaaacata

SEQ ID NO: 51298 - DNA, 22 bp, synthetic construct
  misc_feature 1..22: note = chemically synthesized
  source 1..22: mol_type = other DNA
gatagtggcctcacaaacatag

SEQ ID NO: 51299 - DNA, 22 bp, synthetic construct
  misc_feature 1..22: note = chemically synthesized
  source 1..22: mol_type = other DNA
acaaacataggctccctatgaa

SEQ ID NO: 51300 - DNA, 22 bp, synthetic construct
  misc_feature 1..22: note = chemically synthesized
  source 1..22: mol_type = other DNA
cctatgaaaatcctaggtactt

SEQ ID NO: 51301 - DNA, 22 bp, synthetic construct
  misc_feature 1..22: note = chemically synthesized
  source 1..22: mol_type = other DNA
tgaaaatcctaggtacttatta

SEQ ID NO: 51302 - DNA, 22 bp, synthetic construct
  misc_feature 1..22: note = chemically synthesized
  source 1..22: mol_type = other DNA
ggtacttattagaaaacaatat

SEQ ID NO: 51303 - DNA, 22 bp, synthetic construct
  misc_feature 1..22: note = chemically synthesized
  source 1..22: mol_type = other DNA
attagaaaacaatattctctac

SEQ ID NO: 51304 - DNA, 22 bp, synthetic construct
  misc_feature 1..22: note = chemically synthesized
  source 1..22: mol_type = other DNA
ttagaaaacaatattctctact

SEQ ID NO: 51305 - DNA, 22 bp, synthetic construct
  misc_feature 1..22: note = chemically synthesized
  source 1..22: mol_type = other DNA
gaaaacaatattctctactctc

SEQ ID NO: 51306 - DNA, 22 bp, synthetic construct
  misc_feature 1..22: note = chemically synthesized
  source 1..22: mol_type = other DNA
tctactctctggattttgaagg

SEQ ID NO: 51307 - DNA, 22 bp, synthetic construct
  misc_feature 1..22: note = chemically synthesized
  source 1..22: mol_type = other DNA
tactctctggattttgaaggta

SEQ ID NO: 51308 - DNA, 22 bp, synthetic construct
  misc_feature 1..22: note = chemically synthesized
  source 1..22: mol_type = other DNA
ctctctggattttgaaggtaag

SEQ ID NO: 51309 - DNA, 22 bp, synthetic construct
  misc_feature 1..22: note = chemically synthesized
  source 1..22: mol_type = other DNA
tctggattttgaaggtaagtaa

SEQ ID NO: 51310 - DNA, 22 bp, synthetic construct
  misc_feature 1..22: note = chemically synthesized
  source 1..22: mol_type = other DNA
tggattttgaaggtaagtaaaa

SEQ ID NO: 51311 - DNA, 22 bp, synthetic construct
  misc_feature 1..22: note = chemically synthesized
  source 1..22: mol_type = other DNA
gattttgaaggtaagtaaaatg

SEQ ID NO: 51312 - DNA, 22 bp, synthetic construct
  misc_feature 1..22: note = chemically synthesized
  source 1..22: mol_type = other DNA
tgaaggtaagtaaaatgttcac

SEQ ID NO: 51313 - DNA, 22 bp, synthetic construct
  misc_feature 1..22: note = chemically synthesized
  source 1..22: mol_type = other DNA
gaaggtaagtaaaatgttcacc

SEQ ID NO: 51314 - DNA, 22 bp, synthetic construct
  misc_feature 1..22: note = chemically synthesized
  source 1..22: mol_type = other DNA
aaggtaagtaaaatgttcacca

SEQ ID NO: 51315 - DNA, 22 bp, synthetic construct
  misc_feature 1..22: note = chemically synthesized
  source 1..22: mol_type = other DNA
accagtatattgttttttgtgg

SEQ ID NO: 51316 - DNA, 22 bp, synthetic construct
  misc_feature 1..22: note = chemically synthesized
  source 1..22: mol_type = other DNA
ttttttgtggtagtggtgtttt

SEQ ID NO: 51317 - DNA, 22 bp, synthetic construct
  misc_feature 1..22: note = chemically synthesized
  source 1..22: mol_type = other DNA
tttgtggtagtggtgttttttt

SEQ ID NO: 51318 - DNA, 22 bp, synthetic construct
  misc_feature 1..22: note = chemically synthesized
  source 1..22: mol_type = other DNA
ttgtggtagtggtgtttttttg

SEQ ID NO: 51319 - DNA, 22 bp, synthetic construct
  misc_feature 1..22: note = chemically synthesized
  source 1..22: mol_type = other DNA
tgtggtagtggtgtttttttgt

SEQ ID NO: 51320 - DNA, 22 bp, synthetic construct
  misc_feature 1..22: note = chemically synthesized
  source 1..22: mol_type = other DNA
gtggtagtggtgtttttttgtt

SEQ ID NO: 51321 - DNA, 22 bp, synthetic construct
  misc_feature 1..22: note = chemically synthesized
  source 1..22: mol_type = other DNA
tggtagtggtgtttttttgttt

SEQ ID NO: 51322 - DNA, 22 bp, synthetic construct
  misc_feature 1..22: note = chemically synthesized
  source 1..22: mol_type = other DNA
ttttgttttaactgccatgctg

SEQ ID NO: 51323 - DNA, 22 bp, synthetic construct
  misc_feature 1..22: note = chemically synthesized
  source 1..22: mol_type = other DNA
tttgttttaactgccatgctga

SEQ ID NO: 51324 - DNA, 22 bp, synthetic construct
  misc_feature 1..22: note = chemically synthesized
  source 1..22: mol_type = other DNA
ttgttttaactgccatgctgaa

SEQ ID NO: 51325 - DNA, 22 bp, synthetic construct
  misc_feature 1..22: note = chemically synthesized
  source 1..22: mol_type = other DNA
tgttttaactgccatgctgaaa

SEQ ID NO: 51326 - DNA, 22 bp, synthetic construct
  misc_feature 1..22: note = chemically synthesized
  source 1..22: mol_type = other DNA
gttttaactgccatgctgaaaa

SEQ ID NO: 51327 - DNA, 22 bp, synthetic construct
  misc_feature 1..22: note = chemically synthesized
  source 1..22: mol_type = other DNA
ttttaactgccatgctgaaaat

SEQ ID NO: 51328 - DNA, 22 bp, synthetic construct
  misc_feature 1..22: note = chemically synthesized
  source 1..22: mol_type = other DNA
taactgccatgctgaaaattca

SEQ ID NO: 51329 - DNA, 22 bp, synthetic construct
  misc_feature 1..22: note = chemically synthesized
  source 1..22: mol_type = other DNA
aactgccatgctgaaaattcac

SEQ ID NO: 51330 - DNA, 22 bp, synthetic construct
  misc_feature 1..22: note = chemically synthesized
  source 1..22: mol_type = other DNA
actgccatgctgaaaattcact

SEQ ID NO: 51331 - DNA, 22 bp, synthetic construct
  misc_feature 1..22: note = chemically synthesized
  source 1..22: mol_type = other DNA
ccatgctgaaaattcacttcag

SEQ ID NO: 51332 - DNA, 22 bp, synthetic construct
  misc_feature 1..22: note = chemically synthesized
  source 1..22: mol_type = other DNA
aaaattcacttcagaagtcagt

SEQ ID NO: 51333 - DNA, 22 bp, synthetic construct
  misc_feature 1..22: note = chemically synthesized
  source 1..22: mol_type = other DNA
acttcagaagtcagtcgttttt

SEQ ID NO: 51334 - DNA, 22 bp, synthetic construct
  misc_feature 1..22: note = chemically synthesized
  source 1..22: mol_type = other DNA
cagaagtcagtcgtttttattc

SEQ ID NO: 51335 - DNA, 22 bp, synthetic construct
  misc_feature 1..22: note = chemically synthesized
  source 1..22: mol_type = other DNA
agaagtcagtcgtttttattca

SEQ ID NO: 51336 - DNA, 22 bp, synthetic construct
  misc_feature 1..22: note = chemically synthesized
  source 1..22: mol_type = other DNA
ttattcagaatcacataaataa

SEQ ID NO: 51337 - DNA, 22 bp, synthetic construct
  misc_feature 1..22: note = chemically synthesized
  source 1..22: mol_type = other DNA
tattcagaatcacataaataaa

SEQ ID NO: 51338 - DNA, 22 bp, synthetic construct
  misc_feature 1..22: note = chemically synthesized
  source 1..22: mol_type = other DNA
attcagaatcacataaataaag

SEQ ID NO: 51339 - DNA, 22 bp, synthetic construct
  misc_feature 1..22: note = chemically synthesized
  source 1..22: mol_type = other DNA
ttcagaatcacataaataaaga

SEQ ID NO: 51340 - DNA, 22 bp, synthetic construct
  misc_feature 1..22: note = chemically synthesized
  source 1..22: mol_type = other DNA
agaatcacataaataaagagaa

SEQ ID NO: 51341 - DNA, 22 bp, synthetic construct
  misc_feature 1..22: note = chemically synthesized
  source 1..22: mol_type = other DNA
taatttatagtctcatttacaa

SEQ ID NO: 51342 - DNA, 22 bp, synthetic construct
  misc_feature 1..22: note = chemically synthesized
  source 1..22: mol_type = other DNA
atagtctcatttacaattacac

SEQ ID NO: 51343 - DNA, 22 bp, synthetic construct
  misc_feature 1..22: note = chemically synthesized
  source 1..22: mol_type = other DNA
tagtctcatttacaattacacc

SEQ ID NO: 51344 - DNA, 22 bp, synthetic construct
  misc_feature 1..22: note = chemically synthesized
  source 1..22: mol_type = other DNA
atttacaattacaccataaggt

SEQ ID NO: 51345 - DNA, 22 bp, synthetic construct
  misc_feature 1..22: note = chemically synthesized
  source 1..22: mol_type = other DNA
acaattacaccataaggtacac

SEQ ID NO: 51346 - DNA, 22 bp, synthetic construct
  misc_feature 1..22: note = chemically synthesized
  source 1..22: mol_type = other DNA
caattacaccataaggtacaca

SEQ ID NO: 51347 - DNA, 22 bp, synthetic construct
  misc_feature 1..22: note = chemically synthesized
  source 1..22: mol_type = other DNA
caccataaggtacacaaataca

SEQ ID NO: 51348 - DNA, 22 bp, synthetic construct
  misc_feature 1..22: note = chemically synthesized
  source 1..22: mol_type = other DNA
cagttcagtctgagctaggaga

SEQ ID NO: 51349 - DNA, 22 bp, synthetic construct
  misc_feature 1..22: note = chemically synthesized
  source 1..22: mol_type = other DNA
agtctgagctaggagagaatca

SEQ ID NO: 51350 - DNA, 22 bp, synthetic construct
  misc_feature 1..22: note = chemically synthesized
  source 1..22: mol_type = other DNA
agctaggagagaatcagaatgg

SEQ ID NO: 51351 - DNA, 22 bp, synthetic construct
  misc_feature 1..22: note = chemically synthesized
  source 1..22: mol_type = other DNA
ggagagaatcagaatggataca

SEQ ID NO: 51352 - DNA, 22 bp, synthetic construct
  misc_feature 1..22: note = chemically synthesized
  source 1..22: mol_type = other DNA
attttctaaattctgaaaagca

SEQ ID NO: 51353 - DNA, 22 bp, synthetic construct
  misc_feature 1..22: note = chemically synthesized
  source 1..22: mol_type = other DNA
tctaaattctgaaaagcatatt

SEQ ID NO: 51354 - DNA, 22 bp, synthetic construct
  misc_feature 1..22: note = chemically synthesized
  source 1..22: mol_type = other DNA
ctaaattctgaaaagcatattg

SEQ ID NO: 51355 - DNA, 22 bp, synthetic construct
  misc_feature 1..22: note = chemically synthesized
  source 1..22: mol_type = other DNA
taaattctgaaaagcatattgt

SEQ ID NO: 51356 - DNA, 22 bp, synthetic construct
  misc_feature 1..22: note = chemically synthesized
  source 1..22: mol_type = other DNA
aattctgaaaagcatattgtat

SEQ ID NO: 51357 - DNA, 22 bp, synthetic construct
  misc_feature 1..22: note = chemically synthesized
  source 1..22: mol_type = other DNA
tgaaaagcatattgtatttgat

SEQ ID NO: 51358 - DNA, 22 bp, synthetic construct
  misc_feature 1..22: note = chemically synthesized
  source 1..22: mol_type = other DNA
aaaagcatattgtatttgattt

SEQ ID NO: 51359 - DNA, 22 bp, synthetic construct
  misc_feature 1..22: note = chemically synthesized
  source 1..22: mol_type = other DNA
tatttgatttacttttaagagc

SEQ ID NO: 51360 - DNA, 22 bp, synthetic construct
  misc_feature 1..22: note = chemically synthesized
  source 1..22: mol_type = other DNA
gatttacttttaagagcatgct

SEQ ID NO: 51361 - DNA, 22 bp, synthetic construct
  misc_feature 1..22: note = chemically synthesized
  source 1..22: mol_type = other DNA
atttacttttaagagcatgcta

SEQ ID NO: 51362 - DNA, 22 bp, synthetic construct
  misc_feature 1..22: note = chemically synthesized
  source 1..22: mol_type = other DNA
acttttaagagcatgctaatgt

SEQ ID NO: 51363 - DNA, 22 bp, synthetic construct
  misc_feature 1..22: note = chemically synthesized
  source 1..22: mol_type = other DNA
cttttaagagcatgctaatgta

SEQ ID NO: 51364 - DNA, 22 bp, synthetic construct
  misc_feature 1..22: note = chemically synthesized
  source 1..22: mol_type = other DNA
ttaagagcatgctaatgtattt

SEQ ID NO: 51365 - DNA, 22 bp, synthetic construct
  misc_feature 1..22: note = chemically synthesized
  source 1..22: mol_type = other DNA
taagagcatgctaatgtatttc

SEQ ID NO: 51366 - DNA, 22 bp, synthetic construct
  misc_feature 1..22: note = chemically synthesized
  source 1..22: mol_type = other DNA
aagagcatgctaatgtatttcc

SEQ ID NO: 51367 - DNA, 22 bp, synthetic construct
  misc_feature 1..22: note = chemically synthesized
  source 1..22: mol_type = other DNA
agagcatgctaatgtatttcca

SEQ ID NO: 51368 - DNA, 22 bp, synthetic construct
  misc_feature 1..22: note = chemically synthesized
  source 1..22: mol_type = other DNA
atgtatttccattttgaattac

SEQ ID NO: 51369 - DNA, 22 bp, synthetic construct
  misc_feature 1..22: note = chemically synthesized
  source 1..22: mol_type = other DNA
ccattttgaattactatatctc

SEQ ID NO: 51370 - DNA, 22 bp, synthetic construct
  misc_feature 1..22: note = chemically synthesized
  source 1..22: mol_type = other DNA
cattttgaattactatatctcc

SEQ ID NO: 51371 - DNA, 22 bp, synthetic construct
  misc_feature 1..22: note = chemically synthesized
  source 1..22: mol_type = other DNA
tgaattactatatctcccttct

SEQ ID NO: 51372 - DNA, 22 bp, synthetic construct
  misc_feature 1..22: note = chemically synthesized
  source 1..22: mol_type = other DNA
gaattactatatctcccttctt

SEQ ID NO: 51373 - DNA, 22 bp, synthetic construct
  misc_feature 1..22: note = chemically synthesized
  source 1..22: mol_type = other DNA
aattactatatctcccttcttt

SEQ ID NO: 51374 - DNA, 22 bp, synthetic construct
  misc_feature 1..22: note = chemically synthesized
  source 1..22: mol_type = other DNA
ctatatctcccttctttagagt

SEQ ID NO: 51375 - DNA, 22 bp, synthetic construct
  misc_feature 1..22: note = chemically synthesized
  source 1..22: mol_type = other DNA
tatctcccttctttagagtatc

SEQ ID NO: 51376 - DNA, 22 bp, synthetic construct
  misc_feature 1..22: note = chemically synthesized
  source 1..22: mol_type = other DNA
ccttctttagagtatctgtctg

SEQ ID NO: 51377 - DNA, 22 bp, synthetic construct
  misc_feature 1..22: note = chemically synthesized
  source 1..22: mol_type = other DNA
ctttagagtatctgtctgatat

SEQ ID NO: 51378 - DNA, 22 bp, synthetic construct
  misc_feature 1..22: note = chemically synthesized
  source 1..22: mol_type = other DNA
tttagagtatctgtctgatata

SEQ ID NO: 51379 - DNA, 22 bp, synthetic construct
  misc_feature 1..22: note = chemically synthesized
  source 1..22: mol_type = other DNA
tagagtatctgtctgatatatc

SEQ ID NO: 51380 - DNA, 22 bp, synthetic construct
  misc_feature 1..22: note = chemically synthesized
  source 1..22: mol_type = other DNA
agagtatctgtctgatatatca

SEQ ID NO: 51381 - DNA, 22 bp, synthetic construct
  misc_feature 1..22: note = chemically synthesized
  source 1..22: mol_type = other DNA
gagtatctgtctgatatatcat

SEQ ID NO: 51382 - DNA, 22 bp, synthetic construct
  misc_feature 1..22: note = chemically synthesized
  source 1..22: mol_type = other DNA
tctgatatatcattatctaaat

SEQ ID NO: 51383 - DNA, 22 bp, synthetic construct
  misc_feature 1..22: note = chemically synthesized
  source 1..22: mol_type = other DNA
atatatcattatctaaatacca

SEQ ID NO: 51384 - DNA, 22 bp, synthetic construct
  misc_feature 1..22: note = chemically synthesized
  source 1..22: mol_type = other DNA
tctaaataccagctatactgtc

SEQ ID NO: 51385 - DNA, 22 bp, synthetic construct
  misc_feature 1..22: note = chemically synthesized
  source 1..22: mol_type = other DNA
aataccagctatactgtctagg

SEQ ID NO: 51386 - DNA, 22 bp, synthetic construct
  misc_feature 1..22: note = chemically synthesized
  source 1..22: mol_type = other DNA
tactgtctaggcaaataatttt

SEQ ID NO: 51387 - DNA, 22 bp, synthetic construct
  misc_feature 1..22: note = chemically synthesized
  source 1..22: mol_type = other DNA
tctaggcaaataattttaaata

SEQ ID NO: 51388 - DNA, 22 bp, synthetic construct
  misc_feature 1..22: note = chemically synthesized
  source 1..22: mol_type = other DNA
ggcaaataattttaaataccct

SEQ ID NO: 51389 - DNA, 22 bp, synthetic construct
  misc_feature 1..22: note = chemically synthesized
  source 1..22: mol_type = other DNA
taaataccctgatataaatgtc

SEQ ID NO: 51390 - DNA, 22 bp, synthetic construct
  misc_feature 1..22: note = chemically synthesized
  source 1..22: mol_type = other DNA
aaataccctgatataaatgtct

SEQ ID NO: 51391 - DNA, 22 bp, synthetic construct
  misc_feature 1..22: note = chemically synthesized
  source 1..22: mol_type = other DNA
aataccctgatataaatgtcta

SEQ ID NO: 51392 - DNA, 22 bp, synthetic construct
  misc_feature 1..22: note = chemically synthesized
  source 1..22: mol_type = other DNA
atataaatgtctatgttcatga

SEQ ID NO: 51393 - DNA, 22 bp, synthetic construct
  misc_feature 1..22: note = chemically synthesized
  source 1..22: mol_type = other DNA
tgttcatgattttaaagagaaa

SEQ ID NO: 51394 - DNA, 22 bp, synthetic construct
  misc_feature 1..22: note = chemically synthesized
  source 1..22: mol_type = other DNA
atgattttaaagagaaaaaatg

SEQ ID NO: 51395 - DNA, 22 bp, synthetic construct
  misc_feature 1..22: note = chemically synthesized
  source 1..22: mol_type = other DNA
taaagagaaaaaatgttatata

SEQ ID NO: 51396 - DNA, 22 bp, synthetic construct
  misc_feature 1..22: note = chemically synthesized
  source 1..22: mol_type = other DNA
aaagagaaaaaatgttatatat

SEQ ID NO: 51397 - DNA, 22 bp, synthetic construct
  misc_feature 1..22: note = chemically synthesized
  source 1..22: mol_type = other DNA
aagagaaaaaatgttatatatc

SEQ ID NO: 51398 - DNA, 22 bp, synthetic construct
  misc_feature 1..22: note = chemically synthesized
  source 1..22: mol_type = other DNA
tatatcaacaggagcagacttt

SEQ ID NO: 51399 - DNA, 22 bp, synthetic construct
  misc_feature 1..22: note = chemically synthesized
  source 1..22: mol_type = other DNA
tactacattttataggacttgt

SEQ ID NO: 51400 - DNA, 22 bp, synthetic construct
  misc_feature 1..22: note = chemically synthesized
  source 1..22: mol_type = other DNA
actacattttataggacttgtc

SEQ ID NO: 51401 - DNA, 22 bp, synthetic construct
  misc_feature 1..22: note = chemically synthesized
  source 1..22: mol_type = other DNA
ctacattttataggacttgtca

SEQ ID NO: 51402 - DNA, 22 bp, synthetic construct
  misc_feature 1..22: note = chemically synthesized
  source 1..22: mol_type = other DNA
cattttataggacttgtcatat

SEQ ID NO: 51403 - DNA, 22 bp, synthetic construct
  misc_feature 1..22: note = chemically synthesized
  source 1..22: mol_type = other DNA
tataggacttgtcatatttttt

SEQ ID NO: 51404 - DNA, 22 bp, synthetic construct
  misc_feature 1..22: note = chemically synthesized
  source 1..22: mol_type = other DNA
ataggacttgtcatattttttc

SEQ ID NO: 51405 - DNA, 22 bp, synthetic construct
  misc_feature 1..22: note = chemically synthesized
  source 1..22: mol_type = other DNA
taggacttgtcatattttttct

SEQ ID NO: 51406 - DNA, 22 bp, synthetic construct
  misc_feature 1..22: note = chemically synthesized
  source 1..22: mol_type = other DNA
gtcatattttttctctagtctc

SEQ ID NO: 51407 - DNA, 22 bp, synthetic construct
  misc_feature 1..22: note = chemically synthesized
  source 1..22: mol_type = other DNA
tcatattttttctctagtctct

SEQ ID NO: 51408 - DNA, 22 bp, synthetic construct
  misc_feature 1..22: note = chemically synthesized
  source 1..22: mol_type = other DNA
tttctctagtctctcaaaaagc

SEQ ID NO: 51409 - DNA, 22 bp, synthetic construct
  misc_feature 1..22: note = chemically synthesized
  source 1..22: mol_type = other DNA
ttctctagtctctcaaaaagct

SEQ ID NO: 51410 - DNA, 22 bp, synthetic construct
  misc_feature 1..22: note = chemically synthesized
  source 1..22: mol_type = other DNA
tctctagtctctcaaaaagcta

SEQ ID NO: 51411 - DNA, 22 bp, synthetic construct
  misc_feature 1..22: note = chemically synthesized
  source 1..22: mol_type = other DNA
ctctagtctctcaaaaagctaa

SEQ ID NO: 51412 - DNA, 22 bp, synthetic construct
  misc_feature 1..22: note = chemically synthesized
  source 1..22: mol_type = other DNA
tctagtctctcaaaaagctaac

SEQ ID NO: 51413 - DNA, 22 bp, synthetic construct
  misc_feature 1..22: note = chemically synthesized
  source 1..22: mol_type = other DNA
tagtctctcaaaaagctaactt

SEQ ID NO: 51414 - DNA, 22 bp, synthetic construct
  misc_feature 1..22: note = chemically synthesized
  source 1..22: mol_type = other DNA
gtctctcaaaaagctaacttta

SEQ ID NO: 51415 - DNA, 22 bp, synthetic construct
  misc_feature 1..22: note = chemically synthesized
  source 1..22: mol_type = other DNA
tcaaaaagctaactttatgaca

SEQ ID NO: 51416 - DNA, 22 bp, synthetic construct
  misc_feature 1..22: note = chemically synthesized
  source 1..22: mol_type = other DNA
aaaaagctaactttatgacagc

SEQ ID NO: 51417 - DNA, 22 bp, synthetic construct
  misc_feature 1..22: note = chemically synthesized
  source 1..22: mol_type = other DNA
actttatgacagcccaaaccta

SEQ ID NO: 51418 - DNA, 22 bp, synthetic construct
  misc_feature 1..22: note = chemically synthesized
  source 1..22: mol_type = other DNA
tatgacagcccaaacctaattt

SEQ ID NO: 51419 - DNA, 22 bp, synthetic construct
  misc_feature 1..22: note = chemically synthesized
  source 1..22: mol_type = other DNA
atgacagcccaaacctaattta

SEQ ID NO: 51420 - DNA, 22 bp, synthetic construct
  misc_feature 1..22: note = chemically synthesized
  source 1..22: mol_type = other DNA
tgacagcccaaacctaatttaa

SEQ ID NO: 51421 - DNA, 22 bp, synthetic construct
  misc_feature 1..22: note = chemically synthesized
  source 1..22: mol_type = other DNA
atttaaagattcctatgtgcaa

SEQ ID NO: 51422 - DNA, 22 bp, synthetic construct
  misc_feature 1..22: note = chemically synthesized
  source 1..22: mol_type = other DNA
aaagattcctatgtgcaataag

SEQ ID NO: 51423 - DNA, 22 bp, synthetic construct
  misc_feature 1..22: note = chemically synthesized
  source 1..22: mol_type = other DNA
aagattcctatgtgcaataagc

SEQ ID NO: 51424 - DNA, 22 bp, synthetic construct
  misc_feature 1..22: note = chemically synthesized
  source 1..22: mol_type = other DNA
ctatgtgcaataagccaaaacc

SEQ ID NO: 51425 - DNA, 22 bp, synthetic construct
  misc_feature 1..22: note = chemically synthesized
  source 1..22: mol_type = other DNA
tgtgcaataagccaaaacctca

SEQ ID NO: 51426 - DNA, 22 bp, synthetic construct
  misc_feature 1..22: note = chemically synthesized
  source 1..22: mol_type = other DNA
aaatctgacatgatgggataat

SEQ ID NO: 51427 - DNA, 22 bp, synthetic construct
  misc_feature 1..22: note = chemically synthesized
  source 1..22: mol_type = other DNA
acatgatgggataatgtttggg

SEQ ID NO: 51428 - DNA, 22 bp, synthetic construct
  misc_feature 1..22: note = chemically synthesized
  source 1..22: mol_type = other DNA
gggtcttttctataagggaaca

SEQ ID NO: 51429 - DNA, 22 bp, synthetic construct
  misc_feature 1..22: note = chemically synthesized
  source 1..22: mol_type = other DNA
ggtcttttctataagggaacag

SEQ ID NO: 51430 - DNA, 22 bp, synthetic construct
  misc_feature 1..22: note = chemically synthesized
  source 1..22: mol_type = other DNA
ttctataagggaacagcagttt

SEQ ID NO: 51431 - DNA, 22 bp, synthetic construct
  misc_feature 1..22: note = chemically synthesized
  source 1..22: mol_type = other DNA
tctataagggaacagcagtttc

SEQ ID NO: 51432 - DNA, 22 bp, synthetic construct
  misc_feature 1..22: note = chemically synthesized
  source 1..22: mol_type = other DNA
ctataagggaacagcagtttca

SEQ ID NO: 51433 - DNA, 22 bp, synthetic construct
  misc_feature 1..22: note = chemically synthesized
  source 1..22: mol_type = other DNA
tataagggaacagcagtttcac

SEQ ID NO: 51434 - DNA, 22 bp, synthetic construct
  misc_feature 1..22: note = chemically synthesized
  source 1..22: mol_type = other DNA
taagggaacagcagtttcacat

SEQ ID NO: 51435 - DNA, 22 bp, synthetic construct
  misc_feature 1..22: note = chemically synthesized
  source 1..22: mol_type = other DNA
cacattcagtaatcttccatga

SEQ ID NO: 51436 - DNA, 22 bp, synthetic construct
  misc_feature 1..22: note = chemically synthesized
  source 1..22: mol_type = other DNA
acattcagtaatcttccatgaa

SEQ ID NO: 51437 - DNA, 22 bp, synthetic construct
  misc_feature 1..22: note = chemically synthesized
  source 1..22: mol_type = other DNA
agtaatcttccatgaatatttc

SEQ ID NO: 51438 - DNA, 22 bp, synthetic construct
  misc_feature 1..22: note = chemically synthesized
  source 1..22: mol_type = other DNA
ccatgaatatttccccccatca

SEQ ID NO: 51439 - DNA, 22 bp, synthetic construct
  misc_feature 1..22: note = chemically synthesized
  source 1..22: mol_type = other DNA
catgaatatttccccccatcat

SEQ ID NO: 51440 - DNA, 22 bp, synthetic construct
  misc_feature 1..22: note = chemically synthesized
  source 1..22: mol_type = other DNA
ccccccatcataaaatatgaga

SEQ ID NO: 51441 - DNA, 22 bp, synthetic construct
  misc_feature 1..22: note = chemically synthesized
  source 1..22: mol_type = other DNA
cccccatcataaaatatgagac

SEQ ID NO: 51442 - DNA, 22 bp, synthetic construct
  misc_feature 1..22: note = chemically synthesized
  source 1..22: mol_type = other DNA
aaaaaaaagaaaacaaaacaaa

SEQ ID NO: 51443 - DNA, 22 bp, synthetic construct
  misc_feature 1..22: note = chemically synthesized
  source 1..22: mol_type = other DNA
ttgaaagctctgactgcaagtc

SEQ ID NO: 51444 - DNA, 22 bp, synthetic construct
  misc_feature 1..22: note = chemically synthesized
  source 1..22: mol_type = other DNA
aaagctctgactgcaagtcaaa

SEQ ID NO: 51445 - DNA, 22 bp, synthetic construct
  misc_feature 1..22: note = chemically synthesized
  source 1..22: mol_type = other DNA
tgactgcaagtcaaaggctgct

SEQ ID NO: 51446 - DNA, 22 bp, synthetic construct
  misc_feature 1..22: note = chemically synthesized
  source 1..22: mol_type = other DNA
actgcaagtcaaaggctgctga

SEQ ID NO: 51447 - DNA, 22 bp, synthetic construct
  misc_feature 1..22: note = chemically synthesized
  source 1..22: mol_type = other DNA
caagtcaaaggctgctgatatc

SEQ ID NO: 51448 - DNA, 22 bp, synthetic construct
  misc_feature 1..22: note = chemically synthesized
  source 1..22: mol_type = other DNA
ctgatatctgagggtggatatt

SEQ ID NO: 51449 - DNA, 22 bp, synthetic construct
  misc_feature 1..22: note = chemically synthesized
  source 1..22: mol_type = other DNA
atatctgagggtggatatttga

SEQ ID NO: 51450 - DNA, 22 bp, synthetic construct
  misc_feature 1..22: note = chemically synthesized
  source 1..22: mol_type = other DNA
agggtggatatttgacacacat

SEQ ID NO: 51451 - DNA, 22 bp, synthetic construct
  misc_feature 1..22: note = chemically synthesized
  source 1..22: mol_type = other DNA
gacacacatattgatgaactgg

SEQ ID NO: 51452 - DNA, 22 bp, synthetic construct
  misc_feature 1..22: note = chemically synthesized
  source 1..22: mol_type = other DNA
acacacatattgatgaactggg

SEQ ID NO: 51453 - DNA, 22 bp, synthetic construct
  misc_feature 1..22: note = chemically synthesized
  source 1..22: mol_type = other DNA
atgaactgggcccacacaacat

SEQ ID NO: 51454 - DNA, 22 bp, synthetic construct
  misc_feature 1..22: note = chemically synthesized
  source 1..22: mol_type = other DNA
ggcccacacaacataagctgct

SEQ ID NO: 51455 - DNA, 22 bp, synthetic construct
  misc_feature 1..22: note = chemically synthesized
  source 1..22: mol_type = other DNA
ctaattcccagctaaattaata

SEQ ID NO: 51456 - DNA, 22 bp, synthetic construct
  misc_feature 1..22: note = chemically synthesized
  source 1..22: mol_type = other DNA
attcccagctaaattaatacta

SEQ ID NO: 51457 - DNA, 22 bp, synthetic construct
  misc_feature 1..22: note = chemically synthesized
  source 1..22: mol_type = other DNA
ccagctaaattaatactacttc

SEQ ID NO: 51458 - DNA, 22 bp, synthetic construct
  misc_feature 1..22: note = chemically synthesized
  source 1..22: mol_type = other DNA
aattaatactacttcaatgatc

SEQ ID NO: 51459 - DNA, 22 bp, synthetic construct
  misc_feature 1..22: note = chemically synthesized
  source 1..22: mol_type = other DNA
atactacttcaatgatctcaat

SEQ ID NO: 51460 - DNA, 22 bp, synthetic construct
  misc_feature 1..22: note = chemically synthesized
  source 1..22: mol_type = other DNA
cttcaatgatctcaatggatca

SEQ ID NO: 51461 - DNA, 22 bp, synthetic construct
  misc_feature 1..22: note = chemically synthesized
  source 1..22: mol_type = other DNA
caatgatctcaatggatcacaa

SEQ ID NO: 51462 - DNA, 22 bp, synthetic construct
  misc_feature 1..22: note = chemically synthesized
  source 1..22: mol_type = other DNA
aatgatctcaatggatcacaat

SEQ ID NO: 51463 - DNA, 22 bp, synthetic construct
  misc_feature 1..22: note = chemically synthesized
  source 1..22: mol_type = other DNA
aatggatcacaatcacacaata

SEQ ID NO: 51464 - DNA, 22 bp, synthetic construct
  misc_feature 1..22: note = chemically synthesized
  source 1..22: mol_type = other DNA
tgaatatttaaataaaatgaaa

SEQ ID NO: 51465 - DNA, 22 bp, synthetic construct
  misc_feature 1..22: note = chemically synthesized
  source 1..22: mol_type = other DNA
gaatatttaaataaaatgaaaa

SEQ ID NO: 51466 - DNA, 22 bp, synthetic construct
  misc_feature 1..22: note = chemically synthesized
  source 1..22: mol_type = other DNA
aatatttaaataaaatgaaaaa

SEQ ID NO: 51467 - DNA, 22 bp, synthetic construct
  misc_feature 1..22: note = chemically synthesized
  source 1..22: mol_type = other DNA
aaataaaatgaaaaaagcaacc

SEQ ID NO: 51468 - DNA, 22 bp, synthetic construct
  misc_feature 1..22: note = chemically synthesized
  source 1..22: mol_type = other DNA
aataaaatgaaaaaagcaacct

SEQ ID NO: 51469 - DNA, 22 bp, synthetic construct
  misc_feature 1..22: note = chemically synthesized
  source 1..22: mol_type = other DNA
attaacatctatgtgtacagct

SEQ ID NO: 51470 - DNA, 22 bp, synthetic construct
  misc_feature 1..22: note = chemically synthesized
  source 1..22: mol_type = other DNA
acatctatgtgtacagctcata

SEQ ID NO: 51471 - DNA, 22 bp, synthetic construct
  misc_feature 1..22: note = chemically synthesized
  source 1..22: mol_type = other DNA
tgtgtacagctcatatgtgtac

SEQ ID NO: 51472 - DNA, 22 bp, synthetic construct
  misc_feature 1..22: note = chemically synthesized
  source 1..22: mol_type = other DNA
atatgtgtacgtggatgaagtg

SEQ ID NO: 51473 - DNA, 22 bp, synthetic construct
  misc_feature 1..22: note = chemically synthesized
  source 1..22: mol_type = other DNA
ttcaccaggtaaaaagaatcct

SEQ ID NO: 51474 - DNA, 22 bp, synthetic construct
  misc_feature 1..22: note = chemically synthesized
  source 1..22: mol_type = other DNA
accaggtaaaaagaatcctcta

SEQ ID NO: 51475 - DNA, 22 bp, synthetic construct
  misc_feature 1..22: note = chemically synthesized
  source 1..22: mol_type = other DNA
taaaaaatactcagtttgggcc

SEQ ID NO: 51476 - DNA, 22 bp, synthetic construct
  misc_feature 1..22: note = chemically synthesized
  source 1..22: mol_type = other DNA
aaaaatactcagtttgggccag

SEQ ID NO: 51477 - DNA, 22 bp, synthetic construct
  misc_feature 1..22: note = chemically synthesized
  source 1..22: mol_type = other DNA
agtttgggccaggtgcggtcgc

SEQ ID NO: 51478 - DNA, 22 bp, synthetic construct
  misc_feature 1..22: note = chemically synthesized
  source 1..22: mol_type = other DNA
gggccaggtgcggtcgctcaag

SEQ ID NO: 51479 - DNA, 22 bp, synthetic construct
  misc_feature 1..22: note = chemically synthesized
  source 1..22: mol_type = other DNA
ggccaggtgcggtcgctcaagc

SEQ ID NO: 51480 - DNA, 22 bp, synthetic construct
  misc_feature 1..22: note = chemically synthesized
  source 1..22: mol_type = other DNA
aagcctgtaatcccagcacttt

SEQ ID NO: 51481 - DNA, 22 bp, synthetic construct
  misc_feature 1..22: note = chemically synthesized
  source 1..22: mol_type = other DNA
taatcccagcactttgggaggc

SEQ ID NO: 51482 - DNA, 22 bp, synthetic construct
  misc_feature 1..22: note = chemically synthesized
  source 1..22: mol_type = other DNA
tgggaggccaagccaggtggat

SEQ ID NO: 51483 - DNA, 22 bp, synthetic construct
  misc_feature 1..22: note = chemically synthesized
  source 1..22: mol_type = other DNA
gggaggccaagccaggtggatc

SEQ ID NO: 51484 - DNA, 22 bp, synthetic construct
  misc_feature 1..22: note = chemically synthesized
  source 1..22: mol_type = other DNA
ggaggccaagccaggtggatca

SEQ ID NO: 51485 - DNA, 22 bp, synthetic construct
  misc_feature 1..22: note = chemically synthesized
  source 1..22: mol_type = other DNA
aggtcaggagttcaagaccagc

SEQ ID NO: 51486 - DNA, 22 bp, synthetic construct
  misc_feature 1..22: note = chemically synthesized
  source 1..22: mol_type = other DNA
aagaccagcctggccaacatgg

SEQ ID NO: 51487 - DNA, 22 bp, synthetic construct
  misc_feature 1..22: note = chemically synthesized
  source 1..22: mol_type = other DNA
gccaacatggtgaaaccctgcc

SEQ ID NO: 51488 - DNA, 22 bp, synthetic construct
  misc_feature 1..22: note = chemically synthesized
  source 1..22: mol_type = other DNA
cctctactgaaaatacaaaaaa

SEQ ID NO: 51489 - DNA, 22 bp, synthetic construct
  misc_feature 1..22: note = chemically synthesized
  source 1..22: mol_type = other DNA
tactgaaaatacaaaaaactag

SEQ ID NO: 51490 - DNA, 22 bp, synthetic construct
  misc_feature 1..22: note = chemically synthesized
  source 1..22: mol_type = other DNA
ctgaaaatacaaaaaactagct

SEQ ID NO: 51491 - DNA, 22 bp, synthetic construct
  misc_feature 1..22: note = chemically synthesized
  source 1..22: mol_type = other DNA
aaaatacaaaaaactagctggg

SEQ ID NO: 51492 - DNA, 22 bp, synthetic construct
  misc_feature 1..22: note = chemically synthesized
  source 1..22: mol_type = other DNA
gctgggcgtagtggcacacgcc

SEQ ID NO: 51493 - DNA, 22 bp, synthetic construct
  misc_feature 1..22: note = chemically synthesized
  source 1..22: mol_type = other DNA
ggcgtagtggcacacgcctgta

SEQ ID NO: 51494 - DNA, 22 bp, synthetic construct
  misc_feature 1..22: note = chemically synthesized
  source 1..22: mol_type = other DNA
taatcccagctacttgggaggc

SEQ ID NO: 51495 - DNA, 22 bp, synthetic construct
  misc_feature 1..22: note = chemically synthesized
  source 1..22: mol_type = other DNA
cttgggaggctgaggcaggaga

SEQ ID NO: 51496 - DNA, 22 bp, synthetic construct
  misc_feature 1..22: note = chemically synthesized
  source 1..22: mol_type = other DNA
gggaggctgaggcaggagaatc

SEQ ID NO: 51497 - DNA, 22 bp, synthetic construct
  misc_feature 1..22: note = chemically synthesized
  source 1..22: mol_type = other DNA
ggaggctgaggcaggagaatcg

SEQ ID NO: 51498 - DNA, 22 bp, synthetic construct
  misc_feature 1..22: note = chemically synthesized
  source 1..22: mol_type = other DNA
aggcaggagaatcgcttgaacc

SEQ ID NO: 51499 - DNA, 22 bp, synthetic construct
  misc_feature 1..22: note = chemically synthesized
  source 1..22: mol_type = other DNA
gaacctaggaggcagaggttgc

SEQ ID NO: 51500 - DNA, 22 bp, synthetic construct
  misc_feature 1..22: note = chemically synthesized
  source 1..22: mol_type = other DNA
aacctaggaggcagaggttgca

SEQ ID NO: 51501 - DNA, 22 bp, synthetic construct
  misc_feature 1..22: note = chemically synthesized
  source 1..22: mol_type = other DNA
ggaggcagaggttgcagtgagc

SEQ ID NO: 51502 - DNA, 22 bp, synthetic construct
  misc_feature 1..22: note = chemically synthesized
  source 1..22: mol_type = other DNA
cagtgagccaaaatcatgccac

SEQ ID NO: 51503 - DNA, 22 bp, synthetic construct
  misc_feature 1..22: note = chemically synthesized
  source 1..22: mol_type = other DNA
cactccagcctgggcaacaaga

SEQ ID NO: 51504 - DNA, 22 bp, synthetic construct
  misc_feature 1..22: note = chemically synthesized
  source 1..22: mol_type = other DNA
cagcctgggcaacaagagcaaa

SEQ ID NO: 51505 - DNA, 22 bp, synthetic construct
  misc_feature 1..22: note = chemically synthesized
  source 1..22: mol_type = other DNA
ggcaacaagagcaaaactctgt

SEQ ID NO: 51506 - DNA, 22 bp, synthetic construct
  misc_feature 1..22: note = chemically synthesized
  source 1..22: mol_type = other DNA
tgtctaaaaaaaaaaaaaaaaa

SEQ ID NO: 51507 - DNA, 22 bp, synthetic construct
  misc_feature 1..22: note = chemically synthesized
  source 1..22: mol_type = other DNA
tctaaaaaaaaaaaaaaaaaaa

SEQ ID NO: 51508 - DNA, 22 bp, synthetic construct
  misc_feature 1..22: note = chemically synthesized
  source 1..22: mol_type = other DNA
aaaaaaaaaaaaaaaaaaaaaa

SEQ ID NO: 51509 - DNA, 22 bp, synthetic construct
  misc_feature 1..22: note = chemically synthesized
  source 1..22: mol_type = other DNA
agcttggagaggcctgagtaca

SEQ ID NO: 51510 - DNA, 22 bp, synthetic construct
  misc_feature 1..22: note = chemically synthesized
  source 1..22: mol_type = other DNA
ggagaggcctgagtacagtgaa

SEQ ID NO: 51511 - DNA, 22 bp, synthetic construct
  misc_feature 1..22: note = chemically synthesized
  source 1..22: mol_type = other DNA
gagaggcctgagtacagtgaaa

SEQ ID NO: 51512 - DNA, 22 bp, synthetic construct
  misc_feature 1..22: note = chemically synthesized
  source 1..22: mol_type = other DNA
agtacagtgaaaatgcatacca

SEQ ID NO: 51513 - DNA, 22 bp, synthetic construct
  misc_feature 1..22: note = chemically synthesized
  source 1..22: mol_type = other DNA
tactcaagatttaaagaactct

SEQ ID NO: 51514 - DNA, 22 bp, synthetic construct
  misc_feature 1..22: note = chemically synthesized
  source 1..22: mol_type = other DNA
actcaagatttaaagaactctg

SEQ ID NO: 51515 - DNA, 22 bp, synthetic construct
  misc_feature 1..22: note = chemically synthesized
  source 1..22: mol_type = other DNA
ctcaagatttaaagaactctgc

SEQ ID NO: 51516 - DNA, 22 bp, synthetic construct
  misc_feature 1..22: note = chemically synthesized
  source 1..22: mol_type = other DNA
aagatttaaagaactctgcctt

SEQ ID NO: 51517 - DNA, 22 bp, synthetic construct
  misc_feature 1..22: note = chemically synthesized
  source 1..22: mol_type = other DNA
aaagaactctgccttattctcc

SEQ ID NO: 51518 - DNA, 22 bp, synthetic construct
  misc_feature 1..22: note = chemically synthesized
  source 1..22: mol_type = other DNA
aagaactctgccttattctcct

SEQ ID NO: 51519 - DNA, 22 bp, synthetic construct
  misc_feature 1..22: note = chemically synthesized
  source 1..22: mol_type = other DNA
tgccttattctcctatctgaaa

SEQ ID NO: 51520 - DNA, 22 bp, synthetic construct
  misc_feature 1..22: note = chemically synthesized
  source 1..22: mol_type = other DNA
ccttattctcctatctgaaagt

SEQ ID NO: 51521 - DNA, 22 bp, synthetic construct
  misc_feature 1..22: note = chemically synthesized
  source 1..22: mol_type = other DNA
attctcctatctgaaagtcccg

SEQ ID NO: 51522 - DNA, 22 bp, synthetic construct
  misc_feature 1..22: note = chemically synthesized
  source 1..22: mol_type = other DNA
ttctcctatctgaaagtcccga

SEQ ID NO: 51523 - DNA, 22 bp, synthetic construct
  misc_feature 1..22: note = chemically synthesized
  source 1..22: mol_type = other DNA
tcctatctgaaagtcccgaatt

SEQ ID NO: 51524 - DNA, 22 bp, synthetic construct
  misc_feature 1..22: note = chemically synthesized
  source 1..22: mol_type = other DNA
ctatctgaaagtcccgaattct

SEQ ID NO: 51525 - DNA, 22 bp, synthetic construct
  misc_feature 1..22: note = chemically synthesized
  source 1..22: mol_type = other DNA
tctgaaagtcccgaattctaag

SEQ ID NO: 51526 - DNA, 22 bp, synthetic construct
  misc_feature 1..22: note = chemically synthesized
  source 1..22: mol_type = other DNA
aaagtcccgaattctaagcttt

SEQ ID NO: 51527 - DNA, 22 bp, synthetic construct
  misc_feature 1..22: note = chemically synthesized
  source 1..22: mol_type = other DNA
taagctttatttatcttaggaa

SEQ ID NO: 51528 - DNA, 22 bp, synthetic construct
  misc_feature 1..22: note = chemically synthesized
  source 1..22: mol_type = other DNA
agctttatttatcttaggaaga

SEQ ID NO: 51529 - DNA, 22 bp, synthetic construct
  misc_feature 1..22: note = chemically synthesized
  source 1..22: mol_type = other DNA
tatttatcttaggaagaagatc

SEQ ID NO: 51530 - DNA, 22 bp, synthetic construct
  misc_feature 1..22: note = chemically synthesized
  source 1..22: mol_type = other DNA
atttatcttaggaagaagatct

SEQ ID NO: 51531 - DNA, 22 bp, synthetic construct
  misc_feature 1..22: note = chemically synthesized
  source 1..22: mol_type = other DNA
tttatcttaggaagaagatctg

SEQ ID NO: 51532 - DNA, 22 bp, synthetic construct
  misc_feature 1..22: note = chemically synthesized
  source 1..22: mol_type = other DNA
atcttaggaagaagatctgtca

SEQ ID NO: 51533 - DNA, 22 bp, synthetic construct
  misc_feature 1..22: note = chemically synthesized
  source 1..22: mol_type = other DNA
tcttaggaagaagatctgtcac

SEQ ID NO: 51534 - DNA, 22 bp, synthetic construct
  misc_feature 1..22: note = chemically synthesized
  source 1..22: mol_type = other DNA
aggaagaagatctgtcactgtt

SEQ ID NO: 51535 - DNA, 22 bp, synthetic construct
  misc_feature 1..22: note = chemically synthesized
  source 1..22: mol_type = other DNA
ggaagaagatctgtcactgttt

SEQ ID NO: 51536 - DNA, 22 bp, synthetic construct
  misc_feature 1..22: note = chemically synthesized
  source 1..22: mol_type = other DNA
tcactgttttattcttgcttcc

SEQ ID NO: 51537 - DNA, 22 bp, synthetic construct
  misc_feature 1..22: note = chemically synthesized
  source 1..22: mol_type = other DNA
ttttattcttgcttcctgccta

SEQ ID NO: 51538 - DNA, 22 bp, synthetic construct
  misc_feature 1..22: note = chemically synthesized
  source 1..22: mol_type = other DNA
tattcttgcttcctgcctataa

SEQ ID NO: 51539 - DNA, 22 bp, synthetic construct
  misc_feature 1..22: note = chemically synthesized
  source 1..22: mol_type = other DNA
attcttgcttcctgcctataaa

SEQ ID NO: 51540 - DNA, 22 bp, synthetic construct
  misc_feature 1..22: note = chemically synthesized
  source 1..22: mol_type = other DNA
ttcttgcttcctgcctataaaa

SEQ ID NO: 51541 - DNA, 22 bp, synthetic construct
  misc_feature 1..22: note = chemically synthesized
  source 1..22: mol_type = other DNA
ttgcttcctgcctataaaatag

SEQ ID NO: 51542 - DNA, 22 bp, synthetic construct
  misc_feature 1..22: note = chemically synthesized
  source 1..22: mol_type = other DNA
gcttcctgcctataaaatagta

SEQ ID NO: 51543 - DNA, 22 bp, synthetic construct
  misc_feature 1..22: note = chemically synthesized
  source 1..22: mol_type = other DNA
cttcctgcctataaaatagtac

SEQ ID NO: 51544 - DNA, 22 bp, synthetic construct
  misc_feature 1..22: note = chemically synthesized
  source 1..22: mol_type = other DNA
cctgcctataaaatagtacagg

SEQ ID NO: 51545 - DNA, 22 bp, synthetic construct
  misc_feature 1..22: note = chemically synthesized
  source 1..22: mol_type = other DNA
ctgcctataaaatagtacaggc

SEQ ID NO: 51546 - DNA, 22 bp, synthetic construct
  misc_feature 1..22: note = chemically synthesized
  source 1..22: mol_type = other DNA
cctataaaatagtacaggctca

SEQ ID NO: 51547 - DNA, 22 bp, synthetic construct
  misc_feature 1..22: note = chemically synthesized
  source 1..22: mol_type = other DNA
taaaatagtacaggctcacagt

SEQ ID NO: 51548 - DNA, 22 bp, synthetic construct
  misc_feature 1..22: note = chemically synthesized
  source 1..22: mol_type = other DNA
acagtgaactcaaatccaactt

SEQ ID NO: 51549 - DNA, 22 bp, synthetic construct
  misc_feature 1..22: note = chemically synthesized
  source 1..22: mol_type = other DNA
aaatccaacttacatcacttta

SEQ ID NO: 51550 - DNA, 22 bp, synthetic construct
  misc_feature 1..22: note = chemically synthesized
  source 1..22: mol_type = other DNA
acatcactttaataaagccttt

SEQ ID NO: 51551 - DNA, 22 bp, synthetic construct
  misc_feature 1..22: note = chemically synthesized
  source 1..22: mol_type = other DNA
catcactttaataaagcctttc

SEQ ID NO: 51552 - DNA, 22 bp, synthetic construct
  misc_feature 1..22: note = chemically synthesized
  source 1..22: mol_type = other DNA
taataaagcctttcctacccag

SEQ ID NO: 51553 - DNA, 22 bp, synthetic construct
  misc_feature 1..22: note = chemically synthesized
  source 1..22: mol_type = other DNA
aataaagcctttcctacccagc

SEQ ID NO: 51554 - DNA, 22 bp, synthetic construct
  misc_feature 1..22: note = chemically synthesized
  source 1..22: mol_type = other DNA
ataaagcctttcctacccagca

SEQ ID NO: 51555 - DNA, 22 bp, synthetic construct
  misc_feature 1..22: note = chemically synthesized
  source 1..22: mol_type = other DNA
tcctacccagcacgcttaaatg

SEQ ID NO: 51556 - DNA, 22 bp, synthetic construct
  misc_feature 1..22: note = chemically synthesized
  source 1..22: mol_type = other DNA
cctacccagcacgcttaaatga

SEQ ID NO: 51557 - DNA, 22 bp, synthetic construct
  misc_feature 1..22: note = chemically synthesized
  source 1..22: mol_type = other DNA
ctacccagcacgcttaaatgac

SEQ ID NO: 51558 - DNA, 22 bp, synthetic construct
  misc_feature 1..22: note = chemically synthesized
  source 1..22: mol_type = other DNA
cccagcacgcttaaatgactac

SEQ ID NO: 51559 - DNA, 22 bp, synthetic construct
  misc_feature 1..22: note = chemically synthesized
  source 1..22: mol_type = other DNA
aaatgactaccttttatgtggt

SEQ ID NO: 51560 - DNA, 22 bp, synthetic construct
  misc_feature 1..22: note = chemically synthesized
  source 1..22: mol_type = other DNA
aatgactaccttttatgtggtt

SEQ ID NO: 51561 - DNA, 22 bp, synthetic construct
  misc_feature 1..22: note = chemically synthesized
  source 1..22: mol_type = other DNA
ccttttatgtggttgccaaaca

SEQ ID NO: 51562 - DNA, 22 bp, synthetic construct
  misc_feature 1..22: note = chemically synthesized
  source 1..22: mol_type = other DNA
ttatgtggttgccaaacacatt

SEQ ID NO: 51563 - DNA, 22 bp, synthetic construct
  misc_feature 1..22: note = chemically synthesized
  source 1..22: mol_type = other DNA
tatgtggttgccaaacacattc

SEQ ID NO: 51564 - DNA, 22 bp, synthetic construct
  misc_feature 1..22: note = chemically synthesized
  source 1..22: mol_type = other DNA
atgtggttgccaaacacattct

SEQ ID NO: 51565 - DNA, 22 bp, synthetic construct
  misc_feature 1..22: note = chemically synthesized
  source 1..22: mol_type = other DNA
tgtggttgccaaacacattctt

SEQ ID NO: 51566 - DNA, 22 bp, synthetic construct
  misc_feature 1..22: note = chemically synthesized
  source 1..22: mol_type = other DNA
ccaaacacattcttctagagat

SEQ ID NO: 51567 - DNA, 22 bp, synthetic construct
  misc_feature 1..22: note = chemically synthesized
  source 1..22: mol_type = other DNA
ttctagagattcatcaatatat

SEQ ID NO: 51568 - DNA, 22 bp, synthetic construct
  misc_feature 1..22: note = chemically synthesized
  source 1..22: mol_type = other DNA
ctagagattcatcaatatatct

SEQ ID NO: 51569 - DNA, 22 bp, synthetic construct
  misc_feature 1..22: note = chemically synthesized
  source 1..22: mol_type = other DNA
tagagattcatcaatatatctc

SEQ ID NO: 51570 - DNA, 22 bp, synthetic construct
  misc_feature 1..22: note = chemically synthesized
  source 1..22: mol_type = other DNA
gagattcatcaatatatctctt

SEQ ID NO: 51571 - DNA, 22 bp, synthetic construct
  misc_feature 1..22: note = chemically synthesized
  source 1..22: mol_type = other DNA
atcaatatatctctttccttaa

SEQ ID NO: 51572 - DNA, 22 bp, synthetic construct
  misc_feature 1..22: note = chemically synthesized
  source 1..22: mol_type = other DNA
tttccttaatacaaggcattgc

SEQ ID NO: 51573 - DNA, 22 bp, synthetic construct
  misc_feature 1..22: note = chemically synthesized
  source 1..22: mol_type = other DNA
tccttaatacaaggcattgctt

SEQ ID NO: 51574 - DNA, 22 bp, synthetic construct
  misc_feature 1..22: note = chemically synthesized
  source 1..22: mol_type = other DNA
ccttaatacaaggcattgcttc

SEQ ID NO: 51575 - DNA, 22 bp, synthetic construct
  misc_feature 1..22: note = chemically synthesized
  source 1..22: mol_type = other DNA
cttaatacaaggcattgcttct

SEQ ID NO: 51576 - DNA, 22 bp, synthetic construct
  misc_feature 1..22: note = chemically synthesized
  source 1..22: mol_type = other DNA
aatacaaggcattgcttctcct

SEQ ID NO: 51577 - DNA, 22 bp, synthetic construct
  misc_feature 1..22: note = chemically synthesized
  source 1..22: mol_type = other DNA
atacaaggcattgcttctcctt

SEQ ID NO: 51578 - DNA, 22 bp, synthetic construct
  misc_feature 1..22: note = chemically synthesized
  source 1..22: mol_type = other DNA
cttctcctttctttttgtgaca

SEQ ID NO: 51579 - DNA, 22 bp, synthetic construct
  misc_feature 1..22: note = chemically synthesized
  source 1..22: mol_type = other DNA
ctcctttctttttgtgacacaa

SEQ ID NO: 51580 - DNA, 22 bp, synthetic construct
  misc_feature 1..22: note = chemically synthesized
  source 1..22: mol_type = other DNA
tcctttctttttgtgacacaat

SEQ ID NO: 51581 - DNA, 22 bp, synthetic construct
  misc_feature 1..22: note = chemically synthesized
  source 1..22: mol_type = other DNA
ctttctttttgtgacacaattc

SEQ ID NO: 51582 - DNA, 22 bp, synthetic construct
  misc_feature 1..22: note = chemically synthesized
  source 1..22: mol_type = other DNA
tctttttgtgacacaattcaaa

SEQ ID NO: 51583 - DNA, 22 bp, synthetic construct
  misc_feature 1..22: note = chemically synthesized
  source 1..22: mol_type = other DNA
ctttttgtgacacaattcaaat

SEQ ID NO: 51584 - DNA, 22 bp, synthetic construct
  misc_feature 1..22: note = chemically synthesized
  source 1..22: mol_type = other DNA
tttttgtgacacaattcaaata

SEQ ID NO: 51585 - DNA, 22 bp, synthetic construct
  misc_feature 1..22: note = chemically synthesized
  source 1..22: mol_type = other DNA
tttgtgacacaattcaaatatc

SEQ ID NO: 51586 - DNA, 22 bp, synthetic construct
  misc_feature 1..22: note = chemically synthesized
  source 1..22: mol_type = other DNA
ttgtgacacaattcaaatatct

SEQ ID NO: 51587 - DNA, 22 bp, synthetic construct
  misc_feature 1..22: note = chemically synthesized
  source 1..22: mol_type = other DNA
tgtgacacaattcaaatatcta

SEQ ID NO: 51588 - DNA, 22 bp, synthetic construct
  misc_feature 1..22: note = chemically synthesized
  source 1..22: mol_type = other DNA
gtgacacaattcaaatatctac

SEQ ID NO: 51589 - DNA, 22 bp, synthetic construct
  misc_feature 1..22: note = chemically synthesized
  source 1..22: mol_type = other DNA
tgacacaattcaaatatctact

SEQ ID NO: 51590 - DNA, 22 bp, synthetic construct
  misc_feature 1..22: note = chemically synthesized
  source 1..22: mol_type = other DNA
aaatatctactgaatgattact

SEQ ID NO: 51591 - DNA, 22 bp, synthetic construct
  misc_feature 1..22: note = chemically synthesized
  source 1..22: mol_type = other DNA
ctgaatgattactgttattgtt

SEQ ID NO: 51592 - DNA, 22 bp, synthetic construct
  misc_feature 1..22: note = chemically synthesized
  source 1..22: mol_type = other DNA
aatgattactgttattgtttcc

SEQ ID NO: 51593 - DNA, 22 bp, synthetic construct
  misc_feature 1..22: note = chemically synthesized
  source 1..22: mol_type = other DNA
ctgttattgtttccttcctcat

SEQ ID NO: 51594 - DNA, 22 bp, synthetic construct
  misc_feature 1..22: note = chemically synthesized
  source 1..22: mol_type = other DNA
ttattgtttccttcctcatcat

SEQ ID NO: 51595 - DNA, 22 bp, synthetic construct
  misc_feature 1..22: note = chemically synthesized
  source 1..22: mol_type = other DNA
ttgtttccttcctcatcataaa

SEQ ID NO: 51596 - DNA, 22 bp, synthetic construct
  misc_feature 1..22: note = chemically synthesized
  source 1..22: mol_type = other DNA
tttccttcctcatcataaaaag

SEQ ID NO: 51597 - DNA, 22 bp, synthetic construct
  misc_feature 1..22: note = chemically synthesized
  source 1..22: mol_type = other DNA
ccttcctcatcataaaaagaaa

SEQ ID NO: 51598 - DNA, 22 bp, synthetic construct
  misc_feature 1..22: note = chemically synthesized
  source 1..22: mol_type = other DNA
cttcctcatcataaaaagaaaa

SEQ ID NO: 51599 - DNA, 22 bp, synthetic construct
  misc_feature 1..22: note = chemically synthesized
  source 1..22: mol_type = other DNA
cctcatcataaaaagaaaagca

SEQ ID NO: 51600 - DNA, 22 bp, synthetic construct
  misc_feature 1..22: note = chemically synthesized
  source 1..22: mol_type = other DNA
ctcatcataaaaagaaaagcag

SEQ ID NO: 51601 - DNA, 22 bp, synthetic construct
  misc_feature 1..22: note = chemically synthesized
  source 1..22: mol_type = other DNA
atcataaaaagaaaagcagact

SEQ ID NO: 51602 - DNA, 22 bp, synthetic construct
  misc_feature 1..22: note = chemically synthesized
  source 1..22: mol_type = other DNA
ggaattgtgcagacgtgcttta

SEQ ID NO: 51603 - DNA, 22 bp, synthetic construct
  misc_feature 1..22: note = chemically synthesized
  source 1..22: mol_type = other DNA
gaattgtgcagacgtgctttag

SEQ ID NO: 51604 - DNA, 22 bp, synthetic construct
  misc_feature 1..22: note = chemically synthesized
  source 1..22: mol_type = other DNA
tgcagacgtgctttagagaaat

SEQ ID NO: 51605 - DNA, 22 bp, synthetic construct
  misc_feature 1..22: note = chemically synthesized
  source 1..22: mol_type = other DNA
tagagaaatgggctgggggtac

SEQ ID NO: 51606 - DNA, 22 bp, synthetic construct
  misc_feature 1..22: note = chemically synthesized
  source 1..22: mol_type = other DNA
agagaaatgggctgggggtaca

SEQ ID NO: 51607 - DNA, 22 bp, synthetic construct
  misc_feature 1..22: note = chemically synthesized
  source 1..22: mol_type = other DNA
gagaaatgggctgggggtacac

SEQ ID NO: 51608 - DNA, 22 bp, synthetic construct
  misc_feature 1..22: note = chemically synthesized
  source 1..22: mol_type = other DNA
ggggtacacacacagccgtctt

SEQ ID NO: 51609 - DNA, 22 bp, synthetic construct
  misc_feature 1..22: note = chemically synthesized
  source 1..22: mol_type = other DNA
ccagaacttcgcttcaggggca

SEQ ID NO: 51610 - DNA, 22 bp, synthetic construct
  misc_feature 1..22: note = chemically synthesized
  source 1..22: mol_type = other DNA
cagaacttcgcttcaggggcac

SEQ ID NO: 51611 - DNA, 22 bp, synthetic construct
  misc_feature 1..22: note = chemically synthesized
  source 1..22: mol_type = other DNA
cgcttcaggggcacctgagggc

SEQ ID NO: 51612 - DNA, 22 bp, synthetic construct
  misc_feature 1..22: note = chemically synthesized
  source 1..22: mol_type = other DNA
gcttcaggggcacctgagggcc

SEQ ID NO: 51613 - DNA, 22 bp, synthetic construct
  misc_feature 1..22: note = chemically synthesized
  source 1..22: mol_type = other DNA
caggggcacctgagggccagag

SEQ ID NO: 51614 - DNA, 22 bp, synthetic construct
  misc_feature 1..22: note = chemically synthesized
  source 1..22: mol_type = other DNA
aggggcacctgagggccagagc

SEQ ID NO: 51615 - DNA, 22 bp, synthetic construct
  misc_feature 1..22: note = chemically synthesized
  source 1..22: mol_type = other DNA
agggccagagcgtcggaattta

SEQ ID NO: 51616 - DNA, 22 bp, synthetic construct
  misc_feature 1..22: note = chemically synthesized
  source 1..22: mol_type = other DNA
atgtgcaatggtagaatgttaa

SEQ ID NO: 51617 - DNA, 22 bp, synthetic construct
  misc_feature 1..22: note = chemically synthesized
  source 1..22: mol_type = other DNA
tgtgcaatggtagaatgttaac

SEQ ID NO: 51618 - DNA, 22 bp, synthetic construct
  misc_feature 1..22: note = chemically synthesized
  source 1..22: mol_type = other DNA
acttcaccataggaaactctta

SEQ ID NO: 51619 - DNA, 22 bp, synthetic construct
  misc_feature 1..22: note = chemically synthesized
  source 1..22: mol_type = other DNA
caccataggaaactcttaattc

SEQ ID NO: 51620 - DNA, 22 bp, synthetic construct
  misc_feature 1..22: note = chemically synthesized
  source 1..22: mol_type = other DNA
accataggaaactcttaattca

SEQ ID NO: 51621 - DNA, 22 bp, synthetic construct
  misc_feature 1..22: note = chemically synthesized
  source 1..22: mol_type = other DNA
ttaattcattactgtgaattat

SEQ ID NO: 51622 - DNA, 22 bp, synthetic construct
  misc_feature 1..22: note = chemically synthesized
  source 1..22: mol_type = other DNA
aattcattactgtgaattatga

SEQ ID NO: 51623 - DNA, 22 bp, synthetic construct
  misc_feature 1..22: note = chemically synthesized
  source 1..22: mol_type = other DNA
attcattactgtgaattatgag

SEQ ID NO: 51624 - DNA, 22 bp, synthetic construct
  misc_feature 1..22: note = chemically synthesized
  source 1..22: mol_type = other DNA
attactgtgaattatgagaagt

SEQ ID NO: 51625 - DNA, 22 bp, synthetic construct
  misc_feature 1..22: note = chemically synthesized
  source 1..22: mol_type = other DNA
ctgtgaattatgagaagtcgtg

SEQ ID NO: 51626 - DNA, 22 bp, synthetic construct
  misc_feature 1..22: note = chemically synthesized
  source 1..22: mol_type = other DNA
tgaattatgagaagtcgtgatt

SEQ ID NO: 51627 - DNA, 22 bp, synthetic construct
  misc_feature 1..22: note = chemically synthesized
  source 1..22: mol_type = other DNA
tgagaagtcgtgattctagtta

SEQ ID NO: 51628 - DNA, 22 bp, synthetic construct
  misc_feature 1..22: note = chemically synthesized
  source 1..22: mol_type = other DNA
tagttactgacatctcactttg

SEQ ID NO: 51629 - DNA, 22 bp, synthetic construct
  misc_feature 1..22: note = chemically synthesized
  source 1..22: mol_type = other DNA
gttactgacatctcactttgag

SEQ ID NO: 51630 - DNA, 22 bp, synthetic construct
  misc_feature 1..22: note = chemically synthesized
  source 1..22: mol_type = other DNA
ctgacatctcactttgagatgt

SEQ ID NO: 51631 - DNA, 22 bp, synthetic construct
  misc_feature 1..22: note = chemically synthesized
  source 1..22: mol_type = other DNA
acatctcactttgagatgtgac

SEQ ID NO: 51632 - DNA, 22 bp, synthetic construct
  misc_feature 1..22: note = chemically synthesized
  source 1..22: mol_type = other DNA
actttgagatgtgaccacacta

SEQ ID NO: 51633 - DNA, 22 bp, synthetic construct
  misc_feature 1..22: note = chemically synthesized
  source 1..22: mol_type = other DNA
tgagatgtgaccacactattta

SEQ ID NO: 51634 - DNA, 22 bp, synthetic construct
  misc_feature 1..22: note = chemically synthesized
  source 1..22: mol_type = other DNA
gagatgtgaccacactatttat

SEQ ID NO: 51635 - DNA, 22 bp, synthetic construct
  misc_feature 1..22: note = chemically synthesized
  source 1..22: mol_type = other DNA
agatgtgaccacactatttatg

SEQ ID NO: 51636 - DNA, 22 bp, synthetic construct
  misc_feature 1..22: note = chemically synthesized
  source 1..22: mol_type = other DNA
tttatgttcagccagttccagg

SEQ ID NO: 51637 - DNA, 22 bp, synthetic construct
  misc_feature 1..22: note = chemically synthesized
  source 1..22: mol_type = other DNA
atgttcagccagttccagggtg

SEQ ID NO: 51638 - DNA, 22 bp, synthetic construct
  misc_feature 1..22: note = chemically synthesized
  source 1..22: mol_type = other DNA
tgttcagccagttccagggtgg

SEQ ID NO: 51639 - DNA, 22 bp, synthetic construct
  misc_feature 1..22: note = chemically synthesized
  source 1..22: mol_type = other DNA
agccagttccagggtgggaaca

SEQ ID NO: 51640 - DNA, 22 bp, synthetic construct
  misc_feature 1..22: note = chemically synthesized
  source 1..22: mol_type = other DNA
cagggtgggaacaggtgattaa

SEQ ID NO: 51641 - DNA, 22 bp, synthetic construct
  misc_feature 1..22: note = chemically synthesized
  source 1..22: mol_type = other DNA
aacacaatgaaagaaatcaaga

SEQ ID NO: 51642 - DNA, 22 bp, synthetic construct
  misc_feature 1..22: note = chemically synthesized
  source 1..22: mol_type = other DNA
tgtaattattcatgcacgaaag

SEQ ID NO: 51643 - DNA, 22 bp, synthetic construct
  misc_feature 1..22: note = chemically synthesized
  source 1..22: mol_type = other DNA
gtaattattcatgcacgaaagg

SEQ ID NO: 51644 - DNA, 22 bp, synthetic construct
  misc_feature 1..22: note = chemically synthesized
  source 1..22: mol_type = other DNA
taattattcatgcacgaaaggt

SEQ ID NO: 51645 - DNA, 22 bp, synthetic construct
  misc_feature 1..22: note = chemically synthesized
  source 1..22: mol_type = other DNA
ttcatgcacgaaaggtttacct

SEQ ID NO: 51646 - DNA, 22 bp, synthetic construct
  misc_feature 1..22: note = chemically synthesized
  source 1..22: mol_type = other DNA
atgcacgaaaggtttacctcac

SEQ ID NO: 51647 - DNA, 22 bp, synthetic construct
  misc_feature 1..22: note = chemically synthesized
  source 1..22: mol_type = other DNA
acctcacctgggtcacagcact

SEQ ID NO: 51648 - DNA, 22 bp, synthetic construct
  misc_feature 1..22: note = chemically synthesized
  source 1..22: mol_type = other DNA
cctcacctgggtcacagcactt

SEQ ID NO: 51649 - DNA, 22 bp, synthetic construct
  misc_feature 1..22: note = chemically synthesized
  source 1..22: mol_type = other DNA
acctgggtcacagcacttgttg

SEQ ID NO: 51650 - DNA, 22 bp, synthetic construct
  misc_feature 1..22: note = chemically synthesized
  source 1..22: mol_type = other DNA
ggtcacagcacttgttgtgcgc

SEQ ID NO: 51651 - DNA, 22 bp, synthetic construct
  misc_feature 1..22: note = chemically synthesized
  source 1..22: mol_type = other DNA
gttgtgcgcccattgaatatct

SEQ ID NO: 51652 - DNA, 22 bp, synthetic construct
  misc_feature 1..22: note = chemically synthesized
  source 1..22: mol_type = other DNA
ttgtgcgcccattgaatatctt

SEQ ID NO: 51653 - DNA, 22 bp, synthetic construct
  misc_feature 1..22: note = chemically synthesized
  source 1..22: mol_type = other DNA
tgcgcccattgaatatcttaga

SEQ ID NO: 51654 - DNA, 22 bp, synthetic construct
  misc_feature 1..22: note = chemically synthesized
  source 1..22: mol_type = other DNA
aatatcttagacatcttagaga

SEQ ID NO: 51655 - DNA, 22 bp, synthetic construct
  misc_feature 1..22: note = chemically synthesized
  source 1..22: mol_type = other DNA
agacatcttagagagcttttcg

SEQ ID NO: 51656 - DNA, 22 bp, synthetic construct
  misc_feature 1..22: note = chemically synthesized
  source 1..22: mol_type = other DNA
gacatcttagagagcttttcgt

SEQ ID NO: 51657 - DNA, 22 bp, synthetic construct
  misc_feature 1..22: note = chemically synthesized
  source 1..22: mol_type = other DNA
agagagcttttcgtctcagtta

SEQ ID NO: 51658 - DNA, 22 bp, synthetic construct
  misc_feature 1..22: note = chemically synthesized
  source 1..22: mol_type = other DNA
gagagcttttcgtctcagttaa

SEQ ID NO: 51659 - DNA, 22 bp, synthetic construct
  misc_feature 1..22: note = chemically synthesized
  source 1..22: mol_type = other DNA
ttcgtctcagttaaatgattga

SEQ ID NO: 51660 - DNA, 22 bp, synthetic construct
  misc_feature 1..22: note = chemically synthesized
  source 1..22: mol_type = other DNA
tcgtctcagttaaatgattgat

SEQ ID NO: 51661 - DNA, 22 bp, synthetic construct
  misc_feature 1..22: note = chemically synthesized
  source 1..22: mol_type = other DNA
cgtctcagttaaatgattgatt

SEQ ID NO: 51662 - DNA, 22 bp, synthetic construct
  misc_feature 1..22: note = chemically synthesized
  source 1..22: mol_type = other DNA
gtctcagttaaatgattgatta

SEQ ID NO: 51663 - DNA, 22 bp, synthetic construct
  misc_feature 1..22: note = chemically synthesized
  source 1..22: mol_type = other DNA
agttaaatgattgattattagc

SEQ ID NO: 51664 - DNA, 22 bp, synthetic construct
  misc_feature 1..22: note = chemically synthesized
  source 1..22: mol_type = other DNA
aatgattgattattagcgctat

SEQ ID NO: 51665 - DNA, 22 bp, synthetic construct
  misc_feature 1..22: note = chemically synthesized
  source 1..22: mol_type = other DNA
attattagcgctataaaatata

SEQ ID NO: 51666 - DNA, 22 bp, synthetic construct
  misc_feature 1..22: note = chemically synthesized
  source 1..22: mol_type = other DNA
ttagcgctataaaatatatttt

SEQ ID NO: 51667 - DNA, 22 bp, synthetic construct
  misc_feature 1..22: note = chemically synthesized
  source 1..22: mol_type = other DNA
gcgctataaaatatattttaaa

SEQ ID NO: 51668 - DNA, 22 bp, synthetic construct
  misc_feature 1..22: note = chemically synthesized
  source 1..22: mol_type = other DNA
taaaatatattttaaatttgct

SEQ ID NO: 51669 - DNA, 22 bp, synthetic construct
  misc_feature 1..22: note = chemically synthesized
  source 1..22: mol_type = other DNA
taaatttgcttttggttttggc

SEQ ID NO: 51670 - DNA, 22 bp, synthetic construct
  misc_feature 1..22: note = chemically synthesized
  source 1..22: mol_type = other DNA
aaatttgcttttggttttggct

SEQ ID NO: 51671 - DNA, 22 bp, synthetic construct
  misc_feature 1..22: note = chemically synthesized
  source 1..22: mol_type = other DNA
aatttgcttttggttttggctt

SEQ ID NO: 51672 - DNA, 22 bp, synthetic construct
  misc_feature 1..22: note = chemically synthesized
  source 1..22: mol_type = other DNA
gcttttggttttggcttctcta

SEQ ID NO: 51673 - DNA, 22 bp, synthetic construct
  misc_feature 1..22: note = chemically synthesized
  source 1..22: mol_type = other DNA
cttttggttttggcttctctag

SEQ ID NO: 51674 - DNA, 22 bp, synthetic construct
  misc_feature 1..22: note = chemically synthesized
  source 1..22: mol_type = other DNA
ttggttttggcttctctaggct

SEQ ID NO: 51675 - DNA, 22 bp, synthetic construct
  misc_feature 1..22: note = chemically synthesized
  source 1..22: mol_type = other DNA
tggttttggcttctctaggctc

SEQ ID NO: 51676 - DNA, 22 bp, synthetic construct
  misc_feature 1..22: note = chemically synthesized
  source 1..22: mol_type = other DNA
ggttttggcttctctaggctct

SEQ ID NO: 51677 - DNA, 22 bp, synthetic construct
  misc_feature 1..22: note = chemically synthesized
  source 1..22: mol_type = other DNA
gttttggcttctctaggctctg

SEQ ID NO: 51678 - DNA, 22 bp, synthetic construct
  misc_feature 1..22: note = chemically synthesized
  source 1..22: mol_type = other DNA
tggcttctctaggctctgctat

SEQ ID NO: 51679 - DNA, 22 bp, synthetic construct
  misc_feature 1..22: note = chemically synthesized
  source 1..22: mol_type = other DNA
ggcttctctaggctctgctatt

SEQ ID NO: 51680 - DNA, 22 bp, synthetic construct
  misc_feature 1..22: note = chemically synthesized
  source 1..22: mol_type = other DNA
gcttctctaggctctgctatta

SEQ ID NO: 51681 - DNA, 22 bp, synthetic construct
  misc_feature 1..22: note = chemically synthesized
  source 1..22: mol_type = other DNA
ctctaggctctgctattatact

SEQ ID NO: 51682 - DNA, 22 bp, synthetic construct
  misc_feature 1..22: note = chemically synthesized
  source 1..22: mol_type = other DNA
tctaggctctgctattatactt

SEQ ID NO: 51683 - DNA, 22 bp, synthetic construct
  misc_feature 1..22: note = chemically synthesized
  source 1..22: mol_type = other DNA
taggctctgctattatacttgt

SEQ ID NO: 51684 - DNA, 22 bp, synthetic construct
  misc_feature 1..22: note = chemically synthesized
  source 1..22: mol_type = other DNA
ggctctgctattatacttgttc

SEQ ID NO: 51685 - DNA, 22 bp, synthetic construct
  misc_feature 1..22: note = chemically synthesized
  source 1..22: mol_type = other DNA
tgctattatacttgttctttaa

SEQ ID NO: 51686 - DNA, 22 bp, synthetic construct
  misc_feature 1..22: note = chemically synthesized
  source 1..22: mol_type = other DNA
ctattatacttgttctttaaaa

SEQ ID NO: 51687 - DNA, 22 bp, synthetic construct
  misc_feature 1..22: note = chemically synthesized
  source 1..22: mol_type = other DNA
ttatacttgttctttaaaaaaa

SEQ ID NO: 51688 - DNA, 22 bp, synthetic construct
  misc_feature 1..22: note = chemically synthesized
  source 1..22: mol_type = other DNA
tacttgttctttaaaaaaataa

SEQ ID NO: 51689 - DNA, 22 bp, synthetic construct
  misc_feature 1..22: note = chemically synthesized
  source 1..22: mol_type = other DNA
gttctttaaaaaaataataaca

SEQ ID NO: 51690 - DNA, 22 bp, synthetic construct
  misc_feature 1..22: note = chemically synthesized
  source 1..22: mol_type = other DNA
ttctttaaaaaaataataacag

SEQ ID NO: 51691 - DNA, 22 bp, synthetic construct
  misc_feature 1..22: note = chemically synthesized
  source 1..22: mol_type = other DNA
tttaaaaaaataataacagaac

SEQ ID NO: 51692 - DNA, 22 bp, synthetic construct
  misc_feature 1..22: note = chemically synthesized
  source 1..22: mol_type = other DNA
taaaaaaataataacagaacct

SEQ ID NO: 51693 - DNA, 22 bp, synthetic construct
  misc_feature 1..22: note = chemically synthesized
  source 1..22: mol_type = other DNA
aaaaaaataataacagaacctt

SEQ ID NO: 51694 - DNA, 22 bp, synthetic construct
  misc_feature 1..22: note = chemically synthesized
  source 1..22: mol_type = other DNA
aaaaaataataacagaaccttt

SEQ ID NO: 51695 - DNA, 22 bp, synthetic construct
  misc_feature 1..22: note = chemically synthesized
  source 1..22: mol_type = other DNA
tagacaaccagggagttcaagc

SEQ ID NO: 51696 - DNA, 22 bp, synthetic construct
  misc_feature 1..22: note = chemically synthesized
  source 1..22: mol_type = other DNA
agacaaccagggagttcaagca

SEQ ID NO: 51697 - DNA, 22 bp, synthetic construct
  misc_feature 1..22: note = chemically synthesized
  source 1..22: mol_type = other DNA
gacaaccagggagttcaagcaa

SEQ ID NO: 51698 - DNA, 22 bp, synthetic construct
  misc_feature 1..22: note = chemically synthesized
  source 1..22: mol_type = other DNA
aagcaaatatctcttatttccc

SEQ ID NO: 51699 - DNA, 22 bp, synthetic construct
  misc_feature 1..22: note = chemically synthesized
  source 1..22: mol_type = other DNA
ttatttccctacatagattcac

SEQ ID NO: 51700 - DNA, 22 bp, synthetic construct
  misc_feature 1..22: note = chemically synthesized
  source 1..22: mol_type = other DNA
atttccctacatagattcacaa

SEQ ID NO: 51701 - DNA, 22 bp, synthetic construct
  misc_feature 1..22: note = chemically synthesized
  source 1..22: mol_type = other DNA
tttccctacatagattcacaac

SEQ ID NO: 51702 - DNA, 22 bp, synthetic construct
  misc_feature 1..22: note = chemically synthesized
  source 1..22: mol_type = other DNA
ccctacatagattcacaactat

SEQ ID NO: 51703 - DNA, 22 bp, synthetic construct
  misc_feature 1..22: note = chemically synthesized
  source 1..22: mol_type = other DNA
cctacatagattcacaactata

SEQ ID NO: 51704 - DNA, 22 bp, synthetic construct
  misc_feature 1..22: note = chemically synthesized
  source 1..22: mol_type = other DNA
catagattcacaactatagcag

SEQ ID NO: 51705 - DNA, 22 bp, synthetic construct
  misc_feature 1..22: note = chemically synthesized
  source 1..22: mol_type = other DNA
acaactatagcagtaaaagtct

SEQ ID NO: 51706 - DNA, 22 bp, synthetic construct
  misc_feature 1..22: note = chemically synthesized
  source 1..22: mol_type = other DNA
tagcagtaaaagtcttaactat

SEQ ID NO: 51707 - DNA, 22 bp, synthetic construct
  misc_feature 1..22: note = chemically synthesized
  source 1..22: mol_type = other DNA
aactatatgtaaggccttcccc

SEQ ID NO: 51708 - DNA, 22 bp, synthetic construct
  misc_feature 1..22: note = chemically synthesized
  source 1..22: mol_type = other DNA
actatatgtaaggccttccccc

SEQ ID NO: 51709 - DNA, 22 bp, synthetic construct
  misc_feature 1..22: note = chemically synthesized
  source 1..22: mol_type = other DNA
tatgtaaggccttccccccagc

SEQ ID NO: 51710 - DNA, 22 bp, synthetic construct
  misc_feature 1..22: note = chemically synthesized
  source 1..22: mol_type = other DNA
ccccccagcatttagattcctc

SEQ ID NO: 51711 - DNA, 22 bp, synthetic construct
  misc_feature 1..22: note = chemically synthesized
  source 1..22: mol_type = other DNA
cccccagcatttagattcctcc

SEQ ID NO: 51712 - DNA, 22 bp, synthetic construct
  misc_feature 1..22: note = chemically synthesized
  source 1..22: mol_type = other DNA
agattcctcctctaaatacaga

SEQ ID NO: 51713 - DNA, 22 bp, synthetic construct
  misc_feature 1..22: note = chemically synthesized
  source 1..22: mol_type = other DNA
gattcctcctctaaatacagag

SEQ ID NO: 51714 - DNA, 22 bp, synthetic construct
  misc_feature 1..22: note = chemically synthesized
  source 1..22: mol_type = other DNA
ctcctctaaatacagaggcaca

SEQ ID NO: 51715 - DNA, 22 bp, synthetic construct
  misc_feature 1..22: note = chemically synthesized
  source 1..22: mol_type = other DNA
ctctaaatacagaggcacagaa

SEQ ID NO: 51716 - DNA, 22 bp, synthetic construct
  misc_feature 1..22: note = chemically synthesized
  source 1..22: mol_type = other DNA
taaatacagaggcacagaattt

SEQ ID NO: 51717 - DNA, 22 bp, synthetic construct
  misc_feature 1..22: note = chemically synthesized
  source 1..22: mol_type = other DNA
aatacagaggcacagaattttt

SEQ ID NO: 51718 - DNA, 22 bp, synthetic construct
  misc_feature 1..22: note = chemically synthesized
  source 1..22: mol_type = other DNA
ttgagctggttaatctaagact

SEQ ID NO: 51719 - DNA, 22 bp, synthetic construct
  misc_feature 1..22: note = chemically synthesized
  source 1..22: mol_type = other DNA
tgagctggttaatctaagactg

SEQ ID NO: 51720 - DNA, 22 bp, synthetic construct
  misc_feature 1..22: note = chemically synthesized
  source 1..22: mol_type = other DNA
gagctggttaatctaagactga

SEQ ID NO: 51721 - DNA, 22 bp, synthetic construct
  misc_feature 1..22: note = chemically synthesized
  source 1..22: mol_type = other DNA
agctggttaatctaagactgaa

SEQ ID NO: 51722 - DNA, 22 bp, synthetic construct
  misc_feature 1..22: note = chemically synthesized
  source 1..22: mol_type = other DNA
gttaatctaagactgaataacc

SEQ ID NO: 51723 - DNA, 22 bp, synthetic construct
  misc_feature 1..22: note = chemically synthesized
  source 1..22: mol_type = other DNA
atctaagactgaataacctatt

SEQ ID NO: 51724 - DNA, 22 bp, synthetic construct
  misc_feature 1..22: note = chemically synthesized
  source 1..22: mol_type = other DNA
agactgaataacctatttggga

SEQ ID NO: 51725 - DNA, 22 bp, synthetic construct
  misc_feature 1..22: note = chemically synthesized
  source 1..22: mol_type = other DNA
aataacctatttgggacctcag

SEQ ID NO: 51726 - DNA, 22 bp, synthetic construct
  misc_feature 1..22: note = chemically synthesized
  source 1..22: mol_type = other DNA
tttgggacctcagtaagaagtg

SEQ ID NO: 51727 - DNA, 22 bp, synthetic construct
  misc_feature 1..22: note = chemically synthesized
  source 1..22: mol_type = other DNA
gggacctcagtaagaagtgtgg

SEQ ID NO: 51728 - DNA, 22 bp, synthetic construct
  misc_feature 1..22: note = chemically synthesized
  source 1..22: mol_type = other DNA
ggacctcagtaagaagtgtggt

SEQ ID NO: 51729 - DNA, 22 bp, synthetic construct
  misc_feature 1..22: note = chemically synthesized
  source 1..22: mol_type = other DNA
agtaagaagtgtggttttaatt

SEQ ID NO: 51730 - DNA, 22 bp, synthetic construct
  misc_feature 1..22: note = chemically synthesized
  source 1..22: mol_type = other DNA
taattcttgcttgacagacact

SEQ ID NO: 51731 - DNA, 22 bp, synthetic construct
  misc_feature 1..22: note = chemically synthesized
  source 1..22: mol_type = other DNA
aattcttgcttgacagacactg

SEQ ID NO: 51732 - DNA, 22 bp, synthetic construct
  misc_feature 1..22: note = chemically synthesized
  source 1..22: mol_type = other DNA
attcttgcttgacagacactgt

SEQ ID NO: 51733 - DNA, 22 bp, synthetic construct
  misc_feature 1..22: note = chemically synthesized
  source 1..22: mol_type = other DNA
ttgcttgacagacactgtgttt

SEQ ID NO: 51734 - DNA, 22 bp, synthetic construct
  misc_feature 1..22: note = chemically synthesized
  source 1..22: mol_type = other DNA
gcttgacagacactgtgttttg

SEQ ID NO: 51735 - DNA, 22 bp, synthetic construct
  misc_feature 1..22: note = chemically synthesized
  source 1..22: mol_type = other DNA
cttgacagacactgtgttttgt

SEQ ID NO: 51736 - DNA, 22 bp, synthetic construct
  misc_feature 1..22: note = chemically synthesized
  source 1..22: mol_type = other DNA
gacagacactgtgttttgtctt

SEQ ID NO: 51737 - DNA, 22 bp, synthetic construct
  misc_feature 1..22: note = chemically synthesized
  source 1..22: mol_type = other DNA
acagacactgtgttttgtcttt

SEQ ID NO: 51738 - DNA, 22 bp, synthetic construct
  misc_feature 1..22: note = chemically synthesized
  source 1..22: mol_type = other DNA
tgttttgtcttttaaacgagca

SEQ ID NO: 51739 - DNA, 22 bp, synthetic construct
  misc_feature 1..22: note = chemically synthesized
  source 1..22: mol_type = other DNA
tgtcttttaaacgagcagctcg

SEQ ID NO: 51740 - DNA, 22 bp, synthetic construct
  misc_feature 1..22: note = chemically synthesized
  source 1..22: mol_type = other DNA
gtcttttaaacgagcagctcga

SEQ ID NO: 51741 - DNA, 22 bp, synthetic construct
  misc_feature 1..22: note = chemically synthesized
  source 1..22: mol_type = other DNA
tcttttaaacgagcagctcgat

SEQ ID NO: 51742 - DNA, 22 bp, synthetic construct
  misc_feature 1..22: note = chemically synthesized
  source 1..22: mol_type = other DNA
ttaaacgagcagctcgatatgt

SEQ ID NO: 51743 - DNA, 22 bp, synthetic construct
  misc_feature 1..22: note = chemically synthesized
  source 1..22: mol_type = other DNA
taaacgagcagctcgatatgta

SEQ ID NO: 51744 - DNA, 22 bp, synthetic construct
  misc_feature 1..22: note = chemically synthesized
  source 1..22: mol_type = other DNA
aaacgagcagctcgatatgtaa

SEQ ID NO: 51745 - DNA, 22 bp, synthetic construct
  misc_feature 1..22: note = chemically synthesized
  source 1..22: mol_type = other DNA
aacgagcagctcgatatgtaaa

SEQ ID NO: 51746 - DNA, 22 bp, synthetic construct
  misc_feature 1..22: note = chemically synthesized
  source 1..22: mol_type = other DNA
gatatgtaaatacgatgttaca

SEQ ID NO: 51747 - DNA, 22 bp, synthetic construct
  misc_feature 1..22: note = chemically synthesized
  source 1..22: mol_type = other DNA
catcacgcaagtgttactccat

SEQ ID NO: 51748 - DNA, 22 bp, synthetic construct
  misc_feature 1..22: note = chemically synthesized
  source 1..22: mol_type = other DNA
ctccatatttggtgatttagca

SEQ ID NO: 51749 - DNA, 22 bp, synthetic construct
  misc_feature 1..22: note = chemically synthesized
  source 1..22: mol_type = other DNA
catatttggtgatttagcaagg

SEQ ID NO: 51750 - DNA, 22 bp, synthetic construct
  misc_feature 1..22: note = chemically synthesized
  source 1..22: mol_type = other DNA
ggtgatttagcaaggctttgga

SEQ ID NO: 51751 - DNA, 22 bp, synthetic construct
  misc_feature 1..22: note = chemically synthesized
  source 1..22: mol_type = other DNA
gtgatttagcaaggctttggat

SEQ ID NO: 51752 - DNA, 22 bp, synthetic construct
  misc_feature 1..22: note = chemically synthesized
  source 1..22: mol_type = other DNA
agcaaggctttggatctccgaa

SEQ ID NO: 51753 - DNA, 22 bp, synthetic construct
  misc_feature 1..22: note = chemically synthesized
  source 1..22: mol_type = other DNA
gcaaggctttggatctccgaag

SEQ ID NO: 51754 - DNA, 22 bp, synthetic construct
  misc_feature 1..22: note = chemically synthesized
  source 1..22: mol_type = other DNA
tggatctccgaagacgacaaat

SEQ ID NO: 51755 - DNA, 22 bp, synthetic construct
  misc_feature 1..22: note = chemically synthesized
  source 1..22: mol_type = other DNA
ggatctccgaagacgacaaatc

SEQ ID NO: 51756 - DNA, 22 bp, synthetic construct
  misc_feature 1..22: note = chemically synthesized
  source 1..22: mol_type = other DNA
gatctccgaagacgacaaatcc

SEQ ID NO: 51757 - DNA, 22 bp, synthetic construct
  misc_feature 1..22: note = chemically synthesized
  source 1..22: mol_type = other DNA
cgaagacgacaaatccccttcc

SEQ ID NO: 51758 - DNA, 22 bp, synthetic construct
  misc_feature 1..22: note = chemically synthesized
  source 1..22: mol_type = other DNA
ccgcctgctcttgcttcattaa

SEQ ID NO: 51759 - DNA, 22 bp, synthetic construct
  misc_feature 1..22: note = chemically synthesized
  source 1..22: mol_type = other DNA
cgcctgctcttgcttcattaat

SEQ ID NO: 51760 - DNA, 22 bp, synthetic construct
  misc_feature 1..22: note = chemically synthesized
  source 1..22: mol_type = other DNA
ctcttgcttcattaatcatgcc

SEQ ID NO: 51761 - DNA, 22 bp, synthetic construct
  misc_feature 1..22: note = chemically synthesized
  source 1..22: mol_type = other DNA
ttgcttcattaatcatgcctta

SEQ ID NO: 51762 - DNA, 22 bp, synthetic construct
  misc_feature 1..22: note = chemically synthesized
  source 1..22: mol_type = other DNA
gcttcattaatcatgccttaca

SEQ ID NO: 51763 - DNA, 22 bp, synthetic construct
  misc_feature 1..22: note = chemically synthesized
  source 1..22: mol_type = other DNA
cttcattaatcatgccttacac

SEQ ID NO: 51764 - DNA, 22 bp, synthetic construct
  misc_feature 1..22: note = chemically synthesized
  source 1..22: mol_type = other DNA
cattaatcatgccttacacttc

SEQ ID NO: 51765 - DNA, 22 bp, synthetic construct
  misc_feature 1..22: note = chemically synthesized
  source 1..22: mol_type = other DNA
attaatcatgccttacacttct

SEQ ID NO: 51766 - DNA, 22 bp, synthetic construct
  misc_feature 1..22: note = chemically synthesized
  source 1..22: mol_type = other DNA
atcatgccttacacttctgttc

SEQ ID NO: 51767 - DNA, 22 bp, synthetic construct
  misc_feature 1..22: note = chemically synthesized
  source 1..22: mol_type = other DNA
acacttctgttcattttccttc

SEQ ID NO: 51768 - DNA, 22 bp, synthetic construct
  misc_feature 1..22: note = chemically synthesized
  source 1..22: mol_type = other DNA
cacttctgttcattttccttcc

SEQ ID NO: 51769 - DNA, 22 bp, synthetic construct
  misc_feature 1..22: note = chemically synthesized
  source 1..22: mol_type = other DNA
ctgttcattttccttccagtca

SEQ ID NO: 51770 - DNA, 22 bp, synthetic construct
  misc_feature 1..22: note = chemically synthesized
  source 1..22: mol_type = other DNA
tgttcattttccttccagtcac

SEQ ID NO: 51771 - DNA, 22 bp, synthetic construct
  misc_feature 1..22: note = chemically synthesized
  source 1..22: mol_type = other DNA
ttcattttccttccagtcacaa

SEQ ID NO: 51772 - DNA, 22 bp, synthetic construct
  misc_feature 1..22: note = chemically synthesized
  source 1..22: mol_type = other DNA
attttccttccagtcacaagac

SEQ ID NO: 51773 - DNA, 22 bp, synthetic construct
  misc_feature 1..22: note = chemically synthesized
  source 1..22: mol_type = other DNA
tccttccagtcacaagacaaca

SEQ ID NO: 51774 - DNA, 22 bp, synthetic construct
  misc_feature 1..22: note = chemically synthesized
  source 1..22: mol_type = other DNA
ccttccagtcacaagacaacac

SEQ ID NO: 51775 - DNA, 22 bp, synthetic construct
  misc_feature 1..22: note = chemically synthesized
  source 1..22: mol_type = other DNA
cttccagtcacaagacaacaca

SEQ ID NO: 51776 - DNA, 22 bp, synthetic construct
  misc_feature 1..22: note = chemically synthesized
  source 1..22: mol_type = other DNA
ccagtcacaagacaacacatgg

SEQ ID NO: 51777 - DNA, 22 bp, synthetic construct
  misc_feature 1..22: note = chemically synthesized
  source 1..22: mol_type = other DNA
cagtcacaagacaacacatgga

SEQ ID NO: 51778 - DNA, 22 bp, synthetic construct
  misc_feature 1..22: note = chemically synthesized
  source 1..22: mol_type = other DNA
ccacatcctgctggggggtagg

SEQ ID NO: 51779 - DNA, 22 bp, synthetic construct
  misc_feature 1..22: note = chemically synthesized
  source 1..22: mol_type = other DNA
ctggggggtaggggagataaaa

SEQ ID NO: 51780 - DNA, 22 bp, synthetic construct
  misc_feature 1..22: note = chemically synthesized
  source 1..22: mol_type = other DNA
gggggtaggggagataaaatct

SEQ ID NO: 51781 - DNA, 22 bp, synthetic construct
  misc_feature 1..22: note = chemically synthesized
  source 1..22: mol_type = other DNA
cacctacatgtcacataaggta

SEQ ID NO: 51782 - DNA, 22 bp, synthetic construct
  misc_feature 1..22: note = chemically synthesized
  source 1..22: mol_type = other DNA
acctacatgtcacataaggtaa

SEQ ID NO: 51783 - DNA, 22 bp, synthetic construct
  misc_feature 1..22: note = chemically synthesized
  source 1..22: mol_type = other DNA
catgtcacataaggtaaatgtg

SEQ ID NO: 51784 - DNA, 22 bp, synthetic construct
  misc_feature 1..22: note = chemically synthesized
  source 1..22: mol_type = other DNA
aagaaatacactccacaaatgc

SEQ ID NO: 51785 - DNA, 22 bp, synthetic construct
  misc_feature 1..22: note = chemically synthesized
  source 1..22: mol_type = other DNA
cacaaatgcagcttccctagca

SEQ ID NO: 51786 - DNA, 22 bp, synthetic construct
  misc_feature 1..22: note = chemically synthesized
  source 1..22: mol_type = other DNA
ccctagcagcagatttcccatt

SEQ ID NO: 51787 - DNA, 22 bp, synthetic construct
  misc_feature 1..22: note = chemically synthesized
  source 1..22: mol_type = other DNA
cctagcagcagatttcccattt

SEQ ID NO: 51788 - DNA, 22 bp, synthetic construct
  misc_feature 1..22: note = chemically synthesized
  source 1..22: mol_type = other DNA
gcagcagatttcccatttcact

SEQ ID NO: 51789 - DNA, 22 bp, synthetic construct
  misc_feature 1..22: note = chemically synthesized
  source 1..22: mol_type = other DNA
cccatttcactaaagggaaagt

SEQ ID NO: 51790 - DNA, 22 bp, synthetic construct
  misc_feature 1..22: note = chemically synthesized
  source 1..22: mol_type = other DNA
ccatttcactaaagggaaagta

SEQ ID NO: 51791 - DNA, 22 bp, synthetic construct
  misc_feature 1..22: note = chemically synthesized
  source 1..22: mol_type = other DNA
cactaaagggaaagtatctgag

SEQ ID NO: 51792 - DNA, 22 bp, synthetic construct
  misc_feature 1..22: note = chemically synthesized
  source 1..22: mol_type = other DNA
actaaagggaaagtatctgagt

SEQ ID NO: 51793 - DNA, 22 bp, synthetic construct
  misc_feature 1..22: note = chemically synthesized
  source 1..22: mol_type = other DNA
aagggaaagtatctgagtgcta

SEQ ID NO: 51794 - DNA, 22 bp, synthetic construct
  misc_feature 1..22: note = chemically synthesized
  source 1..22: mol_type = other DNA
agtgctatcacagaaagcacta

SEQ ID NO: 51795 - DNA, 22 bp, synthetic construct
  misc_feature 1..22: note = chemically synthesized
  source 1..22: mol_type = other DNA
tcacagaaagcactaaaaaaag

SEQ ID NO: 51796 - DNA, 22 bp, synthetic construct
  misc_feature 1..22: note = chemically synthesized
  source 1..22: mol_type = other DNA
aaaaaagaaagaaaatgccatg

SEQ ID NO: 51797 - DNA, 22 bp, synthetic construct
  misc_feature 1..22: note = chemically synthesized
  source 1..22: mol_type = other DNA
ggttttaatgatcaaattctag

SEQ ID NO: 51798 - DNA, 22 bp, synthetic construct
  misc_feature 1..22: note = chemically synthesized
  source 1..22: mol_type = other DNA
gttttaatgatcaaattctaga

SEQ ID NO: 51799 - DNA, 22 bp, synthetic construct
  misc_feature 1..22: note = chemically synthesized
  source 1..22: mol_type = other DNA
taatgatcaaattctagagggg

SEQ ID NO: 51800 - DNA, 22 bp, synthetic construct
  misc_feature 1..22: note = chemically synthesized
  source 1..22: mol_type = other DNA
aatgatcaaattctagaggggg

SEQ ID NO: 51801 - DNA, 22 bp, synthetic construct
  misc_feature 1..22: note = chemically synthesized
  source 1..22: mol_type = other DNA
atgatcaaattctagaggggga

SEQ ID NO: 51802 - DNA, 22 bp, synthetic construct
  misc_feature 1..22: note = chemically synthesized
  source 1..22: mol_type = other DNA
tagagggggagaggagaaataa

SEQ ID NO: 51803 - DNA, 22 bp, synthetic construct
  misc_feature 1..22: note = chemically synthesized
  source 1..22: mol_type = other DNA
gagggggagaggagaaataata

SEQ ID NO: 51804 - DNA, 22 bp, synthetic construct
  misc_feature 1..22: note = chemically synthesized
  source 1..22: mol_type = other DNA
aatcccctctagaccactgacc

SEQ ID NO: 51805 - DNA, 22 bp, synthetic construct
  misc_feature 1..22: note = chemically synthesized
  source 1..22: mol_type = other DNA
atcccctctagaccactgacct

SEQ ID NO: 51806 - DNA, 22 bp, synthetic construct
  misc_feature 1..22: note = chemically synthesized
  source 1..22: mol_type = other DNA
tagaccactgacctattatggt

SEQ ID NO: 51807 - DNA, 22 bp, synthetic construct
  misc_feature 1..22: note = chemically synthesized
  source 1..22: mol_type = other DNA
gaccactgacctattatggttc

SEQ ID NO: 51808 - DNA, 22 bp, synthetic construct
  misc_feature 1..22: note = chemically synthesized
  source 1..22: mol_type = other DNA
acctattatggttcaactttgt

SEQ ID NO: 51809 - DNA, 22 bp, synthetic construct
  misc_feature 1..22: note = chemically synthesized
  source 1..22: mol_type = other DNA
ttatggttcaactttgtggtca

SEQ ID NO: 51810 - DNA, 22 bp, synthetic construct
  misc_feature 1..22: note = chemically synthesized
  source 1..22: mol_type = other DNA
tggttcaactttgtggtcaaac

SEQ ID NO: 51811 - DNA, 22 bp, synthetic construct
  misc_feature 1..22: note = chemically synthesized
  source 1..22: mol_type = other DNA
aactttgtggtcaaactaggtc

SEQ ID NO: 51812 - DNA, 22 bp, synthetic construct
  misc_feature 1..22: note = chemically synthesized
  source 1..22: mol_type = other DNA
tgtggtcaaactaggtcggaga

SEQ ID NO: 51813 - DNA, 22 bp, synthetic construct
  misc_feature 1..22: note = chemically synthesized
  source 1..22: mol_type = other DNA
gtggtcaaactaggtcggagag

SEQ ID NO: 51814 - DNA, 22 bp, synthetic construct
  misc_feature 1..22: note = chemically synthesized
  source 1..22: mol_type = other DNA
tggtcaaactaggtcggagaga

SEQ ID NO: 51815 - DNA, 22 bp, synthetic construct
  misc_feature 1..22: note = chemically synthesized
  source 1..22: mol_type = other DNA
ggtcggagagacaagttccagt

SEQ ID NO: 51816 - DNA, 22 bp, synthetic construct
  misc_feature 1..22: note = chemically synthesized
  source 1..22: mol_type = other DNA
cagtgaatcaattcatgatatg

SEQ ID NO: 51817 - DNA, 22 bp, synthetic construct
  misc_feature 1..22: note = chemically synthesized
  source 1..22: mol_type = other DNA
atgatatgcactacctttccta

SEQ ID NO: 51818 - DNA, 22 bp, synthetic construct
  misc_feature 1..22: note = chemically synthesized
  source 1..22: mol_type = other DNA
cctttcctaaaactgaacaaac

SEQ ID NO: 51819 - DNA, 22 bp, synthetic construct
  misc_feature 1..22: note = chemically synthesized
  source 1..22: mol_type = other DNA
tcctaaaactgaacaaacctct

SEQ ID NO: 51820 - DNA, 22 bp, synthetic construct
  misc_feature 1..22: note = chemically synthesized
  source 1..22: mol_type = other DNA
cctaaaactgaacaaacctctt

SEQ ID NO: 51821 - DNA, 22 bp, synthetic construct
  misc_feature 1..22: note = chemically synthesized
  source 1..22: mol_type = other DNA
ctaaaactgaacaaacctcttg

SEQ ID NO: 51822 - DNA, 22 bp, synthetic construct
  misc_feature 1..22: note = chemically synthesized
  source 1..22: mol_type = other DNA
aaactgaacaaacctcttgcct

SEQ ID NO: 51823 - DNA, 22 bp, synthetic construct
  misc_feature 1..22: note = chemically synthesized
  source 1..22: mol_type = other DNA
aacaaacctcttgcctttcggg

SEQ ID NO: 51824 - DNA, 22 bp, synthetic construct
  misc_feature 1..22: note = chemically synthesized
  source 1..22: mol_type = other DNA
ttgcctttcgggagctgggtgg

SEQ ID NO: 51825 - DNA, 22 bp, synthetic construct
  misc_feature 1..22: note = chemically synthesized
  source 1..22: mol_type = other DNA
gcctttcgggagctgggtggta

SEQ ID NO: 51826 - DNA, 22 bp, synthetic construct
  misc_feature 1..22: note = chemically synthesized
  source 1..22: mol_type = other DNA
cctttcgggagctgggtggtag

SEQ ID NO: 51827 - DNA, 22 bp, synthetic construct
  misc_feature 1..22: note = chemically synthesized
  source 1..22: mol_type = other DNA
tcgggagctgggtggtaggtag

SEQ ID NO: 51828 - DNA, 22 bp, synthetic construct
  misc_feature 1..22: note = chemically synthesized
  source 1..22: mol_type = other DNA
cgggagctgggtggtaggtaga

SEQ ID NO: 51829 - DNA, 22 bp, synthetic construct
  misc_feature 1..22: note = chemically synthesized
  source 1..22: mol_type = other DNA
gggagctgggtggtaggtagat

SEQ ID NO: 51830 - DNA, 22 bp, synthetic construct
  misc_feature 1..22: note = chemically synthesized
  source 1..22: mol_type = other DNA
ggtggtaggtagatggaagaaa

SEQ ID NO: 51831 - DNA, 22 bp, synthetic construct
  misc_feature 1..22: note = chemically synthesized
  source 1..22: mol_type = other DNA
tcatcacagaatctgcattgac

SEQ ID NO: 51832 - DNA, 22 bp, synthetic construct
  misc_feature 1..22: note = chemically synthesized
  source 1..22: mol_type = other DNA
cattgacttttgtctaacatgc

SEQ ID NO: 51833 - DNA, 22 bp, synthetic construct
  misc_feature 1..22: note = chemically synthesized
  source 1..22: mol_type = other DNA
acttttgtctaacatgctcaag

SEQ ID NO: 51834 - DNA, 22 bp, synthetic construct
  misc_feature 1..22: note = chemically synthesized
  source 1..22: mol_type = other DNA
ttgtctaacatgctcaagcaaa

SEQ ID NO: 51835 - DNA, 22 bp, synthetic construct
  misc_feature 1..22: note = chemically synthesized
  source 1..22: mol_type = other DNA
tgtctaacatgctcaagcaaaa

SEQ ID NO: 51836 - DNA, 22 bp, synthetic construct
  misc_feature 1..22: note = chemically synthesized
  source 1..22: mol_type = other DNA
gtctaacatgctcaagcaaaaa

SEQ ID NO: 51837 - DNA, 22 bp, synthetic construct
  misc_feature 1..22: note = chemically synthesized
  source 1..22: mol_type = other DNA
tctaacatgctcaagcaaaaaa

SEQ ID NO: 51838 - DNA, 22 bp, synthetic construct
  misc_feature 1..22: note = chemically synthesized
  source 1..22: mol_type = other DNA
acatgctcaagcaaaaaatgtt

SEQ ID NO: 51839 - DNA, 22 bp, synthetic construct
  misc_feature 1..22: note = chemically synthesized
  source 1..22: mol_type = other DNA
aagcaaaaaatgttttgagggt

SEQ ID NO: 51840 - DNA, 22 bp, synthetic construct
  misc_feature 1..22: note = chemically synthesized
  source 1..22: mol_type = other DNA
tgagggtcactatatagtgtta

SEQ ID NO: 51841 - DNA, 22 bp, synthetic construct
  misc_feature 1..22: note = chemically synthesized
  source 1..22: mol_type = other DNA
gagggtcactatatagtgttac

SEQ ID NO: 51842 - DNA, 22 bp, synthetic construct
  misc_feature 1..22: note = chemically synthesized
  source 1..22: mol_type = other DNA
agggtcactatatagtgttact

SEQ ID NO: 51843 - DNA, 22 bp, synthetic construct
  misc_feature 1..22: note = chemically synthesized
  source 1..22: mol_type = other DNA
tatagtgttactgtttatcact

SEQ ID NO: 51844 - DNA, 22 bp, synthetic construct
  misc_feature 1..22: note = chemically synthesized
  source 1..22: mol_type = other DNA
ctgtttatcacttagagaaggg

SEQ ID NO: 51845 - DNA, 22 bp, synthetic construct
  misc_feature 1..22: note = chemically synthesized
  source 1..22: mol_type = other DNA
tttatcacttagagaagggaat

SEQ ID NO: 51846 - DNA, 22 bp, synthetic construct
  misc_feature 1..22: note = chemically synthesized
  source 1..22: mol_type = other DNA
atcacttagagaagggaattta

SEQ ID NO: 51847 - DNA, 22 bp, synthetic construct
  misc_feature 1..22: note = chemically synthesized
  source 1..22: mol_type = other DNA
tcacttagagaagggaatttaa

SEQ ID NO: 51848 - DNA, 22 bp, synthetic construct
  misc_feature 1..22: note = chemically synthesized
  source 1..22: mol_type = other DNA
agagaagggaatttaagtccca

SEQ ID NO: 51849 - DNA, 22 bp, synthetic construct
  misc_feature 1..22: note = chemically synthesized
  source 1..22: mol_type = other DNA
gagaagggaatttaagtcccac

SEQ ID NO: 51850 - DNA, 22 bp, synthetic construct
  misc_feature 1..22: note = chemically synthesized
  source 1..22: mol_type = other DNA
aagtcccactgctagcctttaa

SEQ ID NO: 51851 - DNA, 22 bp, synthetic construct
  misc_feature 1..22: note = chemically synthesized
  source 1..22: mol_type = other DNA
agtcccactgctagcctttaat

SEQ ID NO: 51852 - DNA, 22 bp, synthetic construct
  misc_feature 1..22: note = chemically synthesized
  source 1..22: mol_type = other DNA
ctagcctttaattccttttccc

SEQ ID NO: 51853 - DNA, 22 bp, synthetic construct
  misc_feature 1..22: note = chemically synthesized
  source 1..22: mol_type = other DNA
gcctttaattccttttcccttg

SEQ ID NO: 51854 - DNA, 22 bp, synthetic construct
  misc_feature 1..22: note = chemically synthesized
  source 1..22: mol_type = other DNA
taattccttttcccttgagctg

SEQ ID NO: 51855 - DNA, 22 bp, synthetic construct
  misc_feature 1..22: note = chemically synthesized
  source 1..22: mol_type = other DNA
aattccttttcccttgagctgc

SEQ ID NO: 51856 - DNA, 22 bp, synthetic construct
  misc_feature 1..22: note = chemically synthesized
  source 1..22: mol_type = other DNA
attccttttcccttgagctgcc

SEQ ID NO: 51857 - DNA, 22 bp, synthetic construct
  misc_feature 1..22: note = chemically synthesized
  source 1..22: mol_type = other DNA
cttttcccttgagctgccgaga

SEQ ID NO: 51858 - DNA, 22 bp, synthetic construct
  misc_feature 1..22: note = chemically synthesized
  source 1..22: mol_type = other DNA
ttcccttgagctgccgagaaac

SEQ ID NO: 51859 - DNA, 22 bp, synthetic construct
  misc_feature 1..22: note = chemically synthesized
  source 1..22: mol_type = other DNA
tcccttgagctgccgagaaacc

SEQ ID NO: 51860 - DNA, 22 bp, synthetic construct
  misc_feature 1..22: note = chemically synthesized
  source 1..22: mol_type = other DNA
cccttgagctgccgagaaaccc

SEQ ID NO: 51861 - DNA, 22 bp, synthetic construct
  misc_feature 1..22: note = chemically synthesized
  source 1..22: mol_type = other DNA
ccttgagctgccgagaaaccca

SEQ ID NO: 51862 - DNA, 22 bp, synthetic construct
  misc_feature 1..22: note = chemically synthesized
  source 1..22: mol_type = other DNA
gagctgccgagaaacccacaca

SEQ ID NO: 51863 - DNA, 22 bp, synthetic construct
  misc_feature 1..22: note = chemically synthesized
  source 1..22: mol_type = other DNA
agctgccgagaaacccacacac

SEQ ID NO: 51864 - DNA, 22 bp, synthetic construct
  misc_feature 1..22: note = chemically synthesized
  source 1..22: mol_type = other DNA
ccgagaaacccacacacctagc

SEQ ID NO: 51865 - DNA, 22 bp, synthetic construct
  misc_feature 1..22: note = chemically synthesized
  source 1..22: mol_type = other DNA
gctgcctccctgctaaaattaa

SEQ ID NO: 51866 - DNA, 22 bp, synthetic construct
  misc_feature 1..22: note = chemically synthesized
  source 1..22: mol_type = other DNA
cctccctgctaaaattaaccaa

SEQ ID NO: 51867 - DNA, 22 bp, synthetic construct
  misc_feature 1..22: note = chemically synthesized
  source 1..22: mol_type = other DNA
cctgctaaaattaaccaaagga

SEQ ID NO: 51868 - DNA, 22 bp, synthetic construct
  misc_feature 1..22: note = chemically synthesized
  source 1..22: mol_type = other DNA
ctaaaattaaccaaaggaggga

SEQ ID NO: 51869 - DNA, 22 bp, synthetic construct
  misc_feature 1..22: note = chemically synthesized
  source 1..22: mol_type = other DNA
aaattaaccaaaggagggaggg

SEQ ID NO: 51870 - DNA, 22 bp, synthetic construct
  misc_feature 1..22: note = chemically synthesized
  source 1..22: mol_type = other DNA
accaaaggagggagggctgttg

SEQ ID NO: 51871 - DNA, 22 bp, synthetic construct
  misc_feature 1..22: note = chemically synthesized
  source 1..22: mol_type = other DNA
ttgaatacgtgtgtgtattttt

SEQ ID NO: 51872 - DNA, 22 bp, synthetic construct
  misc_feature 1..22: note = chemically synthesized
  source 1..22: mol_type = other DNA
aatacgtgtgtgtatttttcca

SEQ ID NO: 51873 - DNA, 22 bp, synthetic construct
  misc_feature 1..22: note = chemically synthesized
  source 1..22: mol_type = other DNA
ttccaagaaaatttttacattg

SEQ ID NO: 51874 - DNA, 22 bp, synthetic construct
  misc_feature 1..22: note = chemically synthesized
  source 1..22: mol_type = other DNA
tccaagaaaatttttacattgt

SEQ ID NO: 51875 - DNA, 22 bp, synthetic construct
  misc_feature 1..22: note = chemically synthesized
  source 1..22: mol_type = other DNA
ccaagaaaatttttacattgtg

SEQ ID NO: 51876 - DNA, 22 bp, synthetic construct
  misc_feature 1..22: note = chemically synthesized
  source 1..22: mol_type = other DNA
caagaaaatttttacattgtgt

SEQ ID NO: 51877 - DNA, 22 bp, synthetic construct
  misc_feature 1..22: note = chemically synthesized
  source 1..22: mol_type = other DNA
ttacattgtgttatagcagaaa

SEQ ID NO: 51878 - DNA, 22 bp, synthetic construct
  misc_feature 1..22: note = chemically synthesized
  source 1..22: mol_type = other DNA
tacattgtgttatagcagaaac

SEQ ID NO: 51879 - DNA, 22 bp, synthetic construct
  misc_feature 1..22: note = chemically synthesized
  source 1..22: mol_type = other DNA
acattgtgttatagcagaaaca

SEQ ID NO: 51880 - DNA, 22 bp, synthetic construct
  misc_feature 1..22: note = chemically synthesized
  source 1..22: mol_type = other DNA
cattgtgttatagcagaaacag

SEQ ID NO: 51881 - DNA, 22 bp, synthetic construct
  misc_feature 1..22: note = chemically synthesized
  source 1..22: mol_type = other DNA
tgttatagcagaaacagtggag

SEQ ID NO: 51882 - DNA, 22 bp, synthetic construct
  misc_feature 1..22: note = chemically synthesized
  source 1..22: mol_type = other DNA
tagcagaaacagtggagtctgg

SEQ ID NO: 51883 - DNA, 22 bp, synthetic construct
  misc_feature 1..22: note = chemically synthesized
  source 1..22: mol_type = other DNA
gactggacatttgtaagggtga

SEQ ID NO: 51884 - DNA, 22 bp, synthetic construct
  misc_feature 1..22: note = chemically synthesized
  source 1..22: mol_type = other DNA
gacatttgtaagggtgacatgt

SEQ ID NO: 51885 - DNA, 22 bp, synthetic construct
  misc_feature 1..22: note = chemically synthesized
  source 1..22: mol_type = other DNA
gtaagggtgacatgtggctgtg

SEQ ID NO: 51886 - DNA, 22 bp, synthetic construct
  misc_feature 1..22: note = chemically synthesized
  source 1..22: mol_type = other DNA
taagggtgacatgtggctgtgt

SEQ ID NO: 51887 - DNA, 22 bp, synthetic construct
  misc_feature 1..22: note = chemically synthesized
  source 1..22: mol_type = other DNA
tgtaaaccacaaacaaaatcaa

SEQ ID NO: 51888 - DNA, 22 bp, synthetic construct
  misc_feature 1..22: note = chemically synthesized
  source 1..22: mol_type = other DNA
tcaaaaccacatcagagacaag

SEQ ID NO: 51889 - DNA, 22 bp, synthetic construct
  misc_feature 1..22: note = chemically synthesized
  source 1..22: mol_type = other DNA
atcatttagctgaggaggcagg

SEQ ID NO: 51890 - DNA, 22 bp, synthetic construct
  misc_feature 1..22: note = chemically synthesized
  source 1..22: mol_type = other DNA
tcatttagctgaggaggcaggc

SEQ ID NO: 51891 - DNA, 22 bp, synthetic construct
  misc_feature 1..22: note = chemically synthesized
  source 1..22: mol_type = other DNA
agctgaggaggcaggctgcagg

SEQ ID NO: 51892 - DNA, 22 bp, synthetic construct
  misc_feature 1..22: note = chemically synthesized
  source 1..22: mol_type = other DNA
gctgaggaggcaggctgcaggg

SEQ ID NO: 51893 - DNA, 22 bp, synthetic construct
  misc_feature 1..22: note = chemically synthesized
  source 1..22: mol_type = other DNA
aggaggcaggctgcagggagca

SEQ ID NO: 51894 - DNA, 22 bp, synthetic construct
  misc_feature 1..22: note = chemically synthesized
  source 1..22: mol_type = other DNA
cagggagcagccgttcctgtca

SEQ ID NO: 51895 - DNA, 22 bp, synthetic construct
  misc_feature 1..22: note = chemically synthesized
  source 1..22: mol_type = other DNA
ctgtcaaaccaaccttttgaaa

SEQ ID NO: 51896 - DNA, 22 bp, synthetic construct
  misc_feature 1..22: note = chemically synthesized
  source 1..22: mol_type = other DNA
tcaaaccaaccttttgaaattt

SEQ ID NO: 51897 - DNA, 22 bp, synthetic construct
  misc_feature 1..22: note = chemically synthesized
  source 1..22: mol_type = other DNA
ttgaaatttccaacatgccctt

SEQ ID NO: 51898 - DNA, 22 bp, synthetic construct
  misc_feature 1..22: note = chemically synthesized
  source 1..22: mol_type = other DNA
tgaaatttccaacatgccctta

SEQ ID NO: 51899 - DNA, 22 bp, synthetic construct
  misc_feature 1..22: note = chemically synthesized
  source 1..22: mol_type = other DNA
gaaatttccaacatgcccttaa

SEQ ID NO: 51900 - DNA, 22 bp, synthetic construct
  misc_feature 1..22: note = chemically synthesized
  source 1..22: mol_type = other DNA
aaatttccaacatgcccttaaa

SEQ ID NO: 51901 - DNA, 22 bp, synthetic construct
  misc_feature 1..22: note = chemically synthesized
  source 1..22: mol_type = other DNA
ccaacatgcccttaaacttttc

SEQ ID NO: 51902 - DNA, 22 bp, synthetic construct
  misc_feature 1..22: note = chemically synthesized
  source 1..22: mol_type = other DNA
caacatgcccttaaacttttcg

SEQ ID NO: 51903 - DNA, 22 bp, synthetic construct
  misc_feature 1..22: note = chemically synthesized
  source 1..22: mol_type = other DNA
aaacttttcgagtaagcatgtc

SEQ ID NO: 51904 - DNA, 22 bp, synthetic construct
  misc_feature 1..22: note = chemically synthesized
  source 1..22: mol_type = other DNA
aacttttcgagtaagcatgtct

SEQ ID NO: 51905 - DNA, 22 bp, synthetic construct
  misc_feature 1..22: note = chemically synthesized
  source 1..22: mol_type = other DNA
ttcgagtaagcatgtctgtgcg

SEQ ID NO: 51906 - DNA, 22 bp, synthetic construct
  misc_feature 1..22: note = chemically synthesized
  source 1..22: mol_type = other DNA
tcgagtaagcatgtctgtgcgc

SEQ ID NO: 51907 - DNA, 22 bp, synthetic construct
  misc_feature 1..22: note = chemically synthesized
  source 1..22: mol_type = other DNA
cgagtaagcatgtctgtgcgct

SEQ ID NO: 51908 - DNA, 22 bp, synthetic construct
  misc_feature 1..22: note = chemically synthesized
  source 1..22: mol_type = other DNA
gagtaagcatgtctgtgcgctt

SEQ ID NO: 51909 - DNA, 22 bp, synthetic construct
  misc_feature 1..22: note = chemically synthesized
  source 1..22: mol_type = other DNA
tgcgcttcagcaactgccctct

SEQ ID NO: 51910 - DNA, 22 bp, synthetic construct
  misc_feature 1..22: note = chemically synthesized
  source 1..22: mol_type = other DNA
cagcaactgccctctctactct

SEQ ID NO: 51911 - DNA, 22 bp, synthetic construct
  misc_feature 1..22: note = chemically synthesized
  source 1..22: mol_type = other DNA
agcaactgccctctctactctg

SEQ ID NO: 51912 - DNA, 22 bp, synthetic construct
  misc_feature 1..22: note = chemically synthesized
  source 1..22: mol_type = other DNA
ccctctctactctggcctggcc

SEQ ID NO: 51913 - DNA, 22 bp, synthetic construct
  misc_feature 1..22: note = chemically synthesized
  source 1..22: mol_type = other DNA
tctactctggcctggccagtcg

SEQ ID NO: 51914 - DNA, 22 bp, synthetic construct
  misc_feature 1..22: note = chemically synthesized
  source 1..22: mol_type = other DNA
tactctggcctggccagtcgaa

SEQ ID NO: 51915 - DNA, 22 bp, synthetic construct
  misc_feature 1..22: note = chemically synthesized
  source 1..22: mol_type = other DNA
ctctggcctggccagtcgaaaa

SEQ ID NO: 51916 - DNA, 22 bp, synthetic construct
  misc_feature 1..22: note = chemically synthesized
  source 1..22: mol_type = other DNA
tggcctggccagtcgaaaatgg

SEQ ID NO: 51917 - DNA, 22 bp, synthetic construct
  misc_feature 1..22: note = chemically synthesized
  source 1..22: mol_type = other DNA
gcctggccagtcgaaaatggca

SEQ ID NO: 51918 - DNA, 22 bp, synthetic construct
  misc_feature 1..22: note = chemically synthesized
  source 1..22: mol_type = other DNA
gccagtcgaaaatggcatctta

SEQ ID NO: 51919 - DNA, 22 bp, synthetic construct
  misc_feature 1..22: note = chemically synthesized
  source 1..22: mol_type = other DNA
aaagtcaaggtcatggtgtcat

SEQ ID NO: 51920 - DNA, 22 bp, synthetic construct
  misc_feature 1..22: note = chemically synthesized
  source 1..22: mol_type = other DNA
aagtcaaggtcatggtgtcatc

SEQ ID NO: 51921 - DNA, 22 bp, synthetic construct
  misc_feature 1..22: note = chemically synthesized
  source 1..22: mol_type = other DNA
tgtttaattacagccccatccg

SEQ ID NO: 51922 - DNA, 22 bp, synthetic construct
  misc_feature 1..22: note = chemically synthesized
  source 1..22: mol_type = other DNA
aattacagccccatccgggctg

SEQ ID NO: 51923 - DNA, 22 bp, synthetic construct
  misc_feature 1..22: note = chemically synthesized
  source 1..22: mol_type = other DNA
attacagccccatccgggctga

SEQ ID NO: 51924 - DNA, 22 bp, synthetic construct
  misc_feature 1..22: note = chemically synthesized
  source 1..22: mol_type = other DNA
cagccccatccgggctgacagc

SEQ ID NO: 51925 - DNA, 22 bp, synthetic construct
  misc_feature 1..22: note = chemically synthesized
  source 1..22: mol_type = other DNA
acagccaatatggatccaaggc

SEQ ID NO: 51926 - DNA, 22 bp, synthetic construct
  misc_feature 1..22: note = chemically synthesized
  source 1..22: mol_type = other DNA
gccctgaagctcagttaactct

SEQ ID NO: 51927 - DNA, 22 bp, synthetic construct
  misc_feature 1..22: note = chemically synthesized
  source 1..22: mol_type = other DNA
aagctcagttaactctttccac

SEQ ID NO: 51928 - DNA, 22 bp, synthetic construct
  misc_feature 1..22: note = chemically synthesized
  source 1..22: mol_type = other DNA
agttaactctttccaccacctc

SEQ ID NO: 51929 - DNA, 22 bp, synthetic construct
  misc_feature 1..22: note = chemically synthesized
  source 1..22: mol_type = other DNA
actctttccaccacctccaact

SEQ ID NO: 51930 - DNA, 22 bp, synthetic construct
  misc_feature 1..22: note = chemically synthesized
  source 1..22: mol_type = other DNA
tttccaccacctccaactaccc

SEQ ID NO: 51931 - DNA, 22 bp, synthetic construct
  misc_feature 1..22: note = chemically synthesized
  source 1..22: mol_type = other DNA
tccaccacctccaactaccctg

SEQ ID NO: 51932 - DNA, 22 bp, synthetic construct
  misc_feature 1..22: note = chemically synthesized
  source 1..22: mol_type = other DNA
ccaccacctccaactaccctgc

SEQ ID NO: 51933 - DNA, 22 bp, synthetic construct
  misc_feature 1..22: note = chemically synthesized
  source 1..22: mol_type = other DNA
caccacctccaactaccctgcc

SEQ ID NO: 51934 - DNA, 22 bp, synthetic construct
  misc_feature 1..22: note = chemically synthesized
  source 1..22: mol_type = other DNA
caactaccctgccagcccactc

SEQ ID NO: 51935 - DNA, 22 bp, synthetic construct
  misc_feature 1..22: note = chemically synthesized
  source 1..22: mol_type = other DNA
ccctgccagcccactctacttc

SEQ ID NO: 51936 - DNA, 22 bp, synthetic construct
  misc_feature 1..22: note = chemically synthesized
  source 1..22: mol_type = other DNA
ccagcccactctacttcaggga

SEQ ID NO: 51937 - DNA, 22 bp, synthetic construct
  misc_feature 1..22: note = chemically synthesized
  source 1..22: mol_type = other DNA
tacttcagggaagccttgagaa

SEQ ID NO: 51938 - DNA, 22 bp, synthetic construct
  misc_feature 1..22: note = chemically synthesized
  source 1..22: mol_type = other DNA
cttcagggaagccttgagaacg

SEQ ID NO: 51939 - DNA, 22 bp, synthetic construct
  misc_feature 1..22: note = chemically synthesized
  source 1..22: mol_type = other DNA
cagggaagccttgagaacgagc

SEQ ID NO: 51940 - DNA, 22 bp, synthetic construct
  misc_feature 1..22: note = chemically synthesized
  source 1..22: mol_type = other DNA
agggaagccttgagaacgagct

SEQ ID NO: 51941 - DNA, 22 bp, synthetic construct
  misc_feature 1..22: note = chemically synthesized
  source 1..22: mol_type = other DNA
gagaacgagctgaacccctaag

SEQ ID NO: 51942 - DNA, 22 bp, synthetic construct
  misc_feature 1..22: note = chemically synthesized
  source 1..22: mol_type = other DNA
agaacgagctgaacccctaagg

SEQ ID NO: 51943 - DNA, 22 bp, synthetic construct
  misc_feature 1..22: note = chemically synthesized
  source 1..22: mol_type = other DNA
aacccctaaggaggcctggcca

SEQ ID NO: 51944 - DNA, 22 bp, synthetic construct
  misc_feature 1..22: note = chemically synthesized
  source 1..22: mol_type = other DNA
aggaggcctggccagatgttct

SEQ ID NO: 51945 - DNA, 22 bp, synthetic construct
  misc_feature 1..22: note = chemically synthesized
  source 1..22: mol_type = other DNA
gccagatgttctgagtcaaaca

SEQ ID NO: 51946 - DNA, 22 bp, synthetic construct
  misc_feature 1..22: note = chemically synthesized
  source 1..22: mol_type = other DNA
tgagtcaaacaagtcattggct

SEQ ID NO: 51947 - DNA, 22 bp, synthetic construct
  misc_feature 1..22: note = chemically synthesized
  source 1..22: mol_type = other DNA
agtcaaacaagtcattggctga

SEQ ID NO: 51948 - DNA, 22 bp, synthetic construct
  misc_feature 1..22: note = chemically synthesized
  source 1..22: mol_type = other DNA
gctgaactgcaaatgcctatat

SEQ ID NO: 51949 - DNA, 22 bp, synthetic construct
  misc_feature 1..22: note = chemically synthesized
  source 1..22: mol_type = other DNA
aactgcaaatgcctatatggcc

SEQ ID NO: 51950 - DNA, 22 bp, synthetic construct
  misc_feature 1..22: note = chemically synthesized
  source 1..22: mol_type = other DNA
caaatgcctatatggccacttt

SEQ ID NO: 51951 - DNA, 22 bp, synthetic construct
  misc_feature 1..22: note = chemically synthesized
  source 1..22: mol_type = other DNA
tatggccactttgcctctgaca

SEQ ID NO: 51952 - DNA, 22 bp, synthetic construct
  misc_feature 1..22: note = chemically synthesized
  source 1..22: mol_type = other DNA
tgcctctgacacgtcaccaagg

SEQ ID NO: 51953 - DNA, 22 bp, synthetic construct
  misc_feature 1..22: note = chemically synthesized
  source 1..22: mol_type = other DNA
gcctctgacacgtcaccaaggc

SEQ ID NO: 51954 - DNA, 22 bp, synthetic construct
  misc_feature 1..22: note = chemically synthesized
  source 1..22: mol_type = other DNA
cctctgacacgtcaccaaggct

SEQ ID NO: 51955 - DNA, 22 bp, synthetic construct
  misc_feature 1..22: note = chemically synthesized
  source 1..22: mol_type = other DNA
tgacacgtcaccaaggctggaa

SEQ ID NO: 51956 - DNA, 22 bp, synthetic construct
  misc_feature 1..22: note = chemically synthesized
  source 1..22: mol_type = other DNA
acacgtcaccaaggctggaaat

SEQ ID NO: 51957 - DNA, 22 bp, synthetic construct
  misc_feature 1..22: note = chemically synthesized
  source 1..22: mol_type = other DNA
gaaatggacaatggaagctgga

SEQ ID NO: 51958 - DNA, 22 bp, synthetic construct
  misc_feature 1..22: note = chemically synthesized
  source 1..22: mol_type = other DNA
gactaggtgtagtaaagctcaa

SEQ ID NO: 51959 - DNA, 22 bp, synthetic construct
  misc_feature 1..22: note = chemically synthesized
  source 1..22: mol_type = other DNA
ggtgtagtaaagctcaatactt

SEQ ID NO: 51960 - DNA, 22 bp, synthetic construct
  misc_feature 1..22: note = chemically synthesized
  source 1..22: mol_type = other DNA
aatacttcaaaatgagaaggtg

SEQ ID NO: 51961 - DNA, 22 bp, synthetic construct
  misc_feature 1..22: note = chemically synthesized
  source 1..22: mol_type = other DNA
caaaatgagaaggtggggatgg

SEQ ID NO: 51962 - DNA, 22 bp, synthetic construct
  misc_feature 1..22: note = chemically synthesized
  source 1..22: mol_type = other DNA
aaaatgagaaggtggggatggg

SEQ ID NO: 51963 - DNA, 22 bp, synthetic construct
  misc_feature 1..22: note = chemically synthesized
  source 1..22: mol_type = other DNA
atgtgtgtacctatcctgccta

SEQ ID NO: 51964 - DNA, 22 bp, synthetic construct
  misc_feature 1..22: note = chemically synthesized
  source 1..22: mol_type = other DNA
tcctgcctacatctgattcagt

SEQ ID NO: 51965 - DNA, 22 bp, synthetic construct
  misc_feature 1..22: note = chemically synthesized
  source 1..22: mol_type = other DNA
cctacatctgattcagtgaggt

SEQ ID NO: 51966 - DNA, 22 bp, synthetic construct
  misc_feature 1..22: note = chemically synthesized
  source 1..22: mol_type = other DNA
catctgattcagtgaggtggaa

SEQ ID NO: 51967 - DNA, 22 bp, synthetic construct
  misc_feature 1..22: note = chemically synthesized
  source 1..22: mol_type = other DNA
attcagtgaggtggaaaatatt

SEQ ID NO: 51968 - DNA, 22 bp, synthetic construct
  misc_feature 1..22: note = chemically synthesized
  source 1..22: mol_type = other DNA
agtgaggtggaaaatatttatt

SEQ ID NO: 51969 - DNA, 22 bp, synthetic construct
  misc_feature 1..22: note = chemically synthesized
  source 1..22: mol_type = other DNA
atttttctgtgttctggacgta

SEQ ID NO: 51970 - DNA, 22 bp, synthetic construct
  misc_feature 1..22: note = chemically synthesized
  source 1..22: mol_type = other DNA
tttttctgtgttctggacgtaa

SEQ ID NO: 51971 - DNA, 22 bp, synthetic construct
  misc_feature 1..22: note = chemically synthesized
  source 1..22: mol_type = other DNA
ttctgtgttctggacgtaagca

SEQ ID NO: 51972 - DNA, 22 bp, synthetic construct
  misc_feature 1..22: note = chemically synthesized
  source 1..22: mol_type = other DNA
tctgtgttctggacgtaagcaa

SEQ ID NO: 51973 - DNA, 22 bp, synthetic construct
  misc_feature 1..22: note = chemically synthesized
  source 1..22: mol_type = other DNA
ctgtgttctggacgtaagcaac

SEQ ID NO: 51974 - DNA, 22 bp, synthetic construct
  misc_feature 1..22: note = chemically synthesized
  source 1..22: mol_type = other DNA
tgtgttctggacgtaagcaaca

SEQ ID NO: 51975 - DNA, 22 bp, synthetic construct
  misc_feature 1..22: note = chemically synthesized
  source 1..22: mol_type = other DNA
tgttctggacgtaagcaacaga

SEQ ID NO: 51976 - DNA, 22 bp, synthetic construct
  misc_feature 1..22: note = chemically synthesized
  source 1..22: mol_type = other DNA
tggacgtaagcaacagaaatga

SEQ ID NO: 51977 - DNA, 22 bp, synthetic construct
  misc_feature 1..22: note = chemically synthesized
  source 1..22: mol_type = other DNA
gacgtaagcaacagaaatgatt

SEQ ID NO: 51978 - DNA, 22 bp, synthetic construct
  misc_feature 1..22: note = chemically synthesized
  source 1..22: mol_type = other DNA
ttttaacattacagggctgtca

SEQ ID NO: 51979 - DNA, 22 bp, synthetic construct
  misc_feature 1..22: note = chemically synthesized
  source 1..22: mol_type = other DNA
taacattacagggctgtcatgg

SEQ ID NO: 51980 - DNA, 22 bp, synthetic construct
  misc_feature 1..22: note = chemically synthesized
  source 1..22: mol_type = other DNA
aacattacagggctgtcatgga

SEQ ID NO: 51981 - DNA, 22 bp, synthetic construct
  misc_feature 1..22: note = chemically synthesized
  source 1..22: mol_type = other DNA
acattacagggctgtcatggac

SEQ ID NO: 51982 - DNA, 22 bp, synthetic construct
  misc_feature 1..22: note = chemically synthesized
  source 1..22: mol_type = other DNA
cagggctgtcatggacagtcac

SEQ ID NO: 51983 - DNA, 22 bp, synthetic construct
  misc_feature 1..22: note = chemically synthesized
  source 1..22: mol_type = other DNA
tcatggacagtcacatagagta

SEQ ID NO: 51984 - DNA, 22 bp, synthetic construct
  misc_feature 1..22: note = chemically synthesized
  source 1..22: mol_type = other DNA
cacaactccttactgcttggct

SEQ ID NO: 51985 - DNA, 22 bp, synthetic construct
  misc_feature 1..22: note = chemically synthesized
  source 1..22: mol_type = other DNA
acaactccttactgcttggcta

SEQ ID NO: 51986 - DNA, 22 bp, synthetic construct
  misc_feature 1..22: note = chemically synthesized
  source 1..22: mol_type = other DNA
cttactgcttggctacagcacc

SEQ ID NO: 51987 - DNA, 22 bp, synthetic construct
  misc_feature 1..22: note = chemically synthesized
  source 1..22: mol_type = other DNA
actgcttggctacagcacctct

SEQ ID NO: 51988 - DNA, 22 bp, synthetic construct
  misc_feature 1..22: note = chemically synthesized
  source 1..22: mol_type = other DNA
ctgcttggctacagcacctctg

SEQ ID NO: 51989 - DNA, 22 bp, synthetic construct
  misc_feature 1..22: note = chemically synthesized
  source 1..22: mol_type = other DNA
cttggctacagcacctctgaaa

SEQ ID NO: 51990 - DNA, 22 bp, synthetic construct
  misc_feature 1..22: note = chemically synthesized
  source 1..22: mol_type = other DNA
ggctacagcacctctgaaaatg

SEQ ID NO: 51991 - DNA, 22 bp, synthetic construct
  misc_feature 1..22: note = chemically synthesized
  source 1..22: mol_type = other DNA
gctacagcacctctgaaaatga

SEQ ID NO: 51992 - DNA, 22 bp, synthetic construct
  misc_feature 1..22: note = chemically synthesized
  source 1..22: mol_type = other DNA
cagcacctctgaaaatgaaaag

SEQ ID NO: 51993 - DNA, 22 bp, synthetic construct
  misc_feature 1..22: note = chemically synthesized
  source 1..22: mol_type = other DNA
tgaaaatgaaaagaaaacatgc

SEQ ID NO: 51994 - DNA, 22 bp, synthetic construct
  misc_feature 1..22: note = chemically synthesized
  source 1..22: mol_type = other DNA
aaaatgaaaagaaaacatgcaa

SEQ ID NO: 51995 - DNA, 22 bp, synthetic construct
  misc_feature 1..22: note = chemically synthesized
  source 1..22: mol_type = other DNA
ttctccttgcttctcatttacc

SEQ ID NO: 51996 - DNA, 22 bp, synthetic construct
  misc_feature 1..22: note = chemically synthesized
  source 1..22: mol_type = other DNA
tctccttgcttctcatttacct

SEQ ID NO: 51997 - DNA, 22 bp, synthetic construct
  misc_feature 1..22: note = chemically synthesized
  source 1..22: mol_type = other DNA
ctccttgcttctcatttacctg

SEQ ID NO: 51998 - DNA, 22 bp, synthetic construct
  misc_feature 1..22: note = chemically synthesized
  source 1..22: mol_type = other DNA
tccttgcttctcatttacctgc

SEQ ID NO: 51999 - DNA, 22 bp, synthetic construct
  misc_feature 1..22: note = chemically synthesized
  source 1..22: mol_type = other DNA
cttgcttctcatttacctgcta

SEQ ID NO: 52000 - DNA, 22 bp, synthetic construct
  misc_feature 1..22: note = chemically synthesized
  source 1..22: mol_type = other DNA
gcttctcatttacctgctatgt

SEQ ID NO: 52001 - DNA, 22 bp, synthetic construct
  misc_feature 1..22: note = chemically synthesized
  source 1..22: mol_type = other DNA
cttctcatttacctgctatgtg

SEQ ID NO: 52002 - DNA, 22 bp, synthetic construct
  misc_feature 1..22: note = chemically synthesized
  source 1..22: mol_type = other DNA
ctcatttacctgctatgtgttc

SEQ ID NO: 52003 - DNA, 22 bp, synthetic construct
  misc_feature 1..22: note = chemically synthesized
  source 1..22: mol_type = other DNA
tcatttacctgctatgtgttcc

SEQ ID NO: 52004 - DNA, 22 bp, synthetic construct
  misc_feature 1..22: note = chemically synthesized
  source 1..22: mol_type = other DNA
atttacctgctatgtgttcctg

SEQ ID NO: 52005 - DNA, 22 bp, synthetic construct
  misc_feature 1..22: note = chemically synthesized
  source 1..22: mol_type = other DNA
acctgctatgtgttcctgtttg

SEQ ID NO: 52006 - DNA, 22 bp, synthetic construct
  misc_feature 1..22: note = chemically synthesized
  source 1..22: mol_type = other DNA
cctgctatgtgttcctgtttgg

SEQ ID NO: 52007 - DNA, 22 bp, synthetic construct
  misc_feature 1..22: note = chemically synthesized
  source 1..22: mol_type = other DNA
ctatgtgttcctgtttggggca

SEQ ID NO: 52008 - DNA, 22 bp, synthetic construct
  misc_feature 1..22: note = chemically synthesized
  source 1..22: mol_type = other DNA
tgtgttcctgtttggggcaaat

SEQ ID NO: 52009 - DNA, 22 bp, synthetic construct
  misc_feature 1..22: note = chemically synthesized
  source 1..22: mol_type = other DNA
ctgtttggggcaaattcctcta

SEQ ID NO: 52010 - DNA, 22 bp, synthetic construct
  misc_feature 1..22: note = chemically synthesized
  source 1..22: mol_type = other DNA
tttggggcaaattcctctagat

SEQ ID NO: 52011 - DNA, 22 bp, synthetic construct
  misc_feature 1..22: note = chemically synthesized
  source 1..22: mol_type = other DNA
ggggcaaattcctctagatgac

SEQ ID NO: 52012 - DNA, 22 bp, synthetic construct
  misc_feature 1..22: note = chemically synthesized
  source 1..22: mol_type = other DNA
gggcaaattcctctagatgacg

SEQ ID NO: 52013 - DNA, 22 bp, synthetic construct
  misc_feature 1..22: note = chemically synthesized
  source 1..22: mol_type = other DNA
ctctagatgacgttgataaaca

SEQ ID NO: 52014 - DNA, 22 bp, synthetic construct
  misc_feature 1..22: note = chemically synthesized
  source 1..22: mol_type = other DNA
tagatgacgttgataaacaatc

SEQ ID NO: 52015 - DNA, 22 bp, synthetic construct
  misc_feature 1..22: note = chemically synthesized
  source 1..22: mol_type = other DNA
gatgacgttgataaacaatcgt

SEQ ID NO: 52016 - DNA, 22 bp, synthetic construct
  misc_feature 1..22: note = chemically synthesized
  source 1..22: mol_type = other DNA
ataaacaatcgtcatcctctgg

SEQ ID NO: 52017 - DNA, 22 bp, synthetic construct
  misc_feature 1..22: note = chemically synthesized
  source 1..22: mol_type = other DNA
tggcgtgacctggatgccaacc

SEQ ID NO: 52018 - DNA, 22 bp, synthetic construct
  misc_feature 1..22: note = chemically synthesized
  source 1..22: mol_type = other DNA
gcgtgacctggatgccaacctc

SEQ ID NO: 52019 - DNA, 22 bp, synthetic construct
  misc_feature 1..22: note = chemically synthesized
  source 1..22: mol_type = other DNA
gatgccaacctccacgggattg

SEQ ID NO: 52020 - DNA, 22 bp, synthetic construct
  misc_feature 1..22: note = chemically synthesized
  source 1..22: mol_type = other DNA
cacgggattggatgcttttttc

SEQ ID NO: 52021 - DNA, 22 bp, synthetic construct
  misc_feature 1..22: note = chemically synthesized
  source 1..22: mol_type = other DNA
gatgcttttttcatctcgattg

SEQ ID NO: 52022 - DNA, 22 bp, synthetic construct
  misc_feature 1..22: note = chemically synthesized
  source 1..22: mol_type = other DNA
ttttcatctcgattggtgaagg

SEQ ID NO: 52023 - DNA, 22 bp, synthetic construct
  misc_feature 1..22: note = chemically synthesized
  source 1..22: mol_type = other DNA
tttcatctcgattggtgaaggg

SEQ ID NO: 52024 - DNA, 22 bp, synthetic construct
  misc_feature 1..22: note = chemically synthesized
  source 1..22: mol_type = other DNA
ttcatctcgattggtgaagggg

SEQ ID NO: 52025 - DNA, 22 bp, synthetic construct
  misc_feature 1..22: note = chemically synthesized
  source 1..22: mol_type = other DNA
tcatctcgattggtgaagggga

SEQ ID NO: 52026 - DNA, 22 bp, synthetic construct
  misc_feature 1..22: note = chemically synthesized
  source 1..22: mol_type = other DNA
catctcgattggtgaaggggaa

SEQ ID NO: 52027 - DNA, 22 bp, synthetic construct
  misc_feature 1..22: note = chemically synthesized
  source 1..22: mol_type = other DNA
atctcgattggtgaaggggaag

SEQ ID NO: 52028 - DNA, 22 bp, synthetic construct
  misc_feature 1..22: note = chemically synthesized
  source 1..22: mol_type = other DNA
gattggtgaaggggaaggtggc

SEQ ID NO: 52029 - DNA, 22 bp, synthetic construct
  misc_feature 1..22: note = chemically synthesized
  source 1..22: mol_type = other DNA
gtgaaggggaaggtggcttatc

SEQ ID NO: 52030 - DNA, 22 bp, synthetic construct
  misc_feature 1..22: note = chemically synthesized
  source 1..22: mol_type = other DNA
atccacagctttttctaagcag

SEQ ID NO: 52031 - DNA, 22 bp, synthetic construct
  misc_feature 1..22: note = chemically synthesized
  source 1..22: mol_type = other DNA
tccacagctttttctaagcaga

SEQ ID NO: 52032 - DNA, 22 bp, synthetic construct
  misc_feature 1..22: note = chemically synthesized
  source 1..22: mol_type = other DNA
tttctaagcagaggctgccatt

SEQ ID NO: 52033 - DNA, 22 bp, synthetic construct
  misc_feature 1..22: note = chemically synthesized
  source 1..22: mol_type = other DNA
ttctaagcagaggctgccattg

SEQ ID NO: 52034 - DNA, 22 bp, synthetic construct
  misc_feature 1..22: note = chemically synthesized
  source 1..22: mol_type = other DNA
tctaagcagaggctgccattgc

SEQ ID NO: 52035 - DNA, 22 bp, synthetic construct
  misc_feature 1..22: note = chemically synthesized
  source 1..22: mol_type = other DNA
ctaagcagaggctgccattgca

SEQ ID NO: 52036 - DNA, 22 bp, synthetic construct
  misc_feature 1..22: note = chemically synthesized
  source 1..22: mol_type = other DNA
taagcagaggctgccattgcat

SEQ ID NO: 52037 - DNA, 22 bp, synthetic construct
  misc_feature 1..22: note = chemically synthesized
  source 1..22: mol_type = other DNA
agcagaggctgccattgcattg

SEQ ID NO: 52038 - DNA, 22 bp, synthetic construct
  misc_feature 1..22: note = chemically synthesized
  source 1..22: mol_type = other DNA
ccattgcattgtttccgtttgt

SEQ ID NO: 52039 - DNA, 22 bp, synthetic construct
  misc_feature 1..22: note = chemically synthesized
  source 1..22: mol_type = other DNA
cattgtttccgtttgtgctcga

SEQ ID NO: 52040 - DNA, 22 bp, synthetic construct
  misc_feature 1..22: note = chemically synthesized
  source 1..22: mol_type = other DNA
tttccgtttgtgctcgataaaa

SEQ ID NO: 52041 - DNA, 22 bp, synthetic construct
  misc_feature 1..22: note = chemically synthesized
  source 1..22: mol_type = other DNA
ccgtttgtgctcgataaaaata

SEQ ID NO: 52042 - DNA, 22 bp, synthetic construct
  misc_feature 1..22: note = chemically synthesized
  source 1..22: mol_type = other DNA
cgtttgtgctcgataaaaataa

SEQ ID NO: 52043 - DNA, 22 bp, synthetic construct
  misc_feature 1..22: note = chemically synthesized
  source 1..22: mol_type = other DNA
gtgctcgataaaaataagaatg

SEQ ID NO: 52044 - DNA, 22 bp, synthetic construct
  misc_feature 1..22: note = chemically synthesized
  source 1..22: mol_type = other DNA
tgctcgataaaaataagaatgt

SEQ ID NO: 52045 - DNA, 22 bp, synthetic construct
  misc_feature 1..22: note = chemically synthesized
  source 1..22: mol_type = other DNA
gataaaaataagaatgtccccc

SEQ ID NO: 52046 - DNA, 22 bp, synthetic construct
  misc_feature 1..22: note = chemically synthesized
  source 1..22: mol_type = other DNA
atctggcactgcccacaggtga

SEQ ID NO: 52047 - DNA, 22 bp, synthetic construct
  misc_feature 1..22: note = chemically synthesized
  source 1..22: mol_type = other DNA
gcactgcccacaggtgaggagg

SEQ ID NO: 52048 - DNA, 22 bp, synthetic construct
  misc_feature 1..22: note = chemically synthesized
  source 1..22: mol_type = other DNA
cccacaggtgaggaggtcatga

SEQ ID NO: 52049 - DNA, 22 bp, synthetic construct
  misc_feature 1..22: note = chemically synthesized
  source 1..22: mol_type = other DNA
ctggagctcccaacgggccgtg

SEQ ID NO: 52050 - DNA, 22 bp, synthetic construct
  misc_feature 1..22: note = chemically synthesized
  source 1..22: mol_type = other DNA
tggagctcccaacgggccgtgg

SEQ ID NO: 52051 - DNA, 22 bp, synthetic construct
  misc_feature 1..22: note = chemically synthesized
  source 1..22: mol_type = other DNA
gagctcccaacgggccgtggtc

SEQ ID NO: 52052 - DNA, 22 bp, synthetic construct
  misc_feature 1..22: note = chemically synthesized
  source 1..22: mol_type = other DNA
ccaacgggccgtggtctggttc

SEQ ID NO: 52053 - DNA, 22 bp, synthetic construct
  misc_feature 1..22: note = chemically synthesized
  source 1..22: mol_type = other DNA
gttcatcatctgtaagaatggc

SEQ ID NO: 52054 - DNA, 22 bp, synthetic construct
  misc_feature 1..22: note = chemically synthesized
  source 1..22: mol_type = other DNA
atcatctgtaagaatggcttca

SEQ ID NO: 52055 - DNA, 22 bp, synthetic construct
  misc_feature 1..22: note = chemically synthesized
  source 1..22: mol_type = other DNA
taagaatggcttcaagaggctc

SEQ ID NO: 52056 - DNA, 22 bp, synthetic construct
  misc_feature 1..22: note = chemically synthesized
  source 1..22: mol_type = other DNA
caagaggctcggctgtggttgg

SEQ ID NO: 52057 - DNA, 22 bp, synthetic construct
  misc_feature 1..22: note = chemically synthesized
  source 1..22: mol_type = other DNA
aagaggctcggctgtggttgga

SEQ ID NO: 52058 - DNA, 22 bp, synthetic construct
  misc_feature 1..22: note = chemically synthesized
  source 1..22: mol_type = other DNA
ggctgtggttggagaaacaaaa

SEQ ID NO: 52059 - DNA, 22 bp, synthetic construct
  misc_feature 1..22: note = chemically synthesized
  source 1..22: mol_type = other DNA
tggttggagaaacaaaagcaca

SEQ ID NO: 52060 - DNA, 22 bp, synthetic construct
  misc_feature 1..22: note = chemically synthesized
  source 1..22: mol_type = other DNA
gagaaacaaaagcacaattatt

SEQ ID NO: 52061 - DNA, 22 bp, synthetic construct
  misc_feature 1..22: note = chemically synthesized
  source 1..22: mol_type = other DNA
ttagagtgccagagaggacaga

SEQ ID NO: 52062 - DNA, 22 bp, synthetic construct
  misc_feature 1..22: note = chemically synthesized
  source 1..22: mol_type = other DNA
gagtgccagagaggacagaaag

SEQ ID NO: 52063 - DNA, 22 bp, synthetic construct
  misc_feature 1..22: note = chemically synthesized
  source 1..22: mol_type = other DNA
aaccccatgccatcccaccaca

SEQ ID NO: 52064 - DNA, 22 bp, synthetic construct
  misc_feature 1..22: note = chemically synthesized
  source 1..22: mol_type = other DNA
ctaggcttctctatataatacc

SEQ ID NO: 52065 - DNA, 22 bp, synthetic construct
  misc_feature 1..22: note = chemically synthesized
  source 1..22: mol_type = other DNA
taggcttctctatataataccc

SEQ ID NO: 52066 - DNA, 22 bp, synthetic construct
  misc_feature 1..22: note = chemically synthesized
  source 1..22: mol_type = other DNA
ggcttctctatataatacccag

SEQ ID NO: 52067 - DNA, 22 bp, synthetic construct
  misc_feature 1..22: note = chemically synthesized
  source 1..22: mol_type = other DNA
ctctatataatacccagaaaat

SEQ ID NO: 52068 - DNA, 22 bp, synthetic construct
  misc_feature 1..22: note = chemically synthesized
  source 1..22: mol_type = other DNA
tctatataatacccagaaaatg

SEQ ID NO: 52069 - DNA, 22 bp, synthetic construct
  misc_feature 1..22: note = chemically synthesized
  source 1..22: mol_type = other DNA
tatataatacccagaaaatgtg

SEQ ID NO: 52070 - DNA, 22 bp, synthetic construct
  misc_feature 1..22: note = chemically synthesized
  source 1..22: mol_type = other DNA
tataatacccagaaaatgtgag

SEQ ID NO: 52071 - DNA, 22 bp, synthetic construct
  misc_feature 1..22: note = chemically synthesized
  source 1..22: mol_type = other DNA
tcaaccagagagcaaatttgtc

SEQ ID NO: 52072 - DNA, 22 bp, synthetic construct
  misc_feature 1..22: note = chemically synthesized
  source 1..22: mol_type = other DNA
gtcaatgaggcaaatcatcaca

SEQ ID NO: 52073 - DNA, 22 bp, synthetic construct
  misc_feature 1..22: note = chemically synthesized
  source 1..22: mol_type = other DNA
tcaatgaggcaaatcatcacat

SEQ ID NO: 52074 - DNA, 22 bp, synthetic construct
  misc_feature 1..22: note = chemically synthesized
  source 1..22: mol_type = other DNA
ccttgcataactccagagaaca

SEQ ID NO: 52075 - DNA, 22 bp, synthetic construct
  misc_feature 1..22: note = chemically synthesized
  source 1..22: mol_type = other DNA
cttgcataactccagagaacac

SEQ ID NO: 52076 - DNA, 22 bp, synthetic construct
  misc_feature 1..22: note = chemically synthesized
  source 1..22: mol_type = other DNA
gcataactccagagaacacaca

SEQ ID NO: 52077 - DNA, 22 bp, synthetic construct
  misc_feature 1..22: note = chemically synthesized
  source 1..22: mol_type = other DNA
cataactccagagaacacacac

SEQ ID NO: 52078 - DNA, 22 bp, synthetic construct
  misc_feature 1..22: note = chemically synthesized
  source 1..22: mol_type = other DNA
cagagaacacacacacacacat

SEQ ID NO: 52079 - DNA, 22 bp, synthetic construct
  misc_feature 1..22: note = chemically synthesized
  source 1..22: mol_type = other DNA
gtttgtaagtttagaaagaatg

SEQ ID NO: 52080 - DNA, 22 bp, synthetic construct
  misc_feature 1..22: note = chemically synthesized
  source 1..22: mol_type = other DNA
gtaagtttagaaagaatgctac

SEQ ID NO: 52081 - DNA, 22 bp, synthetic construct
  misc_feature 1..22: note = chemically synthesized
  source 1..22: mol_type = other DNA
taagtttagaaagaatgctact

SEQ ID NO: 52082 - DNA, 22 bp, synthetic construct
  misc_feature 1..22: note = chemically synthesized
  source 1..22: mol_type = other DNA
agaaagaatgctacttaaatag

SEQ ID NO: 52083 - DNA, 22 bp, synthetic construct
  misc_feature 1..22: note = chemically synthesized
  source 1..22: mol_type = other DNA
gaaagaatgctacttaaatagt

SEQ ID NO: 52084 - DNA, 22 bp, synthetic construct
  misc_feature 1..22: note = chemically synthesized
  source 1..22: mol_type = other DNA
cttaaatagttaacacagggaa

SEQ ID NO: 52085 - DNA, 22 bp, synthetic construct
  misc_feature 1..22: note = chemically synthesized
  source 1..22: mol_type = other DNA
aaatagttaacacagggaacat

SEQ ID NO: 52086 - DNA, 22 bp, synthetic construct
  misc_feature 1..22: note = chemically synthesized
  source 1..22: mol_type = other DNA
aatagttaacacagggaacata

SEQ ID NO: 52087 - DNA, 22 bp, synthetic construct
  misc_feature 1..22: note = chemically synthesized
  source 1..22: mol_type = other DNA
acacagggaacataaagaaagc

SEQ ID NO: 52088 - DNA, 22 bp, synthetic construct
  misc_feature 1..22: note = chemically synthesized
  source 1..22: mol_type = other DNA
aaataataactacaagaaaaac

SEQ ID NO: 52089 - DNA, 22 bp, synthetic construct
  misc_feature 1..22: note = chemically synthesized
  source 1..22: mol_type = other DNA
aataataactacaagaaaaact

SEQ ID NO: 52090 - DNA, 22 bp, synthetic construct
  misc_feature 1..22: note = chemically synthesized
  source 1..22: mol_type = other DNA
caagaaaaactggttaaaaaaa

SEQ ID NO: 52091 - DNA, 22 bp, synthetic construct
  misc_feature 1..22: note = chemically synthesized
  source 1..22: mol_type = other DNA
gttaaaaaaaaaagtggataga

SEQ ID NO: 52092 - DNA, 22 bp, synthetic construct
  misc_feature 1..22: note = chemically synthesized
  source 1..22: mol_type = other DNA
aaaaaaaaagtggatagaaacc

SEQ ID NO: 52093 - DNA, 22 bp, synthetic construct
  misc_feature 1..22: note = chemically synthesized
  source 1..22: mol_type = other DNA
gtttcttttttcctatacacca

SEQ ID NO: 52094 - DNA, 22 bp, synthetic construct
  misc_feature 1..22: note = chemically synthesized
  source 1..22: mol_type = other DNA
tttcttttttcctatacaccaa

SEQ ID NO: 52095 - DNA, 22 bp, synthetic construct
  misc_feature 1..22: note = chemically synthesized
  source 1..22: mol_type = other DNA
cttttttcctatacaccaagtt

SEQ ID NO: 52096 - DNA, 22 bp, synthetic construct
  misc_feature 1..22: note = chemically synthesized
  source 1..22: mol_type = other DNA
ttttttcctatacaccaagttg

SEQ ID NO: 52097 - DNA, 22 bp, synthetic construct
  misc_feature 1..22: note = chemically synthesized
  source 1..22: mol_type = other DNA
ttttcctatacaccaagttgtc

SEQ ID NO: 52098 - DNA, 22 bp, synthetic construct
  misc_feature 1..22: note = chemically synthesized
  source 1..22: mol_type = other DNA
tttcctatacaccaagttgtcc

SEQ ID NO: 52099 - DNA, 22 bp, synthetic construct
  misc_feature 1..22: note = chemically synthesized
  source 1..22: mol_type = other DNA
ttcctatacaccaagttgtcca

SEQ ID NO: 52100 - DNA, 22 bp, synthetic construct
  misc_feature 1..22: note = chemically synthesized
  source 1..22: mol_type = other DNA
tcctatacaccaagttgtccat

SEQ ID NO: 52101 - DNA, 22 bp, synthetic construct
  misc_feature 1..22: note = chemically synthesized
  source 1..22: mol_type = other DNA
cctatacaccaagttgtccatt

SEQ ID NO: 52102 - DNA, 22 bp, synthetic construct
  misc_feature 1..22: note = chemically synthesized
  source 1..22: mol_type = other DNA
ctatacaccaagttgtccattg

SEQ ID NO: 52103 - DNA, 22 bp, synthetic construct
  misc_feature 1..22: note = chemically synthesized
  source 1..22: mol_type = other DNA
tacaccaagttgtccattgtgc

SEQ ID NO: 52104 - DNA, 22 bp, synthetic construct
  misc_feature 1..22: note = chemically synthesized
  source 1..22: mol_type = other DNA
tccattgtgccaaagaatgaaa

SEQ ID NO: 52105 - DNA, 22 bp, synthetic construct
  misc_feature 1..22: note = chemically synthesized
  source 1..22: mol_type = other DNA
tgccaaagaatgaaaggagagg

SEQ ID NO: 52106 - DNA, 22 bp, synthetic construct
  misc_feature 1..22: note = chemically synthesized
  source 1..22: mol_type = other DNA
tgtgtgtgaatgtatatactcc

SEQ ID NO: 52107 - DNA, 22 bp, synthetic construct
  misc_feature 1..22: note = chemically synthesized
  source 1..22: mol_type = other DNA
gtgtgtgaatgtatatactcct

SEQ ID NO: 52108 - DNA, 22 bp, synthetic construct
  misc_feature 1..22: note = chemically synthesized
  source 1..22: mol_type = other DNA
tgtgtgaatgtatatactccta

SEQ ID NO: 52109 - DNA, 22 bp, synthetic construct
  misc_feature 1..22: note = chemically synthesized
  source 1..22: mol_type = other DNA
ctaagtaaacagacatggcttc

SEQ ID NO: 52110 - DNA, 22 bp, synthetic construct
  misc_feature 1..22: note = chemically synthesized
  source 1..22: mol_type = other DNA
agtaaacagacatggcttcata

SEQ ID NO: 52111 - DNA, 22 bp, synthetic construct
  misc_feature 1..22: note = chemically synthesized
  source 1..22: mol_type = other DNA
cataaattagaaagctactatg

SEQ ID NO: 52112 - DNA, 22 bp, synthetic construct
  misc_feature 1..22: note = chemically synthesized
  source 1..22: mol_type = other DNA
ataaattagaaagctactatgt

SEQ ID NO: 52113 - DNA, 22 bp, synthetic construct
  misc_feature 1..22: note = chemically synthesized
  source 1..22: mol_type = other DNA
gaaagctactatgtcacatgaa

SEQ ID NO: 52114 - DNA, 22 bp, synthetic construct
  misc_feature 1..22: note = chemically synthesized
  source 1..22: mol_type = other DNA
ctatgtcacatgaaaaatgtgc

SEQ ID NO: 52115 - DNA, 22 bp, synthetic construct
  misc_feature 1..22: note = chemically synthesized
  source 1..22: mol_type = other DNA
tgtcacatgaaaaatgtgccac

SEQ ID NO: 52116 - DNA, 22 bp, synthetic construct
  misc_feature 1..22: note = chemically synthesized
  source 1..22: mol_type = other DNA
acactgctgtaataagaaaacg

SEQ ID NO: 52117 - DNA, 22 bp, synthetic construct
  misc_feature 1..22: note = chemically synthesized
  source 1..22: mol_type = other DNA
cactgctgtaataagaaaacga

SEQ ID NO: 52118 - DNA, 22 bp, synthetic construct
  misc_feature 1..22: note = chemically synthesized
  source 1..22: mol_type = other DNA
ctgtaataagaaaacgactgca

SEQ ID NO: 52119 - DNA, 22 bp, synthetic construct
  misc_feature 1..22: note = chemically synthesized
  source 1..22: mol_type = other DNA
taataagaaaacgactgcatgc

SEQ ID NO: 52120 - DNA, 22 bp, synthetic construct
  misc_feature 1..22: note = chemically synthesized
  source 1..22: mol_type = other DNA
catgcacctatgaaacggatct

SEQ ID NO: 52121 - DNA, 22 bp, synthetic construct
  misc_feature 1..22: note = chemically synthesized
  source 1..22: mol_type = other DNA
tgaaacggatctaaataataat

SEQ ID NO: 52122 - DNA, 22 bp, synthetic construct
  misc_feature 1..22: note = chemically synthesized
  source 1..22: mol_type = other DNA
aataataatcatgtcgcagcat

SEQ ID NO: 52123 - DNA, 22 bp, synthetic construct
  misc_feature 1..22: note = chemically synthesized
  source 1..22: mol_type = other DNA
acactgccaaaaacctttctgc

SEQ ID NO: 52124 - DNA, 22 bp, synthetic construct
  misc_feature 1..22: note = chemically synthesized
  source 1..22: mol_type = other DNA
ccaaaaacctttctgctctcac

SEQ ID NO: 52125 - DNA, 22 bp, synthetic construct
  misc_feature 1..22: note = chemically synthesized
  source 1..22: mol_type = other DNA
tctgctctcactctcagcagtg

SEQ ID NO: 52126 - DNA, 22 bp, synthetic construct
  misc_feature 1..22: note = chemically synthesized
  source 1..22: mol_type = other DNA
ctgctctcactctcagcagtgc

SEQ ID NO: 52127 - DNA, 22 bp, synthetic construct
  misc_feature 1..22: note = chemically synthesized
  source 1..22: mol_type = other DNA
tgctctcactctcagcagtgcc

SEQ ID NO: 52128 - DNA, 22 bp, synthetic construct
  misc_feature 1..22: note = chemically synthesized
  source 1..22: mol_type = other DNA
ctctcactctcagcagtgccac

SEQ ID NO: 52129 - DNA, 22 bp, synthetic construct
  misc_feature 1..22: note = chemically synthesized
  source 1..22: mol_type = other DNA
tcactctcagcagtgccacaaa

SEQ ID NO: 52130 - DNA, 22 bp, synthetic construct
  misc_feature 1..22: note = chemically synthesized
  source 1..22: mol_type = other DNA
actctcagcagtgccacaaaat

SEQ ID NO: 52131 - DNA, 22 bp, synthetic construct
  misc_feature 1..22: note = chemically synthesized
  source 1..22: mol_type = other DNA
tcagcagtgccacaaaatcaaa

SEQ ID NO: 52132 - DNA, 22 bp, synthetic construct
  misc_feature 1..22: note = chemically synthesized
  source 1..22: mol_type = other DNA
agcagtgccacaaaatcaaaga

SEQ ID NO: 52133 - DNA, 22 bp, synthetic construct
  misc_feature 1..22: note = chemically synthesized
  source 1..22: mol_type = other DNA
ctcagacacattagctaaatgg

SEQ ID NO: 52134 - DNA, 22 bp, synthetic construct
  misc_feature 1..22: note = chemically synthesized
  source 1..22: mol_type = other DNA
tcagacacattagctaaatggg

SEQ ID NO: 52135 - DNA, 22 bp, synthetic construct
  misc_feature 1..22: note = chemically synthesized
  source 1..22: mol_type = other DNA
agacacattagctaaatgggat

SEQ ID NO: 52136 - DNA, 22 bp, synthetic construct
  misc_feature 1..22: note = chemically synthesized
  source 1..22: mol_type = other DNA
gctaaatgggatacttttgagt

SEQ ID NO: 52137 - DNA, 22 bp, synthetic construct
  misc_feature 1..22: note = chemically synthesized
  source 1..22: mol_type = other DNA
aatgggatacttttgagtactt

SEQ ID NO: 52138 - DNA, 22 bp, synthetic construct
  misc_feature 1..22: note = chemically synthesized
  source 1..22: mol_type = other DNA
ttgagtacttaagaaaataagc

SEQ ID NO: 52139 - DNA, 22 bp, synthetic construct
  misc_feature 1..22: note = chemically synthesized
  source 1..22: mol_type = other DNA
tgagtacttaagaaaataagcc

SEQ ID NO: 52140 - DNA, 22 bp, synthetic construct
  misc_feature 1..22: note = chemically synthesized
  source 1..22: mol_type = other DNA
gagtacttaagaaaataagcca

SEQ ID NO: 52141 - DNA, 22 bp, synthetic construct
  misc_feature 1..22: note = chemically synthesized
  source 1..22: mol_type = other DNA
agtacttaagaaaataagccaa

SEQ ID NO: 52142 - DNA, 22 bp, synthetic construct
  misc_feature 1..22: note = chemically synthesized
  source 1..22: mol_type = other DNA
aagaaaataagccaattagtca

SEQ ID NO: 52143 - DNA, 22 bp, synthetic construct
  misc_feature 1..22: note = chemically synthesized
  source 1..22: mol_type = other DNA
agaaaataagccaattagtcat

SEQ ID NO: 52144 - DNA, 22 bp, synthetic construct
  misc_feature 1..22: note = chemically synthesized
  source 1..22: mol_type = other DNA
gtcattttttttttattctgag

SEQ ID NO: 52145 - DNA, 22 bp, synthetic construct
  misc_feature 1..22: note = chemically synthesized
  source 1..22: mol_type = other DNA
tttttttattctgagaaatgga

SEQ ID NO: 52146 - DNA, 22 bp, synthetic construct
  misc_feature 1..22: note = chemically synthesized
  source 1..22: mol_type = other DNA
ttttttattctgagaaatggaa

SEQ ID NO: 52147 - DNA, 22 bp, synthetic construct
  misc_feature 1..22: note = chemically synthesized
  source 1..22: mol_type = other DNA
tttttattctgagaaatggaat

SEQ ID NO: 52148 - DNA, 22 bp, synthetic construct
  misc_feature 1..22: note = chemically synthesized
  source 1..22: mol_type = other DNA
ttttattctgagaaatggaatg

SEQ ID NO: 52149 - DNA, 22 bp, synthetic construct
  misc_feature 1..22: note = chemically synthesized
  source 1..22: mol_type = other DNA
tttattctgagaaatggaatgc

SEQ ID NO: 52150 - DNA, 22 bp, synthetic construct
  misc_feature 1..22: note = chemically synthesized
  source 1..22: mol_type = other DNA
ttattctgagaaatggaatgcc

SEQ ID NO: 52151 - DNA, 22 bp, synthetic construct
  misc_feature 1..22: note = chemically synthesized
  source 1..22: mol_type = other DNA
tattctgagaaatggaatgcct

SEQ ID NO: 52152 - DNA, 22 bp, synthetic construct
  misc_feature 1..22: note = chemically synthesized
  source 1..22: mol_type = other DNA
attctgagaaatggaatgccta

SEQ ID NO: 52153 - DNA, 22 bp, synthetic construct
  misc_feature 1..22: note = chemically synthesized
  source 1..22: mol_type = other DNA
ttctgagaaatggaatgcctat

SEQ ID NO: 52154 - DNA, 22 bp, synthetic construct
  misc_feature 1..22: note = chemically synthesized
  source 1..22: mol_type = other DNA
tgagaaatggaatgcctataat

SEQ ID NO: 52155 - DNA, 22 bp, synthetic construct
  misc_feature 1..22: note = chemically synthesized
  source 1..22: mol_type = other DNA
agaaatggaatgcctataatat

SEQ ID NO: 52156 - DNA, 22 bp, synthetic construct
  misc_feature 1..22: note = chemically synthesized
  source 1..22: mol_type = other DNA
taatattctaaacatgtttgca

SEQ ID NO: 52157 - DNA, 22 bp, synthetic construct
  misc_feature 1..22: note = chemically synthesized
  source 1..22: mol_type = other DNA
taaacatgtttgcacttggtgg

SEQ ID NO: 52158 - DNA, 22 bp, synthetic construct
  misc_feature 1..22: note = chemically synthesized
  source 1..22: mol_type = other DNA
aacatgtttgcacttggtggca

SEQ ID NO: 52159 - DNA, 22 bp, synthetic construct
  misc_feature 1..22: note = chemically synthesized
  source 1..22: mol_type = other DNA
gcacttggtggcatctatgata

SEQ ID NO: 52160 - DNA, 22 bp, synthetic construct
  misc_feature 1..22: note = chemically synthesized
  source 1..22: mol_type = other DNA
cacttggtggcatctatgatat

SEQ ID NO: 52161 - DNA, 22 bp, synthetic construct
  misc_feature 1..22: note = chemically synthesized
  source 1..22: mol_type = other DNA
ggtggcatctatgatataaaaa

SEQ ID NO: 52162 - DNA, 22 bp, synthetic construct
  misc_feature 1..22: note = chemically synthesized
  source 1..22: mol_type = other DNA
gtggcatctatgatataaaaat

SEQ ID NO: 52163 - DNA, 22 bp, synthetic construct
  misc_feature 1..22: note = chemically synthesized
  source 1..22: mol_type = other DNA
tgatataaaaatcagaatggtc

SEQ ID NO: 52164 - DNA, 22 bp, synthetic construct
  misc_feature 1..22: note = chemically synthesized
  source 1..22: mol_type = other DNA
cagagcaaggctgagaagtcct

SEQ ID NO: 52165 - DNA, 22 bp, synthetic construct
  misc_feature 1..22: note = chemically synthesized
  source 1..22: mol_type = other DNA
agagcaaggctgagaagtcctt

SEQ ID NO: 52166 - DNA, 22 bp, synthetic construct
  misc_feature 1..22: note = chemically synthesized
  source 1..22: mol_type = other DNA
agaagtcctttctttagacttg

SEQ ID NO: 52167 - DNA, 22 bp, synthetic construct
  misc_feature 1..22: note = chemically synthesized
  source 1..22: mol_type = other DNA
tctttagacttgaaatacttcg

SEQ ID NO: 52168 - DNA, 22 bp, synthetic construct
  misc_feature 1..22: note = chemically synthesized
  source 1..22: mol_type = other DNA
ctttagacttgaaatacttcgc

SEQ ID NO: 52169 - DNA, 22 bp, synthetic construct
  misc_feature 1..22: note = chemically synthesized
  source 1..22: mol_type = other DNA
tttagacttgaaatacttcgcc

SEQ ID NO: 52170 - DNA, 22 bp, synthetic construct
  misc_feature 1..22: note = chemically synthesized
  source 1..22: mol_type = other DNA
tagacttgaaatacttcgccta

SEQ ID NO: 52171 - DNA, 22 bp, synthetic construct
  misc_feature 1..22: note = chemically synthesized
  source 1..22: mol_type = other DNA
agacttgaaatacttcgcctaa

SEQ ID NO: 52172 - DNA, 22 bp, synthetic construct
  misc_feature 1..22: note = chemically synthesized
  source 1..22: mol_type = other DNA
gacttgaaatacttcgcctaat

SEQ ID NO: 52173 - DNA, 22 bp, synthetic construct
  misc_feature 1..22: note = chemically synthesized
  source 1..22: mol_type = other DNA
gaaatacttcgcctaatgttgt

SEQ ID NO: 52174 - DNA, 22 bp, synthetic construct
  misc_feature 1..22: note = chemically synthesized
  source 1..22: mol_type = other DNA
aaatacttcgcctaatgttgtc

SEQ ID NO: 52175 - DNA, 22 bp, synthetic construct
  misc_feature 1..22: note = chemically synthesized
  source 1..22: mol_type = other DNA
cgcctaatgttgtcaaagtgga

SEQ ID NO: 52176 - DNA, 22 bp, synthetic construct
  misc_feature 1..22: note = chemically synthesized
  source 1..22: mol_type = other DNA
gcctaatgttgtcaaagtggac

SEQ ID NO: 52177 - DNA, 22 bp, synthetic construct
  misc_feature 1..22: note = chemically synthesized
  source 1..22: mol_type = other DNA
atgttgtcaaagtggactaatt

SEQ ID NO: 52178 - DNA, 22 bp, synthetic construct
  misc_feature 1..22: note = chemically synthesized
  source 1..22: mol_type = other DNA
tcaaagtggactaattttctga

SEQ ID NO: 52179 - DNA, 22 bp, synthetic construct
  misc_feature 1..22: note = chemically synthesized
  source 1..22: mol_type = other DNA
attttctgaatgagctccaaaa

SEQ ID NO: 52180 - DNA, 22 bp, synthetic construct
  misc_feature 1..22: note = chemically synthesized
  source 1..22: mol_type = other DNA
tctgaatgagctccaaaatgct

SEQ ID NO: 52181 - DNA, 22 bp, synthetic construct
  misc_feature 1..22: note = chemically synthesized
  source 1..22: mol_type = other DNA
ctgaatgagctccaaaatgctt

SEQ ID NO: 52182 - DNA, 22 bp, synthetic construct
  misc_feature 1..22: note = chemically synthesized
  source 1..22: mol_type = other DNA
tgaatgagctccaaaatgcttc

SEQ ID NO: 52183 - DNA, 22 bp, synthetic construct
  misc_feature 1..22: note = chemically synthesized
  source 1..22: mol_type = other DNA
aatgagctccaaaatgcttcat

SEQ ID NO: 52184 - DNA, 22 bp, synthetic construct
  misc_feature 1..22: note = chemically synthesized
  source 1..22: mol_type = other DNA
caaaatgcttcattatgagact

SEQ ID NO: 52185 - DNA, 22 bp, synthetic construct
  misc_feature 1..22: note = chemically synthesized
  source 1..22: mol_type = other DNA
cattatgagactatttctgcac

SEQ ID NO: 52186 - DNA, 22 bp, synthetic construct
  misc_feature 1..22: note = chemically synthesized
  source 1..22: mol_type = other DNA
attatgagactatttctgcaca

SEQ ID NO: 52187 - DNA, 22 bp, synthetic construct
  misc_feature 1..22: note = chemically synthesized
  source 1..22: mol_type = other DNA
tgagactatttctgcacacata

SEQ ID NO: 52188 - DNA, 22 bp, synthetic construct
  misc_feature 1..22: note = chemically synthesized
  source 1..22: mol_type = other DNA
tttctgcacacataatcaccag

SEQ ID NO: 52189 - DNA, 22 bp, synthetic construct
  misc_feature 1..22: note = chemically synthesized
  source 1..22: mol_type = other DNA
ctgcacacataatcaccagcgg

SEQ ID NO: 52190 - DNA, 22 bp, synthetic construct
  misc_feature 1..22: note = chemically synthesized
  source 1..22: mol_type = other DNA
tgcacacataatcaccagcgga

SEQ ID NO: 52191 - DNA, 22 bp, synthetic construct
  misc_feature 1..22: note = chemically synthesized
  source 1..22: mol_type = other DNA
cacacataatcaccagcggatg

SEQ ID NO: 52192 - DNA, 22 bp, synthetic construct
  misc_feature 1..22: note = chemically synthesized
  source 1..22: mol_type = other DNA
tctttcctgtttgctttttttt

SEQ ID NO: 52193 - DNA, 22 bp, synthetic construct
  misc_feature 1..22: note = chemically synthesized
  source 1..22: mol_type = other DNA
ctttcctgtttgcttttttttt

SEQ ID NO: 52194 - DNA, 22 bp, synthetic construct
  misc_feature 1..22: note = chemically synthesized
  source 1..22: mol_type = other DNA
tttcctgtttgctttttttttt

SEQ ID NO: 52195 - DNA, 22 bp, synthetic construct
  misc_feature 1..22: note = chemically synthesized
  source 1..22: mol_type = other DNA
tcctgtttgcttttttttttaa

SEQ ID NO: 52196 - DNA, 22 bp, synthetic construct
  misc_feature 1..22: note = chemically synthesized
  source 1..22: mol_type = other DNA
cctgtttgcttttttttttaac

SEQ ID NO: 52197 - DNA, 22 bp, synthetic construct
  misc_feature 1..22: note = chemically synthesized
  source 1..22: mol_type = other DNA
ctgtttgcttttttttttaact

SEQ ID NO: 52198 - DNA, 22 bp, synthetic construct
  misc_feature 1..22: note = chemically synthesized
  source 1..22: mol_type = other DNA
tttgcttttttttttaactttg

SEQ ID NO: 52199 - DNA, 22 bp, synthetic construct
  misc_feature 1..22: note = chemically synthesized
  source 1..22: mol_type = other DNA
gcttttttttttaactttgtac

SEQ ID NO: 52200 - DNA, 22 bp, synthetic construct
  misc_feature 1..22: note = chemically synthesized
  source 1..22: mol_type = other DNA
cttttttttttaactttgtact

SEQ ID NO: 52201 - DNA, 22 bp, synthetic construct
  misc_feature 1..22: note = chemically synthesized
  source 1..22: mol_type = other DNA
ttttttttaactttgtactaaa

SEQ ID NO: 52202 - DNA, 22 bp, synthetic construct
  misc_feature 1..22: note = chemically synthesized
  source 1..22: mol_type = other DNA
tttttttaactttgtactaaaa

SEQ ID NO: 52203 - DNA, 22 bp, synthetic construct
  misc_feature 1..22: note = chemically synthesized
  source 1..22: mol_type = other DNA
ttttttaactttgtactaaaat

SEQ ID NO: 52204 - DNA, 22 bp, synthetic construct
  misc_feature 1..22: note = chemically synthesized
  source 1..22: mol_type = other DNA
tttttaactttgtactaaaata

SEQ ID NO: 52205 - DNA, 22 bp, synthetic construct
  misc_feature 1..22: note = chemically synthesized
  source 1..22: mol_type = other DNA
ttttaactttgtactaaaatac

SEQ ID NO: 52206 - DNA, 22 bp, synthetic construct
  misc_feature 1..22: note = chemically synthesized
  source 1..22: mol_type = other DNA
tttaactttgtactaaaatact

SEQ ID NO: 52207 - DNA, 22 bp, synthetic construct
  misc_feature 1..22: note = chemically synthesized
  source 1..22: mol_type = other DNA
ttaactttgtactaaaatactc

SEQ ID NO: 52208 - DNA, 22 bp, synthetic construct
  misc_feature 1..22: note = chemically synthesized
  source 1..22: mol_type = other DNA
taactttgtactaaaatactcc

SEQ ID NO: 52209 - DNA, 22 bp, synthetic construct
  misc_feature 1..22: note = chemically synthesized
  source 1..22: mol_type = other DNA
aactttgtactaaaatactcca

SEQ ID NO: 52210 - DNA, 22 bp, synthetic construct
  misc_feature 1..22: note = chemically synthesized
  source 1..22: mol_type = other DNA
actttgtactaaaatactccag

SEQ ID NO: 52211 - DNA, 22 bp, synthetic construct
  misc_feature 1..22: note = chemically synthesized
  source 1..22: mol_type = other DNA
tgtactaaaatactccagcatc

SEQ ID NO: 52212 - DNA, 22 bp, synthetic construct
  misc_feature 1..22: note = chemically synthesized
  source 1..22: mol_type = other DNA
gtactaaaatactccagcatct

SEQ ID NO: 52213 - DNA, 22 bp, synthetic construct
  misc_feature 1..22: note = chemically synthesized
  source 1..22: mol_type = other DNA
tactaaaatactccagcatcta

SEQ ID NO: 52214 - DNA, 22 bp, synthetic construct
  misc_feature 1..22: note = chemically synthesized
  source 1..22: mol_type = other DNA
aaatactccagcatctacttta

SEQ ID NO: 52215 - DNA, 22 bp, synthetic construct
  misc_feature 1..22: note = chemically synthesized
  source 1..22: mol_type = other DNA
cagcatctactttaccagcttc

SEQ ID NO: 52216 - DNA, 22 bp, synthetic construct
  misc_feature 1..22: note = chemically synthesized
  source 1..22: mol_type = other DNA
ctttaccagcttctatcatttt

SEQ ID NO: 52217 - DNA, 22 bp, synthetic construct
  misc_feature 1..22: note = chemically synthesized
  source 1..22: mol_type = other DNA
taccagcttctatcatttttta

SEQ ID NO: 52218 - DNA, 22 bp, synthetic construct
  misc_feature 1..22: note = chemically synthesized
  source 1..22: mol_type = other DNA
accagcttctatcattttttaa

SEQ ID NO: 52219 - DNA, 22 bp, synthetic construct
  misc_feature 1..22: note = chemically synthesized
  source 1..22: mol_type = other DNA
ccagcttctatcattttttaag

SEQ ID NO: 52220 - DNA, 22 bp, synthetic construct
  misc_feature 1..22: note = chemically synthesized
  source 1..22: mol_type = other DNA
ctatcattttttaagcttccaa

SEQ ID NO: 52221 - DNA, 22 bp, synthetic construct
  misc_feature 1..22: note = chemically synthesized
  source 1..22: mol_type = other DNA
tatcattttttaagcttccaaa

SEQ ID NO: 52222 - DNA, 22 bp, synthetic construct
  misc_feature 1..22: note = chemically synthesized
  source 1..22: mol_type = other DNA
tcattttttaagcttccaaagg

SEQ ID NO: 52223 - DNA, 22 bp, synthetic construct
  misc_feature 1..22: note = chemically synthesized
  source 1..22: mol_type = other DNA
tttaagcttccaaaggggaaaa

SEQ ID NO: 52224 - DNA, 22 bp, synthetic construct
  misc_feature 1..22: note = chemically synthesized
  source 1..22: mol_type = other DNA
ttaagcttccaaaggggaaaag

SEQ ID NO: 52225 - DNA, 22 bp, synthetic construct
  misc_feature 1..22: note = chemically synthesized
  source 1..22: mol_type = other DNA
taagcttccaaaggggaaaaga

SEQ ID NO: 52226 - DNA, 22 bp, synthetic construct
  misc_feature 1..22: note = chemically synthesized
  source 1..22: mol_type = other DNA
aagcttccaaaggggaaaagag

SEQ ID NO: 52227 - DNA, 22 bp, synthetic construct
  misc_feature 1..22: note = chemically synthesized
  source 1..22: mol_type = other DNA
agcttccaaaggggaaaagaga

SEQ ID NO: 52228 - DNA, 22 bp, synthetic construct
  misc_feature 1..22: note = chemically synthesized
  source 1..22: mol_type = other DNA
ccaaaggggaaaagagagttgg

SEQ ID NO: 52229 - DNA, 22 bp, synthetic construct
  misc_feature 1..22: note = chemically synthesized
  source 1..22: mol_type = other DNA
caaaggggaaaagagagttggt

SEQ ID NO: 52230 - DNA, 22 bp, synthetic construct
  misc_feature 1..22: note = chemically synthesized
  source 1..22: mol_type = other DNA
gtaagtctctgcttgtgaaatc

SEQ ID NO: 52231 - DNA, 22 bp, synthetic construct
  misc_feature 1..22: note = chemically synthesized
  source 1..22: mol_type = other DNA
tgcttgtgaaatcttatgcttg

SEQ ID NO: 52232 - DNA, 22 bp, synthetic construct
  misc_feature 1..22: note = chemically synthesized
  source 1..22: mol_type = other DNA
cttgtgaaatcttatgcttgct

SEQ ID NO: 52233 - DNA, 22 bp, synthetic construct
  misc_feature 1..22: note = chemically synthesized
  source 1..22: mol_type = other DNA
gtgaaatcttatgcttgctcta

SEQ ID NO: 52234 - DNA, 22 bp, synthetic construct
  misc_feature 1..22: note = chemically synthesized
  source 1..22: mol_type = other DNA
tgaaatcttatgcttgctctat

SEQ ID NO: 52235 - DNA, 22 bp, synthetic construct
  misc_feature 1..22: note = chemically synthesized
  source 1..22: mol_type = other DNA
atgcttgctctatcaaaaaaaa

SEQ ID NO: 52236 - DNA, 22 bp, synthetic construct
  misc_feature 1..22: note = chemically synthesized
  source 1..22: mol_type = other DNA
tgcttgctctatcaaaaaaaaa

SEQ ID NO: 52237 - DNA, 22 bp, synthetic construct
  misc_feature 1..22: note = chemically synthesized
  source 1..22: mol_type = other DNA
gctctatcaaaaaaaaaaaaaa

SEQ ID NO: 52238 - DNA, 22 bp, synthetic construct
  misc_feature 1..22: note = chemically synthesized
  source 1..22: mol_type = other DNA
ctctatcaaaaaaaaaaaaaaa

SEQ ID NO: 52239 - DNA, 22 bp, synthetic construct
  misc_feature 1..22: note = chemically synthesized
  source 1..22: mol_type = other DNA
tatcaaaaaaaaaaaaaaaatc

SEQ ID NO: 52240 - DNA, 22 bp, synthetic construct
  misc_feature 1..22: note = chemically synthesized
  source 1..22: mol_type = other DNA
tcaaaaaaaaaaaaaaaatcac

SEQ ID NO: 52241 - DNA, 22 bp, synthetic construct
  misc_feature 1..22: note = chemically synthesized
  source 1..22: mol_type = other DNA
ccagttaataaaactgaagcag

SEQ ID NO: 52242 - DNA, 22 bp, synthetic construct
  misc_feature 1..22: note = chemically synthesized
  source 1..22: mol_type = other DNA
ataaaactgaagcagaaaatgt

SEQ ID NO: 52243 - DNA, 22 bp, synthetic construct
  misc_feature 1..22: note = chemically synthesized
  source 1..22: mol_type = other DNA
aagcagaaaatgtacaagtctt

SEQ ID NO: 52244 - DNA, 22 bp, synthetic construct
  misc_feature 1..22: note = chemically synthesized
  source 1..22: mol_type = other DNA
aaacagttaatcagtctgacct

SEQ ID NO: 52245 - DNA, 22 bp, synthetic construct
  misc_feature 1..22: note = chemically synthesized
  source 1..22: mol_type = other DNA
aacagttaatcagtctgacctt

SEQ ID NO: 52246 - DNA, 22 bp, synthetic construct
  misc_feature 1..22: note = chemically synthesized
  source 1..22: mol_type = other DNA
atcagtctgaccttctttagca

SEQ ID NO: 52247 - DNA, 22 bp, synthetic construct
  misc_feature 1..22: note = chemically synthesized
  source 1..22: mol_type = other DNA
accttctttagcaagctgccaa

SEQ ID NO: 52248 - DNA, 22 bp, synthetic construct
  misc_feature 1..22: note = chemically synthesized
  source 1..22: mol_type = other DNA
ctttagcaagctgccaatttta

SEQ ID NO: 52249 - DNA, 22 bp, synthetic construct
  misc_feature 1..22: note = chemically synthesized
  source 1..22: mol_type = other DNA
tttagcaagctgccaattttac

SEQ ID NO: 52250 - DNA, 22 bp, synthetic construct
  misc_feature 1..22: note = chemically synthesized
  source 1..22: mol_type = other DNA
tagcaagctgccaattttacat

SEQ ID NO: 52251 - DNA, 22 bp, synthetic construct
  misc_feature 1..22: note = chemically synthesized
  source 1..22: mol_type = other DNA
agcaagctgccaattttacatt

SEQ ID NO: 52252 - DNA, 22 bp, synthetic construct
  misc_feature 1..22: note = chemically synthesized
  source 1..22: mol_type = other DNA
gcaagctgccaattttacattt

SEQ ID NO: 52253 - DNA, 22 bp, synthetic construct
  misc_feature 1..22: note = chemically synthesized
  source 1..22: mol_type = other DNA
ccaattttacatttaatgaact

SEQ ID NO: 52254 - DNA, 22 bp, synthetic construct
  misc_feature 1..22: note = chemically synthesized
  source 1..22: mol_type = other DNA
tacatttaatgaacttaaagcc

SEQ ID NO: 52255 - DNA, 22 bp, synthetic construct
  misc_feature 1..22: note = chemically synthesized
  source 1..22: mol_type = other DNA
acatttaatgaacttaaagcca

SEQ ID NO: 52256 - DNA, 22 bp, synthetic construct
  misc_feature 1..22: note = chemically synthesized
  source 1..22: mol_type = other DNA
catttaatgaacttaaagccac

SEQ ID NO: 52257 - DNA, 22 bp, synthetic construct
  misc_feature 1..22: note = chemically synthesized
  source 1..22: mol_type = other DNA
aatgaacttaaagccacagaga

SEQ ID NO: 52258 - DNA, 22 bp, synthetic construct
  misc_feature 1..22: note = chemically synthesized
  source 1..22: mol_type = other DNA
atgaacttaaagccacagagaa

SEQ ID NO: 52259 - DNA, 22 bp, synthetic construct
  misc_feature 1..22: note = chemically synthesized
  source 1..22: mol_type = other DNA
aaagccacagagaatcaaaaaa

SEQ ID NO: 52260 - DNA, 22 bp, synthetic construct
  misc_feature 1..22: note = chemically synthesized
  source 1..22: mol_type = other DNA
aagccacagagaatcaaaaaat

SEQ ID NO: 52261 - DNA, 22 bp, synthetic construct
  misc_feature 1..22: note = chemically synthesized
  source 1..22: mol_type = other DNA
taatttgagtgtagaatattgg

SEQ ID NO: 52262 - DNA, 22 bp, synthetic construct
  misc_feature 1..22: note = chemically synthesized
  source 1..22: mol_type = other DNA
aatttgagtgtagaatattgga

SEQ ID NO: 52263 - DNA, 22 bp, synthetic construct
  misc_feature 1..22: note = chemically synthesized
  source 1..22: mol_type = other DNA
atttgagtgtagaatattggaa

SEQ ID NO: 52264 - DNA, 22 bp, synthetic construct
  misc_feature 1..22: note = chemically synthesized
  source 1..22: mol_type = other DNA
gagtgtagaatattggaacaga

SEQ ID NO: 52265 - DNA, 22 bp, synthetic construct
  misc_feature 1..22: note = chemically synthesized
  source 1..22: mol_type = other DNA
agtgtagaatattggaacagat

SEQ ID NO: 52266 - DNA, 22 bp, synthetic construct
  misc_feature 1..22: note = chemically synthesized
  source 1..22: mol_type = other DNA
gaacagattttgataaagtgca

SEQ ID NO: 52267 - DNA, 22 bp, synthetic construct
  misc_feature 1..22: note = chemically synthesized
  source 1..22: mol_type = other DNA
tgataaagtgcaaaaatccagt

SEQ ID NO: 52268 - DNA, 22 bp, synthetic construct
  misc_feature 1..22: note = chemically synthesized
  source 1..22: mol_type = other DNA
gataaagtgcaaaaatccagtg

SEQ ID NO: 52269 - DNA, 22 bp, synthetic construct
  misc_feature 1..22: note = chemically synthesized
  source 1..22: mol_type = other DNA
ataaagtgcaaaaatccagtga

SEQ ID NO: 52270 - DNA, 22 bp, synthetic construct
  misc_feature 1..22: note = chemically synthesized
  source 1..22: mol_type = other DNA
aggttaaatttatttcaaccct

SEQ ID NO: 52271 - DNA, 22 bp, synthetic construct
  misc_feature 1..22: note = chemically synthesized
  source 1..22: mol_type = other DNA
aatttatttcaaccctacccag

SEQ ID NO: 52272 - DNA, 22 bp, synthetic construct
  misc_feature 1..22: note = chemically synthesized
  source 1..22: mol_type = other DNA
atttcaaccctacccaggctga

SEQ ID NO: 52273 - DNA, 22 bp, synthetic construct
  misc_feature 1..22: note = chemically synthesized
  source 1..22: mol_type = other DNA
tttcaaccctacccaggctgaa

SEQ ID NO: 52274 - DNA, 22 bp, synthetic construct
  misc_feature 1..22: note = chemically synthesized
  source 1..22: mol_type = other DNA
caaccctacccaggctgaatat

SEQ ID NO: 52275 - DNA, 22 bp, synthetic construct
  misc_feature 1..22: note = chemically synthesized
  source 1..22: mol_type = other DNA
aaccctacccaggctgaatatt

SEQ ID NO: 52276 - DNA, 22 bp, synthetic construct
  misc_feature 1..22: note = chemically synthesized
  source 1..22: mol_type = other DNA
cccaggctgaatattgaggggg

SEQ ID NO: 52277 - DNA, 22 bp, synthetic construct
  misc_feature 1..22: note = chemically synthesized
  source 1..22: mol_type = other DNA
aatattgagggggaagatctgg

SEQ ID NO: 52278 - DNA, 22 bp, synthetic construct
  misc_feature 1..22: note = chemically synthesized
  source 1..22: mol_type = other DNA
agggggaagatctggagtaact

SEQ ID NO: 52279 - DNA, 22 bp, synthetic construct
  misc_feature 1..22: note = chemically synthesized
  source 1..22: mol_type = other DNA
gagtaactcccagatgtgctag

SEQ ID NO: 52280 - DNA, 22 bp, synthetic construct
  misc_feature 1..22: note = chemically synthesized
  source 1..22: mol_type = other DNA
ccagatgtgctaggtgaaataa

SEQ ID NO: 52281 - DNA, 22 bp, synthetic construct
  misc_feature 1..22: note = chemically synthesized
  source 1..22: mol_type = other DNA
ggtgaaataatattgagagagc

SEQ ID NO: 52282 - DNA, 22 bp, synthetic construct
  misc_feature 1..22: note = chemically synthesized
  source 1..22: mol_type = other DNA
agagagccctgcctagctgcac

SEQ ID NO: 52283 - DNA, 22 bp, synthetic construct
  misc_feature 1..22: note = chemically synthesized
  source 1..22: mol_type = other DNA
cctagctgcacctgtgctcaag

SEQ ID NO: 52284 - DNA, 22 bp, synthetic construct
  misc_feature 1..22: note = chemically synthesized
  source 1..22: mol_type = other DNA
gctgcacctgtgctcaagtagg

SEQ ID NO: 52285 - DNA, 22 bp, synthetic construct
  misc_feature 1..22: note = chemically synthesized
  source 1..22: mol_type = other DNA
cacctgtgctcaagtaggacat

SEQ ID NO: 52286 - DNA, 22 bp, synthetic construct
  misc_feature 1..22: note = chemically synthesized
  source 1..22: mol_type = other DNA
tgctcaagtaggacatctcata

SEQ ID NO: 52287 - DNA, 22 bp, synthetic construct
  misc_feature 1..22: note = chemically synthesized
  source 1..22: mol_type = other DNA
aagtaggacatctcataatttc

SEQ ID NO: 52288 - DNA, 22 bp, synthetic construct
  misc_feature 1..22: note = chemically synthesized
  source 1..22: mol_type = other DNA
ataatttctagcctctggtact

SEQ ID NO: 52289 - DNA, 22 bp, synthetic construct
  misc_feature 1..22: note = chemically synthesized
  source 1..22: mol_type = other DNA
ctagcctctggtactcctccta

SEQ ID NO: 52290 - DNA, 22 bp, synthetic construct
  misc_feature 1..22: note = chemically synthesized
  source 1..22: mol_type = other DNA
tagcctctggtactcctcctaa

SEQ ID NO: 52291 - DNA, 22 bp, synthetic construct
  misc_feature 1..22: note = chemically synthesized
  source 1..22: mol_type = other DNA
gcctctggtactcctcctaatt

SEQ ID NO: 52292 - DNA, 22 bp, synthetic construct
  misc_feature 1..22: note = chemically synthesized
  source 1..22: mol_type = other DNA
tggtactcctcctaatttaaca

SEQ ID NO: 52293 - DNA, 22 bp, synthetic construct
  misc_feature 1..22: note = chemically synthesized
  source 1..22: mol_type = other DNA
gtactcctcctaatttaacata

SEQ ID NO: 52294 - DNA, 22 bp, synthetic construct
  misc_feature 1..22: note = chemically synthesized
  source 1..22: mol_type = other DNA
ctcctaatttaacataaggtca

SEQ ID NO: 52295 - DNA, 22 bp, synthetic construct
  misc_feature 1..22: note = chemically synthesized
  source 1..22: mol_type = other DNA
ctaatttaacataaggtcacca

SEQ ID NO: 52296 - DNA, 22 bp, synthetic construct
  misc_feature 1..22: note = chemically synthesized
  source 1..22: mol_type = other DNA
atttaacataaggtcaccacag

SEQ ID NO: 52297 - DNA, 22 bp, synthetic construct
  misc_feature 1..22: note = chemically synthesized
  source 1..22: mol_type = other DNA
aacataaggtcaccacaggaat

SEQ ID NO: 52298 - DNA, 22 bp, synthetic construct
  misc_feature 1..22: note = chemically synthesized
  source 1..22: mol_type = other DNA
acataaggtcaccacaggaata

SEQ ID NO: 52299 - DNA, 22 bp, synthetic construct
  misc_feature 1..22: note = chemically synthesized
  source 1..22: mol_type = other DNA
tattcctactaataaagacagt

SEQ ID NO: 52300 - DNA, 22 bp, synthetic construct
  misc_feature 1..22: note = chemically synthesized
  source 1..22: mol_type = other DNA
ctactaataaagacagtaaagt

SEQ ID NO: 52301 - DNA, 22 bp, synthetic construct
  misc_feature 1..22: note = chemically synthesized
  source 1..22: mol_type = other DNA
ctaataaagacagtaaagtaag

SEQ ID NO: 52302 - DNA, 22 bp, synthetic construct
  misc_feature 1..22: note = chemically synthesized
  source 1..22: mol_type = other DNA
ataaagacagtaaagtaagcac

SEQ ID NO: 52303 - DNA, 22 bp, synthetic construct
  misc_feature 1..22: note = chemically synthesized
  source 1..22: mol_type = other DNA
atgtttctttgcccaacatact

SEQ ID NO: 52304 - DNA, 22 bp, synthetic construct
  misc_feature 1..22: note = chemically synthesized
  source 1..22: mol_type = other DNA
tgtttctttgcccaacatactg

SEQ ID NO: 52305 - DNA, 22 bp, synthetic construct
  misc_feature 1..22: note = chemically synthesized
  source 1..22: mol_type = other DNA
ctttgcccaacatactggccaa

SEQ ID NO: 52306 - DNA, 22 bp, synthetic construct
  misc_feature 1..22: note = chemically synthesized
  source 1..22: mol_type = other DNA
tttgcccaacatactggccaaa

SEQ ID NO: 52307 - DNA, 22 bp, synthetic construct
  misc_feature 1..22: note = chemically synthesized
  source 1..22: mol_type = other DNA
tgcccaacatactggccaaaag

SEQ ID NO: 52308 - DNA, 22 bp, synthetic construct
  misc_feature 1..22: note = chemically synthesized
  source 1..22: mol_type = other DNA
gcccaacatactggccaaaaga

SEQ ID NO: 52309 - DNA, 22 bp, synthetic construct
  misc_feature 1..22: note = chemically synthesized
  source 1..22: mol_type = other DNA
cccaacatactggccaaaagat

SEQ ID NO: 52310 - DNA, 22 bp, synthetic construct
  misc_feature 1..22: note = chemically synthesized
  source 1..22: mol_type = other DNA
gccaaaagataaatacagaata

SEQ ID NO: 52311 - DNA, 22 bp, synthetic construct
  misc_feature 1..22: note = chemically synthesized
  source 1..22: mol_type = other DNA
ttcaaataaaagaagacaaaca

SEQ ID NO: 52312 - DNA, 22 bp, synthetic construct
  misc_feature 1..22: note = chemically synthesized
  source 1..22: mol_type = other DNA
tcaaataaaagaagacaaacag

SEQ ID NO: 52313 - DNA, 22 bp, synthetic construct
  misc_feature 1..22: note = chemically synthesized
  source 1..22: mol_type = other DNA
caaataaaagaagacaaacaga

SEQ ID NO: 52314 - DNA, 22 bp, synthetic construct
  misc_feature 1..22: note = chemically synthesized
  source 1..22: mol_type = other DNA
aaataaaagaagacaaacagaa

SEQ ID NO: 52315 - DNA, 22 bp, synthetic construct
  misc_feature 1..22: note = chemically synthesized
  source 1..22: mol_type = other DNA
tgcattgtgccttaatgtcatt

SEQ ID NO: 52316 - DNA, 22 bp, synthetic construct
  misc_feature 1..22: note = chemically synthesized
  source 1..22: mol_type = other DNA
cattgtgccttaatgtcattct

SEQ ID NO: 52317 - DNA, 22 bp, synthetic construct
  misc_feature 1..22: note = chemically synthesized
  source 1..22: mol_type = other DNA
tgccttaatgtcattcttctct

SEQ ID NO: 52318 - DNA, 22 bp, synthetic construct
  misc_feature 1..22: note = chemically synthesized
  source 1..22: mol_type = other DNA
aatgtcattcttctcttacatt

SEQ ID NO: 52319 - DNA, 22 bp, synthetic construct
  misc_feature 1..22: note = chemically synthesized
  source 1..22: mol_type = other DNA
atgtcattcttctcttacattt

SEQ ID NO: 52320 - DNA, 22 bp, synthetic construct
  misc_feature 1..22: note = chemically synthesized
  source 1..22: mol_type = other DNA
ttctcttacatttgcttccatt

SEQ ID NO: 52321 - DNA, 22 bp, synthetic construct
  misc_feature 1..22: note = chemically synthesized
  source 1..22: mol_type = other DNA
ctcttacatttgcttccatttt

SEQ ID NO: 52322 - DNA, 22 bp, synthetic construct
  misc_feature 1..22: note = chemically synthesized
  source 1..22: mol_type = other DNA
tcttacatttgcttccattttg

SEQ ID NO: 52323 - DNA, 22 bp, synthetic construct
  misc_feature 1..22: note = chemically synthesized
  source 1..22: mol_type = other DNA
ttacatttgcttccattttgac

SEQ ID NO: 52324 - DNA, 22 bp, synthetic construct
  misc_feature 1..22: note = chemically synthesized
  source 1..22: mol_type = other DNA
acatttgcttccattttgacca

SEQ ID NO: 52325 - DNA, 22 bp, synthetic construct
  misc_feature 1..22: note = chemically synthesized
  source 1..22: mol_type = other DNA
catttgcttccattttgaccaa

SEQ ID NO: 52326 - DNA, 22 bp, synthetic construct
  misc_feature 1..22: note = chemically synthesized
  source 1..22: mol_type = other DNA
gcttccattttgaccaagtgag

SEQ ID NO: 52327 - DNA, 22 bp, synthetic construct
  misc_feature 1..22: note = chemically synthesized
  source 1..22: mol_type = other DNA
cttccattttgaccaagtgagg

SEQ ID NO: 52328 - DNA, 22 bp, synthetic construct
  misc_feature 1..22: note = chemically synthesized
  source 1..22: mol_type = other DNA
ccattttgaccaagtgaggaat

SEQ ID NO: 52329 - DNA, 22 bp, synthetic construct
  misc_feature 1..22: note = chemically synthesized
  source 1..22: mol_type = other DNA
cattttgaccaagtgaggaata

SEQ ID NO: 52330 - DNA, 22 bp, synthetic construct
  misc_feature 1..22: note = chemically synthesized
  source 1..22: mol_type = other DNA
tgaccaagtgaggaatagggaa

SEQ ID NO: 52331 - DNA, 22 bp, synthetic construct
  misc_feature 1..22: note = chemically synthesized
  source 1..22: mol_type = other DNA
gaccaagtgaggaatagggaac

SEQ ID NO: 52332 - DNA, 22 bp, synthetic construct
  misc_feature 1..22: note = chemically synthesized
  source 1..22: mol_type = other DNA
accaagtgaggaatagggaact

SEQ ID NO: 52333 - DNA, 22 bp, synthetic construct
  misc_feature 1..22: note = chemically synthesized
  source 1..22: mol_type = other DNA
attctcaaaatattcctgttgt

SEQ ID NO: 52334 - DNA, 22 bp, synthetic construct
  misc_feature 1..22: note = chemically synthesized
  source 1..22: mol_type = other DNA
tcaaaatattcctgttgtctga

SEQ ID NO: 52335 - DNA, 22 bp, synthetic construct
  misc_feature 1..22: note = chemically synthesized
  source 1..22: mol_type = other DNA
aaaatattcctgttgtctgaat

SEQ ID NO: 52336 - DNA, 22 bp, synthetic construct
  misc_feature 1..22: note = chemically synthesized
  source 1..22: mol_type = other DNA
ctgttgtctgaattaaggattt

SEQ ID NO: 52337 - DNA, 22 bp, synthetic construct
  misc_feature 1..22: note = chemically synthesized
  source 1..22: mol_type = other DNA
ttgtctgaattaaggattttaa

SEQ ID NO: 52338 - DNA, 22 bp, synthetic construct
  misc_feature 1..22: note = chemically synthesized
  source 1..22: mol_type = other DNA
tctgaattaaggattttaagta

SEQ ID NO: 52339 - DNA, 22 bp, synthetic construct
  misc_feature 1..22: note = chemically synthesized
  source 1..22: mol_type = other DNA
aattaaggattttaagtacaca

SEQ ID NO: 52340 - DNA, 22 bp, synthetic construct
  misc_feature 1..22: note = chemically synthesized
  source 1..22: mol_type = other DNA
aggattttaagtacacattgat

SEQ ID NO: 52341 - DNA, 22 bp, synthetic construct
  misc_feature 1..22: note = chemically synthesized
  source 1..22: mol_type = other DNA
taagtacacattgataaatgtg

SEQ ID NO: 52342 - DNA, 22 bp, synthetic construct
  misc_feature 1..22: note = chemically synthesized
  source 1..22: mol_type = other DNA
aagtacacattgataaatgtgg

SEQ ID NO: 52343 - DNA, 22 bp, synthetic construct
  misc_feature 1..22: note = chemically synthesized
  source 1..22: mol_type = other DNA
agtacacattgataaatgtggc

SEQ ID NO: 52344 - DNA, 22 bp, synthetic construct
  misc_feature 1..22: note = chemically synthesized
  source 1..22: mol_type = other DNA
ataaatgtggcttttttgttta

SEQ ID NO: 52345 - DNA, 22 bp, synthetic construct
  misc_feature 1..22: note = chemically synthesized
  source 1..22: mol_type = other DNA
ttttgtttagcattagctacaa

SEQ ID NO: 52346 - DNA, 22 bp, synthetic construct
  misc_feature 1..22: note = chemically synthesized
  source 1..22: mol_type = other DNA
tttgtttagcattagctacaag

SEQ ID NO: 52347 - DNA, 22 bp, synthetic construct
  misc_feature 1..22: note = chemically synthesized
  source 1..22: mol_type = other DNA
ttgtttagcattagctacaagt

SEQ ID NO: 52348 - DNA, 22 bp, synthetic construct
  misc_feature 1..22: note = chemically synthesized
  source 1..22: mol_type = other DNA
tgtttagcattagctacaagtt

SEQ ID NO: 52349 - DNA, 22 bp, synthetic construct
  misc_feature 1..22: note = chemically synthesized
  source 1..22: mol_type = other DNA
gtttagcattagctacaagttc

SEQ ID NO: 52350 - DNA, 22 bp, synthetic construct
  misc_feature 1..22: note = chemically synthesized
  source 1..22: mol_type = other DNA
tttagcattagctacaagttct

SEQ ID NO: 52351 - DNA, 22 bp, synthetic construct
  misc_feature 1..22: note = chemically synthesized
  source 1..22: mol_type = other DNA
agcattagctacaagttctgag

SEQ ID NO: 52352 - DNA, 22 bp, synthetic construct
  misc_feature 1..22: note = chemically synthesized
  source 1..22: mol_type = other DNA
gcattagctacaagttctgagg

SEQ ID NO: 52353 - DNA, 22 bp, synthetic construct
  misc_feature 1..22: note = chemically synthesized
  source 1..22: mol_type = other DNA
gctacaagttctgaggtttaca

SEQ ID NO: 52354 - DNA, 22 bp, synthetic construct
  misc_feature 1..22: note = chemically synthesized
  source 1..22: mol_type = other DNA
caagttctgaggtttacagact

SEQ ID NO: 52355 - DNA, 22 bp, synthetic construct
  misc_feature 1..22: note = chemically synthesized
  source 1..22: mol_type = other DNA
tgaggtttacagactgaaggaa

SEQ ID NO: 52356 - DNA, 22 bp, synthetic construct
  misc_feature 1..22: note = chemically synthesized
  source 1..22: mol_type = other DNA
aggtttacagactgaaggaaga

SEQ ID NO: 52357 - DNA, 22 bp, synthetic construct
  misc_feature 1..22: note = chemically synthesized
  source 1..22: mol_type = other DNA
acagactgaaggaagacttagg

SEQ ID NO: 52358 - DNA, 22 bp, synthetic construct
  misc_feature 1..22: note = chemically synthesized
  source 1..22: mol_type = other DNA
cagactgaaggaagacttagga

SEQ ID NO: 52359 - DNA, 22 bp, synthetic construct
  misc_feature 1..22: note = chemically synthesized
  source 1..22: mol_type = other DNA
aaggaagacttaggaaaatatt

SEQ ID NO: 52360 - DNA, 22 bp, synthetic construct
  misc_feature 1..22: note = chemically synthesized
  source 1..22: mol_type = other DNA
aggaaaatattttatcaaactt

SEQ ID NO: 52361 - DNA, 22 bp, synthetic construct
  misc_feature 1..22: note = chemically synthesized
  source 1..22: mol_type = other DNA
ggaaaatattttatcaaactta

SEQ ID NO: 52362 - DNA, 22 bp, synthetic construct
  misc_feature 1..22: note = chemically synthesized
  source 1..22: mol_type = other DNA
tatcaaacttactagtacatag

SEQ ID NO: 52363 - DNA, 22 bp, synthetic construct
  misc_feature 1..22: note = chemically synthesized
  source 1..22: mol_type = other DNA
atcaaacttactagtacataga

SEQ ID NO: 52364 - DNA, 22 bp, synthetic construct
  misc_feature 1..22: note = chemically synthesized
  source 1..22: mol_type = other DNA
tcaaacttactagtacatagaa

SEQ ID NO: 52365 - DNA, 22 bp, synthetic construct
  misc_feature 1..22: note = chemically synthesized
  source 1..22: mol_type = other DNA
actagtacatagaacctttgca

SEQ ID NO: 52366 - DNA, 22 bp, synthetic construct
  misc_feature 1..22: note = chemically synthesized
  source 1..22: mol_type = other DNA
ctagtacatagaacctttgcaa

SEQ ID NO: 52367 - DNA, 22 bp, synthetic construct
  misc_feature 1..22: note = chemically synthesized
  source 1..22: mol_type = other DNA
gtacatagaacctttgcaaaaa

SEQ ID NO: 52368 - DNA, 22 bp, synthetic construct
  misc_feature 1..22: note = chemically synthesized
  source 1..22: mol_type = other DNA
tgcaaaaaaaaaaattttttat

SEQ ID NO: 52369 - DNA, 22 bp, synthetic construct
  misc_feature 1..22: note = chemically synthesized
  source 1..22: mol_type = other DNA
gcaaaaaaaaaaattttttatt

SEQ ID NO: 52370 - DNA, 22 bp, synthetic construct
  misc_feature 1..22: note = chemically synthesized
  source 1..22: mol_type = other DNA
caaaaaaaaaaattttttattt

SEQ ID NO: 52371 - DNA, 22 bp, synthetic construct
  misc_feature 1..22: note = chemically synthesized
  source 1..22: mol_type = other DNA
tttatttccaccgttaagattc

SEQ ID NO: 52372 - DNA, 22 bp, synthetic construct
  misc_feature 1..22: note = chemically synthesized
  source 1..22: mol_type = other DNA
ttatttccaccgttaagattct

SEQ ID NO: 52373 - DNA, 22 bp, synthetic construct
  misc_feature 1..22: note = chemically synthesized
  source 1..22: mol_type = other DNA
tatttccaccgttaagattctt

SEQ ID NO: 52374 - DNA, 22 bp, synthetic construct
  misc_feature 1..22: note = chemically synthesized
  source 1..22: mol_type = other DNA
atttccaccgttaagattcttt

SEQ ID NO: 52375 - DNA, 22 bp, synthetic construct
  misc_feature 1..22: note = chemically synthesized
  source 1..22: mol_type = other DNA
tttccaccgttaagattctttt

SEQ ID NO: 52376 - DNA, 22 bp, synthetic construct
  misc_feature 1..22: note = chemically synthesized
  source 1..22: mol_type = other DNA
ccaccgttaagattcttttttt

SEQ ID NO: 52377 - DNA, 22 bp, synthetic construct
  misc_feature 1..22: note = chemically synthesized
  source 1..22: mol_type = other DNA
caccgttaagattctttttttt

SEQ ID NO: 52378 - DNA, 22 bp, synthetic construct
  misc_feature 1..22: note = chemically synthesized
  source 1..22: mol_type = other DNA
agattctttttttttttttttt

SEQ ID NO: 52379 - DNA, 22 bp, synthetic construct
  misc_feature 1..22: note = chemically synthesized
  source 1..22: mol_type = other DNA
ttttttttttttttttgttccc

SEQ ID NO: 52380 - DNA, 22 bp, synthetic construct
  misc_feature 1..22: note = chemically synthesized
  source 1..22: mol_type = other DNA
ttttttttttttttgttcccaa

SEQ ID NO: 52381 - DNA, 22 bp, synthetic construct
  misc_feature 1..22: note = chemically synthesized
  source 1..22: mol_type = other DNA
tttttttttttttgttcccaag

SEQ ID NO: 52382 - DNA, 22 bp, synthetic construct
  misc_feature 1..22: note = chemically synthesized
  source 1..22: mol_type = other DNA
ttttttttttttgttcccaagg

SEQ ID NO: 52383 - DNA, 22 bp, synthetic construct
  misc_feature 1..22: note = chemically synthesized
  source 1..22: mol_type = other DNA
tttttttttttgttcccaaggt

SEQ ID NO: 52384 - DNA, 22 bp, synthetic construct
  misc_feature 1..22: note = chemically synthesized
  source 1..22: mol_type = other DNA
ttttttttttgttcccaaggtc

SEQ ID NO: 52385 - DNA, 22 bp, synthetic construct
  misc_feature 1..22: note = chemically synthesized
  source 1..22: mol_type = other DNA
tttttttttgttcccaaggtct

SEQ ID NO: 52386 - DNA, 22 bp, synthetic construct
  misc_feature 1..22: note = chemically synthesized
  source 1..22: mol_type = other DNA
ttttttttgttcccaaggtctg

SEQ ID NO: 52387 - DNA, 22 bp, synthetic construct
  misc_feature 1..22: note = chemically synthesized
  source 1..22: mol_type = other DNA
tttttttgttcccaaggtctga

SEQ ID NO: 52388 - DNA, 22 bp, synthetic construct
  misc_feature 1..22: note = chemically synthesized
  source 1..22: mol_type = other DNA
ttttttgttcccaaggtctgac

SEQ ID NO: 52389 - DNA, 22 bp, synthetic construct
  misc_feature 1..22: note = chemically synthesized
  source 1..22: mol_type = other DNA
tttttgttcccaaggtctgaca

SEQ ID NO: 52390 - DNA, 22 bp, synthetic construct
  misc_feature 1..22: note = chemically synthesized
  source 1..22: mol_type = other DNA
ttttgttcccaaggtctgacac

SEQ ID NO: 52391 - DNA, 22 bp, synthetic construct
  misc_feature 1..22: note = chemically synthesized
  source 1..22: mol_type = other DNA
tttgttcccaaggtctgacaca

SEQ ID NO: 52392 - DNA, 22 bp, synthetic construct
  misc_feature 1..22: note = chemically synthesized
  source 1..22: mol_type = other DNA
ttgttcccaaggtctgacacat

SEQ ID NO: 52393 - DNA, 22 bp, synthetic construct
  misc_feature 1..22: note = chemically synthesized
  source 1..22: mol_type = other DNA
tgttcccaaggtctgacacatt

SEQ ID NO: 52394 - DNA, 22 bp, synthetic construct
  misc_feature 1..22: note = chemically synthesized
  source 1..22: mol_type = other DNA
gttcccaaggtctgacacattt

SEQ ID NO: 52395 - DNA, 22 bp, synthetic construct
  misc_feature 1..22: note = chemically synthesized
  source 1..22: mol_type = other DNA
ttcccaaggtctgacacatttc

SEQ ID NO: 52396 - DNA, 22 bp, synthetic construct
  misc_feature 1..22: note = chemically synthesized
  source 1..22: mol_type = other DNA
ccaaggtctgacacatttctaa

SEQ ID NO: 52397 - DNA, 22 bp, synthetic construct
  misc_feature 1..22: note = chemically synthesized
  source 1..22: mol_type = other DNA
acacatttctaaaagtgggaat

SEQ ID NO: 52398 - DNA, 22 bp, synthetic construct
  misc_feature 1..22: note = chemically synthesized
  source 1..22: mol_type = other DNA
ctaaaagtgggaatattattta

SEQ ID NO: 52399 - DNA, 22 bp, synthetic construct
  misc_feature 1..22: note = chemically synthesized
  source 1..22: mol_type = other DNA
taaaagtgggaatattatttag

SEQ ID NO: 52400 - DNA, 22 bp, synthetic construct
  misc_feature 1..22: note = chemically synthesized
  source 1..22: mol_type = other DNA
aaagtgggaatattatttaggt

SEQ ID NO: 52401 - DNA, 22 bp, synthetic construct
  misc_feature 1..22: note = chemically synthesized
  source 1..22: mol_type = other DNA
tttaggtgcaaaaggaaatatt

SEQ ID NO: 52402 - DNA, 22 bp, synthetic construct
  misc_feature 1..22: note = chemically synthesized
  source 1..22: mol_type = other DNA
aggtgcaaaaggaaatattctc

SEQ ID NO: 52403 - DNA, 22 bp, synthetic construct
  misc_feature 1..22: note = chemically synthesized
  source 1..22: mol_type = other DNA
ggtgcaaaaggaaatattctcc

SEQ ID NO: 52404 - DNA, 22 bp, synthetic construct
  misc_feature 1..22: note = chemically synthesized
  source 1..22: mol_type = other DNA
tcctaggtatcaaatagttaaa

SEQ ID NO: 52405 - DNA, 22 bp, synthetic construct
  misc_feature 1..22: note = chemically synthesized
  source 1..22: mol_type = other DNA
ctaggtatcaaatagttaaagg

SEQ ID NO: 52406 - DNA, 22 bp, synthetic construct
  misc_feature 1..22: note = chemically synthesized
  source 1..22: mol_type = other DNA
ggtatcaaatagttaaaggtaa

SEQ ID NO: 52407 - DNA, 22 bp, synthetic construct
  misc_feature 1..22: note = chemically synthesized
  source 1..22: mol_type = other DNA
aaggtaatgtggttcaaaacag

SEQ ID NO: 52408 - DNA, 22 bp, synthetic construct
  misc_feature 1..22: note = chemically synthesized
  source 1..22: mol_type = other DNA
aaaacagacttggttaaagtct

SEQ ID NO: 52409 - DNA, 22 bp, synthetic construct
  misc_feature 1..22: note = chemically synthesized
  source 1..22: mol_type = other DNA
ggttaaagtcttctaaatgtag

SEQ ID NO: 52410 - DNA, 22 bp, synthetic construct
  misc_feature 1..22: note = chemically synthesized
  source 1..22: mol_type = other DNA
gttaaagtcttctaaatgtagt

SEQ ID NO: 52411 - DNA, 22 bp, synthetic construct
  misc_feature 1..22: note = chemically synthesized
  source 1..22: mol_type = other DNA
aagtcttctaaatgtagtgact

SEQ ID NO: 52412 - DNA, 22 bp, synthetic construct
  misc_feature 1..22: note = chemically synthesized
  source 1..22: mol_type = other DNA
ctaaatgtagtgactgaactga

SEQ ID NO: 52413 - DNA, 22 bp, synthetic construct
  misc_feature 1..22: note = chemically synthesized
  source 1..22: mol_type = other DNA
taaatgtagtgactgaactgat

SEQ ID NO: 52414 - DNA, 22 bp, synthetic construct
  misc_feature 1..22: note = chemically synthesized
  source 1..22: mol_type = other DNA
aatgtagtgactgaactgattt

SEQ ID NO: 52415 - DNA, 22 bp, synthetic construct
  misc_feature 1..22: note = chemically synthesized
  source 1..22: mol_type = other DNA
aactgatttacaatcaaaaccg

SEQ ID NO: 52416 - DNA, 22 bp, synthetic construct
  misc_feature 1..22: note = chemically synthesized
  source 1..22: mol_type = other DNA
atttacaatcaaaaccgggaaa

SEQ ID NO: 52417 - DNA, 22 bp, synthetic construct
  misc_feature 1..22: note = chemically synthesized
  source 1..22: mol_type = other DNA
acaatcaaaaccgggaaatgaa

SEQ ID NO: 52418 - DNA, 22 bp, synthetic construct
  misc_feature 1..22: note = chemically synthesized
  source 1..22: mol_type = other DNA
caatcaaaaccgggaaatgaag

SEQ ID NO: 52419 - DNA, 22 bp, synthetic construct
  misc_feature 1..22: note = chemically synthesized
  source 1..22: mol_type = other DNA
agaggttgctgattacacctcc

SEQ ID NO: 52420 - DNA, 22 bp, synthetic construct
  misc_feature 1..22: note = chemically synthesized
  source 1..22: mol_type = other DNA
ctgattacacctccacatttca

SEQ ID NO: 52421 - DNA, 22 bp, synthetic construct
  misc_feature 1..22: note = chemically synthesized
  source 1..22: mol_type = other DNA
attacacctccacatttcacct

SEQ ID NO: 52422 - DNA, 22 bp, synthetic construct
  misc_feature 1..22: note = chemically synthesized
  source 1..22: mol_type = other DNA
cacctccacatttcacctaatt

SEQ ID NO: 52423 - DNA, 22 bp, synthetic construct
  misc_feature 1..22: note = chemically synthesized
  source 1..22: mol_type = other DNA
cacatttcacctaattaatttt

SEQ ID NO: 52424 - DNA, 22 bp, synthetic construct
  misc_feature 1..22: note = chemically synthesized
  source 1..22: mol_type = other DNA
cacctaattaattttataggag

SEQ ID NO: 52425 - DNA, 22 bp, synthetic construct
  misc_feature 1..22: note = chemically synthesized
  source 1..22: mol_type = other DNA
acctaattaattttataggagg

SEQ ID NO: 52426 - DNA, 22 bp, synthetic construct
  misc_feature 1..22: note = chemically synthesized
  source 1..22: mol_type = other DNA
attaattttataggaggcaaag

SEQ ID NO: 52427 - DNA, 22 bp, synthetic construct
  misc_feature 1..22: note = chemically synthesized
  source 1..22: mol_type = other DNA
attttataggaggcaaagttct

SEQ ID NO: 52428 - DNA, 22 bp, synthetic construct
  misc_feature 1..22: note = chemically synthesized
  source 1..22: mol_type = other DNA
tataggaggcaaagttcttgaa

SEQ ID NO: 52429 - DNA, 22 bp, synthetic construct
  misc_feature 1..22: note = chemically synthesized
  source 1..22: mol_type = other DNA
ataggaggcaaagttcttgaaa

SEQ ID NO: 52430 - DNA, 22 bp, synthetic construct
  misc_feature 1..22: note = chemically synthesized
  source 1..22: mol_type = other DNA
taggaggcaaagttcttgaaaa

SEQ ID NO: 52431 - DNA, 22 bp, synthetic construct
  misc_feature 1..22: note = chemically synthesized
  source 1..22: mol_type = other DNA
ttgaaaataacaagatgatcaa

SEQ ID NO: 52432 - DNA, 22 bp, synthetic construct
  misc_feature 1..22: note = chemically synthesized
  source 1..22: mol_type = other DNA
gaaaataacaagatgatcaaat

SEQ ID NO: 52433 - DNA, 22 bp, synthetic construct
  misc_feature 1..22: note = chemically synthesized
  source 1..22: mol_type = other DNA
aaaataacaagatgatcaaatg

SEQ ID NO: 52434 - DNA, 22 bp, synthetic construct
  misc_feature 1..22: note = chemically synthesized
  source 1..22: mol_type = other DNA
taacctcaacattttctatgct

SEQ ID NO: 52435 - DNA, 22 bp, synthetic construct
  misc_feature 1..22: note = chemically synthesized
  source 1..22: mol_type = other DNA
aacattttctatgctcttaacg

SEQ ID NO: 52436 - DNA, 22 bp, synthetic construct
  misc_feature 1..22: note = chemically synthesized
  source 1..22: mol_type = other DNA
tctatgctcttaacgtaaatta

SEQ ID NO: 52437 - DNA, 22 bp, synthetic construct
  misc_feature 1..22: note = chemically synthesized
  source 1..22: mol_type = other DNA
ctatgctcttaacgtaaattat

SEQ ID NO: 52438 - DNA, 22 bp, synthetic construct
  misc_feature 1..22: note = chemically synthesized
  source 1..22: mol_type = other DNA
tatgctcttaacgtaaattatt

SEQ ID NO: 52439 - DNA, 22 bp, synthetic construct
  misc_feature 1..22: note = chemically synthesized
  source 1..22: mol_type = other DNA
tgctcttaacgtaaattattgc

SEQ ID NO: 52440 - DNA, 22 bp, synthetic construct
  misc_feature 1..22: note = chemically synthesized
  source 1..22: mol_type = other DNA
ttaacgtaaattattgctaatt

SEQ ID NO: 52441 - DNA, 22 bp, synthetic construct
  misc_feature 1..22: note = chemically synthesized
  source 1..22: mol_type = other DNA
aacgtaaattattgctaattaa

SEQ ID NO: 52442 - DNA, 22 bp, synthetic construct
  misc_feature 1..22: note = chemically synthesized
  source 1..22: mol_type = other DNA
acgtaaattattgctaattaac

SEQ ID NO: 52443 - DNA, 22 bp, synthetic construct
  misc_feature 1..22: note = chemically synthesized
  source 1..22: mol_type = other DNA
ttgctaattaacaagaattata

SEQ ID NO: 52444 - DNA, 22 bp, synthetic construct
  misc_feature 1..22: note = chemically synthesized
  source 1..22: mol_type = other DNA
ctaattaacaagaattatattc

SEQ ID NO: 52445 - DNA, 22 bp, synthetic construct
  misc_feature 1..22: note = chemically synthesized
  source 1..22: mol_type = other DNA
attaacaagaattatattctaa

SEQ ID NO: 52446 - DNA, 22 bp, synthetic construct
  misc_feature 1..22: note = chemically synthesized
  source 1..22: mol_type = other DNA
acaagaattatattctaatgta

SEQ ID NO: 52447 - DNA, 22 bp, synthetic construct
  misc_feature 1..22: note = chemically synthesized
  source 1..22: mol_type = other DNA
tattctaatgtatgaaatacgt

SEQ ID NO: 52448 - DNA, 22 bp, synthetic construct
  misc_feature 1..22: note = chemically synthesized
  source 1..22: mol_type = other DNA
taatgtatgaaatacgtttaac

SEQ ID NO: 52449 - DNA, 22 bp, synthetic construct
  misc_feature 1..22: note = chemically synthesized
  source 1..22: mol_type = other DNA
atgtatgaaatacgtttaacat

SEQ ID NO: 52450 - DNA, 22 bp, synthetic construct
  misc_feature 1..22: note = chemically synthesized
  source 1..22: mol_type = other DNA
aacatcggtctccttgcaaaac

SEQ ID NO: 52451 - DNA, 22 bp, synthetic construct
  misc_feature 1..22: note = chemically synthesized
  source 1..22: mol_type = other DNA
acatcggtctccttgcaaaaca

SEQ ID NO: 52452 - DNA, 22 bp, synthetic construct
  misc_feature 1..22: note = chemically synthesized
  source 1..22: mol_type = other DNA
cttgcaaaacatttggctagtg

SEQ ID NO: 52453 - DNA, 22 bp, synthetic construct
  misc_feature 1..22: note = chemically synthesized
  source 1..22: mol_type = other DNA
gcaaaacatttggctagtggtg

SEQ ID NO: 52454 - DNA, 22 bp, synthetic construct
  misc_feature 1..22: note = chemically synthesized
  source 1..22: mol_type = other DNA
caaaacatttggctagtggtgt

SEQ ID NO: 52455 - DNA, 22 bp, synthetic construct
  misc_feature 1..22: note = chemically synthesized
  source 1..22: mol_type = other DNA
ggctagtggtgttcagagaaat

SEQ ID NO: 52456 - DNA, 22 bp, synthetic construct
  misc_feature 1..22: note = chemically synthesized
  source 1..22: mol_type = other DNA
gctagtggtgttcagagaaata

SEQ ID NO: 52457 - DNA, 22 bp, synthetic construct
  misc_feature 1..22: note = chemically synthesized
  source 1..22: mol_type = other DNA
gtggtgttcagagaaataccaa

SEQ ID NO: 52458 - DNA, 22 bp, synthetic construct
  misc_feature 1..22: note = chemically synthesized
  source 1..22: mol_type = other DNA
agagaaataccaaaacgtgttt

SEQ ID NO: 52459 - DNA, 22 bp, synthetic construct
  misc_feature 1..22: note = chemically synthesized
  source 1..22: mol_type = other DNA
ttatcattgctggtatattatt

SEQ ID NO: 52460 - DNA, 22 bp, synthetic construct
  misc_feature 1..22: note = chemically synthesized
  source 1..22: mol_type = other DNA
tatcattgctggtatattatta

SEQ ID NO: 52461 - DNA, 22 bp, synthetic construct
  misc_feature 1..22: note = chemically synthesized
  source 1..22: mol_type = other DNA
atcattgctggtatattattaa

SEQ ID NO: 52462 - DNA, 22 bp, synthetic construct
  misc_feature 1..22: note = chemically synthesized
  source 1..22: mol_type = other DNA
tcattgctggtatattattaaa

SEQ ID NO: 52463 - DNA, 22 bp, synthetic construct
  misc_feature 1..22: note = chemically synthesized
  source 1..22: mol_type = other DNA
ctggtatattattaaaaatcag

SEQ ID NO: 52464 - DNA, 22 bp, synthetic construct
  misc_feature 1..22: note = chemically synthesized
  source 1..22: mol_type = other DNA
gtatattattaaaaatcagaca

SEQ ID NO: 52465 - DNA, 22 bp, synthetic construct
  misc_feature 1..22: note = chemically synthesized
  source 1..22: mol_type = other DNA
ttaaaaatcagacaaagtggga

SEQ ID NO: 52466 - DNA, 22 bp, synthetic construct
  misc_feature 1..22: note = chemically synthesized
  source 1..22: mol_type = other DNA
aaaatcagacaaagtgggacac

SEQ ID NO: 52467 - DNA, 22 bp, synthetic construct
  misc_feature 1..22: note = chemically synthesized
  source 1..22: mol_type = other DNA
tcatggtgtagtctactgattt

SEQ ID NO: 52468 - DNA, 22 bp, synthetic construct
  misc_feature 1..22: note = chemically synthesized
  source 1..22: mol_type = other DNA
atggtgtagtctactgatttgc

SEQ ID NO: 52469 - DNA, 22 bp, synthetic construct
  misc_feature 1..22: note = chemically synthesized
  source 1..22: mol_type = other DNA
ctgatttgcattgacatctttt

SEQ ID NO: 52470 - DNA, 22 bp, synthetic construct
  misc_feature 1..22: note = chemically synthesized
  source 1..22: mol_type = other DNA
atttgcattgacatcttttctc

SEQ ID NO: 52471 - DNA, 22 bp, synthetic construct
  misc_feature 1..22: note = chemically synthesized
  source 1..22: mol_type = other DNA
gcattgacatcttttctcagtg

SEQ ID NO: 52472 - DNA, 22 bp, synthetic construct
  misc_feature 1..22: note = chemically synthesized
  source 1..22: mol_type = other DNA
cattgacatcttttctcagtgg

SEQ ID NO: 52473 - DNA, 22 bp, synthetic construct
  misc_feature 1..22: note = chemically synthesized
  source 1..22: mol_type = other DNA
acatcttttctcagtggcaatc

SEQ ID NO: 52474 - DNA, 22 bp, synthetic construct
  misc_feature 1..22: note = chemically synthesized
  source 1..22: mol_type = other DNA
ttctcagtggcaatcaacattt

SEQ ID NO: 52475 - DNA, 22 bp, synthetic construct
  misc_feature 1..22: note = chemically synthesized
  source 1..22: mol_type = other DNA
tctcagtggcaatcaacatttc

SEQ ID NO: 52476 - DNA, 22 bp, synthetic construct
  misc_feature 1..22: note = chemically synthesized
  source 1..22: mol_type = other DNA
ctcagtggcaatcaacatttcc

SEQ ID NO: 52477 - DNA, 22 bp, synthetic construct
  misc_feature 1..22: note = chemically synthesized
  source 1..22: mol_type = other DNA
tcagtggcaatcaacatttcct

SEQ ID NO: 52478 - DNA, 22 bp, synthetic construct
  misc_feature 1..22: note = chemically synthesized
  source 1..22: mol_type = other DNA
agtggcaatcaacatttccttt

SEQ ID NO: 52479 - DNA, 22 bp, synthetic construct
  misc_feature 1..22: note = chemically synthesized
  source 1..22: mol_type = other DNA
cctttctgggcatctgataatt

SEQ ID NO: 52480 - DNA, 22 bp, synthetic construct
  misc_feature 1..22: note = chemically synthesized
  source 1..22: mol_type = other DNA
ctttctgggcatctgataattt

SEQ ID NO: 52481 - DNA, 22 bp, synthetic construct
  misc_feature 1..22: note = chemically synthesized
  source 1..22: mol_type = other DNA
tctgggcatctgataatttctc

SEQ ID NO: 52482 - DNA, 22 bp, synthetic construct
  misc_feature 1..22: note = chemically synthesized
  source 1..22: mol_type = other DNA
ctgggcatctgataatttctct

SEQ ID NO: 52483 - DNA, 22 bp, synthetic construct
  misc_feature 1..22: note = chemically synthesized
  source 1..22: mol_type = other DNA
tgggcatctgataatttctctg

SEQ ID NO: 52484 - DNA, 22 bp, synthetic construct
  misc_feature 1..22: note = chemically synthesized
  source 1..22: mol_type = other DNA
ggcatctgataatttctctgca

SEQ ID NO: 52485 - DNA, 22 bp, synthetic construct
  misc_feature 1..22: note = chemically synthesized
  source 1..22: mol_type = other DNA
ataatttctctgcattttaatg

SEQ ID NO: 52486 - DNA, 22 bp, synthetic construct
  misc_feature 1..22: note = chemically synthesized
  source 1..22: mol_type = other DNA
ctctgcattttaatgcaaattc

SEQ ID NO: 52487 - DNA, 22 bp, synthetic construct
  misc_feature 1..22: note = chemically synthesized
  source 1..22: mol_type = other DNA
tctgcattttaatgcaaattcc

SEQ ID NO: 52488 - DNA, 22 bp, synthetic construct
  misc_feature 1..22: note = chemically synthesized
  source 1..22: mol_type = other DNA
tgcattttaatgcaaattcccc

SEQ ID NO: 52489 - DNA, 22 bp, synthetic construct
  misc_feature 1..22: note = chemically synthesized
  source 1..22: mol_type = other DNA
cattttaatgcaaattcccctt

SEQ ID NO: 52490 - DNA, 22 bp, synthetic construct
  misc_feature 1..22: note = chemically synthesized
  source 1..22: mol_type = other DNA
taatgcaaattcccctttccct

SEQ ID NO: 52491 - DNA, 22 bp, synthetic construct
  misc_feature 1..22: note = chemically synthesized
  source 1..22: mol_type = other DNA
aatgcaaattcccctttcccta

SEQ ID NO: 52492 - DNA, 22 bp, synthetic construct
  misc_feature 1..22: note = chemically synthesized
  source 1..22: mol_type = other DNA
atgcaaattcccctttccctaa

SEQ ID NO: 52493 - DNA, 22 bp, synthetic construct
  misc_feature 1..22: note = chemically synthesized
  source 1..22: mol_type = other DNA
ccctttccctaaaaaccttcct

SEQ ID NO: 52494 - DNA, 22 bp, synthetic construct
  misc_feature 1..22: note = chemically synthesized
  source 1..22: mol_type = other DNA
tccctaaaaaccttcctaaccc

SEQ ID NO: 52495 - DNA, 22 bp, synthetic construct
  misc_feature 1..22: note = chemically synthesized
  source 1..22: mol_type = other DNA
ccctaaaaaccttcctaaccct

SEQ ID NO: 52496 - DNA, 22 bp, synthetic construct
  misc_feature 1..22: note = chemically synthesized
  source 1..22: mol_type = other DNA
cctaaaaaccttcctaaccctc

SEQ ID NO: 52497 - DNA, 22 bp, synthetic construct
  misc_feature 1..22: note = chemically synthesized
  source 1..22: mol_type = other DNA
aaaaccttcctaaccctcagcc

SEQ ID NO: 52498 - DNA, 22 bp, synthetic construct
  misc_feature 1..22: note = chemically synthesized
  source 1..22: mol_type = other DNA
cctaaccctcagccatttaccc

SEQ ID NO: 52499 - DNA, 22 bp, synthetic construct
  misc_feature 1..22: note = chemically synthesized
  source 1..22: mol_type = other DNA
ctaaccctcagccatttacccc

SEQ ID NO: 52500 - DNA, 22 bp, synthetic construct
  misc_feature 1..22: note = chemically synthesized
  source 1..22: mol_type = other DNA
accctcagccatttaccccctc

SEQ ID NO: 52501 - DNA, 22 bp, synthetic construct
  misc_feature 1..22: note = chemically synthesized
  source 1..22: mol_type = other DNA
agccatttaccccctccctcaa

SEQ ID NO: 52502 - DNA, 22 bp, synthetic construct
  misc_feature 1..22: note = chemically synthesized
  source 1..22: mol_type = other DNA
accccctccctcaattcaactc

SEQ ID NO: 52503 - DNA, 22 bp, synthetic construct
  misc_feature 1..22: note = chemically synthesized
  source 1..22: mol_type = other DNA
ccccctccctcaattcaactcc

SEQ ID NO: 52504 - DNA, 22 bp, synthetic construct
  misc_feature 1..22: note = chemically synthesized
  source 1..22: mol_type = other DNA
cctcaattcaactccatcctcc

SEQ ID NO: 52505 - DNA, 22 bp, synthetic construct
  misc_feature 1..22: note = chemically synthesized
  source 1..22: mol_type = other DNA
aattcaactccatcctccttcg

SEQ ID NO: 52506 - DNA, 22 bp, synthetic construct
  misc_feature 1..22: note = chemically synthesized
  source 1..22: mol_type = other DNA
aactccatcctccttcgcccca

SEQ ID NO: 52507 - DNA, 22 bp, synthetic construct
  misc_feature 1..22: note = chemically synthesized
  source 1..22: mol_type = other DNA
catcctccttcgccccaacaat

SEQ ID NO: 52508 - DNA, 22 bp, synthetic construct
  misc_feature 1..22: note = chemically synthesized
  source 1..22: mol_type = other DNA
cttcgccccaacaataccaaca

SEQ ID NO: 52509 - DNA, 22 bp, synthetic construct
  misc_feature 1..22: note = chemically synthesized
  source 1..22: mol_type = other DNA
cgccccaacaataccaacattt

SEQ ID NO: 52510 - DNA, 22 bp, synthetic construct
  misc_feature 1..22: note = chemically synthesized
  source 1..22: mol_type = other DNA
gccccaacaataccaacatttc

SEQ ID NO: 52511 - DNA, 22 bp, synthetic construct
  misc_feature 1..22: note = chemically synthesized
  source 1..22: mol_type = other DNA
ctaagctccggcctaaactccg

SEQ ID NO: 52512 - DNA, 22 bp, synthetic construct
  misc_feature 1..22: note = chemically synthesized
  source 1..22: mol_type = other DNA
taagctccggcctaaactccgg

SEQ ID NO: 52513 - DNA, 22 bp, synthetic construct
  misc_feature 1..22: note = chemically synthesized
  source 1..22: mol_type = other DNA
agctccggcctaaactccggct

SEQ ID NO: 52514 - DNA, 22 bp, synthetic construct
  misc_feature 1..22: note = chemically synthesized
  source 1..22: mol_type = other DNA
cggcctaaactccggctacaaa

SEQ ID NO: 52515 - DNA, 22 bp, synthetic construct
  misc_feature 1..22: note = chemically synthesized
  source 1..22: mol_type = other DNA
aactccggctacaaagcaggga

SEQ ID NO: 52516 - DNA, 22 bp, synthetic construct
  misc_feature 1..22: note = chemically synthesized
  source 1..22: mol_type = other DNA
cggctacaaagcagggagtcct

SEQ ID NO: 52517 - DNA, 22 bp, synthetic construct
  misc_feature 1..22: note = chemically synthesized
  source 1..22: mol_type = other DNA
caaagcagggagtcctcgattg

SEQ ID NO: 52518 - DNA, 22 bp, synthetic construct
  misc_feature 1..22: note = chemically synthesized
  source 1..22: mol_type = other DNA
gattgaagtggaagggagtggg

SEQ ID NO: 52519 - DNA, 22 bp, synthetic construct
  misc_feature 1..22: note = chemically synthesized
  source 1..22: mol_type = other DNA
aagtggaagggagtgggcaaat

SEQ ID NO: 52520 - DNA, 22 bp, synthetic construct
  misc_feature 1..22: note = chemically synthesized
  source 1..22: mol_type = other DNA
gccgcgaattctctctacgagg

SEQ ID NO: 52521 - DNA, 22 bp, synthetic construct
  misc_feature 1..22: note = chemically synthesized
  source 1..22: mol_type = other DNA
tctctacgaggggaggaagaaa

SEQ ID NO: 52522 - DNA, 22 bp, synthetic construct
  misc_feature 1..22: note = chemically synthesized
  source 1..22: mol_type = other DNA
tctacgaggggaggaagaaata

SEQ ID NO: 52523 - DNA, 22 bp, synthetic construct
  misc_feature 1..22: note = chemically synthesized
  source 1..22: mol_type = other DNA
tacgaggggaggaagaaataga

SEQ ID NO: 52524 - DNA, 22 bp, synthetic construct
  misc_feature 1..22: note = chemically synthesized
  source 1..22: mol_type = other DNA
cgaggggaggaagaaatagaaa

SEQ ID NO: 52525 - DNA, 22 bp, synthetic construct
  misc_feature 1..22: note = chemically synthesized
  source 1..22: mol_type = other DNA
ctacgttcaaacagcaagacag

SEQ ID NO: 52526 - DNA, 22 bp, synthetic construct
  misc_feature 1..22: note = chemically synthesized
  source 1..22: mol_type = other DNA
tacgttcaaacagcaagacagc

SEQ ID NO: 52527 - DNA, 22 bp, synthetic construct
  misc_feature 1..22: note = chemically synthesized
  source 1..22: mol_type = other DNA
cgttcaaacagcaagacagcct

SEQ ID NO: 52528 - DNA, 22 bp, synthetic construct
  misc_feature 1..22: note = chemically synthesized
  source 1..22: mol_type = other DNA
aaacagcaagacagcctggaac

SEQ ID NO: 52529 - DNA, 22 bp, synthetic construct
  misc_feature 1..22: note = chemically synthesized
  source 1..22: mol_type = other DNA
gaacgtctcaatgtctcagtga

SEQ ID NO: 52530 - DNA, 22 bp, synthetic construct
  misc_feature 1..22: note = chemically synthesized
  source 1..22: mol_type = other DNA
aatgtctcagtgacagactgag

SEQ ID NO: 52531 - DNA, 22 bp, synthetic construct
  misc_feature 1..22: note = chemically synthesized
  source 1..22: mol_type = other DNA
agtgacagactgagatctcttt

SEQ ID NO: 52532 - DNA, 22 bp, synthetic construct
  misc_feature 1..22: note = chemically synthesized
  source 1..22: mol_type = other DNA
agatctctttcctctctgtgta

SEQ ID NO: 52533 - DNA, 22 bp, synthetic construct
  misc_feature 1..22: note = chemically synthesized
  source 1..22: mol_type = other DNA
tttcctctctgtgtagttgcaa

SEQ ID NO: 52534 - DNA, 22 bp, synthetic construct
  misc_feature 1..22: note = chemically synthesized
  source 1..22: mol_type = other DNA
tcctctctgtgtagttgcaaaa

SEQ ID NO: 52535 - DNA, 22 bp, synthetic construct
  misc_feature 1..22: note = chemically synthesized
  source 1..22: mol_type = other DNA
cctctctgtgtagttgcaaaag

SEQ ID NO: 52536 - DNA, 22 bp, synthetic construct
  misc_feature 1..22: note = chemically synthesized
  source 1..22: mol_type = other DNA
ctctctgtgtagttgcaaaaga

SEQ ID NO: 52537 - DNA, 22 bp, synthetic construct
  misc_feature 1..22: note = chemically synthesized
  source 1..22: mol_type = other DNA
tctgtgtagttgcaaaagaata

SEQ ID NO: 52538 - DNA, 22 bp, synthetic construct
  misc_feature 1..22: note = chemically synthesized
  source 1..22: mol_type = other DNA
tgtgtagttgcaaaagaataaa

SEQ ID NO: 52539 - DNA, 22 bp, synthetic construct
  misc_feature 1..22: note = chemically synthesized
  source 1..22: mol_type = other DNA
tgtagttgcaaaagaataaatt

SEQ ID NO: 52540 - DNA, 22 bp, synthetic construct
  misc_feature 1..22: note = chemically synthesized
  source 1..22: mol_type = other DNA
caaaagaataaatttaagggaa

SEQ ID NO: 52541 - DNA, 22 bp, synthetic construct
  misc_feature 1..22: note = chemically synthesized
  source 1..22: mol_type = other DNA
aagggaaaaaaataatccttat

SEQ ID NO: 52542 - DNA, 22 bp, synthetic construct
  misc_feature 1..22: note = chemically synthesized
  source 1..22: mol_type = other DNA
agggaaaaaaataatccttata

SEQ ID NO: 52543 - DNA, 22 bp, synthetic construct
  misc_feature 1..22: note = chemically synthesized
  source 1..22: mol_type = other DNA
ataggaaatgttggtaaggagc

SEQ ID NO: 52544 - DNA, 22 bp, synthetic construct
  misc_feature 1..22: note = chemically synthesized
  source 1..22: mol_type = other DNA
taggaaatgttggtaaggagcg

SEQ ID NO: 52545 - DNA, 22 bp, synthetic construct
  misc_feature 1..22: note = chemically synthesized
  source 1..22: mol_type = other DNA
gtaaggagcgagcaaaacgaga

SEQ ID NO: 52546 - DNA, 22 bp, synthetic construct
  misc_feature 1..22: note = chemically synthesized
  source 1..22: mol_type = other DNA
ccggggagcggagggggagggg

SEQ ID NO: 52547 - DNA, 22 bp, synthetic construct
  misc_feature 1..22: note = chemically synthesized
  source 1..22: mol_type = other DNA
caagtttgctttccaagtcctt

SEQ ID NO: 52548 - DNA, 22 bp, synthetic construct
  misc_feature 1..22: note = chemically synthesized
  source 1..22: mol_type = other DNA
aagtttgctttccaagtccttc

SEQ ID NO: 52549 - DNA, 22 bp, synthetic construct
  misc_feature 1..22: note = chemically synthesized
  source 1..22: mol_type = other DNA
gctttccaagtccttctccttg

SEQ ID NO: 52550 - DNA, 22 bp, synthetic construct
  misc_feature 1..22: note = chemically synthesized
  source 1..22: mol_type = other DNA
ctttccaagtccttctccttga

SEQ ID NO: 52551 - DNA, 22 bp, synthetic construct
  misc_feature 1..22: note = chemically synthesized
  source 1..22: mol_type = other DNA
tccaagtccttctccttgattg

SEQ ID NO: 52552 - DNA, 22 bp, synthetic construct
  misc_feature 1..22: note = chemically synthesized
  source 1..22: mol_type = other DNA
ccaagtccttctccttgattgt

SEQ ID NO: 52553 - DNA, 22 bp, synthetic construct
  misc_feature 1..22: note = chemically synthesized
  source 1..22: mol_type = other DNA
caagtccttctccttgattgtc

SEQ ID NO: 52554 - DNA, 22 bp, synthetic construct
  misc_feature 1..22: note = chemically synthesized
  source 1..22: mol_type = other DNA
ctccttgattgtcttaacaggg

SEQ ID NO: 52555 - DNA, 22 bp, synthetic construct
  misc_feature 1..22: note = chemically synthesized
  source 1..22: mol_type = other DNA
tccttgattgtcttaacagggt

SEQ ID NO: 52556 - DNA, 22 bp, synthetic construct
  misc_feature 1..22: note = chemically synthesized
  source 1..22: mol_type = other DNA
cttgattgtcttaacagggtaa

SEQ ID NO: 52557 - DNA, 22 bp, synthetic construct
  misc_feature 1..22: note = chemically synthesized
  source 1..22: mol_type = other DNA
gattgtcttaacagggtaaaga

SEQ ID NO: 52558 - DNA, 22 bp, synthetic construct
  misc_feature 1..22: note = chemically synthesized
  source 1..22: mol_type = other DNA
attgtcttaacagggtaaagaa

SEQ ID NO: 52559 - DNA, 22 bp, synthetic construct
  misc_feature 1..22: note = chemically synthesized
  source 1..22: mol_type = other DNA
tcttaacagggtaaagaagcaa

SEQ ID NO: 52560 - DNA, 22 bp, synthetic construct
  misc_feature 1..22: note = chemically synthesized
  source 1..22: mol_type = other DNA
aacagggtaaagaagcaaacgg

SEQ ID NO: 52561 - DNA, 22 bp, synthetic construct
  misc_feature 1..22: note = chemically synthesized
  source 1..22: mol_type = other DNA
acagggtaaagaagcaaacgga

SEQ ID NO: 52562 - DNA, 22 bp, synthetic construct
  misc_feature 1..22: note = chemically synthesized
  source 1..22: mol_type = other DNA
aaattcagagaggaaaagcaaa

SEQ ID NO: 52563 - DNA, 22 bp, synthetic construct
  misc_feature 1..22: note = chemically synthesized
  source 1..22: mol_type = other DNA
agagaggaaaagcaaagaaaca

SEQ ID NO: 52564 - DNA, 22 bp, synthetic construct
  misc_feature 1..22: note = chemically synthesized
  source 1..22: mol_type = other DNA
caggcccggggcaggggccccg

SEQ ID NO: 52565 - DNA, 22 bp, synthetic construct
  misc_feature 1..22: note = chemically synthesized
  source 1..22: mol_type = other DNA
ggcgcggggactctgaggcaca

SEQ ID NO: 52566 - DNA, 22 bp, synthetic construct
  misc_feature 1..22: note = chemically synthesized
  source 1..22: mol_type = other DNA
tgaggcacaaagcgagcagcgt

SEQ ID NO: 52567 - DNA, 22 bp, synthetic construct
  misc_feature 1..22: note = chemically synthesized
  source 1..22: mol_type = other DNA
aggcacaaagcgagcagcgtgc

SEQ ID NO: 52568 - DNA, 22 bp, synthetic construct
  misc_feature 1..22: note = chemically synthesized
  source 1..22: mol_type = other DNA
gctgcaggctcccgccgcgctt

SEQ ID NO: 52569 - DNA, 22 bp, synthetic construct
  misc_feature 1..22: note = chemically synthesized
  source 1..22: mol_type = other DNA
caggctcccgccgcgcttgctg

SEQ ID NO: 52570 - DNA, 22 bp, synthetic construct
  misc_feature 1..22: note = chemically synthesized
  source 1..22: mol_type = other DNA
ccgccgcgcttgctgcgaacac

SEQ ID NO: 52571 - DNA, 22 bp, synthetic construct
  misc_feature 1..22: note = chemically synthesized
  source 1..22: mol_type = other DNA
gctgcgaacacgtgcagcagcg

SEQ ID NO: 52572 - DNA, 22 bp, synthetic construct
  misc_feature 1..22: note = chemically synthesized
  source 1..22: mol_type = other DNA
ctgcgaacacgtgcagcagcgg

SEQ ID NO: 52573 - DNA, 22 bp, synthetic construct
  misc_feature 1..22: note = chemically synthesized
  source 1..22: mol_type = other DNA
cgaacacgtgcagcagcggccg

SEQ ID NO: 52574 - DNA, 22 bp, synthetic construct
  misc_feature 1..22: note = chemically synthesized
  source 1..22: mol_type = other DNA
ggggcccgggggcccggagacg

SEQ ID NO: 52575 - DNA, 22 bp, synthetic construct
  misc_feature 1..22: note = chemically synthesized
  source 1..22: mol_type = other DNA
gggcccgggggcccggagacgg

SEQ ID NO: 52576 - DNA, 22 bp, synthetic construct
  misc_feature 1..22: note = chemically synthesized
  source 1..22: mol_type = other DNA
actgctgcctccatgcccgtcc

SEQ ID NO: 52577 - DNA, 22 bp, synthetic construct
  misc_feature 1..22: note = chemically synthesized
  source 1..22: mol_type = other DNA
ctgcctccatgcccgtccagct

SEQ ID NO: 52578 - DNA, 22 bp, synthetic construct
  misc_feature 1..22: note = chemically synthesized
  source 1..22: mol_type = other DNA
cctccatgcccgtccagctcgg

SEQ ID NO: 52579 - DNA, 22 bp, synthetic construct
  misc_feature 1..22: note = chemically synthesized
  source 1..22: mol_type = other DNA
catgcccgtccagctcggccag

SEQ ID NO: 52580 - DNA, 22 bp, synthetic construct
  misc_feature 1..22: note = chemically synthesized
  source 1..22: mol_type = other DNA
ggccagctcggccgcggggtga

SEQ ID NO: 52581 - DNA, 22 bp, synthetic construct
  misc_feature 1..22: note = chemically synthesized
  source 1..22: mol_type = other DNA
ggccgcggggtgacggttccct

SEQ ID NO: 52582 - DNA, 22 bp, synthetic construct
  misc_feature 1..22: note = chemically synthesized
  source 1..22: mol_type = other DNA
cctgggcctgccagttggtgaa

SEQ ID NO: 52583 - DNA, 22 bp, synthetic construct
  misc_feature 1..22: note = chemically synthesized
  source 1..22: mol_type = other DNA
ggcctgccagttggtgaaaaag

SEQ ID NO: 52584 - DNA, 22 bp, synthetic construct
  misc_feature 1..22: note = chemically synthesized
  source 1..22: mol_type = other DNA
ccagttggtgaaaaaggaagtg

SEQ ID NO: 52585 - DNA, 22 bp, synthetic construct
  misc_feature 1..22: note = chemically synthesized
  source 1..22: mol_type = other DNA
gtgaaaaaggaagtgaggtttg

SEQ ID NO: 52586 - DNA, 22 bp, synthetic construct
  misc_feature 1..22: note = chemically synthesized
  source 1..22: mol_type = other DNA
ggaaaacccggctggttaacct

SEQ ID NO: 52587 - DNA, 22 bp, synthetic construct
  misc_feature 1..22: note = chemically synthesized
  source 1..22: mol_type = other DNA
gaaaacccggctggttaacctg

SEQ ID NO: 52588 - DNA, 22 bp, synthetic construct
  misc_feature 1..22: note = chemically synthesized
  source 1..22: mol_type = other DNA
gttaacctggtgcagtctcagt

SEQ ID NO: 52589 - DNA, 22 bp, synthetic construct
  misc_feature 1..22: note = chemically synthesized
  source 1..22: mol_type = other DNA
acctggtgcagtctcagtatct

SEQ ID NO: 52590 - DNA, 22 bp, synthetic construct
  misc_feature 1..22: note = chemically synthesized
  source 1..22: mol_type = other DNA
gtgcagtctcagtatctccgca

SEQ ID NO: 52591 - DNA, 22 bp, synthetic construct
  misc_feature 1..22: note = chemically synthesized
  source 1..22: mol_type = other DNA
agtatctccgcacacacctcaa

SEQ ID NO: 52592 - DNA, 22 bp, synthetic construct
  misc_feature 1..22: note = chemically synthesized
  source 1..22: mol_type = other DNA
cgcacacacctcaagcgcgggt

SEQ ID NO: 52593 - DNA, 22 bp, synthetic construct
  misc_feature 1..22: note = chemically synthesized
  source 1..22: mol_type = other DNA
aagcgcgggtcctgagattcat

SEQ ID NO: 52594 - DNA, 22 bp, synthetic construct
  misc_feature 1..22: note = chemically synthesized
  source 1..22: mol_type = other DNA
agattcattctgtgtccacaag

SEQ ID NO: 52595 - DNA, 22 bp, synthetic construct
  misc_feature 1..22: note = chemically synthesized
  source 1..22: mol_type = other DNA
attctgtgtccacaagcttaca

SEQ ID NO: 52596 - DNA, 22 bp, synthetic construct
  misc_feature 1..22: note = chemically synthesized
  source 1..22: mol_type = other DNA
tgtgtccacaagcttacacttt

SEQ ID NO: 52597 - DNA, 22 bp, synthetic construct
  misc_feature 1..22: note = chemically synthesized
  source 1..22: mol_type = other DNA
tgtccacaagcttacacttttt

SEQ ID NO: 52598 - DNA, 22 bp, synthetic construct
  misc_feature 1..22: note = chemically synthesized
  source 1..22: mol_type = other DNA
acactttttactttgggggatc

SEQ ID NO: 52599 - DNA, 22 bp, synthetic construct
  misc_feature 1..22: note = chemically synthesized
  source 1..22: mol_type = other DNA
cactttttactttgggggatct

SEQ ID NO: 52600 - DNA, 22 bp, synthetic construct
  misc_feature 1..22: note = chemically synthesized
  source 1..22: mol_type = other DNA
tttactttgggggatctctgca

SEQ ID NO: 52601 - DNA, 22 bp, synthetic construct
  misc_feature 1..22: note = chemically synthesized
  source 1..22: mol_type = other DNA
ttactttgggggatctctgcaa

SEQ ID NO: 52602 - DNA, 22 bp, synthetic construct
  misc_feature 1..22: note = chemically synthesized
  source 1..22: mol_type = other DNA
tactttgggggatctctgcaaa

SEQ ID NO: 52603 - DNA, 22 bp, synthetic construct
  misc_feature 1..22: note = chemically synthesized
  source 1..22: mol_type = other DNA
actttgggggatctctgcaaat

SEQ ID NO: 52604 - DNA, 22 bp, synthetic construct
  misc_feature 1..22: note = chemically synthesized
  source 1..22: mol_type = other DNA
ctttgggggatctctgcaaatg

SEQ ID NO: 52605 - DNA, 22 bp, synthetic construct
  misc_feature 1..22: note = chemically synthesized
  source 1..22: mol_type = other DNA
tgggggatctctgcaaatgcat

SEQ ID NO: 52606 - DNA, 22 bp, synthetic construct
  misc_feature 1..22: note = chemically synthesized
  source 1..22: mol_type = other DNA
gggggatctctgcaaatgcatt

SEQ ID NO: 52607 - DNA, 22 bp, synthetic construct
  misc_feature 1..22: note = chemically synthesized
  source 1..22: mol_type = other DNA
ggggatctctgcaaatgcattt

SEQ ID NO: 52608 - DNA, 22 bp, synthetic construct
  misc_feature 1..22: note = chemically synthesized
  source 1..22: mol_type = other DNA
tgcaaatgcatttcccccgcaa

SEQ ID NO: 52609 - DNA, 22 bp, synthetic construct
  misc_feature 1..22: note = chemically synthesized
  source 1..22: mol_type = other DNA
caaatgcatttcccccgcaatt

SEQ ID NO: 52610 - DNA, 22 bp, synthetic construct
  misc_feature 1..22: note = chemically synthesized
  source 1..22: mol_type = other DNA
cccccgcaattctgggcactgg

SEQ ID NO: 52611 - DNA, 22 bp, synthetic construct
  misc_feature 1..22: note = chemically synthesized
  source 1..22: mol_type = other DNA
ccccgcaattctgggcactggg

SEQ ID NO: 52612 - DNA, 22 bp, synthetic construct
  misc_feature 1..22: note = chemically synthesized
  source 1..22: mol_type = other DNA
tgggcactgggtgtgcgcggcg

SEQ ID NO: 52613 - DNA, 22 bp, synthetic construct
  misc_feature 1..22: note = chemically synthesized
  source 1..22: mol_type = other DNA
ggcactgggtgtgcgcggcggc

SEQ ID NO: 52614 - DNA, 22 bp, synthetic construct
  misc_feature 1..22: note = chemically synthesized
  source 1..22: mol_type = other DNA
ggtgtgcgcggcggcggctgcg

SEQ ID NO: 52615 - DNA, 22 bp, synthetic construct
  misc_feature 1..22: note = chemically synthesized
  source 1..22: mol_type = other DNA
cggttattcattattaatgacg

SEQ ID NO: 52616 - DNA, 22 bp, synthetic construct
  misc_feature 1..22: note = chemically synthesized
  source 1..22: mol_type = other DNA
ttcattattaatgacgctgcct

SEQ ID NO: 52617 - DNA, 22 bp, synthetic construct
  misc_feature 1..22: note = chemically synthesized
  source 1..22: mol_type = other DNA
attattaatgacgctgcctgcc

SEQ ID NO: 52618 - DNA, 22 bp, synthetic construct
  misc_feature 1..22: note = chemically synthesized
  source 1..22: mol_type = other DNA
ttaatgacgctgcctgcccgca

SEQ ID NO: 52619 - DNA, 22 bp, synthetic construct
  misc_feature 1..22: note = chemically synthesized
  source 1..22: mol_type = other DNA
atgacgctgcctgcccgcatca

SEQ ID NO: 52620 - DNA, 22 bp, synthetic construct
  misc_feature 1..22: note = chemically synthesized
  source 1..22: mol_type = other DNA
cctgcccgcatcattatgatga

SEQ ID NO: 52621 - DNA, 22 bp, synthetic construct
  misc_feature 1..22: note = chemically synthesized
  source 1..22: mol_type = other DNA
cccgcatcattatgatgataac

SEQ ID NO: 52622 - DNA, 22 bp, synthetic construct
  misc_feature 1..22: note = chemically synthesized
  source 1..22: mol_type = other DNA
tgatgataactattactattgt

SEQ ID NO: 52623 - DNA, 22 bp, synthetic construct
  misc_feature 1..22: note = chemically synthesized
  source 1..22: mol_type = other DNA
ttactattgttgtgattccgag

SEQ ID NO: 52624 - DNA, 22 bp, synthetic construct
  misc_feature 1..22: note = chemically synthesized
  source 1..22: mol_type = other DNA
ctattgttgtgattccgagctc

SEQ ID NO: 52625 - DNA, 22 bp, synthetic construct
  misc_feature 1..22: note = chemically synthesized
  source 1..22: mol_type = other DNA
ttgttgtgattccgagctccga

SEQ ID NO: 52626 - DNA, 22 bp, synthetic construct
  misc_feature 1..22: note = chemically synthesized
  source 1..22: mol_type = other DNA
ttgtgattccgagctccgaggc

SEQ ID NO: 52627 - DNA, 22 bp, synthetic construct
  misc_feature 1..22: note = chemically synthesized
  source 1..22: mol_type = other DNA
tgattccgagctccgaggcgag

SEQ ID NO: 52628 - DNA, 22 bp, synthetic construct
  misc_feature 1..22: note = chemically synthesized
  source 1..22: mol_type = other DNA
cgagctccgaggcgagaggggg

SEQ ID NO: 52629 - DNA, 22 bp, synthetic construct
  misc_feature 1..22: note = chemically synthesized
  source 1..22: mol_type = other DNA
cgaggcgagagggggggtgtcg

SEQ ID NO: 52630 - DNA, 22 bp, synthetic construct
  misc_feature 1..22: note = chemically synthesized
  source 1..22: mol_type = other DNA
cagagccgcccagcaagccagc

SEQ ID NO: 52631 - DNA, 22 bp, synthetic construct
  misc_feature 1..22: note = chemically synthesized
  source 1..22: mol_type = other DNA
tgctttgcatgggggtgagggg

SEQ ID NO: 52632 - DNA, 22 bp, synthetic construct
  misc_feature 1..22: note = chemically synthesized
  source 1..22: mol_type = other DNA
tgcatgggggtgagggggtgga

SEQ ID NO: 52633 - DNA, 22 bp, synthetic construct
  misc_feature 1..22: note = chemically synthesized
  source 1..22: mol_type = other DNA
gcatgggggtgagggggtggaa

SEQ ID NO: 52634 - DNA, 22 bp, synthetic construct
  misc_feature 1..22: note = chemically synthesized
  source 1..22: mol_type = other DNA
catgggggtgagggggtggaag

SEQ ID NO: 52635 - DNA, 22 bp, synthetic construct
  misc_feature 1..22: note = chemically synthesized
  source 1..22: mol_type = other DNA
gagaccaagtgcaaacttgcca

SEQ ID NO: 52636 - DNA, 22 bp, synthetic construct
  misc_feature 1..22: note = chemically synthesized
  source 1..22: mol_type = other DNA
gccatatccccctcttcggcca

SEQ ID NO: 52637 - DNA, 22 bp, synthetic construct
  misc_feature 1..22: note = chemically synthesized
  source 1..22: mol_type = other DNA
ccatatccccctcttcggccat

SEQ ID NO: 52638 - DNA, 22 bp, synthetic construct
  misc_feature 1..22: note = chemically synthesized
  source 1..22: mol_type = other DNA
ttcggccatgccccgaagccct

SEQ ID NO: 52639 - DNA, 22 bp, synthetic construct
  misc_feature 1..22: note = chemically synthesized
  source 1..22: mol_type = other DNA
cggccatgccccgaagccctag

SEQ ID NO: 52640 - DNA, 22 bp, synthetic construct
  misc_feature 1..22: note = chemically synthesized
  source 1..22: mol_type = other DNA
ggccatgccccgaagccctaga

SEQ ID NO: 52641 - DNA, 22 bp, synthetic construct
  misc_feature 1..22: note = chemically synthesized
  source 1..22: mol_type = other DNA
gagcgcgcactcccggttcctc

SEQ ID NO: 52642 - DNA, 22 bp, synthetic construct
  misc_feature 1..22: note = chemically synthesized
  source 1..22: mol_type = other DNA
ccggttcctccctaccaaaaat

SEQ ID NO: 52643 - DNA, 22 bp, synthetic construct
  misc_feature 1..22: note = chemically synthesized
  source 1..22: mol_type = other DNA
ctccctaccaaaaatgccggcc

SEQ ID NO: 52644 - DNA, 22 bp, synthetic construct
  misc_feature 1..22: note = chemically synthesized
  source 1..22: mol_type = other DNA
cctaccaaaaatgccggccccg

SEQ ID NO: 52645 - DNA, 22 bp, synthetic construct
  misc_feature 1..22: note = chemically synthesized
  source 1..22: mol_type = other DNA
ccaaaaatgccggccccgaaag

SEQ ID NO: 52646 - DNA, 22 bp, synthetic construct
  misc_feature 1..22: note = chemically synthesized
  source 1..22: mol_type = other DNA
caccgtgctccgagcccggcgc

SEQ ID NO: 52647 - DNA, 22 bp, synthetic construct
  misc_feature 1..22: note = chemically synthesized
  source 1..22: mol_type = other DNA
cgagcccggcgcgcgctggtct

SEQ ID NO: 52648 - DNA, 22 bp, synthetic construct
  misc_feature 1..22: note = chemically synthesized
  source 1..22: mol_type = other DNA
gtctcagctcgcgcacgggggt

SEQ ID NO: 52649 - DNA, 22 bp, synthetic construct
  misc_feature 1..22: note = chemically synthesized
  source 1..22: mol_type = other DNA
agctcgcgcacgggggtgtcgg

SEQ ID NO: 52650 - DNA, 22 bp, synthetic construct
  misc_feature 1..22: note = chemically synthesized
  source 1..22: mol_type = other DNA
gcgcacgggggtgtcggccgcg

SEQ ID NO: 52651 - DNA, 22 bp, synthetic construct
  misc_feature 1..22: note = chemically synthesized
  source 1..22: mol_type = other DNA
ctccgcggccccggccagaagc

SEQ ID NO: 52652 - DNA, 22 bp, synthetic construct
  misc_feature 1..22: note = chemically synthesized
  source 1..22: mol_type = other DNA
tccgcggccccggccagaagca

SEQ ID NO: 52653 - DNA, 22 bp, synthetic construct
  misc_feature 1..22: note = chemically synthesized
  source 1..22: mol_type = other DNA
cgcggccccggccagaagcatt

SEQ ID NO: 52654 - DNA, 22 bp, synthetic construct
  misc_feature 1..22: note = chemically synthesized
  source 1..22: mol_type = other DNA
ttaaagtcaaaatgaagaacaa

SEQ ID NO: 52655 - DNA, 22 bp, synthetic construct
  misc_feature 1..22: note = chemically synthesized
  source 1..22: mol_type = other DNA
taaagtcaaaatgaagaacaaa

SEQ ID NO: 52656 - DNA, 22 bp, synthetic construct
  misc_feature 1..22: note = chemically synthesized
  source 1..22: mol_type = other DNA
aaagtcaaaatgaagaacaaag

SEQ ID NO: 52657 - DNA, 22 bp, synthetic construct
  misc_feature 1..22: note = chemically synthesized
  source 1..22: mol_type = other DNA
aagtcaaaatgaagaacaaaga

SEQ ID NO: 52658 - DNA, 22 bp, synthetic construct
  misc_feature 1..22: note = chemically synthesized
  source 1..22: mol_type = other DNA
tgcctaaccgttctttcccccc

SEQ ID NO: 52659 - DNA, 22 bp, synthetic construct
  misc_feature 1..22: note = chemically synthesized
  source 1..22: mol_type = other DNA
cctaaccgttctttccccccac

SEQ ID NO: 52660 - DNA, 22 bp, synthetic construct
  misc_feature 1..22: note = chemically synthesized
  source 1..22: mol_type = other DNA
accgttctttccccccaccccc

SEQ ID NO: 52661 - DNA, 22 bp, synthetic construct
  misc_feature 1..22: note = chemically synthesized
  source 1..22: mol_type = other DNA
tttccccccacccccaccctcg

SEQ ID NO: 52662 - DNA, 22 bp, synthetic construct
  misc_feature 1..22: note = chemically synthesized
  source 1..22: mol_type = other DNA
tccccccacccccaccctcgca

SEQ ID NO: 52663 - DNA, 22 bp, synthetic construct
  misc_feature 1..22: note = chemically synthesized
  source 1..22: mol_type = other DNA
ccccccacccccaccctcgcaa

SEQ ID NO: 52664 - DNA, 22 bp, synthetic construct
  misc_feature 1..22: note = chemically synthesized
  source 1..22: mol_type = other DNA
cccccacccccaccctcgcaaa

SEQ ID NO: 52665 - DNA, 22 bp, synthetic construct
  misc_feature 1..22: note = chemically synthesized
  source 1..22: mol_type = other DNA
gcaaagctcgttcctccccgga

SEQ ID NO: 52666 - DNA, 22 bp, synthetic construct
  misc_feature 1..22: note = chemically synthesized
  source 1..22: mol_type = other DNA
gttcctccccggacgagaatcg

SEQ ID NO: 52667 - DNA, 22 bp, synthetic construct
  misc_feature 1..22: note = chemically synthesized
  source 1..22: mol_type = other DNA
ctccccggacgagaatcgccgg

SEQ ID NO: 52668 - DNA, 22 bp, synthetic construct
  misc_feature 1..22: note = chemically synthesized
  source 1..22: mol_type = other DNA
cccggacgagaatcgccgggca

SEQ ID NO: 52669 - DNA, 22 bp, synthetic construct
  misc_feature 1..22: note = chemically synthesized
  source 1..22: mol_type = other DNA
tggtacaggttcaagttcgctg

SEQ ID NO: 52670 - DNA, 22 bp, synthetic construct
  misc_feature 1..22: note = chemically synthesized
  source 1..22: mol_type = other DNA
gtacaggttcaagttcgctgag

SEQ ID NO: 52671 - DNA, 22 bp, synthetic construct
  misc_feature 1..22: note = chemically synthesized
  source 1..22: mol_type = other DNA
aagttcgctgagctttcttgat

SEQ ID NO: 52672 - DNA, 22 bp, synthetic construct
  misc_feature 1..22: note = chemically synthesized
  source 1..22: mol_type = other DNA
gctgagctttcttgatcttgtt

SEQ ID NO: 52673 - DNA, 22 bp, synthetic construct
  misc_feature 1..22: note = chemically synthesized
  source 1..22: mol_type = other DNA
agctttcttgatcttgttctgc

SEQ ID NO: 52674 - DNA, 22 bp, synthetic construct
  misc_feature 1..22: note = chemically synthesized
  source 1..22: mol_type = other DNA
tcttgatcttgttctgcctcct

SEQ ID NO: 52675 - DNA, 22 bp, synthetic construct
  misc_feature 1..22: note = chemically synthesized
  source 1..22: mol_type = other DNA
cttgatcttgttctgcctccta

SEQ ID NO: 52676 - DNA, 22 bp, synthetic construct
  misc_feature 1..22: note = chemically synthesized
  source 1..22: mol_type = other DNA
ttgatcttgttctgcctcctag

SEQ ID NO: 52677 - DNA, 22 bp, synthetic construct
  misc_feature 1..22: note = chemically synthesized
  source 1..22: mol_type = other DNA
gatcttgttctgcctcctagcg

SEQ ID NO: 52678 - DNA, 22 bp, synthetic construct
  misc_feature 1..22: note = chemically synthesized
  source 1..22: mol_type = other DNA
atcttgttctgcctcctagcga

SEQ ID NO: 52679 - DNA, 22 bp, synthetic construct
  misc_feature 1..22: note = chemically synthesized
  source 1..22: mol_type = other DNA
gttctgcctcctagcgaccgaa

SEQ ID NO: 52680 - DNA, 22 bp, synthetic construct
  misc_feature 1..22: note = chemically synthesized
  source 1..22: mol_type = other DNA
ttctgcctcctagcgaccgaat

SEQ ID NO: 52681 - DNA, 22 bp, synthetic construct
  misc_feature 1..22: note = chemically synthesized
  source 1..22: mol_type = other DNA
tgcctcctagcgaccgaatggc

SEQ ID NO: 52682 - DNA, 22 bp, synthetic construct
  misc_feature 1..22: note = chemically synthesized
  source 1..22: mol_type = other DNA
cctcctagcgaccgaatggctc

SEQ ID NO: 52683 - DNA, 22 bp, synthetic construct
  misc_feature 1..22: note = chemically synthesized
  source 1..22: mol_type = other DNA
ctagcgaccgaatggctcattc

SEQ ID NO: 52684 - DNA, 22 bp, synthetic construct
  misc_feature 1..22: note = chemically synthesized
  source 1..22: mol_type = other DNA
gcgaccgaatggctcattcagc

SEQ ID NO: 52685 - DNA, 22 bp, synthetic construct
  misc_feature 1..22: note = chemically synthesized
  source 1..22: mol_type = other DNA
attcagcccacatagcagaggc

SEQ ID NO: 52686 - DNA, 22 bp, synthetic construct
  misc_feature 1..22: note = chemically synthesized
  source 1..22: mol_type = other DNA
agcccacatagcagaggcgggg

SEQ ID NO: 52687 - DNA, 22 bp, synthetic construct
  misc_feature 1..22: note = chemically synthesized
  source 1..22: mol_type = other DNA
aggaccgggatggctcctgccc

SEQ ID NO: 52688 - DNA, 22 bp, synthetic construct
  misc_feature 1..22: note = chemically synthesized
  source 1..22: mol_type = other DNA
ctgccccctctgagcacccaga

SEQ ID NO: 52689 - DNA, 22 bp, synthetic construct
  misc_feature 1..22: note = chemically synthesized
  source 1..22: mol_type = other DNA
ccccctctgagcacccagaaaa

SEQ ID NO: 52690 - DNA, 22 bp, synthetic construct
  misc_feature 1..22: note = chemically synthesized
  source 1..22: mol_type = other DNA
tgagcacccagaaaatgaggac

SEQ ID NO: 52691 - DNA, 22 bp, synthetic construct
  misc_feature 1..22: note = chemically synthesized
  source 1..22: mol_type = other DNA
agcacccagaaaatgaggacag

SEQ ID NO: 52692 - DNA, 22 bp, synthetic construct
  misc_feature 1..22: note = chemically synthesized
  source 1..22: mol_type = other DNA
accccctcccaaactggccctt

SEQ ID NO: 52693 - DNA, 22 bp, synthetic construct
  misc_feature 1..22: note = chemically synthesized
  source 1..22: mol_type = other DNA
ccaaactggccctttaaccccg

SEQ ID NO: 52694 - DNA, 22 bp, synthetic construct
  misc_feature 1..22: note = chemically synthesized
  source 1..22: mol_type = other DNA
gccctttaaccccgggacagga

SEQ ID NO: 52695 - DNA, 22 bp, synthetic construct
  misc_feature 1..22: note = chemically synthesized
  source 1..22: mol_type = other DNA
taaccccgggacaggaggaggg

SEQ ID NO: 52696 - DNA, 22 bp, synthetic construct
  misc_feature 1..22: note = chemically synthesized
  source 1..22: mol_type = other DNA
aaccccgggacaggaggagggg

SEQ ID NO: 52697 - DNA, 22 bp, synthetic construct
  misc_feature 1..22: note = chemically synthesized
  source 1..22: mol_type = other DNA
accccgggacaggaggaggggg

SEQ ID NO: 52698 - DNA, 22 bp, synthetic construct
  misc_feature 1..22: note = chemically synthesized
  source 1..22: mol_type = other DNA
accctcccagcctagagtgtcc

SEQ ID NO: 52699 - DNA, 22 bp, synthetic construct
  misc_feature 1..22: note = chemically synthesized
  source 1..22: mol_type = other DNA
ccagcctagagtgtcccaagat

SEQ ID NO: 52700 - DNA, 22 bp, synthetic construct
  misc_feature 1..22: note = chemically synthesized
  source 1..22: mol_type = other DNA
gagtgtcccaagatggacccag

SEQ ID NO: 52701 - DNA, 22 bp, synthetic construct
  misc_feature 1..22: note = chemically synthesized
  source 1..22: mol_type = other DNA
gactgcgcgccccggtctgtcc

SEQ ID NO: 52702 - DNA, 22 bp, synthetic construct
  misc_feature 1..22: note = chemically synthesized
  source 1..22: mol_type = other DNA
cgcgccccggtctgtcctttga

SEQ ID NO: 52703 - DNA, 22 bp, synthetic construct
  misc_feature 1..22: note = chemically synthesized
  source 1..22: mol_type = other DNA
tcctttgagcccccactgcatc

SEQ ID NO: 52704 - DNA, 22 bp, synthetic construct
  misc_feature 1..22: note = chemically synthesized
  source 1..22: mol_type = other DNA
tgagcccccactgcatccttcc

SEQ ID NO: 52705 - DNA, 22 bp, synthetic construct
  misc_feature 1..22: note = chemically synthesized
  source 1..22: mol_type = other DNA
gagcccccactgcatccttccg

SEQ ID NO: 52706 - DNA, 22 bp, synthetic construct
  misc_feature 1..22: note = chemically synthesized
  source 1..22: mol_type = other DNA
agcccccactgcatccttccga

SEQ ID NO: 52707 - DNA, 22 bp, synthetic construct
  misc_feature 1..22: note = chemically synthesized
  source 1..22: mol_type = other DNA
catccttccgaagaagggcctg

SEQ ID NO: 52708 - DNA, 22 bp, synthetic construct
  misc_feature 1..22: note = chemically synthesized
  source 1..22: mol_type = other DNA
ccgaagaagggcctgactttcc

SEQ ID NO: 52709 - DNA, 22 bp, synthetic construct
  misc_feature 1..22: note = chemically synthesized
  source 1..22: mol_type = other DNA
cgaagaagggcctgactttccc

SEQ ID NO: 52710 - DNA, 22 bp, synthetic construct
  misc_feature 1..22: note = chemically synthesized
  source 1..22: mol_type = other DNA
actttcccgagtcctgcgaaca

SEQ ID NO: 52711 - DNA, 22 bp, synthetic construct
  misc_feature 1..22: note = chemically synthesized
  source 1..22: mol_type = other DNA
tcccgagtcctgcgaacactgc

SEQ ID NO: 52712 - DNA, 22 bp, synthetic construct
  misc_feature 1..22: note = chemically synthesized
  source 1..22: mol_type = other DNA
cccgagtcctgcgaacactgcc

SEQ ID NO: 52713 - DNA, 22 bp, synthetic construct
  misc_feature 1..22: note = chemically synthesized
  source 1..22: mol_type = other DNA
ccgagtcctgcgaacactgccc

SEQ ID NO: 52714 - DNA, 22 bp, synthetic construct
  misc_feature 1..22: note = chemically synthesized
  source 1..22: mol_type = other DNA
cgaacactgcccttccttcccg

SEQ ID NO: 52715 - DNA, 22 bp, synthetic construct
  misc_feature 1..22: note = chemically synthesized
  source 1..22: mol_type = other DNA
cccttccttcccgccggtacct

SEQ ID NO: 52716 - DNA, 22 bp, synthetic construct
  misc_feature 1..22: note = chemically synthesized
  source 1..22: mol_type = other DNA
ccttcccgccggtacctggccg

SEQ ID NO: 52717 - DNA, 22 bp, synthetic construct
  misc_feature 1..22: note = chemically synthesized
  source 1..22: mol_type = other DNA
cttcccgccggtacctggccgg

SEQ ID NO: 52718 - DNA, 22 bp, synthetic construct
  misc_feature 1..22: note = chemically synthesized
  source 1..22: mol_type = other DNA
cccgccggtacctggccgggct

SEQ ID NO: 52719 - DNA, 22 bp, synthetic construct
  misc_feature 1..22: note = chemically synthesized
  source 1..22: mol_type = other DNA
ccgccggtacctggccgggctg

SEQ ID NO: 52720 - DNA, 22 bp, synthetic construct
  misc_feature 1..22: note = chemically synthesized
  source 1..22: mol_type = other DNA
gccgggctgtaacttcacaccg

SEQ ID NO: 52721 - DNA, 22 bp, synthetic construct
  misc_feature 1..22: note = chemically synthesized
  source 1..22: mol_type = other DNA
taacttcacaccgccgcgcgcc

SEQ ID NO: 52722 - DNA, 22 bp, synthetic construct
  misc_feature 1..22: note = chemically synthesized
  source 1..22: mol_type = other DNA
cacaccgccgcgcgccgcgtct

SEQ ID NO: 52723 - DNA, 22 bp, synthetic construct
  misc_feature 1..22: note = chemically synthesized
  source 1..22: mol_type = other DNA
acaccgccgcgcgccgcgtctg

SEQ ID NO: 52724 - DNA, 22 bp, synthetic construct
  misc_feature 1..22: note = chemically synthesized
  source 1..22: mol_type = other DNA
atccgcatccggcgcggccggg

SEQ ID NO: 52725 - DNA, 22 bp, synthetic construct
  misc_feature 1..22: note = chemically synthesized
  source 1..22: mol_type = other DNA
ggggcgggggagagcggcgagg

SEQ ID NO: 52726 - DNA, 22 bp, synthetic construct
  misc_feature 1..22: note = chemically synthesized
  source 1..22: mol_type = other DNA
ccgaagtgtgtgacaagttcca

SEQ ID NO: 52727 - DNA, 22 bp, synthetic construct
  misc_feature 1..22: note = chemically synthesized
  source 1..22: mol_type = other DNA
cgaagtgtgtgacaagttccag

SEQ ID NO: 52728 - DNA, 22 bp, synthetic construct
  misc_feature 1..22: note = chemically synthesized
  source 1..22: mol_type = other DNA
cagggcccagtgaaaaattaaa

SEQ ID NO: 52729 - DNA, 22 bp, synthetic construct
  misc_feature 1..22: note = chemically synthesized
  source 1..22: mol_type = other DNA
aattccctgtgcgcacccccca

SEQ ID NO: 52730 - DNA, 22 bp, synthetic construct
  misc_feature 1..22: note = chemically synthesized
  source 1..22: mol_type = other DNA
cctgtgcgcaccccccaccacc

SEQ ID NO: 52731 - DNA, 22 bp, synthetic construct
  misc_feature 1..22: note = chemically synthesized
  source 1..22: mol_type = other DNA
tgcgcaccccccaccaccaccc

SEQ ID NO: 52732 - DNA, 22 bp, synthetic construct
  misc_feature 1..22: note = chemically synthesized
  source 1..22: mol_type = other DNA
taaaaaaacacagaaccaagta

SEQ ID NO: 52733 - DNA, 22 bp, synthetic construct
  misc_feature 1..22: note = chemically synthesized
  source 1..22: mol_type = other DNA
aaaaaaacacagaaccaagtat

SEQ ID NO: 52734 - DNA, 22 bp, synthetic construct
  misc_feature 1..22: note = chemically synthesized
  source 1..22: mol_type = other DNA
aaaaaacacagaaccaagtata

SEQ ID NO: 52735 - DNA, 22 bp, synthetic construct
  misc_feature 1..22: note = chemically synthesized
  source 1..22: mol_type = other DNA
taaaactgcatcaaaaatttaa

SEQ ID NO: 52736 - DNA, 22 bp, synthetic construct
  misc_feature 1..22: note = chemically synthesized
  source 1..22: mol_type = other DNA
aaaactgcatcaaaaatttaaa

SEQ ID NO: 52737 - DNA, 22 bp, synthetic construct
  misc_feature 1..22: note = chemically synthesized
  source 1..22: mol_type = other DNA
aaactgcatcaaaaatttaaag

SEQ ID NO: 52738 - DNA, 22 bp, synthetic construct
  misc_feature 1..22: note = chemically synthesized
  source 1..22: mol_type = other DNA
catcaaaaatttaaagtaagaa

SEQ ID NO: 52739 - DNA, 22 bp, synthetic construct
  misc_feature 1..22: note = chemically synthesized
  source 1..22: mol_type = other DNA
aaagtaagaatcataaattgag

SEQ ID NO: 52740 - DNA, 22 bp, synthetic construct
  misc_feature 1..22: note = chemically synthesized
  source 1..22: mol_type = other DNA
aagtaagaatcataaattgagt

SEQ ID NO: 52741 - DNA, 22 bp, synthetic construct
  misc_feature 1..22: note = chemically synthesized
  source 1..22: mol_type = other DNA
agtagggggggaatgtgggccc

SEQ ID NO: 52742 - DNA, 22 bp, synthetic construct
  misc_feature 1..22: note = chemically synthesized
  source 1..22: mol_type = other DNA
acgcctttctttcccttgctgc

SEQ ID NO: 52743 - DNA, 22 bp, synthetic construct
  misc_feature 1..22: note = chemically synthesized
  source 1..22: mol_type = other DNA
tctttcccttgctgccaaactt

SEQ ID NO: 52744 - DNA, 22 bp, synthetic construct
  misc_feature 1..22: note = chemically synthesized
  source 1..22: mol_type = other DNA
ctttcccttgctgccaaacttt

SEQ ID NO: 52745 - DNA, 22 bp, synthetic construct
  misc_feature 1..22: note = chemically synthesized
  source 1..22: mol_type = other DNA
tttcccttgctgccaaactttc

SEQ ID NO: 52746 - DNA, 22 bp, synthetic construct
  misc_feature 1..22: note = chemically synthesized
  source 1..22: mol_type = other DNA
tcccttgctgccaaactttcct

SEQ ID NO: 52747 - DNA, 22 bp, synthetic construct
  misc_feature 1..22: note = chemically synthesized
  source 1..22: mol_type = other DNA
cccttgctgccaaactttccta

SEQ ID NO: 52748 - DNA, 22 bp, synthetic construct
  misc_feature 1..22: note = chemically synthesized
  source 1..22: mol_type = other DNA
ccttgctgccaaactttcctaa

SEQ ID NO: 52749 - DNA, 22 bp, synthetic construct
  misc_feature 1..22: note = chemically synthesized
  source 1..22: mol_type = other DNA
gctgccaaactttcctaagtgc

SEQ ID NO: 52750 - DNA, 22 bp, synthetic construct
  misc_feature 1..22: note = chemically synthesized
  source 1..22: mol_type = other DNA
ctgccaaactttcctaagtgcc

SEQ ID NO: 52751 - DNA, 22 bp, synthetic construct
  misc_feature 1..22: note = chemically synthesized
  source 1..22: mol_type = other DNA
ccaaactttcctaagtgcccac

SEQ ID NO: 52752 - DNA, 22 bp, synthetic construct
  misc_feature 1..22: note = chemically synthesized
  source 1..22: mol_type = other DNA
tcctaagtgcccaccgcccgcc

SEQ ID NO: 52753 - DNA, 22 bp, synthetic construct
  misc_feature 1..22: note = chemically synthesized
  source 1..22: mol_type = other DNA
cctaagtgcccaccgcccgcct

SEQ ID NO: 52754 - DNA, 22 bp, synthetic construct
  misc_feature 1..22: note = chemically synthesized
  source 1..22: mol_type = other DNA
ctaagtgcccaccgcccgcctt

SEQ ID NO: 52755 - DNA, 22 bp, synthetic construct
  misc_feature 1..22: note = chemically synthesized
  source 1..22: mol_type = other DNA
agtgcccaccgcccgcctttcc

SEQ ID NO: 52756 - DNA, 22 bp, synthetic construct
  misc_feature 1..22: note = chemically synthesized
  source 1..22: mol_type = other DNA
tccaggcgcagtcagcgggaga

SEQ ID NO: 52757 - DNA, 22 bp, synthetic construct
  misc_feature 1..22: note = chemically synthesized
  source 1..22: mol_type = other DNA
ccaggcgcagtcagcgggagac

SEQ ID NO: 52758 - DNA, 22 bp, synthetic construct
  misc_feature 1..22: note = chemically synthesized
  source 1..22: mol_type = other DNA
caggcgcagtcagcgggagaca

SEQ ID NO: 52759 - DNA, 22 bp, synthetic construct
  misc_feature 1..22: note = chemically synthesized
  source 1..22: mol_type = other DNA
ttatacagactcacaagaacct

SEQ ID NO: 52760 - DNA, 22 bp, synthetic construct
  misc_feature 1..22: note = chemically synthesized
  source 1..22: mol_type = other DNA
atacagactcacaagaacctca

SEQ ID NO: 52761 - DNA, 22 bp, synthetic construct
  misc_feature 1..22: note = chemically synthesized
  source 1..22: mol_type = other DNA
tacagactcacaagaacctcag

SEQ ID NO: 52762 - DNA, 22 bp, synthetic construct
  misc_feature 1..22: note = chemically synthesized
  source 1..22: mol_type = other DNA
acaagaacctcagaccaagcca

SEQ ID NO: 52763 - DNA, 22 bp, synthetic construct
  misc_feature 1..22: note = chemically synthesized
  source 1..22: mol_type = other DNA
agaccaagccaggcctggggaa

SEQ ID NO: 52764 - DNA, 22 bp, synthetic construct
  misc_feature 1..22: note = chemically synthesized
  source 1..22: mol_type = other DNA
gggaagagggcaagacccaaag

SEQ ID NO: 52765 - DNA, 22 bp, synthetic construct
  misc_feature 1..22: note = chemically synthesized
  source 1..22: mol_type = other DNA
ggggtcccaggatccagcgccc

SEQ ID NO: 52766 - DNA, 22 bp, synthetic construct
  misc_feature 1..22: note = chemically synthesized
  source 1..22: mol_type = other DNA
aaaatgcacactcaaacacact

SEQ ID NO: 52767 - DNA, 22 bp, synthetic construct
  misc_feature 1..22: note = chemically synthesized
  source 1..22: mol_type = other DNA
aaatgcacactcaaacacactt

SEQ ID NO: 52768 - DNA, 22 bp, synthetic construct
  misc_feature 1..22: note = chemically synthesized
  source 1..22: mol_type = other DNA
aaacacacttctcccctgccct

SEQ ID NO: 52769 - DNA, 22 bp, synthetic construct
  misc_feature 1..22: note = chemically synthesized
  source 1..22: mol_type = other DNA
ctcccctgcccttccccggcaa

SEQ ID NO: 52770 - DNA, 22 bp, synthetic construct
  misc_feature 1..22: note = chemically synthesized
  source 1..22: mol_type = other DNA
tcccctgcccttccccggcaac

SEQ ID NO: 52771 - DNA, 22 bp, synthetic construct
  misc_feature 1..22: note = chemically synthesized
  source 1..22: mol_type = other DNA
ccctgcccttccccggcaaccc

SEQ ID NO: 52772 - DNA, 22 bp, synthetic construct
  misc_feature 1..22: note = chemically synthesized
  source 1..22: mol_type = other DNA
cccttccccggcaaccccgcca

SEQ ID NO: 52773 - DNA, 22 bp, synthetic construct
  misc_feature 1..22: note = chemically synthesized
  source 1..22: mol_type = other DNA
ccccggcaaccccgccacctgg

SEQ ID NO: 52774 - DNA, 22 bp, synthetic construct
  misc_feature 1..22: note = chemically synthesized
  source 1..22: mol_type = other DNA
cccggcaaccccgccacctggc

SEQ ID NO: 52775 - DNA, 22 bp, synthetic construct
  misc_feature 1..22: note = chemically synthesized
  source 1..22: mol_type = other DNA
gcctagtcgtgctcggggcgca

SEQ ID NO: 52776 - DNA, 22 bp, synthetic construct
  misc_feature 1..22: note = chemically synthesized
  source 1..22: mol_type = other DNA
gtcgtgctcggggcgcaggggg

SEQ ID NO: 52777 - DNA, 22 bp, synthetic construct
  misc_feature 1..22: note = chemically synthesized
  source 1..22: mol_type = other DNA
ggggcgcagggggactggtgac

SEQ ID NO: 52778 - DNA, 22 bp, synthetic construct
  misc_feature 1..22: note = chemically synthesized
  source 1..22: mol_type = other DNA
gtgaccagaccgggcggggtgg

SEQ ID NO: 52779 - DNA, 22 bp, synthetic construct
  misc_feature 1..22: note = chemically synthesized
  source 1..22: mol_type = other DNA
ctcgcggtcccgagctgtggac

SEQ ID NO: 52780 - DNA, 22 bp, synthetic construct
  misc_feature 1..22: note = chemically synthesized
  source 1..22: mol_type = other DNA
gcggtcccgagctgtggacaag

SEQ ID NO: 52781 - DNA, 22 bp, synthetic construct
  misc_feature 1..22: note = chemically synthesized
  source 1..22: mol_type = other DNA
tggacaagagacgtctgagaaa

SEQ ID NO: 52782 - DNA, 22 bp, synthetic construct
  misc_feature 1..22: note = chemically synthesized
  source 1..22: mol_type = other DNA
agaaagtacccagggcggaggg

SEQ ID NO: 52783 - DNA, 22 bp, synthetic construct
  misc_feature 1..22: note = chemically synthesized
  source 1..22: mol_type = other DNA
ttacagttgccctgcaaaataa

SEQ ID NO: 52784 - DNA, 22 bp, synthetic construct
  misc_feature 1..22: note = chemically synthesized
  source 1..22: mol_type = other DNA
tacagttgccctgcaaaataaa

SEQ ID NO: 52785 - DNA, 22 bp, synthetic construct
  misc_feature 1..22: note = chemically synthesized
  source 1..22: mol_type = other DNA
acagttgccctgcaaaataaaa

SEQ ID NO: 52786 - DNA, 22 bp, synthetic construct
  misc_feature 1..22: note = chemically synthesized
  source 1..22: mol_type = other DNA
cagttgccctgcaaaataaaaa

SEQ ID NO: 52787 - DNA, 22 bp, synthetic construct
  misc_feature 1..22: note = chemically synthesized
  source 1..22: mol_type = other DNA
ccctgcaaaataaaaatgcttt

SEQ ID NO: 52788 - DNA, 22 bp, synthetic construct
  misc_feature 1..22: note = chemically synthesized
  source 1..22: mol_type = other DNA
caaaataaaaatgctttgcaaa

SEQ ID NO: 52789 - DNA, 22 bp, synthetic construct
  misc_feature 1..22: note = chemically synthesized
  source 1..22: mol_type = other DNA
tgcaaagccgagtttcacccag

SEQ ID NO: 52790 - DNA, 22 bp, synthetic construct
  misc_feature 1..22: note = chemically synthesized
  source 1..22: mol_type = other DNA
gcaaagccgagtttcacccagc

SEQ ID NO: 52791 - DNA, 22 bp, synthetic construct
  misc_feature 1..22: note = chemically synthesized
  source 1..22: mol_type = other DNA
caaagccgagtttcacccagcc

SEQ ID NO: 52792 - DNA, 22 bp, synthetic construct
  misc_feature 1..22: note = chemically synthesized
  source 1..22: mol_type = other DNA
cacccagccgatttcgcagtct

SEQ ID NO: 52793 - DNA, 22 bp, synthetic construct
  misc_feature 1..22: note = chemically synthesized
  source 1..22: mol_type = other DNA
acccagccgatttcgcagtctg

SEQ ID NO: 52794 - DNA, 22 bp, synthetic construct
  misc_feature 1..22: note = chemically synthesized
  source 1..22: mol_type = other DNA
cgcagtctgggaggtcgagaag

SEQ ID NO: 52795 - DNA, 22 bp, synthetic construct
  misc_feature 1..22: note = chemically synthesized
  source 1..22: mol_type = other DNA
gcagtctgggaggtcgagaaga

SEQ ID NO: 52796 - DNA, 22 bp, synthetic construct
  misc_feature 1..22: note = chemically synthesized
  source 1..22: mol_type = other DNA
ggaggtcgagaagaggtctcgg

SEQ ID NO: 52797 - DNA, 22 bp, synthetic construct
  misc_feature 1..22: note = chemically synthesized
  source 1..22: mol_type = other DNA
ggcattgtgctgggggcggacc

SEQ ID NO: 52798 - DNA, 22 bp, synthetic construct
  misc_feature 1..22: note = chemically synthesized
  source 1..22: mol_type = other DNA
tgctgggggcggaccaggacca

SEQ ID NO: 52799 - DNA, 22 bp, synthetic construct
  misc_feature 1..22: note = chemically synthesized
  source 1..22: mol_type = other DNA
ggggcggaccaggaccacgggc

SEQ ID NO: 52800 - DNA, 22 bp, synthetic construct
  misc_feature 1..22: note = chemically synthesized
  source 1..22: mol_type = other DNA
gcgcggagacactgcgtggcct

SEQ ID NO: 52801 - DNA, 22 bp, synthetic construct
  misc_feature 1..22: note = chemically synthesized
  source 1..22: mol_type = other DNA
cgtggcctgccgccgtgcctgg

SEQ ID NO: 52802 - DNA, 22 bp, synthetic construct
  misc_feature 1..22: note = chemically synthesized
  source 1..22: mol_type = other DNA
ccgccgtgcctggcgggtgggc

SEQ ID NO: 52803 - DNA, 22 bp, synthetic construct
  misc_feature 1..22: note = chemically synthesized
  source 1..22: mol_type = other DNA
gcgggtgggcgccgggcgccgg

SEQ ID NO: 52804 - DNA, 22 bp, synthetic construct
  misc_feature 1..22: note = chemically synthesized
  source 1..22: mol_type = other DNA
ggctggggcgcggcgaggtcgg

SEQ ID NO: 52805 - DNA, 22 bp, synthetic construct
  misc_feature 1..22: note = chemically synthesized
  source 1..22: mol_type = other DNA
gggcgcggcgaggtcgggcaag

SEQ ID NO: 52806 - DNA, 22 bp, synthetic construct
  misc_feature 1..22: note = chemically synthesized
  source 1..22: mol_type = other DNA
ctccggggctgccgcgccgcgc

SEQ ID NO: 52807 - DNA, 22 bp, synthetic construct
  misc_feature 1..22: note = chemically synthesized
  source 1..22: mol_type = other DNA
cggggctgccgcgccgcgctcg

SEQ ID NO: 52808 - DNA, 22 bp, synthetic construct
  misc_feature 1..22: note = chemically synthesized
  source 1..22: mol_type = other DNA
ccgcgccgcgctcggtcctctg

SEQ ID NO: 52809 - DNA, 22 bp, synthetic construct
  misc_feature 1..22: note = chemically synthesized
  source 1..22: mol_type = other DNA
ggtcctctgtctgtttgttggc

SEQ ID NO: 52810 - DNA, 22 bp, synthetic construct
  misc_feature 1..22: note = chemically synthesized
  source 1..22: mol_type = other DNA
tgtctgtttgttggcaggaggc

SEQ ID NO: 52811 - DNA, 22 bp, synthetic construct
  misc_feature 1..22: note = chemically synthesized
  source 1..22: mol_type = other DNA
tctgtttgttggcaggaggctc

SEQ ID NO: 52812 - DNA, 22 bp, synthetic construct
  misc_feature 1..22: note = chemically synthesized
  source 1..22: mol_type = other DNA
tttgttggcaggaggctcccgc

SEQ ID NO: 52813 - DNA, 22 bp, synthetic construct
  misc_feature 1..22: note = chemically synthesized
  source 1..22: mol_type = other DNA
gttggcaggaggctcccgcaca

SEQ ID NO: 52814 - DNA, 22 bp, synthetic construct
  misc_feature 1..22: note = chemically synthesized
  source 1..22: mol_type = other DNA
ttggcaggaggctcccgcacac

SEQ ID NO: 52815 - DNA, 22 bp, synthetic construct
  misc_feature 1..22: note = chemically synthesized
  source 1..22: mol_type = other DNA
gcaggaggctcccgcacacgcg

SEQ ID NO: 52816 - DNA, 22 bp, synthetic construct
  misc_feature 1..22: note = chemically synthesized
  source 1..22: mol_type = other DNA
ccgcacacgcggtgcttgtaaa

SEQ ID NO: 52817 - DNA, 22 bp, synthetic construct
  misc_feature 1..22: note = chemically synthesized
  source 1..22: mol_type = other DNA
gtaaacattcagacacgagatt

SEQ ID NO: 52818 - DNA, 22 bp, synthetic construct
  misc_feature 1..22: note = chemically synthesized
  source 1..22: mol_type = other DNA
taaacattcagacacgagattt

SEQ ID NO: 52819 - DNA, 22 bp, synthetic construct
  misc_feature 1..22: note = chemically synthesized
  source 1..22: mol_type = other DNA
agacacgagatttttcccaatc

SEQ ID NO: 52820 - DNA, 22 bp, synthetic construct
  misc_feature 1..22: note = chemically synthesized
  source 1..22: mol_type = other DNA
ttcccaatcaaaatccacttcc

SEQ ID NO: 52821 - DNA, 22 bp, synthetic construct
  misc_feature 1..22: note = chemically synthesized
  source 1..22: mol_type = other DNA
tcccaatcaaaatccacttcca

SEQ ID NO: 52822 - DNA, 22 bp, synthetic construct
  misc_feature 1..22: note = chemically synthesized
  source 1..22: mol_type = other DNA
cccaatcaaaatccacttccac

SEQ ID NO: 52823 - DNA, 22 bp, synthetic construct
  misc_feature 1..22: note = chemically synthesized
  source 1..22: mol_type = other DNA
ccaatcaaaatccacttccact

SEQ ID NO: 52824 - DNA, 22 bp, synthetic construct
  misc_feature 1..22: note = chemically synthesized
  source 1..22: mol_type = other DNA
ccactttttttgaaaatcttcc

SEQ ID NO: 52825 - DNA, 22 bp, synthetic construct
  misc_feature 1..22: note = chemically synthesized
  source 1..22: mol_type = other DNA
cactttttttgaaaatcttcca

SEQ ID NO: 52826 - DNA, 22 bp, synthetic construct
  misc_feature 1..22: note = chemically synthesized
  source 1..22: mol_type = other DNA
tttttgaaaatcttccaaaaaa

SEQ ID NO: 52827 - DNA, 22 bp, synthetic construct
  misc_feature 1..22: note = chemically synthesized
  source 1..22: mol_type = other DNA
ttttgaaaatcttccaaaaaat

SEQ ID NO: 52828 - DNA, 22 bp, synthetic construct
  misc_feature 1..22: note = chemically synthesized
  source 1..22: mol_type = other DNA
tttgaaaatcttccaaaaaata

SEQ ID NO: 52829 - DNA, 22 bp, synthetic construct
  misc_feature 1..22: note = chemically synthesized
  source 1..22: mol_type = other DNA
ttgaaaatcttccaaaaaatag

SEQ ID NO: 52830 - DNA, 22 bp, synthetic construct
  misc_feature 1..22: note = chemically synthesized
  source 1..22: mol_type = other DNA
tgaaaatcttccaaaaaatagt

SEQ ID NO: 52831 - DNA, 22 bp, synthetic construct
  misc_feature 1..22: note = chemically synthesized
  source 1..22: mol_type = other DNA
gaaaatcttccaaaaaatagta

SEQ ID NO: 52832 - DNA, 22 bp, synthetic construct
  misc_feature 1..22: note = chemically synthesized
  source 1..22: mol_type = other DNA
aaaatcttccaaaaaatagtaa

SEQ ID NO: 52833 - DNA, 22 bp, synthetic construct
  misc_feature 1..22: note = chemically synthesized
  source 1..22: mol_type = other DNA
ccaaaaaatagtaagaggaggg

SEQ ID NO: 52834 - DNA, 22 bp, synthetic construct
  misc_feature 1..22: note = chemically synthesized
  source 1..22: mol_type = other DNA
caaaaaatagtaagaggaggga

SEQ ID NO: 52835 - DNA, 22 bp, synthetic construct
  misc_feature 1..22: note = chemically synthesized
  source 1..22: mol_type = other DNA
ctctctccctctccgtgccgtc

SEQ ID NO: 52836 - DNA, 22 bp, synthetic construct
  misc_feature 1..22: note = chemically synthesized
  source 1..22: mol_type = other DNA
tctccctctccgtgccgtcggc

SEQ ID NO: 52837 - DNA, 22 bp, synthetic construct
  misc_feature 1..22: note = chemically synthesized
  source 1..22: mol_type = other DNA
tccctctccgtgccgtcggcgc

SEQ ID NO: 52838 - DNA, 22 bp, synthetic construct
  misc_feature 1..22: note = chemically synthesized
  source 1..22: mol_type = other DNA
cctctccgtgccgtcggcgccc

SEQ ID NO: 52839 - DNA, 22 bp, synthetic construct
  misc_feature 1..22: note = chemically synthesized
  source 1..22: mol_type = other DNA
tccgtgccgtcggcgccctaag

SEQ ID NO: 52840 - DNA, 22 bp, synthetic construct
  misc_feature 1..22: note = chemically synthesized
  source 1..22: mol_type = other DNA
cgtgccgtcggcgccctaagtt

SEQ ID NO: 52841 - DNA, 22 bp, synthetic construct
  misc_feature 1..22: note = chemically synthesized
  source 1..22: mol_type = other DNA
agtttgcaactgaaggggtttg

SEQ ID NO: 52842 - DNA, 22 bp, synthetic construct
  misc_feature 1..22: note = chemically synthesized
  source 1..22: mol_type = other DNA
gcaactgaaggggtttggggga

SEQ ID NO: 52843 - DNA, 22 bp, synthetic construct
  misc_feature 1..22: note = chemically synthesized
  source 1..22: mol_type = other DNA
caactgaaggggtttgggggaa

SEQ ID NO: 52844 - DNA, 22 bp, synthetic construct
  misc_feature 1..22: note = chemically synthesized
  source 1..22: mol_type = other DNA
aaggggtttgggggaagagggt

SEQ ID NO: 52845 - DNA, 22 bp, synthetic construct
  misc_feature 1..22: note = chemically synthesized
  source 1..22: mol_type = other DNA
gggggaagagggtgattgtaaa

SEQ ID NO: 52846 - DNA, 22 bp, synthetic construct
  misc_feature 1..22: note = chemically synthesized
  source 1..22: mol_type = other DNA
ggggaagagggtgattgtaaat

SEQ ID NO: 52847 - DNA, 22 bp, synthetic construct
  misc_feature 1..22: note = chemically synthesized
  source 1..22: mol_type = other DNA
taaatttttttctagatgagag

SEQ ID NO: 52848 - DNA, 22 bp, synthetic construct
  misc_feature 1..22: note = chemically synthesized
  source 1..22: mol_type = other DNA
ttttctagatgagagattgtga

SEQ ID NO: 52849 - DNA, 22 bp, synthetic construct
  misc_feature 1..22: note = chemically synthesized
  source 1..22: mol_type = other DNA
tttctagatgagagattgtgag

SEQ ID NO: 52850 - DNA, 22 bp, synthetic construct
  misc_feature 1..22: note = chemically synthesized
  source 1..22: mol_type = other DNA
ttctagatgagagattgtgaga

SEQ ID NO: 52851 - DNA, 22 bp, synthetic construct
  misc_feature 1..22: note = chemically synthesized
  source 1..22: mol_type = other DNA
tctagatgagagattgtgagat

SEQ ID NO: 52852 - DNA, 22 bp, synthetic construct
  misc_feature 1..22: note = chemically synthesized
  source 1..22: mol_type = other DNA
ctagatgagagattgtgagatt

SEQ ID NO: 52853 - DNA, 22 bp, synthetic construct
  misc_feature 1..22: note = chemically synthesized
  source 1..22: mol_type = other DNA
tagatgagagattgtgagattt

SEQ ID NO: 52854 - DNA, 22 bp, synthetic construct
  misc_feature 1..22: note = chemically synthesized
  source 1..22: mol_type = other DNA
gatgagagattgtgagattttt

SEQ ID NO: 52855 - DNA, 22 bp, synthetic construct
  misc_feature 1..22: note = chemically synthesized
  source 1..22: mol_type = other DNA
tgagatttttgcaggggggctg

SEQ ID NO: 52856 - DNA, 22 bp, synthetic construct
  misc_feature 1..22: note = chemically synthesized
  source 1..22: mol_type = other DNA
ttgcaggggggctggtggggga

SEQ ID NO: 52857 - DNA, 22 bp, synthetic construct
  misc_feature 1..22: note = chemically synthesized
  source 1..22: mol_type = other DNA
tgcaggggggctggtgggggag

SEQ ID NO: 52858 - DNA, 22 bp, synthetic construct
  misc_feature 1..22: note = chemically synthesized
  source 1..22: mol_type = other DNA
gcaggggggctggtgggggagt

SEQ ID NO: 52859 - DNA, 22 bp, synthetic construct
  misc_feature 1..22: note = chemically synthesized
  source 1..22: mol_type = other DNA
caggggggctggtgggggagtc

SEQ ID NO: 52860 - DNA, 22 bp, synthetic construct
  misc_feature 1..22: note = chemically synthesized
  source 1..22: mol_type = other DNA
gtgggggagtcaaagagaaggc

SEQ ID NO: 52861 - DNA, 22 bp, synthetic construct
  misc_feature 1..22: note = chemically synthesized
  source 1..22: mol_type = other DNA
gcagagcgtttggcttcggttt

SEQ ID NO: 52862 - DNA, 22 bp, synthetic construct
  misc_feature 1..22: note = chemically synthesized
  source 1..22: mol_type = other DNA
ggcttcggtttgggggcaagaa

SEQ ID NO: 52863 - DNA, 22 bp, synthetic construct
  misc_feature 1..22: note = chemically synthesized
  source 1..22: mol_type = other DNA
gcttcggtttgggggcaagaaa

SEQ ID NO: 52864 - DNA, 22 bp, synthetic construct
  misc_feature 1..22: note = chemically synthesized
  source 1..22: mol_type = other DNA
cggtttgggggcaagaaattgt

SEQ ID NO: 52865 - DNA, 22 bp, synthetic construct
  misc_feature 1..22: note = chemically synthesized
  source 1..22: mol_type = other DNA
ggtttgggggcaagaaattgta

SEQ ID NO: 52866 - DNA, 22 bp, synthetic construct
  misc_feature 1..22: note = chemically synthesized
  source 1..22: mol_type = other DNA
gggggcaagaaattgtacattc

SEQ ID NO: 52867 - DNA, 22 bp, synthetic construct
  misc_feature 1..22: note = chemically synthesized
  source 1..22: mol_type = other DNA
ggggcaagaaattgtacattct

SEQ ID NO: 52868 - DNA, 22 bp, synthetic construct
  misc_feature 1..22: note = chemically synthesized
  source 1..22: mol_type = other DNA
tacattctcttgccttgtttta

SEQ ID NO: 52869 - DNA, 22 bp, synthetic construct
  misc_feature 1..22: note = chemically synthesized
  source 1..22: mol_type = other DNA
tcttgccttgttttatttattt

SEQ ID NO: 52870 - DNA, 22 bp, synthetic construct
  misc_feature 1..22: note = chemically synthesized
  source 1..22: mol_type = other DNA
ttgccttgttttatttatttta

SEQ ID NO: 52871 - DNA, 22 bp, synthetic construct
  misc_feature 1..22: note = chemically synthesized
  source 1..22: mol_type = other DNA
gccttgttttatttattttatt

SEQ ID NO: 52872 - DNA, 22 bp, synthetic construct
  misc_feature 1..22: note = chemically synthesized
  source 1..22: mol_type = other DNA
ccttgttttatttattttattt

SEQ ID NO: 52873 - DNA, 22 bp, synthetic construct
  misc_feature 1..22: note = chemically synthesized
  source 1..22: mol_type = other DNA
gttttatttattttatttttat

SEQ ID NO: 52874 - DNA, 22 bp, synthetic construct
  misc_feature 1..22: note = chemically synthesized
  source 1..22: mol_type = other DNA
ttttatttattttatttttatg

SEQ ID NO: 52875 - DNA, 22 bp, synthetic construct
  misc_feature 1..22: note = chemically synthesized
  source 1..22: mol_type = other DNA
tatttattttatttttatgtat

SEQ ID NO: 52876 - DNA, 22 bp, synthetic construct
  misc_feature 1..22: note = chemically synthesized
  source 1..22: mol_type = other DNA
atttattttatttttatgtatt

SEQ ID NO: 52877 - DNA, 22 bp, synthetic construct
  misc_feature 1..22: note = chemically synthesized
  source 1..22: mol_type = other DNA
tttattttatttttatgtattt

SEQ ID NO: 52878 - DNA, 22 bp, synthetic construct
  misc_feature 1..22: note = chemically synthesized
  source 1..22: mol_type = other DNA
attttatttttatgtatttatt

SEQ ID NO: 52879 - DNA, 22 bp, synthetic construct
  misc_feature 1..22: note = chemically synthesized
  source 1..22: mol_type = other DNA
ttttatttttatgtatttattt

SEQ ID NO: 52880 - DNA, 22 bp, synthetic construct
  misc_feature 1..22: note = chemically synthesized
  source 1..22: mol_type = other DNA
tatttttatgtatttatttatt

SEQ ID NO: 52881 - DNA, 22 bp, synthetic construct
  misc_feature 1..22: note = chemically synthesized
  source 1..22: mol_type = other DNA
atttttatgtatttatttattt

SEQ ID NO: 52882 - DNA, 22 bp, synthetic construct
  misc_feature 1..22: note = chemically synthesized
  source 1..22: mol_type = other DNA
tttttatgtatttatttattta

SEQ ID NO: 52883 - DNA, 22 bp, synthetic construct
  misc_feature 1..22: note = chemically synthesized
  source 1..22: mol_type = other DNA
ttatgtatttatttatttatgt

SEQ ID NO: 52884 - DNA, 22 bp, synthetic construct
  misc_feature 1..22: note = chemically synthesized
  source 1..22: mol_type = other DNA
tatgtatttatttatttatgtg

SEQ ID NO: 52885 - DNA, 22 bp, synthetic construct
  misc_feature 1..22: note = chemically synthesized
  source 1..22: mol_type = other DNA
atgtatttatttatttatgtgc

SEQ ID NO: 52886 - DNA, 22 bp, synthetic construct
  misc_feature 1..22: note = chemically synthesized
  source 1..22: mol_type = other DNA
tgtatttatttatttatgtgcc

SEQ ID NO: 52887 - DNA, 22 bp, synthetic construct
  misc_feature 1..22: note = chemically synthesized
  source 1..22: mol_type = other DNA
atttatttatgtgccagtcttc

SEQ ID NO: 52888 - DNA, 22 bp, synthetic construct
  misc_feature 1..22: note = chemically synthesized
  source 1..22: mol_type = other DNA
tttatttatgtgccagtcttct

SEQ ID NO: 52889 - DNA, 22 bp, synthetic construct
  misc_feature 1..22: note = chemically synthesized
  source 1..22: mol_type = other DNA
atttatgtgccagtcttctcct

SEQ ID NO: 52890 - DNA, 22 bp, synthetic construct
  misc_feature 1..22: note = chemically synthesized
  source 1..22: mol_type = other DNA
tttatgtgccagtcttctcctt

SEQ ID NO: 52891 - DNA, 22 bp, synthetic construct
  misc_feature 1..22: note = chemically synthesized
  source 1..22: mol_type = other DNA
atgtgccagtcttctccttgct

SEQ ID NO: 52892 - DNA, 22 bp, synthetic construct
  misc_feature 1..22: note = chemically synthesized
  source 1..22: mol_type = other DNA
tgtgccagtcttctccttgctg

SEQ ID NO: 52893 - DNA, 22 bp, synthetic construct
  misc_feature 1..22: note = chemically synthesized
  source 1..22: mol_type = other DNA
ctccttgctgcctctgaggttc

SEQ ID NO: 52894 - DNA, 22 bp, synthetic construct
  misc_feature 1..22: note = chemically synthesized
  source 1..22: mol_type = other DNA
tccttgctgcctctgaggttcg

SEQ ID NO: 52895 - DNA, 22 bp, synthetic construct
  misc_feature 1..22: note = chemically synthesized
  source 1..22: mol_type = other DNA
cttgctgcctctgaggttcggt

SEQ ID NO: 52896 - DNA, 22 bp, synthetic construct
  misc_feature 1..22: note = chemically synthesized
  source 1..22: mol_type = other DNA
gctgcctctgaggttcggtcgg

SEQ ID NO: 52897 - DNA, 22 bp, synthetic construct
  misc_feature 1..22: note = chemically synthesized
  source 1..22: mol_type = other DNA
ctgcctctgaggttcggtcggg

SEQ ID NO: 52898 - DNA, 22 bp, synthetic construct
  misc_feature 1..22: note = chemically synthesized
  source 1..22: mol_type = other DNA
cctctgaggttcggtcgggagg

SEQ ID NO: 52899 - DNA, 22 bp, synthetic construct
  misc_feature 1..22: note = chemically synthesized
  source 1..22: mol_type = other DNA
tgaggttcggtcgggaggggag

SEQ ID NO: 52900 - DNA, 22 bp, synthetic construct
  misc_feature 1..22: note = chemically synthesized
  source 1..22: mol_type = other DNA
aggttcggtcgggaggggaggg

SEQ ID NO: 52901 - DNA, 22 bp, synthetic construct
  misc_feature 1..22: note = chemically synthesized
  source 1..22: mol_type = other DNA
ggtcgggaggggagggcagcgg

SEQ ID NO: 52902 - DNA, 22 bp, synthetic construct
  misc_feature 1..22: note = chemically synthesized
  source 1..22: mol_type = other DNA
cctccctccctctcccgcgtgc

SEQ ID NO: 52903 - DNA, 22 bp, synthetic construct
  misc_feature 1..22: note = chemically synthesized
  source 1..22: mol_type = other DNA
cctccctctcccgcgtgccccc

SEQ ID NO: 52904 - DNA, 22 bp, synthetic construct
  misc_feature 1..22: note = chemically synthesized
  source 1..22: mol_type = other DNA
cctctcccgcgtgcccccggcc

SEQ ID NO: 52905 - DNA, 22 bp, synthetic construct
  misc_feature 1..22: note = chemically synthesized
  source 1..22: mol_type = other DNA
tcccgcgtgcccccggccgcct

SEQ ID NO: 52906 - DNA, 22 bp, synthetic construct
  misc_feature 1..22: note = chemically synthesized
  source 1..22: mol_type = other DNA
ccgcgtgcccccggccgcctcc

SEQ ID NO: 52907 - DNA, 22 bp, synthetic construct
  misc_feature 1..22: note = chemically synthesized
  source 1..22: mol_type = other DNA
ctcccccggccctagctcctgc

SEQ ID NO: 52908 - DNA, 22 bp, synthetic construct
  misc_feature 1..22: note = chemically synthesized
  source 1..22: mol_type = other DNA
ccccggccctagctcctgccct

SEQ ID NO: 52909 - DNA, 22 bp, synthetic construct
  misc_feature 1..22: note = chemically synthesized
  source 1..22: mol_type = other DNA
gctcctgcccttcggcggcggc

SEQ ID NO: 52910 - DNA, 22 bp, synthetic construct
  misc_feature 1..22: note = chemically synthesized
  source 1..22: mol_type = other DNA
ctgcccttcggcggcggcggcg

SEQ ID NO: 52911 - DNA, 22 bp, synthetic construct
  misc_feature 1..22: note = chemically synthesized
  source 1..22: mol_type = other DNA
cccttcggcggcggcggcggcg

SEQ ID NO: 52912 - DNA, 22 bp, synthetic construct
  misc_feature 1..22: note = chemically synthesized
  source 1..22: mol_type = other DNA
cggcggcggcggcggcggcggc

SEQ ID NO: 52913 - DNA, 22 bp, synthetic construct
  misc_feature 1..22: note = chemically synthesized
  source 1..22: mol_type = other DNA
ggcggcggcggcggcggcggcg

SEQ ID NO: 52914 - DNA, 22 bp, synthetic construct
  misc_feature 1..22: note = chemically synthesized
  source 1..22: mol_type = other DNA
tggccggaacaaaaggcggcag

SEQ ID NO: 52915 - DNA, 22 bp, synthetic construct
  misc_feature 1..22: note = chemically synthesized
  source 1..22: mol_type = other DNA
gccggaacaaaaggcggcagtg

SEQ ID NO: 52916 - DNA, 22 bp, synthetic construct
  misc_feature 1..22: note = chemically synthesized
  source 1..22: mol_type = other DNA
ccgtccttcccggtcccacggc

SEQ ID NO: 52917 - DNA, 22 bp, synthetic construct
  misc_feature 1..22: note = chemically synthesized
  source 1..22: mol_type = other DNA
cccggtcccacggctctccccg

SEQ ID NO: 52918 - DNA, 22 bp, synthetic construct
  misc_feature 1..22: note = chemically synthesized
  source 1..22: mol_type = other DNA
ccggtcccacggctctccccgt

SEQ ID NO: 52919 - DNA, 22 bp, synthetic construct
  misc_feature 1..22: note = chemically synthesized
  source 1..22: mol_type = other DNA
tccccgtcgccgcggcccctct

SEQ ID NO: 52920 - DNA, 22 bp, synthetic construct
  misc_feature 1..22: note = chemically synthesized
  source 1..22: mol_type = other DNA
cccgtcgccgcggcccctctcc

SEQ ID NO: 52921 - DNA, 22 bp, synthetic construct
  misc_feature 1..22: note = chemically synthesized
  source 1..22: mol_type = other DNA
tcccgactccgcggactcagga

SEQ ID NO: 52922 - DNA, 22 bp, synthetic construct
  misc_feature 1..22: note = chemically synthesized
  source 1..22: mol_type = other DNA
ccgactccgcggactcaggagc

SEQ ID NO: 52923 - DNA, 22 bp, synthetic construct
  misc_feature 1..22: note = chemically synthesized
  source 1..22: mol_type = other DNA
cgcggactcaggagcgccgggg

SEQ ID NO: 52924 - DNA, 22 bp, synthetic construct
  misc_feature 1..22: note = chemically synthesized
  source 1..22: mol_type = other DNA
aggagcgccgggggcccctttc

SEQ ID NO: 52925 - DNA, 22 bp, synthetic construct
  misc_feature 1..22: note = chemically synthesized
  source 1..22: mol_type = other DNA
tccacagtgccactttctcact

SEQ ID NO: 52926 - DNA, 22 bp, synthetic construct
  misc_feature 1..22: note = chemically synthesized
  source 1..22: mol_type = other DNA
ccacagtgccactttctcacta

SEQ ID NO: 52927 - DNA, 22 bp, synthetic construct
  misc_feature 1..22: note = chemically synthesized
  source 1..22: mol_type = other DNA
cacagtgccactttctcactat

SEQ ID NO: 52928 - DNA, 22 bp, synthetic construct
  misc_feature 1..22: note = chemically synthesized
  source 1..22: mol_type = other DNA
tctcactattgtggggatgact

SEQ ID NO: 52929 - DNA, 22 bp, synthetic construct
  misc_feature 1..22: note = chemically synthesized
  source 1..22: mol_type = other DNA
ctcactattgtggggatgacta

SEQ ID NO: 52930 - DNA, 22 bp, synthetic construct
  misc_feature 1..22: note = chemically synthesized
  source 1..22: mol_type = other DNA
tcactattgtggggatgactac

SEQ ID NO: 52931 - DNA, 22 bp, synthetic construct
  misc_feature 1..22: note = chemically synthesized
  source 1..22: mol_type = other DNA
actattgtggggatgactactt

SEQ ID NO: 52932 - DNA, 22 bp, synthetic construct
  misc_feature 1..22: note = chemically synthesized
  source 1..22: mol_type = other DNA
ttgtggggatgactactttcct

SEQ ID NO: 52933 - DNA, 22 bp, synthetic construct
  misc_feature 1..22: note = chemically synthesized
  source 1..22: mol_type = other DNA
tggggatgactactttcctccc

SEQ ID NO: 52934 - DNA, 22 bp, synthetic construct
  misc_feature 1..22: note = chemically synthesized
  source 1..22: mol_type = other DNA
ctttcctcccgctgcacacttg

SEQ ID NO: 52935 - DNA, 22 bp, synthetic construct
  misc_feature 1..22: note = chemically synthesized
  source 1..22: mol_type = other DNA
tcctcccgctgcacacttgacc

SEQ ID NO: 52936 - DNA, 22 bp, synthetic construct
  misc_feature 1..22: note = chemically synthesized
  source 1..22: mol_type = other DNA
cctcccgctgcacacttgaccg

SEQ ID NO: 52937 - DNA, 22 bp, synthetic construct
  misc_feature 1..22: note = chemically synthesized
  source 1..22: mol_type = other DNA
ctcccgctgcacacttgaccgt

SEQ ID NO: 52938 - DNA, 22 bp, synthetic construct
  misc_feature 1..22: note = chemically synthesized
  source 1..22: mol_type = other DNA
ccgctgcacacttgaccgtgag

SEQ ID NO: 52939 - DNA, 22 bp, synthetic construct
  misc_feature 1..22: note = chemically synthesized
  source 1..22: mol_type = other DNA
cacacttgaccgtgagcgcgct

SEQ ID NO: 52940 - DNA, 22 bp, synthetic construct
  misc_feature 1..22: note = chemically synthesized
  source 1..22: mol_type = other DNA
gaccgtgagcgcgctggtgtcc

SEQ ID NO: 52941 - DNA, 22 bp, synthetic construct
  misc_feature 1..22: note = chemically synthesized
  source 1..22: mol_type = other DNA
accgtgagcgcgctggtgtcca

SEQ ID NO: 52942 - DNA, 22 bp, synthetic construct
  misc_feature 1..22: note = chemically synthesized
  source 1..22: mol_type = other DNA
gtgtccaaaagccagtctcacc

SEQ ID NO: 52943 - DNA, 22 bp, synthetic construct
  misc_feature 1..22: note = chemically synthesized
  source 1..22: mol_type = other DNA
acctcttttctccccgggaatc

SEQ ID NO: 52944 - DNA, 22 bp, synthetic construct
  misc_feature 1..22: note = chemically synthesized
  source 1..22: mol_type = other DNA
ttttctccccgggaatcgtttt

SEQ ID NO: 52945 - DNA, 22 bp, synthetic construct
  misc_feature 1..22: note = chemically synthesized
  source 1..22: mol_type = other DNA
ttctccccgggaatcgtttttt

SEQ ID NO: 52946 - DNA, 22 bp, synthetic construct
  misc_feature 1..22: note = chemically synthesized
  source 1..22: mol_type = other DNA
tctccccgggaatcgtttttta

SEQ ID NO: 52947 - DNA, 22 bp, synthetic construct
  misc_feature 1..22: note = chemically synthesized
  source 1..22: mol_type = other DNA
ctccccgggaatcgttttttag

SEQ ID NO: 52948 - DNA, 22 bp, synthetic construct
  misc_feature 1..22: note = chemically synthesized
  source 1..22: mol_type = other DNA
tccccgggaatcgttttttaga

SEQ ID NO: 52949 - DNA, 22 bp, synthetic construct
  misc_feature 1..22: note = chemically synthesized
  source 1..22: mol_type = other DNA
cccgggaatcgttttttagact

SEQ ID NO: 52950 - DNA, 22 bp, synthetic construct
  misc_feature 1..22: note = chemically synthesized
  source 1..22: mol_type = other DNA
tttagacttgtactcactccct

SEQ ID NO: 52951 - DNA, 22 bp, synthetic construct
  misc_feature 1..22: note = chemically synthesized
  source 1..22: mol_type = other DNA
ttagacttgtactcactccctc

SEQ ID NO: 52952 - DNA, 22 bp, synthetic construct
  misc_feature 1..22: note = chemically synthesized
  source 1..22: mol_type = other DNA
tagacttgtactcactccctcc

SEQ ID NO: 52953 - DNA, 22 bp, synthetic construct
  misc_feature 1..22: note = chemically synthesized
  source 1..22: mol_type = other DNA
agacttgtactcactccctccc

SEQ ID NO: 52954 - DNA, 22 bp, synthetic construct
  misc_feature 1..22: note = chemically synthesized
  source 1..22: mol_type = other DNA
gacttgtactcactccctccct

SEQ ID NO: 52955 - DNA, 22 bp, synthetic construct
  misc_feature 1..22: note = chemically synthesized
  source 1..22: mol_type = other DNA
gtactcactccctccctacccc

SEQ ID NO: 52956 - DNA, 22 bp, synthetic construct
  misc_feature 1..22: note = chemically synthesized
  source 1..22: mol_type = other DNA
tactcactccctccctaccccc

SEQ ID NO: 52957 - DNA, 22 bp, synthetic construct
  misc_feature 1..22: note = chemically synthesized
  source 1..22: mol_type = other DNA
actccctccctacccccccatt

SEQ ID NO: 52958 - DNA, 22 bp, synthetic construct
  misc_feature 1..22: note = chemically synthesized
  source 1..22: mol_type = other DNA
cctccctacccccccattttct

SEQ ID NO: 52959 - DNA, 22 bp, synthetic construct
  misc_feature 1..22: note = chemically synthesized
  source 1..22: mol_type = other DNA
cctacccccccattttcttacg

SEQ ID NO: 52960 - DNA, 22 bp, synthetic construct
  misc_feature 1..22: note = chemically synthesized
  source 1..22: mol_type = other DNA
cccccccattttcttacggtga

SEQ ID NO: 52961 - DNA, 22 bp, synthetic construct
  misc_feature 1..22: note = chemically synthesized
  source 1..22: mol_type = other DNA
tcttacggtgagtgggaagcaa

SEQ ID NO: 52962 - DNA, 22 bp, synthetic construct
  misc_feature 1..22: note = chemically synthesized
  source 1..22: mol_type = other DNA
cttacggtgagtgggaagcaac

SEQ ID NO: 52963 - DNA, 22 bp, synthetic construct
  misc_feature 1..22: note = chemically synthesized
  source 1..22: mol_type = other DNA
ttacggtgagtgggaagcaacc

SEQ ID NO: 52964 - DNA, 22 bp, synthetic construct
  misc_feature 1..22: note = chemically synthesized
  source 1..22: mol_type = other DNA
acggtgagtgggaagcaacctc

SEQ ID NO: 52965 - DNA, 22 bp, synthetic construct
  misc_feature 1..22: note = chemically synthesized
  source 1..22: mol_type = other DNA
cggtgagtgggaagcaacctcc

SEQ ID NO: 52966 - DNA, 22 bp, synthetic construct
  misc_feature 1..22: note = chemically synthesized
  source 1..22: mol_type = other DNA
cctttccccaccagctcccacc

SEQ ID NO: 52967 - DNA, 22 bp, synthetic construct
  misc_feature 1..22: note = chemically synthesized
  source 1..22: mol_type = other DNA
tccccaccagctcccaccccca

SEQ ID NO: 52968 - DNA, 22 bp, synthetic construct
  misc_feature 1..22: note = chemically synthesized
  source 1..22: mol_type = other DNA
ccccaccagctcccacccccag

SEQ ID NO: 52969 - DNA, 22 bp, synthetic construct
  misc_feature 1..22: note = chemically synthesized
  source 1..22: mol_type = other DNA
cccaccagctcccacccccagg

SEQ ID NO: 52970 - DNA, 22 bp, synthetic construct
  misc_feature 1..22: note = chemically synthesized
  source 1..22: mol_type = other DNA
ccacccccaggtttgcatgtga

SEQ ID NO: 52971 - DNA, 22 bp, synthetic construct
  misc_feature 1..22: note = chemically synthesized
  source 1..22: mol_type = other DNA
gcatgtgagttgttcgcaacct

SEQ ID NO: 52972 - DNA, 22 bp, synthetic construct
  misc_feature 1..22: note = chemically synthesized
  source 1..22: mol_type = other DNA
catgtgagttgttcgcaacctt

SEQ ID NO: 52973 - DNA, 22 bp, synthetic construct
  misc_feature 1..22: note = chemically synthesized
  source 1..22: mol_type = other DNA
ttcgcaaccttagcattgttca

SEQ ID NO: 52974 - DNA, 22 bp, synthetic construct
  misc_feature 1..22: note = chemically synthesized
  source 1..22: mol_type = other DNA
gcaaccttagcattgttcatta

SEQ ID NO: 52975 - DNA, 22 bp, synthetic construct
  misc_feature 1..22: note = chemically synthesized
  source 1..22: mol_type = other DNA
agcattgttcattattttgcaa

SEQ ID NO: 52976 - DNA, 22 bp, synthetic construct
  misc_feature 1..22: note = chemically synthesized
  source 1..22: mol_type = other DNA
gcattgttcattattttgcaaa

SEQ ID NO: 52977 - DNA, 22 bp, synthetic construct
  misc_feature 1..22: note = chemically synthesized
  source 1..22: mol_type = other DNA
ttcattattttgcaaaactggc

SEQ ID NO: 52978 - DNA, 22 bp, synthetic construct
  misc_feature 1..22: note = chemically synthesized
  source 1..22: mol_type = other DNA
attattttgcaaaactggcggg

SEQ ID NO: 52979 - DNA, 22 bp, synthetic construct
  misc_feature 1..22: note = chemically synthesized
  source 1..22: mol_type = other DNA
ttttgcaaaactggcggggcgg

SEQ ID NO: 52980 - DNA, 22 bp, synthetic construct
  misc_feature 1..22: note = chemically synthesized
  source 1..22: mol_type = other DNA
tgcaaaactggcggggcggggg

SEQ ID NO: 52981 - DNA, 22 bp, synthetic construct
  misc_feature 1..22: note = chemically synthesized
  source 1..22: mol_type = other DNA
gcaaaactggcggggcgggggg

SEQ ID NO: 52982 - DNA, 22 bp, synthetic construct
  misc_feature 1..22: note = chemically synthesized
  source 1..22: mol_type = other DNA
caaaactggcggggcggggggg

SEQ ID NO: 52983 - DNA, 22 bp, synthetic construct
  misc_feature 1..22: note = chemically synthesized
  source 1..22: mol_type = other DNA
gcggggcggggggggagtggaa

SEQ ID NO: 52984 - DNA, 22 bp, synthetic construct
  misc_feature 1..22: note = chemically synthesized
  source 1..22: mol_type = other DNA
cattccttttcgaaaagagaaa

SEQ ID NO: 52985 - DNA, 22 bp, synthetic construct
  misc_feature 1..22: note = chemically synthesized
  source 1..22: mol_type = other DNA
cttttcgaaaagagaaataaag

SEQ ID NO: 52986 - DNA, 22 bp, synthetic construct
  misc_feature 1..22: note = chemically synthesized
  source 1..22: mol_type = other DNA
ttcgaaaagagaaataaagcgg

SEQ ID NO: 52987 - DNA, 22 bp, synthetic construct
  misc_feature 1..22: note = chemically synthesized
  source 1..22: mol_type = other DNA
tcgaaaagagaaataaagcggc

SEQ ID NO: 52988 - DNA, 22 bp, synthetic construct
  misc_feature 1..22: note = chemically synthesized
  source 1..22: mol_type = other DNA
cgaaaagagaaataaagcggcg

SEQ ID NO: 52989 - DNA, 22 bp, synthetic construct
  misc_feature 1..22: note = chemically synthesized
  source 1..22: mol_type = other DNA
gaaaagagaaataaagcggcgg

SEQ ID NO: 52990 - DNA, 22 bp, synthetic construct
  misc_feature 1..22: note = chemically synthesized
  source 1..22: mol_type = other DNA
ttgtaaaattaaataaaattaa

SEQ ID NO: 52991 - DNA, 22 bp, synthetic construct
  misc_feature 1..22: note = chemically synthesized
  source 1..22: mol_type = other DNA
tgtaaaattaaataaaattaaa

SEQ ID NO: 52992 - DNA, 22 bp, synthetic construct
  misc_feature 1..22: note = chemically synthesized
  source 1..22: mol_type = other DNA
gtaaaattaaataaaattaaaa

SEQ ID NO: 52993 - DNA, 22 bp, synthetic construct
  misc_feature 1..22: note = chemically synthesized
  source 1..22: mol_type = other DNA
taaaattaaataaaattaaaag

SEQ ID NO: 52994 - DNA, 22 bp, synthetic construct
  misc_feature 1..22: note = chemically synthesized
  source 1..22: mol_type = other DNA
aataaaattaaaaggtgcgtgc

SEQ ID NO: 52995 - DNA, 22 bp, synthetic construct
  misc_feature 1..22: note = chemically synthesized
  source 1..22: mol_type = other DNA
aaaggtgcgtgctgtctcaaaa

SEQ ID NO: 52996 - DNA, 22 bp, synthetic construct
  misc_feature 1..22: note = chemically synthesized
  source 1..22: mol_type = other DNA
tctcaaaagtgcatacacggca

SEQ ID NO: 52997 - DNA, 22 bp, synthetic construct
  misc_feature 1..22: note = chemically synthesized
  source 1..22: mol_type = other DNA
aaaagtgcatacacggcaatgg

SEQ ID NO: 52998 - DNA, 22 bp, synthetic construct
  misc_feature 1..22: note = chemically synthesized
  source 1..22: mol_type = other DNA
cagatgggatgagggttttttc

SEQ ID NO: 52999 - DNA, 22 bp, synthetic construct
  misc_feature 1..22: note = chemically synthesized
  source 1..22: mol_type = other DNA
tttccccctttatctcttttac

SEQ ID NO: 53000 - DNA, 22 bp, synthetic construct
  misc_feature 1..22: note = chemically synthesized
  source 1..22: mol_type = other DNA
ttccccctttatctcttttacc

SEQ ID NO: 53001 - DNA, 22 bp, synthetic construct
  misc_feature 1..22: note = chemically synthesized
  source 1..22: mol_type = other DNA
tccccctttatctcttttacct

SEQ ID NO: 53002 - DNA, 22 bp, synthetic construct
  misc_feature 1..22: note = chemically synthesized
  source 1..22: mol_type = other DNA
ccccctttatctcttttacctc

SEQ ID NO: 53003 - DNA, 22 bp, synthetic construct
  misc_feature 1..22: note = chemically synthesized
  source 1..22: mol_type = other DNA
cccctttatctcttttacctcg

SEQ ID NO: 53004 - DNA, 22 bp, synthetic construct
  misc_feature 1..22: note = chemically synthesized
  source 1..22: mol_type = other DNA
tatctcttttacctcgactctc

SEQ ID NO: 53005 - DNA, 22 bp, synthetic construct
  misc_feature 1..22: note = chemically synthesized
  source 1..22: mol_type = other DNA
atctcttttacctcgactctcg

SEQ ID NO: 53006 - DNA, 22 bp, synthetic construct
  misc_feature 1..22: note = chemically synthesized
  source 1..22: mol_type = other DNA
tctcttttacctcgactctcgg

SEQ ID NO: 53007 - DNA, 22 bp, synthetic construct
  misc_feature 1..22: note = chemically synthesized
  source 1..22: mol_type = other DNA
ttttacctcgactctcggaggt

SEQ ID NO: 53008 - DNA, 22 bp, synthetic construct
  misc_feature 1..22: note = chemically synthesized
  source 1..22: mol_type = other DNA
ttacctcgactctcggaggttt

SEQ ID NO: 53009 - DNA, 22 bp, synthetic construct
  misc_feature 1..22: note = chemically synthesized
  source 1..22: mol_type = other DNA
tacctcgactctcggaggtttt

SEQ ID NO: 53010 - DNA, 22 bp, synthetic construct
  misc_feature 1..22: note = chemically synthesized
  source 1..22: mol_type = other DNA
acctcgactctcggaggttttt

SEQ ID NO: 53011 - DNA, 22 bp, synthetic construct
  misc_feature 1..22: note = chemically synthesized
  source 1..22: mol_type = other DNA
cctcgactctcggaggtttttc

SEQ ID NO: 53012 - DNA, 22 bp, synthetic construct
  misc_feature 1..22: note = chemically synthesized
  source 1..22: mol_type = other DNA
gactctcggaggtttttctcgt

SEQ ID NO: 53013 - DNA, 22 bp, synthetic construct
  misc_feature 1..22: note = chemically synthesized
  source 1..22: mol_type = other DNA
tcggaggtttttctcgtgaaaa

SEQ ID NO: 53014 - DNA, 22 bp, synthetic construct
  misc_feature 1..22: note = chemically synthesized
  source 1..22: mol_type = other DNA
ggaggtttttctcgtgaaaaat

SEQ ID NO: 53015 - DNA, 22 bp, synthetic construct
  misc_feature 1..22: note = chemically synthesized
  source 1..22: mol_type = other DNA
ttctcgtgaaaaatttaaaaat

SEQ ID NO: 53016 - DNA, 22 bp, synthetic construct
  misc_feature 1..22: note = chemically synthesized
  source 1..22: mol_type = other DNA
tctcgtgaaaaatttaaaaatg

SEQ ID NO: 53017 - DNA, 22 bp, synthetic construct
  misc_feature 1..22: note = chemically synthesized
  source 1..22: mol_type = other DNA
ctcgtgaaaaatttaaaaatgc

SEQ ID NO: 53018 - DNA, 22 bp, synthetic construct
  misc_feature 1..22: note = chemically synthesized
  source 1..22: mol_type = other DNA
tcgtgaaaaatttaaaaatgca

SEQ ID NO: 53019 - DNA, 22 bp, synthetic construct
  misc_feature 1..22: note = chemically synthesized
  source 1..22: mol_type = other DNA
gtgaaaaatttaaaaatgcatg

SEQ ID NO: 53020 - DNA, 22 bp, synthetic construct
  misc_feature 1..22: note = chemically synthesized
  source 1..22: mol_type = other DNA
aaaaatgcatgcacacacccct

SEQ ID NO: 53021 - DNA, 22 bp, synthetic construct
  misc_feature 1..22: note = chemically synthesized
  source 1..22: mol_type = other DNA
aaaatgcatgcacacacccctc

SEQ ID NO: 53022 - DNA, 22 bp, synthetic construct
  misc_feature 1..22: note = chemically synthesized
  source 1..22: mol_type = other DNA
tctccccctcgcttttgcttct

SEQ ID NO: 53023 - DNA, 22 bp, synthetic construct
  misc_feature 1..22: note = chemically synthesized
  source 1..22: mol_type = other DNA
tccccctcgcttttgcttctag

SEQ ID NO: 53024 - DNA, 22 bp, synthetic construct
  misc_feature 1..22: note = chemically synthesized
  source 1..22: mol_type = other DNA
cccctcgcttttgcttctagtc

SEQ ID NO: 53025 - DNA, 22 bp, synthetic construct
  misc_feature 1..22: note = chemically synthesized
  source 1..22: mol_type = other DNA
gcttttgcttctagtcctgcgc

SEQ ID NO: 53026 - DNA, 22 bp, synthetic construct
  misc_feature 1..22: note = chemically synthesized
  source 1..22: mol_type = other DNA
ttgcttctagtcctgcgcgctc

SEQ ID NO: 53027 - DNA, 22 bp, synthetic construct
  misc_feature 1..22: note = chemically synthesized
  source 1..22: mol_type = other DNA
tgcttctagtcctgcgcgctct

SEQ ID NO: 53028 - DNA, 22 bp, synthetic construct
  misc_feature 1..22: note = chemically synthesized
  source 1..22: mol_type = other DNA
gcttctagtcctgcgcgctctc

SEQ ID NO: 53029 - DNA, 22 bp, synthetic construct
  misc_feature 1..22: note = chemically synthesized
  source 1..22: mol_type = other DNA
cttctagtcctgcgcgctctcg

SEQ ID NO: 53030 - DNA, 22 bp, synthetic construct
  misc_feature 1..22: note = chemically synthesized
  source 1..22: mol_type = other DNA
ctagtcctgcgcgctctcgtga

SEQ ID NO: 53031 - DNA, 22 bp, synthetic construct
  misc_feature 1..22: note = chemically synthesized
  source 1..22: mol_type = other DNA
tagtcctgcgcgctctcgtgat

SEQ ID NO: 53032 - DNA, 22 bp, synthetic construct
  misc_feature 1..22: note = chemically synthesized
  source 1..22: mol_type = other DNA
gtcctgcgcgctctcgtgatta

SEQ ID NO: 53033 - DNA, 22 bp, synthetic construct
  misc_feature 1..22: note = chemically synthesized
  source 1..22: mol_type = other DNA
cgcgctctcgtgattattaata

SEQ ID NO: 53034 - DNA, 22 bp, synthetic construct
  misc_feature 1..22: note = chemically synthesized
  source 1..22: mol_type = other DNA
tcgtgattattaataattatta

SEQ ID NO: 53035 - DNA, 22 bp, synthetic construct
  misc_feature 1..22: note = chemically synthesized
  source 1..22: mol_type = other DNA
gtgattattaataattattatt

SEQ ID NO: 53036 - DNA, 22 bp, synthetic construct
  misc_feature 1..22: note = chemically synthesized
  source 1..22: mol_type = other DNA
ttaataattattattactatta

SEQ ID NO: 53037 - DNA, 22 bp, synthetic construct
  misc_feature 1..22: note = chemically synthesized
  source 1..22: mol_type = other DNA
ataattattattactattattg

SEQ ID NO: 53038 - DNA, 22 bp, synthetic construct
  misc_feature 1..22: note = chemically synthesized
  source 1..22: mol_type = other DNA
ttattactattattgggttact

SEQ ID NO: 53039 - DNA, 22 bp, synthetic construct
  misc_feature 1..22: note = chemically synthesized
  source 1..22: mol_type = other DNA
ttactattattgggttacttac

SEQ ID NO: 53040 - DNA, 22 bp, synthetic construct
  misc_feature 1..22: note = chemically synthesized
  source 1..22: mol_type = other DNA
ctattattgggttacttacgcg

SEQ ID NO: 53041 - DNA, 22 bp, synthetic construct
  misc_feature 1..22: note = chemically synthesized
  source 1..22: mol_type = other DNA
ttattgggttacttacgcgaga

SEQ ID NO: 53042 - DNA, 22 bp, synthetic construct
  misc_feature 1..22: note = chemically synthesized
  source 1..22: mol_type = other DNA
ttgggttacttacgcgagaatt

SEQ ID NO: 53043 - DNA, 22 bp, synthetic construct
  misc_feature 1..22: note = chemically synthesized
  source 1..22: mol_type = other DNA
ggttacttacgcgagaattccc

SEQ ID NO: 53044 - DNA, 22 bp, synthetic construct
  misc_feature 1..22: note = chemically synthesized
  source 1..22: mol_type = other DNA
cttacgcgagaattcccgtttg

SEQ ID NO: 53045 - DNA, 22 bp, synthetic construct
  misc_feature 1..22: note = chemically synthesized
  source 1..22: mol_type = other DNA
acgcgagaattcccgtttgctt

SEQ ID NO: 53046 - DNA, 22 bp, synthetic construct
  misc_feature 1..22: note = chemically synthesized
  source 1..22: mol_type = other DNA
cgcgagaattcccgtttgctta

SEQ ID NO: 53047 - DNA, 22 bp, synthetic construct
  misc_feature 1..22: note = chemically synthesized
  source 1..22: mol_type = other DNA
ccgtttgcttaagtgctggggt

SEQ ID NO: 53048 - DNA, 22 bp, synthetic construct
  misc_feature 1..22: note = chemically synthesized
  source 1..22: mol_type = other DNA
gcttaagtgctggggtttgcct

SEQ ID NO: 53049 - DNA, 22 bp, synthetic construct
  misc_feature 1..22: note = chemically synthesized
  source 1..22: mol_type = other DNA
cttaagtgctggggtttgcctt

SEQ ID NO: 53050 - DNA, 22 bp, synthetic construct
  misc_feature 1..22: note = chemically synthesized
  source 1..22: mol_type = other DNA
aagtgctggggtttgccttgct

SEQ ID NO: 53051 - DNA, 22 bp, synthetic construct
  misc_feature 1..22: note = chemically synthesized
  source 1..22: mol_type = other DNA
agtgctggggtttgccttgctt

SEQ ID NO: 53052 - DNA, 22 bp, synthetic construct
  misc_feature 1..22: note = chemically synthesized
  source 1..22: mol_type = other DNA
gggtttgccttgcttgcggcga

SEQ ID NO: 53053 - DNA, 22 bp, synthetic construct
  misc_feature 1..22: note = chemically synthesized
  source 1..22: mol_type = other DNA
gccttgcttgcggcgagacatg

SEQ ID NO: 53054 - DNA, 22 bp, synthetic construct
  misc_feature 1..22: note = chemically synthesized
  source 1..22: mol_type = other DNA
ccttgcttgcggcgagacatgg

SEQ ID NO: 53055 - DNA, 22 bp, synthetic construct
  misc_feature 1..22: note = chemically synthesized
  source 1..22: mol_type = other DNA
gcttgcggcgagacatggtggg

SEQ ID NO: 53056 - DNA, 22 bp, synthetic construct
  misc_feature 1..22: note = chemically synthesized
  source 1..22: mol_type = other DNA
cttgcggcgagacatggtgggc

SEQ ID NO: 53057 - DNA, 22 bp, synthetic construct
  misc_feature 1..22: note = chemically synthesized
  source 1..22: mol_type = other DNA
gcggcgagacatggtgggctgc

SEQ ID NO: 53058 - DNA, 22 bp, synthetic construct
  misc_feature 1..22: note = chemically synthesized
  source 1..22: mol_type = other DNA
cggcgagacatggtgggctgcg

SEQ ID NO: 53059 - DNA, 22 bp, synthetic construct
  misc_feature 1..22: note = chemically synthesized
  source 1..22: mol_type = other DNA
cggggcgggcggcggcggcggc

SEQ ID NO: 53060 - DNA, 22 bp, synthetic construct
  misc_feature 1..22: note = chemically synthesized
  source 1..22: mol_type = other DNA
ggttcacatcgggagagccggg

SEQ ID NO: 53061 - DNA, 22 bp, synthetic construct
  misc_feature 1..22: note = chemically synthesized
  source 1..22: mol_type = other DNA
acatcgggagagccgggttaga

SEQ ID NO: 53062 - DNA, 22 bp, synthetic construct
  misc_feature 1..22: note = chemically synthesized
  source 1..22: mol_type = other DNA
gaaagaaggagactccagagaa

SEQ ID NO: 53063 - DNA, 22 bp, synthetic construct
  misc_feature 1..22: note = chemically synthesized
  source 1..22: mol_type = other DNA
cagagaaaatatcttcatcagt

SEQ ID NO: 53064 - DNA, 22 bp, synthetic construct
  misc_feature 1..22: note = chemically synthesized
  source 1..22: mol_type = other DNA
catcagtgccttttgacatcca

SEQ ID NO: 53065 - DNA, 22 bp, synthetic construct
  misc_feature 1..22: note = chemically synthesized
  source 1..22: mol_type = other DNA
atcagtgccttttgacatccaa

SEQ ID NO: 53066 - DNA, 22 bp, synthetic construct
  misc_feature 1..22: note = chemically synthesized
  source 1..22: mol_type = other DNA
ttgacatccaaaataaattaga

SEQ ID NO: 53067 - DNA, 22 bp, synthetic construct
  misc_feature 1..22: note = chemically synthesized
  source 1..22: mol_type = other DNA
tgacatccaaaataaattagaa

SEQ ID NO: 53068 - DNA, 22 bp, synthetic construct
  misc_feature 1..22: note = chemically synthesized
  source 1..22: mol_type = other DNA
gacatccaaaataaattagaaa

SEQ ID NO: 53069 - DNA, 22 bp, synthetic construct
  misc_feature 1..22: note = chemically synthesized
  source 1..22: mol_type = other DNA
acatccaaaataaattagaaat

SEQ ID NO: 53070 - DNA, 22 bp, synthetic construct
  misc_feature 1..22: note = chemically synthesized
  source 1..22: mol_type = other DNA
gaaataatacaaagatggcgca

SEQ ID NO: 53071 - DNA, 22 bp, synthetic construct
  misc_feature 1..22: note = chemically synthesized
  source 1..22: mol_type = other DNA
tgggagagccgtcatggctttt

SEQ ID NO: 53072 - DNA, 22 bp, synthetic construct
  misc_feature 1..22: note = chemically synthesized
  source 1..22: mol_type = other DNA
ttttttaagcaaaaaaaaaaaa

SEQ ID NO: 53073 - DNA, 22 bp, synthetic construct
  misc_feature 1..22: note = chemically synthesized
  source 1..22: mol_type = other DNA
tttttaagcaaaaaaaaaaaaa

SEQ ID NO: 53074 - DNA, 22 bp, synthetic construct
  misc_feature 1..22: note = chemically synthesized
  source 1..22: mol_type = other DNA
ttttaagcaaaaaaaaaaaaaa

SEQ ID NO: 53075 - DNA, 22 bp, synthetic construct
  misc_feature 1..22: note = chemically synthesized
  source 1..22: mol_type = other DNA
tttaagcaaaaaaaaaaaaaaa

SEQ ID NO: 53076 - DNA, 22 bp, synthetic construct
  misc_feature 1..22: note = chemically synthesized
  source 1..22: mol_type = other DNA
ttaagcaaaaaaaaaaaaaaaa

SEQ ID NO: 53077 - DNA, 22 bp, synthetic construct
  misc_feature 1..22: note = chemically synthesized
  source 1..22: mol_type = other DNA
taagcaaaaaaaaaaaaaaaaa

SEQ ID NO: 53078 - DNA, 22 bp, synthetic construct
  misc_feature 1..22: note = chemically synthesized
  source 1..22: mol_type = other DNA
aagcaaaaaaaaaaaaaaaaaa

SEQ ID NO: 53079 - DNA, 22 bp, synthetic construct
  misc_feature 1..22: note = chemically synthesized
  source 1..22: mol_type = other DNA
agcaaaaaaaaaaaaaaaaaaa

SEQ ID NO: 53080 - DNA, 22 bp, synthetic construct
  misc_feature 1..22: note = chemically synthesized
  source 1..22: mol_type = other DNA
agctgcaagttcaagtgcggac

SEQ ID NO: 53081 - DNA, 22 bp, synthetic construct
  misc_feature 1..22: note = chemically synthesized
  source 1..22: mol_type = other DNA
caagttcaagtgcggacgtgac

SEQ ID NO: 53082 - DNA, 22 bp, synthetic construct
  misc_feature 1..22: note = chemically synthesized
  source 1..22: mol_type = other DNA
aagtgcggacgtgacgtccctg

SEQ ID NO: 53083 - DNA, 22 bp, synthetic construct
  misc_feature 1..22: note = chemically synthesized
  source 1..22: mol_type = other DNA
cgaacttgaacgtcaggagtct

SEQ ID NO: 53084 - DNA, 22 bp, synthetic construct
  misc_feature 1..22: note = chemically synthesized
  source 1..22: mol_type = other DNA
gaacgtcaggagtctggatgga

SEQ ID NO: 53085 - DNA, 22 bp, synthetic construct
  misc_feature 1..22: note = chemically synthesized
  source 1..22: mol_type = other DNA
aacgtcaggagtctggatggac

SEQ ID NO: 53086 - DNA, 22 bp, synthetic construct
  misc_feature 1..22: note = chemically synthesized
  source 1..22: mol_type = other DNA
gatggacagagacacacaaaac

SEQ ID NO: 53087 - DNA, 22 bp, synthetic construct
  misc_feature 1..22: note = chemically synthesized
  source 1..22: mol_type = other DNA
acaccaatggacacacatcagg

SEQ ID NO: 53088 - DNA, 22 bp, synthetic construct
  misc_feature 1..22: note = chemically synthesized
  source 1..22: mol_type = other DNA
gacatgaaaaagagaccaggac

SEQ ID NO: 53089 - DNA, 22 bp, synthetic construct
  misc_feature 1..22: note = chemically synthesized
  source 1..22: mol_type = other DNA
cgcggacgccagacgcggcccc

SEQ ID NO: 53090 - DNA, 22 bp, synthetic construct
  misc_feature 1..22: note = chemically synthesized
  source 1..22: mol_type = other DNA
gggccgcgggctcaccagtggc

SEQ ID NO: 53091 - DNA, 22 bp, synthetic construct
  misc_feature 1..22: note = chemically synthesized
  source 1..22: mol_type = other DNA
accagtggccgcagcgagcgcc

SEQ ID NO: 53092 - DNA, 22 bp, synthetic construct
  misc_feature 1..22: note = chemically synthesized
  source 1..22: mol_type = other DNA
ctcccccccacacacgcggact

SEQ ID NO: 53093 - DNA, 22 bp, synthetic construct
  misc_feature 1..22: note = chemically synthesized
  source 1..22: mol_type = other DNA
ccccccacacacgcggactcta

SEQ ID NO: 53094 - DNA, 22 bp, synthetic construct
  misc_feature 1..22: note = chemically synthesized
  source 1..22: mol_type = other DNA
taaaatgaaagattattcaaaa

SEQ ID NO: 53095 - DNA, 22 bp, synthetic construct
  misc_feature 1..22: note = chemically synthesized
  source 1..22: mol_type = other DNA
aaatgaaagattattcaaaaaa

SEQ ID NO: 53096 - DNA, 22 bp, synthetic construct
  misc_feature 1..22: note = chemically synthesized
  source 1..22: mol_type = other DNA
ttcaaaaaagaaaaaaatagag

SEQ ID NO: 53097 - DNA, 22 bp, synthetic construct
  misc_feature 1..22: note = chemically synthesized
  source 1..22: mol_type = other DNA
aaaaaagaaaaaaatagagcga

SEQ ID NO: 53098 - DNA, 22 bp, synthetic construct
  misc_feature 1..22: note = chemically synthesized
  source 1..22: mol_type = other DNA
cagccccgggctggggaagcgc

SEQ ID NO: 53099 - DNA, 22 bp, synthetic construct
  misc_feature 1..22: note = chemically synthesized
  source 1..22: mol_type = other DNA
gggaagcgcgggcggagggaag

SEQ ID NO: 53100 - DNA, 22 bp, synthetic construct
  misc_feature 1..22: note = chemically synthesized
  source 1..22: mol_type = other DNA
ctcccggacaccctcctccgta

SEQ ID NO: 53101 - DNA, 22 bp, synthetic construct
  misc_feature 1..22: note = chemically synthesized
  source 1..22: mol_type = other DNA
ccggacaccctcctccgtacgc

SEQ ID NO: 53102 - DNA, 22 bp, synthetic construct
  misc_feature 1..22: note = chemically synthesized
  source 1..22: mol_type = other DNA
ctccgtacgcacacccacttcc

SEQ ID NO: 53103 - DNA, 22 bp, synthetic construct
  misc_feature 1..22: note = chemically synthesized
  source 1..22: mol_type = other DNA
cgtacgcacacccacttcccct

SEQ ID NO: 53104 - DNA, 22 bp, synthetic construct
  misc_feature 1..22: note = chemically synthesized
  source 1..22: mol_type = other DNA
cccctccccgccgccgccgcgc

SEQ ID NO: 53105 - DNA, 22 bp, synthetic construct
  misc_feature 1..22: note = chemically synthesized
  source 1..22: mol_type = other DNA
ccctccccgccgccgccgcgct

SEQ ID NO: 53106 - DNA, 22 bp, synthetic construct
  misc_feature 1..22: note = chemically synthesized
  source 1..22: mol_type = other DNA
cccgccgccgccgcgctcgctc

SEQ ID NO: 53107 - DNA, 22 bp, synthetic construct
  misc_feature 1..22: note = chemically synthesized
  source 1..22: mol_type = other DNA
gctccccgcgtgtggacgccag

SEQ ID NO: 53108 - DNA, 22 bp, synthetic construct
  misc_feature 1..22: note = chemically synthesized
  source 1..22: mol_type = other DNA
cccgcgtgtggacgccaggggc

SEQ ID NO: 53109 - DNA, 22 bp, synthetic construct
  misc_feature 1..22: note = chemically synthesized
  source 1..22: mol_type = other DNA
cgctcgggaaactttgcccgag

SEQ ID NO: 53110 - DNA, 22 bp, synthetic construct
  misc_feature 1..22: note = chemically synthesized
  source 1..22: mol_type = other DNA
gggaaactttgcccgaggagag

SEQ ID NO: 53111 - DNA, 22 bp, synthetic construct
  misc_feature 1..22: note = chemically synthesized
  source 1..22: mol_type = other DNA
tgcccgaggagaggacagcaaa

SEQ ID NO: 53112 - DNA, 22 bp, synthetic construct
  misc_feature 1..22: note = chemically synthesized
  source 1..22: mol_type = other DNA
gcccgaggagaggacagcaaag

SEQ ID NO: 53113 - DNA, 22 bp, synthetic construct
  misc_feature 1..22: note = chemically synthesized
  source 1..22: mol_type = other DNA
cccgaggagaggacagcaaaga

SEQ ID NO: 53114 - DNA, 22 bp, synthetic construct
  misc_feature 1..22: note = chemically synthesized
  source 1..22: mol_type = other DNA
agagctgagcctccaagttaca

SEQ ID NO: 53115 - DNA, 22 bp, synthetic construct
  misc_feature 1..22: note = chemically synthesized
  source 1..22: mol_type = other DNA
agcctccaagttacagctccgc

SEQ ID NO: 53116 - DNA, 22 bp, synthetic construct
  misc_feature 1..22: note = chemically synthesized
  source 1..22: mol_type = other DNA
caagttacagctccgcagcggg

SEQ ID NO: 53117 - DNA, 22 bp, synthetic construct
  misc_feature 1..22: note = chemically synthesized
  source 1..22: mol_type = other DNA
cagctccgcagcgggcgagggg

SEQ ID NO: 53118 - DNA, 22 bp, synthetic construct
  misc_feature 1..22: note = chemically synthesized
  source 1..22: mol_type = other DNA
cgcagcgggcgaggggaggtgg

SEQ ID NO: 53119 - DNA, 22 bp, synthetic construct
  misc_feature 1..22: note = chemically synthesized
  source 1..22: mol_type = other DNA
agtttggagggctgcgggtccg

SEQ ID NO: 53120 - DNA, 22 bp, synthetic construct
  misc_feature 1..22: note = chemically synthesized
  source 1..22: mol_type = other DNA
ggagggctgcgggtccggaagg

SEQ ID NO: 53121 - DNA, 22 bp, synthetic construct
  misc_feature 1..22: note = chemically synthesized
  source 1..22: mol_type = other DNA
gagggctgcgggtccggaaggg

SEQ ID NO: 53122 - DNA, 22 bp, synthetic construct
  misc_feature 1..22: note = chemically synthesized
  source 1..22: mol_type = other DNA
cgggtccggaagggcagcgccc

SEQ ID NO: 53123 - DNA, 22 bp, synthetic construct
  misc_feature 1..22: note = chemically synthesized
  source 1..22: mol_type = other DNA
caggagcccgcgcggcctggaa

SEQ ID NO: 53124 - DNA, 22 bp, synthetic construct
  misc_feature 1..22: note = chemically synthesized
  source 1..22: mol_type = other DNA
gaaagaggggaccggggagagg

SEQ ID NO: 53125 - DNA, 22 bp, synthetic construct
  misc_feature 1..22: note = chemically synthesized
  source 1..22: mol_type = other DNA
agcgccccgccaagcgactggg

SEQ ID NO: 53126 - DNA, 22 bp, synthetic construct
  misc_feature 1..22: note = chemically synthesized
  source 1..22: mol_type = other DNA
ggtctgaatgcaactgaaagcg

SEQ ID NO: 53127 - DNA, 22 bp, synthetic construct
  misc_feature 1..22: note = chemically synthesized
  source 1..22: mol_type = other DNA
aatgcaactgaaagcgccgagt

SEQ ID NO: 53128 - DNA, 22 bp, synthetic construct
  misc_feature 1..22: note = chemically synthesized
  source 1..22: mol_type = other DNA
aaagcgccgagtccccggctcc

SEQ ID NO: 53129 - DNA, 22 bp, synthetic construct
  misc_feature 1..22: note = chemically synthesized
  source 1..22: mol_type = other DNA
ctaagggtcgcagaaagagagc

SEQ ID NO: 53130 - DNA, 22 bp, synthetic construct
  misc_feature 1..22: note = chemically synthesized
  source 1..22: mol_type = other DNA
agggtcgcagaaagagagcccg

SEQ ID NO: 53131 - DNA, 22 bp, synthetic construct
  misc_feature 1..22: note = chemically synthesized
  source 1..22: mol_type = other DNA
gcccccggaggggagcgccggg

SEQ ID NO: 53132 - DNA, 22 bp, synthetic construct
  misc_feature 1..22: note = chemically synthesized
  source 1..22: mol_type = other DNA
ggcaagagaggcaccgaggcgt

SEQ ID NO: 53133 - DNA, 22 bp, synthetic construct
  misc_feature 1..22: note = chemically synthesized
  source 1..22: mol_type = other DNA
tctgagaggccgaggacaaagc

SEQ ID NO: 53134 - DNA, 22 bp, synthetic construct
  misc_feature 1..22: note = chemically synthesized
  source 1..22: mol_type = other DNA
tgagaggccgaggacaaagcgc

SEQ ID NO: 53135 - DNA, 22 bp, synthetic construct
  misc_feature 1..22: note = chemically synthesized
  source 1..22: mol_type = other DNA
agaggccgaggacaaagcgcgg

SEQ ID NO: 53136 - DNA, 22 bp, synthetic construct
  misc_feature 1..22: note = chemically synthesized
  source 1..22: mol_type = other DNA
ggaatgtgctcacggcgccgcg

SEQ ID NO: 53137 - DNA, 22 bp, synthetic construct
  misc_feature 1..22: note = chemically synthesized
  source 1..22: mol_type = other DNA
acggcgccgcgggaggtccccg

SEQ ID NO: 53138 - DNA, 22 bp, synthetic construct
  misc_feature 1..22: note = chemically synthesized
  source 1..22: mol_type = other DNA
ggagggacacaccccctcccac

SEQ ID NO: 53139 - DNA, 22 bp, synthetic construct
  misc_feature 1..22: note = chemically synthesized
  source 1..22: mol_type = other DNA
ccactccagagcaactgcaaaa

SEQ ID NO: 53140 - DNA, 22 bp, synthetic construct
  misc_feature 1..22: note = chemically synthesized
  source 1..22: mol_type = other DNA
cagagcaactgcaaaagcacag

SEQ ID NO: 53141 - DNA, 22 bp, synthetic construct
  misc_feature 1..22: note = chemically synthesized
  source 1..22: mol_type = other DNA
caaaagcacagagggatgggaa

SEQ ID NO: 53142 - DNA, 22 bp, synthetic construct
  misc_feature 1..22: note = chemically synthesized
  source 1..22: mol_type = other DNA
cttacgggcagagcacaactgt

SEQ ID NO: 53143 - DNA, 22 bp, synthetic construct
  misc_feature 1..22: note = chemically synthesized
  source 1..22: mol_type = other DNA
ttacgggcagagcacaactgtt

SEQ ID NO: 53144 - DNA, 22 bp, synthetic construct
  misc_feature 1..22: note = chemically synthesized
  source 1..22: mol_type = other DNA
acgggcagagcacaactgttcc

SEQ ID NO: 53145 - DNA, 22 bp, synthetic construct
  misc_feature 1..22: note = chemically synthesized
  source 1..22: mol_type = other DNA
cgggcagagcacaactgttcct

SEQ ID NO: 53146 - DNA, 22 bp, synthetic construct
  misc_feature 1..22: note = chemically synthesized
  source 1..22: mol_type = other DNA
ttcctgtgctgttacccaggga

SEQ ID NO: 53147 - DNA, 22 bp, synthetic construct
  misc_feature 1..22: note = chemically synthesized
  source 1..22: mol_type = other DNA
ctgtgctgttacccagggaaag

SEQ ID NO: 53148 - DNA, 22 bp, synthetic construct
  misc_feature 1..22: note = chemically synthesized
  source 1..22: mol_type = other DNA
tgctgttacccagggaaagaga

SEQ ID NO: 53149 - DNA, 22 bp, synthetic construct
  misc_feature 1..22: note = chemically synthesized
  source 1..22: mol_type = other DNA
ttacccagggaaagagaaaatg

SEQ ID NO: 53150 - DNA, 22 bp, synthetic construct
  misc_feature 1..22: note = chemically synthesized
  source 1..22: mol_type = other DNA
cccagggaaagagaaaatggga

SEQ ID NO: 53151 - DNA, 22 bp, synthetic construct
  misc_feature 1..22: note = chemically synthesized
  source 1..22: mol_type = other DNA
gcaggagcagcggggagaccac

SEQ ID NO: 53152 - DNA, 22 bp, synthetic construct
  misc_feature 1..22: note = chemically synthesized
  source 1..22: mol_type = other DNA
gggtcaccgccgcgctccccag

SEQ ID NO: 53153 - DNA, 22 bp, synthetic construct
  misc_feature 1..22: note = chemically synthesized
  source 1..22: mol_type = other DNA
cccaggcgccgccggccaaggc

SEQ ID NO: 53154 - DNA, 22 bp, synthetic construct
  misc_feature 1..22: note = chemically synthesized
  source 1..22: mol_type = other DNA
tcgcctttctgcagacgttccc

SEQ ID NO: 53155 - DNA, 22 bp, synthetic construct
  misc_feature 1..22: note = chemically synthesized
  source 1..22: mol_type = other DNA
gcctttctgcagacgttccctg

SEQ ID NO: 53156 - DNA, 22 bp, synthetic construct
  misc_feature 1..22: note = chemically synthesized
  source 1..22: mol_type = other DNA
tctgcagacgttccctggaaat

SEQ ID NO: 53157 - DNA, 22 bp, synthetic construct
  misc_feature 1..22: note = chemically synthesized
  source 1..22: mol_type = other DNA
ctgcagacgttccctggaaatt

SEQ ID NO: 53158 - DNA, 22 bp, synthetic construct
  misc_feature 1..22: note = chemically synthesized
  source 1..22: mol_type = other DNA
tgcagacgttccctggaaatta

SEQ ID NO: 53159 - DNA, 22 bp, synthetic construct
  misc_feature 1..22: note = chemically synthesized
  source 1..22: mol_type = other DNA
cagacgttccctggaaattagg

SEQ ID NO: 53160 - DNA, 22 bp, synthetic construct
  misc_feature 1..22: note = chemically synthesized
  source 1..22: mol_type = other DNA
cctggaaattagggaagacctg

SEQ ID NO: 53161 - DNA, 22 bp, synthetic construct
  misc_feature 1..22: note = chemically synthesized
  source 1..22: mol_type = other DNA
gaaattagggaagacctgttgg

SEQ ID NO: 53162 - DNA, 22 bp, synthetic construct
  misc_feature 1..22: note = chemically synthesized
  source 1..22: mol_type = other DNA
gggaagacctgttggaaataaa

SEQ ID NO: 53163 - DNA, 22 bp, synthetic construct
  misc_feature 1..22: note = chemically synthesized
  source 1..22: mol_type = other DNA
ttggaaataaaaccctgtctct

SEQ ID NO: 53164 - DNA, 22 bp, synthetic construct
  misc_feature 1..22: note = chemically synthesized
  source 1..22: mol_type = other DNA
gaaataaaaccctgtctcttta

SEQ ID NO: 53165 - DNA, 22 bp, synthetic construct
  misc_feature 1..22: note = chemically synthesized
  source 1..22: mol_type = other DNA
tctctttaatgcacacacgcac

SEQ ID NO: 53166 - DNA, 22 bp, synthetic construct
  misc_feature 1..22: note = chemically synthesized
  source 1..22: mol_type = other DNA
tttaatgcacacacgcacacac

SEQ ID NO: 53167 - DNA, 22 bp, synthetic construct
  misc_feature 1..22: note = chemically synthesized
  source 1..22: mol_type = other DNA
taatgcacacacgcacacacac

SEQ ID NO: 53168 - DNA, 22 bp, synthetic construct
  misc_feature 1..22: note = chemically synthesized
  source 1..22: mol_type = other DNA
aatgcacacacgcacacacacg

SEQ ID NO: 53169 - DNA, 22 bp, synthetic construct
  misc_feature 1..22: note = chemically synthesized
  source 1..22: mol_type = other DNA
atgcacacacgcacacacacgc

SEQ ID NO: 53170 - DNA, 22 bp, synthetic construct
  misc_feature 1..22: note = chemically synthesized
  source 1..22: mol_type = other DNA
ccgctgtcaaaaagcgggcttc

SEQ ID NO: 53171 - DNA, 22 bp, synthetic construct
  misc_feature 1..22: note = chemically synthesized
  source 1..22: mol_type = other DNA
tcaaaaagcgggcttcactctg

SEQ ID NO: 53172 - DNA, 22 bp, synthetic construct
  misc_feature 1..22: note = chemically synthesized
  source 1..22: mol_type = other DNA
cactctggcgtgggatactttc

SEQ ID NO: 53173 - DNA, 22 bp, synthetic construct
  misc_feature 1..22: note = chemically synthesized
  source 1..22: mol_type = other DNA
actctggcgtgggatactttca

SEQ ID NO: 53174 - DNA, 22 bp, synthetic construct
  misc_feature 1..22: note = chemically synthesized
  source 1..22: mol_type = other DNA
tggcgtgggatactttcagttt

SEQ ID NO: 53175 - DNA, 22 bp, synthetic construct
  misc_feature 1..22: note = chemically synthesized
  source 1..22: mol_type = other DNA
gcgtgggatactttcagtttta

SEQ ID NO: 53176 - DNA, 22 bp, synthetic construct
  misc_feature 1..22: note = chemically synthesized
  source 1..22: mol_type = other DNA
tcagttttacgtaaaatgtaca

SEQ ID NO: 53177 - DNA, 22 bp, synthetic construct
  misc_feature 1..22: note = chemically synthesized
  source 1..22: mol_type = other DNA
cagttttacgtaaaatgtacag

SEQ ID NO: 53178 - DNA, 22 bp, synthetic construct
  misc_feature 1..22: note = chemically synthesized
  source 1..22: mol_type = other DNA
agttttacgtaaaatgtacagc

SEQ ID NO: 53179 - DNA, 22 bp, synthetic construct
  misc_feature 1..22: note = chemically synthesized
  source 1..22: mol_type = other DNA
tacgtaaaatgtacagcaacag

SEQ ID NO: 53180 - DNA, 22 bp, synthetic construct
  misc_feature 1..22: note = chemically synthesized
  source 1..22: mol_type = other DNA
acgtaaaatgtacagcaacagc

SEQ ID NO: 53181 - DNA, 22 bp, synthetic construct
  misc_feature 1..22: note = chemically synthesized
  source 1..22: mol_type = other DNA
cgtaaaatgtacagcaacagca

SEQ ID NO: 53182 - DNA, 22 bp, synthetic construct
  misc_feature 1..22: note = chemically synthesized
  source 1..22: mol_type = other DNA
cgattggaaagtttattcagaa

SEQ ID NO: 53183 - DNA, 22 bp, synthetic construct
  misc_feature 1..22: note = chemically synthesized
  source 1..22: mol_type = other DNA
gaaagtttattcagaaacgtgc

SEQ ID NO: 53184 - DNA, 22 bp, synthetic construct
  misc_feature 1..22: note = chemically synthesized
  source 1..22: mol_type = other DNA
attcagaaacgtgcctgtaaag

SEQ ID NO: 53185 - DNA, 22 bp, synthetic construct
  misc_feature 1..22: note = chemically synthesized
  source 1..22: mol_type = other DNA
ttcagaaacgtgcctgtaaagt

SEQ ID NO: 53186 - DNA, 22 bp, synthetic construct
  misc_feature 1..22: note = chemically synthesized
  source 1..22: mol_type = other DNA
agaaacgtgcctgtaaagtccc

SEQ ID NO: 53187 - DNA, 22 bp, synthetic construct
  misc_feature 1..22: note = chemically synthesized
  source 1..22: mol_type = other DNA
taaagtcccctggcgcctcccg

SEQ ID NO: 53188 - DNA, 22 bp, synthetic construct
  misc_feature 1..22: note = chemically synthesized
  source 1..22: mol_type = other DNA
gcgcctcccgcctcccagcctc

SEQ ID NO: 53189 - DNA, 22 bp, synthetic construct
  misc_feature 1..22: note = chemically synthesized
  source 1..22: mol_type = other DNA
ccgcctcccagcctccctgcct

SEQ ID NO: 53190 - DNA, 22 bp, synthetic construct
  misc_feature 1..22: note = chemically synthesized
  source 1..22: mol_type = other DNA
ccagcctccctgcctgccagca

SEQ ID NO: 53191 - DNA, 22 bp, synthetic construct
  misc_feature 1..22: note = chemically synthesized
  source 1..22: mol_type = other DNA
cctgcctgccagcaccactctg

SEQ ID NO: 53192 - DNA, 22 bp, synthetic construct
  misc_feature 1..22: note = chemically synthesized
  source 1..22: mol_type = other DNA
cctgccagcaccactctgcagc

SEQ ID NO: 53193 - DNA, 22 bp, synthetic construct
  misc_feature 1..22: note = chemically synthesized
  source 1..22: mol_type = other DNA
ccagcaccactctgcagccgcc

SEQ ID NO: 53194 - DNA, 22 bp, synthetic construct
  misc_feature 1..22: note = chemically synthesized
  source 1..22: mol_type = other DNA
tgcagccgccgccgccgccgcc

SEQ ID NO: 53195 - DNA, 22 bp, synthetic construct
  misc_feature 1..22: note = chemically synthesized
  source 1..22: mol_type = other DNA
cagccgccgccgccgccgccgg

SEQ ID NO: 53196 - DNA, 22 bp, synthetic construct
  misc_feature 1..22: note = chemically synthesized
  source 1..22: mol_type = other DNA
caaatctggaaggagttggggg

SEQ ID NO: 53197 - DNA, 22 bp, synthetic construct
  misc_feature 1..22: note = chemically synthesized
  source 1..22: mol_type = other DNA
gaaggagttggggggagaggag

SEQ ID NO: 53198 - DNA, 22 bp, synthetic construct
  misc_feature 1..22: note = chemically synthesized
  source 1..22: mol_type = other DNA
gggggagaggagaatggactca

SEQ ID NO: 53199 - DNA, 22 bp, synthetic construct
  misc_feature 1..22: note = chemically synthesized
  source 1..22: mol_type = other DNA
aggtccaagggaggtgcggagg

SEQ ID NO: 53200 - DNA, 22 bp, synthetic construct
  misc_feature 1..22: note = chemically synthesized
  source 1..22: mol_type = other DNA
agctgcaggtggatatgtgtga

SEQ ID NO: 53201 - DNA, 22 bp, synthetic construct
  misc_feature 1..22: note = chemically synthesized
  source 1..22: mol_type = other DNA
caggtggatatgtgtgagtgtg

SEQ ID NO: 53202 - DNA, 22 bp, synthetic construct
  misc_feature 1..22: note = chemically synthesized
  source 1..22: mol_type = other DNA
cagagcgaggagccctccttcc

SEQ ID NO: 53203 - DNA, 22 bp, synthetic construct
  misc_feature 1..22: note = chemically synthesized
  source 1..22: mol_type = other DNA
cttccctctcctcggagcggtt

SEQ ID NO: 53204 - DNA, 22 bp, synthetic construct
  misc_feature 1..22: note = chemically synthesized
  source 1..22: mol_type = other DNA
ccctctcctcggagcggttcca

SEQ ID NO: 53205 - DNA, 22 bp, synthetic construct
  misc_feature 1..22: note = chemically synthesized
  source 1..22: mol_type = other DNA
cctctcctcggagcggttccac

SEQ ID NO: 53206 - DNA, 22 bp, synthetic construct
  misc_feature 1..22: note = chemically synthesized
  source 1..22: mol_type = other DNA
tcctcggagcggttccacaacc

SEQ ID NO: 53207 - DNA, 22 bp, synthetic construct
  misc_feature 1..22: note = chemically synthesized
  source 1..22: mol_type = other DNA
ctcggagcggttccacaacccc

SEQ ID NO: 53208 - DNA, 22 bp, synthetic construct
  misc_feature 1..22: note = chemically synthesized
  source 1..22: mol_type = other DNA
ggagcggttccacaacccccgt

SEQ ID NO: 53209 - DNA, 22 bp, synthetic construct
  misc_feature 1..22: note = chemically synthesized
  source 1..22: mol_type = other DNA
cacaacccccgtcttctcatcc

SEQ ID NO: 53210 - DNA, 22 bp, synthetic construct
  misc_feature 1..22: note = chemically synthesized
  source 1..22: mol_type = other DNA
ctcatccccctcttcagtctaa

SEQ ID NO: 53211 - DNA, 22 bp, synthetic construct
  misc_feature 1..22: note = chemically synthesized
  source 1..22: mol_type = other DNA
tcatccccctcttcagtctaaa

SEQ ID NO: 53212 - DNA, 22 bp, synthetic construct
  misc_feature 1..22: note = chemically synthesized
  source 1..22: mol_type = other DNA
atccccctcttcagtctaaagg

SEQ ID NO: 53213 - DNA, 22 bp, synthetic construct
  misc_feature 1..22: note = chemically synthesized
  source 1..22: mol_type = other DNA
ttcagtctaaagggtgtcgctt

SEQ ID NO: 53214 - DNA, 22 bp, synthetic construct
  misc_feature 1..22: note = chemically synthesized
  source 1..22: mol_type = other DNA
cagtctaaagggtgtcgcttcc

SEQ ID NO: 53215 - DNA, 22 bp, synthetic construct
  misc_feature 1..22: note = chemically synthesized
  source 1..22: mol_type = other DNA
agtctaaagggtgtcgcttccg

SEQ ID NO: 53216 - DNA, 22 bp, synthetic construct
  misc_feature 1..22: note = chemically synthesized
  source 1..22: mol_type = other DNA
aagggtgtcgcttccgtaaact

SEQ ID NO: 53217 - DNA, 22 bp, synthetic construct
  misc_feature 1..22: note = chemically synthesized
  source 1..22: mol_type = other DNA
ccgtaaactcacccacccggtg

SEQ ID NO: 53218 - DNA, 22 bp, synthetic construct
  misc_feature 1..22: note = chemically synthesized
  source 1..22: mol_type = other DNA
cgtaaactcacccacccggtgg

SEQ ID NO: 53219 - DNA, 22 bp, synthetic construct
  misc_feature 1..22: note = chemically synthesized
  source 1..22: mol_type = other DNA
acccacccggtgggggggcttt

SEQ ID NO: 53220 - DNA, 22 bp, synthetic construct
  misc_feature 1..22: note = chemically synthesized
  source 1..22: mol_type = other DNA
tattgttttaagcgagggcccc

SEQ ID NO: 53221 - DNA, 22 bp, synthetic construct
  misc_feature 1..22: note = chemically synthesized
  source 1..22: mol_type = other DNA
attgttttaagcgagggccccg

SEQ ID NO: 53222 - DNA, 22 bp, synthetic construct
  misc_feature 1..22: note = chemically synthesized
  source 1..22: mol_type = other DNA
ttgttttaagcgagggccccgg

SEQ ID NO: 53223 - DNA, 22 bp, synthetic construct
  misc_feature 1..22: note = chemically synthesized
  source 1..22: mol_type = other DNA
ttttaagcgagggccccgggct

SEQ ID NO: 53224 - DNA, 22 bp, synthetic construct
  misc_feature 1..22: note = chemically synthesized
  source 1..22: mol_type = other DNA
taagcgagggccccgggcttgc

SEQ ID NO: 53225 - DNA, 22 bp, synthetic construct
  misc_feature 1..22: note = chemically synthesized
  source 1..22: mol_type = other DNA
aagcgagggccccgggcttgca

SEQ ID NO: 53226 - DNA, 22 bp, synthetic construct
  misc_feature 1..22: note = chemically synthesized
  source 1..22: mol_type = other DNA
agcgagggccccgggcttgcac

SEQ ID NO: 53227 - DNA, 22 bp, synthetic construct
  misc_feature 1..22: note = chemically synthesized
  source 1..22: mol_type = other DNA
gcacgcgctcacccatcccgca

SEQ ID NO: 53228 - DNA, 22 bp, synthetic construct
  misc_feature 1..22: note = chemically synthesized
  source 1..22: mol_type = other DNA
cacgcgctcacccatcccgcag

SEQ ID NO: 53229 - DNA, 22 bp, synthetic construct
  misc_feature 1..22: note = chemically synthesized
  source 1..22: mol_type = other DNA
acccatcccgcagccctgccgg

SEQ ID NO: 53230 - DNA, 22 bp, synthetic construct
  misc_feature 1..22: note = chemically synthesized
  source 1..22: mol_type = other DNA
ccggcaagcggctgtttattcc

SEQ ID NO: 53231 - DNA, 22 bp, synthetic construct
  misc_feature 1..22: note = chemically synthesized
  source 1..22: mol_type = other DNA
tttattcctgtttcgtcttagt

SEQ ID NO: 53232 - DNA, 22 bp, synthetic construct
  misc_feature 1..22: note = chemically synthesized
  source 1..22: mol_type = other DNA
attcctgtttcgtcttagtaaa

SEQ ID NO: 53233 - DNA, 22 bp, synthetic construct
  misc_feature 1..22: note = chemically synthesized
  source 1..22: mol_type = other DNA
ttcctgtttcgtcttagtaaag

SEQ ID NO: 53234 - DNA, 22 bp, synthetic construct
  misc_feature 1..22: note = chemically synthesized
  source 1..22: mol_type = other DNA
ctgtttcgtcttagtaaagttt

SEQ ID NO: 53235 - DNA, 22 bp, synthetic construct
  misc_feature 1..22: note = chemically synthesized
  source 1..22: mol_type = other DNA
tttcgtcttagtaaagtttcaa

SEQ ID NO: 53236 - DNA, 22 bp, synthetic construct
  misc_feature 1..22: note = chemically synthesized
  source 1..22: mol_type = other DNA
cgtcttagtaaagtttcaagtc

SEQ ID NO: 53237 - DNA, 22 bp, synthetic construct
  misc_feature 1..22: note = chemically synthesized
  source 1..22: mol_type = other DNA
gtcttagtaaagtttcaagtct

SEQ ID NO: 53238 - DNA, 22 bp, synthetic construct
  misc_feature 1..22: note = chemically synthesized
  source 1..22: mol_type = other DNA
agtaaagtttcaagtctactgt

SEQ ID NO: 53239 - DNA, 22 bp, synthetic construct
  misc_feature 1..22: note = chemically synthesized
  source 1..22: mol_type = other DNA
gtaaagtttcaagtctactgtg

SEQ ID NO: 53240 - DNA, 22 bp, synthetic construct
  misc_feature 1..22: note = chemically synthesized
  source 1..22: mol_type = other DNA
caagtctactgtgttagaaaat

SEQ ID NO: 53241 - DNA, 22 bp, synthetic construct
  misc_feature 1..22: note = chemically synthesized
  source 1..22: mol_type = other DNA
aagtctactgtgttagaaaatg

SEQ ID NO: 53242 - DNA, 22 bp, synthetic construct
  misc_feature 1..22: note = chemically synthesized
  source 1..22: mol_type = other DNA
ctgtgttagaaaatgactggct

SEQ ID NO: 53243 - DNA, 22 bp, synthetic construct
  misc_feature 1..22: note = chemically synthesized
  source 1..22: mol_type = other DNA
tgttagaaaatgactggcttgc

SEQ ID NO: 53244 - DNA, 22 bp, synthetic construct
  misc_feature 1..22: note = chemically synthesized
  source 1..22: mol_type = other DNA
gaaaatgactggcttgcctagc

SEQ ID NO: 53245 - DNA, 22 bp, synthetic construct
  misc_feature 1..22: note = chemically synthesized
  source 1..22: mol_type = other DNA
gcttgcctagctcggcggagct

SEQ ID NO: 53246 - DNA, 22 bp, synthetic construct
  misc_feature 1..22: note = chemically synthesized
  source 1..22: mol_type = other DNA
gcctagctcggcggagcttcgg

SEQ ID NO: 53247 - DNA, 22 bp, synthetic construct
  misc_feature 1..22: note = chemically synthesized
  source 1..22: mol_type = other DNA
cctagctcggcggagcttcgga

SEQ ID NO: 53248 - DNA, 22 bp, synthetic construct
  misc_feature 1..22: note = chemically synthesized
  source 1..22: mol_type = other DNA
gctcggcggagcttcggacccc

SEQ ID NO: 53249 - DNA, 22 bp, synthetic construct
  misc_feature 1..22: note = chemically synthesized
  source 1..22: mol_type = other DNA
ggcggagcttcggacccctcta

SEQ ID NO: 53250 - DNA, 22 bp, synthetic construct
  misc_feature 1..22: note = chemically synthesized
  source 1..22: mol_type = other DNA
cggacccctctaaggaagaaaa

SEQ ID NO: 53251 - DNA, 22 bp, synthetic construct
  misc_feature 1..22: note = chemically synthesized
  source 1..22: mol_type = other DNA
ggacccctctaaggaagaaaag

SEQ ID NO: 53252 - DNA, 22 bp, synthetic construct
  misc_feature 1..22: note = chemically synthesized
  source 1..22: mol_type = other DNA
taaggaagaaaaggaggttttg

SEQ ID NO: 53253 - DNA, 22 bp, synthetic construct
  misc_feature 1..22: note = chemically synthesized
  source 1..22: mol_type = other DNA
aggaagaaaaggaggttttgat

SEQ ID NO: 53254 - DNA, 22 bp, synthetic construct
  misc_feature 1..22: note = chemically synthesized
  source 1..22: mol_type = other DNA
tgatgctcaacattgagagaga

SEQ ID NO: 53255 - DNA, 22 bp, synthetic construct
  misc_feature 1..22: note = chemically synthesized
  source 1..22: mol_type = other DNA
gatgctcaacattgagagagat

SEQ ID NO: 53256 - DNA, 22 bp, synthetic construct
  misc_feature 1..22: note = chemically synthesized
  source 1..22: mol_type = other DNA
atgctcaacattgagagagatg

SEQ ID NO: 53257 - DNA, 22 bp, synthetic construct
  misc_feature 1..22: note = chemically synthesized
  source 1..22: mol_type = other DNA
aacattgagagagatgtgggct

SEQ ID NO: 53258 - DNA, 22 bp, synthetic construct
  misc_feature 1..22: note = chemically synthesized
  source 1..22: mol_type = other DNA
agagagatgtgggctgtactgg

SEQ ID NO: 53259 - DNA, 22 bp, synthetic construct
  misc_feature 1..22: note = chemically synthesized
  source 1..22: mol_type = other DNA
tactgggattgtgtcaatgtgg

SEQ ID NO: 53260 - DNA, 22 bp, synthetic construct
  misc_feature 1..22: note = chemically synthesized
  source 1..22: mol_type = other DNA
ggattgtgtcaatgtggtttgt

SEQ ID NO: 53261 - DNA, 22 bp, synthetic construct
  misc_feature 1..22: note = chemically synthesized
  source 1..22: mol_type = other DNA
tgtcaatgtggtttgttgtttg

SEQ ID NO: 53262 - DNA, 22 bp, synthetic construct
  misc_feature 1..22: note = chemically synthesized
  source 1..22: mol_type = other DNA
gttgtttgttgttgtttccctc

SEQ ID NO: 53263 - DNA, 22 bp, synthetic construct
  misc_feature 1..22: note = chemically synthesized
  source 1..22: mol_type = other DNA
ttgtttgttgttgtttccctcc

SEQ ID NO: 53264 - DNA, 22 bp, synthetic construct
  misc_feature 1..22: note = chemically synthesized
  source 1..22: mol_type = other DNA
tttgttgttgtttccctccagt

SEQ ID NO: 53265 - DNA, 22 bp, synthetic construct
  misc_feature 1..22: note = chemically synthesized
  source 1..22: mol_type = other DNA
gttgttgtttccctccagtttg

SEQ ID NO: 53266 - DNA, 22 bp, synthetic construct
  misc_feature 1..22: note = chemically synthesized
  source 1..22: mol_type = other DNA
ttgttgtttccctccagtttgt

SEQ ID NO: 53267 - DNA, 22 bp, synthetic construct
  misc_feature 1..22: note = chemically synthesized
  source 1..22: mol_type = other DNA
ttgtttccctccagtttgtggg

SEQ ID NO: 53268 - DNA, 22 bp, synthetic construct
  misc_feature 1..22: note = chemically synthesized
  source 1..22: mol_type = other DNA
tttccctccagtttgtgggagg

SEQ ID NO: 53269 - DNA, 22 bp, synthetic construct
  misc_feature 1..22: note = chemically synthesized
  source 1..22: mol_type = other DNA
ccctccagtttgtgggagggag

SEQ ID NO: 53270 - DNA, 22 bp, synthetic construct
  misc_feature 1..22: note = chemically synthesized
  source 1..22: mol_type = other DNA
cctccagtttgtgggagggaga

SEQ ID NO: 53271 - DNA, 22 bp, synthetic construct
  misc_feature 1..22: note = chemically synthesized
  source 1..22: mol_type = other DNA
cagtttgtgggagggagacctc

SEQ ID NO: 53272 - DNA, 22 bp, synthetic construct
  misc_feature 1..22: note = chemically synthesized
  source 1..22: mol_type = other DNA
gtgggagggagacctcaaattc

SEQ ID NO: 53273 - DNA, 22 bp, synthetic construct
  misc_feature 1..22: note = chemically synthesized
  source 1..22: mol_type = other DNA
tgggagggagacctcaaattct

SEQ ID NO: 53274 - DNA, 22 bp, synthetic construct
  misc_feature 1..22: note = chemically synthesized
  source 1..22: mol_type = other DNA
aaattctgtttaagaagcggga

SEQ ID NO: 53275 - DNA, 22 bp, synthetic construct
  misc_feature 1..22: note = chemically synthesized
  source 1..22: mol_type = other DNA
tgtttaagaagcgggaggattc

SEQ ID NO: 53276 - DNA, 22 bp, synthetic construct
  misc_feature 1..22: note = chemically synthesized
  source 1..22: mol_type = other DNA
tttaagaagcgggaggattcac

SEQ ID NO: 53277 - DNA, 22 bp, synthetic construct
  misc_feature 1..22: note = chemically synthesized
  source 1..22: mol_type = other DNA
aagaagcgggaggattcactag

SEQ ID NO: 53278 - DNA, 22 bp, synthetic construct
  misc_feature 1..22: note = chemically synthesized
  source 1..22: mol_type = other DNA
agaagcgggaggattcactaga

SEQ ID NO: 53279 - DNA, 22 bp, synthetic construct
  misc_feature 1..22: note = chemically synthesized
  source 1..22: mol_type = other DNA
actagaagttaagctctgtagc

SEQ ID NO: 53280 - DNA, 22 bp, synthetic construct
  misc_feature 1..22: note = chemically synthesized
  source 1..22: mol_type = other DNA
gaagttaagctctgtagcttgt

SEQ ID NO: 53281 - DNA, 22 bp, synthetic construct
  misc_feature 1..22: note = chemically synthesized
  source 1..22: mol_type = other DNA
agctctgtagcttgtgtgtgac

SEQ ID NO: 53282 - DNA, 22 bp, synthetic construct
  misc_feature 1..22: note = chemically synthesized
  source 1..22: mol_type = other DNA
tgtagcttgtgtgtgacaccat

SEQ ID NO: 53283 - DNA, 22 bp, synthetic construct
  misc_feature 1..22: note = chemically synthesized
  source 1..22: mol_type = other DNA
tagcttgtgtgtgacaccattt

SEQ ID NO: 53284 - DNA, 22 bp, synthetic construct
  misc_feature 1..22: note = chemically synthesized
  source 1..22: mol_type = other DNA
gtgtgtgacaccatttcccctt

SEQ ID NO: 53285 - DNA, 22 bp, synthetic construct
  misc_feature 1..22: note = chemically synthesized
  source 1..22: mol_type = other DNA
tgtgtgacaccatttccccttt

SEQ ID NO: 53286 - DNA, 22 bp, synthetic construct
  misc_feature 1..22: note = chemically synthesized
  source 1..22: mol_type = other DNA
ccccttttcactgagttcttca

SEQ ID NO: 53287 - DNA, 22 bp, synthetic construct
  misc_feature 1..22: note = chemically synthesized
  source 1..22: mol_type = other DNA
cccttttcactgagttcttcag

SEQ ID NO: 53288 - DNA, 22 bp, synthetic construct
  misc_feature 1..22: note = chemically synthesized
  source 1..22: mol_type = other DNA
ttcactgagttcttcagagcag

SEQ ID NO: 53289 - DNA, 22 bp, synthetic construct
  misc_feature 1..22: note = chemically synthesized
  source 1..22: mol_type = other DNA
tcactgagttcttcagagcagg

SEQ ID NO: 53290 - DNA, 22 bp, synthetic construct
  misc_feature 1..22: note = chemically synthesized
  source 1..22: mol_type = other DNA
cactgagttcttcagagcaggt

SEQ ID NO: 53291 - DNA, 22 bp, synthetic construct
  misc_feature 1..22: note = chemically synthesized
  source 1..22: mol_type = other DNA
actgagttcttcagagcaggtc

SEQ ID NO: 53292 - DNA, 22 bp, synthetic construct
  misc_feature 1..22: note = chemically synthesized
  source 1..22: mol_type = other DNA
agttcttcagagcaggtcagca

SEQ ID NO: 53293 - DNA, 22 bp, synthetic construct
  misc_feature 1..22: note = chemically synthesized
  source 1..22: mol_type = other DNA
ttcagagcaggtcagcatctct

SEQ ID NO: 53294 - DNA, 22 bp, synthetic construct
  misc_feature 1..22: note = chemically synthesized
  source 1..22: mol_type = other DNA
cagagcaggtcagcatctctat

SEQ ID NO: 53295 - DNA, 22 bp, synthetic construct
  misc_feature 1..22: note = chemically synthesized
  source 1..22: mol_type = other DNA
agagcaggtcagcatctctatt

SEQ ID NO: 53296 - DNA, 22 bp, synthetic construct
  misc_feature 1..22: note = chemically synthesized
  source 1..22: mol_type = other DNA
tattccaccacagtctgctttt

SEQ ID NO: 53297 - DNA, 22 bp, synthetic construct
  misc_feature 1..22: note = chemically synthesized
  source 1..22: mol_type = other DNA
ttccaccacagtctgctttttg

SEQ ID NO: 53298 - DNA, 22 bp, synthetic construct
  misc_feature 1..22: note = chemically synthesized
  source 1..22: mol_type = other DNA
caccacagtctgctttttgtct

SEQ ID NO: 53299 - DNA, 22 bp, synthetic construct
  misc_feature 1..22: note = chemically synthesized
  source 1..22: mol_type = other DNA
ctttttgtcttgttaaaccagc

SEQ ID NO: 53300 - DNA, 22 bp, synthetic construct
  misc_feature 1..22: note = chemically synthesized
  source 1..22: mol_type = other DNA
tttgtcttgttaaaccagcctt

SEQ ID NO: 53301 - DNA, 22 bp, synthetic construct
  misc_feature 1..22: note = chemically synthesized
  source 1..22: mol_type = other DNA
ttgtcttgttaaaccagccttg

SEQ ID NO: 53302 - DNA, 22 bp, synthetic construct
  misc_feature 1..22: note = chemically synthesized
  source 1..22: mol_type = other DNA
tgtcttgttaaaccagccttgg

SEQ ID NO: 53303 - DNA, 22 bp, synthetic construct
  misc_feature 1..22: note = chemically synthesized
  source 1..22: mol_type = other DNA
gtcttgttaaaccagccttgga

SEQ ID NO: 53304 - DNA, 22 bp, synthetic construct
  misc_feature 1..22: note = chemically synthesized
  source 1..22: mol_type = other DNA
tcttgttaaaccagccttggag

SEQ ID NO: 53305 - DNA, 22 bp, synthetic construct
  misc_feature 1..22: note = chemically synthesized
  source 1..22: mol_type = other DNA
gttaaaccagccttggagtcac

SEQ ID NO: 53306 - DNA, 22 bp, synthetic construct
  misc_feature 1..22: note = chemically synthesized
  source 1..22: mol_type = other DNA
ttaaaccagccttggagtcacc

SEQ ID NO: 53307 - DNA, 22 bp, synthetic construct
  misc_feature 1..22: note = chemically synthesized
  source 1..22: mol_type = other DNA
aaccagccttggagtcaccaaa

SEQ ID NO: 53308 - DNA, 22 bp, synthetic construct
  misc_feature 1..22: note = chemically synthesized
  source 1..22: mol_type = other DNA
ggagtcaccaaaagaatgtctt

SEQ ID NO: 53309 - DNA, 22 bp, synthetic construct
  misc_feature 1..22: note = chemically synthesized
  source 1..22: mol_type = other DNA
gagtcaccaaaagaatgtcttc

SEQ ID NO: 53310 - DNA, 22 bp, synthetic construct
  misc_feature 1..22: note = chemically synthesized
  source 1..22: mol_type = other DNA
cttggggggtggcgggggagga

SEQ ID NO: 53311 - DNA, 22 bp, synthetic construct
  misc_feature 1..22: note = chemically synthesized
  source 1..22: mol_type = other DNA
ttggggggtggcgggggaggac

SEQ ID NO: 53312 - DNA, 22 bp, synthetic construct
  misc_feature 1..22: note = chemically synthesized
  source 1..22: mol_type = other DNA
ggggggtggcgggggaggacga

SEQ ID NO: 53313 - DNA, 22 bp, synthetic construct
  misc_feature 1..22: note = chemically synthesized
  source 1..22: mol_type = other DNA
gggggtggcgggggaggacgac

SEQ ID NO: 53314 - DNA, 22 bp, synthetic construct
  misc_feature 1..22: note = chemically synthesized
  source 1..22: mol_type = other DNA
gagggaaggtgaagagagggaa

SEQ ID NO: 53315 - DNA, 22 bp, synthetic construct
  misc_feature 1..22: note = chemically synthesized
  source 1..22: mol_type = other DNA
ggaggcctttgaaaaataaata

SEQ ID NO: 53316 - DNA, 22 bp, synthetic construct
  misc_feature 1..22: note = chemically synthesized
  source 1..22: mol_type = other DNA
tgaaaaataaataaataaaaga

SEQ ID NO: 53317 - DNA, 22 bp, synthetic construct
  misc_feature 1..22: note = chemically synthesized
  source 1..22: mol_type = other DNA
gaaaaataaataaataaaagaa

SEQ ID NO: 53318 - DNA, 22 bp, synthetic construct
  misc_feature 1..22: note = chemically synthesized
  source 1..22: mol_type = other DNA
aaaaataaataaataaaagaaa

SEQ ID NO: 53319 - DNA, 22 bp, synthetic construct
  misc_feature 1..22: note = chemically synthesized
  source 1..22: mol_type = other DNA
caggtaacaatagtgagccaga

SEQ ID NO: 53320 - DNA, 22 bp, synthetic construct
  misc_feature 1..22: note = chemically synthesized
  source 1..22: mol_type = other DNA
aggtaacaatagtgagccagat

SEQ ID NO: 53321 - DNA, 22 bp, synthetic construct
  misc_feature 1..22: note = chemically synthesized
  source 1..22: mol_type = other DNA
tttcagaaccaagcttttcaga

SEQ ID NO: 53322 - DNA, 22 bp, synthetic construct
  misc_feature 1..22: note = chemically synthesized
  source 1..22: mol_type = other DNA
tcagaaccaagcttttcagatt

SEQ ID NO: 53323 - DNA, 22 bp, synthetic construct
  misc_feature 1..22: note = chemically synthesized
  source 1..22: mol_type = other DNA
cagaaccaagcttttcagattt

SEQ ID NO: 53324 - DNA, 22 bp, synthetic construct
  misc_feature 1..22: note = chemically synthesized
  source 1..22: mol_type = other DNA
agaaccaagcttttcagatttg

SEQ ID NO: 53325 - DNA, 22 bp, synthetic construct
  misc_feature 1..22: note = chemically synthesized
  source 1..22: mol_type = other DNA
ttcagatttgaatattgttccc

SEQ ID NO: 53326 - DNA, 22 bp, synthetic construct
  misc_feature 1..22: note = chemically synthesized
  source 1..22: mol_type = other DNA
tcagatttgaatattgttccca

SEQ ID NO: 53327 - DNA, 22 bp, synthetic construct
  misc_feature 1..22: note = chemically synthesized
  source 1..22: mol_type = other DNA
cagatttgaatattgttcccac

SEQ ID NO: 53328 - DNA, 22 bp, synthetic construct
  misc_feature 1..22: note = chemically synthesized
  source 1..22: mol_type = other DNA
agatttgaatattgttcccacc

SEQ ID NO: 53329 - DNA, 22 bp, synthetic construct
  misc_feature 1..22: note = chemically synthesized
  source 1..22: mol_type = other DNA
gaatattgttcccacccgtcca

SEQ ID NO: 53330 - DNA, 22 bp, synthetic construct
  misc_feature 1..22: note = chemically synthesized
  source 1..22: mol_type = other DNA
aatattgttcccacccgtccat

SEQ ID NO: 53331 - DNA, 22 bp, synthetic construct
  misc_feature 1..22: note = chemically synthesized
  source 1..22: mol_type = other DNA
ttcccacccgtccataaaagtc

SEQ ID NO: 53332 - DNA, 22 bp, synthetic construct
  misc_feature 1..22: note = chemically synthesized
  source 1..22: mol_type = other DNA
ccacccgtccataaaagtccat

SEQ ID NO: 53333 - DNA, 22 bp, synthetic construct
  misc_feature 1..22: note = chemically synthesized
  source 1..22: mol_type = other DNA
tagagaagatatataaatgagc

SEQ ID NO: 53334 - DNA, 22 bp, synthetic construct
  misc_feature 1..22: note = chemically synthesized
  source 1..22: mol_type = other DNA
tggaaatatatatatatgtatg

SEQ ID NO: 53335 - DNA, 22 bp, synthetic construct
  misc_feature 1..22: note = chemically synthesized
  source 1..22: mol_type = other DNA
atatataatggtgtgtataaag

SEQ ID NO: 53336 - DNA, 22 bp, synthetic construct
  misc_feature 1..22: note = chemically synthesized
  source 1..22: mol_type = other DNA
tatataatggtgtgtataaagc

SEQ ID NO: 53337 - DNA, 22 bp, synthetic construct
  misc_feature 1..22: note = chemically synthesized
  source 1..22: mol_type = other DNA
ttcggggttggctgtagtgtaa

SEQ ID NO: 53338 - DNA, 22 bp, synthetic construct
  misc_feature 1..22: note = chemically synthesized
  source 1..22: mol_type = other DNA
tcggggttggctgtagtgtaaa

SEQ ID NO: 53339 - DNA, 22 bp, synthetic construct
  misc_feature 1..22: note = chemically synthesized
  source 1..22: mol_type = other DNA
cggggttggctgtagtgtaaaa

SEQ ID NO: 53340 - DNA, 22 bp, synthetic construct
  misc_feature 1..22: note = chemically synthesized
  source 1..22: mol_type = other DNA
ggggttggctgtagtgtaaaaa

SEQ ID NO: 53341 - DNA, 22 bp, synthetic construct
  misc_feature 1..22: note = chemically synthesized
  source 1..22: mol_type = other DNA
gctgtagtgtaaaaagtaatga

SEQ ID NO: 53342 - DNA, 22 bp, synthetic construct
  misc_feature 1..22: note = chemically synthesized
  source 1..22: mol_type = other DNA
tagtgtaaaaagtaatgacttt

SEQ ID NO: 53343 - DNA, 22 bp, synthetic construct
  misc_feature 1..22: note = chemically synthesized
  source 1..22: mol_type = other DNA
tattacctctgaaaggttctgt

SEQ ID NO: 53344 - DNA, 22 bp, synthetic construct
  misc_feature 1..22: note = chemically synthesized
  source 1..22: mol_type = other DNA
attacctctgaaaggttctgtg

SEQ ID NO: 53345 - DNA, 22 bp, synthetic construct
  misc_feature 1..22: note = chemically synthesized
  source 1..22: mol_type = other DNA
ttacctctgaaaggttctgtgg

SEQ ID NO: 53346 - DNA, 22 bp, synthetic construct
  misc_feature 1..22: note = chemically synthesized
  source 1..22: mol_type = other DNA
cctctgaaaggttctgtggttc

SEQ ID NO: 53347 - DNA, 22 bp, synthetic construct
  misc_feature 1..22: note = chemically synthesized
  source 1..22: mol_type = other DNA
tgaaaggttctgtggttcacat

SEQ ID NO: 53348 - DNA, 22 bp, synthetic construct
  misc_feature 1..22: note = chemically synthesized
  source 1..22: mol_type = other DNA
aaaggttctgtggttcacattt

SEQ ID NO: 53349 - DNA, 22 bp, synthetic construct
  misc_feature 1..22: note = chemically synthesized
  source 1..22: mol_type = other DNA
tgtggttcacatttaacagtct

SEQ ID NO: 53350 - DNA, 22 bp, synthetic construct
  misc_feature 1..22: note = chemically synthesized
  source 1..22: mol_type = other DNA
tggttcacatttaacagtcttc

SEQ ID NO: 53351 - DNA, 22 bp, synthetic construct
  misc_feature 1..22: note = chemically synthesized
  source 1..22: mol_type = other DNA
acatttaacagtcttctgaatt

SEQ ID NO: 53352 - DNA, 22 bp, synthetic construct
  misc_feature 1..22: note = chemically synthesized
  source 1..22: mol_type = other DNA
aacagtcttctgaattacaatt

SEQ ID NO: 53353 - DNA, 22 bp, synthetic construct
  misc_feature 1..22: note = chemically synthesized
  source 1..22: mol_type = other DNA
acagtcttctgaattacaattc

SEQ ID NO: 53354 - DNA, 22 bp, synthetic construct
  misc_feature 1..22: note = chemically synthesized
  source 1..22: mol_type = other DNA
ctgaattacaattcattacaca

SEQ ID NO: 53355 - DNA, 22 bp, synthetic construct
  misc_feature 1..22: note = chemically synthesized
  source 1..22: mol_type = other DNA
tgaattacaattcattacacaa

SEQ ID NO: 53356 - DNA, 22 bp, synthetic construct
  misc_feature 1..22: note = chemically synthesized
  source 1..22: mol_type = other DNA
aattacaattcattacacaatt

SEQ ID NO: 53357 - DNA, 22 bp, synthetic construct
  misc_feature 1..22: note = chemically synthesized
  source 1..22: mol_type = other DNA
caattcattacacaattgtgtg

SEQ ID NO: 53358 - DNA, 22 bp, synthetic construct
  misc_feature 1..22: note = chemically synthesized
  source 1..22: mol_type = other DNA
attacacaattgtgtgcgctct

SEQ ID NO: 53359 - DNA, 22 bp, synthetic construct
  misc_feature 1..22: note = chemically synthesized
  source 1..22: mol_type = other DNA
cacaattgtgtgcgctctgacg

SEQ ID NO: 53360 - DNA, 22 bp, synthetic construct
  misc_feature 1..22: note = chemically synthesized
  source 1..22: mol_type = other DNA
tgtgcgctctgacgatggcacc

SEQ ID NO: 53361 - DNA, 22 bp, synthetic construct
  misc_feature 1..22: note = chemically synthesized
  source 1..22: mol_type = other DNA
tgacgatggcaccctatcaggg

SEQ ID NO: 53362 - DNA, 22 bp, synthetic construct
  misc_feature 1..22: note = chemically synthesized
  source 1..22: mol_type = other DNA
acgatggcaccctatcagggct

SEQ ID NO: 53363 - DNA, 22 bp, synthetic construct
  misc_feature 1..22: note = chemically synthesized
  source 1..22: mol_type = other DNA
tcagggctgctatctgtggcta

SEQ ID NO: 53364 - DNA, 22 bp, synthetic construct
  misc_feature 1..22: note = chemically synthesized
  source 1..22: mol_type = other DNA
ctatctgtggctatttccaata

SEQ ID NO: 53365 - DNA, 22 bp, synthetic construct
  misc_feature 1..22: note = chemically synthesized
  source 1..22: mol_type = other DNA
tctgtggctatttccaataaat

SEQ ID NO: 53366 - DNA, 22 bp, synthetic construct
  misc_feature 1..22: note = chemically synthesized
  source 1..22: mol_type = other DNA
tggctatttccaataaataact

SEQ ID NO: 53367 - DNA, 22 bp, synthetic construct
  misc_feature 1..22: note = chemically synthesized
  source 1..22: mol_type = other DNA
tttccaataaataactggcaac

SEQ ID NO: 53368 - DNA, 22 bp, synthetic construct
  misc_feature 1..22: note = chemically synthesized
  source 1..22: mol_type = other DNA
ccaataaataactggcaacatt

SEQ ID NO: 53369 - DNA, 22 bp, synthetic construct
  misc_feature 1..22: note = chemically synthesized
  source 1..22: mol_type = other DNA
caataaataactggcaacattt

SEQ ID NO: 53370 - DNA, 22 bp, synthetic construct
  misc_feature 1..22: note = chemically synthesized
  source 1..22: mol_type = other DNA
gcaacattttattgattttcct

SEQ ID NO: 53371 - DNA, 22 bp, synthetic construct
  misc_feature 1..22: note = chemically synthesized
  source 1..22: mol_type = other DNA
tattgattttcctttttaaaaa

SEQ ID NO: 53372 - DNA, 22 bp, synthetic construct
  misc_feature 1..22: note = chemically synthesized
  source 1..22: mol_type = other DNA
attgattttcctttttaaaaaa

SEQ ID NO: 53373 - DNA, 22 bp, synthetic construct
  misc_feature 1..22: note = chemically synthesized
  source 1..22: mol_type = other DNA
ttgattttcctttttaaaaaaa

SEQ ID NO: 53374 - DNA, 22 bp, synthetic construct
  misc_feature 1..22: note = chemically synthesized
  source 1..22: mol_type = other DNA
attttcctttttaaaaaaaaac

SEQ ID NO: 53375 - DNA, 22 bp, synthetic construct
  misc_feature 1..22: note = chemically synthesized
  source 1..22: mol_type = other DNA
tcctttttaaaaaaaaacatag

SEQ ID NO: 53376 - DNA, 22 bp, synthetic construct
  misc_feature 1..22: note = chemically synthesized
  source 1..22: mol_type = other DNA
cctttttaaaaaaaaacatagg

SEQ ID NO: 53377 - DNA, 22 bp, synthetic construct
  misc_feature 1..22: note = chemically synthesized
  source 1..22: mol_type = other DNA
ctttttaaaaaaaaacatagga

SEQ ID NO: 53378 - DNA, 22 bp, synthetic construct
  misc_feature 1..22: note = chemically synthesized
  source 1..22: mol_type = other DNA
tttaaaaaaaaacataggaaat

SEQ ID NO: 53379 - DNA, 22 bp, synthetic construct
  misc_feature 1..22: note = chemically synthesized
  source 1..22: mol_type = other DNA
ttaaaaaaaaacataggaaatt

SEQ ID NO: 53380 - DNA, 22 bp, synthetic construct
  misc_feature 1..22: note = chemically synthesized
  source 1..22: mol_type = other DNA
taaaaaaaaacataggaaatta

SEQ ID NO: 53381 - DNA, 22 bp, synthetic construct
  misc_feature 1..22: note = chemically synthesized
  source 1..22: mol_type = other DNA
aaaaaaaaacataggaaattaa

SEQ ID NO: 53382 - DNA, 22 bp, synthetic construct
  misc_feature 1..22: note = chemically synthesized
  source 1..22: mol_type = other DNA
aaaaaaaacataggaaattaag

SEQ ID NO: 53383 - DNA, 22 bp, synthetic construct
  misc_feature 1..22: note = chemically synthesized
  source 1..22: mol_type = other DNA
agcacttagttacaagtaggtc

SEQ ID NO: 53384 - DNA, 22 bp, synthetic construct
  misc_feature 1..22: note = chemically synthesized
  source 1..22: mol_type = other DNA
agttacaagtaggtctgctatg

SEQ ID NO: 53385 - DNA, 22 bp, synthetic construct
  misc_feature 1..22: note = chemically synthesized
  source 1..22: mol_type = other DNA
gttacaagtaggtctgctatgt

SEQ ID NO: 53386 - DNA, 22 bp, synthetic construct
  misc_feature 1..22: note = chemically synthesized
  source 1..22: mol_type = other DNA
caagtaggtctgctatgttatt

SEQ ID NO: 53387 - DNA, 22 bp, synthetic construct
  misc_feature 1..22: note = chemically synthesized
  source 1..22: mol_type = other DNA
cttgtaactaagtgcttaattt

SEQ ID NO: 53388 - DNA, 22 bp, synthetic construct
  misc_feature 1..22: note = chemically synthesized
  source 1..22: mol_type = other DNA
gtaactaagtgcttaatttcct

SEQ ID NO: 53389 - DNA, 22 bp, synthetic construct
  misc_feature 1..22: note = chemically synthesized
  source 1..22: mol_type = other DNA
taactaagtgcttaatttccta

SEQ ID NO: 53390 - DNA, 22 bp, synthetic construct
  misc_feature 1..22: note = chemically synthesized
  source 1..22: mol_type = other DNA
agtgcttaatttcctatgtttt

SEQ ID NO: 53391 - DNA, 22 bp, synthetic construct
  misc_feature 1..22: note = chemically synthesized
  source 1..22: mol_type = other DNA
aatttcctatgtttttttttaa

SEQ ID NO: 53392 - DNA, 22 bp, synthetic construct
  misc_feature 1..22: note = chemically synthesized
  source 1..22: mol_type = other DNA
atttcctatgtttttttttaaa

SEQ ID NO: 53393 - DNA, 22 bp, synthetic construct
  misc_feature 1..22: note = chemically synthesized
  source 1..22: mol_type = other DNA
cctatgtttttttttaaaaagg

SEQ ID NO: 53394 - DNA, 22 bp, synthetic construct
  misc_feature 1..22: note = chemically synthesized
  source 1..22: mol_type = other DNA
ctatgtttttttttaaaaagga

SEQ ID NO: 53395 - DNA, 22 bp, synthetic construct
  misc_feature 1..22: note = chemically synthesized
  source 1..22: mol_type = other DNA
tgtttttttttaaaaaggaaaa

SEQ ID NO: 53396 - DNA, 22 bp, synthetic construct
  misc_feature 1..22: note = chemically synthesized
  source 1..22: mol_type = other DNA
ttttttaaaaaggaaaatcaat

SEQ ID NO: 53397 - DNA, 22 bp, synthetic construct
  misc_feature 1..22: note = chemically synthesized
  source 1..22: mol_type = other DNA
tttttaaaaaggaaaatcaata

SEQ ID NO: 53398 - DNA, 22 bp, synthetic construct
  misc_feature 1..22: note = chemically synthesized
  source 1..22: mol_type = other DNA
ttttaaaaaggaaaatcaataa

SEQ ID NO: 53399 - DNA, 22 bp, synthetic construct
  misc_feature 1..22: note = chemically synthesized
  source 1..22: mol_type = other DNA
tttaaaaaggaaaatcaataaa

SEQ ID NO: 53400 - DNA, 22 bp, synthetic construct
  misc_feature 1..22: note = chemically synthesized
  source 1..22: mol_type = other DNA
ttaaaaaggaaaatcaataaaa

SEQ ID NO: 53401 - DNA, 22 bp, synthetic construct
  misc_feature 1..22: note = chemically synthesized
  source 1..22: mol_type = other DNA
taaaaaggaaaatcaataaaat

SEQ ID NO: 53402 - DNA, 22 bp, synthetic construct
  misc_feature 1..22: note = chemically synthesized
  source 1..22: mol_type = other DNA
aaaaaggaaaatcaataaaatg

SEQ ID NO: 53403 - DNA, 22 bp, synthetic construct
  misc_feature 1..22: note = chemically synthesized
  source 1..22: mol_type = other DNA
aaaaggaaaatcaataaaatgt

SEQ ID NO: 53404 - DNA, 22 bp, synthetic construct
  misc_feature 1..22: note = chemically synthesized
  source 1..22: mol_type = other DNA
ccagttatttattggaaatagc

SEQ ID NO: 53405 - DNA, 22 bp, synthetic construct
  misc_feature 1..22: note = chemically synthesized
  source 1..22: mol_type = other DNA
tttattggaaatagccacagat

SEQ ID NO: 53406 - DNA, 22 bp, synthetic construct
  misc_feature 1..22: note = chemically synthesized
  source 1..22: mol_type = other DNA
attggaaatagccacagatagc

SEQ ID NO: 53407 - DNA, 22 bp, synthetic construct
  misc_feature 1..22: note = chemically synthesized
  source 1..22: mol_type = other DNA
ttggaaatagccacagatagca

SEQ ID NO: 53408 - DNA, 22 bp, synthetic construct
  misc_feature 1..22: note = chemically synthesized
  source 1..22: mol_type = other DNA
gaaatagccacagatagcagcc

SEQ ID NO: 53409 - DNA, 22 bp, synthetic construct
  misc_feature 1..22: note = chemically synthesized
  source 1..22: mol_type = other DNA
atagggtgccatcgtcagagcg

SEQ ID NO: 53410 - DNA, 22 bp, synthetic construct
  misc_feature 1..22: note = chemically synthesized
  source 1..22: mol_type = other DNA
tgtaatgaattgtaattcagaa

SEQ ID NO: 53411 - DNA, 22 bp, synthetic construct
  misc_feature 1..22: note = chemically synthesized
  source 1..22: mol_type = other DNA
taattcagaagactgttaaatg

SEQ ID NO: 53412 - DNA, 22 bp, synthetic construct
  misc_feature 1..22: note = chemically synthesized
  source 1..22: mol_type = other DNA
agaagactgttaaatgtgaacc

SEQ ID NO: 53413 - DNA, 22 bp, synthetic construct
  misc_feature 1..22: note = chemically synthesized
  source 1..22: mol_type = other DNA
ttaaatgtgaaccacagaacct

SEQ ID NO: 53414 - DNA, 22 bp, synthetic construct
  misc_feature 1..22: note = chemically synthesized
  source 1..22: mol_type = other DNA
aatgtgaaccacagaacctttc

SEQ ID NO: 53415 - DNA, 22 bp, synthetic construct
  misc_feature 1..22: note = chemically synthesized
  source 1..22: mol_type = other DNA
tcagaggtaataaagtcattac

SEQ ID NO: 53416 - DNA, 22 bp, synthetic construct
  misc_feature 1..22: note = chemically synthesized
  source 1..22: mol_type = other DNA
cagaggtaataaagtcattact

SEQ ID NO: 53417 - DNA, 22 bp, synthetic construct
  misc_feature 1..22: note = chemically synthesized
  source 1..22: mol_type = other DNA
agaggtaataaagtcattactt

SEQ ID NO: 53418 - DNA, 22 bp, synthetic construct
  misc_feature 1..22: note = chemically synthesized
  source 1..22: mol_type = other DNA
ctttttacactacagccaaccc

SEQ ID NO: 53419 - DNA, 22 bp, synthetic construct
  misc_feature 1..22: note = chemically synthesized
  source 1..22: mol_type = other DNA
tttacactacagccaaccccga

SEQ ID NO: 53420 - DNA, 22 bp, synthetic construct
  misc_feature 1..22: note = chemically synthesized
  source 1..22: mol_type = other DNA
ttacactacagccaaccccgaa

SEQ ID NO: 53421 - DNA, 22 bp, synthetic construct
  misc_feature 1..22: note = chemically synthesized
  source 1..22: mol_type = other DNA
tacactacagccaaccccgaaa

SEQ ID NO: 53422 - DNA, 22 bp, synthetic construct
  misc_feature 1..22: note = chemically synthesized
  source 1..22: mol_type = other DNA
acactacagccaaccccgaaaa

SEQ ID NO: 53423 - DNA, 22 bp, synthetic construct
  misc_feature 1..22: note = chemically synthesized
  source 1..22: mol_type = other DNA
cactacagccaaccccgaaaag

SEQ ID NO: 53424 - DNA, 22 bp, synthetic construct
  misc_feature 1..22: note = chemically synthesized
  source 1..22: mol_type = other DNA
cagccaaccccgaaaagcttta

SEQ ID NO: 53425 - DNA, 22 bp, synthetic construct
  misc_feature 1..22: note = chemically synthesized
  source 1..22: mol_type = other DNA
tatacacaccattatatataaa

SEQ ID NO: 53426 - DNA, 22 bp, synthetic construct
  misc_feature 1..22: note = chemically synthesized
  source 1..22: mol_type = other DNA
atacacaccattatatataaat

SEQ ID NO: 53427 - DNA, 22 bp, synthetic construct
  misc_feature 1..22: note = chemically synthesized
  source 1..22: mol_type = other DNA
tacacaccattatatataaatc

SEQ ID NO: 53428 - DNA, 22 bp, synthetic construct
  misc_feature 1..22: note = chemically synthesized
  source 1..22: mol_type = other DNA
tatataaatcatacatatatat

SEQ ID NO: 53429 - DNA, 22 bp, synthetic construct
  misc_feature 1..22: note = chemically synthesized
  source 1..22: mol_type = other DNA
ccacaacactcactcgctcatt

SEQ ID NO: 53430 - DNA, 22 bp, synthetic construct
  misc_feature 1..22: note = chemically synthesized
  source 1..22: mol_type = other DNA
cacaacactcactcgctcattt

SEQ ID NO: 53431 - DNA, 22 bp, synthetic construct
  misc_feature 1..22: note = chemically synthesized
  source 1..22: mol_type = other DNA
actcgctcatttatatatcttc

SEQ ID NO: 53432 - DNA, 22 bp, synthetic construct
  misc_feature 1..22: note = chemically synthesized
  source 1..22: mol_type = other DNA
gctcatttatatatcttctcta

SEQ ID NO: 53433 - DNA, 22 bp, synthetic construct
  misc_feature 1..22: note = chemically synthesized
  source 1..22: mol_type = other DNA
atttatatatcttctctataga

SEQ ID NO: 53434 - DNA, 22 bp, synthetic construct
  misc_feature 1..22: note = chemically synthesized
  source 1..22: mol_type = other DNA
atatatcttctctatagatgga

SEQ ID NO: 53435 - DNA, 22 bp, synthetic construct
  misc_feature 1..22: note = chemically synthesized
  source 1..22: mol_type = other DNA
tatatcttctctatagatggac

SEQ ID NO: 53436 - DNA, 22 bp, synthetic construct
  misc_feature 1..22: note = chemically synthesized
  source 1..22: mol_type = other DNA
ctctatagatggacttttatgg

SEQ ID NO: 53437 - DNA, 22 bp, synthetic construct
  misc_feature 1..22: note = chemically synthesized
  source 1..22: mol_type = other DNA
tctatagatggacttttatgga

SEQ ID NO: 53438 - DNA, 22 bp, synthetic construct
  misc_feature 1..22: note = chemically synthesized
  source 1..22: mol_type = other DNA
tatagatggacttttatggacg

SEQ ID NO: 53439 - DNA, 22 bp, synthetic construct
  misc_feature 1..22: note = chemically synthesized
  source 1..22: mol_type = other DNA
tagatggacttttatggacggg

SEQ ID NO: 53440 - DNA, 22 bp, synthetic construct
  misc_feature 1..22: note = chemically synthesized
  source 1..22: mol_type = other DNA
ttatggacgggtgggaacaata

SEQ ID NO: 53441 - DNA, 22 bp, synthetic construct
  misc_feature 1..22: note = chemically synthesized
  source 1..22: mol_type = other DNA
tatggacgggtgggaacaatat

SEQ ID NO: 53442 - DNA, 22 bp, synthetic construct
  misc_feature 1..22: note = chemically synthesized
  source 1..22: mol_type = other DNA
atggacgggtgggaacaatatt

SEQ ID NO: 53443 - DNA, 22 bp, synthetic construct
  misc_feature 1..22: note = chemically synthesized
  source 1..22: mol_type = other DNA
tggacgggtgggaacaatattc

SEQ ID NO: 53444 - DNA, 22 bp, synthetic construct
  misc_feature 1..22: note = chemically synthesized
  source 1..22: mol_type = other DNA
aaatctgaaaagcttggttctg

SEQ ID NO: 53445 - DNA, 22 bp, synthetic construct
  misc_feature 1..22: note = chemically synthesized
  source 1..22: mol_type = other DNA
aaaagcttggttctgaaagaat

SEQ ID NO: 53446 - DNA, 22 bp, synthetic construct
  misc_feature 1..22: note = chemically synthesized
  source 1..22: mol_type = other DNA
ggttctgaaagaatctggctca

SEQ ID NO: 53447 - DNA, 22 bp, synthetic construct
  misc_feature 1..22: note = chemically synthesized
  source 1..22: mol_type = other DNA
gttctgaaagaatctggctcac

SEQ ID NO: 53448 - DNA, 22 bp, synthetic construct
  misc_feature 1..22: note = chemically synthesized
  source 1..22: mol_type = other DNA
tgaaagaatctggctcactatt

SEQ ID NO: 53449 - DNA, 22 bp, synthetic construct
  misc_feature 1..22: note = chemically synthesized
  source 1..22: mol_type = other DNA
aaagaatctggctcactattgt

SEQ ID NO: 53450 - DNA, 22 bp, synthetic construct
  misc_feature 1..22: note = chemically synthesized
  source 1..22: mol_type = other DNA
gctcactattgttacctgaagg

SEQ ID NO: 53451 - DNA, 22 bp, synthetic construct
  misc_feature 1..22: note = chemically synthesized
  source 1..22: mol_type = other DNA
actattgttacctgaaggggct

SEQ ID NO: 53452 - DNA, 22 bp, synthetic construct
  misc_feature 1..22: note = chemically synthesized
  source 1..22: mol_type = other DNA
ttgttacctgaaggggcttttc

SEQ ID NO: 53453 - DNA, 22 bp, synthetic construct
  misc_feature 1..22: note = chemically synthesized
  source 1..22: mol_type = other DNA
ttacctgaaggggcttttcttt

SEQ ID NO: 53454 - DNA, 22 bp, synthetic construct
  misc_feature 1..22: note = chemically synthesized
  source 1..22: mol_type = other DNA
cctgaaggggcttttcttttat

SEQ ID NO: 53455 - DNA, 22 bp, synthetic construct
  misc_feature 1..22: note = chemically synthesized
  source 1..22: mol_type = other DNA
aaggggcttttcttttatttat

SEQ ID NO: 53456 - DNA, 22 bp, synthetic construct
  misc_feature 1..22: note = chemically synthesized
  source 1..22: mol_type = other DNA
ttcttttatttatttatttttc

SEQ ID NO: 53457 - DNA, 22 bp, synthetic construct
  misc_feature 1..22: note = chemically synthesized
  source 1..22: mol_type = other DNA
tcttttatttatttatttttca

SEQ ID NO: 53458 - DNA, 22 bp, synthetic construct
  misc_feature 1..22: note = chemically synthesized
  source 1..22: mol_type = other DNA
cttttatttatttatttttcaa

SEQ ID NO: 53459 - DNA, 22 bp, synthetic construct
  misc_feature 1..22: note = chemically synthesized
  source 1..22: mol_type = other DNA
ttttatttatttatttttcaaa

SEQ ID NO: 53460 - DNA, 22 bp, synthetic construct
  misc_feature 1..22: note = chemically synthesized
  source 1..22: mol_type = other DNA
ttatttatttatttttcaaagg

SEQ ID NO: 53461 - DNA, 22 bp, synthetic construct
  misc_feature 1..22: note = chemically synthesized
  source 1..22: mol_type = other DNA
tatttatttatttttcaaaggc

SEQ ID NO: 53462 - DNA, 22 bp, synthetic construct
  misc_feature 1..22: note = chemically synthesized
  source 1..22: mol_type = other DNA
atttatttatttttcaaaggcc

SEQ ID NO: 53463 - DNA, 22 bp, synthetic construct
  misc_feature 1..22: note = chemically synthesized
  source 1..22: mol_type = other DNA
tttatttatttttcaaaggcct

SEQ ID NO: 53464 - DNA, 22 bp, synthetic construct
  misc_feature 1..22: note = chemically synthesized
  source 1..22: mol_type = other DNA
atttatttttcaaaggcctccc

SEQ ID NO: 53465 - DNA, 22 bp, synthetic construct
  misc_feature 1..22: note = chemically synthesized
  source 1..22: mol_type = other DNA
tttatttttcaaaggcctccca

SEQ ID NO: 53466 - DNA, 22 bp, synthetic construct
  misc_feature 1..22: note = chemically synthesized
  source 1..22: mol_type = other DNA
atttttcaaaggcctcccagtt

SEQ ID NO: 53467 - DNA, 22 bp, synthetic construct
  misc_feature 1..22: note = chemically synthesized
  source 1..22: mol_type = other DNA
tttttcaaaggcctcccagttg

SEQ ID NO: 53468 - DNA, 22 bp, synthetic construct
  misc_feature 1..22: note = chemically synthesized
  source 1..22: mol_type = other DNA
ttcaaaggcctcccagttgcac

SEQ ID NO: 53469 - DNA, 22 bp, synthetic construct
  misc_feature 1..22: note = chemically synthesized
  source 1..22: mol_type = other DNA
tcaaaggcctcccagttgcact

SEQ ID NO: 53470 - DNA, 22 bp, synthetic construct
  misc_feature 1..22: note = chemically synthesized
  source 1..22: mol_type = other DNA
caaaggcctcccagttgcactt

SEQ ID NO: 53471 - DNA, 22 bp, synthetic construct
  misc_feature 1..22: note = chemically synthesized
  source 1..22: mol_type = other DNA
aaaggcctcccagttgcacttt

SEQ ID NO: 53472 - DNA, 22 bp, synthetic construct
  misc_feature 1..22: note = chemically synthesized
  source 1..22: mol_type = other DNA
ccagttgcactttcttcttccc

SEQ ID NO: 53473 - DNA, 22 bp, synthetic construct
  misc_feature 1..22: note = chemically synthesized
  source 1..22: mol_type = other DNA
cactttcttcttccctctcttc

SEQ ID NO: 53474 - DNA, 22 bp, synthetic construct
  misc_feature 1..22: note = chemically synthesized
  source 1..22: mol_type = other DNA
tcttcttccctctcttcacctt

SEQ ID NO: 53475 - DNA, 22 bp, synthetic construct
  misc_feature 1..22: note = chemically synthesized
  source 1..22: mol_type = other DNA
cttcttccctctcttcaccttc

SEQ ID NO: 53476 - DNA, 22 bp, synthetic construct
  misc_feature 1..22: note = chemically synthesized
  source 1..22: mol_type = other DNA
ttcttccctctcttcaccttcc

SEQ ID NO: 53477 - DNA, 22 bp, synthetic construct
  misc_feature 1..22: note = chemically synthesized
  source 1..22: mol_type = other DNA
cttccctctcttcaccttccct

SEQ ID NO: 53478 - DNA, 22 bp, synthetic construct
  misc_feature 1..22: note = chemically synthesized
  source 1..22: mol_type = other DNA
ttccctctcttcaccttccctc

SEQ ID NO: 53479 - DNA, 22 bp, synthetic construct
  misc_feature 1..22: note = chemically synthesized
  source 1..22: mol_type = other DNA
ccctctcttcaccttccctcca

SEQ ID NO: 53480 - DNA, 22 bp, synthetic construct
  misc_feature 1..22: note = chemically synthesized
  source 1..22: mol_type = other DNA
cctctcttcaccttccctccaa

SEQ ID NO: 53481 - DNA, 22 bp, synthetic construct
  misc_feature 1..22: note = chemically synthesized
  source 1..22: mol_type = other DNA
tcttcaccttccctccaaccgt

SEQ ID NO: 53482 - DNA, 22 bp, synthetic construct
  misc_feature 1..22: note = chemically synthesized
  source 1..22: mol_type = other DNA
ttcaccttccctccaaccgtcc

SEQ ID NO: 53483 - DNA, 22 bp, synthetic construct
  misc_feature 1..22: note = chemically synthesized
  source 1..22: mol_type = other DNA
caccttccctccaaccgtcccc

SEQ ID NO: 53484 - DNA, 22 bp, synthetic construct
  misc_feature 1..22: note = chemically synthesized
  source 1..22: mol_type = other DNA
accttccctccaaccgtccccc

SEQ ID NO: 53485 - DNA, 22 bp, synthetic construct
  misc_feature 1..22: note = chemically synthesized
  source 1..22: mol_type = other DNA
ccctccaaccgtcccccacgtc

SEQ ID NO: 53486 - DNA, 22 bp, synthetic construct
  misc_feature 1..22: note = chemically synthesized
  source 1..22: mol_type = other DNA
cctccaaccgtcccccacgtcg

SEQ ID NO: 53487 - DNA, 22 bp, synthetic construct
  misc_feature 1..22: note = chemically synthesized
  source 1..22: mol_type = other DNA
caaccgtcccccacgtcgtcct

SEQ ID NO: 53488 - DNA, 22 bp, synthetic construct
  misc_feature 1..22: note = chemically synthesized
  source 1..22: mol_type = other DNA
ccccgccaccccccaagaagac

SEQ ID NO: 53489 - DNA, 22 bp, synthetic construct
  misc_feature 1..22: note = chemically synthesized
  source 1..22: mol_type = other DNA
ttttggtgactccaaggctggt

SEQ ID NO: 53490 - DNA, 22 bp, synthetic construct
  misc_feature 1..22: note = chemically synthesized
  source 1..22: mol_type = other DNA
ttggtgactccaaggctggttt

SEQ ID NO: 53491 - DNA, 22 bp, synthetic construct
  misc_feature 1..22: note = chemically synthesized
  source 1..22: mol_type = other DNA
tggtgactccaaggctggttta

SEQ ID NO: 53492 - DNA, 22 bp, synthetic construct
  misc_feature 1..22: note = chemically synthesized
  source 1..22: mol_type = other DNA
ggtgactccaaggctggtttaa

SEQ ID NO: 53493 - DNA, 22 bp, synthetic construct
  misc_feature 1..22: note = chemically synthesized
  source 1..22: mol_type = other DNA
gtgactccaaggctggtttaac

SEQ ID NO: 53494 - DNA, 22 bp, synthetic construct
  misc_feature 1..22: note = chemically synthesized
  source 1..22: mol_type = other DNA
caaggctggtttaacaagacaa

SEQ ID NO: 53495 - DNA, 22 bp, synthetic construct
  misc_feature 1..22: note = chemically synthesized
  source 1..22: mol_type = other DNA
gtttaacaagacaaaaagcaga

SEQ ID NO: 53496 - DNA, 22 bp, synthetic construct
  misc_feature 1..22: note = chemically synthesized
  source 1..22: mol_type = other DNA
aacaagacaaaaagcagactgt

SEQ ID NO: 53497 - DNA, 22 bp, synthetic construct
  misc_feature 1..22: note = chemically synthesized
  source 1..22: mol_type = other DNA
acaagacaaaaagcagactgtg

SEQ ID NO: 53498 - DNA, 22 bp, synthetic construct
  misc_feature 1..22: note = chemically synthesized
  source 1..22: mol_type = other DNA
tggtggaatagagatgctgacc

SEQ ID NO: 53499 - DNA, 22 bp, synthetic construct
  misc_feature 1..22: note = chemically synthesized
  source 1..22: mol_type = other DNA
acctgctctgaagaactcagtg

SEQ ID NO: 53500 - DNA, 22 bp, synthetic construct
  misc_feature 1..22: note = chemically synthesized
  source 1..22: mol_type = other DNA
ctctgaagaactcagtgaaaag

SEQ ID NO: 53501 - DNA, 22 bp, synthetic construct
  misc_feature 1..22: note = chemically synthesized
  source 1..22: mol_type = other DNA
tgaagaactcagtgaaaagggg

SEQ ID NO: 53502 - DNA, 22 bp, synthetic construct
  misc_feature 1..22: note = chemically synthesized
  source 1..22: mol_type = other DNA
aagaactcagtgaaaaggggaa

SEQ ID NO: 53503 - DNA, 22 bp, synthetic construct
  misc_feature 1..22: note = chemically synthesized
  source 1..22: mol_type = other DNA
agtgaaaaggggaaatggtgtc

SEQ ID NO: 53504 - DNA, 22 bp, synthetic construct
  misc_feature 1..22: note = chemically synthesized
  source 1..22: mol_type = other DNA
cagagcttaacttctagtgaat

SEQ ID NO: 53505 - DNA, 22 bp, synthetic construct
  misc_feature 1..22: note = chemically synthesized
  source 1..22: mol_type = other DNA
aacttctagtgaatcctcccgc

SEQ ID NO: 53506 - DNA, 22 bp, synthetic construct
  misc_feature 1..22: note = chemically synthesized
  source 1..22: mol_type = other DNA
acttctagtgaatcctcccgct

SEQ ID NO: 53507 - DNA, 22 bp, synthetic construct
  misc_feature 1..22: note = chemically synthesized
  source 1..22: mol_type = other DNA
ctagtgaatcctcccgcttctt

SEQ ID NO: 53508 - DNA, 22 bp, synthetic construct
  misc_feature 1..22: note = chemically synthesized
  source 1..22: mol_type = other DNA
tagtgaatcctcccgcttctta

SEQ ID NO: 53509 - DNA, 22 bp, synthetic construct
  misc_feature 1..22: note = chemically synthesized
  source 1..22: mol_type = other DNA
gtgaatcctcccgcttcttaaa

SEQ ID NO: 53510 - DNA, 22 bp, synthetic construct
  misc_feature 1..22: note = chemically synthesized
  source 1..22: mol_type = other DNA
ccgcttcttaaacagaatttga

SEQ ID NO: 53511 - DNA, 22 bp, synthetic construct
  misc_feature 1..22: note = chemically synthesized
  source 1..22: mol_type = other DNA
cttaaacagaatttgaggtctc

SEQ ID NO: 53512 - DNA, 22 bp, synthetic construct
  misc_feature 1..22: note = chemically synthesized
  source 1..22: mol_type = other DNA
ttaaacagaatttgaggtctcc

SEQ ID NO: 53513 - DNA, 22 bp, synthetic construct
  misc_feature 1..22: note = chemically synthesized
  source 1..22: mol_type = other DNA
aaacagaatttgaggtctccct

SEQ ID NO: 53514 - DNA, 22 bp, synthetic construct
  misc_feature 1..22: note = chemically synthesized
  source 1..22: mol_type = other DNA
aacagaatttgaggtctccctc

SEQ ID NO: 53515 - DNA, 22 bp, synthetic construct
  misc_feature 1..22: note = chemically synthesized
  source 1..22: mol_type = other DNA
gaggtctccctcccacaaactg

SEQ ID NO: 53516 - DNA, 22 bp, synthetic construct
  misc_feature 1..22: note = chemically synthesized
  source 1..22: mol_type = other DNA
aggtctccctcccacaaactgg

SEQ ID NO: 53517 - DNA, 22 bp, synthetic construct
  misc_feature 1..22: note = chemically synthesized
  source 1..22: mol_type = other DNA
cctcccacaaactggagggaaa

SEQ ID NO: 53518 - DNA, 22 bp, synthetic construct
  misc_feature 1..22: note = chemically synthesized
  source 1..22: mol_type = other DNA
ccacaaactggagggaaacaac

SEQ ID NO: 53519 - DNA, 22 bp, synthetic construct
  misc_feature 1..22: note = chemically synthesized
  source 1..22: mol_type = other DNA
gagggaaacaacaacaaacaac

SEQ ID NO: 53520 - DNA, 22 bp, synthetic construct
  misc_feature 1..22: note = chemically synthesized
  source 1..22: mol_type = other DNA
acacaatcccagtacagcccac

SEQ ID NO: 53521 - DNA, 22 bp, synthetic construct
  misc_feature 1..22: note = chemically synthesized
  source 1..22: mol_type = other DNA
tctcaatgttgagcatcaaaac

SEQ ID NO: 53522 - DNA, 22 bp, synthetic construct
  misc_feature 1..22: note = chemically synthesized
  source 1..22: mol_type = other DNA
tcaatgttgagcatcaaaacct

SEQ ID NO: 53523 - DNA, 22 bp, synthetic construct
  misc_feature 1..22: note = chemically synthesized
  source 1..22: mol_type = other DNA
aatgttgagcatcaaaacctcc

SEQ ID NO: 53524 - DNA, 22 bp, synthetic construct
  misc_feature 1..22: note = chemically synthesized
  source 1..22: mol_type = other DNA
agcatcaaaacctccttttctt

SEQ ID NO: 53525 - DNA, 22 bp, synthetic construct
  misc_feature 1..22: note = chemically synthesized
  source 1..22: mol_type = other DNA
cttttcttccttagaggggtcc

SEQ ID NO: 53526 - DNA, 22 bp, synthetic construct
  misc_feature 1..22: note = chemically synthesized
  source 1..22: mol_type = other DNA
ttcttccttagaggggtccgaa

SEQ ID NO: 53527 - DNA, 22 bp, synthetic construct
  misc_feature 1..22: note = chemically synthesized
  source 1..22: mol_type = other DNA
tcttccttagaggggtccgaag

SEQ ID NO: 53528 - DNA, 22 bp, synthetic construct
  misc_feature 1..22: note = chemically synthesized
  source 1..22: mol_type = other DNA
cttccttagaggggtccgaagc

SEQ ID NO: 53529 - DNA, 22 bp, synthetic construct
  misc_feature 1..22: note = chemically synthesized
  source 1..22: mol_type = other DNA
ttccttagaggggtccgaagct

SEQ ID NO: 53530 - DNA, 22 bp, synthetic construct
  misc_feature 1..22: note = chemically synthesized
  source 1..22: mol_type = other DNA
ccttagaggggtccgaagctcc

SEQ ID NO: 53531 - DNA, 22 bp, synthetic construct
  misc_feature 1..22: note = chemically synthesized
  source 1..22: mol_type = other DNA
cttagaggggtccgaagctccg

SEQ ID NO: 53532 - DNA, 22 bp, synthetic construct
  misc_feature 1..22: note = chemically synthesized
  source 1..22: mol_type = other DNA
agaggggtccgaagctccgccg

SEQ ID NO: 53533 - DNA, 22 bp, synthetic construct
  misc_feature 1..22: note = chemically synthesized
  source 1..22: mol_type = other DNA
gaggggtccgaagctccgccga

SEQ ID NO: 53534 - DNA, 22 bp, synthetic construct
  misc_feature 1..22: note = chemically synthesized
  source 1..22: mol_type = other DNA
cgccgagctaggcaagccagtc

SEQ ID NO: 53535 - DNA, 22 bp, synthetic construct
  misc_feature 1..22: note = chemically synthesized
  source 1..22: mol_type = other DNA
ggcaagccagtcattttctaac

SEQ ID NO: 53536 - DNA, 22 bp, synthetic construct
  misc_feature 1..22: note = chemically synthesized
  source 1..22: mol_type = other DNA
tctaacacagtagacttgaaac

SEQ ID NO: 53537 - DNA, 22 bp, synthetic construct
  misc_feature 1..22: note = chemically synthesized
  source 1..22: mol_type = other DNA
ctaacacagtagacttgaaact

SEQ ID NO: 53538 - DNA, 22 bp, synthetic construct
  misc_feature 1..22: note = chemically synthesized
  source 1..22: mol_type = other DNA
taacacagtagacttgaaactt

SEQ ID NO: 53539 - DNA, 22 bp, synthetic construct
  misc_feature 1..22: note = chemically synthesized
  source 1..22: mol_type = other DNA
acacagtagacttgaaacttta

SEQ ID NO: 53540 - DNA, 22 bp, synthetic construct
  misc_feature 1..22: note = chemically synthesized
  source 1..22: mol_type = other DNA
gaaactttactaagacgaaaca

SEQ ID NO: 53541 - DNA, 22 bp, synthetic construct
  misc_feature 1..22: note = chemically synthesized
  source 1..22: mol_type = other DNA
aaactttactaagacgaaacag

SEQ ID NO: 53542 - DNA, 22 bp, synthetic construct
  misc_feature 1..22: note = chemically synthesized
  source 1..22: mol_type = other DNA
tactaagacgaaacaggaataa

SEQ ID NO: 53543 - DNA, 22 bp, synthetic construct
  misc_feature 1..22: note = chemically synthesized
  source 1..22: mol_type = other DNA
actaagacgaaacaggaataaa

SEQ ID NO: 53544 - DNA, 22 bp, synthetic construct
  misc_feature 1..22: note = chemically synthesized
  source 1..22: mol_type = other DNA
ctaagacgaaacaggaataaac

SEQ ID NO: 53545 - DNA, 22 bp, synthetic construct
  misc_feature 1..22: note = chemically synthesized
  source 1..22: mol_type = other DNA
agacgaaacaggaataaacagc

SEQ ID NO: 53546 - DNA, 22 bp, synthetic construct
  misc_feature 1..22: note = chemically synthesized
  source 1..22: mol_type = other DNA
gccggcagggctgcgggatggg

SEQ ID NO: 53547 - DNA, 22 bp, synthetic construct
  misc_feature 1..22: note = chemically synthesized
  source 1..22: mol_type = other DNA
ccggcagggctgcgggatgggt

SEQ ID NO: 53548 - DNA, 22 bp, synthetic construct
  misc_feature 1..22: note = chemically synthesized
  source 1..22: mol_type = other DNA
cgggatgggtgagcgcgtgcaa

SEQ ID NO: 53549 - DNA, 22 bp, synthetic construct
  misc_feature 1..22: note = chemically synthesized
  source 1..22: mol_type = other DNA
gcttaaaacaataaagcccccc

SEQ ID NO: 53550 - DNA, 22 bp, synthetic construct
  misc_feature 1..22: note = chemically synthesized
  source 1..22: mol_type = other DNA
aaaacaataaagcccccccacc

SEQ ID NO: 53551 - DNA, 22 bp, synthetic construct
  misc_feature 1..22: note = chemically synthesized
  source 1..22: mol_type = other DNA
aaacaataaagcccccccaccg

SEQ ID NO: 53552 - DNA, 22 bp, synthetic construct
  misc_feature 1..22: note = chemically synthesized
  source 1..22: mol_type = other DNA
acggaagcgacaccctttagac

SEQ ID NO: 53553 - DNA, 22 bp, synthetic construct
  misc_feature 1..22: note = chemically synthesized
  source 1..22: mol_type = other DNA
cggaagcgacaccctttagact

SEQ ID NO: 53554 - DNA, 22 bp, synthetic construct
  misc_feature 1..22: note = chemically synthesized
  source 1..22: mol_type = other DNA
tagactgaagagggggatgaga

SEQ ID NO: 53555 - DNA, 22 bp, synthetic construct
  misc_feature 1..22: note = chemically synthesized
  source 1..22: mol_type = other DNA
agactgaagagggggatgagaa

SEQ ID NO: 53556 - DNA, 22 bp, synthetic construct
  misc_feature 1..22: note = chemically synthesized
  source 1..22: mol_type = other DNA
gactgaagagggggatgagaag

SEQ ID NO: 53557 - DNA, 22 bp, synthetic construct
  misc_feature 1..22: note = chemically synthesized
  source 1..22: mol_type = other DNA
aagagggggatgagaagacggg

SEQ ID NO: 53558 - DNA, 22 bp, synthetic construct
  misc_feature 1..22: note = chemically synthesized
  source 1..22: mol_type = other DNA
tggaaccgctccgaggagaggg

SEQ ID NO: 53559 - DNA, 22 bp, synthetic construct
  misc_feature 1..22: note = chemically synthesized
  source 1..22: mol_type = other DNA
cgaggagagggaaggagggctc

SEQ ID NO: 53560 - DNA, 22 bp, synthetic construct
  misc_feature 1..22: note = chemically synthesized
  source 1..22: mol_type = other DNA
ctcgctctgcagacacactcac

SEQ ID NO: 53561 - DNA, 22 bp, synthetic construct
  misc_feature 1..22: note = chemically synthesized
  source 1..22: mol_type = other DNA
gctctgcagacacactcacaca

SEQ ID NO: 53562 - DNA, 22 bp, synthetic construct
  misc_feature 1..22: note = chemically synthesized
  source 1..22: mol_type = other DNA
tgcagacacactcacacatatc

SEQ ID NO: 53563 - DNA, 22 bp, synthetic construct
  misc_feature 1..22: note = chemically synthesized
  source 1..22: mol_type = other DNA
cagacacactcacacatatcca

SEQ ID NO: 53564 - DNA, 22 bp, synthetic construct
  misc_feature 1..22: note = chemically synthesized
  source 1..22: mol_type = other DNA
acacatatccacctgcagctca

SEQ ID NO: 53565 - DNA, 22 bp, synthetic construct
  misc_feature 1..22: note = chemically synthesized
  source 1..22: mol_type = other DNA
cagctcagggtctcgcgggcca

SEQ ID NO: 53566 - DNA, 22 bp, synthetic construct
  misc_feature 1..22: note = chemically synthesized
  source 1..22: mol_type = other DNA
agggtctcgcgggccatggcga

SEQ ID NO: 53567 - DNA, 22 bp, synthetic construct
  misc_feature 1..22: note = chemically synthesized
  source 1..22: mol_type = other DNA
gcgggccatggcgacccgtctc

SEQ ID NO: 53568 - DNA, 22 bp, synthetic construct
  misc_feature 1..22: note = chemically synthesized
  source 1..22: mol_type = other DNA
caccctgcaccctccgcacctc

SEQ ID NO: 53569 - DNA, 22 bp, synthetic construct
  misc_feature 1..22: note = chemically synthesized
  source 1..22: mol_type = other DNA
caccctccgcacctcccttgga

SEQ ID NO: 53570 - DNA, 22 bp, synthetic construct
  misc_feature 1..22: note = chemically synthesized
  source 1..22: mol_type = other DNA
cgcacctcccttggacctgagt

SEQ ID NO: 53571 - DNA, 22 bp, synthetic construct
  misc_feature 1..22: note = chemically synthesized
  source 1..22: mol_type = other DNA
ccttggacctgagtccattctc

SEQ ID NO: 53572 - DNA, 22 bp, synthetic construct
  misc_feature 1..22: note = chemically synthesized
  source 1..22: mol_type = other DNA
ggacctgagtccattctcctct

SEQ ID NO: 53573 - DNA, 22 bp, synthetic construct
  misc_feature 1..22: note = chemically synthesized
  source 1..22: mol_type = other DNA
gacctgagtccattctcctctc

SEQ ID NO: 53574 - DNA, 22 bp, synthetic construct
  misc_feature 1..22: note = chemically synthesized
  source 1..22: mol_type = other DNA
agtccattctcctctcccccca

SEQ ID NO: 53575 - DNA, 22 bp, synthetic construct
  misc_feature 1..22: note = chemically synthesized
  source 1..22: mol_type = other DNA
tcctctccccccaactccttcc

SEQ ID NO: 53576 - DNA, 22 bp, synthetic construct
  misc_feature 1..22: note = chemically synthesized
  source 1..22: mol_type = other DNA
ctctccccccaactccttccag

SEQ ID NO: 53577 - DNA, 22 bp, synthetic construct
  misc_feature 1..22: note = chemically synthesized
  source 1..22: mol_type = other DNA
tccccccaactccttccagatt

SEQ ID NO: 53578 - DNA, 22 bp, synthetic construct
  misc_feature 1..22: note = chemically synthesized
  source 1..22: mol_type = other DNA
cccccaactccttccagatttg

SEQ ID NO: 53579 - DNA, 22 bp, synthetic construct
  misc_feature 1..22: note = chemically synthesized
  source 1..22: mol_type = other DNA
cttccagatttggaatcggact

SEQ ID NO: 53580 - DNA, 22 bp, synthetic construct
  misc_feature 1..22: note = chemically synthesized
  source 1..22: mol_type = other DNA
ccagatttggaatcggactgcg

SEQ ID NO: 53581 - DNA, 22 bp, synthetic construct
  misc_feature 1..22: note = chemically synthesized
  source 1..22: mol_type = other DNA
cagatttggaatcggactgcga

SEQ ID NO: 53582 - DNA, 22 bp, synthetic construct
  misc_feature 1..22: note = chemically synthesized
  source 1..22: mol_type = other DNA
ggaatcggactgcgatctcccc

SEQ ID NO: 53583 - DNA, 22 bp, synthetic construct
  misc_feature 1..22: note = chemically synthesized
  source 1..22: mol_type = other DNA
gaatcggactgcgatctccccg

SEQ ID NO: 53584 - DNA, 22 bp, synthetic construct
  misc_feature 1..22: note = chemically synthesized
  source 1..22: mol_type = other DNA
cgatctccccggcggcggcggc

SEQ ID NO: 53585 - DNA, 22 bp, synthetic construct
  misc_feature 1..22: note = chemically synthesized
  source 1..22: mol_type = other DNA
cccggcggcggcggcggcggct

SEQ ID NO: 53586 - DNA, 22 bp, synthetic construct
  misc_feature 1..22: note = chemically synthesized
  source 1..22: mol_type = other DNA
cagagtggtgctggcaggcagg

SEQ ID NO: 53587 - DNA, 22 bp, synthetic construct
  misc_feature 1..22: note = chemically synthesized
  source 1..22: mol_type = other DNA
gcaggcagggaggctgggaggc

SEQ ID NO: 53588 - DNA, 22 bp, synthetic construct
  misc_feature 1..22: note = chemically synthesized
  source 1..22: mol_type = other DNA
ggaggcgggaggcgccagggga

SEQ ID NO: 53589 - DNA, 22 bp, synthetic construct
  misc_feature 1..22: note = chemically synthesized
  source 1..22: mol_type = other DNA
tacaggcacgtttctgaataaa

SEQ ID NO: 53590 - DNA, 22 bp, synthetic construct
  misc_feature 1..22: note = chemically synthesized
  source 1..22: mol_type = other DNA
acaggcacgtttctgaataaac

SEQ ID NO: 53591 - DNA, 22 bp, synthetic construct
  misc_feature 1..22: note = chemically synthesized
  source 1..22: mol_type = other DNA
caggcacgtttctgaataaact

SEQ ID NO: 53592 - DNA, 22 bp, synthetic construct
  misc_feature 1..22: note = chemically synthesized
  source 1..22: mol_type = other DNA
ctgaataaactttccaatcgca

SEQ ID NO: 53593 - DNA, 22 bp, synthetic construct
  misc_feature 1..22: note = chemically synthesized
  source 1..22: mol_type = other DNA
tgaataaactttccaatcgcag

SEQ ID NO: 53594 - DNA, 22 bp, synthetic construct
  misc_feature 1..22: note = chemically synthesized
  source 1..22: mol_type = other DNA
aataaactttccaatcgcaggg

SEQ ID NO: 53595 - DNA, 22 bp, synthetic construct
  misc_feature 1..22: note = chemically synthesized
  source 1..22: mol_type = other DNA
tccaatcgcagggggtgctgtt

SEQ ID NO: 53596 - DNA, 22 bp, synthetic construct
  misc_feature 1..22: note = chemically synthesized
  source 1..22: mol_type = other DNA
ccaatcgcagggggtgctgttg

SEQ ID NO: 53597 - DNA, 22 bp, synthetic construct
  misc_feature 1..22: note = chemically synthesized
  source 1..22: mol_type = other DNA
caatcgcagggggtgctgttgc

SEQ ID NO: 53598 - DNA, 22 bp, synthetic construct
  misc_feature 1..22: note = chemically synthesized
  source 1..22: mol_type = other DNA
ttgctgtacattttacgtaaaa

SEQ ID NO: 53599 - DNA, 22 bp, synthetic construct
  misc_feature 1..22: note = chemically synthesized
  source 1..22: mol_type = other DNA
ctgtacattttacgtaaaactg

SEQ ID NO: 53600 - DNA, 22 bp, synthetic construct
  misc_feature 1..22: note = chemically synthesized
  source 1..22: mol_type = other DNA
tacattttacgtaaaactgaaa

SEQ ID NO: 53601 - DNA, 22 bp, synthetic construct
  misc_feature 1..22: note = chemically synthesized
  source 1..22: mol_type = other DNA
tacgtaaaactgaaagtatccc

SEQ ID NO: 53602 - DNA, 22 bp, synthetic construct
  misc_feature 1..22: note = chemically synthesized
  source 1..22: mol_type = other DNA
acgtaaaactgaaagtatccca

SEQ ID NO: 53603 - DNA, 22 bp, synthetic construct
  misc_feature 1..22: note = chemically synthesized
  source 1..22: mol_type = other DNA
cgtaaaactgaaagtatcccac

SEQ ID NO: 53604 - DNA, 22 bp, synthetic construct
  misc_feature 1..22: note = chemically synthesized
  source 1..22: mol_type = other DNA
aaagtatcccacgccagagtga

SEQ ID NO: 53605 - DNA, 22 bp, synthetic construct
  misc_feature 1..22: note = chemically synthesized
  source 1..22: mol_type = other DNA
tttgacagcggcagcacgcgcg

SEQ ID NO: 53606 - DNA, 22 bp, synthetic construct
  misc_feature 1..22: note = chemically synthesized
  source 1..22: mol_type = other DNA
ttgacagcggcagcacgcgcgt

SEQ ID NO: 53607 - DNA, 22 bp, synthetic construct
  misc_feature 1..22: note = chemically synthesized
  source 1..22: mol_type = other DNA
tgacagcggcagcacgcgcgtg

SEQ ID NO: 53608 - DNA, 22 bp, synthetic construct
  misc_feature 1..22: note = chemically synthesized
  source 1..22: mol_type = other DNA
gacagcggcagcacgcgcgtgt

SEQ ID NO: 53609 - DNA, 22 bp, synthetic construct
  misc_feature 1..22: note = chemically synthesized
  source 1..22: mol_type = other DNA
acagcggcagcacgcgcgtgtg

SEQ ID NO: 53610 - DNA, 22 bp, synthetic construct
  misc_feature 1..22: note = chemically synthesized
  source 1..22: mol_type = other DNA
aagagacagggttttatttcca

SEQ ID NO: 53611 - DNA, 22 bp, synthetic construct
  misc_feature 1..22: note = chemically synthesized
  source 1..22: mol_type = other DNA
tatttccaacaggtcttcccta

SEQ ID NO: 53612 - DNA, 22 bp, synthetic construct
  misc_feature 1..22: note = chemically synthesized
  source 1..22: mol_type = other DNA
atttccaacaggtcttccctaa

SEQ ID NO: 53613 - DNA, 22 bp, synthetic construct
  misc_feature 1..22: note = chemically synthesized
  source 1..22: mol_type = other DNA
tttccaacaggtcttccctaat

SEQ ID NO: 53614 - DNA, 22 bp, synthetic construct
  misc_feature 1..22: note = chemically synthesized
  source 1..22: mol_type = other DNA
ccaacaggtcttccctaatttc

SEQ ID NO: 53615 - DNA, 22 bp, synthetic construct
  misc_feature 1..22: note = chemically synthesized
  source 1..22: mol_type = other DNA
caacaggtcttccctaatttcc

SEQ ID NO: 53616 - DNA, 22 bp, synthetic construct
  misc_feature 1..22: note = chemically synthesized
  source 1..22: mol_type = other DNA
ccctaatttccagggaacgtct

SEQ ID NO: 53617 - DNA, 22 bp, synthetic construct
  misc_feature 1..22: note = chemically synthesized
  source 1..22: mol_type = other DNA
cctaatttccagggaacgtctg

SEQ ID NO: 53618 - DNA, 22 bp, synthetic construct
  misc_feature 1..22: note = chemically synthesized
  source 1..22: mol_type = other DNA
atttccagggaacgtctgcaga

SEQ ID NO: 53619 - DNA, 22 bp, synthetic construct
  misc_feature 1..22: note = chemically synthesized
  source 1..22: mol_type = other DNA
ccagggaacgtctgcagaaagg

SEQ ID NO: 53620 - DNA, 22 bp, synthetic construct
  misc_feature 1..22: note = chemically synthesized
  source 1..22: mol_type = other DNA
cagggaacgtctgcagaaaggc

SEQ ID NO: 53621 - DNA, 22 bp, synthetic construct
  misc_feature 1..22: note = chemically synthesized
  source 1..22: mol_type = other DNA
cagaaaggcgagagggggctgc

SEQ ID NO: 53622 - DNA, 22 bp, synthetic construct
  misc_feature 1..22: note = chemically synthesized
  source 1..22: mol_type = other DNA
ctggctcctgggtgtgcgcctt

SEQ ID NO: 53623 - DNA, 22 bp, synthetic construct
  misc_feature 1..22: note = chemically synthesized
  source 1..22: mol_type = other DNA
gctcctgggtgtgcgccttggc

SEQ ID NO: 53624 - DNA, 22 bp, synthetic construct
  misc_feature 1..22: note = chemically synthesized
  source 1..22: mol_type = other DNA
ctgggtgtgcgccttggccggc

SEQ ID NO: 53625 - DNA, 22 bp, synthetic construct
  misc_feature 1..22: note = chemically synthesized
  source 1..22: mol_type = other DNA
ggtgtgcgccttggccggcggc

SEQ ID NO: 53626 - DNA, 22 bp, synthetic construct
  misc_feature 1..22: note = chemically synthesized
  source 1..22: mol_type = other DNA
ggccggcggcgcctggggagcg

SEQ ID NO: 53627 - DNA, 22 bp, synthetic construct
  misc_feature 1..22: note = chemically synthesized
  source 1..22: mol_type = other DNA
gccggcggcgcctggggagcgc

SEQ ID NO: 53628 - DNA, 22 bp, synthetic construct
  misc_feature 1..22: note = chemically synthesized
  source 1..22: mol_type = other DNA
gggagcgcggcggtgacccgag

SEQ ID NO: 53629 - DNA, 22 bp, synthetic construct
  misc_feature 1..22: note = chemically synthesized
  source 1..22: mol_type = other DNA
accaccgtggtctccccgctgc

SEQ ID NO: 53630 - DNA, 22 bp, synthetic construct
  misc_feature 1..22: note = chemically synthesized
  source 1..22: mol_type = other DNA
cccgctgctcctgcgagcctgt

SEQ ID NO: 53631 - DNA, 22 bp, synthetic construct
  misc_feature 1..22: note = chemically synthesized
  source 1..22: mol_type = other DNA
ctcctgcgagcctgtcgctctc

SEQ ID NO: 53632 - DNA, 22 bp, synthetic construct
  misc_feature 1..22: note = chemically synthesized
  source 1..22: mol_type = other DNA
ctgcgagcctgtcgctctctct

SEQ ID NO: 53633 - DNA, 22 bp, synthetic construct
  misc_feature 1..22: note = chemically synthesized
  source 1..22: mol_type = other DNA
cgagcctgtcgctctctctcca

SEQ ID NO: 53634 - DNA, 22 bp, synthetic construct
  misc_feature 1..22: note = chemically synthesized
  source 1..22: mol_type = other DNA
tcgctctctctccattcccatt

SEQ ID NO: 53635 - DNA, 22 bp, synthetic construct
  misc_feature 1..22: note = chemically synthesized
  source 1..22: mol_type = other DNA
tctctccattcccattttctct

SEQ ID NO: 53636 - DNA, 22 bp, synthetic construct
  misc_feature 1..22: note = chemically synthesized
  source 1..22: mol_type = other DNA
tctccattcccattttctcttt

SEQ ID NO: 53637 - DNA, 22 bp, synthetic construct
  misc_feature 1..22: note = chemically synthesized
  source 1..22: mol_type = other DNA
tccattcccattttctctttcc

SEQ ID NO: 53638 - DNA, 22 bp, synthetic construct
  misc_feature 1..22: note = chemically synthesized
  source 1..22: mol_type = other DNA
cattcccattttctctttccct

SEQ ID NO: 53639 - DNA, 22 bp, synthetic construct
  misc_feature 1..22: note = chemically synthesized
  source 1..22: mol_type = other DNA
ccattttctctttccctgggta

SEQ ID NO: 53640 - DNA, 22 bp, synthetic construct
  misc_feature 1..22: note = chemically synthesized
  source 1..22: mol_type = other DNA
tctctttccctgggtaacagca

SEQ ID NO: 53641 - DNA, 22 bp, synthetic construct
  misc_feature 1..22: note = chemically synthesized
  source 1..22: mol_type = other DNA
ctctttccctgggtaacagcac

SEQ ID NO: 53642 - DNA, 22 bp, synthetic construct
  misc_feature 1..22: note = chemically synthesized
  source 1..22: mol_type = other DNA
tctttccctgggtaacagcaca

SEQ ID NO: 53643 - DNA, 22 bp, synthetic construct
  misc_feature 1..22: note = chemically synthesized
  source 1..22: mol_type = other DNA
tttccctgggtaacagcacagg

SEQ ID NO: 53644 - DNA, 22 bp, synthetic construct
  misc_feature 1..22: note = chemically synthesized
  source 1..22: mol_type = other DNA
tccctgggtaacagcacaggaa

SEQ ID NO: 53645 - DNA, 22 bp, synthetic construct
  misc_feature 1..22: note = chemically synthesized
  source 1..22: mol_type = other DNA
ccctgggtaacagcacaggaac

SEQ ID NO: 53646 - DNA, 22 bp, synthetic construct
  misc_feature 1..22: note = chemically synthesized
  source 1..22: mol_type = other DNA
cctgggtaacagcacaggaaca

SEQ ID NO: 53647 - DNA, 22 bp, synthetic construct
  misc_feature 1..22: note = chemically synthesized
  source 1..22: mol_type = other DNA
ggtaacagcacaggaacagttg

SEQ ID NO: 53648 - DNA, 22 bp, synthetic construct
  misc_feature 1..22: note = chemically synthesized
  source 1..22: mol_type = other DNA
tgctctgcccgtaagaaacatt

SEQ ID NO: 53649 - DNA, 22 bp, synthetic construct
  misc_feature 1..22: note = chemically synthesized
  source 1..22: mol_type = other DNA
tgcccgtaagaaacattttctt

SEQ ID NO: 53650 - DNA, 22 bp, synthetic construct
  misc_feature 1..22: note = chemically synthesized
  source 1..22: mol_type = other DNA
cccgtaagaaacattttcttcc

SEQ ID NO: 53651 - DNA, 22 bp, synthetic construct
  misc_feature 1..22: note = chemically synthesized
  source 1..22: mol_type = other DNA
tcttcccatccctctgtgcttt

SEQ ID NO: 53652 - DNA, 22 bp, synthetic construct
  misc_feature 1..22: note = chemically synthesized
  source 1..22: mol_type = other DNA
cttcccatccctctgtgctttt

SEQ ID NO: 53653 - DNA, 22 bp, synthetic construct
  misc_feature 1..22: note = chemically synthesized
  source 1..22: mol_type = other DNA
ttcccatccctctgtgcttttg

SEQ ID NO: 53654 - DNA, 22 bp, synthetic construct
  misc_feature 1..22: note = chemically synthesized
  source 1..22: mol_type = other DNA
cccatccctctgtgcttttgca

SEQ ID NO: 53655 - DNA, 22 bp, synthetic construct
  misc_feature 1..22: note = chemically synthesized
  source 1..22: mol_type = other DNA
ccatccctctgtgcttttgcag

SEQ ID NO: 53656 - DNA, 22 bp, synthetic construct
  misc_feature 1..22: note = chemically synthesized
  source 1..22: mol_type = other DNA
tgtgcttttgcagttgctctgg

SEQ ID NO: 53657 - DNA, 22 bp, synthetic construct
  misc_feature 1..22: note = chemically synthesized
  source 1..22: mol_type = other DNA
tgcttttgcagttgctctggag

SEQ ID NO: 53658 - DNA, 22 bp, synthetic construct
  misc_feature 1..22: note = chemically synthesized
  source 1..22: mol_type = other DNA
ttgcagttgctctggagtggga

SEQ ID NO: 53659 - DNA, 22 bp, synthetic construct
  misc_feature 1..22: note = chemically synthesized
  source 1..22: mol_type = other DNA
tgcagttgctctggagtgggag

SEQ ID NO: 53660 - DNA, 22 bp, synthetic construct
  misc_feature 1..22: note = chemically synthesized
  source 1..22: mol_type = other DNA
gcagttgctctggagtgggagg

SEQ ID NO: 53661 - DNA, 22 bp, synthetic construct
  misc_feature 1..22: note = chemically synthesized
  source 1..22: mol_type = other DNA
cagttgctctggagtgggaggg

SEQ ID NO: 53662 - DNA, 22 bp, synthetic construct
  misc_feature 1..22: note = chemically synthesized
  source 1..22: mol_type = other DNA
ctctggagtgggagggggtgtg

SEQ ID NO: 53663 - DNA, 22 bp, synthetic construct
  misc_feature 1..22: note = chemically synthesized
  source 1..22: mol_type = other DNA
tggagtgggagggggtgtgtcc

SEQ ID NO: 53664 - DNA, 22 bp, synthetic construct
  misc_feature 1..22: note = chemically synthesized
  source 1..22: mol_type = other DNA
gagtgggagggggtgtgtccct

SEQ ID NO: 53665 - DNA, 22 bp, synthetic construct
  misc_feature 1..22: note = chemically synthesized
  source 1..22: mol_type = other DNA
ccagggacccggctcggggacc

SEQ ID NO: 53666 - DNA, 22 bp, synthetic construct
  misc_feature 1..22: note = chemically synthesized
  source 1..22: mol_type = other DNA
ggggacctcccgcggcgccgtg

SEQ ID NO: 53667 - DNA, 22 bp, synthetic construct
  misc_feature 1..22: note = chemically synthesized
  source 1..22: mol_type = other DNA
ccgcggcgccgtgagcacattc

SEQ ID NO: 53668 - DNA, 22 bp, synthetic construct
  misc_feature 1..22: note = chemically synthesized
  source 1..22: mol_type = other DNA
ccagggactgggactcccggga

SEQ ID NO: 53669 - DNA, 22 bp, synthetic construct
  misc_feature 1..22: note = chemically synthesized
  source 1..22: mol_type = other DNA
ggactcccgggactgcccgcgc

SEQ ID NO: 53670 - DNA, 22 bp, synthetic construct
  misc_feature 1..22: note = chemically synthesized
  source 1..22: mol_type = other DNA
ccgggactgcccgcgctttgtc

SEQ ID NO: 53671 - DNA, 22 bp, synthetic construct
  misc_feature 1..22: note = chemically synthesized
  source 1..22: mol_type = other DNA
cccgcgctttgtcctcggcctc

SEQ ID NO: 53672 - DNA, 22 bp, synthetic construct
  misc_feature 1..22: note = chemically synthesized
  source 1..22: mol_type = other DNA
tgtcctcggcctctcagagagg

SEQ ID NO: 53673 - DNA, 22 bp, synthetic construct
  misc_feature 1..22: note = chemically synthesized
  source 1..22: mol_type = other DNA
gtcctcggcctctcagagaggt

SEQ ID NO: 53674 - DNA, 22 bp, synthetic construct
  misc_feature 1..22: note = chemically synthesized
  source 1..22: mol_type = other DNA
tcctcggcctctcagagaggtg

SEQ ID NO: 53675 - DNA, 22 bp, synthetic construct
  misc_feature 1..22: note = chemically synthesized
  source 1..22: mol_type = other DNA
ggcctctcagagaggtggacgc

SEQ ID NO: 53676 - DNA, 22 bp, synthetic construct
  misc_feature 1..22: note = chemically synthesized
  source 1..22: mol_type = other DNA
tcagagaggtggacgcctcggt

SEQ ID NO: 53677 - DNA, 22 bp, synthetic construct
  misc_feature 1..22: note = chemically synthesized
  source 1..22: mol_type = other DNA
agagaggtggacgcctcggtgc

SEQ ID NO: 53678 - DNA, 22 bp, synthetic construct
  misc_feature 1..22: note = chemically synthesized
  source 1..22: mol_type = other DNA
ggtgcctctcttgcccaggccc

SEQ ID NO: 53679 - DNA, 22 bp, synthetic construct
  misc_feature 1..22: note = chemically synthesized
  source 1..22: mol_type = other DNA
tcttgcccaggcccccggcgct

SEQ ID NO: 53680 - DNA, 22 bp, synthetic construct
  misc_feature 1..22: note = chemically synthesized
  source 1..22: mol_type = other DNA
ttgcccaggcccccggcgctcc

SEQ ID NO: 53681 - DNA, 22 bp, synthetic construct
  misc_feature 1..22: note = chemically synthesized
  source 1..22: mol_type = other DNA
gcccaggcccccggcgctcccc

SEQ ID NO: 53682 - DNA, 22 bp, synthetic construct
  misc_feature 1..22: note = chemically synthesized
  source 1..22: mol_type = other DNA
cccaggcccccggcgctcccct

SEQ ID NO: 53683 - DNA, 22 bp, synthetic construct
  misc_feature 1..22: note = chemically synthesized
  source 1..22: mol_type = other DNA
ccctccgggggccagactctgg

SEQ ID NO: 53684 - DNA, 22 bp, synthetic construct
  misc_feature 1..22: note = chemically synthesized
  source 1..22: mol_type = other DNA
cgggggccagactctggctcct

SEQ ID NO: 53685 - DNA, 22 bp, synthetic construct
  misc_feature 1..22: note = chemically synthesized
  source 1..22: mol_type = other DNA
tggctcctcgttctttattcct

SEQ ID NO: 53686 - DNA, 22 bp, synthetic construct
  misc_feature 1..22: note = chemically synthesized
  source 1..22: mol_type = other DNA
gctcctcgttctttattcctcg

SEQ ID NO: 53687 - DNA, 22 bp, synthetic construct
  misc_feature 1..22: note = chemically synthesized
  source 1..22: mol_type = other DNA
ctcgttctttattcctcgggct

SEQ ID NO: 53688 - DNA, 22 bp, synthetic construct
  misc_feature 1..22: note = chemically synthesized
  source 1..22: mol_type = other DNA
gttctttattcctcgggctctc

SEQ ID NO: 53689 - DNA, 22 bp, synthetic construct
  misc_feature 1..22: note = chemically synthesized
  source 1..22: mol_type = other DNA
tttattcctcgggctctctttc

SEQ ID NO: 53690 - DNA, 22 bp, synthetic construct
  misc_feature 1..22: note = chemically synthesized
  source 1..22: mol_type = other DNA
tattcctcgggctctctttctg

SEQ ID NO: 53691 - DNA, 22 bp, synthetic construct
  misc_feature 1..22: note = chemically synthesized
  source 1..22: mol_type = other DNA
attcctcgggctctctttctgc

SEQ ID NO: 53692 - DNA, 22 bp, synthetic construct
  misc_feature 1..22: note = chemically synthesized
  source 1..22: mol_type = other DNA
ttcctcgggctctctttctgcg

SEQ ID NO: 53693 - DNA, 22 bp, synthetic construct
  misc_feature 1..22: note = chemically synthesized
  source 1..22: mol_type = other DNA
ctcgggctctctttctgcgacc

SEQ ID NO: 53694 - DNA, 22 bp, synthetic construct
  misc_feature 1..22: note = chemically synthesized
  source 1..22: mol_type = other DNA
gggctctctttctgcgaccctt

SEQ ID NO: 53695 - DNA, 22 bp, synthetic construct
  misc_feature 1..22: note = chemically synthesized
  source 1..22: mol_type = other DNA
tctttctgcgacccttaggagc

SEQ ID NO: 53696 - DNA, 22 bp, synthetic construct
  misc_feature 1..22: note = chemically synthesized
  source 1..22: mol_type = other DNA
tttctgcgacccttaggagccg

SEQ ID NO: 53697 - DNA, 22 bp, synthetic construct
  misc_feature 1..22: note = chemically synthesized
  source 1..22: mol_type = other DNA
tctgcgacccttaggagccggg

SEQ ID NO: 53698 - DNA, 22 bp, synthetic construct
  misc_feature 1..22: note = chemically synthesized
  source 1..22: mol_type = other DNA
ctgcgacccttaggagccgggg

SEQ ID NO: 53699 - DNA, 22 bp, synthetic construct
  misc_feature 1..22: note = chemically synthesized
  source 1..22: mol_type = other DNA
tgcgacccttaggagccgggga

SEQ ID NO: 53700 - DNA, 22 bp, synthetic construct
  misc_feature 1..22: note = chemically synthesized
  source 1..22: mol_type = other DNA
cgacccttaggagccggggact

SEQ ID NO: 53701 - DNA, 22 bp, synthetic construct
  misc_feature 1..22: note = chemically synthesized
  source 1..22: mol_type = other DNA
aggagccggggactcggcgctt

SEQ ID NO: 53702 - DNA, 22 bp, synthetic construct
  misc_feature 1..22: note = chemically synthesized
  source 1..22: mol_type = other DNA
ggagccggggactcggcgcttt

SEQ ID NO: 53703 - DNA, 22 bp, synthetic construct
  misc_feature 1..22: note = chemically synthesized
  source 1..22: mol_type = other DNA
ggcgctttcagttgcattcaga

SEQ ID NO: 53704 - DNA, 22 bp, synthetic construct
  misc_feature 1..22: note = chemically synthesized
  source 1..22: mol_type = other DNA
tcagttgcattcagacccagtc

SEQ ID NO: 53705 - DNA, 22 bp, synthetic construct
  misc_feature 1..22: note = chemically synthesized
  source 1..22: mol_type = other DNA
cagttgcattcagacccagtcg

SEQ ID NO: 53706 - DNA, 22 bp, synthetic construct
  misc_feature 1..22: note = chemically synthesized
  source 1..22: mol_type = other DNA
agttgcattcagacccagtcgc

SEQ ID NO: 53707 - DNA, 22 bp, synthetic construct
  misc_feature 1..22: note = chemically synthesized
  source 1..22: mol_type = other DNA
cattcagacccagtcgcttggc

SEQ ID NO: 53708 - DNA, 22 bp, synthetic construct
  misc_feature 1..22: note = chemically synthesized
  source 1..22: mol_type = other DNA
agacccagtcgcttggcggggc

SEQ ID NO: 53709 - DNA, 22 bp, synthetic construct
  misc_feature 1..22: note = chemically synthesized
  source 1..22: mol_type = other DNA
ggcggggcgctcagattcccgg

SEQ ID NO: 53710 - DNA, 22 bp, synthetic construct
  misc_feature 1..22: note = chemically synthesized
  source 1..22: mol_type = other DNA
gcggggcgctcagattcccggt

SEQ ID NO: 53711 - DNA, 22 bp, synthetic construct
  misc_feature 1..22: note = chemically synthesized
  source 1..22: mol_type = other DNA
agattcccggtccctggctcgg

SEQ ID NO: 53712 - DNA, 22 bp, synthetic construct
  misc_feature 1..22: note = chemically synthesized
  source 1..22: mol_type = other DNA
ccggtccctggctcggccttgg

SEQ ID NO: 53713 - DNA, 22 bp, synthetic construct
  misc_feature 1..22: note = chemically synthesized
  source 1..22: mol_type = other DNA
gctcggccttgggggcgccctc

SEQ ID NO: 53714 - DNA, 22 bp, synthetic construct
  misc_feature 1..22: note = chemically synthesized
  source 1..22: mol_type = other DNA
ggccttgggggcgccctcgggc

SEQ ID NO: 53715 - DNA, 22 bp, synthetic construct
  misc_feature 1..22: note = chemically synthesized
  source 1..22: mol_type = other DNA
gggggcgccctcgggccccggc

SEQ ID NO: 53716 - DNA, 22 bp, synthetic construct
  misc_feature 1..22: note = chemically synthesized
  source 1..22: mol_type = other DNA
ggggcgccctcgggccccggcc

SEQ ID NO: 53717 - DNA, 22 bp, synthetic construct
  misc_feature 1..22: note = chemically synthesized
  source 1..22: mol_type = other DNA
gggccccggcctgcgccgcctg

SEQ ID NO: 53718 - DNA, 22 bp, synthetic construct
  misc_feature 1..22: note = chemically synthesized
  source 1..22: mol_type = other DNA
cgccgcctgcctctccccggtc

SEQ ID NO: 53719 - DNA, 22 bp, synthetic construct
  misc_feature 1..22: note = chemically synthesized
  source 1..22: mol_type = other DNA
cctctccccggtcccctctttc

SEQ ID NO: 53720 - DNA, 22 bp, synthetic construct
  misc_feature 1..22: note = chemically synthesized
  source 1..22: mol_type = other DNA
tccccggtcccctctttccagg

SEQ ID NO: 53721 - DNA, 22 bp, synthetic construct
  misc_feature 1..22: note = chemically synthesized
  source 1..22: mol_type = other DNA
cccggtcccctctttccaggcc

SEQ ID NO: 53722 - DNA, 22 bp, synthetic construct
  misc_feature 1..22: note = chemically synthesized
  source 1..22: mol_type = other DNA
tttccaggccgcgcgggctcct

SEQ ID NO: 53723 - DNA, 22 bp, synthetic construct
  misc_feature 1..22: note = chemically synthesized
  source 1..22: mol_type = other DNA
tccaggccgcgcgggctcctgg

SEQ ID NO: 53724 - DNA, 22 bp, synthetic construct
  misc_feature 1..22: note = chemically synthesized
  source 1..22: mol_type = other DNA
ccaggccgcgcgggctcctgga

SEQ ID NO: 53725 - DNA, 22 bp, synthetic construct
  misc_feature 1..22: note = chemically synthesized
  source 1..22: mol_type = other DNA
caggccgcgcgggctcctggag

SEQ ID NO: 53726 - DNA, 22 bp, synthetic construct
  misc_feature 1..22: note = chemically synthesized
  source 1..22: mol_type = other DNA
ctggagacttgggcgctgccct

SEQ ID NO: 53727 - DNA, 22 bp, synthetic construct
  misc_feature 1..22: note = chemically synthesized
  source 1..22: mol_type = other DNA
gagacttgggcgctgcccttcc

SEQ ID NO: 53728 - DNA, 22 bp, synthetic construct
  misc_feature 1..22: note = chemically synthesized
  source 1..22: mol_type = other DNA
gggcgctgcccttccggacccg

SEQ ID NO: 53729 - DNA, 22 bp, synthetic construct
  misc_feature 1..22: note = chemically synthesized
  source 1..22: mol_type = other DNA
ggcgctgcccttccggacccgc

SEQ ID NO: 53730 - DNA, 22 bp, synthetic construct
  misc_feature 1..22: note = chemically synthesized
  source 1..22: mol_type = other DNA
cccttccggacccgcagccctc

SEQ ID NO: 53731 - DNA, 22 bp, synthetic construct
  misc_feature 1..22: note = chemically synthesized
  source 1..22: mol_type = other DNA
ccggacccgcagccctccaaac

SEQ ID NO: 53732 - DNA, 22 bp, synthetic construct
  misc_feature 1..22: note = chemically synthesized
  source 1..22: mol_type = other DNA
cggacccgcagccctccaaact

SEQ ID NO: 53733 - DNA, 22 bp, synthetic construct
  misc_feature 1..22: note = chemically synthesized
  source 1..22: mol_type = other DNA
caaacttaggctggattccgcg

SEQ ID NO: 53734 - DNA, 22 bp, synthetic construct
  misc_feature 1..22: note = chemically synthesized
  source 1..22: mol_type = other DNA
aggctggattccgcgttgccgt

SEQ ID NO: 53735 - DNA, 22 bp, synthetic construct
  misc_feature 1..22: note = chemically synthesized
  source 1..22: mol_type = other DNA
ggctggattccgcgttgccgtg

SEQ ID NO: 53736 - DNA, 22 bp, synthetic construct
  misc_feature 1..22: note = chemically synthesized
  source 1..22: mol_type = other DNA
gattccgcgttgccgtgcgctc

SEQ ID NO: 53737 - DNA, 22 bp, synthetic construct
  misc_feature 1..22: note = chemically synthesized
  source 1..22: mol_type = other DNA
cgcgttgccgtgcgctccctcc

SEQ ID NO: 53738 - DNA, 22 bp, synthetic construct
  misc_feature 1..22: note = chemically synthesized
  source 1..22: mol_type = other DNA
ccgtgcgctccctcccacctcc

SEQ ID NO: 53739 - DNA, 22 bp, synthetic construct
  misc_feature 1..22: note = chemically synthesized
  source 1..22: mol_type = other DNA
cctcccacctcccctcgcccgc

SEQ ID NO: 53740 - DNA, 22 bp, synthetic construct
  misc_feature 1..22: note = chemically synthesized
  source 1..22: mol_type = other DNA
ccacctcccctcgcccgctgcg

SEQ ID NO: 53741 - DNA, 22 bp, synthetic construct
  misc_feature 1..22: note = chemically synthesized
  source 1..22: mol_type = other DNA
ccctcgcccgctgcggagctgt

SEQ ID NO: 53742 - DNA, 22 bp, synthetic construct
  misc_feature 1..22: note = chemically synthesized
  source 1..22: mol_type = other DNA
gcccgctgcggagctgtaactt

SEQ ID NO: 53743 - DNA, 22 bp, synthetic construct
  misc_feature 1..22: note = chemically synthesized
  source 1..22: mol_type = other DNA
cggagctgtaacttggaggctc

SEQ ID NO: 53744 - DNA, 22 bp, synthetic construct
  misc_feature 1..22: note = chemically synthesized
  source 1..22: mol_type = other DNA
taacttggaggctcagctctca

SEQ ID NO: 53745 - DNA, 22 bp, synthetic construct
  misc_feature 1..22: note = chemically synthesized
  source 1..22: mol_type = other DNA
ggaggctcagctctcaacttcg

SEQ ID NO: 53746 - DNA, 22 bp, synthetic construct
  misc_feature 1..22: note = chemically synthesized
  source 1..22: mol_type = other DNA
gaggctcagctctcaacttcgg

SEQ ID NO: 53747 - DNA, 22 bp, synthetic construct
  misc_feature 1..22: note = chemically synthesized
  source 1..22: mol_type = other DNA
agctctcaacttcgggtgattt

SEQ ID NO: 53748 - DNA, 22 bp, synthetic construct
  misc_feature 1..22: note = chemically synthesized
  source 1..22: mol_type = other DNA
tcaacttcgggtgatttttctt

SEQ ID NO: 53749 - DNA, 22 bp, synthetic construct
  misc_feature 1..22: note = chemically synthesized
  source 1..22: mol_type = other DNA
aacttcgggtgatttttctttg

SEQ ID NO: 53750 - DNA, 22 bp, synthetic construct
  misc_feature 1..22: note = chemically synthesized
  source 1..22: mol_type = other DNA
cgggtgatttttctttgctgtc

SEQ ID NO: 53751 - DNA, 22 bp, synthetic construct
  misc_feature 1..22: note = chemically synthesized
  source 1..22: mol_type = other DNA
gggtgatttttctttgctgtcc

SEQ ID NO: 53752 - DNA, 22 bp, synthetic construct
  misc_feature 1..22: note = chemically synthesized
  source 1..22: mol_type = other DNA
ttctttgctgtcctctcctcgg

SEQ ID NO: 53753 - DNA, 22 bp, synthetic construct
  misc_feature 1..22: note = chemically synthesized
  source 1..22: mol_type = other DNA
tctttgctgtcctctcctcggg

SEQ ID NO: 53754 - DNA, 22 bp, synthetic construct
  misc_feature 1..22: note = chemically synthesized
  source 1..22: mol_type = other DNA
ctttgctgtcctctcctcgggc

SEQ ID NO: 53755 - DNA, 22 bp, synthetic construct
  misc_feature 1..22: note = chemically synthesized
  source 1..22: mol_type = other DNA
tttgctgtcctctcctcgggca

SEQ ID NO: 53756 - DNA, 22 bp, synthetic construct
  misc_feature 1..22: note = chemically synthesized
  source 1..22: mol_type = other DNA
tgctgtcctctcctcgggcaaa

SEQ ID NO: 53757 - DNA, 22 bp, synthetic construct
  misc_feature 1..22: note = chemically synthesized
  source 1..22: mol_type = other DNA
gctgtcctctcctcgggcaaag

SEQ ID NO: 53758 - DNA, 22 bp, synthetic construct
  misc_feature 1..22: note = chemically synthesized
  source 1..22: mol_type = other DNA
ctgtcctctcctcgggcaaagt

SEQ ID NO: 53759 - DNA, 22 bp, synthetic construct
  misc_feature 1..22: note = chemically synthesized
  source 1..22: mol_type = other DNA
tcctctcctcgggcaaagtttc

SEQ ID NO: 53760 - DNA, 22 bp, synthetic construct
  misc_feature 1..22: note = chemically synthesized
  source 1..22: mol_type = other DNA
tcctcgggcaaagtttcccgag

SEQ ID NO: 53761 - DNA, 22 bp, synthetic construct
  misc_feature 1..22: note = chemically synthesized
  source 1..22: mol_type = other DNA
ctcgggcaaagtttcccgagcg

SEQ ID NO: 53762 - DNA, 22 bp, synthetic construct
  misc_feature 1..22: note = chemically synthesized
  source 1..22: mol_type = other DNA
gggcaaagtttcccgagcgcag

SEQ ID NO: 53763 - DNA, 22 bp, synthetic construct
  misc_feature 1..22: note = chemically synthesized
  source 1..22: mol_type = other DNA
cccgagcgcagccgcgggctcg

SEQ ID NO: 53764 - DNA, 22 bp, synthetic construct
  misc_feature 1..22: note = chemically synthesized
  source 1..22: mol_type = other DNA
ccgagcgcagccgcgggctcgg

SEQ ID NO: 53765 - DNA, 22 bp, synthetic construct
  misc_feature 1..22: note = chemically synthesized
  source 1..22: mol_type = other DNA
ggggcttttacttcggcccctg

SEQ ID NO: 53766 - DNA, 22 bp, synthetic construct
  misc_feature 1..22: note = chemically synthesized
  source 1..22: mol_type = other DNA
ttacttcggcccctggcgtcca

SEQ ID NO: 53767 - DNA, 22 bp, synthetic construct
  misc_feature 1..22: note = chemically synthesized
  source 1..22: mol_type = other DNA
tacttcggcccctggcgtccac

SEQ ID NO: 53768 - DNA, 22 bp, synthetic construct
  misc_feature 1..22: note = chemically synthesized
  source 1..22: mol_type = other DNA
acttcggcccctggcgtccaca

SEQ ID NO: 53769 - DNA, 22 bp, synthetic construct
  misc_feature 1..22: note = chemically synthesized
  source 1..22: mol_type = other DNA
cttcggcccctggcgtccacac

SEQ ID NO: 53770 - DNA, 22 bp, synthetic construct
  misc_feature 1..22: note = chemically synthesized
  source 1..22: mol_type = other DNA
cggcccctggcgtccacacgcg

SEQ ID NO: 53771 - DNA, 22 bp, synthetic construct
  misc_feature 1..22: note = chemically synthesized
  source 1..22: mol_type = other DNA
ggcccctggcgtccacacgcgg

SEQ ID NO: 53772 - DNA, 22 bp, synthetic construct
  misc_feature 1..22: note = chemically synthesized
  source 1..22: mol_type = other DNA
gcgtccacacgcggggagcgag

SEQ ID NO: 53773 - DNA, 22 bp, synthetic construct
  misc_feature 1..22: note = chemically synthesized
  source 1..22: mol_type = other DNA
tacctggcttccctccgcccgc

SEQ ID NO: 53774 - DNA, 22 bp, synthetic construct
  misc_feature 1..22: note = chemically synthesized
  source 1..22: mol_type = other DNA
cctggcttccctccgcccgcgc

SEQ ID NO: 53775 - DNA, 22 bp, synthetic construct
  misc_feature 1..22: note = chemically synthesized
  source 1..22: mol_type = other DNA
gcttccctccgcccgcgcttcc

SEQ ID NO: 53776 - DNA, 22 bp, synthetic construct
  misc_feature 1..22: note = chemically synthesized
  source 1..22: mol_type = other DNA
ccctccgcccgcgcttccccag

SEQ ID NO: 53777 - DNA, 22 bp, synthetic construct
  misc_feature 1..22: note = chemically synthesized
  source 1..22: mol_type = other DNA
cctccgcccgcgcttccccagc

SEQ ID NO: 53778 - DNA, 22 bp, synthetic construct
  misc_feature 1..22: note = chemically synthesized
  source 1..22: mol_type = other DNA
cgcccgcgcttccccagcccgg

SEQ ID NO: 53779 - DNA, 22 bp, synthetic construct
  misc_feature 1..22: note = chemically synthesized
  source 1..22: mol_type = other DNA
ccccagcccggggctgcagcct

SEQ ID NO: 53780 - DNA, 22 bp, synthetic construct
  misc_feature 1..22: note = chemically synthesized
  source 1..22: mol_type = other DNA
cccagcccggggctgcagcctc

SEQ ID NO: 53781 - DNA, 22 bp, synthetic construct
  misc_feature 1..22: note = chemically synthesized
  source 1..22: mol_type = other DNA
cagcctcccggtgcactctcgc

SEQ ID NO: 53782 - DNA, 22 bp, synthetic construct
  misc_feature 1..22: note = chemically synthesized
  source 1..22: mol_type = other DNA
ccggtgcactctcgctctattt

SEQ ID NO: 53783 - DNA, 22 bp, synthetic construct
  misc_feature 1..22: note = chemically synthesized
  source 1..22: mol_type = other DNA
tcgctctatttttttctttttt

SEQ ID NO: 53784 - DNA, 22 bp, synthetic construct
  misc_feature 1..22: note = chemically synthesized
  source 1..22: mol_type = other DNA
gctctatttttttcttttttga

SEQ ID NO: 53785 - DNA, 22 bp, synthetic construct
  misc_feature 1..22: note = chemically synthesized
  source 1..22: mol_type = other DNA
tatttttttcttttttgaataa

SEQ ID NO: 53786 - DNA, 22 bp, synthetic construct
  misc_feature 1..22: note = chemically synthesized
  source 1..22: mol_type = other DNA
tttttttcttttttgaataatc

SEQ ID NO: 53787 - DNA, 22 bp, synthetic construct
  misc_feature 1..22: note = chemically synthesized
  source 1..22: mol_type = other DNA
ttttcttttttgaataatcttt

SEQ ID NO: 53788 - DNA, 22 bp, synthetic construct
  misc_feature 1..22: note = chemically synthesized
  source 1..22: mol_type = other DNA
tttcttttttgaataatctttc

SEQ ID NO: 53789 - DNA, 22 bp, synthetic construct
  misc_feature 1..22: note = chemically synthesized
  source 1..22: mol_type = other DNA
ttcttttttgaataatctttca

SEQ ID NO: 53790 - DNA, 22 bp, synthetic construct
  misc_feature 1..22: note = chemically synthesized
  source 1..22: mol_type = other DNA
tcttttttgaataatctttcat

SEQ ID NO: 53791 - DNA, 22 bp, synthetic construct
  misc_feature 1..22: note = chemically synthesized
  source 1..22: mol_type = other DNA
cttttttgaataatctttcatt

SEQ ID NO: 53792 - DNA, 22 bp, synthetic construct
  misc_feature 1..22: note = chemically synthesized
  source 1..22: mol_type = other DNA
ttttttgaataatctttcattt

SEQ ID NO: 53793 - DNA, 22 bp, synthetic construct
  misc_feature 1..22: note = chemically synthesized
  source 1..22: mol_type = other DNA
ttttgaataatctttcatttta

SEQ ID NO: 53794 - DNA, 22 bp, synthetic construct
  misc_feature 1..22: note = chemically synthesized
  source 1..22: mol_type = other DNA
tttgaataatctttcattttag

SEQ ID NO: 53795 - DNA, 22 bp, synthetic construct
  misc_feature 1..22: note = chemically synthesized
  source 1..22: mol_type = other DNA
ttgaataatctttcattttaga

SEQ ID NO: 53796 - DNA, 22 bp, synthetic construct
  misc_feature 1..22: note = chemically synthesized
  source 1..22: mol_type = other DNA
tgaataatctttcattttagag

SEQ ID NO: 53797 - DNA, 22 bp, synthetic construct
  misc_feature 1..22: note = chemically synthesized
  source 1..22: mol_type = other DNA
gaataatctttcattttagagt

SEQ ID NO: 53798 - DNA, 22 bp, synthetic construct
  misc_feature 1..22: note = chemically synthesized
  source 1..22: mol_type = other DNA
aataatctttcattttagagtc

SEQ ID NO: 53799 - DNA, 22 bp, synthetic construct
  misc_feature 1..22: note = chemically synthesized
  source 1..22: mol_type = other DNA
tcattttagagtccgcgtgtgt

SEQ ID NO: 53800 - DNA, 22 bp, synthetic construct
  misc_feature 1..22: note = chemically synthesized
  source 1..22: mol_type = other DNA
cattttagagtccgcgtgtgtg

SEQ ID NO: 53801 - DNA, 22 bp, synthetic construct
  misc_feature 1..22: note = chemically synthesized
  source 1..22: mol_type = other DNA
attttagagtccgcgtgtgtgg

SEQ ID NO: 53802 - DNA, 22 bp, synthetic construct
  misc_feature 1..22: note = chemically synthesized
  source 1..22: mol_type = other DNA
tagagtccgcgtgtgtgggggg

SEQ ID NO: 53803 - DNA, 22 bp, synthetic construct
  misc_feature 1..22: note = chemically synthesized
  source 1..22: mol_type = other DNA
agagtccgcgtgtgtggggggg

SEQ ID NO: 53804 - DNA, 22 bp, synthetic construct
  misc_feature 1..22: note = chemically synthesized
  source 1..22: mol_type = other DNA
gagtccgcgtgtgtggggggga

SEQ ID NO: 53805 - DNA, 22 bp, synthetic construct
  misc_feature 1..22: note = chemically synthesized
  source 1..22: mol_type = other DNA
gctcccccccaccctttcctcc

SEQ ID NO: 53806 - DNA, 22 bp, synthetic construct
  misc_feature 1..22: note = chemically synthesized
  source 1..22: mol_type = other DNA
ctcccccccaccctttcctccc

SEQ ID NO: 53807 - DNA, 22 bp, synthetic construct
  misc_feature 1..22: note = chemically synthesized
  source 1..22: mol_type = other DNA
ccccccaccctttcctcccacc

SEQ ID NO: 53808 - DNA, 22 bp, synthetic construct
  misc_feature 1..22: note = chemically synthesized
  source 1..22: mol_type = other DNA
tcctcccacccctgccacccct

SEQ ID NO: 53809 - DNA, 22 bp, synthetic construct
  misc_feature 1..22: note = chemically synthesized
  source 1..22: mol_type = other DNA
cctcccacccctgccacccctt

SEQ ID NO: 53810 - DNA, 22 bp, synthetic construct
  misc_feature 1..22: note = chemically synthesized
  source 1..22: mol_type = other DNA
ctcccacccctgccaccccttt

SEQ ID NO: 53811 - DNA, 22 bp, synthetic construct
  misc_feature 1..22: note = chemically synthesized
  source 1..22: mol_type = other DNA
ccacccctgccacccctttctt

SEQ ID NO: 53812 - DNA, 22 bp, synthetic construct
  misc_feature 1..22: note = chemically synthesized
  source 1..22: mol_type = other DNA
ccacccctttcttctctcccgg

SEQ ID NO: 53813 - DNA, 22 bp, synthetic construct
  misc_feature 1..22: note = chemically synthesized
  source 1..22: mol_type = other DNA
tcttctctcccggccacgccac

SEQ ID NO: 53814 - DNA, 22 bp, synthetic construct
  misc_feature 1..22: note = chemically synthesized
  source 1..22: mol_type = other DNA
cttctctcccggccacgccacc

SEQ ID NO: 53815 - DNA, 22 bp, synthetic construct
  misc_feature 1..22: note = chemically synthesized
  source 1..22: mol_type = other DNA
ttctctcccggccacgccaccg

SEQ ID NO: 53816 - DNA, 22 bp, synthetic construct
  misc_feature 1..22: note = chemically synthesized
  source 1..22: mol_type = other DNA
ctctcccggccacgccaccgcc

SEQ ID NO: 53817 - DNA, 22 bp, synthetic construct
  misc_feature 1..22: note = chemically synthesized
  source 1..22: mol_type = other DNA
tctcccggccacgccaccgccg

SEQ ID NO: 53818 - DNA, 22 bp, synthetic construct
  misc_feature 1..22: note = chemically synthesized
  source 1..22: mol_type = other DNA
tcccggccacgccaccgccgcg

SEQ ID NO: 53819 - DNA, 22 bp, synthetic construct
  misc_feature 1..22: note = chemically synthesized
  source 1..22: mol_type = other DNA
ccggccacgccaccgccgcggc

SEQ ID NO: 53820 - DNA, 22 bp, synthetic construct
  misc_feature 1..22: note = chemically synthesized
  source 1..22: mol_type = other DNA
gctgcggccactggtgagcccg

SEQ ID NO: 53821 - DNA, 22 bp, synthetic construct
  misc_feature 1..22: note = chemically synthesized
  source 1..22: mol_type = other DNA
cggccactggtgagcccgcggc

SEQ ID NO: 53822 - DNA, 22 bp, synthetic construct
  misc_feature 1..22: note = chemically synthesized
  source 1..22: mol_type = other DNA
gtgagcccgcggccccagcgcc

SEQ ID NO: 53823 - DNA, 22 bp, synthetic construct
  misc_feature 1..22: note = chemically synthesized
  source 1..22: mol_type = other DNA
ccctcggcccgcccctcccccg

SEQ ID NO: 53824 - DNA, 22 bp, synthetic construct
  misc_feature 1..22: note = chemically synthesized
  source 1..22: mol_type = other DNA
ggcccgcccctcccccgggggc

SEQ ID NO: 53825 - DNA, 22 bp, synthetic construct
  misc_feature 1..22: note = chemically synthesized
  source 1..22: mol_type = other DNA
ccccgggggccgcgtctggcgt

SEQ ID NO: 53826 - DNA, 22 bp, synthetic construct
  misc_feature 1..22: note = chemically synthesized
  source 1..22: mol_type = other DNA
gcgtccgcggagccccccgccc

SEQ ID NO: 53827 - DNA, 22 bp, synthetic construct
  misc_feature 1..22: note = chemically synthesized
  source 1..22: mol_type = other DNA
cccctccccgcactggccattg

SEQ ID NO: 53828 - DNA, 22 bp, synthetic construct
  misc_feature 1..22: note = chemically synthesized
  source 1..22: mol_type = other DNA
cccgcactggccattggcttgt

SEQ ID NO: 53829 - DNA, 22 bp, synthetic construct
  misc_feature 1..22: note = chemically synthesized
  source 1..22: mol_type = other DNA
gccattggcttgtcctggtctc

SEQ ID NO: 53830 - DNA, 22 bp, synthetic construct
  misc_feature 1..22: note = chemically synthesized
  source 1..22: mol_type = other DNA
gcttgtcctggtctctttttca

SEQ ID NO: 53831 - DNA, 22 bp, synthetic construct
  misc_feature 1..22: note = chemically synthesized
  source 1..22: mol_type = other DNA
gtcctggtctctttttcatgtc

SEQ ID NO: 53832 - DNA, 22 bp, synthetic construct
  misc_feature 1..22: note = chemically synthesized
  source 1..22: mol_type = other DNA
tcctggtctctttttcatgtcc

SEQ ID NO: 53833 - DNA, 22 bp, synthetic construct
  misc_feature 1..22: note = chemically synthesized
  source 1..22: mol_type = other DNA
gtctctttttcatgtccagccc

SEQ ID NO: 53834 - DNA, 22 bp, synthetic construct
  misc_feature 1..22: note = chemically synthesized
  source 1..22: mol_type = other DNA
tttttcatgtccagcccctgat

SEQ ID NO: 53835 - DNA, 22 bp, synthetic construct
  misc_feature 1..22: note = chemically synthesized
  source 1..22: mol_type = other DNA
tttcatgtccagcccctgatgt

SEQ ID NO: 53836 - DNA, 22 bp, synthetic construct
  misc_feature 1..22: note = chemically synthesized
  source 1..22: mol_type = other DNA
ttcatgtccagcccctgatgtg

SEQ ID NO: 53837 - DNA, 22 bp, synthetic construct
  misc_feature 1..22: note = chemically synthesized
  source 1..22: mol_type = other DNA
tcatgtccagcccctgatgtgt

SEQ ID NO: 53838 - DNA, 22 bp, synthetic construct
  misc_feature 1..22: note = chemically synthesized
  source 1..22: mol_type = other DNA
catgtccagcccctgatgtgtg

SEQ ID NO: 53839 - DNA, 22 bp, synthetic construct
  misc_feature 1..22: note = chemically synthesized
  source 1..22: mol_type = other DNA
atgtccagcccctgatgtgtgt

SEQ ID NO: 53840 - DNA, 22 bp, synthetic construct
  misc_feature 1..22: note = chemically synthesized
  source 1..22: mol_type = other DNA
atgtgtgtccattggtgtgagc

SEQ ID NO: 53841 - DNA, 22 bp, synthetic construct
  misc_feature 1..22: note = chemically synthesized
  source 1..22: mol_type = other DNA
gtgtgagcttccccttccctcc

SEQ ID NO: 53842 - DNA, 22 bp, synthetic construct
  misc_feature 1..22: note = chemically synthesized
  source 1..22: mol_type = other DNA
ccccttccctcctccccttctc

SEQ ID NO: 53843 - DNA, 22 bp, synthetic construct
  misc_feature 1..22: note = chemically synthesized
  source 1..22: mol_type = other DNA
cccttccctcctccccttctct

SEQ ID NO: 53844 - DNA, 22 bp, synthetic construct
  misc_feature 1..22: note = chemically synthesized
  source 1..22: mol_type = other DNA
ccctcctccccttctctcctgc

SEQ ID NO: 53845 - DNA, 22 bp, synthetic construct
  misc_feature 1..22: note = chemically synthesized
  source 1..22: mol_type = other DNA
cctcctccccttctctcctgct

SEQ ID NO: 53846 - DNA, 22 bp, synthetic construct
  misc_feature 1..22: note = chemically synthesized
  source 1..22: mol_type = other DNA
ctccccttctctcctgctcgcc

SEQ ID NO: 53847 - DNA, 22 bp, synthetic construct
  misc_feature 1..22: note = chemically synthesized
  source 1..22: mol_type = other DNA
cccttctctcctgctcgccctg

SEQ ID NO: 53848 - DNA, 22 bp, synthetic construct
  misc_feature 1..22: note = chemically synthesized
  source 1..22: mol_type = other DNA
ctctcctgctcgccctgcccat

SEQ ID NO: 53849 - DNA, 22 bp, synthetic construct
  misc_feature 1..22: note = chemically synthesized
  source 1..22: mol_type = other DNA
tctcctgctcgccctgcccatg

SEQ ID NO: 53850 - DNA, 22 bp, synthetic construct
  misc_feature 1..22: note = chemically synthesized
  source 1..22: mol_type = other DNA
tcctgctcgccctgcccatgtt

SEQ ID NO: 53851 - DNA, 22 bp, synthetic construct
  misc_feature 1..22: note = chemically synthesized
  source 1..22: mol_type = other DNA
ctgctcgccctgcccatgtttt

SEQ ID NO: 53852 - DNA, 22 bp, synthetic construct
  misc_feature 1..22: note = chemically synthesized
  source 1..22: mol_type = other DNA
ctcgccctgcccatgttttgtg

SEQ ID NO: 53853 - DNA, 22 bp, synthetic construct
  misc_feature 1..22: note = chemically synthesized
  source 1..22: mol_type = other DNA
gccctgcccatgttttgtgtgt

SEQ ID NO: 53854 - DNA, 22 bp, synthetic construct
  misc_feature 1..22: note = chemically synthesized
  source 1..22: mol_type = other DNA
cccatgttttgtgtgtctctgt

SEQ ID NO: 53855 - DNA, 22 bp, synthetic construct
  misc_feature 1..22: note = chemically synthesized
  source 1..22: mol_type = other DNA
tgtgtgtctctgtccatccaga

SEQ ID NO: 53856 - DNA, 22 bp, synthetic construct
  misc_feature 1..22: note = chemically synthesized
  source 1..22: mol_type = other DNA
gtgtgtctctgtccatccagac

SEQ ID NO: 53857 - DNA, 22 bp, synthetic construct
  misc_feature 1..22: note = chemically synthesized
  source 1..22: mol_type = other DNA
tgtgtctctgtccatccagact

SEQ ID NO: 53858 - DNA, 22 bp, synthetic construct
  misc_feature 1..22: note = chemically synthesized
  source 1..22: mol_type = other DNA
tgtccatccagactcctgacgt

SEQ ID NO: 53859 - DNA, 22 bp, synthetic construct
  misc_feature 1..22: note = chemically synthesized
  source 1..22: mol_type = other DNA
tccatccagactcctgacgttc

SEQ ID NO: 53860 - DNA, 22 bp, synthetic construct
  misc_feature 1..22: note = chemically synthesized
  source 1..22: mol_type = other DNA
ctgacgttcaagttcgcaggga

SEQ ID NO: 53861 - DNA, 22 bp, synthetic construct
  misc_feature 1..22: note = chemically synthesized
  source 1..22: mol_type = other DNA
acgttcaagttcgcagggacgt

SEQ ID NO: 53862 - DNA, 22 bp, synthetic construct
  misc_feature 1..22: note = chemically synthesized
  source 1..22: mol_type = other DNA
aagttcgcagggacgtcacgtc

SEQ ID NO: 53863 - DNA, 22 bp, synthetic construct
  misc_feature 1..22: note = chemically synthesized
  source 1..22: mol_type = other DNA
gcagggacgtcacgtccgcact

SEQ ID NO: 53864 - DNA, 22 bp, synthetic construct
  misc_feature 1..22: note = chemically synthesized
  source 1..22: mol_type = other DNA
gaacttgcagctcaggggggct

SEQ ID NO: 53865 - DNA, 22 bp, synthetic construct
  misc_feature 1..22: note = chemically synthesized
  source 1..22: mol_type = other DNA
aacttgcagctcaggggggctt

SEQ ID NO: 53866 - DNA, 22 bp, synthetic construct
  misc_feature 1..22: note = chemically synthesized
  source 1..22: mol_type = other DNA
gcagctcaggggggcttttgcc

SEQ ID NO: 53867 - DNA, 22 bp, synthetic construct
  misc_feature 1..22: note = chemically synthesized
  source 1..22: mol_type = other DNA
cagctcaggggggcttttgcca

SEQ ID NO: 53868 - DNA, 22 bp, synthetic construct
  misc_feature 1..22: note = chemically synthesized
  source 1..22: mol_type = other DNA
aggggggcttttgccatttttt

SEQ ID NO: 53869 - DNA, 22 bp, synthetic construct
  misc_feature 1..22: note = chemically synthesized
  source 1..22: mol_type = other DNA
ttgccatttttttcatctctct

SEQ ID NO: 53870 - DNA, 22 bp, synthetic construct
  misc_feature 1..22: note = chemically synthesized
  source 1..22: mol_type = other DNA
tgccatttttttcatctctctc

SEQ ID NO: 53871 - DNA, 22 bp, synthetic construct
  misc_feature 1..22: note = chemically synthesized
  source 1..22: mol_type = other DNA
gccatttttttcatctctctct

SEQ ID NO: 53872 - DNA, 22 bp, synthetic construct
  misc_feature 1..22: note = chemically synthesized
  source 1..22: mol_type = other DNA
ccatttttttcatctctctctc

SEQ ID NO: 53873 - DNA, 22 bp, synthetic construct
  misc_feature 1..22: note = chemically synthesized
  source 1..22: mol_type = other DNA
ttttcatctctctctctctctc

SEQ ID NO: 53874 - DNA, 22 bp, synthetic construct
  misc_feature 1..22: note = chemically synthesized
  source 1..22: mol_type = other DNA
tttcatctctctctctctctct

SEQ ID NO: 53875 - DNA, 22 bp, synthetic construct
  misc_feature 1..22: note = chemically synthesized
  source 1..22: mol_type = other DNA
ttcatctctctctctctctctc

SEQ ID NO: 53876 - DNA, 22 bp, synthetic construct
  misc_feature 1..22: note = chemically synthesized
  source 1..22: mol_type = other DNA
tcatctctctctctctctctcc

SEQ ID NO: 53877 - DNA, 22 bp, synthetic construct
  misc_feature 1..22: note = chemically synthesized
  source 1..22: mol_type = other DNA
catctctctctctctctctccc

SEQ ID NO: 53878 - DNA, 22 bp, synthetic construct
  misc_feature 1..22: note = chemically synthesized
  source 1..22: mol_type = other DNA
atctctctctctctctctccct

SEQ ID NO: 53879 - DNA, 22 bp, synthetic construct
  misc_feature 1..22: note = chemically synthesized
  source 1..22: mol_type = other DNA
tctctctctctctccctctatc

SEQ ID NO: 53880 - DNA, 22 bp, synthetic construct
  misc_feature 1..22: note = chemically synthesized
  source 1..22: mol_type = other DNA
tctctctctctccctctatctc

SEQ ID NO: 53881 - DNA, 22 bp, synthetic construct
  misc_feature 1..22: note = chemically synthesized
  source 1..22: mol_type = other DNA
tctctctctccctctatctctc

SEQ ID NO: 53882 - DNA, 22 bp, synthetic construct
  misc_feature 1..22: note = chemically synthesized
  source 1..22: mol_type = other DNA
tctctctccctctatctctctt

SEQ ID NO: 53883 - DNA, 22 bp, synthetic construct
  misc_feature 1..22: note = chemically synthesized
  source 1..22: mol_type = other DNA
tctctccctctatctctcttct

SEQ ID NO: 53884 - DNA, 22 bp, synthetic construct
  misc_feature 1..22: note = chemically synthesized
  source 1..22: mol_type = other DNA
tctccctctatctctcttctct

SEQ ID NO: 53885 - DNA, 22 bp, synthetic construct
  misc_feature 1..22: note = chemically synthesized
  source 1..22: mol_type = other DNA
tccctctatctctcttctctct

SEQ ID NO: 53886 - DNA, 22 bp, synthetic construct
  misc_feature 1..22: note = chemically synthesized
  source 1..22: mol_type = other DNA
cctctatctctcttctctctct

SEQ ID NO: 53887 - DNA, 22 bp, synthetic construct
  misc_feature 1..22: note = chemically synthesized
  source 1..22: mol_type = other DNA
tatctctcttctctctctctcc

SEQ ID NO: 53888 - DNA, 22 bp, synthetic construct
  misc_feature 1..22: note = chemically synthesized
  source 1..22: mol_type = other DNA
tctctcttctctctctctccct

SEQ ID NO: 53889 - DNA, 22 bp, synthetic construct
  misc_feature 1..22: note = chemically synthesized
  source 1..22: mol_type = other DNA
tcttctctctctctccctcttt

SEQ ID NO: 53890 - DNA, 22 bp, synthetic construct
  misc_feature 1..22: note = chemically synthesized
  source 1..22: mol_type = other DNA
ttctctctctctccctcttttt

SEQ ID NO: 53891 - DNA, 22 bp, synthetic construct
  misc_feature 1..22: note = chemically synthesized
  source 1..22: mol_type = other DNA
ctctctctctccctcttttttt

SEQ ID NO: 53892 - DNA, 22 bp, synthetic construct
  misc_feature 1..22: note = chemically synthesized
  source 1..22: mol_type = other DNA
tctctctctccctctttttttt

SEQ ID NO: 53893 - DNA, 22 bp, synthetic construct
  misc_feature 1..22: note = chemically synthesized
  source 1..22: mol_type = other DNA
tctctctccctctttttttttt

SEQ ID NO: 53894 - DNA, 22 bp, synthetic construct
  misc_feature 1..22: note = chemically synthesized
  source 1..22: mol_type = other DNA
tctctccctctttttttttttt

SEQ ID NO: 53895 - DNA, 22 bp, synthetic construct
  misc_feature 1..22: note = chemically synthesized
  source 1..22: mol_type = other DNA
tctccctctttttttttttttt

SEQ ID NO: 53896 - DNA, 22 bp, synthetic construct
  misc_feature 1..22: note = chemically synthesized
  source 1..22: mol_type = other DNA
tccctctttttttttttttttt

SEQ ID NO: 53897 - DNA, 22 bp, synthetic construct
  misc_feature 1..22: note = chemically synthesized
  source 1..22: mol_type = other DNA
cctctttttttttttttttttt

SEQ ID NO: 53898 - DNA, 22 bp, synthetic construct
  misc_feature 1..22: note = chemically synthesized
  source 1..22: mol_type = other DNA
tttttttttttttttttttttt

SEQ ID NO: 53899 - DNA, 22 bp, synthetic construct
  misc_feature 1..22: note = chemically synthesized
  source 1..22: mol_type = other DNA
tttttttttttttttttttttt

SEQ ID NO: 53900 - DNA, 22 bp, synthetic construct
  misc_feature 1..22: note = chemically synthesized
  source 1..22: mol_type = other DNA
tttttttttttttttttttttt

SEQ ID NO: 53901 - DNA, 22 bp, synthetic construct
  misc_feature 1..22: note = chemically synthesized
  source 1..22: mol_type = other DNA
tttttttttttttttttttttt

SEQ ID NO: 53902 - DNA, 22 bp, synthetic construct
  misc_feature 1..22: note = chemically synthesized
  source 1..22: mol_type = other DNA
tttttttttttttttttttttt

SEQ ID NO: 53903 - DNA, 22 bp, synthetic construct
  misc_feature 1..22: note = chemically synthesized
  source 1..22: mol_type = other DNA
tttttttttttttttttttttt

SEQ ID NO: 53904 - DNA, 22 bp, synthetic construct
  misc_feature 1..22: note = chemically synthesized
  source 1..22: mol_type = other DNA
tttttttttttttttttttttt

SEQ ID NO: 53905 - DNA, 22 bp, synthetic construct
  misc_feature 1..22: note = chemically synthesized
  source 1..22: mol_type = other DNA
tttttttttttttttttttttg

SEQ ID NO: 53906 - DNA, 22 bp, synthetic construct
  misc_feature 1..22: note = chemically synthesized
  source 1..22: mol_type = other DNA
ttttttttttttttttttttgc

SEQ ID NO: 53907 - DNA, 22 bp, synthetic construct
  misc_feature 1..22: note = chemically synthesized
  source 1..22: mol_type = other DNA
tttttttttttttttttttgct

SEQ ID NO: 53908 - DNA, 22 bp, synthetic construct
  misc_feature 1..22: note = chemically synthesized
  source 1..22: mol_type = other DNA
ttttttttttttttttttgctt

SEQ ID NO: 53909 - DNA, 22 bp, synthetic construct
  misc_feature 1..22: note = chemically synthesized
  source 1..22: mol_type = other DNA
tttttttttttttttttgctta

SEQ ID NO: 53910 - DNA, 22 bp, synthetic construct
  misc_feature 1..22: note = chemically synthesized
  source 1..22: mol_type = other DNA
ttttttttttttttttgcttaa

SEQ ID NO: 53911 - DNA, 22 bp, synthetic construct
  misc_feature 1..22: note = chemically synthesized
  source 1..22: mol_type = other DNA
tttttttttttttttgcttaaa

SEQ ID NO: 53912 - DNA, 22 bp, synthetic construct
  misc_feature 1..22: note = chemically synthesized
  source 1..22: mol_type = other DNA
ttttttttttttttgcttaaaa

SEQ ID NO: 53913 - DNA, 22 bp, synthetic construct
  misc_feature 1..22: note = chemically synthesized
  source 1..22: mol_type = other DNA
tttttttttttttgcttaaaaa

SEQ ID NO: 53914 - DNA, 22 bp, synthetic construct
  misc_feature 1..22: note = chemically synthesized
  source 1..22: mol_type = other DNA
ttttttttttttgcttaaaaaa

SEQ ID NO: 53915 - DNA, 22 bp, synthetic construct
  misc_feature 1..22: note = chemically synthesized
  source 1..22: mol_type = other DNA
tttttttttttgcttaaaaaaa

SEQ ID NO: 53916 - DNA, 22 bp, synthetic construct
  misc_feature 1..22: note = chemically synthesized
  source 1..22: mol_type = other DNA
ttttttttttgcttaaaaaaaa

SEQ ID NO: 53917 - DNA, 22 bp, synthetic construct
  misc_feature 1..22: note = chemically synthesized
  source 1..22: mol_type = other DNA
tttttttttgcttaaaaaaaag

SEQ ID NO: 53918 - DNA, 22 bp, synthetic construct
  misc_feature 1..22: note = chemically synthesized
  source 1..22: mol_type = other DNA
ttttttttgcttaaaaaaaagc

SEQ ID NO: 53919 - DNA, 22 bp, synthetic construct
  misc_feature 1..22: note = chemically synthesized
  source 1..22: mol_type = other DNA
tttttttgcttaaaaaaaagcc

SEQ ID NO: 53920 - DNA, 22 bp, synthetic construct
  misc_feature 1..22: note = chemically synthesized
  source 1..22: mol_type = other DNA
ttttttgcttaaaaaaaagcca

SEQ ID NO: 53921 - DNA, 22 bp, synthetic construct
  misc_feature 1..22: note = chemically synthesized
  source 1..22: mol_type = other DNA
tttttgcttaaaaaaaagccat

SEQ ID NO: 53922 - DNA, 22 bp, synthetic construct
  misc_feature 1..22: note = chemically synthesized
  source 1..22: mol_type = other DNA
ttttgcttaaaaaaaagccatg

SEQ ID NO: 53923 - DNA, 22 bp, synthetic construct
  misc_feature 1..22: note = chemically synthesized
  source 1..22: mol_type = other DNA
tttgcttaaaaaaaagccatga

SEQ ID NO: 53924 - DNA, 22 bp, synthetic construct
  misc_feature 1..22: note = chemically synthesized
  source 1..22: mol_type = other DNA
ttgcttaaaaaaaagccatgac

SEQ ID NO: 53925 - DNA, 22 bp, synthetic construct
  misc_feature 1..22: note = chemically synthesized
  source 1..22: mol_type = other DNA
tgcttaaaaaaaagccatgacg

SEQ ID NO: 53926 - DNA, 22 bp, synthetic construct
  misc_feature 1..22: note = chemically synthesized
  source 1..22: mol_type = other DNA
gcttaaaaaaaagccatgacgg

SEQ ID NO: 53927 - DNA, 22 bp, synthetic construct
  misc_feature 1..22: note = chemically synthesized
  source 1..22: mol_type = other DNA
cttaaaaaaaagccatgacggc

SEQ ID NO: 53928 - DNA, 22 bp, synthetic construct
  misc_feature 1..22: note = chemically synthesized
  source 1..22: mol_type = other DNA
aaaaaaaagccatgacggctct

SEQ ID NO: 53929 - DNA, 22 bp, synthetic construct
  misc_feature 1..22: note = chemically synthesized
  source 1..22: mol_type = other DNA
aaaaaaagccatgacggctctc

SEQ ID NO: 53930 - DNA, 22 bp, synthetic construct
  misc_feature 1..22: note = chemically synthesized
  source 1..22: mol_type = other DNA
tcccacaattcatcttccctgc

SEQ ID NO: 53931 - DNA, 22 bp, synthetic construct
  misc_feature 1..22: note = chemically synthesized
  source 1..22: mol_type = other DNA
ccacaattcatcttccctgcgc

SEQ ID NO: 53932 - DNA, 22 bp, synthetic construct
  misc_feature 1..22: note = chemically synthesized
  source 1..22: mol_type = other DNA
atcttccctgcgccatctttgt

SEQ ID NO: 53933 - DNA, 22 bp, synthetic construct
  misc_feature 1..22: note = chemically synthesized
  source 1..22: mol_type = other DNA
ccctgcgccatctttgtattat

SEQ ID NO: 53934 - DNA, 22 bp, synthetic construct
  misc_feature 1..22: note = chemically synthesized
  source 1..22: mol_type = other DNA
cctgcgccatctttgtattatt

SEQ ID NO: 53935 - DNA, 22 bp, synthetic construct
  misc_feature 1..22: note = chemically synthesized
  source 1..22: mol_type = other DNA
cgccatctttgtattatttcta

SEQ ID NO: 53936 - DNA, 22 bp, synthetic construct
  misc_feature 1..22: note = chemically synthesized
  source 1..22: mol_type = other DNA
tgtattatttctaatttatttt

SEQ ID NO: 53937 - DNA, 22 bp, synthetic construct
  misc_feature 1..22: note = chemically synthesized
  source 1..22: mol_type = other DNA
gtattatttctaatttattttg

SEQ ID NO: 53938 - DNA, 22 bp, synthetic construct
  misc_feature 1..22: note = chemically synthesized
  source 1..22: mol_type = other DNA
tattatttctaatttattttgg

SEQ ID NO: 53939 - DNA, 22 bp, synthetic construct
  misc_feature 1..22: note = chemically synthesized
  source 1..22: mol_type = other DNA
tttctaatttattttggatgtc

SEQ ID NO: 53940 - DNA, 22 bp, synthetic construct
  misc_feature 1..22: note = chemically synthesized
  source 1..22: mol_type = other DNA
ctaatttattttggatgtcaaa

SEQ ID NO: 53941 - DNA, 22 bp, synthetic construct
  misc_feature 1..22: note = chemically synthesized
  source 1..22: mol_type = other DNA
taatttattttggatgtcaaaa

SEQ ID NO: 53942 - DNA, 22 bp, synthetic construct
  misc_feature 1..22: note = chemically synthesized
  source 1..22: mol_type = other DNA
atttattttggatgtcaaaagg

SEQ ID NO: 53943 - DNA, 22 bp, synthetic construct
  misc_feature 1..22: note = chemically synthesized
  source 1..22: mol_type = other DNA
attttggatgtcaaaaggcact

SEQ ID NO: 53944 - DNA, 22 bp, synthetic construct
  misc_feature 1..22: note = chemically synthesized
  source 1..22: mol_type = other DNA
ttttggatgtcaaaaggcactg

SEQ ID NO: 53945 - DNA, 22 bp, synthetic construct
  misc_feature 1..22: note = chemically synthesized
  source 1..22: mol_type = other DNA
tggatgtcaaaaggcactgatg

SEQ ID NO: 53946 - DNA, 22 bp, synthetic construct
  misc_feature 1..22: note = chemically synthesized
  source 1..22: mol_type = other DNA
ggatgtcaaaaggcactgatga

SEQ ID NO: 53947 - DNA, 22 bp, synthetic construct
  misc_feature 1..22: note = chemically synthesized
  source 1..22: mol_type = other DNA
gatgtcaaaaggcactgatgaa

SEQ ID NO: 53948 - DNA, 22 bp, synthetic construct
  misc_feature 1..22: note = chemically synthesized
  source 1..22: mol_type = other DNA
atgaagatattttctctggagt

SEQ ID NO: 53949 - DNA, 22 bp, synthetic construct
  misc_feature 1..22: note = chemically synthesized
  source 1..22: mol_type = other DNA
tctctggagtctccttctttct

SEQ ID NO: 53950 - DNA, 22 bp, synthetic construct
  misc_feature 1..22: note = chemically synthesized
  source 1..22: mol_type = other DNA
ctctggagtctccttctttcta

SEQ ID NO: 53951 - DNA, 22 bp, synthetic construct
  misc_feature 1..22: note = chemically synthesized
  source 1..22: mol_type = other DNA
tctggagtctccttctttctaa

SEQ ID NO: 53952 - DNA, 22 bp, synthetic construct
  misc_feature 1..22: note = chemically synthesized
  source 1..22: mol_type = other DNA
tggagtctccttctttctaacc

SEQ ID NO: 53953 - DNA, 22 bp, synthetic construct
  misc_feature 1..22: note = chemically synthesized
  source 1..22: mol_type = other DNA
gagtctccttctttctaacccg

SEQ ID NO: 53954 - DNA, 22 bp, synthetic construct
  misc_feature 1..22: note = chemically synthesized
  source 1..22: mol_type = other DNA
cttctttctaacccggctctcc

SEQ ID NO: 53955 - DNA, 22 bp, synthetic construct
  misc_feature 1..22: note = chemically synthesized
  source 1..22: mol_type = other DNA
ctttctaacccggctctcccga

SEQ ID NO: 53956 - DNA, 22 bp, synthetic construct
  misc_feature 1..22: note = chemically synthesized
  source 1..22: mol_type = other DNA
tttctaacccggctctcccgat

SEQ ID NO: 53957 - DNA, 22 bp, synthetic construct
  misc_feature 1..22: note = chemically synthesized
  source 1..22: mol_type = other DNA
tctaacccggctctcccgatgt

SEQ ID NO: 53958 - DNA, 22 bp, synthetic construct
  misc_feature 1..22: note = chemically synthesized
  source 1..22: mol_type = other DNA
ctaacccggctctcccgatgtg

SEQ ID NO: 53959 - DNA, 22 bp, synthetic construct
  misc_feature 1..22: note = chemically synthesized
  source 1..22: mol_type = other DNA
taacccggctctcccgatgtga

SEQ ID NO: 53960 - DNA, 22 bp, synthetic construct
  misc_feature 1..22: note = chemically synthesized
  source 1..22: mol_type = other DNA
acccggctctcccgatgtgaac

SEQ ID NO: 53961 - DNA, 22 bp, synthetic construct
  misc_feature 1..22: note = chemically synthesized
  source 1..22: mol_type = other DNA
tcccgatgtgaaccgagccgtc

SEQ ID NO: 53962 - DNA, 22 bp, synthetic construct
  misc_feature 1..22: note = chemically synthesized
  source 1..22: mol_type = other DNA
ccgatgtgaaccgagccgtcgt

SEQ ID NO: 53963 - DNA, 22 bp, synthetic construct
  misc_feature 1..22: note = chemically synthesized
  source 1..22: mol_type = other DNA
gccgcaagcaaggcaaacccca

SEQ ID NO: 53964 - DNA, 22 bp, synthetic construct
  misc_feature 1..22: note = chemically synthesized
  source 1..22: mol_type = other DNA
aagcaaacgggaattctcgcgt

SEQ ID NO: 53965 - DNA, 22 bp, synthetic construct
  misc_feature 1..22: note = chemically synthesized
  source 1..22: mol_type = other DNA
agcaaacgggaattctcgcgta

SEQ ID NO: 53966 - DNA, 22 bp, synthetic construct
  misc_feature 1..22: note = chemically synthesized
  source 1..22: mol_type = other DNA
tcgcgtaagtaacccaataata

SEQ ID NO: 53967 - DNA, 22 bp, synthetic construct
  misc_feature 1..22: note = chemically synthesized
  source 1..22: mol_type = other DNA
gcgtaagtaacccaataatagt

SEQ ID NO: 53968 - DNA, 22 bp, synthetic construct
  misc_feature 1..22: note = chemically synthesized
  source 1..22: mol_type = other DNA
ttaataatcacgagagcgcgca

SEQ ID NO: 53969 - DNA, 22 bp, synthetic construct
  misc_feature 1..22: note = chemically synthesized
  source 1..22: mol_type = other DNA
ataatcacgagagcgcgcagga

SEQ ID NO: 53970 - DNA, 22 bp, synthetic construct
  misc_feature 1..22: note = chemically synthesized
  source 1..22: mol_type = other DNA
gaagcaaaagcgagggggagag

SEQ ID NO: 53971 - DNA, 22 bp, synthetic construct
  misc_feature 1..22: note = chemically synthesized
  source 1..22: mol_type = other DNA
ttaaatttttcacgagaaaaac

SEQ ID NO: 53972 - DNA, 22 bp, synthetic construct
  misc_feature 1..22: note = chemically synthesized
  source 1..22: mol_type = other DNA
taaatttttcacgagaaaaacc

SEQ ID NO: 53973 - DNA, 22 bp, synthetic construct
  misc_feature 1..22: note = chemically synthesized
  source 1..22: mol_type = other DNA
aaatttttcacgagaaaaacct

SEQ ID NO: 53974 - DNA, 22 bp, synthetic construct
  misc_feature 1..22: note = chemically synthesized
  source 1..22: mol_type = other DNA
aatttttcacgagaaaaacctc

SEQ ID NO: 53975 - DNA, 22 bp, synthetic construct
  misc_feature 1..22: note = chemically synthesized
  source 1..22: mol_type = other DNA
ttcacgagaaaaacctccgaga

SEQ ID NO: 53976 - DNA, 22 bp, synthetic construct
  misc_feature 1..22: note = chemically synthesized
  source 1..22: mol_type = other DNA
tcacgagaaaaacctccgagag

SEQ ID NO: 53977 - DNA, 22 bp, synthetic construct
  misc_feature 1..22: note = chemically synthesized
  source 1..22: mol_type = other DNA
cacgagaaaaacctccgagagt

SEQ ID NO: 53978 - DNA, 22 bp, synthetic construct
  misc_feature 1..22: note = chemically synthesized
  source 1..22: mol_type = other DNA
acgagaaaaacctccgagagtc

SEQ ID NO: 53979 - DNA, 22 bp, synthetic construct
  misc_feature 1..22: note = chemically synthesized
  source 1..22: mol_type = other DNA
cgagagtcgaggtaaaagagat

SEQ ID NO: 53980 - DNA, 22 bp, synthetic construct
  misc_feature 1..22: note = chemically synthesized
  source 1..22: mol_type = other DNA
atcccatctggaaccattgccg

SEQ ID NO: 53981 - DNA, 22 bp, synthetic construct
  misc_feature 1..22: note = chemically synthesized
  source 1..22: mol_type = other DNA
gaaccattgccgtgtatgcact

SEQ ID NO: 53982 - DNA, 22 bp, synthetic construct
  misc_feature 1..22: note = chemically synthesized
  source 1..22: mol_type = other DNA
ccgtgtatgcacttttgagaca

SEQ ID NO: 53983 - DNA, 22 bp, synthetic construct
  misc_feature 1..22: note = chemically synthesized
  source 1..22: mol_type = other DNA
ttgagacagcacgcacctttta

SEQ ID NO: 53984 - DNA, 22 bp, synthetic construct
  misc_feature 1..22: note = chemically synthesized
  source 1..22: mol_type = other DNA
tgagacagcacgcaccttttaa

SEQ ID NO: 53985 - DNA, 22 bp, synthetic construct
  misc_feature 1..22: note = chemically synthesized
  source 1..22: mol_type = other DNA
gagacagcacgcaccttttaat

SEQ ID NO: 53986 - DNA, 22 bp, synthetic construct
  misc_feature 1..22: note = chemically synthesized
  source 1..22: mol_type = other DNA
agacagcacgcaccttttaatt

SEQ ID NO: 53987 - DNA, 22 bp, synthetic construct
  misc_feature 1..22: note = chemically synthesized
  source 1..22: mol_type = other DNA
ttaattttatttaattttacaa

SEQ ID NO: 53988 - DNA, 22 bp, synthetic construct
  misc_feature 1..22: note = chemically synthesized
  source 1..22: mol_type = other DNA
taattttatttaattttacaaa

SEQ ID NO: 53989 - DNA, 22 bp, synthetic construct
  misc_feature 1..22: note = chemically synthesized
  source 1..22: mol_type = other DNA
aattttatttaattttacaaaa

SEQ ID NO: 53990 - DNA, 22 bp, synthetic construct
  misc_feature 1..22: note = chemically synthesized
  source 1..22: mol_type = other DNA
attttatttaattttacaaaaa

SEQ ID NO: 53991 - DNA, 22 bp, synthetic construct
  misc_feature 1..22: note = chemically synthesized
  source 1..22: mol_type = other DNA
tatttaattttacaaaaatttg

SEQ ID NO: 53992 - DNA, 22 bp, synthetic construct
  misc_feature 1..22: note = chemically synthesized
  source 1..22: mol_type = other DNA
atttaattttacaaaaatttga

SEQ ID NO: 53993 - DNA, 22 bp, synthetic construct
  misc_feature 1..22: note = chemically synthesized
  source 1..22: mol_type = other DNA
tttaattttacaaaaatttgac

SEQ ID NO: 53994 - DNA, 22 bp, synthetic construct
  misc_feature 1..22: note = chemically synthesized
  source 1..22: mol_type = other DNA
aattttacaaaaatttgactcc

SEQ ID NO: 53995 - DNA, 22 bp, synthetic construct
  misc_feature 1..22: note = chemically synthesized
  source 1..22: mol_type = other DNA
attttacaaaaatttgactcct

SEQ ID NO: 53996 - DNA, 22 bp, synthetic construct
  misc_feature 1..22: note = chemically synthesized
  source 1..22: mol_type = other DNA
tacaaaaatttgactcctcctc

SEQ ID NO: 53997 - DNA, 22 bp, synthetic construct
  misc_feature 1..22: note = chemically synthesized
  source 1..22: mol_type = other DNA
acaaaaatttgactcctcctct

SEQ ID NO: 53998 - DNA, 22 bp, synthetic construct
  misc_feature 1..22: note = chemically synthesized
  source 1..22: mol_type = other DNA
caaaaatttgactcctcctctt

SEQ ID NO: 53999 - DNA, 22 bp, synthetic construct
  misc_feature 1..22: note = chemically synthesized
  source 1..22: mol_type = other DNA
gactcctcctctttcctccttt

SEQ ID NO: 54000 - DNA, 22 bp, synthetic construct
  misc_feature 1..22: note = chemically synthesized
  source 1..22: mol_type = other DNA
actcctcctctttcctcctttc

SEQ ID NO: 54001 - DNA, 22 bp, synthetic construct
  misc_feature 1..22: note = chemically synthesized
  source 1..22: mol_type = other DNA
ctcctctttcctcctttccgcc

SEQ ID NO: 54002 - DNA, 22 bp, synthetic construct
  misc_feature 1..22: note = chemically synthesized
  source 1..22: mol_type = other DNA
ctctttcctcctttccgccgct

SEQ ID NO: 54003 - DNA, 22 bp, synthetic construct
  misc_feature 1..22: note = chemically synthesized
  source 1..22: mol_type = other DNA
tttcctcctttccgccgcttta

SEQ ID NO: 54004 - DNA, 22 bp, synthetic construct
  misc_feature 1..22: note = chemically synthesized
  source 1..22: mol_type = other DNA
tcctcctttccgccgctttatt

SEQ ID NO: 54005 - DNA, 22 bp, synthetic construct
  misc_feature 1..22: note = chemically synthesized
  source 1..22: mol_type = other DNA
cctcctttccgccgctttattt

SEQ ID NO: 54006 - DNA, 22 bp, synthetic construct
  misc_feature 1..22: note = chemically synthesized
  source 1..22: mol_type = other DNA
ctcctttccgccgctttatttc

SEQ ID NO: 54007 - DNA, 22 bp, synthetic construct
  misc_feature 1..22: note = chemically synthesized
  source 1..22: mol_type = other DNA
ctttccgccgctttatttctct

SEQ ID NO: 54008 - DNA, 22 bp, synthetic construct
  misc_feature 1..22: note = chemically synthesized
  source 1..22: mol_type = other DNA
tccgccgctttatttctctttt

SEQ ID NO: 54009 - DNA, 22 bp, synthetic construct
  misc_feature 1..22: note = chemically synthesized
  source 1..22: mol_type = other DNA
ccgccgctttatttctcttttc

SEQ ID NO: 54010 - DNA, 22 bp, synthetic construct
  misc_feature 1..22: note = chemically synthesized
  source 1..22: mol_type = other DNA
cgccgctttatttctcttttcg

SEQ ID NO: 54011 - DNA, 22 bp, synthetic construct
  misc_feature 1..22: note = chemically synthesized
  source 1..22: mol_type = other DNA
tatttctcttttcgaaaaggaa

SEQ ID NO: 54012 - DNA, 22 bp, synthetic construct
  misc_feature 1..22: note = chemically synthesized
  source 1..22: mol_type = other DNA
atttctcttttcgaaaaggaat

SEQ ID NO: 54013 - DNA, 22 bp, synthetic construct
  misc_feature 1..22: note = chemically synthesized
  source 1..22: mol_type = other DNA
tttctcttttcgaaaaggaatg

SEQ ID NO: 54014 - DNA, 22 bp, synthetic construct
  misc_feature 1..22: note = chemically synthesized
  source 1..22: mol_type = other DNA
ctcttttcgaaaaggaatgcaa

SEQ ID NO: 54015 - DNA, 22 bp, synthetic construct
  misc_feature 1..22: note = chemically synthesized
  source 1..22: mol_type = other DNA
tcttttcgaaaaggaatgcaat

SEQ ID NO: 54016 - DNA, 22 bp, synthetic construct
  misc_feature 1..22: note = chemically synthesized
  source 1..22: mol_type = other DNA
ttttcgaaaaggaatgcaatga

SEQ ID NO: 54017 - DNA, 22 bp, synthetic construct
  misc_feature 1..22: note = chemically synthesized
  source 1..22: mol_type = other DNA
ttcgaaaaggaatgcaatgatt

SEQ ID NO: 54018 - DNA, 22 bp, synthetic construct
  misc_feature 1..22: note = chemically synthesized
  source 1..22: mol_type = other DNA
tcgaaaaggaatgcaatgattc

SEQ ID NO: 54019 - DNA, 22 bp, synthetic construct
  misc_feature 1..22: note = chemically synthesized
  source 1..22: mol_type = other DNA
cgaaaaggaatgcaatgattcc

SEQ ID NO: 54020 - DNA, 22 bp, synthetic construct
  misc_feature 1..22: note = chemically synthesized
  source 1..22: mol_type = other DNA
gaaaaggaatgcaatgattcca

SEQ ID NO: 54021 - DNA, 22 bp, synthetic construct
  misc_feature 1..22: note = chemically synthesized
  source 1..22: mol_type = other DNA
cactccccccccgccccgccag

SEQ ID NO: 54022 - DNA, 22 bp, synthetic construct
  misc_feature 1..22: note = chemically synthesized
  source 1..22: mol_type = other DNA
cccccccgccccgccagttttg

SEQ ID NO: 54023 - DNA, 22 bp, synthetic construct
  misc_feature 1..22: note = chemically synthesized
  source 1..22: mol_type = other DNA
tgcaaaataatgaacaatgcta

SEQ ID NO: 54024 - DNA, 22 bp, synthetic construct
  misc_feature 1..22: note = chemically synthesized
  source 1..22: mol_type = other DNA
gcaaaataatgaacaatgctaa

SEQ ID NO: 54025 - DNA, 22 bp, synthetic construct
  misc_feature 1..22: note = chemically synthesized
  source 1..22: mol_type = other DNA
caaaataatgaacaatgctaag

SEQ ID NO: 54026 - DNA, 22 bp, synthetic construct
  misc_feature 1..22: note = chemically synthesized
  source 1..22: mol_type = other DNA
aggttgcgaacaactcacatgc

SEQ ID NO: 54027 - DNA, 22 bp, synthetic construct
  misc_feature 1..22: note = chemically synthesized
  source 1..22: mol_type = other DNA
cgaacaactcacatgcaaacct

SEQ ID NO: 54028 - DNA, 22 bp, synthetic construct
  misc_feature 1..22: note = chemically synthesized
  source 1..22: mol_type = other DNA
acatgcaaacctgggggtggga

SEQ ID NO: 54029 - DNA, 22 bp, synthetic construct
  misc_feature 1..22: note = chemically synthesized
  source 1..22: mol_type = other DNA
ggggtgggagctggtggggaaa

SEQ ID NO: 54030 - DNA, 22 bp, synthetic construct
  misc_feature 1..22: note = chemically synthesized
  source 1..22: mol_type = other DNA
gtggggaaagggaggttgcttc

SEQ ID NO: 54031 - DNA, 22 bp, synthetic construct
  misc_feature 1..22: note = chemically synthesized
  source 1..22: mol_type = other DNA
cttcccactcaccgtaagaaaa

SEQ ID NO: 54032 - DNA, 22 bp, synthetic construct
  misc_feature 1..22: note = chemically synthesized
  source 1..22: mol_type = other DNA
cccactcaccgtaagaaaatgg

SEQ ID NO: 54033 - DNA, 22 bp, synthetic construct
  misc_feature 1..22: note = chemically synthesized
  source 1..22: mol_type = other DNA
ccactcaccgtaagaaaatggg

SEQ ID NO: 54034 - DNA, 22 bp, synthetic construct
  misc_feature 1..22: note = chemically synthesized
  source 1..22: mol_type = other DNA
accgtaagaaaatgggggggta

SEQ ID NO: 54035 - DNA, 22 bp, synthetic construct
  misc_feature 1..22: note = chemically synthesized
  source 1..22: mol_type = other DNA
aaaaacgattcccggggagaaa

SEQ ID NO: 54036 - DNA, 22 bp, synthetic construct
  misc_feature 1..22: note = chemically synthesized
  source 1..22: mol_type = other DNA
ccggggagaaaagaggtgagac

SEQ ID NO: 54037 - DNA, 22 bp, synthetic construct
  misc_feature 1..22: note = chemically synthesized
  source 1..22: mol_type = other DNA
gcttttggacaccagcgcgctc

SEQ ID NO: 54038 - DNA, 22 bp, synthetic construct
  misc_feature 1..22: note = chemically synthesized
  source 1..22: mol_type = other DNA
ttggacaccagcgcgctcacgg

SEQ ID NO: 54039 - DNA, 22 bp, synthetic construct
  misc_feature 1..22: note = chemically synthesized
  source 1..22: mol_type = other DNA
tggacaccagcgcgctcacggt

SEQ ID NO: 54040 - DNA, 22 bp, synthetic construct
  misc_feature 1..22: note = chemically synthesized
  source 1..22: mol_type = other DNA
ggacaccagcgcgctcacggtc

SEQ ID NO: 54041 - DNA, 22 bp, synthetic construct
  misc_feature 1..22: note = chemically synthesized
  source 1..22: mol_type = other DNA
gacaccagcgcgctcacggtca

SEQ ID NO: 54042 - DNA, 22 bp, synthetic construct
  misc_feature 1..22: note = chemically synthesized
  source 1..22: mol_type = other DNA
acggtcaagtgtgcagcgggag

SEQ ID NO: 54043 - DNA, 22 bp, synthetic construct
  misc_feature 1..22: note = chemically synthesized
  source 1..22: mol_type = other DNA
tggaaaggggcccccggcgctc

SEQ ID NO: 54044 - DNA, 22 bp, synthetic construct
  misc_feature 1..22: note = chemically synthesized
  source 1..22: mol_type = other DNA
ctgagtccgcggagtcgggaga

SEQ ID NO: 54045 - DNA, 22 bp, synthetic construct
  misc_feature 1..22: note = chemically synthesized
  source 1..22: mol_type = other DNA
agtccgcggagtcgggagaggg

SEQ ID NO: 54046 - DNA, 22 bp, synthetic construct
  misc_feature 1..22: note = chemically synthesized
  source 1..22: mol_type = other DNA
ccgccttttgttccggccagag

SEQ ID NO: 54047 - DNA, 22 bp, synthetic construct
  misc_feature 1..22: note = chemically synthesized
  source 1..22: mol_type = other DNA
ttgttccggccagaggtgggtg

SEQ ID NO: 54048 - DNA, 22 bp, synthetic construct
  misc_feature 1..22: note = chemically synthesized
  source 1..22: mol_type = other DNA
tgttccggccagaggtgggtgt

SEQ ID NO: 54049 - DNA, 22 bp, synthetic construct
  misc_feature 1..22: note = chemically synthesized
  source 1..22: mol_type = other DNA
gttccggccagaggtgggtgtt

SEQ ID NO: 54050 - DNA, 22 bp, synthetic construct
  misc_feature 1..22: note = chemically synthesized
  source 1..22: mol_type = other DNA
ttccggccagaggtgggtgttt

SEQ ID NO: 54051 - DNA, 22 bp, synthetic construct
  misc_feature 1..22: note = chemically synthesized
  source 1..22: mol_type = other DNA
cggccagaggtgggtgtttgtc

SEQ ID NO: 54052 - DNA, 22 bp, synthetic construct
  misc_feature 1..22: note = chemically synthesized
  source 1..22: mol_type = other DNA
gtcccgctgccttttgtgccgg

SEQ ID NO: 54053 - DNA, 22 bp, synthetic construct
  misc_feature 1..22: note = chemically synthesized
  source 1..22: mol_type = other DNA
tcccgctgccttttgtgccggc

SEQ ID NO: 54054 - DNA, 22 bp, synthetic construct
  misc_feature 1..22: note = chemically synthesized
  source 1..22: mol_type = other DNA
ccttttgtgccggctcctcgcg

SEQ ID NO: 54055 - DNA, 22 bp, synthetic construct
  misc_feature 1..22: note = chemically synthesized
  source 1..22: mol_type = other DNA
ttgtgccggctcctcgcgcttg

SEQ ID NO: 54056 - DNA, 22 bp, synthetic construct
  misc_feature 1..22: note = chemically synthesized
  source 1..22: mol_type = other DNA
tgtgccggctcctcgcgcttgc

SEQ ID NO: 54057 - DNA, 22 bp, synthetic construct
  misc_feature 1..22: note = chemically synthesized
  source 1..22: mol_type = other DNA
gtgccggctcctcgcgcttgcc

SEQ ID NO: 54058 - DNA, 22 bp, synthetic construct
  misc_feature 1..22: note = chemically synthesized
  source 1..22: mol_type = other DNA
tgccggctcctcgcgcttgccc

SEQ ID NO: 54059 - DNA, 22 bp, synthetic construct
  misc_feature 1..22: note = chemically synthesized
  source 1..22: mol_type = other DNA
ctcgcgcttgccctcccgcgcc

SEQ ID NO: 54060 - DNA, 22 bp, synthetic construct
  misc_feature 1..22: note = chemically synthesized
  source 1..22: mol_type = other DNA
gcgcttgccctcccgcgccgcc

SEQ ID NO: 54061 - DNA, 22 bp, synthetic construct
  misc_feature 1..22: note = chemically synthesized
  source 1..22: mol_type = other DNA
gccctcccgcgccgccgccgcc

SEQ ID NO: 54062 - DNA, 22 bp, synthetic construct
  misc_feature 1..22: note = chemically synthesized
  source 1..22: mol_type = other DNA
ccctcccgcgccgccgccgccg

SEQ ID NO: 54063 - DNA, 22 bp, synthetic construct
  misc_feature 1..22: note = chemically synthesized
  source 1..22: mol_type = other DNA
ccgcgccgccgccgccgccgcc

SEQ ID NO: 54064 - DNA, 22 bp, synthetic construct
  misc_feature 1..22: note = chemically synthesized
  source 1..22: mol_type = other DNA
gggccgggggaggaggcggccg

SEQ ID NO: 54065 - DNA, 22 bp, synthetic construct
  misc_feature 1..22: note = chemically synthesized
  source 1..22: mol_type = other DNA
ctgcctcctgggttgccgctgc

SEQ ID NO: 54066 - DNA, 22 bp, synthetic construct
  misc_feature 1..22: note = chemically synthesized
  source 1..22: mol_type = other DNA
cctcctgggttgccgctgccct

SEQ ID NO: 54067 - DNA, 22 bp, synthetic construct
  misc_feature 1..22: note = chemically synthesized
  source 1..22: mol_type = other DNA
ctgggttgccgctgccctcccc

SEQ ID NO: 54068 - DNA, 22 bp, synthetic construct
  misc_feature 1..22: note = chemically synthesized
  source 1..22: mol_type = other DNA
ggttgccgctgccctcccctcc

SEQ ID NO: 54069 - DNA, 22 bp, synthetic construct
  misc_feature 1..22: note = chemically synthesized
  source 1..22: mol_type = other DNA
ccgctgccctcccctcccgacc

SEQ ID NO: 54070 - DNA, 22 bp, synthetic construct
  misc_feature 1..22: note = chemically synthesized
  source 1..22: mol_type = other DNA
ccctcccctcccgaccgaacct

SEQ ID NO: 54071 - DNA, 22 bp, synthetic construct
  misc_feature 1..22: note = chemically synthesized
  source 1..22: mol_type = other DNA
ccctcccgaccgaacctcagag

SEQ ID NO: 54072 - DNA, 22 bp, synthetic construct
  misc_feature 1..22: note = chemically synthesized
  source 1..22: mol_type = other DNA
ccgaccgaacctcagaggcagc

SEQ ID NO: 54073 - DNA, 22 bp, synthetic construct
  misc_feature 1..22: note = chemically synthesized
  source 1..22: mol_type = other DNA
agaggcagcaaggagaagactg

SEQ ID NO: 54074 - DNA, 22 bp, synthetic construct
  misc_feature 1..22: note = chemically synthesized
  source 1..22: mol_type = other DNA
gcacataaataaataaatacat

SEQ ID NO: 54075 - DNA, 22 bp, synthetic construct
  misc_feature 1..22: note = chemically synthesized
  source 1..22: mol_type = other DNA
cttgcccccaaaccgaagccaa

SEQ ID NO: 54076 - DNA, 22 bp, synthetic construct
  misc_feature 1..22: note = chemically synthesized
  source 1..22: mol_type = other DNA
ttgcccccaaaccgaagccaaa

SEQ ID NO: 54077 - DNA, 22 bp, synthetic construct
  misc_feature 1..22: note = chemically synthesized
  source 1..22: mol_type = other DNA
gcccccaaaccgaagccaaacg

SEQ ID NO: 54078 - DNA, 22 bp, synthetic construct
  misc_feature 1..22: note = chemically synthesized
  source 1..22: mol_type = other DNA
cccccaaaccgaagccaaacgc

SEQ ID NO: 54079 - DNA, 22 bp, synthetic construct
  misc_feature 1..22: note = chemically synthesized
  source 1..22: mol_type = other DNA
tgccaacccttttctgtgacgg

SEQ ID NO: 54080 - DNA, 22 bp, synthetic construct
  misc_feature 1..22: note = chemically synthesized
  source 1..22: mol_type = other DNA
ccaacccttttctgtgacggcc

SEQ ID NO: 54081 - DNA, 22 bp, synthetic construct
  misc_feature 1..22: note = chemically synthesized
  source 1..22: mol_type = other DNA
ttctgtgacggccttctctttg

SEQ ID NO: 54082 - DNA, 22 bp, synthetic construct
  misc_feature 1..22: note = chemically synthesized
  source 1..22: mol_type = other DNA
tctgtgacggccttctctttga

SEQ ID NO: 54083 - DNA, 22 bp, synthetic construct
  misc_feature 1..22: note = chemically synthesized
  source 1..22: mol_type = other DNA
ctgtgacggccttctctttgac

SEQ ID NO: 54084 - DNA, 22 bp, synthetic construct
  misc_feature 1..22: note = chemically synthesized
  source 1..22: mol_type = other DNA
tgtgacggccttctctttgact

SEQ ID NO: 54085 - DNA, 22 bp, synthetic construct
  misc_feature 1..22: note = chemically synthesized
  source 1..22: mol_type = other DNA
tgacggccttctctttgactcc

SEQ ID NO: 54086 - DNA, 22 bp, synthetic construct
  misc_feature 1..22: note = chemically synthesized
  source 1..22: mol_type = other DNA
ctctttgactcccccaccagcc

SEQ ID NO: 54087 - DNA, 22 bp, synthetic construct
  misc_feature 1..22: note = chemically synthesized
  source 1..22: mol_type = other DNA
tctttgactcccccaccagccc

SEQ ID NO: 54088 - DNA, 22 bp, synthetic construct
  misc_feature 1..22: note = chemically synthesized
  source 1..22: mol_type = other DNA
tttgactcccccaccagccccc

SEQ ID NO: 54089 - DNA, 22 bp, synthetic construct
  misc_feature 1..22: note = chemically synthesized
  source 1..22: mol_type = other DNA
tgactcccccaccagcccccct

SEQ ID NO: 54090 - DNA, 22 bp, synthetic construct
  misc_feature 1..22: note = chemically synthesized
  source 1..22: mol_type = other DNA
gactcccccaccagcccccctg

SEQ ID NO: 54091 - DNA, 22 bp, synthetic construct
  misc_feature 1..22: note = chemically synthesized
  source 1..22: mol_type = other DNA
actcccccaccagcccccctgc

SEQ ID NO: 54092 - DNA, 22 bp, synthetic construct
  misc_feature 1..22: note = chemically synthesized
  source 1..22: mol_type = other DNA
ccccaccagcccccctgcaaaa

SEQ ID NO: 54093 - DNA, 22 bp, synthetic construct
  misc_feature 1..22: note = chemically synthesized
  source 1..22: mol_type = other DNA
caaaaatctcacaatctctcat

SEQ ID NO: 54094 - DNA, 22 bp, synthetic construct
  misc_feature 1..22: note = chemically synthesized
  source 1..22: mol_type = other DNA
acaatctctcatctagaaaaaa

SEQ ID NO: 54095 - DNA, 22 bp, synthetic construct
  misc_feature 1..22: note = chemically synthesized
  source 1..22: mol_type = other DNA
tcatctagaaaaaaatttacaa

SEQ ID NO: 54096 - DNA, 22 bp, synthetic construct
  misc_feature 1..22: note = chemically synthesized
  source 1..22: mol_type = other DNA
atctagaaaaaaatttacaatc

SEQ ID NO: 54097 - DNA, 22 bp, synthetic construct
  misc_feature 1..22: note = chemically synthesized
  source 1..22: mol_type = other DNA
gaaaaaaatttacaatcaccct

SEQ ID NO: 54098 - DNA, 22 bp, synthetic construct
  misc_feature 1..22: note = chemically synthesized
  source 1..22: mol_type = other DNA
acaatcaccctcttcccccaaa

SEQ ID NO: 54099 - DNA, 22 bp, synthetic construct
  misc_feature 1..22: note = chemically synthesized
  source 1..22: mol_type = other DNA
caatcaccctcttcccccaaac

SEQ ID NO: 54100 - DNA, 22 bp, synthetic construct
  misc_feature 1..22: note = chemically synthesized
  source 1..22: mol_type = other DNA
ttcccccaaaccccttcagttg

SEQ ID NO: 54101 - DNA, 22 bp, synthetic construct
  misc_feature 1..22: note = chemically synthesized
  source 1..22: mol_type = other DNA
cccccaaaccccttcagttgca

SEQ ID NO: 54102 - DNA, 22 bp, synthetic construct
  misc_feature 1..22: note = chemically synthesized
  source 1..22: mol_type = other DNA
ccccaaaccccttcagttgcaa

SEQ ID NO: 54103 - DNA, 22 bp, synthetic construct
  misc_feature 1..22: note = chemically synthesized
  source 1..22: mol_type = other DNA
cagttgcaaacttagggcgccg

SEQ ID NO: 54104 - DNA, 22 bp, synthetic construct
  misc_feature 1..22: note = chemically synthesized
  source 1..22: mol_type = other DNA
agttgcaaacttagggcgccga

SEQ ID NO: 54105 - DNA, 22 bp, synthetic construct
  misc_feature 1..22: note = chemically synthesized
  source 1..22: mol_type = other DNA
caaacttagggcgccgacggca

SEQ ID NO: 54106 - DNA, 22 bp, synthetic construct
  misc_feature 1..22: note = chemically synthesized
  source 1..22: mol_type = other DNA
agggcgccgacggcacggagag

SEQ ID NO: 54107 - DNA, 22 bp, synthetic construct
  misc_feature 1..22: note = chemically synthesized
  source 1..22: mol_type = other DNA
gggcgccgacggcacggagagg

SEQ ID NO: 54108 - DNA, 22 bp, synthetic construct
  misc_feature 1..22: note = chemically synthesized
  source 1..22: mol_type = other DNA
cctcctcttactattttttgga

SEQ ID NO: 54109 - DNA, 22 bp, synthetic construct
  misc_feature 1..22: note = chemically synthesized
  source 1..22: mol_type = other DNA
ctcttactattttttggaagat

SEQ ID NO: 54110 - DNA, 22 bp, synthetic construct
  misc_feature 1..22: note = chemically synthesized
  source 1..22: mol_type = other DNA
ttactattttttggaagatttt

SEQ ID NO: 54111 - DNA, 22 bp, synthetic construct
  misc_feature 1..22: note = chemically synthesized
  source 1..22: mol_type = other DNA
actattttttggaagattttca

SEQ ID NO: 54112 - DNA, 22 bp, synthetic construct
  misc_feature 1..22: note = chemically synthesized
  source 1..22: mol_type = other DNA
ctattttttggaagattttcaa

SEQ ID NO: 54113 - DNA, 22 bp, synthetic construct
  misc_feature 1..22: note = chemically synthesized
  source 1..22: mol_type = other DNA
ttttttggaagattttcaaaaa

SEQ ID NO: 54114 - DNA, 22 bp, synthetic construct
  misc_feature 1..22: note = chemically synthesized
  source 1..22: mol_type = other DNA
tttggaagattttcaaaaaaag

SEQ ID NO: 54115 - DNA, 22 bp, synthetic construct
  misc_feature 1..22: note = chemically synthesized
  source 1..22: mol_type = other DNA
ttggaagattttcaaaaaaagt

SEQ ID NO: 54116 - DNA, 22 bp, synthetic construct
  misc_feature 1..22: note = chemically synthesized
  source 1..22: mol_type = other DNA
tggaagattttcaaaaaaagtg

SEQ ID NO: 54117 - DNA, 22 bp, synthetic construct
  misc_feature 1..22: note = chemically synthesized
  source 1..22: mol_type = other DNA
ggaagattttcaaaaaaagtgg

SEQ ID NO: 54118 - DNA, 22 bp, synthetic construct
  misc_feature 1..22: note = chemically synthesized
  source 1..22: mol_type = other DNA
gaagattttcaaaaaaagtgga

SEQ ID NO: 54119 - DNA, 22 bp, synthetic construct
  misc_feature 1..22: note = chemically synthesized
  source 1..22: mol_type = other DNA
tcaaaaaaagtggaagtggatt

SEQ ID NO: 54120 - DNA, 22 bp, synthetic construct
  misc_feature 1..22: note = chemically synthesized
  source 1..22: mol_type = other DNA
caaaaaaagtggaagtggattt

SEQ ID NO: 54121 - DNA, 22 bp, synthetic construct
  misc_feature 1..22: note = chemically synthesized
  source 1..22: mol_type = other DNA
aaaaaaagtggaagtggatttt

SEQ ID NO: 54122 - DNA, 22 bp, synthetic construct
  misc_feature 1..22: note = chemically synthesized
  source 1..22: mol_type = other DNA
tgattgggaaaaatctcgtgtc

SEQ ID NO: 54123 - DNA, 22 bp, synthetic construct
  misc_feature 1..22: note = chemically synthesized
  source 1..22: mol_type = other DNA
gattgggaaaaatctcgtgtct

SEQ ID NO: 54124 - DNA, 22 bp, synthetic construct
  misc_feature 1..22: note = chemically synthesized
  source 1..22: mol_type = other DNA
attgggaaaaatctcgtgtctg

SEQ ID NO: 54125 - DNA, 22 bp, synthetic construct
  misc_feature 1..22: note = chemically synthesized
  source 1..22: mol_type = other DNA
ggaaaaatctcgtgtctgaatg

SEQ ID NO: 54126 - DNA, 22 bp, synthetic construct
  misc_feature 1..22: note = chemically synthesized
  source 1..22: mol_type = other DNA
gtgtctgaatgtttacaagcac

SEQ ID NO: 54127 - DNA, 22 bp, synthetic construct
  misc_feature 1..22: note = chemically synthesized
  source 1..22: mol_type = other DNA
aatgtttacaagcaccgcgtgt

SEQ ID NO: 54128 - DNA, 22 bp, synthetic construct
  misc_feature 1..22: note = chemically synthesized
  source 1..22: mol_type = other DNA
acaagcaccgcgtgtgcgggag

SEQ ID NO: 54129 - DNA, 22 bp, synthetic construct
  misc_feature 1..22: note = chemically synthesized
  source 1..22: mol_type = other DNA
caagcaccgcgtgtgcgggagc

SEQ ID NO: 54130 - DNA, 22 bp, synthetic construct
  misc_feature 1..22: note = chemically synthesized
  source 1..22: mol_type = other DNA
ctgccaacaaacagacagagga

SEQ ID NO: 54131 - DNA, 22 bp, synthetic construct
  misc_feature 1..22: note = chemically synthesized
  source 1..22: mol_type = other DNA
ccaacaaacagacagaggaccg

SEQ ID NO: 54132 - DNA, 22 bp, synthetic construct
  misc_feature 1..22: note = chemically synthesized
  source 1..22: mol_type = other DNA
gcctcgcccgggccttgcccga

SEQ ID NO: 54133 - DNA, 22 bp, synthetic construct
  misc_feature 1..22: note = chemically synthesized
  source 1..22: mol_type = other DNA
gcccgggccttgcccgacctcg

SEQ ID NO: 54134 - DNA, 22 bp, synthetic construct
  misc_feature 1..22: note = chemically synthesized
  source 1..22: mol_type = other DNA
gcccgacctcgccgcgccccag

SEQ ID NO: 54135 - DNA, 22 bp, synthetic construct
  misc_feature 1..22: note = chemically synthesized
  source 1..22: mol_type = other DNA
cccgacctcgccgcgccccagc

SEQ ID NO: 54136 - DNA, 22 bp, synthetic construct
  misc_feature 1..22: note = chemically synthesized
  source 1..22: mol_type = other DNA
gccgcgccccagcccagccccg

SEQ ID NO: 54137 - DNA, 22 bp, synthetic construct
  misc_feature 1..22: note = chemically synthesized
  source 1..22: mol_type = other DNA
cgcgccagcctggcccgtggtc

SEQ ID NO: 54138 - DNA, 22 bp, synthetic construct
  misc_feature 1..22: note = chemically synthesized
  source 1..22: mol_type = other DNA
gcccgtggtcctggtccgcccc

SEQ ID NO: 54139 - DNA, 22 bp, synthetic construct
  misc_feature 1..22: note = chemically synthesized
  source 1..22: mol_type = other DNA
gtccgcccccagcacaatgccg

SEQ ID NO: 54140 - DNA, 22 bp, synthetic construct
  misc_feature 1..22: note = chemically synthesized
  source 1..22: mol_type = other DNA
ttctcgacctcccagactgcga

SEQ ID NO: 54141 - DNA, 22 bp, synthetic construct
  misc_feature 1..22: note = chemically synthesized
  source 1..22: mol_type = other DNA
ctcgacctcccagactgcgaaa

SEQ ID NO: 54142 - DNA, 22 bp, synthetic construct
  misc_feature 1..22: note = chemically synthesized
  source 1..22: mol_type = other DNA
tcgacctcccagactgcgaaat

SEQ ID NO: 54143 - DNA, 22 bp, synthetic construct
  misc_feature 1..22: note = chemically synthesized
  source 1..22: mol_type = other DNA
gacctcccagactgcgaaatcg

SEQ ID NO: 54144 - DNA, 22 bp, synthetic construct
  misc_feature 1..22: note = chemically synthesized
  source 1..22: mol_type = other DNA
ccagactgcgaaatcggctggg

SEQ ID NO: 54145 - DNA, 22 bp, synthetic construct
  misc_feature 1..22: note = chemically synthesized
  source 1..22: mol_type = other DNA
cgaaatcggctgggtgaaactc

SEQ ID NO: 54146 - DNA, 22 bp, synthetic construct
  misc_feature 1..22: note = chemically synthesized
  source 1..22: mol_type = other DNA
ggtgaaactcggctttgcaaag

SEQ ID NO: 54147 - DNA, 22 bp, synthetic construct
  misc_feature 1..22: note = chemically synthesized
  source 1..22: mol_type = other DNA
ggctttgcaaagcatttttatt

SEQ ID NO: 54148 - DNA, 22 bp, synthetic construct
  misc_feature 1..22: note = chemically synthesized
  source 1..22: mol_type = other DNA
tgcaaagcatttttattttgca

SEQ ID NO: 54149 - DNA, 22 bp, synthetic construct
  misc_feature 1..22: note = chemically synthesized
  source 1..22: mol_type = other DNA
gcaaagcatttttattttgcag

SEQ ID NO: 54150 - DNA, 22 bp, synthetic construct
  misc_feature 1..22: note = chemically synthesized
  source 1..22: mol_type = other DNA
caaagcatttttattttgcagg

SEQ ID NO: 54151 - DNA, 22 bp, synthetic construct
  misc_feature 1..22: note = chemically synthesized
  source 1..22: mol_type = other DNA
ttattttgcagggcaactgtaa

SEQ ID NO: 54152 - DNA, 22 bp, synthetic construct
  misc_feature 1..22: note = chemically synthesized
  source 1..22: mol_type = other DNA
tattttgcagggcaactgtaaa

SEQ ID NO: 54153 - DNA, 22 bp, synthetic construct
  misc_feature 1..22: note = chemically synthesized
  source 1..22: mol_type = other DNA
attttgcagggcaactgtaaaa

SEQ ID NO: 54154 - DNA, 22 bp, synthetic construct
  misc_feature 1..22: note = chemically synthesized
  source 1..22: mol_type = other DNA
ttttgcagggcaactgtaaaag

SEQ ID NO: 54155 - DNA, 22 bp, synthetic construct
  misc_feature 1..22: note = chemically synthesized
  source 1..22: mol_type = other DNA
tgcagggcaactgtaaaagcgc

SEQ ID NO: 54156 - DNA, 22 bp, synthetic construct
  misc_feature 1..22: note = chemically synthesized
  source 1..22: mol_type = other DNA
gcagggcaactgtaaaagcgcg

SEQ ID NO: 54157 - DNA, 22 bp, synthetic construct
  misc_feature 1..22: note = chemically synthesized
  source 1..22: mol_type = other DNA
cagggcaactgtaaaagcgcgt

SEQ ID NO: 54158 - DNA, 22 bp, synthetic construct
  misc_feature 1..22: note = chemically synthesized
  source 1..22: mol_type = other DNA
taaaagcgcgttctgcgcctcc

SEQ ID NO: 54159 - DNA, 22 bp, synthetic construct
  misc_feature 1..22: note = chemically synthesized
  source 1..22: mol_type = other DNA
tgcgcctcccctcccctccgcc

SEQ ID NO: 54160 - DNA, 22 bp, synthetic construct
  misc_feature 1..22: note = chemically synthesized
  source 1..22: mol_type = other DNA
cgcctcccctcccctccgccct

SEQ ID NO: 54161 - DNA, 22 bp, synthetic construct
  misc_feature 1..22: note = chemically synthesized
  source 1..22: mol_type = other DNA
ccctcccctccgccctgggtac

SEQ ID NO: 54162 - DNA, 22 bp, synthetic construct
  misc_feature 1..22: note = chemically synthesized
  source 1..22: mol_type = other DNA
ccctccgccctgggtactttct

SEQ ID NO: 54163 - DNA, 22 bp, synthetic construct
  misc_feature 1..22: note = chemically synthesized
  source 1..22: mol_type = other DNA
cgccctgggtactttctcagac

SEQ ID NO: 54164 - DNA, 22 bp, synthetic construct
  misc_feature 1..22: note = chemically synthesized
  source 1..22: mol_type = other DNA
ggtactttctcagacgtctctt

SEQ ID NO: 54165 - DNA, 22 bp, synthetic construct
  misc_feature 1..22: note = chemically synthesized
  source 1..22: mol_type = other DNA
tctcagacgtctcttgtccaca

SEQ ID NO: 54166 - DNA, 22 bp, synthetic construct
  misc_feature 1..22: note = chemically synthesized
  source 1..22: mol_type = other DNA
ctcagacgtctcttgtccacag

SEQ ID NO: 54167 - DNA, 22 bp, synthetic construct
  misc_feature 1..22: note = chemically synthesized
  source 1..22: mol_type = other DNA
tcagacgtctcttgtccacagc

SEQ ID NO: 54168 - DNA, 22 bp, synthetic construct
  misc_feature 1..22: note = chemically synthesized
  source 1..22: mol_type = other DNA
agacgtctcttgtccacagctc

SEQ ID NO: 54169 - DNA, 22 bp, synthetic construct
  misc_feature 1..22: note = chemically synthesized
  source 1..22: mol_type = other DNA
ttgtccacagctcgggaccgcg

SEQ ID NO: 54170 - DNA, 22 bp, synthetic construct
  misc_feature 1..22: note = chemically synthesized
  source 1..22: mol_type = other DNA
gtccacagctcgggaccgcgag

SEQ ID NO: 54171 - DNA, 22 bp, synthetic construct
  misc_feature 1..22: note = chemically synthesized
  source 1..22: mol_type = other DNA
tccacagctcgggaccgcgagg

SEQ ID NO: 54172 - DNA, 22 bp, synthetic construct
  misc_feature 1..22: note = chemically synthesized
  source 1..22: mol_type = other DNA
gggaccgcgaggaggtcaccac

SEQ ID NO: 54173 - DNA, 22 bp, synthetic construct
  misc_feature 1..22: note = chemically synthesized
  source 1..22: mol_type = other DNA
tccctgcccaccccccaccccg

SEQ ID NO: 54174 - DNA, 22 bp, synthetic construct
  misc_feature 1..22: note = chemically synthesized
  source 1..22: mol_type = other DNA
ccctgcccaccccccaccccgc

SEQ ID NO: 54175 - DNA, 22 bp, synthetic construct
  misc_feature 1..22: note = chemically synthesized
  source 1..22: mol_type = other DNA
cctgcccaccccccaccccgcc

SEQ ID NO: 54176 - DNA, 22 bp, synthetic construct
  misc_feature 1..22: note = chemically synthesized
  source 1..22: mol_type = other DNA
cccaccccccaccccgcccggt

SEQ ID NO: 54177 - DNA, 22 bp, synthetic construct
  misc_feature 1..22: note = chemically synthesized
  source 1..22: mol_type = other DNA
gtcaccagtccccctgcgcccc

SEQ ID NO: 54178 - DNA, 22 bp, synthetic construct
  misc_feature 1..22: note = chemically synthesized
  source 1..22: mol_type = other DNA
cgccccgagcacgactaggcca

SEQ ID NO: 54179 - DNA, 22 bp, synthetic construct
  misc_feature 1..22: note = chemically synthesized
  source 1..22: mol_type = other DNA
ggccaggtggcggggttgccgg

SEQ ID NO: 54180 - DNA, 22 bp, synthetic construct
  misc_feature 1..22: note = chemically synthesized
  source 1..22: mol_type = other DNA
ccggggaagggcaggggagaag

SEQ ID NO: 54181 - DNA, 22 bp, synthetic construct
  misc_feature 1..22: note = chemically synthesized
  source 1..22: mol_type = other DNA
gagtgtgcattttaagggcgct

SEQ ID NO: 54182 - DNA, 22 bp, synthetic construct
  misc_feature 1..22: note = chemically synthesized
  source 1..22: mol_type = other DNA
agtgtgcattttaagggcgctg

SEQ ID NO: 54183 - DNA, 22 bp, synthetic construct
  misc_feature 1..22: note = chemically synthesized
  source 1..22: mol_type = other DNA
taagggcgctggatcctgggac

SEQ ID NO: 54184 - DNA, 22 bp, synthetic construct
  misc_feature 1..22: note = chemically synthesized
  source 1..22: mol_type = other DNA
aagggcgctggatcctgggacc

SEQ ID NO: 54185 - DNA, 22 bp, synthetic construct
  misc_feature 1..22: note = chemically synthesized
  source 1..22: mol_type = other DNA
agggcgctggatcctgggaccc

SEQ ID NO: 54186 - DNA, 22 bp, synthetic construct
  misc_feature 1..22: note = chemically synthesized
  source 1..22: mol_type = other DNA
gatcctgggaccccgagcactt

SEQ ID NO: 54187 - DNA, 22 bp, synthetic construct
  misc_feature 1..22: note = chemically synthesized
  source 1..22: mol_type = other DNA
ggaccccgagcacttcaccctt

SEQ ID NO: 54188 - DNA, 22 bp, synthetic construct
  misc_feature 1..22: note = chemically synthesized
  source 1..22: mol_type = other DNA
caccctttgggtcttgccctct

SEQ ID NO: 54189 - DNA, 22 bp, synthetic construct
  misc_feature 1..22: note = chemically synthesized
  source 1..22: mol_type = other DNA
accctttgggtcttgccctctt

SEQ ID NO: 54190 - DNA, 22 bp, synthetic construct
  misc_feature 1..22: note = chemically synthesized
  source 1..22: mol_type = other DNA
tgggtcttgccctcttccccag

SEQ ID NO: 54191 - DNA, 22 bp, synthetic construct
  misc_feature 1..22: note = chemically synthesized
  source 1..22: mol_type = other DNA
gggtcttgccctcttccccagg

SEQ ID NO: 54192 - DNA, 22 bp, synthetic construct
  misc_feature 1..22: note = chemically synthesized
  source 1..22: mol_type = other DNA
ggtcttgccctcttccccaggc

SEQ ID NO: 54193 - DNA, 22 bp, synthetic construct
  misc_feature 1..22: note = chemically synthesized
  source 1..22: mol_type = other DNA
gccctcttccccaggcctggct

SEQ ID NO: 54194 - DNA, 22 bp, synthetic construct
  misc_feature 1..22: note = chemically synthesized
  source 1..22: mol_type = other DNA
ccctcttccccaggcctggctt

SEQ ID NO: 54195 - DNA, 22 bp, synthetic construct
  misc_feature 1..22: note = chemically synthesized
  source 1..22: mol_type = other DNA
ttccccaggcctggcttggtct

SEQ ID NO: 54196 - DNA, 22 bp, synthetic construct
  misc_feature 1..22: note = chemically synthesized
  source 1..22: mol_type = other DNA
ccccaggcctggcttggtctga

SEQ ID NO: 54197 - DNA, 22 bp, synthetic construct
  misc_feature 1..22: note = chemically synthesized
  source 1..22: mol_type = other DNA
cccaggcctggcttggtctgag

SEQ ID NO: 54198 - DNA, 22 bp, synthetic construct
  misc_feature 1..22: note = chemically synthesized
  source 1..22: mol_type = other DNA
gcttggtctgaggttcttgtga

SEQ ID NO: 54199 - DNA, 22 bp, synthetic construct
  misc_feature 1..22: note = chemically synthesized
  source 1..22: mol_type = other DNA
ggtctgaggttcttgtgagtct

SEQ ID NO: 54200 - DNA, 22 bp, synthetic construct
  misc_feature 1..22: note = chemically synthesized
  source 1..22: mol_type = other DNA
gtctgaggttcttgtgagtctg

SEQ ID NO: 54201 - DNA, 22 bp, synthetic construct
  misc_feature 1..22: note = chemically synthesized
  source 1..22: mol_type = other DNA
aggttcttgtgagtctgtataa

SEQ ID NO: 54202 - DNA, 22 bp, synthetic construct
  misc_feature 1..22: note = chemically synthesized
  source 1..22: mol_type = other DNA
ttgtgagtctgtataagagctg

SEQ ID NO: 54203 - DNA, 22 bp, synthetic construct
  misc_feature 1..22: note = chemically synthesized
  source 1..22: mol_type = other DNA
gtgagtctgtataagagctggt

SEQ ID NO: 54204 - DNA, 22 bp, synthetic construct
  misc_feature 1..22: note = chemically synthesized
  source 1..22: mol_type = other DNA
tgagtctgtataagagctggtg

SEQ ID NO: 54205 - DNA, 22 bp, synthetic construct
  misc_feature 1..22: note = chemically synthesized
  source 1..22: mol_type = other DNA
tataagagctggtggtggtggc

SEQ ID NO: 54206 - DNA, 22 bp, synthetic construct
  misc_feature 1..22: note = chemically synthesized
  source 1..22: mol_type = other DNA
gtggtggtggctgtctcccgct

SEQ ID NO: 54207 - DNA, 22 bp, synthetic construct
  misc_feature 1..22: note = chemically synthesized
  source 1..22: mol_type = other DNA
tctcccgctgactgcgcctgga

SEQ ID NO: 54208 - DNA, 22 bp, synthetic construct
  misc_feature 1..22: note = chemically synthesized
  source 1..22: mol_type = other DNA
ccgctgactgcgcctggaaagg

SEQ ID NO: 54209 - DNA, 22 bp, synthetic construct
  misc_feature 1..22: note = chemically synthesized
  source 1..22: mol_type = other DNA
actgcgcctggaaaggcgggcg

SEQ ID NO: 54210 - DNA, 22 bp, synthetic construct
  misc_feature 1..22: note = chemically synthesized
  source 1..22: mol_type = other DNA
cgcctggaaaggcgggcggtgg

SEQ ID NO: 54211 - DNA, 22 bp, synthetic construct
  misc_feature 1..22: note = chemically synthesized
  source 1..22: mol_type = other DNA
gaaaggcgggcggtgggcactt

SEQ ID NO: 54212 - DNA, 22 bp, synthetic construct
  misc_feature 1..22: note = chemically synthesized
  source 1..22: mol_type = other DNA
aggaaagtttggcagcaaggga

SEQ ID NO: 54213 - DNA, 22 bp, synthetic construct
  misc_feature 1..22: note = chemically synthesized
  source 1..22: mol_type = other DNA
ggaaagtttggcagcaagggaa

SEQ ID NO: 54214 - DNA, 22 bp, synthetic construct
  misc_feature 1..22: note = chemically synthesized
  source 1..22: mol_type = other DNA
ggcagcaagggaaagaaaggcg

SEQ ID NO: 54215 - DNA, 22 bp, synthetic construct
  misc_feature 1..22: note = chemically synthesized
  source 1..22: mol_type = other DNA
gcagcaagggaaagaaaggcgt

SEQ ID NO: 54216 - DNA, 22 bp, synthetic construct
  misc_feature 1..22: note = chemically synthesized
  source 1..22: mol_type = other DNA
cccccctactcaatttatgatt

SEQ ID NO: 54217 - DNA, 22 bp, synthetic construct
  misc_feature 1..22: note = chemically synthesized
  source 1..22: mol_type = other DNA
ctcaatttatgattcttacttt

SEQ ID NO: 54218 - DNA, 22 bp, synthetic construct
  misc_feature 1..22: note = chemically synthesized
  source 1..22: mol_type = other DNA
aatttatgattcttactttaaa

SEQ ID NO: 54219 - DNA, 22 bp, synthetic construct
  misc_feature 1..22: note = chemically synthesized
  source 1..22: mol_type = other DNA
atgattcttactttaaattttt

SEQ ID NO: 54220 - DNA, 22 bp, synthetic construct
  misc_feature 1..22: note = chemically synthesized
  source 1..22: mol_type = other DNA
tgattcttactttaaatttttg

SEQ ID NO: 54221 - DNA, 22 bp, synthetic construct
  misc_feature 1..22: note = chemically synthesized
  source 1..22: mol_type = other DNA
ttactttaaatttttgatgcag

SEQ ID NO: 54222 - DNA, 22 bp, synthetic construct
  misc_feature 1..22: note = chemically synthesized
  source 1..22: mol_type = other DNA
actttaaatttttgatgcagtt

SEQ ID NO: 54223 - DNA, 22 bp, synthetic construct
  misc_feature 1..22: note = chemically synthesized
  source 1..22: mol_type = other DNA
ctttaaatttttgatgcagttt

SEQ ID NO: 54224 - DNA, 22 bp, synthetic construct
  misc_feature 1..22: note = chemically synthesized
  source 1..22: mol_type = other DNA
taaatttttgatgcagttttaa

SEQ ID NO: 54225 - DNA, 22 bp, synthetic construct
  misc_feature 1..22: note = chemically synthesized
  source 1..22: mol_type = other DNA
aaatttttgatgcagttttaaa

SEQ ID NO: 54226 - DNA, 22 bp, synthetic construct
  misc_feature 1..22: note = chemically synthesized
  source 1..22: mol_type = other DNA
aatttttgatgcagttttaaag

SEQ ID NO: 54227 - DNA, 22 bp, synthetic construct
  misc_feature 1..22: note = chemically synthesized
  source 1..22: mol_type = other DNA
ttgatgcagttttaaaggacca

SEQ ID NO: 54228 - DNA, 22 bp, synthetic construct
  misc_feature 1..22: note = chemically synthesized
  source 1..22: mol_type = other DNA
tgatgcagttttaaaggaccac

SEQ ID NO: 54229 - DNA, 22 bp, synthetic construct
  misc_feature 1..22: note = chemically synthesized
  source 1..22: mol_type = other DNA
gatgcagttttaaaggaccacc

SEQ ID NO: 54230 - DNA, 22 bp, synthetic construct
  misc_feature 1..22: note = chemically synthesized
  source 1..22: mol_type = other DNA
atgcagttttaaaggaccacct

SEQ ID NO: 54231 - DNA, 22 bp, synthetic construct
  misc_feature 1..22: note = chemically synthesized
  source 1..22: mol_type = other DNA
taaaggaccacctatacttggt

SEQ ID NO: 54232 - DNA, 22 bp, synthetic construct
  misc_feature 1..22: note = chemically synthesized
  source 1..22: mol_type = other DNA
aaaggaccacctatacttggtt

SEQ ID NO: 54233 - DNA, 22 bp, synthetic construct
  misc_feature 1..22: note = chemically synthesized
  source 1..22: mol_type = other DNA
aaggaccacctatacttggttc

SEQ ID NO: 54234 - DNA, 22 bp, synthetic construct
  misc_feature 1..22: note = chemically synthesized
  source 1..22: mol_type = other DNA
tacttggttctgtgttttttta

SEQ ID NO: 54235 - DNA, 22 bp, synthetic construct
  misc_feature 1..22: note = chemically synthesized
  source 1..22: mol_type = other DNA
ggttctgtgtttttttaaaggg

SEQ ID NO: 54236 - DNA, 22 bp, synthetic construct
  misc_feature 1..22: note = chemically synthesized
  source 1..22: mol_type = other DNA
gttctgtgtttttttaaagggg

SEQ ID NO: 54237 - DNA, 22 bp, synthetic construct
  misc_feature 1..22: note = chemically synthesized
  source 1..22: mol_type = other DNA
tgtgtttttttaaaggggtggt

SEQ ID NO: 54238 - DNA, 22 bp, synthetic construct
  misc_feature 1..22: note = chemically synthesized
  source 1..22: mol_type = other DNA
tgtttttttaaaggggtggtgg

SEQ ID NO: 54239 - DNA, 22 bp, synthetic construct
  misc_feature 1..22: note = chemically synthesized
  source 1..22: mol_type = other DNA
ttttaaaggggtggtggtgggg

SEQ ID NO: 54240 - DNA, 22 bp, synthetic construct
  misc_feature 1..22: note = chemically synthesized
  source 1..22: mol_type = other DNA
tttaaaggggtggtggtggggg

SEQ ID NO: 54241 - DNA, 22 bp, synthetic construct
  misc_feature 1..22: note = chemically synthesized
  source 1..22: mol_type = other DNA
ttaaaggggtggtggtgggggg

SEQ ID NO: 54242 - DNA, 22 bp, synthetic construct
  misc_feature 1..22: note = chemically synthesized
  source 1..22: mol_type = other DNA
taaaggggtggtggtggggggt

SEQ ID NO: 54243 - DNA, 22 bp, synthetic construct
  misc_feature 1..22: note = chemically synthesized
  source 1..22: mol_type = other DNA
aaaggggtggtggtggggggtg

SEQ ID NO: 54244 - DNA, 22 bp, synthetic construct
  misc_feature 1..22: note = chemically synthesized
  source 1..22: mol_type = other DNA
aaggggtggtggtggggggtgc

SEQ ID NO: 54245 - DNA, 22 bp, synthetic construct
  misc_feature 1..22: note = chemically synthesized
  source 1..22: mol_type = other DNA
aatttttcactgggccctggaa

SEQ ID NO: 54246 - DNA, 22 bp, synthetic construct
  misc_feature 1..22: note = chemically synthesized
  source 1..22: mol_type = other DNA
atttttcactgggccctggaac

SEQ ID NO: 54247 - DNA, 22 bp, synthetic construct
  misc_feature 1..22: note = chemically synthesized
  source 1..22: mol_type = other DNA
ttcactgggccctggaacttgt

SEQ ID NO: 54248 - DNA, 22 bp, synthetic construct
  misc_feature 1..22: note = chemically synthesized
  source 1..22: mol_type = other DNA
tcactgggccctggaacttgtc

SEQ ID NO: 54249 - DNA, 22 bp, synthetic construct
  misc_feature 1..22: note = chemically synthesized
  source 1..22: mol_type = other DNA
cactgggccctggaacttgtca

SEQ ID NO: 54250 - DNA, 22 bp, synthetic construct
  misc_feature 1..22: note = chemically synthesized
  source 1..22: mol_type = other DNA
actgggccctggaacttgtcac

SEQ ID NO: 54251 - DNA, 22 bp, synthetic construct
  misc_feature 1..22: note = chemically synthesized
  source 1..22: mol_type = other DNA
ggccctggaacttgtcacacac

SEQ ID NO: 54252 - DNA, 22 bp, synthetic construct
  misc_feature 1..22: note = chemically synthesized
  source 1..22: mol_type = other DNA
gaacttgtcacacacttcggaa

SEQ ID NO: 54253 - DNA, 22 bp, synthetic construct
  misc_feature 1..22: note = chemically synthesized
  source 1..22: mol_type = other DNA
gtcacacacttcggaagctccc

SEQ ID NO: 54254 - DNA, 22 bp, synthetic construct
  misc_feature 1..22: note = chemically synthesized
  source 1..22: mol_type = other DNA
tcacacacttcggaagctcccc

SEQ ID NO: 54255 - DNA, 22 bp, synthetic construct
  misc_feature 1..22: note = chemically synthesized
  source 1..22: mol_type = other DNA
cggaagctcccccaccccggca

SEQ ID NO: 54256 - DNA, 22 bp, synthetic construct
  misc_feature 1..22: note = chemically synthesized
  source 1..22: mol_type = other DNA
ggaagctcccccaccccggcac

SEQ ID NO: 54257 - DNA, 22 bp, synthetic construct
  misc_feature 1..22: note = chemically synthesized
  source 1..22: mol_type = other DNA
ccccaccccggcacgttgcgcg

SEQ ID NO: 54258 - DNA, 22 bp, synthetic construct
  misc_feature 1..22: note = chemically synthesized
  source 1..22: mol_type = other DNA
cgcggccctccctctccccacc

SEQ ID NO: 54259 - DNA, 22 bp, synthetic construct
  misc_feature 1..22: note = chemically synthesized
  source 1..22: mol_type = other DNA
cctctccccaccccctcgcatc

SEQ ID NO: 54260 - DNA, 22 bp, synthetic construct
  misc_feature 1..22: note = chemically synthesized
  source 1..22: mol_type = other DNA
tccccaccccctcgcatccctc

SEQ ID NO: 54261 - DNA, 22 bp, synthetic construct
  misc_feature 1..22: note = chemically synthesized
  source 1..22: mol_type = other DNA
cccaccccctcgcatccctccc

SEQ ID NO: 54262 - DNA, 22 bp, synthetic construct
  misc_feature 1..22: note = chemically synthesized
  source 1..22: mol_type = other DNA
gcatccctccctcgccgctctc

SEQ ID NO: 54263 - DNA, 22 bp, synthetic construct
  misc_feature 1..22: note = chemically synthesized
  source 1..22: mol_type = other DNA
cctcgccgctctcccccgcccc

SEQ ID NO: 54264 - DNA, 22 bp, synthetic construct
  misc_feature 1..22: note = chemically synthesized
  source 1..22: mol_type = other DNA
gccgctctcccccgcccccaac

SEQ ID NO: 54265 - DNA, 22 bp, synthetic construct
  misc_feature 1..22: note = chemically synthesized
  source 1..22: mol_type = other DNA
tcccccgcccccaactcccccg

SEQ ID NO: 54266 - DNA, 22 bp, synthetic construct
  misc_feature 1..22: note = chemically synthesized
  source 1..22: mol_type = other DNA
ccccgcccccaactcccccggc

SEQ ID NO: 54267 - DNA, 22 bp, synthetic construct
  misc_feature 1..22: note = chemically synthesized
  source 1..22: mol_type = other DNA
ccccggccgcgccggatgcgga

SEQ ID NO: 54268 - DNA, 22 bp, synthetic construct
  misc_feature 1..22: note = chemically synthesized
  source 1..22: mol_type = other DNA
cagcccggccaggtaccggcgg

SEQ ID NO: 54269 - DNA, 22 bp, synthetic construct
  misc_feature 1..22: note = chemically synthesized
  source 1..22: mol_type = other DNA
gcaggactcgggaaagtcaggc

SEQ ID NO: 54270 - DNA, 22 bp, synthetic construct
  misc_feature 1..22: note = chemically synthesized
  source 1..22: mol_type = other DNA
gggaaagtcaggcccttcttcg

SEQ ID NO: 54271 - DNA, 22 bp, synthetic construct
  misc_feature 1..22: note = chemically synthesized
  source 1..22: mol_type = other DNA
cttcggaaggatgcagtggggg

SEQ ID NO: 54272 - DNA, 22 bp, synthetic construct
  misc_feature 1..22: note = chemically synthesized
  source 1..22: mol_type = other DNA
ttcggaaggatgcagtgggggc

SEQ ID NO: 54273 - DNA, 22 bp, synthetic construct
  misc_feature 1..22: note = chemically synthesized
  source 1..22: mol_type = other DNA
cggaaggatgcagtgggggctc

SEQ ID NO: 54274 - DNA, 22 bp, synthetic construct
  misc_feature 1..22: note = chemically synthesized
  source 1..22: mol_type = other DNA
ggaaggatgcagtgggggctca

SEQ ID NO: 54275 - DNA, 22 bp, synthetic construct
  misc_feature 1..22: note = chemically synthesized
  source 1..22: mol_type = other DNA
aaaggacagaccggggcgcgca

SEQ ID NO: 54276 - DNA, 22 bp, synthetic construct
  misc_feature 1..22: note = chemically synthesized
  source 1..22: mol_type = other DNA
ctccctcgtacccctctccctc

SEQ ID NO: 54277 - DNA, 22 bp, synthetic construct
  misc_feature 1..22: note = chemically synthesized
  source 1..22: mol_type = other DNA
cctcgtacccctctccctcctg

SEQ ID NO: 54278 - DNA, 22 bp, synthetic construct
  misc_feature 1..22: note = chemically synthesized
  source 1..22: mol_type = other DNA
gtacccctctccctcctgggtc

SEQ ID NO: 54279 - DNA, 22 bp, synthetic construct
  misc_feature 1..22: note = chemically synthesized
  source 1..22: mol_type = other DNA
tccctcctgggtccatcttggg

SEQ ID NO: 54280 - DNA, 22 bp, synthetic construct
  misc_feature 1..22: note = chemically synthesized
  source 1..22: mol_type = other DNA
cctcctgggtccatcttgggac

SEQ ID NO: 54281 - DNA, 22 bp, synthetic construct
  misc_feature 1..22: note = chemically synthesized
  source 1..22: mol_type = other DNA
ctgggtccatcttgggacactc

SEQ ID NO: 54282 - DNA, 22 bp, synthetic construct
  misc_feature 1..22: note = chemically synthesized
  source 1..22: mol_type = other DNA
ggtccatcttgggacactctag

SEQ ID NO: 54283 - DNA, 22 bp, synthetic construct
  misc_feature 1..22: note = chemically synthesized
  source 1..22: mol_type = other DNA
gggacactctaggctgggaggg

SEQ ID NO: 54284 - DNA, 22 bp, synthetic construct
  misc_feature 1..22: note = chemically synthesized
  source 1..22: mol_type = other DNA
ggacactctaggctgggagggt

SEQ ID NO: 54285 - DNA, 22 bp, synthetic construct
  misc_feature 1..22: note = chemically synthesized
  source 1..22: mol_type = other DNA
taggctgggagggttagtaccc

SEQ ID NO: 54286 - DNA, 22 bp, synthetic construct
  misc_feature 1..22: note = chemically synthesized
  source 1..22: mol_type = other DNA
ggctgggagggttagtaccccc

SEQ ID NO: 54287 - DNA, 22 bp, synthetic construct
  misc_feature 1..22: note = chemically synthesized
  source 1..22: mol_type = other DNA
ggagggttagtaccccctcctc

SEQ ID NO: 54288 - DNA, 22 bp, synthetic construct
  misc_feature 1..22: note = chemically synthesized
  source 1..22: mol_type = other DNA
gtaccccctcctcctgtcccgg

SEQ ID NO: 54289 - DNA, 22 bp, synthetic construct
  misc_feature 1..22: note = chemically synthesized
  source 1..22: mol_type = other DNA
ctcctgtcccggggttaaaggg

SEQ ID NO: 54290 - DNA, 22 bp, synthetic construct
  misc_feature 1..22: note = chemically synthesized
  source 1..22: mol_type = other DNA
ctgtcccggggttaaagggcca

SEQ ID NO: 54291 - DNA, 22 bp, synthetic construct
  misc_feature 1..22: note = chemically synthesized
  source 1..22: mol_type = other DNA
tcccggggttaaagggccagtt

SEQ ID NO: 54292 - DNA, 22 bp, synthetic construct
  misc_feature 1..22: note = chemically synthesized
  source 1..22: mol_type = other DNA
aagggccagtttgggagggggt

SEQ ID NO: 54293 - DNA, 22 bp, synthetic construct
  misc_feature 1..22: note = chemically synthesized
  source 1..22: mol_type = other DNA
gggagggggtgagggggccact

SEQ ID NO: 54294 - DNA, 22 bp, synthetic construct
  misc_feature 1..22: note = chemically synthesized
  source 1..22: mol_type = other DNA
ggagggggtgagggggccactt

SEQ ID NO: 54295 - DNA, 22 bp, synthetic construct
  misc_feature 1..22: note = chemically synthesized
  source 1..22: mol_type = other DNA
ctttctgtcctcattttctggg

SEQ ID NO: 54296 - DNA, 22 bp, synthetic construct
  misc_feature 1..22: note = chemically synthesized
  source 1..22: mol_type = other DNA
tttctgtcctcattttctgggt

SEQ ID NO: 54297 - DNA, 22 bp, synthetic construct
  misc_feature 1..22: note = chemically synthesized
  source 1..22: mol_type = other DNA
tctgtcctcattttctgggtgc

SEQ ID NO: 54298 - DNA, 22 bp, synthetic construct
  misc_feature 1..22: note = chemically synthesized
  source 1..22: mol_type = other DNA
ctgtcctcattttctgggtgct

SEQ ID NO: 54299 - DNA, 22 bp, synthetic construct
  misc_feature 1..22: note = chemically synthesized
  source 1..22: mol_type = other DNA
tgtcctcattttctgggtgctc

SEQ ID NO: 54300 - DNA, 22 bp, synthetic construct
  misc_feature 1..22: note = chemically synthesized
  source 1..22: mol_type = other DNA
tcctcattttctgggtgctcag

SEQ ID NO: 54301 - DNA, 22 bp, synthetic construct
  misc_feature 1..22: note = chemically synthesized
  source 1..22: mol_type = other DNA
attttctgggtgctcagagggg

SEQ ID NO: 54302 - DNA, 22 bp, synthetic construct
  misc_feature 1..22: note = chemically synthesized
  source 1..22: mol_type = other DNA
tctgggtgctcagagggggcag

SEQ ID NO: 54303 - DNA, 22 bp, synthetic construct
  misc_feature 1..22: note = chemically synthesized
  source 1..22: mol_type = other DNA
ctgggtgctcagagggggcagg

SEQ ID NO: 54304 - DNA, 22 bp, synthetic construct
  misc_feature 1..22: note = chemically synthesized
  source 1..22: mol_type = other DNA
tgggtgctcagagggggcagga

SEQ ID NO: 54305 - DNA, 22 bp, synthetic construct
  misc_feature 1..22: note = chemically synthesized
  source 1..22: mol_type = other DNA
ggtgctcagagggggcaggagc

SEQ ID NO: 54306 - DNA, 22 bp, synthetic construct
  misc_feature 1..22: note = chemically synthesized
  source 1..22: mol_type = other DNA
agagggggcaggagccatcccg

SEQ ID NO: 54307 - DNA, 22 bp, synthetic construct
  misc_feature 1..22: note = chemically synthesized
  source 1..22: mol_type = other DNA
agtaccacccccccgccccccg

SEQ ID NO: 54308 - DNA, 22 bp, synthetic construct
  misc_feature 1..22: note = chemically synthesized
  source 1..22: mol_type = other DNA
tgctatgtgggctgaatgagcc

SEQ ID NO: 54309 - DNA, 22 bp, synthetic construct
  misc_feature 1..22: note = chemically synthesized
  source 1..22: mol_type = other DNA
ctatgtgggctgaatgagccat

SEQ ID NO: 54310 - DNA, 22 bp, synthetic construct
  misc_feature 1..22: note = chemically synthesized
  source 1..22: mol_type = other DNA
tgtgggctgaatgagccattcg

SEQ ID NO: 54311 - DNA, 22 bp, synthetic construct
  misc_feature 1..22: note = chemically synthesized
  source 1..22: mol_type = other DNA
aatgagccattcggtcgctagg

SEQ ID NO: 54312 - DNA, 22 bp, synthetic construct
  misc_feature 1..22: note = chemically synthesized
  source 1..22: mol_type = other DNA
ggtcgctaggaggcagaacaag

SEQ ID NO: 54313 - DNA, 22 bp, synthetic construct
  misc_feature 1..22: note = chemically synthesized
  source 1..22: mol_type = other DNA
ggaggcagaacaagatcaagaa

SEQ ID NO: 54314 - DNA, 22 bp, synthetic construct
  misc_feature 1..22: note = chemically synthesized
  source 1..22: mol_type = other DNA
agcgaacttgaacctgtaccag

SEQ ID NO: 54315 - DNA, 22 bp, synthetic construct
  misc_feature 1..22: note = chemically synthesized
  source 1..22: mol_type = other DNA
gaacctgtaccagagcctcccc

SEQ ID NO: 54316 - DNA, 22 bp, synthetic construct
  misc_feature 1..22: note = chemically synthesized
  source 1..22: mol_type = other DNA
aacctgtaccagagcctccccc

SEQ ID NO: 54317 - DNA, 22 bp, synthetic construct
  misc_feature 1..22: note = chemically synthesized
  source 1..22: mol_type = other DNA
taccagagcctcccccacctcc

SEQ ID NO: 54318 - DNA, 22 bp, synthetic construct
  misc_feature 1..22: note = chemically synthesized
  source 1..22: mol_type = other DNA
ccccacctcctgcccggcgatt

SEQ ID NO: 54319 - DNA, 22 bp, synthetic construct
  misc_feature 1..22: note = chemically synthesized
  source 1..22: mol_type = other DNA
ctgcccggcgattctcgtccgg

SEQ ID NO: 54320 - DNA, 22 bp, synthetic construct
  misc_feature 1..22: note = chemically synthesized
  source 1..22: mol_type = other DNA
cccggcgattctcgtccgggga

SEQ ID NO: 54321 - DNA, 22 bp, synthetic construct
  misc_feature 1..22: note = chemically synthesized
  source 1..22: mol_type = other DNA
tcgtccggggaggaacgagctt

SEQ ID NO: 54322 - DNA, 22 bp, synthetic construct
  misc_feature 1..22: note = chemically synthesized
  source 1..22: mol_type = other DNA
gtccggggaggaacgagctttg

SEQ ID NO: 54323 - DNA, 22 bp, synthetic construct
  misc_feature 1..22: note = chemically synthesized
  source 1..22: mol_type = other DNA
tgcgagggtgggggtgggggga

SEQ ID NO: 54324 - DNA, 22 bp, synthetic construct
  misc_feature 1..22: note = chemically synthesized
  source 1..22: mol_type = other DNA
gcgagggtgggggtggggggaa

SEQ ID NO: 54325 - DNA, 22 bp, synthetic construct
  misc_feature 1..22: note = chemically synthesized
  source 1..22: mol_type = other DNA
cgagggtgggggtggggggaaa

SEQ ID NO: 54326 - DNA, 22 bp, synthetic construct
  misc_feature 1..22: note = chemically synthesized
  source 1..22: mol_type = other DNA
ggcagaattccctttctctccc

SEQ ID NO: 54327 - DNA, 22 bp, synthetic construct
  misc_feature 1..22: note = chemically synthesized
  source 1..22: mol_type = other DNA
cctttctctcccccatcacccc

SEQ ID NO: 54328 - DNA, 22 bp, synthetic construct
  misc_feature 1..22: note = chemically synthesized
  source 1..22: mol_type = other DNA
tctctcccccatcaccccgtat

SEQ ID NO: 54329 - DNA, 22 bp, synthetic construct
  misc_feature 1..22: note = chemically synthesized
  source 1..22: mol_type = other DNA
ctctcccccatcaccccgtatg

SEQ ID NO: 54330 - DNA, 22 bp, synthetic construct
  misc_feature 1..22: note = chemically synthesized
  source 1..22: mol_type = other DNA
tctcccccatcaccccgtatgt

SEQ ID NO: 54331 - DNA, 22 bp, synthetic construct
  misc_feature 1..22: note = chemically synthesized
  source 1..22: mol_type = other DNA
tcccccatcaccccgtatgtct

SEQ ID NO: 54332 - DNA, 22 bp, synthetic construct
  misc_feature 1..22: note = chemically synthesized
  source 1..22: mol_type = other DNA
ccccatcaccccgtatgtcttt

SEQ ID NO: 54333 - DNA, 22 bp, synthetic construct
  misc_feature 1..22: note = chemically synthesized
  source 1..22: mol_type = other DNA
tgttcttcattttgactttaaa

SEQ ID NO: 54334 - DNA, 22 bp, synthetic construct
  misc_feature 1..22: note = chemically synthesized
  source 1..22: mol_type = other DNA
gttcttcattttgactttaaaa

SEQ ID NO: 54335 - DNA, 22 bp, synthetic construct
  misc_feature 1..22: note = chemically synthesized
  source 1..22: mol_type = other DNA
ttcttcattttgactttaaaaa

SEQ ID NO: 54336 - DNA, 22 bp, synthetic construct
  misc_feature 1..22: note = chemically synthesized
  source 1..22: mol_type = other DNA
ttcattttgactttaaaaatgc

SEQ ID NO: 54337 - DNA, 22 bp, synthetic construct
  misc_feature 1..22: note = chemically synthesized
  source 1..22: mol_type = other DNA
cattttgactttaaaaatgctt

SEQ ID NO: 54338 - DNA, 22 bp, synthetic construct
  misc_feature 1..22: note = chemically synthesized
  source 1..22: mol_type = other DNA
attttgactttaaaaatgcttc

SEQ ID NO: 54339 - DNA, 22 bp, synthetic construct
  misc_feature 1..22: note = chemically synthesized
  source 1..22: mol_type = other DNA
tgactttaaaaatgcttctggc

SEQ ID NO: 54340 - DNA, 22 bp, synthetic construct
  misc_feature 1..22: note = chemically synthesized
  source 1..22: mol_type = other DNA
gactttaaaaatgcttctggcc

SEQ ID NO: 54341 - DNA, 22 bp, synthetic construct
  misc_feature 1..22: note = chemically synthesized
  source 1..22: mol_type = other DNA
actttaaaaatgcttctggccg

SEQ ID NO: 54342 - DNA, 22 bp, synthetic construct
  misc_feature 1..22: note = chemically synthesized
  source 1..22: mol_type = other DNA
taaaaatgcttctggccggggc

SEQ ID NO: 54343 - DNA, 22 bp, synthetic construct
  misc_feature 1..22: note = chemically synthesized
  source 1..22: mol_type = other DNA
aaaaatgcttctggccggggcc

SEQ ID NO: 54344 - DNA, 22 bp, synthetic construct
  misc_feature 1..22: note = chemically synthesized
  source 1..22: mol_type = other DNA
aaaatgcttctggccggggccg

SEQ ID NO: 54345 - DNA, 22 bp, synthetic construct
  misc_feature 1..22: note = chemically synthesized
  source 1..22: mol_type = other DNA
ctggccggggccgcggagaagc

SEQ ID NO: 54346 - DNA, 22 bp, synthetic construct
  misc_feature 1..22: note = chemically synthesized
  source 1..22: mol_type = other DNA
tggccggggccgcggagaagcg

SEQ ID NO: 54347 - DNA, 22 bp, synthetic construct
  misc_feature 1..22: note = chemically synthesized
  source 1..22: mol_type = other DNA
gccggggccgcggagaagcgac

SEQ ID NO: 54348 - DNA, 22 bp, synthetic construct
  misc_feature 1..22: note = chemically synthesized
  source 1..22: mol_type = other DNA
agaccagcgcgcgccgggctcg

SEQ ID NO: 54349 - DNA, 22 bp, synthetic construct
  misc_feature 1..22: note = chemically synthesized
  source 1..22: mol_type = other DNA
ggagcacggtgcagttttcgct

SEQ ID NO: 54350 - DNA, 22 bp, synthetic construct
  misc_feature 1..22: note = chemically synthesized
  source 1..22: mol_type = other DNA
tcgctttctttcggggccggca

SEQ ID NO: 54351 - DNA, 22 bp, synthetic construct
  misc_feature 1..22: note = chemically synthesized
  source 1..22: mol_type = other DNA
cgctttctttcggggccggcat

SEQ ID NO: 54352 - DNA, 22 bp, synthetic construct
  misc_feature 1..22: note = chemically synthesized
  source 1..22: mol_type = other DNA
gctttctttcggggccggcatt

SEQ ID NO: 54353 - DNA, 22 bp, synthetic construct
  misc_feature 1..22: note = chemically synthesized
  source 1..22: mol_type = other DNA
tctttcggggccggcatttttg

SEQ ID NO: 54354 - DNA, 22 bp, synthetic construct
  misc_feature 1..22: note = chemically synthesized
  source 1..22: mol_type = other DNA
ctttcggggccggcatttttgg

SEQ ID NO: 54355 - DNA, 22 bp, synthetic construct
  misc_feature 1..22: note = chemically synthesized
  source 1..22: mol_type = other DNA
tttcggggccggcatttttggt

SEQ ID NO: 54356 - DNA, 22 bp, synthetic construct
  misc_feature 1..22: note = chemically synthesized
  source 1..22: mol_type = other DNA
tcggggccggcatttttggtag

SEQ ID NO: 54357 - DNA, 22 bp, synthetic construct
  misc_feature 1..22: note = chemically synthesized
  source 1..22: mol_type = other DNA
cggggccggcatttttggtagg

SEQ ID NO: 54358 - DNA, 22 bp, synthetic construct
  misc_feature 1..22: note = chemically synthesized
  source 1..22: mol_type = other DNA
ggggccggcatttttggtaggg

SEQ ID NO: 54359 - DNA, 22 bp, synthetic construct
  misc_feature 1..22: note = chemically synthesized
  source 1..22: mol_type = other DNA
ttggtagggaggaaccgggagt

SEQ ID NO: 54360 - DNA, 22 bp, synthetic construct
  misc_feature 1..22: note = chemically synthesized
  source 1..22: mol_type = other DNA
tggtagggaggaaccgggagtg

SEQ ID NO: 54361 - DNA, 22 bp, synthetic construct
  misc_feature 1..22: note = chemically synthesized
  source 1..22: mol_type = other DNA
ggtagggaggaaccgggagtgc

SEQ ID NO: 54362 - DNA, 22 bp, synthetic construct
  misc_feature 1..22: note = chemically synthesized
  source 1..22: mol_type = other DNA
gtagggaggaaccgggagtgcg

SEQ ID NO: 54363 - DNA, 22 bp, synthetic construct
  misc_feature 1..22: note = chemically synthesized
  source 1..22: mol_type = other DNA
tagggcttcggggcatggccga

SEQ ID NO: 54364 - DNA, 22 bp, synthetic construct
  misc_feature 1..22: note = chemically synthesized
  source 1..22: mol_type = other DNA
gggcttcggggcatggccgaag

SEQ ID NO: 54365 - DNA, 22 bp, synthetic construct
  misc_feature 1..22: note = chemically synthesized
  source 1..22: mol_type = other DNA
cggggcatggccgaagaggggg

SEQ ID NO: 54366 - DNA, 22 bp, synthetic construct
  misc_feature 1..22: note = chemically synthesized
  source 1..22: mol_type = other DNA
ggggcatggccgaagaggggga

SEQ ID NO: 54367 - DNA, 22 bp, synthetic construct
  misc_feature 1..22: note = chemically synthesized
  source 1..22: mol_type = other DNA
gcacttggtctccagcctcact

SEQ ID NO: 54368 - DNA, 22 bp, synthetic construct
  misc_feature 1..22: note = chemically synthesized
  source 1..22: mol_type = other DNA
cacttggtctccagcctcactt

SEQ ID NO: 54369 - DNA, 22 bp, synthetic construct
  misc_feature 1..22: note = chemically synthesized
  source 1..22: mol_type = other DNA
ggtctccagcctcacttcttcc

SEQ ID NO: 54370 - DNA, 22 bp, synthetic construct
  misc_feature 1..22: note = chemically synthesized
  source 1..22: mol_type = other DNA
gtctccagcctcacttcttcca

SEQ ID NO: 54371 - DNA, 22 bp, synthetic construct
  misc_feature 1..22: note = chemically synthesized
  source 1..22: mol_type = other DNA
cagcctcacttcttccaccccc

SEQ ID NO: 54372 - DNA, 22 bp, synthetic construct
  misc_feature 1..22: note = chemically synthesized
  source 1..22: mol_type = other DNA
acttcttccaccccctcacccc

SEQ ID NO: 54373 - DNA, 22 bp, synthetic construct
  misc_feature 1..22: note = chemically synthesized
  source 1..22: mol_type = other DNA
cttccaccccctcacccccatg

SEQ ID NO: 54374 - DNA, 22 bp, synthetic construct
  misc_feature 1..22: note = chemically synthesized
  source 1..22: mol_type = other DNA
ttccaccccctcacccccatgc

SEQ ID NO: 54375 - DNA, 22 bp, synthetic construct
  misc_feature 1..22: note = chemically synthesized
  source 1..22: mol_type = other DNA
ccaccccctcacccccatgcaa

SEQ ID NO: 54376 - DNA, 22 bp, synthetic construct
  misc_feature 1..22: note = chemically synthesized
  source 1..22: mol_type = other DNA
caccccctcacccccatgcaaa

SEQ ID NO: 54377 - DNA, 22 bp, synthetic construct
  misc_feature 1..22: note = chemically synthesized
  source 1..22: mol_type = other DNA
acccccatgcaaagcacagacc

SEQ ID NO: 54378 - DNA, 22 bp, synthetic construct
  misc_feature 1..22: note = chemically synthesized
  source 1..22: mol_type = other DNA
ggtggcctcggctggcttgctg

SEQ ID NO: 54379 - DNA, 22 bp, synthetic construct
  misc_feature 1..22: note = chemically synthesized
  source 1..22: mol_type = other DNA
ggctggcttgctgggcggctct

SEQ ID NO: 54380 - DNA, 22 bp, synthetic construct
  misc_feature 1..22: note = chemically synthesized
  source 1..22: mol_type = other DNA
gcttgctgggcggctctgcagc

SEQ ID NO: 54381 - DNA, 22 bp, synthetic construct
  misc_feature 1..22: note = chemically synthesized
  source 1..22: mol_type = other DNA
gctgggcggctctgcagcccga

SEQ ID NO: 54382 - DNA, 22 bp, synthetic construct
  misc_feature 1..22: note = chemically synthesized
  source 1..22: mol_type = other DNA
ctgggcggctctgcagcccgac

SEQ ID NO: 54383 - DNA, 22 bp, synthetic construct
  misc_feature 1..22: note = chemically synthesized
  source 1..22: mol_type = other DNA
ggcggctctgcagcccgacacc

SEQ ID NO: 54384 - DNA, 22 bp, synthetic construct
  misc_feature 1..22: note = chemically synthesized
  source 1..22: mol_type = other DNA
tgcagcccgacaccccccctct

SEQ ID NO: 54385 - DNA, 22 bp, synthetic construct
  misc_feature 1..22: note = chemically synthesized
  source 1..22: mol_type = other DNA
cagcccgacaccccccctctcg

SEQ ID NO: 54386 - DNA, 22 bp, synthetic construct
  misc_feature 1..22: note = chemically synthesized
  source 1..22: mol_type = other DNA
tcgcctcggagctcggaatcac

SEQ ID NO: 54387 - DNA, 22 bp, synthetic construct
  misc_feature 1..22: note = chemically synthesized
  source 1..22: mol_type = other DNA
gcctcggagctcggaatcacaa

SEQ ID NO: 54388 - DNA, 22 bp, synthetic construct
  misc_feature 1..22: note = chemically synthesized
  source 1..22: mol_type = other DNA
ggagctcggaatcacaacaata

SEQ ID NO: 54389 - DNA, 22 bp, synthetic construct
  misc_feature 1..22: note = chemically synthesized
  source 1..22: mol_type = other DNA
ggaatcacaacaatagtaatag

SEQ ID NO: 54390 - DNA, 22 bp, synthetic construct
  misc_feature 1..22: note = chemically synthesized
  source 1..22: mol_type = other DNA
tcatcataatgatgcgggcagg

SEQ ID NO: 54391 - DNA, 22 bp, synthetic construct
  misc_feature 1..22: note = chemically synthesized
  source 1..22: mol_type = other DNA
ataatgaataaccgcagccgcc

SEQ ID NO: 54392 - DNA, 22 bp, synthetic construct
  misc_feature 1..22: note = chemically synthesized
  source 1..22: mol_type = other DNA
cgggggaaatgcatttgcagag

SEQ ID NO: 54393 - DNA, 22 bp, synthetic construct
  misc_feature 1..22: note = chemically synthesized
  source 1..22: mol_type = other DNA
gcagagatcccccaaagtaaaa

SEQ ID NO: 54394 - DNA, 22 bp, synthetic construct
  misc_feature 1..22: note = chemically synthesized
  source 1..22: mol_type = other DNA
cagagatcccccaaagtaaaaa

SEQ ID NO: 54395 - DNA, 22 bp, synthetic construct
  misc_feature 1..22: note = chemically synthesized
  source 1..22: mol_type = other DNA
gtggacacagaatgaatctcag

SEQ ID NO: 54396 - DNA, 22 bp, synthetic construct
  misc_feature 1..22: note = chemically synthesized
  source 1..22: mol_type = other DNA
tggacacagaatgaatctcagg

SEQ ID NO: 54397 - DNA, 22 bp, synthetic construct
  misc_feature 1..22: note = chemically synthesized
  source 1..22: mol_type = other DNA
aggacccgcgcttgaggtgtgt

SEQ ID NO: 54398 - DNA, 22 bp, synthetic construct
  misc_feature 1..22: note = chemically synthesized
  source 1..22: mol_type = other DNA
gaggtgtgtgcggagatactga

SEQ ID NO: 54399 - DNA, 22 bp, synthetic construct
  misc_feature 1..22: note = chemically synthesized
  source 1..22: mol_type = other DNA
aggtgtgtgcggagatactgag

SEQ ID NO: 54400 - DNA, 22 bp, synthetic construct
  misc_feature 1..22: note = chemically synthesized
  source 1..22: mol_type = other DNA
agactgcaccaggttaaccagc

SEQ ID NO: 54401 - DNA, 22 bp, synthetic construct
  misc_feature 1..22: note = chemically synthesized
  source 1..22: mol_type = other DNA
caccaggttaaccagccgggtt

SEQ ID NO: 54402 - DNA, 22 bp, synthetic construct
  misc_feature 1..22: note = chemically synthesized
  source 1..22: mol_type = other DNA
accagccgggttttccaaacct

SEQ ID NO: 54403 - DNA, 22 bp, synthetic construct
  misc_feature 1..22: note = chemically synthesized
  source 1..22: mol_type = other DNA
tccaaacctcacttcctttttc

SEQ ID NO: 54404 - DNA, 22 bp, synthetic construct
  misc_feature 1..22: note = chemically synthesized
  source 1..22: mol_type = other DNA
ccaaacctcacttcctttttca

SEQ ID NO: 54405 - DNA, 22 bp, synthetic construct
  misc_feature 1..22: note = chemically synthesized
  source 1..22: mol_type = other DNA
caaacctcacttcctttttcac

SEQ ID NO: 54406 - DNA, 22 bp, synthetic construct
  misc_feature 1..22: note = chemically synthesized
  source 1..22: mol_type = other DNA
acttcctttttcaccaactggc

SEQ ID NO: 54407 - DNA, 22 bp, synthetic construct
  misc_feature 1..22: note = chemically synthesized
  source 1..22: mol_type = other DNA
cctttttcaccaactggcaggc

SEQ ID NO: 54408 - DNA, 22 bp, synthetic construct
  misc_feature 1..22: note = chemically synthesized
  source 1..22: mol_type = other DNA
ctttttcaccaactggcaggcc

SEQ ID NO: 54409 - DNA, 22 bp, synthetic construct
  misc_feature 1..22: note = chemically synthesized
  source 1..22: mol_type = other DNA
tttcaccaactggcaggcccag

SEQ ID NO: 54410 - DNA, 22 bp, synthetic construct
  misc_feature 1..22: note = chemically synthesized
  source 1..22: mol_type = other DNA
ttcaccaactggcaggcccagg

SEQ ID NO: 54411 - DNA, 22 bp, synthetic construct
  misc_feature 1..22: note = chemically synthesized
  source 1..22: mol_type = other DNA
tcaccaactggcaggcccaggg

SEQ ID NO: 54412 - DNA, 22 bp, synthetic construct
  misc_feature 1..22: note = chemically synthesized
  source 1..22: mol_type = other DNA
caccaactggcaggcccaggga

SEQ ID NO: 54413 - DNA, 22 bp, synthetic construct
  misc_feature 1..22: note = chemically synthesized
  source 1..22: mol_type = other DNA
accaactggcaggcccagggaa

SEQ ID NO: 54414 - DNA, 22 bp, synthetic construct
  misc_feature 1..22: note = chemically synthesized
  source 1..22: mol_type = other DNA
gcaggcccagggaaccgtcacc

SEQ ID NO: 54415 - DNA, 22 bp, synthetic construct
  misc_feature 1..22: note = chemically synthesized
  source 1..22: mol_type = other DNA
gccgagctggacgggcatggag

SEQ ID NO: 54416 - DNA, 22 bp, synthetic construct
  misc_feature 1..22: note = chemically synthesized
  source 1..22: mol_type = other DNA
gacgggcatggaggcagcagtc

SEQ ID NO: 54417 - DNA, 22 bp, synthetic construct
  misc_feature 1..22: note = chemically synthesized
  source 1..22: mol_type = other DNA
gctgccctccgtctccgggccc

SEQ ID NO: 54418 - DNA, 22 bp, synthetic construct
  misc_feature 1..22: note = chemically synthesized
  source 1..22: mol_type = other DNA
ccctccgtctccgggcccccgg

SEQ ID NO: 54419 - DNA, 22 bp, synthetic construct
  misc_feature 1..22: note = chemically synthesized
  source 1..22: mol_type = other DNA
cgtctccgggcccccgggcccc

SEQ ID NO: 54420 - DNA, 22 bp, synthetic construct
  misc_feature 1..22: note = chemically synthesized
  source 1..22: mol_type = other DNA
cgggcccccgggccccaaggcc

SEQ ID NO: 54421 - DNA, 22 bp, synthetic construct
  misc_feature 1..22: note = chemically synthesized
  source 1..22: mol_type = other DNA
ctgcacgtgttcgcagcaagcg

SEQ ID NO: 54422 - DNA, 22 bp, synthetic construct
  misc_feature 1..22: note = chemically synthesized
  source 1..22: mol_type = other DNA
cacgtgttcgcagcaagcgcgg

SEQ ID NO: 54423 - DNA, 22 bp, synthetic construct
  misc_feature 1..22: note = chemically synthesized
  source 1..22: mol_type = other DNA
gcagcaagcgcggcgggagcct

SEQ ID NO: 54424 - DNA, 22 bp, synthetic construct
  misc_feature 1..22: note = chemically synthesized
  source 1..22: mol_type = other DNA
cagccagcacgctgctcgcttt

SEQ ID NO: 54425 - DNA, 22 bp, synthetic construct
  misc_feature 1..22: note = chemically synthesized
  source 1..22: mol_type = other DNA
ctcgctttgtgcctcagagtcc

SEQ ID NO: 54426 - DNA, 22 bp, synthetic construct
  misc_feature 1..22: note = chemically synthesized
  source 1..22: mol_type = other DNA
gctttgtgcctcagagtccccg

SEQ ID NO: 54427 - DNA, 22 bp, synthetic construct
  misc_feature 1..22: note = chemically synthesized
  source 1..22: mol_type = other DNA
tgtgcctcagagtccccgcgcc

SEQ ID NO: 54428 - DNA, 22 bp, synthetic construct
  misc_feature 1..22: note = chemically synthesized
  source 1..22: mol_type = other DNA
gtgcctcagagtccccgcgccc

SEQ ID NO: 54429 - DNA, 22 bp, synthetic construct
  misc_feature 1..22: note = chemically synthesized
  source 1..22: mol_type = other DNA
tgcctcagagtccccgcgccca

SEQ ID NO: 54430 - DNA, 22 bp, synthetic construct
  misc_feature 1..22: note = chemically synthesized
  source 1..22: mol_type = other DNA
agagtccccgcgcccaacttca

SEQ ID NO: 54431 - DNA, 22 bp, synthetic construct
  misc_feature 1..22: note = chemically synthesized
  source 1..22: mol_type = other DNA
cactttctgcacggtccaccct

SEQ ID NO: 54432 - DNA, 22 bp, synthetic construct
  misc_feature 1..22: note = chemically synthesized
  source 1..22: mol_type = other DNA
actttctgcacggtccaccctt

SEQ ID NO: 54433 - DNA, 22 bp, synthetic construct
  misc_feature 1..22: note = chemically synthesized
  source 1..22: mol_type = other DNA
tctgcacggtccacccttgccg

SEQ ID NO: 54434 - DNA, 22 bp, synthetic construct
  misc_feature 1..22: note = chemically synthesized
  source 1..22: mol_type = other DNA
ctgcacggtccacccttgccgg

SEQ ID NO: 54435 - DNA, 22 bp, synthetic construct
  misc_feature 1..22: note = chemically synthesized
  source 1..22: mol_type = other DNA
tgcacggtccacccttgccggg

SEQ ID NO: 54436 - DNA, 22 bp, synthetic construct
  misc_feature 1..22: note = chemically synthesized
  source 1..22: mol_type = other DNA
cacggtccacccttgccggggc

SEQ ID NO: 54437 - DNA, 22 bp, synthetic construct
  misc_feature 1..22: note = chemically synthesized
  source 1..22: mol_type = other DNA
gccggggcccctgccccgggcc

SEQ ID NO: 54438 - DNA, 22 bp, synthetic construct
  misc_feature 1..22: note = chemically synthesized
  source 1..22: mol_type = other DNA
ccggggcccctgccccgggcct

SEQ ID NO: 54439 - DNA, 22 bp, synthetic construct
  misc_feature 1..22: note = chemically synthesized
  source 1..22: mol_type = other DNA
ccccgggcctgtagcccccggc

SEQ ID NO: 54440 - DNA, 22 bp, synthetic construct
  misc_feature 1..22: note = chemically synthesized
  source 1..22: mol_type = other DNA
tagcccccggctttgcttttgt

SEQ ID NO: 54441 - DNA, 22 bp, synthetic construct
  misc_feature 1..22: note = chemically synthesized
  source 1..22: mol_type = other DNA
tgcttttgtttctttgcttttc

SEQ ID NO: 54442 - DNA, 22 bp, synthetic construct
  misc_feature 1..22: note = chemically synthesized
  source 1..22: mol_type = other DNA
gcttttgtttctttgcttttcc

SEQ ID NO: 54443 - DNA, 22 bp, synthetic construct
  misc_feature 1..22: note = chemically synthesized
  source 1..22: mol_type = other DNA
cttttgtttctttgcttttcct

SEQ ID NO: 54444 - DNA, 22 bp, synthetic construct
  misc_feature 1..22: note = chemically synthesized
  source 1..22: mol_type = other DNA
ttgtttctttgcttttcctctc

SEQ ID NO: 54445 - DNA, 22 bp, synthetic construct
  misc_feature 1..22: note = chemically synthesized
  source 1..22: mol_type = other DNA
tgtttctttgcttttcctctct

SEQ ID NO: 54446 - DNA, 22 bp, synthetic construct
  misc_feature 1..22: note = chemically synthesized
  source 1..22: mol_type = other DNA
gtttctttgcttttcctctctg

SEQ ID NO: 54447 - DNA, 22 bp, synthetic construct
  misc_feature 1..22: note = chemically synthesized
  source 1..22: mol_type = other DNA
tttctttgcttttcctctctga

SEQ ID NO: 54448 - DNA, 22 bp, synthetic construct
  misc_feature 1..22: note = chemically synthesized
  source 1..22: mol_type = other DNA
ctttgcttttcctctctgaatt

SEQ ID NO: 54449 - DNA, 22 bp, synthetic construct
  misc_feature 1..22: note = chemically synthesized
  source 1..22: mol_type = other DNA
tttgcttttcctctctgaattt

SEQ ID NO: 54450 - DNA, 22 bp, synthetic construct
  misc_feature 1..22: note = chemically synthesized
  source 1..22: mol_type = other DNA
tgcttttcctctctgaatttca

SEQ ID NO: 54451 - DNA, 22 bp, synthetic construct
  misc_feature 1..22: note = chemically synthesized
  source 1..22: mol_type = other DNA
gcttttcctctctgaatttcag

SEQ ID NO: 54452 - DNA, 22 bp, synthetic construct
  misc_feature 1..22: note = chemically synthesized
  source 1..22: mol_type = other DNA
cttttcctctctgaatttcagc

SEQ ID NO: 54453 - DNA, 22 bp, synthetic construct
  misc_feature 1..22: note = chemically synthesized
  source 1..22: mol_type = other DNA
ttcctctctgaatttcagcctc

SEQ ID NO: 54454 - DNA, 22 bp, synthetic construct
  misc_feature 1..22: note = chemically synthesized
  source 1..22: mol_type = other DNA
tcctctctgaatttcagcctcc

SEQ ID NO: 54455 - DNA, 22 bp, synthetic construct
  misc_feature 1..22: note = chemically synthesized
  source 1..22: mol_type = other DNA
cctctctgaatttcagcctccg

SEQ ID NO: 54456 - DNA, 22 bp, synthetic construct
  misc_feature 1..22: note = chemically synthesized
  source 1..22: mol_type = other DNA
ctctctgaatttcagcctccgt

SEQ ID NO: 54457 - DNA, 22 bp, synthetic construct
  misc_feature 1..22: note = chemically synthesized
  source 1..22: mol_type = other DNA
tctgaatttcagcctccgtttg

SEQ ID NO: 54458 - DNA, 22 bp, synthetic construct
  misc_feature 1..22: note = chemically synthesized
  source 1..22: mol_type = other DNA
tgaatttcagcctccgtttgct

SEQ ID NO: 54459 - DNA, 22 bp, synthetic construct
  misc_feature 1..22: note = chemically synthesized
  source 1..22: mol_type = other DNA
aatttcagcctccgtttgcttc

SEQ ID NO: 54460 - DNA, 22 bp, synthetic construct
  misc_feature 1..22: note = chemically synthesized
  source 1..22: mol_type = other DNA
cagcctccgtttgcttctttac

SEQ ID NO: 54461 - DNA, 22 bp, synthetic construct
  misc_feature 1..22: note = chemically synthesized
  source 1..22: mol_type = other DNA
agcctccgtttgcttctttacc

SEQ ID NO: 54462 - DNA, 22 bp, synthetic construct
  misc_feature 1..22: note = chemically synthesized
  source 1..22: mol_type = other DNA
cgtttgcttctttaccctgtta

SEQ ID NO: 54463 - DNA, 22 bp, synthetic construct
  misc_feature 1..22: note = chemically synthesized
  source 1..22: mol_type = other DNA
gcttctttaccctgttaagaca

SEQ ID NO: 54464 - DNA, 22 bp, synthetic construct
  misc_feature 1..22: note = chemically synthesized
  source 1..22: mol_type = other DNA
cttctttaccctgttaagacaa

SEQ ID NO: 54465 - DNA, 22 bp, synthetic construct
  misc_feature 1..22: note = chemically synthesized
  source 1..22: mol_type = other DNA
ctttaccctgttaagacaatca

SEQ ID NO: 54466 - DNA, 22 bp, synthetic construct
  misc_feature 1..22: note = chemically synthesized
  source 1..22: mol_type = other DNA
tttaccctgttaagacaatcaa

SEQ ID NO: 54467 - DNA, 22 bp, synthetic construct
  misc_feature 1..22: note = chemically synthesized
  source 1..22: mol_type = other DNA
taccctgttaagacaatcaagg

SEQ ID NO: 54468 - DNA, 22 bp, synthetic construct
  misc_feature 1..22: note = chemically synthesized
  source 1..22: mol_type = other DNA
accctgttaagacaatcaagga

SEQ ID NO: 54469 - DNA, 22 bp, synthetic construct
  misc_feature 1..22: note = chemically synthesized
  source 1..22: mol_type = other DNA
ccctgttaagacaatcaaggag

SEQ ID NO: 54470 - DNA, 22 bp, synthetic construct
  misc_feature 1..22: note = chemically synthesized
  source 1..22: mol_type = other DNA
ttaagacaatcaaggagaagga

SEQ ID NO: 54471 - DNA, 22 bp, synthetic construct
  misc_feature 1..22: note = chemically synthesized
  source 1..22: mol_type = other DNA
agacaatcaaggagaaggactt

SEQ ID NO: 54472 - DNA, 22 bp, synthetic construct
  misc_feature 1..22: note = chemically synthesized
  source 1..22: mol_type = other DNA
ggaaagcaaacttgaagacaca

SEQ ID NO: 54473 - DNA, 22 bp, synthetic construct
  misc_feature 1..22: note = chemically synthesized
  source 1..22: mol_type = other DNA
gaaagcaaacttgaagacacat

SEQ ID NO: 54474 - DNA, 22 bp, synthetic construct
  misc_feature 1..22: note = chemically synthesized
  source 1..22: mol_type = other DNA
gaagacacatctccctttcccc

SEQ ID NO: 54475 - DNA, 22 bp, synthetic construct
  misc_feature 1..22: note = chemically synthesized
  source 1..22: mol_type = other DNA
aagacacatctccctttccccc

SEQ ID NO: 54476 - DNA, 22 bp, synthetic construct
  misc_feature 1..22: note = chemically synthesized
  source 1..22: mol_type = other DNA
cctttccccctccccctccgct

SEQ ID NO: 54477 - DNA, 22 bp, synthetic construct
  misc_feature 1..22: note = chemically synthesized
  source 1..22: mol_type = other DNA
tccccctccccctccgctcccc

SEQ ID NO: 54478 - DNA, 22 bp, synthetic construct
  misc_feature 1..22: note = chemically synthesized
  source 1..22: mol_type = other DNA
ccccctccccctccgctccccg

SEQ ID NO: 54479 - DNA, 22 bp, synthetic construct
  misc_feature 1..22: note = chemically synthesized
  source 1..22: mol_type = other DNA
cccctccccctccgctccccgg

SEQ ID NO: 54480 - DNA, 22 bp, synthetic construct
  misc_feature 1..22: note = chemically synthesized
  source 1..22: mol_type = other DNA
cccctccgctccccggcagctc

SEQ ID NO: 54481 - DNA, 22 bp, synthetic construct
  misc_feature 1..22: note = chemically synthesized
  source 1..22: mol_type = other DNA
cgctccccggcagctctcgttt

SEQ ID NO: 54482 - DNA, 22 bp, synthetic construct
  misc_feature 1..22: note = chemically synthesized
  source 1..22: mol_type = other DNA
cccggcagctctcgttttgctc

SEQ ID NO: 54483 - DNA, 22 bp, synthetic construct
  misc_feature 1..22: note = chemically synthesized
  source 1..22: mol_type = other DNA
tcgttttgctcgctccttacca

SEQ ID NO: 54484 - DNA, 22 bp, synthetic construct
  misc_feature 1..22: note = chemically synthesized
  source 1..22: mol_type = other DNA
gttttgctcgctccttaccaac

SEQ ID NO: 54485 - DNA, 22 bp, synthetic construct
  misc_feature 1..22: note = chemically synthesized
  source 1..22: mol_type = other DNA
tgctcgctccttaccaacattt

SEQ ID NO: 54486 - DNA, 22 bp, synthetic construct
  misc_feature 1..22: note = chemically synthesized
  source 1..22: mol_type = other DNA
gctcgctccttaccaacatttc

SEQ ID NO: 54487 - DNA, 22 bp, synthetic construct
  misc_feature 1..22: note = chemically synthesized
  source 1..22: mol_type = other DNA
ctcgctccttaccaacatttcc

SEQ ID NO: 54488 - DNA, 22 bp, synthetic construct
  misc_feature 1..22: note = chemically synthesized
  source 1..22: mol_type = other DNA
gctccttaccaacatttcctat

SEQ ID NO: 54489 - DNA, 22 bp, synthetic construct
  misc_feature 1..22: note = chemically synthesized
  source 1..22: mol_type = other DNA
cttaccaacatttcctataagg

SEQ ID NO: 54490 - DNA, 22 bp, synthetic construct
  misc_feature 1..22: note = chemically synthesized
  source 1..22: mol_type = other DNA
accaacatttcctataaggatt

SEQ ID NO: 54491 - DNA, 22 bp, synthetic construct
  misc_feature 1..22: note = chemically synthesized
  source 1..22: mol_type = other DNA
ccaacatttcctataaggatta

SEQ ID NO: 54492 - DNA, 22 bp, synthetic construct
  misc_feature 1..22: note = chemically synthesized
  source 1..22: mol_type = other DNA
cctataaggattatttttttcc

SEQ ID NO: 54493 - DNA, 22 bp, synthetic construct
  misc_feature 1..22: note = chemically synthesized
  source 1..22: mol_type = other DNA
ctataaggattatttttttccc

SEQ ID NO: 54494 - DNA, 22 bp, synthetic construct
  misc_feature 1..22: note = chemically synthesized
  source 1..22: mol_type = other DNA
taaggattatttttttccctta

SEQ ID NO: 54495 - DNA, 22 bp, synthetic construct
  misc_feature 1..22: note = chemically synthesized
  source 1..22: mol_type = other DNA
tttttttcccttaaatttattc

SEQ ID NO: 54496 - DNA, 22 bp, synthetic construct
  misc_feature 1..22: note = chemically synthesized
  source 1..22: mol_type = other DNA
ttttcccttaaatttattcttt

SEQ ID NO: 54497 - DNA, 22 bp, synthetic construct
  misc_feature 1..22: note = chemically synthesized
  source 1..22: mol_type = other DNA
tttcccttaaatttattctttt

SEQ ID NO: 54498 - DNA, 22 bp, synthetic construct
  misc_feature 1..22: note = chemically synthesized
  source 1..22: mol_type = other DNA
ttcccttaaatttattcttttg

SEQ ID NO: 54499 - DNA, 22 bp, synthetic construct
  misc_feature 1..22: note = chemically synthesized
  source 1..22: mol_type = other DNA
tcccttaaatttattcttttgc

SEQ ID NO: 54500 - DNA, 22 bp, synthetic construct
  misc_feature 1..22: note = chemically synthesized
  source 1..22: mol_type = other DNA
cccttaaatttattcttttgca

SEQ ID NO: 54501 - DNA, 22 bp, synthetic construct
  misc_feature 1..22: note = chemically synthesized
  source 1..22: mol_type = other DNA
ccttaaatttattcttttgcaa

SEQ ID NO: 54502 - DNA, 22 bp, synthetic construct
  misc_feature 1..22: note = chemically synthesized
  source 1..22: mol_type = other DNA
aaatttattcttttgcaactac

SEQ ID NO: 54503 - DNA, 22 bp, synthetic construct
  misc_feature 1..22: note = chemically synthesized
  source 1..22: mol_type = other DNA
aatttattcttttgcaactaca

SEQ ID NO: 54504 - DNA, 22 bp, synthetic construct
  misc_feature 1..22: note = chemically synthesized
  source 1..22: mol_type = other DNA
attcttttgcaactacacagag

SEQ ID NO: 54505 - DNA, 22 bp, synthetic construct
  misc_feature 1..22: note = chemically synthesized
  source 1..22: mol_type = other DNA
ttcttttgcaactacacagaga

SEQ ID NO: 54506 - DNA, 22 bp, synthetic construct
  misc_feature 1..22: note = chemically synthesized
  source 1..22: mol_type = other DNA
ttttgcaactacacagagagga

SEQ ID NO: 54507 - DNA, 22 bp, synthetic construct
  misc_feature 1..22: note = chemically synthesized
  source 1..22: mol_type = other DNA
ttgcaactacacagagaggaaa

SEQ ID NO: 54508 - DNA, 22 bp, synthetic construct
  misc_feature 1..22: note = chemically synthesized
  source 1..22: mol_type = other DNA
tgcaactacacagagaggaaag

SEQ ID NO: 54509 - DNA, 22 bp, synthetic construct
  misc_feature 1..22: note = chemically synthesized
  source 1..22: mol_type = other DNA
gcaactacacagagaggaaaga

SEQ ID NO: 54510 - DNA, 22 bp, synthetic construct
  misc_feature 1..22: note = chemically synthesized
  source 1..22: mol_type = other DNA
caactacacagagaggaaagag

SEQ ID NO: 54511 - DNA, 22 bp, synthetic construct
  misc_feature 1..22: note = chemically synthesized
  source 1..22: mol_type = other DNA
cacagagaggaaagagatctca

SEQ ID NO: 54512 - DNA, 22 bp, synthetic construct
  misc_feature 1..22: note = chemically synthesized
  source 1..22: mol_type = other DNA
agtctgtcactgagacattgag

SEQ ID NO: 54513 - DNA, 22 bp, synthetic construct
  misc_feature 1..22: note = chemically synthesized
  source 1..22: mol_type = other DNA
tcactgagacattgagacgttc

SEQ ID NO: 54514 - DNA, 22 bp, synthetic construct
  misc_feature 1..22: note = chemically synthesized
  source 1..22: mol_type = other DNA
agacattgagacgttccaggct

SEQ ID NO: 54515 - DNA, 22 bp, synthetic construct
  misc_feature 1..22: note = chemically synthesized
  source 1..22: mol_type = other DNA
agacgttccaggctgtcttgct

SEQ ID NO: 54516 - DNA, 22 bp, synthetic construct
  misc_feature 1..22: note = chemically synthesized
  source 1..22: mol_type = other DNA
caggctgtcttgctgtttgaac

SEQ ID NO: 54517 - DNA, 22 bp, synthetic construct
  misc_feature 1..22: note = chemically synthesized
  source 1..22: mol_type = other DNA
tcttgctgtttgaacgtagaag

SEQ ID NO: 54518 - DNA, 22 bp, synthetic construct
  misc_feature 1..22: note = chemically synthesized
  source 1..22: mol_type = other DNA
gctgtttgaacgtagaagcatt

SEQ ID NO: 54519 - DNA, 22 bp, synthetic construct
  misc_feature 1..22: note = chemically synthesized
  source 1..22: mol_type = other DNA
ctgtttgaacgtagaagcattt

SEQ ID NO: 54520 - DNA, 22 bp, synthetic construct
  misc_feature 1..22: note = chemically synthesized
  source 1..22: mol_type = other DNA
tttgaacgtagaagcattttat

SEQ ID NO: 54521 - DNA, 22 bp, synthetic construct
  misc_feature 1..22: note = chemically synthesized
  source 1..22: mol_type = other DNA
gaacgtagaagcattttatttt

SEQ ID NO: 54522 - DNA, 22 bp, synthetic construct
  misc_feature 1..22: note = chemically synthesized
  source 1..22: mol_type = other DNA
aacgtagaagcattttattttc

SEQ ID NO: 54523 - DNA, 22 bp, synthetic construct
  misc_feature 1..22: note = chemically synthesized
  source 1..22: mol_type = other DNA
tattttctatttcttcctcccc

SEQ ID NO: 54524 - DNA, 22 bp, synthetic construct
  misc_feature 1..22: note = chemically synthesized
  source 1..22: mol_type = other DNA
attttctatttcttcctcccct

SEQ ID NO: 54525 - DNA, 22 bp, synthetic construct
  misc_feature 1..22: note = chemically synthesized
  source 1..22: mol_type = other DNA
ttttctatttcttcctcccctc

SEQ ID NO: 54526 - DNA, 22 bp, synthetic construct
  misc_feature 1..22: note = chemically synthesized
  source 1..22: mol_type = other DNA
tctatttcttcctcccctcgta

SEQ ID NO: 54527 - DNA, 22 bp, synthetic construct
  misc_feature 1..22: note = chemically synthesized
  source 1..22: mol_type = other DNA
ctatttcttcctcccctcgtag

SEQ ID NO: 54528 - DNA, 22 bp, synthetic construct
  misc_feature 1..22: note = chemically synthesized
  source 1..22: mol_type = other DNA
tatttcttcctcccctcgtaga

SEQ ID NO: 54529 - DNA, 22 bp, synthetic construct
  misc_feature 1..22: note = chemically synthesized
  source 1..22: mol_type = other DNA
tttcttcctcccctcgtagaga

SEQ ID NO: 54530 - DNA, 22 bp, synthetic construct
  misc_feature 1..22: note = chemically synthesized
  source 1..22: mol_type = other DNA
cttcctcccctcgtagagagaa

SEQ ID NO: 54531 - DNA, 22 bp, synthetic construct
  misc_feature 1..22: note = chemically synthesized
  source 1..22: mol_type = other DNA
ttcctcccctcgtagagagaat

SEQ ID NO: 54532 - DNA, 22 bp, synthetic construct
  misc_feature 1..22: note = chemically synthesized
  source 1..22: mol_type = other DNA
cctcccctcgtagagagaattc

SEQ ID NO: 54533 - DNA, 22 bp, synthetic construct
  misc_feature 1..22: note = chemically synthesized
  source 1..22: mol_type = other DNA
ctcccctcgtagagagaattcg

SEQ ID NO: 54534 - DNA, 22 bp, synthetic construct
  misc_feature 1..22: note = chemically synthesized
  source 1..22: mol_type = other DNA
ccctcgtagagagaattcgcgg

SEQ ID NO: 54535 - DNA, 22 bp, synthetic construct
  misc_feature 1..22: note = chemically synthesized
  source 1..22: mol_type = other DNA
gtagagagaattcgcggctaat

SEQ ID NO: 54536 - DNA, 22 bp, synthetic construct
  misc_feature 1..22: note = chemically synthesized
  source 1..22: mol_type = other DNA
gcggctaattattatgattatt

SEQ ID NO: 54537 - DNA, 22 bp, synthetic construct
  misc_feature 1..22: note = chemically synthesized
  source 1..22: mol_type = other DNA
attattatgattatttgcccac

SEQ ID NO: 54538 - DNA, 22 bp, synthetic construct
  misc_feature 1..22: note = chemically synthesized
  source 1..22: mol_type = other DNA
ttatgattatttgcccactccc

SEQ ID NO: 54539 - DNA, 22 bp, synthetic construct
  misc_feature 1..22: note = chemically synthesized
  source 1..22: mol_type = other DNA
tgattatttgcccactcccttc

SEQ ID NO: 54540 - DNA, 22 bp, synthetic construct
  misc_feature 1..22: note = chemically synthesized
  source 1..22: mol_type = other DNA
tttgcccactcccttccacttc

SEQ ID NO: 54541 - DNA, 22 bp, synthetic construct
  misc_feature 1..22: note = chemically synthesized
  source 1..22: mol_type = other DNA
gcccactcccttccacttcaat

SEQ ID NO: 54542 - DNA, 22 bp, synthetic construct
  misc_feature 1..22: note = chemically synthesized
  source 1..22: mol_type = other DNA
cccactcccttccacttcaatc

SEQ ID NO: 54543 - DNA, 22 bp, synthetic construct
  misc_feature 1..22: note = chemically synthesized
  source 1..22: mol_type = other DNA
ccttccacttcaatcgaggact

SEQ ID NO: 54544 - DNA, 22 bp, synthetic construct
  misc_feature 1..22: note = chemically synthesized
  source 1..22: mol_type = other DNA
ccacttcaatcgaggactccct

SEQ ID NO: 54545 - DNA, 22 bp, synthetic construct
  misc_feature 1..22: note = chemically synthesized
  source 1..22: mol_type = other DNA
cacttcaatcgaggactccctg

SEQ ID NO: 54546 - DNA, 22 bp, synthetic construct
  misc_feature 1..22: note = chemically synthesized
  source 1..22: mol_type = other DNA
caatcgaggactccctgctttg

SEQ ID NO: 54547 - DNA, 22 bp, synthetic construct
  misc_feature 1..22: note = chemically synthesized
  source 1..22: mol_type = other DNA
aatcgaggactccctgctttgt

SEQ ID NO: 54548 - DNA, 22 bp, synthetic construct
  misc_feature 1..22: note = chemically synthesized
  source 1..22: mol_type = other DNA
cctgctttgtagccggagttta

SEQ ID NO: 54549 - DNA, 22 bp, synthetic construct
  misc_feature 1..22: note = chemically synthesized
  source 1..22: mol_type = other DNA
ctttgtagccggagtttaggcc

SEQ ID NO: 54550 - DNA, 22 bp, synthetic construct
  misc_feature 1..22: note = chemically synthesized
  source 1..22: mol_type = other DNA
tgtagccggagtttaggccgga

SEQ ID NO: 54551 - DNA, 22 bp, synthetic construct
  misc_feature 1..22: note = chemically synthesized
  source 1..22: mol_type = other DNA
gtagccggagtttaggccggag

SEQ ID NO: 54552 - DNA, 22 bp, synthetic construct
  misc_feature 1..22: note = chemically synthesized
  source 1..22: mol_type = other DNA
tagccggagtttaggccggagc

SEQ ID NO: 54553 - DNA, 22 bp, synthetic construct
  misc_feature 1..22: note = chemically synthesized
  source 1..22: mol_type = other DNA
aggccggagcttagaaatgttg

SEQ ID NO: 54554 - DNA, 22 bp, synthetic construct
  misc_feature 1..22: note = chemically synthesized
  source 1..22: mol_type = other DNA
ggccggagcttagaaatgttgg

SEQ ID NO: 54555 - DNA, 22 bp, synthetic construct
  misc_feature 1..22: note = chemically synthesized
  source 1..22: mol_type = other DNA
agaaatgttggtattgttgggg

SEQ ID NO: 54556 - DNA, 22 bp, synthetic construct
  misc_feature 1..22: note = chemically synthesized
  source 1..22: mol_type = other DNA
gaaatgttggtattgttggggc

SEQ ID NO: 54557 - DNA, 22 bp, synthetic construct
  misc_feature 1..22: note = chemically synthesized
  source 1..22: mol_type = other DNA
gtattgttggggcgaaggagga

SEQ ID NO: 54558 - DNA, 22 bp, synthetic construct
  misc_feature 1..22: note = chemically synthesized
  source 1..22: mol_type = other DNA
ttggggcgaaggaggatggagt

SEQ ID NO: 54559 - DNA, 22 bp, synthetic construct
  misc_feature 1..22: note = chemically synthesized
  source 1..22: mol_type = other DNA
gggcgaaggaggatggagttga

SEQ ID NO: 54560 - DNA, 22 bp, synthetic construct
  misc_feature 1..22: note = chemically synthesized
  source 1..22: mol_type = other DNA
aattgagggagggggtaaatgg

SEQ ID NO: 54561 - DNA, 22 bp, synthetic construct
  misc_feature 1..22: note = chemically synthesized
  source 1..22: mol_type = other DNA
agggagggggtaaatggctgag

SEQ ID NO: 54562 - DNA, 22 bp, synthetic construct
  misc_feature 1..22: note = chemically synthesized
  source 1..22: mol_type = other DNA
agggttaggaaggtttttaggg

SEQ ID NO: 54563 - DNA, 22 bp, synthetic construct
  misc_feature 1..22: note = chemically synthesized
  source 1..22: mol_type = other DNA
ggaaggtttttagggaaagggg

SEQ ID NO: 54564 - DNA, 22 bp, synthetic construct
  misc_feature 1..22: note = chemically synthesized
  source 1..22: mol_type = other DNA
ttagggaaaggggaatttgcat

SEQ ID NO: 54565 - DNA, 22 bp, synthetic construct
  misc_feature 1..22: note = chemically synthesized
  source 1..22: mol_type = other DNA
tagggaaaggggaatttgcatt

SEQ ID NO: 54566 - DNA, 22 bp, synthetic construct
  misc_feature 1..22: note = chemically synthesized
  source 1..22: mol_type = other DNA
agggaaaggggaatttgcatta

SEQ ID NO: 54567 - DNA, 22 bp, synthetic construct
  misc_feature 1..22: note = chemically synthesized
  source 1..22: mol_type = other DNA
gggaaaggggaatttgcattaa

SEQ ID NO: 54568 - DNA, 22 bp, synthetic construct
  misc_feature 1..22: note = chemically synthesized
  source 1..22: mol_type = other DNA
gcattaaaatgcagagaaatta

SEQ ID NO: 54569 - DNA, 22 bp, synthetic construct
  misc_feature 1..22: note = chemically synthesized
  source 1..22: mol_type = other DNA
cattaaaatgcagagaaattat

SEQ ID NO: 54570 - DNA, 22 bp, synthetic construct
  misc_feature 1..22: note = chemically synthesized
  source 1..22: mol_type = other DNA
aaatgcagagaaattatcagat

SEQ ID NO: 54571 - DNA, 22 bp, synthetic construct
  misc_feature 1..22: note = chemically synthesized
  source 1..22: mol_type = other DNA
tcagatgcccagaaaggaaatg

SEQ ID NO: 54572 - DNA, 22 bp, synthetic construct
  misc_feature 1..22: note = chemically synthesized
  source 1..22: mol_type = other DNA
attgccactgagaaaagatgtc

SEQ ID NO: 54573 - DNA, 22 bp, synthetic construct
  misc_feature 1..22: note = chemically synthesized
  source 1..22: mol_type = other DNA
ccactgagaaaagatgtcaatg

SEQ ID NO: 54574 - DNA, 22 bp, synthetic construct
  misc_feature 1..22: note = chemically synthesized
  source 1..22: mol_type = other DNA
agaaaagatgtcaatgcaaatc

SEQ ID NO: 54575 - DNA, 22 bp, synthetic construct
  misc_feature 1..22: note = chemically synthesized
  source 1..22: mol_type = other DNA
caccatgagaattgtattttca

SEQ ID NO: 54576 - DNA, 22 bp, synthetic construct
  misc_feature 1..22: note = chemically synthesized
  source 1..22: mol_type = other DNA
tattttcatattttctttgtgt

SEQ ID NO: 54577 - DNA, 22 bp, synthetic construct
  misc_feature 1..22: note = chemically synthesized
  source 1..22: mol_type = other DNA
tcatattttctttgtgtcccac

SEQ ID NO: 54578 - DNA, 22 bp, synthetic construct
  misc_feature 1..22: note = chemically synthesized
  source 1..22: mol_type = other DNA
catattttctttgtgtcccact

SEQ ID NO: 54579 - DNA, 22 bp, synthetic construct
  misc_feature 1..22: note = chemically synthesized
  source 1..22: mol_type = other DNA
atattttctttgtgtcccactt

SEQ ID NO: 54580 - DNA, 22 bp, synthetic construct
  misc_feature 1..22: note = chemically synthesized
  source 1..22: mol_type = other DNA
tctttgtgtcccactttgtctg

SEQ ID NO: 54581 - DNA, 22 bp, synthetic construct
  misc_feature 1..22: note = chemically synthesized
  source 1..22: mol_type = other DNA
ctttgtgtcccactttgtctga

SEQ ID NO: 54582 - DNA, 22 bp, synthetic construct
  misc_feature 1..22: note = chemically synthesized
  source 1..22: mol_type = other DNA
tttgtgtcccactttgtctgat

SEQ ID NO: 54583 - DNA, 22 bp, synthetic construct
  misc_feature 1..22: note = chemically synthesized
  source 1..22: mol_type = other DNA
tgtgtcccactttgtctgattt

SEQ ID NO: 54584 - DNA, 22 bp, synthetic construct
  misc_feature 1..22: note = chemically synthesized
  source 1..22: mol_type = other DNA
gtgtcccactttgtctgatttt

SEQ ID NO: 54585 - DNA, 22 bp, synthetic construct
  misc_feature 1..22: note = chemically synthesized
  source 1..22: mol_type = other DNA
tgtcccactttgtctgattttt

SEQ ID NO: 54586 - DNA, 22 bp, synthetic construct
  misc_feature 1..22: note = chemically synthesized
  source 1..22: mol_type = other DNA
tgtctgatttttaataatatac

SEQ ID NO: 54587 - DNA, 22 bp, synthetic construct
  misc_feature 1..22: note = chemically synthesized
  source 1..22: mol_type = other DNA
gtctgatttttaataatatacc

SEQ ID NO: 54588 - DNA, 22 bp, synthetic construct
  misc_feature 1..22: note = chemically synthesized
  source 1..22: mol_type = other DNA
tctgatttttaataatatacca

SEQ ID NO: 54589 - DNA, 22 bp, synthetic construct
  misc_feature 1..22: note = chemically synthesized
  source 1..22: mol_type = other DNA
atttttaataatataccagcaa

SEQ ID NO: 54590 - DNA, 22 bp, synthetic construct
  misc_feature 1..22: note = chemically synthesized
  source 1..22: mol_type = other DNA
ttaataatataccagcaatgat

SEQ ID NO: 54591 - DNA, 22 bp, synthetic construct
  misc_feature 1..22: note = chemically synthesized
  source 1..22: mol_type = other DNA
taataatataccagcaatgata

SEQ ID NO: 54592 - DNA, 22 bp, synthetic construct
  misc_feature 1..22: note = chemically synthesized
  source 1..22: mol_type = other DNA
aataatataccagcaatgataa

SEQ ID NO: 54593 - DNA, 22 bp, synthetic construct
  misc_feature 1..22: note = chemically synthesized
  source 1..22: mol_type = other DNA
ataatataccagcaatgataaa

SEQ ID NO: 54594 - DNA, 22 bp, synthetic construct
  misc_feature 1..22: note = chemically synthesized
  source 1..22: mol_type = other DNA
tggtatttctctgaacaccact

SEQ ID NO: 54595 - DNA, 22 bp, synthetic construct
  misc_feature 1..22: note = chemically synthesized
  source 1..22: mol_type = other DNA
ggtatttctctgaacaccacta

SEQ ID NO: 54596 - DNA, 22 bp, synthetic construct
  misc_feature 1..22: note = chemically synthesized
  source 1..22: mol_type = other DNA
gtatttctctgaacaccactag

SEQ ID NO: 54597 - DNA, 22 bp, synthetic construct
  misc_feature 1..22: note = chemically synthesized
  source 1..22: mol_type = other DNA
ctctgaacaccactagccaaat

SEQ ID NO: 54598 - DNA, 22 bp, synthetic construct
  misc_feature 1..22: note = chemically synthesized
  source 1..22: mol_type = other DNA
tctgaacaccactagccaaatg

SEQ ID NO: 54599 - DNA, 22 bp, synthetic construct
  misc_feature 1..22: note = chemically synthesized
  source 1..22: mol_type = other DNA
tgaacaccactagccaaatgtt

SEQ ID NO: 54600 - DNA, 22 bp, synthetic construct
  misc_feature 1..22: note = chemically synthesized
  source 1..22: mol_type = other DNA
aacaccactagccaaatgtttt

SEQ ID NO: 54601 - DNA, 22 bp, synthetic construct
  misc_feature 1..22: note = chemically synthesized
  source 1..22: mol_type = other DNA
gccaaatgttttgcaaggagac

SEQ ID NO: 54602 - DNA, 22 bp, synthetic construct
  misc_feature 1..22: note = chemically synthesized
  source 1..22: mol_type = other DNA
tgcaaggagaccgatgttaaac

SEQ ID NO: 54603 - DNA, 22 bp, synthetic construct
  misc_feature 1..22: note = chemically synthesized
  source 1..22: mol_type = other DNA
gcaaggagaccgatgttaaacg

SEQ ID NO: 54604 - DNA, 22 bp, synthetic construct
  misc_feature 1..22: note = chemically synthesized
  source 1..22: mol_type = other DNA
caaggagaccgatgttaaacgt

SEQ ID NO: 54605 - DNA, 22 bp, synthetic construct
  misc_feature 1..22: note = chemically synthesized
  source 1..22: mol_type = other DNA
aacgtatttcatacattagaat

SEQ ID NO: 54606 - DNA, 22 bp, synthetic construct
  misc_feature 1..22: note = chemically synthesized
  source 1..22: mol_type = other DNA
catacattagaatataattctt

SEQ ID NO: 54607 - DNA, 22 bp, synthetic construct
  misc_feature 1..22: note = chemically synthesized
  source 1..22: mol_type = other DNA
atacattagaatataattcttg

SEQ ID NO: 54608 - DNA, 22 bp, synthetic construct
  misc_feature 1..22: note = chemically synthesized
  source 1..22: mol_type = other DNA
gaatataattcttgttaattag

SEQ ID NO: 54609 - DNA, 22 bp, synthetic construct
  misc_feature 1..22: note = chemically synthesized
  source 1..22: mol_type = other DNA
ttgttaattagcaataatttac

SEQ ID NO: 54610 - DNA, 22 bp, synthetic construct
  misc_feature 1..22: note = chemically synthesized
  source 1..22: mol_type = other DNA
gttaattagcaataatttacgt

SEQ ID NO: 54611 - DNA, 22 bp, synthetic construct
  misc_feature 1..22: note = chemically synthesized
  source 1..22: mol_type = other DNA
ttaattagcaataatttacgtt

SEQ ID NO: 54612 - DNA, 22 bp, synthetic construct
  misc_feature 1..22: note = chemically synthesized
  source 1..22: mol_type = other DNA
attagcaataatttacgttaag

SEQ ID NO: 54613 - DNA, 22 bp, synthetic construct
  misc_feature 1..22: note = chemically synthesized
  source 1..22: mol_type = other DNA
gcaataatttacgttaagagca

SEQ ID NO: 54614 - DNA, 22 bp, synthetic construct
  misc_feature 1..22: note = chemically synthesized
  source 1..22: mol_type = other DNA
acgttaagagcatagaaaatgt

SEQ ID NO: 54615 - DNA, 22 bp, synthetic construct
  misc_feature 1..22: note = chemically synthesized
  source 1..22: mol_type = other DNA
cgttaagagcatagaaaatgtt

SEQ ID NO: 54616 - DNA, 22 bp, synthetic construct
  misc_feature 1..22: note = chemically synthesized
  source 1..22: mol_type = other DNA
agagcatagaaaatgttgaggt

SEQ ID NO: 54617 - DNA, 22 bp, synthetic construct
  misc_feature 1..22: note = chemically synthesized
  source 1..22: mol_type = other DNA
aggttacaggttttatatctgt

SEQ ID NO: 54618 - DNA, 22 bp, synthetic construct
  misc_feature 1..22: note = chemically synthesized
  source 1..22: mol_type = other DNA
caggttttatatctgtacattt

SEQ ID NO: 54619 - DNA, 22 bp, synthetic construct
  misc_feature 1..22: note = chemically synthesized
  source 1..22: mol_type = other DNA
tatatctgtacatttgatcatc

SEQ ID NO: 54620 - DNA, 22 bp, synthetic construct
  misc_feature 1..22: note = chemically synthesized
  source 1..22: mol_type = other DNA
atatctgtacatttgatcatct

SEQ ID NO: 54621 - DNA, 22 bp, synthetic construct
  misc_feature 1..22: note = chemically synthesized
  source 1..22: mol_type = other DNA
tatctgtacatttgatcatctt

SEQ ID NO: 54622 - DNA, 22 bp, synthetic construct
  misc_feature 1..22: note = chemically synthesized
  source 1..22: mol_type = other DNA
tacatttgatcatcttgttatt

SEQ ID NO: 54623 - DNA, 22 bp, synthetic construct
  misc_feature 1..22: note = chemically synthesized
  source 1..22: mol_type = other DNA
gatcatcttgttattttcaaga

SEQ ID NO: 54624 - DNA, 22 bp, synthetic construct
  misc_feature 1..22: note = chemically synthesized
  source 1..22: mol_type = other DNA
atcatcttgttattttcaagaa

SEQ ID NO: 54625 - DNA, 22 bp, synthetic construct
  misc_feature 1..22: note = chemically synthesized
  source 1..22: mol_type = other DNA
gttattttcaagaactttgcct

SEQ ID NO: 54626 - DNA, 22 bp, synthetic construct
  misc_feature 1..22: note = chemically synthesized
  source 1..22: mol_type = other DNA
ttattttcaagaactttgcctc

SEQ ID NO: 54627 - DNA, 22 bp, synthetic construct
  misc_feature 1..22: note = chemically synthesized
  source 1..22: mol_type = other DNA
ttttcaagaactttgcctccta

SEQ ID NO: 54628 - DNA, 22 bp, synthetic construct
  misc_feature 1..22: note = chemically synthesized
  source 1..22: mol_type = other DNA
tcaagaactttgcctcctataa

SEQ ID NO: 54629 - DNA, 22 bp, synthetic construct
  misc_feature 1..22: note = chemically synthesized
  source 1..22: mol_type = other DNA
caagaactttgcctcctataaa

SEQ ID NO: 54630 - DNA, 22 bp, synthetic construct
  misc_feature 1..22: note = chemically synthesized
  source 1..22: mol_type = other DNA
aagaactttgcctcctataaaa

SEQ ID NO: 54631 - DNA, 22 bp, synthetic construct
  misc_feature 1..22: note = chemically synthesized
  source 1..22: mol_type = other DNA
tgcctcctataaaattaattag

SEQ ID NO: 54632 - DNA, 22 bp, synthetic construct
  misc_feature 1..22: note = chemically synthesized
  source 1..22: mol_type = other DNA
gcctcctataaaattaattagg

SEQ ID NO: 54633 - DNA, 22 bp, synthetic construct
  misc_feature 1..22: note = chemically synthesized
  source 1..22: mol_type = other DNA
cctcctataaaattaattaggt

SEQ ID NO: 54634 - DNA, 22 bp, synthetic construct
  misc_feature 1..22: note = chemically synthesized
  source 1..22: mol_type = other DNA
ctataaaattaattaggtgaaa

SEQ ID NO: 54635 - DNA, 22 bp, synthetic construct
  misc_feature 1..22: note = chemically synthesized
  source 1..22: mol_type = other DNA
taaaattaattaggtgaaatgt

SEQ ID NO: 54636 - DNA, 22 bp, synthetic construct
  misc_feature 1..22: note = chemically synthesized
  source 1..22: mol_type = other DNA
attaggtgaaatgtggaggtgt

SEQ ID NO: 54637 - DNA, 22 bp, synthetic construct
  misc_feature 1..22: note = chemically synthesized
  source 1..22: mol_type = other DNA
ggtgaaatgtggaggtgtaatc

SEQ ID NO: 54638 - DNA, 22 bp, synthetic construct
  misc_feature 1..22: note = chemically synthesized
  source 1..22: mol_type = other DNA
tgaattaccacttcatttcccg

SEQ ID NO: 54639 - DNA, 22 bp, synthetic construct
  misc_feature 1..22: note = chemically synthesized
  source 1..22: mol_type = other DNA
aattaccacttcatttcccggt

SEQ ID NO: 54640 - DNA, 22 bp, synthetic construct
  misc_feature 1..22: note = chemically synthesized
  source 1..22: mol_type = other DNA
ccacttcatttcccggttttga

SEQ ID NO: 54641 - DNA, 22 bp, synthetic construct
  misc_feature 1..22: note = chemically synthesized
  source 1..22: mol_type = other DNA
catttcccggttttgattgtaa

SEQ ID NO: 54642 - DNA, 22 bp, synthetic construct
  misc_feature 1..22: note = chemically synthesized
  source 1..22: mol_type = other DNA
atttcccggttttgattgtaaa

SEQ ID NO: 54643 - DNA, 22 bp, synthetic construct
  misc_feature 1..22: note = chemically synthesized
  source 1..22: mol_type = other DNA
cccggttttgattgtaaatcag

SEQ ID NO: 54644 - DNA, 22 bp, synthetic construct
  misc_feature 1..22: note = chemically synthesized
  source 1..22: mol_type = other DNA
ccggttttgattgtaaatcagt

SEQ ID NO: 54645 - DNA, 22 bp, synthetic construct
  misc_feature 1..22: note = chemically synthesized
  source 1..22: mol_type = other DNA
tgattgtaaatcagttcagtca

SEQ ID NO: 54646 - DNA, 22 bp, synthetic construct
  misc_feature 1..22: note = chemically synthesized
  source 1..22: mol_type = other DNA
gattgtaaatcagttcagtcac

SEQ ID NO: 54647 - DNA, 22 bp, synthetic construct
  misc_feature 1..22: note = chemically synthesized
  source 1..22: mol_type = other DNA
attgtaaatcagttcagtcact

SEQ ID NO: 54648 - DNA, 22 bp, synthetic construct
  misc_feature 1..22: note = chemically synthesized
  source 1..22: mol_type = other DNA
taaatcagttcagtcactacat

SEQ ID NO: 54649 - DNA, 22 bp, synthetic construct
  misc_feature 1..22: note = chemically synthesized
  source 1..22: mol_type = other DNA
agtcactacatttagaagactt

SEQ ID NO: 54650 - DNA, 22 bp, synthetic construct
  misc_feature 1..22: note = chemically synthesized
  source 1..22: mol_type = other DNA
catttagaagactttaaccaag

SEQ ID NO: 54651 - DNA, 22 bp, synthetic construct
  misc_feature 1..22: note = chemically synthesized
  source 1..22: mol_type = other DNA
agaagactttaaccaagtctgt

SEQ ID NO: 54652 - DNA, 22 bp, synthetic construct
  misc_feature 1..22: note = chemically synthesized
  source 1..22: mol_type = other DNA
gaagactttaaccaagtctgtt

SEQ ID NO: 54653 - DNA, 22 bp, synthetic construct
  misc_feature 1..22: note = chemically synthesized
  source 1..22: mol_type = other DNA
taaccaagtctgttttgaacca

SEQ ID NO: 54654 - DNA, 22 bp, synthetic construct
  misc_feature 1..22: note = chemically synthesized
  source 1..22: mol_type = other DNA
aaccaagtctgttttgaaccac

SEQ ID NO: 54655 - DNA, 22 bp, synthetic construct
  misc_feature 1..22: note = chemically synthesized
  source 1..22: mol_type = other DNA
accaagtctgttttgaaccaca

SEQ ID NO: 54656 - DNA, 22 bp, synthetic construct
  misc_feature 1..22: note = chemically synthesized
  source 1..22: mol_type = other DNA
ttttgaaccacattacctttaa

SEQ ID NO: 54657 - DNA, 22 bp, synthetic construct
  misc_feature 1..22: note = chemically synthesized
  source 1..22: mol_type = other DNA
tgaaccacattacctttaacta

SEQ ID NO: 54658 - DNA, 22 bp, synthetic construct
  misc_feature 1..22: note = chemically synthesized
  source 1..22: mol_type = other DNA
gaaccacattacctttaactat

SEQ ID NO: 54659 - DNA, 22 bp, synthetic construct
  misc_feature 1..22: note = chemically synthesized
  source 1..22: mol_type = other DNA
aaccacattacctttaactatt

SEQ ID NO: 54660 - DNA, 22 bp, synthetic construct
  misc_feature 1..22: note = chemically synthesized
  source 1..22: mol_type = other DNA
cctttaactatttgatacctag

SEQ ID NO: 54661 - DNA, 22 bp, synthetic construct
  misc_feature 1..22: note = chemically synthesized
  source 1..22: mol_type = other DNA
taactatttgatacctaggaga

SEQ ID NO: 54662 - DNA, 22 bp, synthetic construct
  misc_feature 1..22: note = chemically synthesized
  source 1..22: mol_type = other DNA
aactatttgatacctaggagaa

SEQ ID NO: 54663 - DNA, 22 bp, synthetic construct
  misc_feature 1..22: note = chemically synthesized
  source 1..22: mol_type = other DNA
actatttgatacctaggagaat

SEQ ID NO: 54664 - DNA, 22 bp, synthetic construct
  misc_feature 1..22: note = chemically synthesized
  source 1..22: mol_type = other DNA
tttgatacctaggagaatattt

SEQ ID NO: 54665 - DNA, 22 bp, synthetic construct
  misc_feature 1..22: note = chemically synthesized
  source 1..22: mol_type = other DNA
gatacctaggagaatatttcct

SEQ ID NO: 54666 - DNA, 22 bp, synthetic construct
  misc_feature 1..22: note = chemically synthesized
  source 1..22: mol_type = other DNA
atacctaggagaatatttcctt

SEQ ID NO: 54667 - DNA, 22 bp, synthetic construct
  misc_feature 1..22: note = chemically synthesized
  source 1..22: mol_type = other DNA
ggagaatatttccttttgcacc

SEQ ID NO: 54668 - DNA, 22 bp, synthetic construct
  misc_feature 1..22: note = chemically synthesized
  source 1..22: mol_type = other DNA
ccttttgcacctaaataatatt

SEQ ID NO: 54669 - DNA, 22 bp, synthetic construct
  misc_feature 1..22: note = chemically synthesized
  source 1..22: mol_type = other DNA
cttttgcacctaaataatattc

SEQ ID NO: 54670 - DNA, 22 bp, synthetic construct
  misc_feature 1..22: note = chemically synthesized
  source 1..22: mol_type = other DNA
ttgcacctaaataatattccca

SEQ ID NO: 54671 - DNA, 22 bp, synthetic construct
  misc_feature 1..22: note = chemically synthesized
  source 1..22: mol_type = other DNA
tgcacctaaataatattcccac

SEQ ID NO: 54672 - DNA, 22 bp, synthetic construct
  misc_feature 1..22: note = chemically synthesized
  source 1..22: mol_type = other DNA
gcacctaaataatattcccact

SEQ ID NO: 54673 - DNA, 22 bp, synthetic construct
  misc_feature 1..22: note = chemically synthesized
  source 1..22: mol_type = other DNA
cacctaaataatattcccactt

SEQ ID NO: 54674 - DNA, 22 bp, synthetic construct
  misc_feature 1..22: note = chemically synthesized
  source 1..22: mol_type = other DNA
aataatattcccacttttagaa

SEQ ID NO: 54675 - DNA, 22 bp, synthetic construct
  misc_feature 1..22: note = chemically synthesized
  source 1..22: mol_type = other DNA
ccacttttagaaatgtgtcaga

SEQ ID NO: 54676 - DNA, 22 bp, synthetic construct
  misc_feature 1..22: note = chemically synthesized
  source 1..22: mol_type = other DNA
ttagaaatgtgtcagaccttgg

SEQ ID NO: 54677 - DNA, 22 bp, synthetic construct
  misc_feature 1..22: note = chemically synthesized
  source 1..22: mol_type = other DNA
tagaaatgtgtcagaccttggg

SEQ ID NO: 54678 - DNA, 22 bp, synthetic construct
  misc_feature 1..22: note = chemically synthesized
  source 1..22: mol_type = other DNA
agaaatgtgtcagaccttggga

SEQ ID NO: 54679 - DNA, 22 bp, synthetic construct
  misc_feature 1..22: note = chemically synthesized
  source 1..22: mol_type = other DNA
gaaatgtgtcagaccttgggaa

SEQ ID NO: 54680 - DNA, 22 bp, synthetic construct
  misc_feature 1..22: note = chemically synthesized
  source 1..22: mol_type = other DNA
gggaacaaaaaaaaaaaaaaaa

SEQ ID NO: 54681 - DNA, 22 bp, synthetic construct
  misc_feature 1..22: note = chemically synthesized
  source 1..22: mol_type = other DNA
ggaacaaaaaaaaaaaaaaaag

SEQ ID NO: 54682 - DNA, 22 bp, synthetic construct
  misc_feature 1..22: note = chemically synthesized
  source 1..22: mol_type = other DNA
aacggtggaaataaaaaatttt

SEQ ID NO: 54683 - DNA, 22 bp, synthetic construct
  misc_feature 1..22: note = chemically synthesized
  source 1..22: mol_type = other DNA
acggtggaaataaaaaattttt

SEQ ID NO: 54684 - DNA, 22 bp, synthetic construct
  misc_feature 1..22: note = chemically synthesized
  source 1..22: mol_type = other DNA
ttttttttgcaaaggttctatg

SEQ ID NO: 54685 - DNA, 22 bp, synthetic construct
  misc_feature 1..22: note = chemically synthesized
  source 1..22: mol_type = other DNA
tttttttgcaaaggttctatgt

SEQ ID NO: 54686 - DNA, 22 bp, synthetic construct
  misc_feature 1..22: note = chemically synthesized
  source 1..22: mol_type = other DNA
ttttttgcaaaggttctatgta

SEQ ID NO: 54687 - DNA, 22 bp, synthetic construct
  misc_feature 1..22: note = chemically synthesized
  source 1..22: mol_type = other DNA
tttttgcaaaggttctatgtac

SEQ ID NO: 54688 - DNA, 22 bp, synthetic construct
  misc_feature 1..22: note = chemically synthesized
  source 1..22: mol_type = other DNA
ttttgcaaaggttctatgtact

SEQ ID NO: 54689 - DNA, 22 bp, synthetic construct
  misc_feature 1..22: note = chemically synthesized
  source 1..22: mol_type = other DNA
tttgcaaaggttctatgtacta

SEQ ID NO: 54690 - DNA, 22 bp, synthetic construct
  misc_feature 1..22: note = chemically synthesized
  source 1..22: mol_type = other DNA
ttgcaaaggttctatgtactag

SEQ ID NO: 54691 - DNA, 22 bp, synthetic construct
  misc_feature 1..22: note = chemically synthesized
  source 1..22: mol_type = other DNA
tgcaaaggttctatgtactagt

SEQ ID NO: 54692 - DNA, 22 bp, synthetic construct
  misc_feature 1..22: note = chemically synthesized
  source 1..22: mol_type = other DNA
gcaaaggttctatgtactagta

SEQ ID NO: 54693 - DNA, 22 bp, synthetic construct
  misc_feature 1..22: note = chemically synthesized
  source 1..22: mol_type = other DNA
caaaggttctatgtactagtaa

SEQ ID NO: 54694 - DNA, 22 bp, synthetic construct
  misc_feature 1..22: note = chemically synthesized
  source 1..22: mol_type = other DNA
tatgtactagtaagtttgataa

SEQ ID NO: 54695 - DNA, 22 bp, synthetic construct
  misc_feature 1..22: note = chemically synthesized
  source 1..22: mol_type = other DNA
tgtactagtaagtttgataaaa

SEQ ID NO: 54696 - DNA, 22 bp, synthetic construct
  misc_feature 1..22: note = chemically synthesized
  source 1..22: mol_type = other DNA
gtaagtttgataaaatattttc

SEQ ID NO: 54697 - DNA, 22 bp, synthetic construct
  misc_feature 1..22: note = chemically synthesized
  source 1..22: mol_type = other DNA
gataaaatattttcctaagtct

SEQ ID NO: 54698 - DNA, 22 bp, synthetic construct
  misc_feature 1..22: note = chemically synthesized
  source 1..22: mol_type = other DNA
ataaaatattttcctaagtctt

SEQ ID NO: 54699 - DNA, 22 bp, synthetic construct
  misc_feature 1..22: note = chemically synthesized
  source 1..22: mol_type = other DNA
tcctaagtcttccttcagtctg

SEQ ID NO: 54700 - DNA, 22 bp, synthetic construct
  misc_feature 1..22: note = chemically synthesized
  source 1..22: mol_type = other DNA
cctaagtcttccttcagtctgt

SEQ ID NO: 54701 - DNA, 22 bp, synthetic construct
  misc_feature 1..22: note = chemically synthesized
  source 1..22: mol_type = other DNA
ctaagtcttccttcagtctgta

SEQ ID NO: 54702 - DNA, 22 bp, synthetic construct
  misc_feature 1..22: note = chemically synthesized
  source 1..22: mol_type = other DNA
agtcttccttcagtctgtaaac

SEQ ID NO: 54703 - DNA, 22 bp, synthetic construct
  misc_feature 1..22: note = chemically synthesized
  source 1..22: mol_type = other DNA
ccttcagtctgtaaacctcaga

SEQ ID NO: 54704 - DNA, 22 bp, synthetic construct
  misc_feature 1..22: note = chemically synthesized
  source 1..22: mol_type = other DNA
cttcagtctgtaaacctcagaa

SEQ ID NO: 54705 - DNA, 22 bp, synthetic construct
  misc_feature 1..22: note = chemically synthesized
  source 1..22: mol_type = other DNA
cagtctgtaaacctcagaactt

SEQ ID NO: 54706 - DNA, 22 bp, synthetic construct
  misc_feature 1..22: note = chemically synthesized
  source 1..22: mol_type = other DNA
agtctgtaaacctcagaacttg

SEQ ID NO: 54707 - DNA, 22 bp, synthetic construct
  misc_feature 1..22: note = chemically synthesized
  source 1..22: mol_type = other DNA
taaacctcagaacttgtagcta

SEQ ID NO: 54708 - DNA, 22 bp, synthetic construct
  misc_feature 1..22: note = chemically synthesized
  source 1..22: mol_type = other DNA
agaacttgtagctaatgctaaa

SEQ ID NO: 54709 - DNA, 22 bp, synthetic construct
  misc_feature 1..22: note = chemically synthesized
  source 1..22: mol_type = other DNA
gtagctaatgctaaacaaaaaa

SEQ ID NO: 54710 - DNA, 22 bp, synthetic construct
  misc_feature 1..22: note = chemically synthesized
  source 1..22: mol_type = other DNA
tagctaatgctaaacaaaaaag

SEQ ID NO: 54711 - DNA, 22 bp, synthetic construct
  misc_feature 1..22: note = chemically synthesized
  source 1..22: mol_type = other DNA
atgctaaacaaaaaagccacat

SEQ ID NO: 54712 - DNA, 22 bp, synthetic construct
  misc_feature 1..22: note = chemically synthesized
  source 1..22: mol_type = other DNA
aacaaaaaagccacatttatca

SEQ ID NO: 54713 - DNA, 22 bp, synthetic construct
  misc_feature 1..22: note = chemically synthesized
  source 1..22: mol_type = other DNA
atcaatgtgtacttaaaatcct

SEQ ID NO: 54714 - DNA, 22 bp, synthetic construct
  misc_feature 1..22: note = chemically synthesized
  source 1..22: mol_type = other DNA
tcaatgtgtacttaaaatcctt

SEQ ID NO: 54715 - DNA, 22 bp, synthetic construct
  misc_feature 1..22: note = chemically synthesized
  source 1..22: mol_type = other DNA
aaaatccttaattcagacaaca

SEQ ID NO: 54716 - DNA, 22 bp, synthetic construct
  misc_feature 1..22: note = chemically synthesized
  source 1..22: mol_type = other DNA
aaatccttaattcagacaacag

SEQ ID NO: 54717 - DNA, 22 bp, synthetic construct
  misc_feature 1..22: note = chemically synthesized
  source 1..22: mol_type = other DNA
aattcagacaacaggaatattt

SEQ ID NO: 54718 - DNA, 22 bp, synthetic construct
  misc_feature 1..22: note = chemically synthesized
  source 1..22: mol_type = other DNA
attcagacaacaggaatatttt

SEQ ID NO: 54719 - DNA, 22 bp, synthetic construct
  misc_feature 1..22: note = chemically synthesized
  source 1..22: mol_type = other DNA
agacaacaggaatattttgaga

SEQ ID NO: 54720 - DNA, 22 bp, synthetic construct
  misc_feature 1..22: note = chemically synthesized
  source 1..22: mol_type = other DNA
tgagaatgagttccctattcct

SEQ ID NO: 54721 - DNA, 22 bp, synthetic construct
  misc_feature 1..22: note = chemically synthesized
  source 1..22: mol_type = other DNA
gagaatgagttccctattcctc

SEQ ID NO: 54722 - DNA, 22 bp, synthetic construct
  misc_feature 1..22: note = chemically synthesized
  source 1..22: mol_type = other DNA
agaatgagttccctattcctca

SEQ ID NO: 54723 - DNA, 22 bp, synthetic construct
  misc_feature 1..22: note = chemically synthesized
  source 1..22: mol_type = other DNA
cctattcctcacttggtcaaaa

SEQ ID NO: 54724 - DNA, 22 bp, synthetic construct
  misc_feature 1..22: note = chemically synthesized
  source 1..22: mol_type = other DNA
ttcctcacttggtcaaaatgga

SEQ ID NO: 54725 - DNA, 22 bp, synthetic construct
  misc_feature 1..22: note = chemically synthesized
  source 1..22: mol_type = other DNA
ctcacttggtcaaaatggaagc

SEQ ID NO: 54726 - DNA, 22 bp, synthetic construct
  misc_feature 1..22: note = chemically synthesized
  source 1..22: mol_type = other DNA
acttggtcaaaatggaagcaaa

SEQ ID NO: 54727 - DNA, 22 bp, synthetic construct
  misc_feature 1..22: note = chemically synthesized
  source 1..22: mol_type = other DNA
ggtcaaaatggaagcaaatgta

SEQ ID NO: 54728 - DNA, 22 bp, synthetic construct
  misc_feature 1..22: note = chemically synthesized
  source 1..22: mol_type = other DNA
gtcaaaatggaagcaaatgtaa

SEQ ID NO: 54729 - DNA, 22 bp, synthetic construct
  misc_feature 1..22: note = chemically synthesized
  source 1..22: mol_type = other DNA
aggcacaatgcagaggcacttc

SEQ ID NO: 54730 - DNA, 22 bp, synthetic construct
  misc_feature 1..22: note = chemically synthesized
  source 1..22: mol_type = other DNA
ctgtttgtcttcttttatttga

SEQ ID NO: 54731 - DNA, 22 bp, synthetic construct
  misc_feature 1..22: note = chemically synthesized
  source 1..22: mol_type = other DNA
tgtttgtcttcttttatttgaa

SEQ ID NO: 54732 - DNA, 22 bp, synthetic construct
  misc_feature 1..22: note = chemically synthesized
  source 1..22: mol_type = other DNA
tttgtcttcttttatttgaaaa

SEQ ID NO: 54733 - DNA, 22 bp, synthetic construct
  misc_feature 1..22: note = chemically synthesized
  source 1..22: mol_type = other DNA
gtcttcttttatttgaaaagta

SEQ ID NO: 54734 - DNA, 22 bp, synthetic construct
  misc_feature 1..22: note = chemically synthesized
  source 1..22: mol_type = other DNA
tcttcttttatttgaaaagtat

SEQ ID NO: 54735 - DNA, 22 bp, synthetic construct
  misc_feature 1..22: note = chemically synthesized
  source 1..22: mol_type = other DNA
cttttatttgaaaagtatgcat

SEQ ID NO: 54736 - DNA, 22 bp, synthetic construct
  misc_feature 1..22: note = chemically synthesized
  source 1..22: mol_type = other DNA
ttttatttgaaaagtatgcata

SEQ ID NO: 54737 - DNA, 22 bp, synthetic construct
  misc_feature 1..22: note = chemically synthesized
  source 1..22: mol_type = other DNA
ttatttgaaaagtatgcatatg

SEQ ID NO: 54738 - DNA, 22 bp, synthetic construct
  misc_feature 1..22: note = chemically synthesized
  source 1..22: mol_type = other DNA
tatttgaaaagtatgcatatgt

SEQ ID NO: 54739 - DNA, 22 bp, synthetic construct
  misc_feature 1..22: note = chemically synthesized
  source 1..22: mol_type = other DNA
atttgaaaagtatgcatatgta

SEQ ID NO: 54740 - DNA, 22 bp, synthetic construct
  misc_feature 1..22: note = chemically synthesized
  source 1..22: mol_type = other DNA
tttgaaaagtatgcatatgtat

SEQ ID NO: 54741 - DNA, 22 bp, synthetic construct
  misc_feature 1..22: note = chemically synthesized
  source 1..22: mol_type = other DNA
gaaaagtatgcatatgtattct

SEQ ID NO: 54742 - DNA, 22 bp, synthetic construct
  misc_feature 1..22: note = chemically synthesized
  source 1..22: mol_type = other DNA
aaaagtatgcatatgtattctg

SEQ ID NO: 54743 - DNA, 22 bp, synthetic construct
  misc_feature 1..22: note = chemically synthesized
  source 1..22: mol_type = other DNA
tgtatttatcttttggccagta

SEQ ID NO: 54744 - DNA, 22 bp, synthetic construct
  misc_feature 1..22: note = chemically synthesized
  source 1..22: mol_type = other DNA
tatttatcttttggccagtatg

SEQ ID NO: 54745 - DNA, 22 bp, synthetic construct
  misc_feature 1..22: note = chemically synthesized
  source 1..22: mol_type = other DNA
atcttttggccagtatgttggg

SEQ ID NO: 54746 - DNA, 22 bp, synthetic construct
  misc_feature 1..22: note = chemically synthesized
  source 1..22: mol_type = other DNA
tcttttggccagtatgttgggc

SEQ ID NO: 54747 - DNA, 22 bp, synthetic construct
  misc_feature 1..22: note = chemically synthesized
  source 1..22: mol_type = other DNA
ttggccagtatgttgggcaaag

SEQ ID NO: 54748 - DNA, 22 bp, synthetic construct
  misc_feature 1..22: note = chemically synthesized
  source 1..22: mol_type = other DNA
tggccagtatgttgggcaaaga

SEQ ID NO: 54749 - DNA, 22 bp, synthetic construct
  misc_feature 1..22: note = chemically synthesized
  source 1..22: mol_type = other DNA
ggccagtatgttgggcaaagaa

SEQ ID NO: 54750 - DNA, 22 bp, synthetic construct
  misc_feature 1..22: note = chemically synthesized
  source 1..22: mol_type = other DNA
gccagtatgttgggcaaagaaa

SEQ ID NO: 54751 - DNA, 22 bp, synthetic construct
  misc_feature 1..22: note = chemically synthesized
  source 1..22: mol_type = other DNA
ggcaaagaaacataagtgctta

SEQ ID NO: 54752 - DNA, 22 bp, synthetic construct
  misc_feature 1..22: note = chemically synthesized
  source 1..22: mol_type = other DNA
actttactgtctttattagtag

SEQ ID NO: 54753 - DNA, 22 bp, synthetic construct
  misc_feature 1..22: note = chemically synthesized
  source 1..22: mol_type = other DNA
ctttactgtctttattagtagg

SEQ ID NO: 54754 - DNA, 22 bp, synthetic construct
  misc_feature 1..22: note = chemically synthesized
  source 1..22: mol_type = other DNA
tactgtctttattagtaggaat

SEQ ID NO: 54755 - DNA, 22 bp, synthetic construct
  misc_feature 1..22: note = chemically synthesized
  source 1..22: mol_type = other DNA
actgtctttattagtaggaata

SEQ ID NO: 54756 - DNA, 22 bp, synthetic construct
  misc_feature 1..22: note = chemically synthesized
  source 1..22: mol_type = other DNA
ctgtctttattagtaggaatat

SEQ ID NO: 54757 - DNA, 22 bp, synthetic construct
  misc_feature 1..22: note = chemically synthesized
  source 1..22: mol_type = other DNA
tctttattagtaggaatataac

SEQ ID NO: 54758 - DNA, 22 bp, synthetic construct
  misc_feature 1..22: note = chemically synthesized
  source 1..22: mol_type = other DNA
tattagtaggaatataaccttc

SEQ ID NO: 54759 - DNA, 22 bp, synthetic construct
  misc_feature 1..22: note = chemically synthesized
  source 1..22: mol_type = other DNA
attagtaggaatataaccttca

SEQ ID NO: 54760 - DNA, 22 bp, synthetic construct
  misc_feature 1..22: note = chemically synthesized
  source 1..22: mol_type = other DNA
ttagtaggaatataaccttcat

SEQ ID NO: 54761 - DNA, 22 bp, synthetic construct
  misc_feature 1..22: note = chemically synthesized
  source 1..22: mol_type = other DNA
gtaggaatataaccttcatatt

SEQ ID NO: 54762 - DNA, 22 bp, synthetic construct
  misc_feature 1..22: note = chemically synthesized
  source 1..22: mol_type = other DNA
catattcctgtggtgaccttat

SEQ ID NO: 54763 - DNA, 22 bp, synthetic construct
  misc_feature 1..22: note = chemically synthesized
  source 1..22: mol_type = other DNA
atattcctgtggtgaccttatg

SEQ ID NO: 54764 - DNA, 22 bp, synthetic construct
  misc_feature 1..22: note = chemically synthesized
  source 1..22: mol_type = other DNA
ctgtggtgaccttatgttaaat

SEQ ID NO: 54765 - DNA, 22 bp, synthetic construct
  misc_feature 1..22: note = chemically synthesized
  source 1..22: mol_type = other DNA
tggtgaccttatgttaaattag

SEQ ID NO: 54766 - DNA, 22 bp, synthetic construct
  misc_feature 1..22: note = chemically synthesized
  source 1..22: mol_type = other DNA
atgttaaattaggaggagtacc

SEQ ID NO: 54767 - DNA, 22 bp, synthetic construct
  misc_feature 1..22: note = chemically synthesized
  source 1..22: mol_type = other DNA
tgttaaattaggaggagtacca

SEQ ID NO: 54768 - DNA, 22 bp, synthetic construct
  misc_feature 1..22: note = chemically synthesized
  source 1..22: mol_type = other DNA
aattaggaggagtaccagaggc

SEQ ID NO: 54769 - DNA, 22 bp, synthetic construct
  misc_feature 1..22: note = chemically synthesized
  source 1..22: mol_type = other DNA
ggaggagtaccagaggctagaa

SEQ ID NO: 54770 - DNA, 22 bp, synthetic construct
  misc_feature 1..22: note = chemically synthesized
  source 1..22: mol_type = other DNA
gaaattatgagatgtcctactt

SEQ ID NO: 54771 - DNA, 22 bp, synthetic construct
  misc_feature 1..22: note = chemically synthesized
  source 1..22: mol_type = other DNA
tgagatgtcctacttgagcaca

SEQ ID NO: 54772 - DNA, 22 bp, synthetic construct
  misc_feature 1..22: note = chemically synthesized
  source 1..22: mol_type = other DNA
cttgagcacaggtgcagctagg

SEQ ID NO: 54773 - DNA, 22 bp, synthetic construct
  misc_feature 1..22: note = chemically synthesized
  source 1..22: mol_type = other DNA
gagcacaggtgcagctaggcag

SEQ ID NO: 54774 - DNA, 22 bp, synthetic construct
  misc_feature 1..22: note = chemically synthesized
  source 1..22: mol_type = other DNA
agcacaggtgcagctaggcagg

SEQ ID NO: 54775 - DNA, 22 bp, synthetic construct
  misc_feature 1..22: note = chemically synthesized
  source 1..22: mol_type = other DNA
ggcagggctctctcaatattat

SEQ ID NO: 54776 - DNA, 22 bp, synthetic construct
  misc_feature 1..22: note = chemically synthesized
  source 1..22: mol_type = other DNA
tctcaatattatttcacctagc

SEQ ID NO: 54777 - DNA, 22 bp, synthetic construct
  misc_feature 1..22: note = chemically synthesized
  source 1..22: mol_type = other DNA
tcaatattatttcacctagcac

SEQ ID NO: 54778 - DNA, 22 bp, synthetic construct
  misc_feature 1..22: note = chemically synthesized
  source 1..22: mol_type = other DNA
aatattatttcacctagcacat

SEQ ID NO: 54779 - DNA, 22 bp, synthetic construct
  misc_feature 1..22: note = chemically synthesized
  source 1..22: mol_type = other DNA
tttcacctagcacatctgggag

SEQ ID NO: 54780 - DNA, 22 bp, synthetic construct
  misc_feature 1..22: note = chemically synthesized
  source 1..22: mol_type = other DNA
cacctagcacatctgggagtta

SEQ ID NO: 54781 - DNA, 22 bp, synthetic construct
  misc_feature 1..22: note = chemically synthesized
  source 1..22: mol_type = other DNA
acctagcacatctgggagttac

SEQ ID NO: 54782 - DNA, 22 bp, synthetic construct
  misc_feature 1..22: note = chemically synthesized
  source 1..22: mol_type = other DNA
gcacatctgggagttactccag

SEQ ID NO: 54783 - DNA, 22 bp, synthetic construct
  misc_feature 1..22: note = chemically synthesized
  source 1..22: mol_type = other DNA
ggagttactccagatcttcccc

SEQ ID NO: 54784 - DNA, 22 bp, synthetic construct
  misc_feature 1..22: note = chemically synthesized
  source 1..22: mol_type = other DNA
ctccagatcttccccctcaata

SEQ ID NO: 54785 - DNA, 22 bp, synthetic construct
  misc_feature 1..22: note = chemically synthesized
  source 1..22: mol_type = other DNA
cagatcttccccctcaatattc

SEQ ID NO: 54786 - DNA, 22 bp, synthetic construct
  misc_feature 1..22: note = chemically synthesized
  source 1..22: mol_type = other DNA
ccccctcaatattcagcctggg

SEQ ID NO: 54787 - DNA, 22 bp, synthetic construct
  misc_feature 1..22: note = chemically synthesized
  source 1..22: mol_type = other DNA
cccctcaatattcagcctgggt

SEQ ID NO: 54788 - DNA, 22 bp, synthetic construct
  misc_feature 1..22: note = chemically synthesized
  source 1..22: mol_type = other DNA
aatattcagcctgggtagggtt

SEQ ID NO: 54789 - DNA, 22 bp, synthetic construct
  misc_feature 1..22: note = chemically synthesized
  source 1..22: mol_type = other DNA
agcctgggtagggttgaaataa

SEQ ID NO: 54790 - DNA, 22 bp, synthetic construct
  misc_feature 1..22: note = chemically synthesized
  source 1..22: mol_type = other DNA
ggtagggttgaaataaatttaa

SEQ ID NO: 54791 - DNA, 22 bp, synthetic construct
  misc_feature 1..22: note = chemically synthesized
  source 1..22: mol_type = other DNA
aaataaatttaacctgagttca

SEQ ID NO: 54792 - DNA, 22 bp, synthetic construct
  misc_feature 1..22: note = chemically synthesized
  source 1..22: mol_type = other DNA
aacctgagttcactggattttt

SEQ ID NO: 54793 - DNA, 22 bp, synthetic construct
  misc_feature 1..22: note = chemically synthesized
  source 1..22: mol_type = other DNA
acctgagttcactggatttttg

SEQ ID NO: 54794 - DNA, 22 bp, synthetic construct
  misc_feature 1..22: note = chemically synthesized
  source 1..22: mol_type = other DNA
agttcactggatttttgcactt

SEQ ID NO: 54795 - DNA, 22 bp, synthetic construct
  misc_feature 1..22: note = chemically synthesized
  source 1..22: mol_type = other DNA
actggatttttgcactttatca

SEQ ID NO: 54796 - DNA, 22 bp, synthetic construct
  misc_feature 1..22: note = chemically synthesized
  source 1..22: mol_type = other DNA
gatttttgcactttatcaaaat

SEQ ID NO: 54797 - DNA, 22 bp, synthetic construct
  misc_feature 1..22: note = chemically synthesized
  source 1..22: mol_type = other DNA
ttgcactttatcaaaatctgtt

SEQ ID NO: 54798 - DNA, 22 bp, synthetic construct
  misc_feature 1..22: note = chemically synthesized
  source 1..22: mol_type = other DNA
tgcactttatcaaaatctgttc

SEQ ID NO: 54799 - DNA, 22 bp, synthetic construct
  misc_feature 1..22: note = chemically synthesized
  source 1..22: mol_type = other DNA
gcactttatcaaaatctgttcc

SEQ ID NO: 54800 - DNA, 22 bp, synthetic construct
  misc_feature 1..22: note = chemically synthesized
  source 1..22: mol_type = other DNA
cactttatcaaaatctgttcca

SEQ ID NO: 54801 - DNA, 22 bp, synthetic construct
  misc_feature 1..22: note = chemically synthesized
  source 1..22: mol_type = other DNA
tatcaaaatctgttccaatatt

SEQ ID NO: 54802 - DNA, 22 bp, synthetic construct
  misc_feature 1..22: note = chemically synthesized
  source 1..22: mol_type = other DNA
atcaaaatctgttccaatattc

SEQ ID NO: 54803 - DNA, 22 bp, synthetic construct
  misc_feature 1..22: note = chemically synthesized
  source 1..22: mol_type = other DNA
tcaaaatctgttccaatattct

SEQ ID NO: 54804 - DNA, 22 bp, synthetic construct
  misc_feature 1..22: note = chemically synthesized
  source 1..22: mol_type = other DNA
ttccaatattctacactcaaat

SEQ ID NO: 54805 - DNA, 22 bp, synthetic construct
  misc_feature 1..22: note = chemically synthesized
  source 1..22: mol_type = other DNA
caatattctacactcaaattaa

SEQ ID NO: 54806 - DNA, 22 bp, synthetic construct
  misc_feature 1..22: note = chemically synthesized
  source 1..22: mol_type = other DNA
tacactcaaattaaaatctatt

SEQ ID NO: 54807 - DNA, 22 bp, synthetic construct
  misc_feature 1..22: note = chemically synthesized
  source 1..22: mol_type = other DNA
cactcaaattaaaatctatttt

SEQ ID NO: 54808 - DNA, 22 bp, synthetic construct
  misc_feature 1..22: note = chemically synthesized
  source 1..22: mol_type = other DNA
aaattaaaatctattttttgat

SEQ ID NO: 54809 - DNA, 22 bp, synthetic construct
  misc_feature 1..22: note = chemically synthesized
  source 1..22: mol_type = other DNA
aaatctattttttgattctctg

SEQ ID NO: 54810 - DNA, 22 bp, synthetic construct
  misc_feature 1..22: note = chemically synthesized
  source 1..22: mol_type = other DNA
ttttttgattctctgtggcttt

SEQ ID NO: 54811 - DNA, 22 bp, synthetic construct
  misc_feature 1..22: note = chemically synthesized
  source 1..22: mol_type = other DNA
tttgattctctgtggctttaag

SEQ ID NO: 54812 - DNA, 22 bp, synthetic construct
  misc_feature 1..22: note = chemically synthesized
  source 1..22: mol_type = other DNA
ttgattctctgtggctttaagt

SEQ ID NO: 54813 - DNA, 22 bp, synthetic construct
  misc_feature 1..22: note = chemically synthesized
  source 1..22: mol_type = other DNA
tgattctctgtggctttaagtt

SEQ ID NO: 54814 - DNA, 22 bp, synthetic construct
  misc_feature 1..22: note = chemically synthesized
  source 1..22: mol_type = other DNA
gattctctgtggctttaagttc

SEQ ID NO: 54815 - DNA, 22 bp, synthetic construct
  misc_feature 1..22: note = chemically synthesized
  source 1..22: mol_type = other DNA
attctctgtggctttaagttca

SEQ ID NO: 54816 - DNA, 22 bp, synthetic construct
  misc_feature 1..22: note = chemically synthesized
  source 1..22: mol_type = other DNA
tctgtggctttaagttcattaa

SEQ ID NO: 54817 - DNA, 22 bp, synthetic construct
  misc_feature 1..22: note = chemically synthesized
  source 1..22: mol_type = other DNA
tgtggctttaagttcattaaat

SEQ ID NO: 54818 - DNA, 22 bp, synthetic construct
  misc_feature 1..22: note = chemically synthesized
  source 1..22: mol_type = other DNA
tggctttaagttcattaaatgt

SEQ ID NO: 54819 - DNA, 22 bp, synthetic construct
  misc_feature 1..22: note = chemically synthesized
  source 1..22: mol_type = other DNA
taagttcattaaatgtaaaatt

SEQ ID NO: 54820 - DNA, 22 bp, synthetic construct
  misc_feature 1..22: note = chemically synthesized
  source 1..22: mol_type = other DNA
aagttcattaaatgtaaaattg

SEQ ID NO: 54821 - DNA, 22 bp, synthetic construct
  misc_feature 1..22: note = chemically synthesized
  source 1..22: mol_type = other DNA
agttcattaaatgtaaaattgg

SEQ ID NO: 54822 - DNA, 22 bp, synthetic construct
  misc_feature 1..22: note = chemically synthesized
  source 1..22: mol_type = other DNA
attaaatgtaaaattggcagct

SEQ ID NO: 54823 - DNA, 22 bp, synthetic construct
  misc_feature 1..22: note = chemically synthesized
  source 1..22: mol_type = other DNA
aatgtaaaattggcagcttgct

SEQ ID NO: 54824 - DNA, 22 bp, synthetic construct
  misc_feature 1..22: note = chemically synthesized
  source 1..22: mol_type = other DNA
gcagcttgctaaagaaggtcag

SEQ ID NO: 54825 - DNA, 22 bp, synthetic construct
  misc_feature 1..22: note = chemically synthesized
  source 1..22: mol_type = other DNA
gctaaagaaggtcagactgatt

SEQ ID NO: 54826 - DNA, 22 bp, synthetic construct
  misc_feature 1..22: note = chemically synthesized
  source 1..22: mol_type = other DNA
ctaaagaaggtcagactgatta

SEQ ID NO: 54827 - DNA, 22 bp, synthetic construct
  misc_feature 1..22: note = chemically synthesized
  source 1..22: mol_type = other DNA
aagaaggtcagactgattaact

SEQ ID NO: 54828 - DNA, 22 bp, synthetic construct
  misc_feature 1..22: note = chemically synthesized
  source 1..22: mol_type = other DNA
attaactgtttaagacttgtac

SEQ ID NO: 54829 - DNA, 22 bp, synthetic construct
  misc_feature 1..22: note = chemically synthesized
  source 1..22: mol_type = other DNA
actgtttaagacttgtacattt

SEQ ID NO: 54830 - DNA, 22 bp, synthetic construct
  misc_feature 1..22: note = chemically synthesized
  source 1..22: mol_type = other DNA
tttaagacttgtacattttctg

SEQ ID NO: 54831 - DNA, 22 bp, synthetic construct
  misc_feature 1..22: note = chemically synthesized
  source 1..22: mol_type = other DNA
aagacttgtacattttctgctt

SEQ ID NO: 54832 - DNA, 22 bp, synthetic construct
  misc_feature 1..22: note = chemically synthesized
  source 1..22: mol_type = other DNA
agacttgtacattttctgcttc

SEQ ID NO: 54833 - DNA, 22 bp, synthetic construct
  misc_feature 1..22: note = chemically synthesized
  source 1..22: mol_type = other DNA
gtacattttctgcttcagtttt

SEQ ID NO: 54834 - DNA, 22 bp, synthetic construct
  misc_feature 1..22: note = chemically synthesized
  source 1..22: mol_type = other DNA
tacattttctgcttcagtttta

SEQ ID NO: 54835 - DNA, 22 bp, synthetic construct
  misc_feature 1..22: note = chemically synthesized
  source 1..22: mol_type = other DNA
tctgcttcagttttattaactg

SEQ ID NO: 54836 - DNA, 22 bp, synthetic construct
  misc_feature 1..22: note = chemically synthesized
  source 1..22: mol_type = other DNA
ctgcttcagttttattaactgg

SEQ ID NO: 54837 - DNA, 22 bp, synthetic construct
  misc_feature 1..22: note = chemically synthesized
  source 1..22: mol_type = other DNA
tgcttcagttttattaactggc

SEQ ID NO: 54838 - DNA, 22 bp, synthetic construct
  misc_feature 1..22: note = chemically synthesized
  source 1..22: mol_type = other DNA
cttcagttttattaactggcag

SEQ ID NO: 54839 - DNA, 22 bp, synthetic construct
  misc_feature 1..22: note = chemically synthesized
  source 1..22: mol_type = other DNA
cagttttattaactggcagcat

SEQ ID NO: 54840 - DNA, 22 bp, synthetic construct
  misc_feature 1..22: note = chemically synthesized
  source 1..22: mol_type = other DNA
agttttattaactggcagcatc

SEQ ID NO: 54841 - DNA, 22 bp, synthetic construct
  misc_feature 1..22: note = chemically synthesized
  source 1..22: mol_type = other DNA
tattaactggcagcatcctgga

SEQ ID NO: 54842 - DNA, 22 bp, synthetic construct
  misc_feature 1..22: note = chemically synthesized
  source 1..22: mol_type = other DNA
attaactggcagcatcctggat

SEQ ID NO: 54843 - DNA, 22 bp, synthetic construct
  misc_feature 1..22: note = chemically synthesized
  source 1..22: mol_type = other DNA
ttaactggcagcatcctggatg

SEQ ID NO: 54844 - DNA, 22 bp, synthetic construct
  misc_feature 1..22: note = chemically synthesized
  source 1..22: mol_type = other DNA
actggcagcatcctggatgttt

SEQ ID NO: 54845 - DNA, 22 bp, synthetic construct
  misc_feature 1..22: note = chemically synthesized
  source 1..22: mol_type = other DNA
gcagcatcctggatgttttgta

SEQ ID NO: 54846 - DNA, 22 bp, synthetic construct
  misc_feature 1..22: note = chemically synthesized
  source 1..22: mol_type = other DNA
gatgttttgtattttgtgattt

SEQ ID NO: 54847 - DNA, 22 bp, synthetic construct
  misc_feature 1..22: note = chemically synthesized
  source 1..22: mol_type = other DNA
tgtattttgtgatttttttttt

SEQ ID NO: 54848 - DNA, 22 bp, synthetic construct
  misc_feature 1..22: note = chemically synthesized
  source 1..22: mol_type = other DNA
gtattttgtgattttttttttt

SEQ ID NO: 54849 - DNA, 22 bp, synthetic construct
  misc_feature 1..22: note = chemically synthesized
  source 1..22: mol_type = other DNA
tattttgtgatttttttttttt

SEQ ID NO: 54850 - DNA, 22 bp, synthetic construct
  misc_feature 1..22: note = chemically synthesized
  source 1..22: mol_type = other DNA
tgtgattttttttttttttttg

SEQ ID NO: 54851 - DNA, 22 bp, synthetic construct
  misc_feature 1..22: note = chemically synthesized
  source 1..22: mol_type = other DNA
gtgattttttttttttttttga

SEQ ID NO: 54852 - DNA, 22 bp, synthetic construct
  misc_feature 1..22: note = chemically synthesized
  source 1..22: mol_type = other DNA
tgattttttttttttttttgat

SEQ ID NO: 54853 - DNA, 22 bp, synthetic construct
  misc_feature 1..22: note = chemically synthesized
  source 1..22: mol_type = other DNA
tttttttttttttgatagagca

SEQ ID NO: 54854 - DNA, 22 bp, synthetic construct
  misc_feature 1..22: note = chemically synthesized
  source 1..22: mol_type = other DNA
ttttttttttttgatagagcaa

SEQ ID NO: 54855 - DNA, 22 bp, synthetic construct
  misc_feature 1..22: note = chemically synthesized
  source 1..22: mol_type = other DNA
tttttttttttgatagagcaag

SEQ ID NO: 54856 - DNA, 22 bp, synthetic construct
  misc_feature 1..22: note = chemically synthesized
  source 1..22: mol_type = other DNA
ttttttttttgatagagcaagc

SEQ ID NO: 54857 - DNA, 22 bp, synthetic construct
  misc_feature 1..22: note = chemically synthesized
  source 1..22: mol_type = other DNA
tttttttttgatagagcaagca

SEQ ID NO: 54858 - DNA, 22 bp, synthetic construct
  misc_feature 1..22: note = chemically synthesized
  source 1..22: mol_type = other DNA
ttttttttgatagagcaagcat

SEQ ID NO: 54859 - DNA, 22 bp, synthetic construct
  misc_feature 1..22: note = chemically synthesized
  source 1..22: mol_type = other DNA
tttttttgatagagcaagcata

SEQ ID NO: 54860 - DNA, 22 bp, synthetic construct
  misc_feature 1..22: note = chemically synthesized
  source 1..22: mol_type = other DNA
ttttttgatagagcaagcataa

SEQ ID NO: 54861 - DNA, 22 bp, synthetic construct
  misc_feature 1..22: note = chemically synthesized
  source 1..22: mol_type = other DNA
tttttgatagagcaagcataag

SEQ ID NO: 54862 - DNA, 22 bp, synthetic construct
  misc_feature 1..22: note = chemically synthesized
  source 1..22: mol_type = other DNA
ttttgatagagcaagcataaga

SEQ ID NO: 54863 - DNA, 22 bp, synthetic construct
  misc_feature 1..22: note = chemically synthesized
  source 1..22: mol_type = other DNA
tttgatagagcaagcataagat

SEQ ID NO: 54864 - DNA, 22 bp, synthetic construct
  misc_feature 1..22: note = chemically synthesized
  source 1..22: mol_type = other DNA
ttgatagagcaagcataagatt

SEQ ID NO: 54865 - DNA, 22 bp, synthetic construct
  misc_feature 1..22: note = chemically synthesized
  source 1..22: mol_type = other DNA
tgatagagcaagcataagattt

SEQ ID NO: 54866 - DNA, 22 bp, synthetic construct
  misc_feature 1..22: note = chemically synthesized
  source 1..22: mol_type = other DNA
gatagagcaagcataagatttc

SEQ ID NO: 54867 - DNA, 22 bp, synthetic construct
  misc_feature 1..22: note = chemically synthesized
  source 1..22: mol_type = other DNA
atagagcaagcataagatttca

SEQ ID NO: 54868 - DNA, 22 bp, synthetic construct
  misc_feature 1..22: note = chemically synthesized
  source 1..22: mol_type = other DNA
cacaagcagagacttaccaact

SEQ ID NO: 54869 - DNA, 22 bp, synthetic construct
  misc_feature 1..22: note = chemically synthesized
  source 1..22: mol_type = other DNA
acaagcagagacttaccaactc

SEQ ID NO: 54870 - DNA, 22 bp, synthetic construct
  misc_feature 1..22: note = chemically synthesized
  source 1..22: mol_type = other DNA
accaactctcttttcccctttg

SEQ ID NO: 54871 - DNA, 22 bp, synthetic construct
  misc_feature 1..22: note = chemically synthesized
  source 1..22: mol_type = other DNA
ccaactctcttttcccctttgg

SEQ ID NO: 54872 - DNA, 22 bp, synthetic construct
  misc_feature 1..22: note = chemically synthesized
  source 1..22: mol_type = other DNA
tcttttcccctttggaagctta

SEQ ID NO: 54873 - DNA, 22 bp, synthetic construct
  misc_feature 1..22: note = chemically synthesized
  source 1..22: mol_type = other DNA
ttttcccctttggaagcttaaa

SEQ ID NO: 54874 - DNA, 22 bp, synthetic construct
  misc_feature 1..22: note = chemically synthesized
  source 1..22: mol_type = other DNA
ttcccctttggaagcttaaaaa

SEQ ID NO: 54875 - DNA, 22 bp, synthetic construct
  misc_feature 1..22: note = chemically synthesized
  source 1..22: mol_type = other DNA
tcccctttggaagcttaaaaaa

SEQ ID NO: 54876 - DNA, 22 bp, synthetic construct
  misc_feature 1..22: note = chemically synthesized
  source 1..22: mol_type = other DNA
cccctttggaagcttaaaaaat

SEQ ID NO: 54877 - DNA, 22 bp, synthetic construct
  misc_feature 1..22: note = chemically synthesized
  source 1..22: mol_type = other DNA
ccctttggaagcttaaaaaatg

SEQ ID NO: 54878 - DNA, 22 bp, synthetic construct
  misc_feature 1..22: note = chemically synthesized
  source 1..22: mol_type = other DNA
tggaagcttaaaaaatgataga

SEQ ID NO: 54879 - DNA, 22 bp, synthetic construct
  misc_feature 1..22: note = chemically synthesized
  source 1..22: mol_type = other DNA
ggaagcttaaaaaatgatagaa

SEQ ID NO: 54880 - DNA, 22 bp, synthetic construct
  misc_feature 1..22: note = chemically synthesized
  source 1..22: mol_type = other DNA
gaagcttaaaaaatgatagaag

SEQ ID NO: 54881 - DNA, 22 bp, synthetic construct
  misc_feature 1..22: note = chemically synthesized
  source 1..22: mol_type = other DNA
aaaaaatgatagaagctggtaa

SEQ ID NO: 54882 - DNA, 22 bp, synthetic construct
  misc_feature 1..22: note = chemically synthesized
  source 1..22: mol_type = other DNA
aaaaatgatagaagctggtaaa

SEQ ID NO: 54883 - DNA, 22 bp, synthetic construct
  misc_feature 1..22: note = chemically synthesized
  source 1..22: mol_type = other DNA
gtaaagtagatgctggagtatt

SEQ ID NO: 54884 - DNA, 22 bp, synthetic construct
  misc_feature 1..22: note = chemically synthesized
  source 1..22: mol_type = other DNA
gagtattttagtacaaagttaa

SEQ ID NO: 54885 - DNA, 22 bp, synthetic construct
  misc_feature 1..22: note = chemically synthesized
  source 1..22: mol_type = other DNA
tagtacaaagttaaaaaaaaaa

SEQ ID NO: 54886 - DNA, 22 bp, synthetic construct
  misc_feature 1..22: note = chemically synthesized
  source 1..22: mol_type = other DNA
agtacaaagttaaaaaaaaaag

SEQ ID NO: 54887 - DNA, 22 bp, synthetic construct
  misc_feature 1..22: note = chemically synthesized
  source 1..22: mol_type = other DNA
gtacaaagttaaaaaaaaaagc

SEQ ID NO: 54888 - DNA, 22 bp, synthetic construct
  misc_feature 1..22: note = chemically synthesized
  source 1..22: mol_type = other DNA
aaaaaaaaagcaaacaggaaag

SEQ ID NO: 54889 - DNA, 22 bp, synthetic construct
  misc_feature 1..22: note = chemically synthesized
  source 1..22: mol_type = other DNA
ccttgttataccatccgctggt

SEQ ID NO: 54890 - DNA, 22 bp, synthetic construct
  misc_feature 1..22: note = chemically synthesized
  source 1..22: mol_type = other DNA
gttataccatccgctggtgatt

SEQ ID NO: 54891 - DNA, 22 bp, synthetic construct
  misc_feature 1..22: note = chemically synthesized
  source 1..22: mol_type = other DNA
ttataccatccgctggtgatta

SEQ ID NO: 54892 - DNA, 22 bp, synthetic construct
  misc_feature 1..22: note = chemically synthesized
  source 1..22: mol_type = other DNA
taccatccgctggtgattatgt

SEQ ID NO: 54893 - DNA, 22 bp, synthetic construct
  misc_feature 1..22: note = chemically synthesized
  source 1..22: mol_type = other DNA
gtgattatgtgtgcagaaatag

SEQ ID NO: 54894 - DNA, 22 bp, synthetic construct
  misc_feature 1..22: note = chemically synthesized
  source 1..22: mol_type = other DNA
tgtgtgcagaaatagtctcata

SEQ ID NO: 54895 - DNA, 22 bp, synthetic construct
  misc_feature 1..22: note = chemically synthesized
  source 1..22: mol_type = other DNA
ataatgaagcattttggagctc

SEQ ID NO: 54896 - DNA, 22 bp, synthetic construct
  misc_feature 1..22: note = chemically synthesized
  source 1..22: mol_type = other DNA
tggagctcattcagaaaattag

SEQ ID NO: 54897 - DNA, 22 bp, synthetic construct
  misc_feature 1..22: note = chemically synthesized
  source 1..22: mol_type = other DNA
ggagctcattcagaaaattagt

SEQ ID NO: 54898 - DNA, 22 bp, synthetic construct
  misc_feature 1..22: note = chemically synthesized
  source 1..22: mol_type = other DNA
gagctcattcagaaaattagtc

SEQ ID NO: 54899 - DNA, 22 bp, synthetic construct
  misc_feature 1..22: note = chemically synthesized
  source 1..22: mol_type = other DNA
attcagaaaattagtccacttt

SEQ ID NO: 54900 - DNA, 22 bp, synthetic construct
  misc_feature 1..22: note = chemically synthesized
  source 1..22: mol_type = other DNA
agaaaattagtccactttgaca

SEQ ID NO: 54901 - DNA, 22 bp, synthetic construct
  misc_feature 1..22: note = chemically synthesized
  source 1..22: mol_type = other DNA
gtccactttgacaacattaggc

SEQ ID NO: 54902 - DNA, 22 bp, synthetic construct
  misc_feature 1..22: note = chemically synthesized
  source 1..22: mol_type = other DNA
tgacaacattaggcgaagtatt

SEQ ID NO: 54903 - DNA, 22 bp, synthetic construct
  misc_feature 1..22: note = chemically synthesized
  source 1..22: mol_type = other DNA
gacaacattaggcgaagtattt

SEQ ID NO: 54904 - DNA, 22 bp, synthetic construct
  misc_feature 1..22: note = chemically synthesized
  source 1..22: mol_type = other DNA
acaacattaggcgaagtatttc

SEQ ID NO: 54905 - DNA, 22 bp, synthetic construct
  misc_feature 1..22: note = chemically synthesized
  source 1..22: mol_type = other DNA
ggcgaagtatttcaagtctaaa

SEQ ID NO: 54906 - DNA, 22 bp, synthetic construct
  misc_feature 1..22: note = chemically synthesized
  source 1..22: mol_type = other DNA
caagtctaaagaaaggacttct

SEQ ID NO: 54907 - DNA, 22 bp, synthetic construct
  misc_feature 1..22: note = chemically synthesized
  source 1..22: mol_type = other DNA
aagtctaaagaaaggacttctc

SEQ ID NO: 54908 - DNA, 22 bp, synthetic construct
  misc_feature 1..22: note = chemically synthesized
  source 1..22: mol_type = other DNA
aagaaaggacttctcagccttg

SEQ ID NO: 54909 - DNA, 22 bp, synthetic construct
  misc_feature 1..22: note = chemically synthesized
  source 1..22: mol_type = other DNA
ctcagccttgctctgaaatgtg

SEQ ID NO: 54910 - DNA, 22 bp, synthetic construct
  misc_feature 1..22: note = chemically synthesized
  source 1..22: mol_type = other DNA
tcagccttgctctgaaatgtgg

SEQ ID NO: 54911 - DNA, 22 bp, synthetic construct
  misc_feature 1..22: note = chemically synthesized
  source 1..22: mol_type = other DNA
agccttgctctgaaatgtggtg

SEQ ID NO: 54912 - DNA, 22 bp, synthetic construct
  misc_feature 1..22: note = chemically synthesized
  source 1..22: mol_type = other DNA
gctctgaaatgtggtgtttgct

SEQ ID NO: 54913 - DNA, 22 bp, synthetic construct
  misc_feature 1..22: note = chemically synthesized
  source 1..22: mol_type = other DNA
ctctgaaatgtggtgtttgctt

SEQ ID NO: 54914 - DNA, 22 bp, synthetic construct
  misc_feature 1..22: note = chemically synthesized
  source 1..22: mol_type = other DNA
tgaaatgtggtgtttgcttgac

SEQ ID NO: 54915 - DNA, 22 bp, synthetic construct
  misc_feature 1..22: note = chemically synthesized
  source 1..22: mol_type = other DNA
aaatgtggtgtttgcttgacca

SEQ ID NO: 54916 - DNA, 22 bp, synthetic construct
  misc_feature 1..22: note = chemically synthesized
  source 1..22: mol_type = other DNA
gcttgaccattctgatttttat

SEQ ID NO: 54917 - DNA, 22 bp, synthetic construct
  misc_feature 1..22: note = chemically synthesized
  source 1..22: mol_type = other DNA
cttgaccattctgatttttata

SEQ ID NO: 54918 - DNA, 22 bp, synthetic construct
  misc_feature 1..22: note = chemically synthesized
  source 1..22: mol_type = other DNA
gaccattctgatttttatatca

SEQ ID NO: 54919 - DNA, 22 bp, synthetic construct
  misc_feature 1..22: note = chemically synthesized
  source 1..22: mol_type = other DNA
accattctgatttttatatcat

SEQ ID NO: 54920 - DNA, 22 bp, synthetic construct
  misc_feature 1..22: note = chemically synthesized
  source 1..22: mol_type = other DNA
tgatttttatatcatagatgcc

SEQ ID NO: 54921 - DNA, 22 bp, synthetic construct
  misc_feature 1..22: note = chemically synthesized
  source 1..22: mol_type = other DNA
atttttatatcatagatgccac

SEQ ID NO: 54922 - DNA, 22 bp, synthetic construct
  misc_feature 1..22: note = chemically synthesized
  source 1..22: mol_type = other DNA
ttatatcatagatgccaccaag

SEQ ID NO: 54923 - DNA, 22 bp, synthetic construct
  misc_feature 1..22: note = chemically synthesized
  source 1..22: mol_type = other DNA
tatatcatagatgccaccaagt

SEQ ID NO: 54924 - DNA, 22 bp, synthetic construct
  misc_feature 1..22: note = chemically synthesized
  source 1..22: mol_type = other DNA
atatcatagatgccaccaagtg

SEQ ID NO: 54925 - DNA, 22 bp, synthetic construct
  misc_feature 1..22: note = chemically synthesized
  source 1..22: mol_type = other DNA
tatcatagatgccaccaagtgc

SEQ ID NO: 54926 - DNA, 22 bp, synthetic construct
  misc_feature 1..22: note = chemically synthesized
  source 1..22: mol_type = other DNA
agaatattataggcattccatt

SEQ ID NO: 54927 - DNA, 22 bp, synthetic construct
  misc_feature 1..22: note = chemically synthesized
  source 1..22: mol_type = other DNA
gaatattataggcattccattt

SEQ ID NO: 54928 - DNA, 22 bp, synthetic construct
  misc_feature 1..22: note = chemically synthesized
  source 1..22: mol_type = other DNA
taggcattccatttctcagaat

SEQ ID NO: 54929 - DNA, 22 bp, synthetic construct
  misc_feature 1..22: note = chemically synthesized
  source 1..22: mol_type = other DNA
catttctcagaataaaaaaaaa

SEQ ID NO: 54930 - DNA, 22 bp, synthetic construct
  misc_feature 1..22: note = chemically synthesized
  source 1..22: mol_type = other DNA
ctcagaataaaaaaaaaatgac

SEQ ID NO: 54931 - DNA, 22 bp, synthetic construct
  misc_feature 1..22: note = chemically synthesized
  source 1..22: mol_type = other DNA
tcagaataaaaaaaaaatgact

SEQ ID NO: 54932 - DNA, 22 bp, synthetic construct
  misc_feature 1..22: note = chemically synthesized
  source 1..22: mol_type = other DNA
agaataaaaaaaaaatgactaa

SEQ ID NO: 54933 - DNA, 22 bp, synthetic construct
  misc_feature 1..22: note = chemically synthesized
  source 1..22: mol_type = other DNA
attggcttattttcttaagtac

SEQ ID NO: 54934 - DNA, 22 bp, synthetic construct
  misc_feature 1..22: note = chemically synthesized
  source 1..22: mol_type = other DNA
gcttattttcttaagtactcaa

SEQ ID NO: 54935 - DNA, 22 bp, synthetic construct
  misc_feature 1..22: note = chemically synthesized
  source 1..22: mol_type = other DNA
attttcttaagtactcaaaagt

SEQ ID NO: 54936 - DNA, 22 bp, synthetic construct
  misc_feature 1..22: note = chemically synthesized
  source 1..22: mol_type = other DNA
ttttcttaagtactcaaaagta

SEQ ID NO: 54937 - DNA, 22 bp, synthetic construct
  misc_feature 1..22: note = chemically synthesized
  source 1..22: mol_type = other DNA
tcttaagtactcaaaagtatcc

SEQ ID NO: 54938 - DNA, 22 bp, synthetic construct
  misc_feature 1..22: note = chemically synthesized
  source 1..22: mol_type = other DNA
cttaagtactcaaaagtatccc

SEQ ID NO: 54939 - DNA, 22 bp, synthetic construct
  misc_feature 1..22: note = chemically synthesized
  source 1..22: mol_type = other DNA
ttaagtactcaaaagtatccca

SEQ ID NO: 54940 - DNA, 22 bp, synthetic construct
  misc_feature 1..22: note = chemically synthesized
  source 1..22: mol_type = other DNA
aagtactcaaaagtatcccatt

SEQ ID NO: 54941 - DNA, 22 bp, synthetic construct
  misc_feature 1..22: note = chemically synthesized
  source 1..22: mol_type = other DNA
agtactcaaaagtatcccattt

SEQ ID NO: 54942 - DNA, 22 bp, synthetic construct
  misc_feature 1..22: note = chemically synthesized
  source 1..22: mol_type = other DNA
aaaagtatcccatttagctaat

SEQ ID NO: 54943 - DNA, 22 bp, synthetic construct
  misc_feature 1..22: note = chemically synthesized
  source 1..22: mol_type = other DNA
agctaatgtgtctgagaaatac

SEQ ID NO: 54944 - DNA, 22 bp, synthetic construct
  misc_feature 1..22: note = chemically synthesized
  source 1..22: mol_type = other DNA
gctaatgtgtctgagaaatact

SEQ ID NO: 54945 - DNA, 22 bp, synthetic construct
  misc_feature 1..22: note = chemically synthesized
  source 1..22: mol_type = other DNA
atgtgtctgagaaatactgccc

SEQ ID NO: 54946 - DNA, 22 bp, synthetic construct
  misc_feature 1..22: note = chemically synthesized
  source 1..22: mol_type = other DNA
agaaatactgcccgtgcatttg

SEQ ID NO: 54947 - DNA, 22 bp, synthetic construct
  misc_feature 1..22: note = chemically synthesized
  source 1..22: mol_type = other DNA
cccgtgcatttggtatttcttt

SEQ ID NO: 54948 - DNA, 22 bp, synthetic construct
  misc_feature 1..22: note = chemically synthesized
  source 1..22: mol_type = other DNA
ggtatttctttgattttgtggc

SEQ ID NO: 54949 - DNA, 22 bp, synthetic construct
  misc_feature 1..22: note = chemically synthesized
  source 1..22: mol_type = other DNA
gtatttctttgattttgtggca

SEQ ID NO: 54950 - DNA, 22 bp, synthetic construct
  misc_feature 1..22: note = chemically synthesized
  source 1..22: mol_type = other DNA
ctttgattttgtggcactgctg

SEQ ID NO: 54951 - DNA, 22 bp, synthetic construct
  misc_feature 1..22: note = chemically synthesized
  source 1..22: mol_type = other DNA
tttgattttgtggcactgctga

SEQ ID NO: 54952 - DNA, 22 bp, synthetic construct
  misc_feature 1..22: note = chemically synthesized
  source 1..22: mol_type = other DNA
tgattttgtggcactgctgaga

SEQ ID NO: 54953 - DNA, 22 bp, synthetic construct
  misc_feature 1..22: note = chemically synthesized
  source 1..22: mol_type = other DNA
gattttgtggcactgctgagag

SEQ ID NO: 54954 - DNA, 22 bp, synthetic construct
  misc_feature 1..22: note = chemically synthesized
  source 1..22: mol_type = other DNA
attttgtggcactgctgagagt

SEQ ID NO: 54955 - DNA, 22 bp, synthetic construct
  misc_feature 1..22: note = chemically synthesized
  source 1..22: mol_type = other DNA
tgtggcactgctgagagtgaga

SEQ ID NO: 54956 - DNA, 22 bp, synthetic construct
  misc_feature 1..22: note = chemically synthesized
  source 1..22: mol_type = other DNA
gtggcactgctgagagtgagag

SEQ ID NO: 54957 - DNA, 22 bp, synthetic construct
  misc_feature 1..22: note = chemically synthesized
  source 1..22: mol_type = other DNA
tggcactgctgagagtgagagc

SEQ ID NO: 54958 - DNA, 22 bp, synthetic construct
  misc_feature 1..22: note = chemically synthesized
  source 1..22: mol_type = other DNA
ctgagagtgagagcagaaaggt

SEQ ID NO: 54959 - DNA, 22 bp, synthetic construct
  misc_feature 1..22: note = chemically synthesized
  source 1..22: mol_type = other DNA
agagtgagagcagaaaggtttt

SEQ ID NO: 54960 - DNA, 22 bp, synthetic construct
  misc_feature 1..22: note = chemically synthesized
  source 1..22: mol_type = other DNA
ttggcagtgtgaattatgctgc

SEQ ID NO: 54961 - DNA, 22 bp, synthetic construct
  misc_feature 1..22: note = chemically synthesized
  source 1..22: mol_type = other DNA
tggcagtgtgaattatgctgcg

SEQ ID NO: 54962 - DNA, 22 bp, synthetic construct
  misc_feature 1..22: note = chemically synthesized
  source 1..22: mol_type = other DNA
ggcagtgtgaattatgctgcga

SEQ ID NO: 54963 - DNA, 22 bp, synthetic construct
  misc_feature 1..22: note = chemically synthesized
  source 1..22: mol_type = other DNA
gcagtgtgaattatgctgcgac

SEQ ID NO: 54964 - DNA, 22 bp, synthetic construct
  misc_feature 1..22: note = chemically synthesized
  source 1..22: mol_type = other DNA
tgctgcgacatgattattattt

SEQ ID NO: 54965 - DNA, 22 bp, synthetic construct
  misc_feature 1..22: note = chemically synthesized
  source 1..22: mol_type = other DNA
cgacatgattattatttagatc

SEQ ID NO: 54966 - DNA, 22 bp, synthetic construct
  misc_feature 1..22: note = chemically synthesized
  source 1..22: mol_type = other DNA
ttatttagatccgtttcatagg

SEQ ID NO: 54967 - DNA, 22 bp, synthetic construct
  misc_feature 1..22: note = chemically synthesized
  source 1..22: mol_type = other DNA
tttagatccgtttcataggtgc

SEQ ID NO: 54968 - DNA, 22 bp, synthetic construct
  misc_feature 1..22: note = chemically synthesized
  source 1..22: mol_type = other DNA
agatccgtttcataggtgcatg

SEQ ID NO: 54969 - DNA, 22 bp, synthetic construct
  misc_feature 1..22: note = chemically synthesized
  source 1..22: mol_type = other DNA
gatccgtttcataggtgcatgc

SEQ ID NO: 54970 - DNA, 22 bp, synthetic construct
  misc_feature 1..22: note = chemically synthesized
  source 1..22: mol_type = other DNA
cataggtgcatgcagtcgtttt

SEQ ID NO: 54971 - DNA, 22 bp, synthetic construct
  misc_feature 1..22: note = chemically synthesized
  source 1..22: mol_type = other DNA
ataggtgcatgcagtcgttttc

SEQ ID NO: 54972 - DNA, 22 bp, synthetic construct
  misc_feature 1..22: note = chemically synthesized
  source 1..22: mol_type = other DNA
tcttattacagcagtgtaaatg

SEQ ID NO: 54973 - DNA, 22 bp, synthetic construct
  misc_feature 1..22: note = chemically synthesized
  source 1..22: mol_type = other DNA
cttattacagcagtgtaaatgt

SEQ ID NO: 54974 - DNA, 22 bp, synthetic construct
  misc_feature 1..22: note = chemically synthesized
  source 1..22: mol_type = other DNA
ttattacagcagtgtaaatgtg

SEQ ID NO: 54975 - DNA, 22 bp, synthetic construct
  misc_feature 1..22: note = chemically synthesized
  source 1..22: mol_type = other DNA
attacagcagtgtaaatgtggc

SEQ ID NO: 54976 - DNA, 22 bp, synthetic construct
  misc_feature 1..22: note = chemically synthesized
  source 1..22: mol_type = other DNA
ttacagcagtgtaaatgtggca

SEQ ID NO: 54977 - DNA, 22 bp, synthetic construct
  misc_feature 1..22: note = chemically synthesized
  source 1..22: mol_type = other DNA
cagcagtgtaaatgtggcacat

SEQ ID NO: 54978 - DNA, 22 bp, synthetic construct
  misc_feature 1..22: note = chemically synthesized
  source 1..22: mol_type = other DNA
ttcatgtgacatagtagctttc

SEQ ID NO: 54979 - DNA, 22 bp, synthetic construct
  misc_feature 1..22: note = chemically synthesized
  source 1..22: mol_type = other DNA
tcatgtgacatagtagctttct

SEQ ID NO: 54980 - DNA, 22 bp, synthetic construct
  misc_feature 1..22: note = chemically synthesized
  source 1..22: mol_type = other DNA
catgtgacatagtagctttcta

SEQ ID NO: 54981 - DNA, 22 bp, synthetic construct
  misc_feature 1..22: note = chemically synthesized
  source 1..22: mol_type = other DNA
atgtgacatagtagctttctaa

SEQ ID NO: 54982 - DNA, 22 bp, synthetic construct
  misc_feature 1..22: note = chemically synthesized
  source 1..22: mol_type = other DNA
tctaatttatgaagccatgtct

SEQ ID NO: 54983 - DNA, 22 bp, synthetic construct
  misc_feature 1..22: note = chemically synthesized
  source 1..22: mol_type = other DNA
ctaatttatgaagccatgtctg

SEQ ID NO: 54984 - DNA, 22 bp, synthetic construct
  misc_feature 1..22: note = chemically synthesized
  source 1..22: mol_type = other DNA
taatttatgaagccatgtctgt

SEQ ID NO: 54985 - DNA, 22 bp, synthetic construct
  misc_feature 1..22: note = chemically synthesized
  source 1..22: mol_type = other DNA
atttatgaagccatgtctgttt

SEQ ID NO: 54986 - DNA, 22 bp, synthetic construct
  misc_feature 1..22: note = chemically synthesized
  source 1..22: mol_type = other DNA
atgaagccatgtctgtttactt

SEQ ID NO: 54987 - DNA, 22 bp, synthetic construct
  misc_feature 1..22: note = chemically synthesized
  source 1..22: mol_type = other DNA
tgaagccatgtctgtttactta

SEQ ID NO: 54988 - DNA, 22 bp, synthetic construct
  misc_feature 1..22: note = chemically synthesized
  source 1..22: mol_type = other DNA
tttacttaggagtatatacatt

SEQ ID NO: 54989 - DNA, 22 bp, synthetic construct
  misc_feature 1..22: note = chemically synthesized
  source 1..22: mol_type = other DNA
acttaggagtatatacattcac

SEQ ID NO: 54990 - DNA, 22 bp, synthetic construct
  misc_feature 1..22: note = chemically synthesized
  source 1..22: mol_type = other DNA
cttaggagtatatacattcaca

SEQ ID NO: 54991 - DNA, 22 bp, synthetic construct
  misc_feature 1..22: note = chemically synthesized
  source 1..22: mol_type = other DNA
aggagtatatacattcacacac

SEQ ID NO: 54992 - DNA, 22 bp, synthetic construct
  misc_feature 1..22: note = chemically synthesized
  source 1..22: mol_type = other DNA
ggagtatatacattcacacaca

SEQ ID NO: 54993 - DNA, 22 bp, synthetic construct
  misc_feature 1..22: note = chemically synthesized
  source 1..22: mol_type = other DNA
acacacaaagggtgtgtgtgtt

SEQ ID NO: 54994 - DNA, 22 bp, synthetic construct
  misc_feature 1..22: note = chemically synthesized
  source 1..22: mol_type = other DNA
attcacctctcctttcattctt

SEQ ID NO: 54995 - DNA, 22 bp, synthetic construct
  misc_feature 1..22: note = chemically synthesized
  source 1..22: mol_type = other DNA
ttcacctctcctttcattcttt

SEQ ID NO: 54996 - DNA, 22 bp, synthetic construct
  misc_feature 1..22: note = chemically synthesized
  source 1..22: mol_type = other DNA
acctctcctttcattctttggc

SEQ ID NO: 54997 - DNA, 22 bp, synthetic construct
  misc_feature 1..22: note = chemically synthesized
  source 1..22: mol_type = other DNA
tcctttcattctttggcacaat

SEQ ID NO: 54998 - DNA, 22 bp, synthetic construct
  misc_feature 1..22: note = chemically synthesized
  source 1..22: mol_type = other DNA
ctttcattctttggcacaatgg

SEQ ID NO: 54999 - DNA, 22 bp, synthetic construct
  misc_feature 1..22: note = chemically synthesized
  source 1..22: mol_type = other DNA
tcattctttggcacaatggaca

SEQ ID NO: 55000 - DNA, 22 bp, synthetic construct
  misc_feature 1..22: note = chemically synthesized
  source 1..22: mol_type = other DNA
cattctttggcacaatggacaa

SEQ ID NO: 55001 - DNA, 22 bp, synthetic construct
  misc_feature 1..22: note = chemically synthesized
  source 1..22: mol_type = other DNA
attctttggcacaatggacaac

SEQ ID NO: 55002 - DNA, 22 bp, synthetic construct
  misc_feature 1..22: note = chemically synthesized
  source 1..22: mol_type = other DNA
tttggcacaatggacaacttgg

SEQ ID NO: 55003 - DNA, 22 bp, synthetic construct
  misc_feature 1..22: note = chemically synthesized
  source 1..22: mol_type = other DNA
tggcacaatggacaacttggtg

SEQ ID NO: 55004 - DNA, 22 bp, synthetic construct
  misc_feature 1..22: note = chemically synthesized
  source 1..22: mol_type = other DNA
ggcacaatggacaacttggtgt

SEQ ID NO: 55005 - DNA, 22 bp, synthetic construct
  misc_feature 1..22: note = chemically synthesized
  source 1..22: mol_type = other DNA
gcacaatggacaacttggtgta

SEQ ID NO: 55006 - DNA, 22 bp, synthetic construct
  misc_feature 1..22: note = chemically synthesized
  source 1..22: mol_type = other DNA
ggtgtataggaaaaaagaaaca

SEQ ID NO: 55007 - DNA, 22 bp, synthetic construct
  misc_feature 1..22: note = chemically synthesized
  source 1..22: mol_type = other DNA
gtgtataggaaaaaagaaacaa

SEQ ID NO: 55008 - DNA, 22 bp, synthetic construct
  misc_feature 1..22: note = chemically synthesized
  source 1..22: mol_type = other DNA
ggtttctatccacttttttttt

SEQ ID NO: 55009 - DNA, 22 bp, synthetic construct
  misc_feature 1..22: note = chemically synthesized
  source 1..22: mol_type = other DNA
gtttctatccactttttttttt

SEQ ID NO: 55010 - DNA, 22 bp, synthetic construct
  misc_feature 1..22: note = chemically synthesized
  source 1..22: mol_type = other DNA
ctatccacttttttttttaacc

SEQ ID NO: 55011 - DNA, 22 bp, synthetic construct
  misc_feature 1..22: note = chemically synthesized
  source 1..22: mol_type = other DNA
tatccacttttttttttaacca

SEQ ID NO: 55012 - DNA, 22 bp, synthetic construct
  misc_feature 1..22: note = chemically synthesized
  source 1..22: mol_type = other DNA
tccacttttttttttaaccagt

SEQ ID NO: 55013 - DNA, 22 bp, synthetic construct
  misc_feature 1..22: note = chemically synthesized
  source 1..22: mol_type = other DNA
ttttttttaaccagtttttctt

SEQ ID NO: 55014 - DNA, 22 bp, synthetic construct
  misc_feature 1..22: note = chemically synthesized
  source 1..22: mol_type = other DNA
tttttttaaccagtttttcttg

SEQ ID NO: 55015 - DNA, 22 bp, synthetic construct
  misc_feature 1..22: note = chemically synthesized
  source 1..22: mol_type = other DNA
ttttttaaccagtttttcttgt

SEQ ID NO: 55016 - DNA, 22 bp, synthetic construct
  misc_feature 1..22: note = chemically synthesized
  source 1..22: mol_type = other DNA
tttttaaccagtttttcttgta

SEQ ID NO: 55017 - DNA, 22 bp, synthetic construct
  misc_feature 1..22: note = chemically synthesized
  source 1..22: mol_type = other DNA
ttttaaccagtttttcttgtag

SEQ ID NO: 55018 - DNA, 22 bp, synthetic construct
  misc_feature 1..22: note = chemically synthesized
  source 1..22: mol_type = other DNA
tttaaccagtttttcttgtagt

SEQ ID NO: 55019 - DNA, 22 bp, synthetic construct
  misc_feature 1..22: note = chemically synthesized
  source 1..22: mol_type = other DNA
ttaaccagtttttcttgtagtt

SEQ ID NO: 55020 - DNA, 22 bp, synthetic construct
  misc_feature 1..22: note = chemically synthesized
  source 1..22: mol_type = other DNA
taaccagtttttcttgtagtta

SEQ ID NO: 55021 - DNA, 22 bp, synthetic construct
  misc_feature 1..22: note = chemically synthesized
  source 1..22: mol_type = other DNA
aaccagtttttcttgtagttat

SEQ ID NO: 55022 - DNA, 22 bp, synthetic construct
  misc_feature 1..22: note = chemically synthesized
  source 1..22: mol_type = other DNA
accagtttttcttgtagttatt

SEQ ID NO: 55023 - DNA, 22 bp, synthetic construct
  misc_feature 1..22: note = chemically synthesized
  source 1..22: mol_type = other DNA
ttcttgtagttattatttaagc

SEQ ID NO: 55024 - DNA, 22 bp, synthetic construct
  misc_feature 1..22: note = chemically synthesized
  source 1..22: mol_type = other DNA
tcttgtagttattatttaagct

SEQ ID NO: 55025 - DNA, 22 bp, synthetic construct
  misc_feature 1..22: note = chemically synthesized
  source 1..22: mol_type = other DNA
cttgtagttattatttaagctt

SEQ ID NO: 55026 - DNA, 22 bp, synthetic construct
  misc_feature 1..22: note = chemically synthesized
  source 1..22: mol_type = other DNA
ttgtagttattatttaagcttt

SEQ ID NO: 55027 - DNA, 22 bp, synthetic construct
  misc_feature 1..22: note = chemically synthesized
  source 1..22: mol_type = other DNA
gtagttattatttaagctttct

SEQ ID NO: 55028 - DNA, 22 bp, synthetic construct
  misc_feature 1..22: note = chemically synthesized
  source 1..22: mol_type = other DNA
tagttattatttaagctttctt

SEQ ID NO: 55029 - DNA, 22 bp, synthetic construct
  misc_feature 1..22: note = chemically synthesized
  source 1..22: mol_type = other DNA
ttatttaagctttctttatgtt

SEQ ID NO: 55030 - DNA, 22 bp, synthetic construct
  misc_feature 1..22: note = chemically synthesized
  source 1..22: mol_type = other DNA
tttaagctttctttatgttccc

SEQ ID NO: 55031 - DNA, 22 bp, synthetic construct
  misc_feature 1..22: note = chemically synthesized
  source 1..22: mol_type = other DNA
aagctttctttatgttccctgt

SEQ ID NO: 55032 - DNA, 22 bp, synthetic construct
  misc_feature 1..22: note = chemically synthesized
  source 1..22: mol_type = other DNA
agctttctttatgttccctgtg

SEQ ID NO: 55033 - DNA, 22 bp, synthetic construct
  misc_feature 1..22: note = chemically synthesized
  source 1..22: mol_type = other DNA
tctttatgttccctgtgttaac

SEQ ID NO: 55034 - DNA, 22 bp, synthetic construct
  misc_feature 1..22: note = chemically synthesized
  source 1..22: mol_type = other DNA
ctttatgttccctgtgttaact

SEQ ID NO: 55035 - DNA, 22 bp, synthetic construct
  misc_feature 1..22: note = chemically synthesized
  source 1..22: mol_type = other DNA
tttatgttccctgtgttaacta

SEQ ID NO: 55036 - DNA, 22 bp, synthetic construct
  misc_feature 1..22: note = chemically synthesized
  source 1..22: mol_type = other DNA
tatgttccctgtgttaactatt

SEQ ID NO: 55037 - DNA, 22 bp, synthetic construct
  misc_feature 1..22: note = chemically synthesized
  source 1..22: mol_type = other DNA
atgttccctgtgttaactattt

SEQ ID NO: 55038 - DNA, 22 bp, synthetic construct
  misc_feature 1..22: note = chemically synthesized
  source 1..22: mol_type = other DNA
tgttccctgtgttaactattta

SEQ ID NO: 55039 - DNA, 22 bp, synthetic construct
  misc_feature 1..22: note = chemically synthesized
  source 1..22: mol_type = other DNA
cctgtgttaactatttaagtag

SEQ ID NO: 55040 - DNA, 22 bp, synthetic construct
  misc_feature 1..22: note = chemically synthesized
  source 1..22: mol_type = other DNA
tgttaactatttaagtagcatt

SEQ ID NO: 55041 - DNA, 22 bp, synthetic construct
  misc_feature 1..22: note = chemically synthesized
  source 1..22: mol_type = other DNA
actatttaagtagcattctttc

SEQ ID NO: 55042 - DNA, 22 bp, synthetic construct
  misc_feature 1..22: note = chemically synthesized
  source 1..22: mol_type = other DNA
tttaagtagcattctttctaaa

SEQ ID NO: 55043 - DNA, 22 bp, synthetic construct
  misc_feature 1..22: note = chemically synthesized
  source 1..22: mol_type = other DNA
aagtagcattctttctaaactt

SEQ ID NO: 55044 - DNA, 22 bp, synthetic construct
  misc_feature 1..22: note = chemically synthesized
  source 1..22: mol_type = other DNA
agtagcattctttctaaactta

SEQ ID NO: 55045 - DNA, 22 bp, synthetic construct
  misc_feature 1..22: note = chemically synthesized
  source 1..22: mol_type = other DNA
tttctaaacttacaaaccagac

SEQ ID NO: 55046 - DNA, 22 bp, synthetic construct
  misc_feature 1..22: note = chemically synthesized
  source 1..22: mol_type = other DNA
tctaaacttacaaaccagacac

SEQ ID NO: 55047 - DNA, 22 bp, synthetic construct
  misc_feature 1..22: note = chemically synthesized
  source 1..22: mol_type = other DNA
ctaaacttacaaaccagacaca

SEQ ID NO: 55048 - DNA, 22 bp, synthetic construct
  misc_feature 1..22: note = chemically synthesized
  source 1..22: mol_type = other DNA
taaacttacaaaccagacacat

SEQ ID NO: 55049 - DNA, 22 bp, synthetic construct
  misc_feature 1..22: note = chemically synthesized
  source 1..22: mol_type = other DNA
aacttacaaaccagacacattt

SEQ ID NO: 55050 - DNA, 22 bp, synthetic construct
  misc_feature 1..22: note = chemically synthesized
  source 1..22: mol_type = other DNA
acaaaccagacacatttgttgc

SEQ ID NO: 55051 - DNA, 22 bp, synthetic construct
  misc_feature 1..22: note = chemically synthesized
  source 1..22: mol_type = other DNA
caaaccagacacatttgttgct

SEQ ID NO: 55052 - DNA, 22 bp, synthetic construct
  misc_feature 1..22: note = chemically synthesized
  source 1..22: mol_type = other DNA
gttgctgtgggtgtgtgcatgg

SEQ ID NO: 55053 - DNA, 22 bp, synthetic construct
  misc_feature 1..22: note = chemically synthesized
  source 1..22: mol_type = other DNA
ttgctgtgggtgtgtgcatggg

SEQ ID NO: 55054 - DNA, 22 bp, synthetic construct
  misc_feature 1..22: note = chemically synthesized
  source 1..22: mol_type = other DNA
ctgtgggtgtgtgcatgggtat

SEQ ID NO: 55055 - DNA, 22 bp, synthetic construct
  misc_feature 1..22: note = chemically synthesized
  source 1..22: mol_type = other DNA
tgggtgtgtgcatgggtatatg

SEQ ID NO: 55056 - DNA, 22 bp, synthetic construct
  misc_feature 1..22: note = chemically synthesized
  source 1..22: mol_type = other DNA
tctggagttatgcaaggaagac

SEQ ID NO: 55057 - DNA, 22 bp, synthetic construct
  misc_feature 1..22: note = chemically synthesized
  source 1..22: mol_type = other DNA
tggagttatgcaaggaagactg

SEQ ID NO: 55058 - DNA, 22 bp, synthetic construct
  misc_feature 1..22: note = chemically synthesized
  source 1..22: mol_type = other DNA
gagttatgcaaggaagactgtt

SEQ ID NO: 55059 - DNA, 22 bp, synthetic construct
  misc_feature 1..22: note = chemically synthesized
  source 1..22: mol_type = other DNA
tgcaaggaagactgttttcttt

SEQ ID NO: 55060 - DNA, 22 bp, synthetic construct
  misc_feature 1..22: note = chemically synthesized
  source 1..22: mol_type = other DNA
ttttctttacatatgtgatgat

SEQ ID NO: 55061 - DNA, 22 bp, synthetic construct
  misc_feature 1..22: note = chemically synthesized
  source 1..22: mol_type = other DNA
tctttacatatgtgatgatttg

SEQ ID NO: 55062 - DNA, 22 bp, synthetic construct
  misc_feature 1..22: note = chemically synthesized
  source 1..22: mol_type = other DNA
ctttacatatgtgatgatttgc

SEQ ID NO: 55063 - DNA, 22 bp, synthetic construct
  misc_feature 1..22: note = chemically synthesized
  source 1..22: mol_type = other DNA
tttacatatgtgatgatttgcc

SEQ ID NO: 55064 - DNA, 22 bp, synthetic construct
  misc_feature 1..22: note = chemically synthesized
  source 1..22: mol_type = other DNA
tacatatgtgatgatttgcctc

SEQ ID NO: 55065 - DNA, 22 bp, synthetic construct
  misc_feature 1..22: note = chemically synthesized
  source 1..22: mol_type = other DNA
acatatgtgatgatttgcctca

SEQ ID NO: 55066 - DNA, 22 bp, synthetic construct
  misc_feature 1..22: note = chemically synthesized
  source 1..22: mol_type = other DNA
catatgtgatgatttgcctcat

SEQ ID NO: 55067 - DNA, 22 bp, synthetic construct
  misc_feature 1..22: note = chemically synthesized
  source 1..22: mol_type = other DNA
gcctcattgacaaatttgctct

SEQ ID NO: 55068 - DNA, 22 bp, synthetic construct
  misc_feature 1..22: note = chemically synthesized
  source 1..22: mol_type = other DNA
cctcattgacaaatttgctctc

SEQ ID NO: 55069 - DNA, 22 bp, synthetic construct
  misc_feature 1..22: note = chemically synthesized
  source 1..22: mol_type = other DNA
attgacaaatttgctctctggt

SEQ ID NO: 55070 - DNA, 22 bp, synthetic construct
  misc_feature 1..22: note = chemically synthesized
  source 1..22: mol_type = other DNA
acaaatttgctctctggttgat

SEQ ID NO: 55071 - DNA, 22 bp, synthetic construct
  misc_feature 1..22: note = chemically synthesized
  source 1..22: mol_type = other DNA
gctctctggttgataaccttca

SEQ ID NO: 55072 - DNA, 22 bp, synthetic construct
  misc_feature 1..22: note = chemically synthesized
  source 1..22: mol_type = other DNA
ctctctggttgataaccttcac

SEQ ID NO: 55073 - DNA, 22 bp, synthetic construct
  misc_feature 1..22: note = chemically synthesized
  source 1..22: mol_type = other DNA
tctggttgataaccttcacatc

SEQ ID NO: 55074 - DNA, 22 bp, synthetic construct
  misc_feature 1..22: note = chemically synthesized
  source 1..22: mol_type = other DNA
tggttgataaccttcacatcct

SEQ ID NO: 55075 - DNA, 22 bp, synthetic construct
  misc_feature 1..22: note = chemically synthesized
  source 1..22: mol_type = other DNA
gttgataaccttcacatccttg

SEQ ID NO: 55076 - DNA, 22 bp, synthetic construct
  misc_feature 1..22: note = chemically synthesized
  source 1..22: mol_type = other DNA
ataaccttcacatccttgtact

SEQ ID NO: 55077 - DNA, 22 bp, synthetic construct
  misc_feature 1..22: note = chemically synthesized
  source 1..22: mol_type = other DNA
cacatccttgtactttttgtat

SEQ ID NO: 55078 - DNA, 22 bp, synthetic construct
  misc_feature 1..22: note = chemically synthesized
  source 1..22: mol_type = other DNA
acatccttgtactttttgtatg

SEQ ID NO: 55079 - DNA, 22 bp, synthetic construct
  misc_feature 1..22: note = chemically synthesized
  source 1..22: mol_type = other DNA
gtactttttgtatgctcacatt

SEQ ID NO: 55080 - DNA, 22 bp, synthetic construct
  misc_feature 1..22: note = chemically synthesized
  source 1..22: mol_type = other DNA
tactttttgtatgctcacattt

SEQ ID NO: 55081 - DNA, 22 bp, synthetic construct
  misc_feature 1..22: note = chemically synthesized
  source 1..22: mol_type = other DNA
tttgtatgctcacattttctgg

SEQ ID NO: 55082 - DNA, 22 bp, synthetic construct
  misc_feature 1..22: note = chemically synthesized
  source 1..22: mol_type = other DNA
ttgtatgctcacattttctggg

SEQ ID NO: 55083 - DNA, 22 bp, synthetic construct
  misc_feature 1..22: note = chemically synthesized
  source 1..22: mol_type = other DNA
tgtatgctcacattttctgggt

SEQ ID NO: 55084 - DNA, 22 bp, synthetic construct
  misc_feature 1..22: note = chemically synthesized
  source 1..22: mol_type = other DNA
gtatgctcacattttctgggta

SEQ ID NO: 55085 - DNA, 22 bp, synthetic construct
  misc_feature 1..22: note = chemically synthesized
  source 1..22: mol_type = other DNA
tatgctcacattttctgggtat

SEQ ID NO: 55086 - DNA, 22 bp, synthetic construct
  misc_feature 1..22: note = chemically synthesized
  source 1..22: mol_type = other DNA
acattttctgggtattatatag

SEQ ID NO: 55087 - DNA, 22 bp, synthetic construct
  misc_feature 1..22: note = chemically synthesized
  source 1..22: mol_type = other DNA
tctgggtattatatagagaagc

SEQ ID NO: 55088 - DNA, 22 bp, synthetic construct
  misc_feature 1..22: note = chemically synthesized
  source 1..22: mol_type = other DNA
ctgggtattatatagagaagcc

SEQ ID NO: 55089 - DNA, 22 bp, synthetic construct
  misc_feature 1..22: note = chemically synthesized
  source 1..22: mol_type = other DNA
tgggtattatatagagaagcct

SEQ ID NO: 55090 - DNA, 22 bp, synthetic construct
  misc_feature 1..22: note = chemically synthesized
  source 1..22: mol_type = other DNA
ggtattatatagagaagcctag

SEQ ID NO: 55091 - DNA, 22 bp, synthetic construct
  misc_feature 1..22: note = chemically synthesized
  source 1..22: mol_type = other DNA
tatagagaagcctagaaacact

SEQ ID NO: 55092 - DNA, 22 bp, synthetic construct
  misc_feature 1..22: note = chemically synthesized
  source 1..22: mol_type = other DNA
gaaacactttacatgatgtggt

SEQ ID NO: 55093 - DNA, 22 bp, synthetic construct
  misc_feature 1..22: note = chemically synthesized
  source 1..22: mol_type = other DNA
tacatgatgtggtgggatggca

SEQ ID NO: 55094 - DNA, 22 bp, synthetic construct
  misc_feature 1..22: note = chemically synthesized
  source 1..22: mol_type = other DNA
acatgatgtggtgggatggcat

SEQ ID NO: 55095 - DNA, 22 bp, synthetic construct
  misc_feature 1..22: note = chemically synthesized
  source 1..22: mol_type = other DNA
catgatgtggtgggatggcatg

SEQ ID NO: 55096 - DNA, 22 bp, synthetic construct
  misc_feature 1..22: note = chemically synthesized
  source 1..22: mol_type = other DNA
agatgtgcttctcccctttctg

SEQ ID NO: 55097 - DNA, 22 bp, synthetic construct
  misc_feature 1..22: note = chemically synthesized
  source 1..22: mol_type = other DNA
ctcccctttctgtcctctctgg

SEQ ID NO: 55098 - DNA, 22 bp, synthetic construct
  misc_feature 1..22: note = chemically synthesized
  source 1..22: mol_type = other DNA
tcccctttctgtcctctctggc

SEQ ID NO: 55099 - DNA, 22 bp, synthetic construct
  misc_feature 1..22: note = chemically synthesized
  source 1..22: mol_type = other DNA
ccctttctgtcctctctggcac

SEQ ID NO: 55100 - DNA, 22 bp, synthetic construct
  misc_feature 1..22: note = chemically synthesized
  source 1..22: mol_type = other DNA
tctgtcctctctggcactctaa

SEQ ID NO: 55101 - DNA, 22 bp, synthetic construct
  misc_feature 1..22: note = chemically synthesized
  source 1..22: mol_type = other DNA
ctgtcctctctggcactctaat

SEQ ID NO: 55102 - DNA, 22 bp, synthetic construct
  misc_feature 1..22: note = chemically synthesized
  source 1..22: mol_type = other DNA
tgtcctctctggcactctaata

SEQ ID NO: 55103 - DNA, 22 bp, synthetic construct
  misc_feature 1..22: note = chemically synthesized
  source 1..22: mol_type = other DNA
tcctctctggcactctaataat

SEQ ID NO: 55104 - DNA, 22 bp, synthetic construct
  misc_feature 1..22: note = chemically synthesized
  source 1..22: mol_type = other DNA
tctggcactctaataattgtgc

SEQ ID NO: 55105 - DNA, 22 bp, synthetic construct
  misc_feature 1..22: note = chemically synthesized
  source 1..22: mol_type = other DNA
tggcactctaataattgtgctt

SEQ ID NO: 55106 - DNA, 22 bp, synthetic construct
  misc_feature 1..22: note = chemically synthesized
  source 1..22: mol_type = other DNA
gcactctaataattgtgctttt

SEQ ID NO: 55107 - DNA, 22 bp, synthetic construct
  misc_feature 1..22: note = chemically synthesized
  source 1..22: mol_type = other DNA
taataattgtgcttttgtttct

SEQ ID NO: 55108 - DNA, 22 bp, synthetic construct
  misc_feature 1..22: note = chemically synthesized
  source 1..22: mol_type = other DNA
ataattgtgcttttgtttctcc

SEQ ID NO: 55109 - DNA, 22 bp, synthetic construct
  misc_feature 1..22: note = chemically synthesized
  source 1..22: mol_type = other DNA
tgcttttgtttctccaaccaca

SEQ ID NO: 55110 - DNA, 22 bp, synthetic construct
  misc_feature 1..22: note = chemically synthesized
  source 1..22: mol_type = other DNA
ttgtttctccaaccacagccga

SEQ ID NO: 55111 - DNA, 22 bp, synthetic construct
  misc_feature 1..22: note = chemically synthesized
  source 1..22: mol_type = other DNA
tgtttctccaaccacagccgag

SEQ ID NO: 55112 - DNA, 22 bp, synthetic construct
  misc_feature 1..22: note = chemically synthesized
  source 1..22: mol_type = other DNA
gtttctccaaccacagccgagc

SEQ ID NO: 55113 - DNA, 22 bp, synthetic construct
  misc_feature 1..22: note = chemically synthesized
  source 1..22: mol_type = other DNA
tttctccaaccacagccgagcc

SEQ ID NO: 55114 - DNA, 22 bp, synthetic construct
  misc_feature 1..22: note = chemically synthesized
  source 1..22: mol_type = other DNA
ctccaaccacagccgagcctct

SEQ ID NO: 55115 - DNA, 22 bp, synthetic construct
  misc_feature 1..22: note = chemically synthesized
  source 1..22: mol_type = other DNA
tccaaccacagccgagcctctt

SEQ ID NO: 55116 - DNA, 22 bp, synthetic construct
  misc_feature 1..22: note = chemically synthesized
  source 1..22: mol_type = other DNA
caaccacagccgagcctcttga

SEQ ID NO: 55117 - DNA, 22 bp, synthetic construct
  misc_feature 1..22: note = chemically synthesized
  source 1..22: mol_type = other DNA
ttgaagccattcttacagatga

SEQ ID NO: 55118 - DNA, 22 bp, synthetic construct
  misc_feature 1..22: note = chemically synthesized
  source 1..22: mol_type = other DNA
gaagccattcttacagatgatg

SEQ ID NO: 55119 - DNA, 22 bp, synthetic construct
  misc_feature 1..22: note = chemically synthesized
  source 1..22: mol_type = other DNA
aagccattcttacagatgatga

SEQ ID NO: 55120 - DNA, 22 bp, synthetic construct
  misc_feature 1..22: note = chemically synthesized
  source 1..22: mol_type = other DNA
ttacagatgatgaaccagacca

SEQ ID NO: 55121 - DNA, 22 bp, synthetic construct
  misc_feature 1..22: note = chemically synthesized
  source 1..22: mol_type = other DNA
acagatgatgaaccagaccacg

SEQ ID NO: 55122 - DNA, 22 bp, synthetic construct
  misc_feature 1..22: note = chemically synthesized
  source 1..22: mol_type = other DNA
cagatgatgaaccagaccacgg

SEQ ID NO: 55123 - DNA, 22 bp, synthetic construct
  misc_feature 1..22: note = chemically synthesized
  source 1..22: mol_type = other DNA
ggagctccagaaggggatcatg

SEQ ID NO: 55124 - DNA, 22 bp, synthetic construct
  misc_feature 1..22: note = chemically synthesized
  source 1..22: mol_type = other DNA
cagaaggggatcatgacctcct

SEQ ID NO: 55125 - DNA, 22 bp, synthetic construct
  misc_feature 1..22: note = chemically synthesized
  source 1..22: mol_type = other DNA
ctcacctgtgggcagtgccaga

SEQ ID NO: 55126 - DNA, 22 bp, synthetic construct
  misc_feature 1..22: note = chemically synthesized
  source 1..22: mol_type = other DNA
acctgtgggcagtgccagatga

SEQ ID NO: 55127 - DNA, 22 bp, synthetic construct
  misc_feature 1..22: note = chemically synthesized
  source 1..22: mol_type = other DNA
tgggcagtgccagatgaacttc

SEQ ID NO: 55128 - DNA, 22 bp, synthetic construct
  misc_feature 1..22: note = chemically synthesized
  source 1..22: mol_type = other DNA
cccattgggggacattcttatt

SEQ ID NO: 55129 - DNA, 22 bp, synthetic construct
  misc_feature 1..22: note = chemically synthesized
  source 1..22: mol_type = other DNA
ccattgggggacattcttattt

SEQ ID NO: 55130 - DNA, 22 bp, synthetic construct
  misc_feature 1..22: note = chemically synthesized
  source 1..22: mol_type = other DNA
ggggacattcttatttttatcg

SEQ ID NO: 55131 - DNA, 22 bp, synthetic construct
  misc_feature 1..22: note = chemically synthesized
  source 1..22: mol_type = other DNA
ttatttttatcgagcacaaacg

SEQ ID NO: 55132 - DNA, 22 bp, synthetic construct
  misc_feature 1..22: note = chemically synthesized
  source 1..22: mol_type = other DNA
atttttatcgagcacaaacgga

SEQ ID NO: 55133 - DNA, 22 bp, synthetic construct
  misc_feature 1..22: note = chemically synthesized
  source 1..22: mol_type = other DNA
tttttatcgagcacaaacggaa

SEQ ID NO: 55134 - DNA, 22 bp, synthetic construct
  misc_feature 1..22: note = chemically synthesized
  source 1..22: mol_type = other DNA
ttatcgagcacaaacggaaaca

SEQ ID NO: 55135 - DNA, 22 bp, synthetic construct
  misc_feature 1..22: note = chemically synthesized
  source 1..22: mol_type = other DNA
tatcgagcacaaacggaaacaa

SEQ ID NO: 55136 - DNA, 22 bp, synthetic construct
  misc_feature 1..22: note = chemically synthesized
  source 1..22: mol_type = other DNA
atcgagcacaaacggaaacaat

SEQ ID NO: 55137 - DNA, 22 bp, synthetic construct
  misc_feature 1..22: note = chemically synthesized
  source 1..22: mol_type = other DNA
tcgagcacaaacggaaacaatg

SEQ ID NO: 55138 - DNA, 22 bp, synthetic construct
  misc_feature 1..22: note = chemically synthesized
  source 1..22: mol_type = other DNA
tgcttagaaaaagctgtggata

SEQ ID NO: 55139 - DNA, 22 bp, synthetic construct
  misc_feature 1..22: note = chemically synthesized
  source 1..22: mol_type = other DNA
cttagaaaaagctgtggataag

SEQ ID NO: 55140 - DNA, 22 bp, synthetic construct
  misc_feature 1..22: note = chemically synthesized
  source 1..22: mol_type = other DNA
agaaaaagctgtggataagcca

SEQ ID NO: 55141 - DNA, 22 bp, synthetic construct
  misc_feature 1..22: note = chemically synthesized
  source 1..22: mol_type = other DNA
gaaaaagctgtggataagccac

SEQ ID NO: 55142 - DNA, 22 bp, synthetic construct
  misc_feature 1..22: note = chemically synthesized
  source 1..22: mol_type = other DNA
tggataagccaccttccccttc

SEQ ID NO: 55143 - DNA, 22 bp, synthetic construct
  misc_feature 1..22: note = chemically synthesized
  source 1..22: mol_type = other DNA
ccccttcaccaatcgagatgaa

SEQ ID NO: 55144 - DNA, 22 bp, synthetic construct
  misc_feature 1..22: note = chemically synthesized
  source 1..22: mol_type = other DNA
cccttcaccaatcgagatgaaa

SEQ ID NO: 55145 - DNA, 22 bp, synthetic construct
  misc_feature 1..22: note = chemically synthesized
  source 1..22: mol_type = other DNA
caccaatcgagatgaaaaaagc

SEQ ID NO: 55146 - DNA, 22 bp, synthetic construct
  misc_feature 1..22: note = chemically synthesized
  source 1..22: mol_type = other DNA
accaatcgagatgaaaaaagca

SEQ ID NO: 55147 - DNA, 22 bp, synthetic construct
  misc_feature 1..22: note = chemically synthesized
  source 1..22: mol_type = other DNA
gcatccaggtcacgccagagga

SEQ ID NO: 55148 - DNA, 22 bp, synthetic construct
  misc_feature 1..22: note = chemically synthesized
  source 1..22: mol_type = other DNA
tttatcaacgtcatctagagga

SEQ ID NO: 55149 - DNA, 22 bp, synthetic construct
  misc_feature 1..22: note = chemically synthesized
  source 1..22: mol_type = other DNA
atcaacgtcatctagaggaatt

SEQ ID NO: 55150 - DNA, 22 bp, synthetic construct
  misc_feature 1..22: note = chemically synthesized
  source 1..22: mol_type = other DNA
tcaacgtcatctagaggaattt

SEQ ID NO: 55151 - DNA, 22 bp, synthetic construct
  misc_feature 1..22: note = chemically synthesized
  source 1..22: mol_type = other DNA
gaggaatttgccccaaacagga

SEQ ID NO: 55152 - DNA, 22 bp, synthetic construct
  misc_feature 1..22: note = chemically synthesized
  source 1..22: mol_type = other DNA
gccccaaacaggaacacatagc

SEQ ID NO: 55153 - DNA, 22 bp, synthetic construct
  misc_feature 1..22: note = chemically synthesized
  source 1..22: mol_type = other DNA
ccccaaacaggaacacatagca

SEQ ID NO: 55154 - DNA, 22 bp, synthetic construct
  misc_feature 1..22: note = chemically synthesized
  source 1..22: mol_type = other DNA
tttgcatgttttcttttcattt

SEQ ID NO: 55155 - DNA, 22 bp, synthetic construct
  misc_feature 1..22: note = chemically synthesized
  source 1..22: mol_type = other DNA
gcatgttttcttttcattttca

SEQ ID NO: 55156 - DNA, 22 bp, synthetic construct
  misc_feature 1..22: note = chemically synthesized
  source 1..22: mol_type = other DNA
catgttttcttttcattttcag

SEQ ID NO: 55157 - DNA, 22 bp, synthetic construct
  misc_feature 1..22: note = chemically synthesized
  source 1..22: mol_type = other DNA
tcttttcattttcagaggtgct

SEQ ID NO: 55158 - DNA, 22 bp, synthetic construct
  misc_feature 1..22: note = chemically synthesized
  source 1..22: mol_type = other DNA
cttttcattttcagaggtgctg

SEQ ID NO: 55159 - DNA, 22 bp, synthetic construct
  misc_feature 1..22: note = chemically synthesized
  source 1..22: mol_type = other DNA
ttttcattttcagaggtgctgt

SEQ ID NO: 55160 - DNA, 22 bp, synthetic construct
  misc_feature 1..22: note = chemically synthesized
  source 1..22: mol_type = other DNA
ttcattttcagaggtgctgtag

SEQ ID NO: 55161 - DNA, 22 bp, synthetic construct
  misc_feature 1..22: note = chemically synthesized
  source 1..22: mol_type = other DNA
tcattttcagaggtgctgtagc

SEQ ID NO: 55162 - DNA, 22 bp, synthetic construct
  misc_feature 1..22: note = chemically synthesized
  source 1..22: mol_type = other DNA
cattttcagaggtgctgtagcc

SEQ ID NO: 55163 - DNA, 22 bp, synthetic construct
  misc_feature 1..22: note = chemically synthesized
  source 1..22: mol_type = other DNA
attttcagaggtgctgtagcca

SEQ ID NO: 55164 - DNA, 22 bp, synthetic construct
  misc_feature 1..22: note = chemically synthesized
  source 1..22: mol_type = other DNA
tcagaggtgctgtagccaagca

SEQ ID NO: 55165 - DNA, 22 bp, synthetic construct
  misc_feature 1..22: note = chemically synthesized
  source 1..22: mol_type = other DNA
cagaggtgctgtagccaagcag

SEQ ID NO: 55166 - DNA, 22 bp, synthetic construct
  misc_feature 1..22: note = chemically synthesized
  source 1..22: mol_type = other DNA
agaggtgctgtagccaagcagt

SEQ ID NO: 55167 - DNA, 22 bp, synthetic construct
  misc_feature 1..22: note = chemically synthesized
  source 1..22: mol_type = other DNA
tagccaagcagtaaggagttgt

SEQ ID NO: 55168 - DNA, 22 bp, synthetic construct
  misc_feature 1..22: note = chemically synthesized
  source 1..22: mol_type = other DNA
tgaagtgctttctctattactc

SEQ ID NO: 55169 - DNA, 22 bp, synthetic construct
  misc_feature 1..22: note = chemically synthesized
  source 1..22: mol_type = other DNA
tctctattactctatgtgactg

SEQ ID NO: 55170 - DNA, 22 bp, synthetic construct
  misc_feature 1..22: note = chemically synthesized
  source 1..22: mol_type = other DNA
ctctattactctatgtgactgt

SEQ ID NO: 55171 - DNA, 22 bp, synthetic construct
  misc_feature 1..22: note = chemically synthesized
  source 1..22: mol_type = other DNA
tctattactctatgtgactgtc

SEQ ID NO: 55172 - DNA, 22 bp, synthetic construct
  misc_feature 1..22: note = chemically synthesized
  source 1..22: mol_type = other DNA
tattactctatgtgactgtcca

SEQ ID NO: 55173 - DNA, 22 bp, synthetic construct
  misc_feature 1..22: note = chemically synthesized
  source 1..22: mol_type = other DNA
ttactctatgtgactgtccatg

SEQ ID NO: 55174 - DNA, 22 bp, synthetic construct
  misc_feature 1..22: note = chemically synthesized
  source 1..22: mol_type = other DNA
ctctatgtgactgtccatgaca

SEQ ID NO: 55175 - DNA, 22 bp, synthetic construct
  misc_feature 1..22: note = chemically synthesized
  source 1..22: mol_type = other DNA
tatgtgactgtccatgacagcc

SEQ ID NO: 55176 - DNA, 22 bp, synthetic construct
  misc_feature 1..22: note = chemically synthesized
  source 1..22: mol_type = other DNA
tgtgactgtccatgacagccct

SEQ ID NO: 55177 - DNA, 22 bp, synthetic construct
  misc_feature 1..22: note = chemically synthesized
  source 1..22: mol_type = other DNA
tccatgacagccctgtaatgtt

SEQ ID NO: 55178 - DNA, 22 bp, synthetic construct
  misc_feature 1..22: note = chemically synthesized
  source 1..22: mol_type = other DNA
taatgttaaaataatcatttct

SEQ ID NO: 55179 - DNA, 22 bp, synthetic construct
  misc_feature 1..22: note = chemically synthesized
  source 1..22: mol_type = other DNA
aaataatcatttctgttgctta

SEQ ID NO: 55180 - DNA, 22 bp, synthetic construct
  misc_feature 1..22: note = chemically synthesized
  source 1..22: mol_type = other DNA
ctgttgcttacgtccagaacac

SEQ ID NO: 55181 - DNA, 22 bp, synthetic construct
  misc_feature 1..22: note = chemically synthesized
  source 1..22: mol_type = other DNA
tgttgcttacgtccagaacaca

SEQ ID NO: 55182 - DNA, 22 bp, synthetic construct
  misc_feature 1..22: note = chemically synthesized
  source 1..22: mol_type = other DNA
ttgcttacgtccagaacacaga

SEQ ID NO: 55183 - DNA, 22 bp, synthetic construct
  misc_feature 1..22: note = chemically synthesized
  source 1..22: mol_type = other DNA
cttacgtccagaacacagaaaa

SEQ ID NO: 55184 - DNA, 22 bp, synthetic construct
  misc_feature 1..22: note = chemically synthesized
  source 1..22: mol_type = other DNA
acgtccagaacacagaaaaata

SEQ ID NO: 55185 - DNA, 22 bp, synthetic construct
  misc_feature 1..22: note = chemically synthesized
  source 1..22: mol_type = other DNA
cgtccagaacacagaaaaataa

SEQ ID NO: 55186 - DNA, 22 bp, synthetic construct
  misc_feature 1..22: note = chemically synthesized
  source 1..22: mol_type = other DNA
tccacctcactgaatcagatgt

SEQ ID NO: 55187 - DNA, 22 bp, synthetic construct
  misc_feature 1..22: note = chemically synthesized
  source 1..22: mol_type = other DNA
ccacctcactgaatcagatgta

SEQ ID NO: 55188 - DNA, 22 bp, synthetic construct
  misc_feature 1..22: note = chemically synthesized
  source 1..22: mol_type = other DNA
cacctcactgaatcagatgtag

SEQ ID NO: 55189 - DNA, 22 bp, synthetic construct
  misc_feature 1..22: note = chemically synthesized
  source 1..22: mol_type = other DNA
actgaatcagatgtaggcagga

SEQ ID NO: 55190 - DNA, 22 bp, synthetic construct
  misc_feature 1..22: note = chemically synthesized
  source 1..22: mol_type = other DNA
aatcagatgtaggcaggatagg

SEQ ID NO: 55191 - DNA, 22 bp, synthetic construct
  misc_feature 1..22: note = chemically synthesized
  source 1..22: mol_type = other DNA
ctctctggatctgtcgattttg

SEQ ID NO: 55192 - DNA, 22 bp, synthetic construct
  misc_feature 1..22: note = chemically synthesized
  source 1..22: mol_type = other DNA
tctctggatctgtcgattttgg

SEQ ID NO: 55193 - DNA, 22 bp, synthetic construct
  misc_feature 1..22: note = chemically synthesized
  source 1..22: mol_type = other DNA
tctggatctgtcgattttggat

SEQ ID NO: 55194 - DNA, 22 bp, synthetic construct
  misc_feature 1..22: note = chemically synthesized
  source 1..22: mol_type = other DNA
tggatctgtcgattttggattt

SEQ ID NO: 55195 - DNA, 22 bp, synthetic construct
  misc_feature 1..22: note = chemically synthesized
  source 1..22: mol_type = other DNA
gatctgtcgattttggatttct

SEQ ID NO: 55196 - DNA, 22 bp, synthetic construct
  misc_feature 1..22: note = chemically synthesized
  source 1..22: mol_type = other DNA
tcgattttggatttcttttctt

SEQ ID NO: 55197 - DNA, 22 bp, synthetic construct
  misc_feature 1..22: note = chemically synthesized
  source 1..22: mol_type = other DNA
tggatttcttttcttccccatc

SEQ ID NO: 55198 - DNA, 22 bp, synthetic construct
  misc_feature 1..22: note = chemically synthesized
  source 1..22: mol_type = other DNA
ggatttcttttcttccccatcc

SEQ ID NO: 55199 - DNA, 22 bp, synthetic construct
  misc_feature 1..22: note = chemically synthesized
  source 1..22: mol_type = other DNA
gatttcttttcttccccatccc

SEQ ID NO: 55200 - DNA, 22 bp, synthetic construct
  misc_feature 1..22: note = chemically synthesized
  source 1..22: mol_type = other DNA
cttttcttccccatccccacct

SEQ ID NO: 55201 - DNA, 22 bp, synthetic construct
  misc_feature 1..22: note = chemically synthesized
  source 1..22: mol_type = other DNA
ttttcttccccatccccacctt

SEQ ID NO: 55202 - DNA, 22 bp, synthetic construct
  misc_feature 1..22: note = chemically synthesized
  source 1..22: mol_type = other DNA
ttcttccccatccccaccttct

SEQ ID NO: 55203 - DNA, 22 bp, synthetic construct
  misc_feature 1..22: note = chemically synthesized
  source 1..22: mol_type = other DNA
tcttccccatccccaccttctc

SEQ ID NO: 55204 - DNA, 22 bp, synthetic construct
  misc_feature 1..22: note = chemically synthesized
  source 1..22: mol_type = other DNA
cttccccatccccaccttctca

SEQ ID NO: 55205 - DNA, 22 bp, synthetic construct
  misc_feature 1..22: note = chemically synthesized
  source 1..22: mol_type = other DNA
ttccccatccccaccttctcat

SEQ ID NO: 55206 - DNA, 22 bp, synthetic construct
  misc_feature 1..22: note = chemically synthesized
  source 1..22: mol_type = other DNA
ccccatccccaccttctcattt

SEQ ID NO: 55207 - DNA, 22 bp, synthetic construct
  misc_feature 1..22: note = chemically synthesized
  source 1..22: mol_type = other DNA
cccatccccaccttctcatttt

SEQ ID NO: 55208 - DNA, 22 bp, synthetic construct
  misc_feature 1..22: note = chemically synthesized
  source 1..22: mol_type = other DNA
ctcattttgaagtattgagctt

SEQ ID NO: 55209 - DNA, 22 bp, synthetic construct
  misc_feature 1..22: note = chemically synthesized
  source 1..22: mol_type = other DNA
tcattttgaagtattgagcttt

SEQ ID NO: 55210 - DNA, 22 bp, synthetic construct
  misc_feature 1..22: note = chemically synthesized
  source 1..22: mol_type = other DNA
attttgaagtattgagctttac

SEQ ID NO: 55211 - DNA, 22 bp, synthetic construct
  misc_feature 1..22: note = chemically synthesized
  source 1..22: mol_type = other DNA
tgaagtattgagctttactaca

SEQ ID NO: 55212 - DNA, 22 bp, synthetic construct
  misc_feature 1..22: note = chemically synthesized
  source 1..22: mol_type = other DNA
gaagtattgagctttactacac

SEQ ID NO: 55213 - DNA, 22 bp, synthetic construct
  misc_feature 1..22: note = chemically synthesized
  source 1..22: mol_type = other DNA
aagtattgagctttactacacc

SEQ ID NO: 55214 - DNA, 22 bp, synthetic construct
  misc_feature 1..22: note = chemically synthesized
  source 1..22: mol_type = other DNA
agctttactacacctagtccag

SEQ ID NO: 55215 - DNA, 22 bp, synthetic construct
  misc_feature 1..22: note = chemically synthesized
  source 1..22: mol_type = other DNA
tactacacctagtccagcttcc

SEQ ID NO: 55216 - DNA, 22 bp, synthetic construct
  misc_feature 1..22: note = chemically synthesized
  source 1..22: mol_type = other DNA
actacacctagtccagcttcca

SEQ ID NO: 55217 - DNA, 22 bp, synthetic construct
  misc_feature 1..22: note = chemically synthesized
  source 1..22: mol_type = other DNA
ctacacctagtccagcttccat

SEQ ID NO: 55218 - DNA, 22 bp, synthetic construct
  misc_feature 1..22: note = chemically synthesized
  source 1..22: mol_type = other DNA
cacctagtccagcttccattgt

SEQ ID NO: 55219 - DNA, 22 bp, synthetic construct
  misc_feature 1..22: note = chemically synthesized
  source 1..22: mol_type = other DNA
gtccagcttccattgtccattt

SEQ ID NO: 55220 - DNA, 22 bp, synthetic construct
  misc_feature 1..22: note = chemically synthesized
  source 1..22: mol_type = other DNA
ccattgtccatttccagccttg

SEQ ID NO: 55221 - DNA, 22 bp, synthetic construct
  misc_feature 1..22: note = chemically synthesized
  source 1..22: mol_type = other DNA
cattgtccatttccagccttgg

SEQ ID NO: 55222 - DNA, 22 bp, synthetic construct
  misc_feature 1..22: note = chemically synthesized
  source 1..22: mol_type = other DNA
tccatttccagccttggtgacg

SEQ ID NO: 55223 - DNA, 22 bp, synthetic construct
  misc_feature 1..22: note = chemically synthesized
  source 1..22: mol_type = other DNA
ccagccttggtgacgtgtcaga

SEQ ID NO: 55224 - DNA, 22 bp, synthetic construct
  misc_feature 1..22: note = chemically synthesized
  source 1..22: mol_type = other DNA
cagccttggtgacgtgtcagag

SEQ ID NO: 55225 - DNA, 22 bp, synthetic construct
  misc_feature 1..22: note = chemically synthesized
  source 1..22: mol_type = other DNA
ggtgacgtgtcagaggcaaagt

SEQ ID NO: 55226 - DNA, 22 bp, synthetic construct
  misc_feature 1..22: note = chemically synthesized
  source 1..22: mol_type = other DNA
gtgacgtgtcagaggcaaagtg

SEQ ID NO: 55227 - DNA, 22 bp, synthetic construct
  misc_feature 1..22: note = chemically synthesized
  source 1..22: mol_type = other DNA
gcagttcagccaatgacttgtt

SEQ ID NO: 55228 - DNA, 22 bp, synthetic construct
  misc_feature 1..22: note = chemically synthesized
  source 1..22: mol_type = other DNA
cagttcagccaatgacttgttt

SEQ ID NO: 55229 - DNA, 22 bp, synthetic construct
  misc_feature 1..22: note = chemically synthesized
  source 1..22: mol_type = other DNA
agccaatgacttgtttgactca

SEQ ID NO: 55230 - DNA, 22 bp, synthetic construct
  misc_feature 1..22: note = chemically synthesized
  source 1..22: mol_type = other DNA
gtttgactcagaacatctggcc

SEQ ID NO: 55231 - DNA, 22 bp, synthetic construct
  misc_feature 1..22: note = chemically synthesized
  source 1..22: mol_type = other DNA
tttgactcagaacatctggcca

SEQ ID NO: 55232 - DNA, 22 bp, synthetic construct
  misc_feature 1..22: note = chemically synthesized
  source 1..22: mol_type = other DNA
gactcagaacatctggccaggc

SEQ ID NO: 55233 - DNA, 22 bp, synthetic construct
  misc_feature 1..22: note = chemically synthesized
  source 1..22: mol_type = other DNA
actcagaacatctggccaggcc

SEQ ID NO: 55234 - DNA, 22 bp, synthetic construct
  misc_feature 1..22: note = chemically synthesized
  source 1..22: mol_type = other DNA
agaacatctggccaggcctcct

SEQ ID NO: 55235 - DNA, 22 bp, synthetic construct
  misc_feature 1..22: note = chemically synthesized
  source 1..22: mol_type = other DNA
gccaggcctccttaggggttca

SEQ ID NO: 55236 - DNA, 22 bp, synthetic construct
  misc_feature 1..22: note = chemically synthesized
  source 1..22: mol_type = other DNA
cttaggggttcagctcgttctc

SEQ ID NO: 55237 - DNA, 22 bp, synthetic construct
  misc_feature 1..22: note = chemically synthesized
  source 1..22: mol_type = other DNA
aggggttcagctcgttctcaag

SEQ ID NO: 55238 - DNA, 22 bp, synthetic construct
  misc_feature 1..22: note = chemically synthesized
  source 1..22: mol_type = other DNA
ggggttcagctcgttctcaagg

SEQ ID NO: 55239 - DNA, 22 bp, synthetic construct
  misc_feature 1..22: note = chemically synthesized
  source 1..22: mol_type = other DNA
agctcgttctcaaggcttccct

SEQ ID NO: 55240 - DNA, 22 bp, synthetic construct
  misc_feature 1..22: note = chemically synthesized
  source 1..22: mol_type = other DNA
gttctcaaggcttccctgaagt

SEQ ID NO: 55241 - DNA, 22 bp, synthetic construct
  misc_feature 1..22: note = chemically synthesized
  source 1..22: mol_type = other DNA
tcaaggcttccctgaagtagag

SEQ ID NO: 55242 - DNA, 22 bp, synthetic construct
  misc_feature 1..22: note = chemically synthesized
  source 1..22: mol_type = other DNA
aaggcttccctgaagtagagtg

SEQ ID NO: 55243 - DNA, 22 bp, synthetic construct
  misc_feature 1..22: note = chemically synthesized
  source 1..22: mol_type = other DNA
ccctgaagtagagtgggctggc

SEQ ID NO: 55244 - DNA, 22 bp, synthetic construct
  misc_feature 1..22: note = chemically synthesized
  source 1..22: mol_type = other DNA
cctgaagtagagtgggctggca

SEQ ID NO: 55245 - DNA, 22 bp, synthetic construct
  misc_feature 1..22: note = chemically synthesized
  source 1..22: mol_type = other DNA
aagtagagtgggctggcagggt

SEQ ID NO: 55246 - DNA, 22 bp, synthetic construct
  misc_feature 1..22: note = chemically synthesized
  source 1..22: mol_type = other DNA
gcagggtagttggaggtggtgg

SEQ ID NO: 55247 - DNA, 22 bp, synthetic construct
  misc_feature 1..22: note = chemically synthesized
  source 1..22: mol_type = other DNA
gaggtggtggaaagagttaact

SEQ ID NO: 55248 - DNA, 22 bp, synthetic construct
  misc_feature 1..22: note = chemically synthesized
  source 1..22: mol_type = other DNA
actgagcttcagggctagcctt

SEQ ID NO: 55249 - DNA, 22 bp, synthetic construct
  misc_feature 1..22: note = chemically synthesized
  source 1..22: mol_type = other DNA
agcttcagggctagccttggat

SEQ ID NO: 55250 - DNA, 22 bp, synthetic construct
  misc_feature 1..22: note = chemically synthesized
  source 1..22: mol_type = other DNA
cagggctagccttggatccata

SEQ ID NO: 55251 - DNA, 22 bp, synthetic construct
  misc_feature 1..22: note = chemically synthesized
  source 1..22: mol_type = other DNA
agggctagccttggatccatat

SEQ ID NO: 55252 - DNA, 22 bp, synthetic construct
  misc_feature 1..22: note = chemically synthesized
  source 1..22: mol_type = other DNA
gccttggatccatattggctgt

SEQ ID NO: 55253 - DNA, 22 bp, synthetic construct
  misc_feature 1..22: note = chemically synthesized
  source 1..22: mol_type = other DNA
ggatccatattggctgtcagcc

SEQ ID NO: 55254 - DNA, 22 bp, synthetic construct
  misc_feature 1..22: note = chemically synthesized
  source 1..22: mol_type = other DNA
gatccatattggctgtcagccc

SEQ ID NO: 55255 - DNA, 22 bp, synthetic construct
  misc_feature 1..22: note = chemically synthesized
  source 1..22: mol_type = other DNA
gctgtcagcccggatggggctg

SEQ ID NO: 55256 - DNA, 22 bp, synthetic construct
  misc_feature 1..22: note = chemically synthesized
  source 1..22: mol_type = other DNA
tcagcccggatggggctgtaat

SEQ ID NO: 55257 - DNA, 22 bp, synthetic construct
  misc_feature 1..22: note = chemically synthesized
  source 1..22: mol_type = other DNA
taattaaacacagccccgtggt

SEQ ID NO: 55258 - DNA, 22 bp, synthetic construct
  misc_feature 1..22: note = chemically synthesized
  source 1..22: mol_type = other DNA
aacacagccccgtggtgggatg

SEQ ID NO: 55259 - DNA, 22 bp, synthetic construct
  misc_feature 1..22: note = chemically synthesized
  source 1..22: mol_type = other DNA
gactttaagatgccattttcga

SEQ ID NO: 55260 - DNA, 22 bp, synthetic construct
  misc_feature 1..22: note = chemically synthesized
  source 1..22: mol_type = other DNA
actttaagatgccattttcgac

SEQ ID NO: 55261 - DNA, 22 bp, synthetic construct
  misc_feature 1..22: note = chemically synthesized
  source 1..22: mol_type = other DNA
taagatgccattttcgactggc

SEQ ID NO: 55262 - DNA, 22 bp, synthetic construct
  misc_feature 1..22: note = chemically synthesized
  source 1..22: mol_type = other DNA
aagatgccattttcgactggcc

SEQ ID NO: 55263 - DNA, 22 bp, synthetic construct
  misc_feature 1..22: note = chemically synthesized
  source 1..22: mol_type = other DNA
agatgccattttcgactggcca

SEQ ID NO: 55264 - DNA, 22 bp, synthetic construct
  misc_feature 1..22: note = chemically synthesized
  source 1..22: mol_type = other DNA
tcgactggccaggccagagtag

SEQ ID NO: 55265 - DNA, 22 bp, synthetic construct
  misc_feature 1..22: note = chemically synthesized
  source 1..22: mol_type = other DNA
cgactggccaggccagagtaga

SEQ ID NO: 55266 - DNA, 22 bp, synthetic construct
  misc_feature 1..22: note = chemically synthesized
  source 1..22: mol_type = other DNA
gactggccaggccagagtagag

SEQ ID NO: 55267 - DNA, 22 bp, synthetic construct
  misc_feature 1..22: note = chemically synthesized
  source 1..22: mol_type = other DNA
gccaggccagagtagagagggc

SEQ ID NO: 55268 - DNA, 22 bp, synthetic construct
  misc_feature 1..22: note = chemically synthesized
  source 1..22: mol_type = other DNA
ctgaagcgcacagacatgctta

SEQ ID NO: 55269 - DNA, 22 bp, synthetic construct
  misc_feature 1..22: note = chemically synthesized
  source 1..22: mol_type = other DNA
aagcgcacagacatgcttactc

SEQ ID NO: 55270 - DNA, 22 bp, synthetic construct
  misc_feature 1..22: note = chemically synthesized
  source 1..22: mol_type = other DNA
actcgaaaagtttaagggcatg

SEQ ID NO: 55271 - DNA, 22 bp, synthetic construct
  misc_feature 1..22: note = chemically synthesized
  source 1..22: mol_type = other DNA
ctcgaaaagtttaagggcatgt

SEQ ID NO: 55272 - DNA, 22 bp, synthetic construct
  misc_feature 1..22: note = chemically synthesized
  source 1..22: mol_type = other DNA
gaaaagtttaagggcatgttgg

SEQ ID NO: 55273 - DNA, 22 bp, synthetic construct
  misc_feature 1..22: note = chemically synthesized
  source 1..22: mol_type = other DNA
aagggcatgttggaaatttcaa

SEQ ID NO: 55274 - DNA, 22 bp, synthetic construct
  misc_feature 1..22: note = chemically synthesized
  source 1..22: mol_type = other DNA
agggcatgttggaaatttcaaa

SEQ ID NO: 55275 - DNA, 22 bp, synthetic construct
  misc_feature 1..22: note = chemically synthesized
  source 1..22: mol_type = other DNA
gaaatttcaaaaggttggtttg

SEQ ID NO: 55276 - DNA, 22 bp, synthetic construct
  misc_feature 1..22: note = chemically synthesized
  source 1..22: mol_type = other DNA
caaaaggttggtttgacaggaa

SEQ ID NO: 55277 - DNA, 22 bp, synthetic construct
  misc_feature 1..22: note = chemically synthesized
  source 1..22: mol_type = other DNA
aaaaggttggtttgacaggaac

SEQ ID NO: 55278 - DNA, 22 bp, synthetic construct
  misc_feature 1..22: note = chemically synthesized
  source 1..22: mol_type = other DNA
gtttgacaggaacggctgctcc

SEQ ID NO: 55279 - DNA, 22 bp, synthetic construct
  misc_feature 1..22: note = chemically synthesized
  source 1..22: mol_type = other DNA
gacaggaacggctgctccctgc

SEQ ID NO: 55280 - DNA, 22 bp, synthetic construct
  misc_feature 1..22: note = chemically synthesized
  source 1..22: mol_type = other DNA
acaggaacggctgctccctgca

SEQ ID NO: 55281 - DNA, 22 bp, synthetic construct
  misc_feature 1..22: note = chemically synthesized
  source 1..22: mol_type = other DNA
ctccctgcagcctgcctcctca

SEQ ID NO: 55282 - DNA, 22 bp, synthetic construct
  misc_feature 1..22: note = chemically synthesized
  source 1..22: mol_type = other DNA
cctgcagcctgcctcctcagct

SEQ ID NO: 55283 - DNA, 22 bp, synthetic construct
  misc_feature 1..22: note = chemically synthesized
  source 1..22: mol_type = other DNA
cagcctgcctcctcagctaaat

SEQ ID NO: 55284 - DNA, 22 bp, synthetic construct
  misc_feature 1..22: note = chemically synthesized
  source 1..22: mol_type = other DNA
cctcctcagctaaatgataaat

SEQ ID NO: 55285 - DNA, 22 bp, synthetic construct
  misc_feature 1..22: note = chemically synthesized
  source 1..22: mol_type = other DNA
ctcagctaaatgataaatgctt

SEQ ID NO: 55286 - DNA, 22 bp, synthetic construct
  misc_feature 1..22: note = chemically synthesized
  source 1..22: mol_type = other DNA
agctaaatgataaatgcttctc

SEQ ID NO: 55287 - DNA, 22 bp, synthetic construct
  misc_feature 1..22: note = chemically synthesized
  source 1..22: mol_type = other DNA
aatgataaatgcttctctgtgc

SEQ ID NO: 55288 - DNA, 22 bp, synthetic construct
  misc_feature 1..22: note = chemically synthesized
  source 1..22: mol_type = other DNA
ctctgtgctctctcttgtctct

SEQ ID NO: 55289 - DNA, 22 bp, synthetic construct
  misc_feature 1..22: note = chemically synthesized
  source 1..22: mol_type = other DNA
tctgtgctctctcttgtctctg

SEQ ID NO: 55290 - DNA, 22 bp, synthetic construct
  misc_feature 1..22: note = chemically synthesized
  source 1..22: mol_type = other DNA
tgtgctctctcttgtctctgat

SEQ ID NO: 55291 - DNA, 22 bp, synthetic construct
  misc_feature 1..22: note = chemically synthesized
  source 1..22: mol_type = other DNA
tgctctctcttgtctctgatgt

SEQ ID NO: 55292 - DNA, 22 bp, synthetic construct
  misc_feature 1..22: note = chemically synthesized
  source 1..22: mol_type = other DNA
tctcttgtctctgatgtggttt

SEQ ID NO: 55293 - DNA, 22 bp, synthetic construct
  misc_feature 1..22: note = chemically synthesized
  source 1..22: mol_type = other DNA
tcttgtctctgatgtggttttg

SEQ ID NO: 55294 - DNA, 22 bp, synthetic construct
  misc_feature 1..22: note = chemically synthesized
  source 1..22: mol_type = other DNA
ttgtctctgatgtggttttgac

SEQ ID NO: 55295 - DNA, 22 bp, synthetic construct
  misc_feature 1..22: note = chemically synthesized
  source 1..22: mol_type = other DNA
gtctctgatgtggttttgacag

SEQ ID NO: 55296 - DNA, 22 bp, synthetic construct
  misc_feature 1..22: note = chemically synthesized
  source 1..22: mol_type = other DNA
tctctgatgtggttttgacaga

SEQ ID NO: 55297 - DNA, 22 bp, synthetic construct
  misc_feature 1..22: note = chemically synthesized
  source 1..22: mol_type = other DNA
tgatgtggttttgacagatgta

SEQ ID NO: 55298 - DNA, 22 bp, synthetic construct
  misc_feature 1..22: note = chemically synthesized
  source 1..22: mol_type = other DNA
atgtggttttgacagatgtatc

SEQ ID NO: 55299 - DNA, 22 bp, synthetic construct
  misc_feature 1..22: note = chemically synthesized
  source 1..22: mol_type = other DNA
tgacagatgtatcttgattttg

SEQ ID NO: 55300 - DNA, 22 bp, synthetic construct
  misc_feature 1..22: note = chemically synthesized
  source 1..22: mol_type = other DNA
gacagatgtatcttgattttgt

SEQ ID NO: 55301 - DNA, 22 bp, synthetic construct
  misc_feature 1..22: note = chemically synthesized
  source 1..22: mol_type = other DNA
acagatgtatcttgattttgtt

SEQ ID NO: 55302 - DNA, 22 bp, synthetic construct
  misc_feature 1..22: note = chemically synthesized
  source 1..22: mol_type = other DNA
gattttgtttgtggtttacaca

SEQ ID NO: 55303 - DNA, 22 bp, synthetic construct
  misc_feature 1..22: note = chemically synthesized
  source 1..22: mol_type = other DNA
attttgtttgtggtttacacag

SEQ ID NO: 55304 - DNA, 22 bp, synthetic construct
  misc_feature 1..22: note = chemically synthesized
  source 1..22: mol_type = other DNA
tgtttgtggtttacacagccac

SEQ ID NO: 55305 - DNA, 22 bp, synthetic construct
  misc_feature 1..22: note = chemically synthesized
  source 1..22: mol_type = other DNA
gtttgtggtttacacagccaca

SEQ ID NO: 55306 - DNA, 22 bp, synthetic construct
  misc_feature 1..22: note = chemically synthesized
  source 1..22: mol_type = other DNA
tttgtggtttacacagccacat

SEQ ID NO: 55307 - DNA, 22 bp, synthetic construct
  misc_feature 1..22: note = chemically synthesized
  source 1..22: mol_type = other DNA
gtggtttacacagccacatgtc

SEQ ID NO: 55308 - DNA, 22 bp, synthetic construct
  misc_feature 1..22: note = chemically synthesized
  source 1..22: mol_type = other DNA
tggtttacacagccacatgtca

SEQ ID NO: 55309 - DNA, 22 bp, synthetic construct
  misc_feature 1..22: note = chemically synthesized
  source 1..22: mol_type = other DNA
acacagccacatgtcaccctta

SEQ ID NO: 55310 - DNA, 22 bp, synthetic construct
  misc_feature 1..22: note = chemically synthesized
  source 1..22: mol_type = other DNA
cacagccacatgtcacccttac

SEQ ID NO: 55311 - DNA, 22 bp, synthetic construct
  misc_feature 1..22: note = chemically synthesized
  source 1..22: mol_type = other DNA
acaaatgtccagtccagactcc

SEQ ID NO: 55312 - DNA, 22 bp, synthetic construct
  misc_feature 1..22: note = chemically synthesized
  source 1..22: mol_type = other DNA
caaatgtccagtccagactcca

SEQ ID NO: 55313 - DNA, 22 bp, synthetic construct
  misc_feature 1..22: note = chemically synthesized
  source 1..22: mol_type = other DNA
cactgtttctgctataacacaa

SEQ ID NO: 55314 - DNA, 22 bp, synthetic construct
  misc_feature 1..22: note = chemically synthesized
  source 1..22: mol_type = other DNA
tttctgctataacacaatgtaa

SEQ ID NO: 55315 - DNA, 22 bp, synthetic construct
  misc_feature 1..22: note = chemically synthesized
  source 1..22: mol_type = other DNA
ctgctataacacaatgtaaaaa

SEQ ID NO: 55316 - DNA, 22 bp, synthetic construct
  misc_feature 1..22: note = chemically synthesized
  source 1..22: mol_type = other DNA
tgctataacacaatgtaaaaat

SEQ ID NO: 55317 - DNA, 22 bp, synthetic construct
  misc_feature 1..22: note = chemically synthesized
  source 1..22: mol_type = other DNA
ctataacacaatgtaaaaattt

SEQ ID NO: 55318 - DNA, 22 bp, synthetic construct
  misc_feature 1..22: note = chemically synthesized
  source 1..22: mol_type = other DNA
taacacaatgtaaaaattttct

SEQ ID NO: 55319 - DNA, 22 bp, synthetic construct
  misc_feature 1..22: note = chemically synthesized
  source 1..22: mol_type = other DNA
tcttggaaaaatacacacacgt

SEQ ID NO: 55320 - DNA, 22 bp, synthetic construct
  misc_feature 1..22: note = chemically synthesized
  source 1..22: mol_type = other DNA
cttggaaaaatacacacacgta

SEQ ID NO: 55321 - DNA, 22 bp, synthetic construct
  misc_feature 1..22: note = chemically synthesized
  source 1..22: mol_type = other DNA
ttggaaaaatacacacacgtat

SEQ ID NO: 55322 - DNA, 22 bp, synthetic construct
  misc_feature 1..22: note = chemically synthesized
  source 1..22: mol_type = other DNA
ggaaaaatacacacacgtattc

SEQ ID NO: 55323 - DNA, 22 bp, synthetic construct
  misc_feature 1..22: note = chemically synthesized
  source 1..22: mol_type = other DNA
gaaaaatacacacacgtattca

SEQ ID NO: 55324 - DNA, 22 bp, synthetic construct
  misc_feature 1..22: note = chemically synthesized
  source 1..22: mol_type = other DNA
aacagccctccctcctttggtt

SEQ ID NO: 55325 - DNA, 22 bp, synthetic construct
  misc_feature 1..22: note = chemically synthesized
  source 1..22: mol_type = other DNA
cctcctttggttaattttagca

SEQ ID NO: 55326 - DNA, 22 bp, synthetic construct
  misc_feature 1..22: note = chemically synthesized
  source 1..22: mol_type = other DNA
ctttggttaattttagcaggga

SEQ ID NO: 55327 - DNA, 22 bp, synthetic construct
  misc_feature 1..22: note = chemically synthesized
  source 1..22: mol_type = other DNA
tggttaattttagcagggaggc

SEQ ID NO: 55328 - DNA, 22 bp, synthetic construct
  misc_feature 1..22: note = chemically synthesized
  source 1..22: mol_type = other DNA
ggttaattttagcagggaggca

SEQ ID NO: 55329 - DNA, 22 bp, synthetic construct
  misc_feature 1..22: note = chemically synthesized
  source 1..22: mol_type = other DNA
gttaattttagcagggaggcag

SEQ ID NO: 55330 - DNA, 22 bp, synthetic construct
  misc_feature 1..22: note = chemically synthesized
  source 1..22: mol_type = other DNA
attttagcagggaggcagctag

SEQ ID NO: 55331 - DNA, 22 bp, synthetic construct
  misc_feature 1..22: note = chemically synthesized
  source 1..22: mol_type = other DNA
tagcagggaggcagctaggtgt

SEQ ID NO: 55332 - DNA, 22 bp, synthetic construct
  misc_feature 1..22: note = chemically synthesized
  source 1..22: mol_type = other DNA
agcagggaggcagctaggtgtg

SEQ ID NO: 55333 - DNA, 22 bp, synthetic construct
  misc_feature 1..22: note = chemically synthesized
  source 1..22: mol_type = other DNA
gcagggaggcagctaggtgtgt

SEQ ID NO: 55334 - DNA, 22 bp, synthetic construct
  misc_feature 1..22: note = chemically synthesized
  source 1..22: mol_type = other DNA
ggtgtgtgggtttctcggcagc

SEQ ID NO: 55335 - DNA, 22 bp, synthetic construct
  misc_feature 1..22: note = chemically synthesized
  source 1..22: mol_type = other DNA
ctcggcagctcaagggaaaagg

SEQ ID NO: 55336 - DNA, 22 bp, synthetic construct
  misc_feature 1..22: note = chemically synthesized
  source 1..22: mol_type = other DNA
tcggcagctcaagggaaaagga

SEQ ID NO: 55337 - DNA, 22 bp, synthetic construct
  misc_feature 1..22: note = chemically synthesized
  source 1..22: mol_type = other DNA
ggcagctcaagggaaaaggaat

SEQ ID NO: 55338 - DNA, 22 bp, synthetic construct
  misc_feature 1..22: note = chemically synthesized
  source 1..22: mol_type = other DNA
aagggaaaaggaattaaaggct

SEQ ID NO: 55339 - DNA, 22 bp, synthetic construct
  misc_feature 1..22: note = chemically synthesized
  source 1..22: mol_type = other DNA
aaggctagcagtgggacttaaa

SEQ ID NO: 55340 - DNA, 22 bp, synthetic construct
  misc_feature 1..22: note = chemically synthesized
  source 1..22: mol_type = other DNA
gcagtgggacttaaattccctt

SEQ ID NO: 55341 - DNA, 22 bp, synthetic construct
  misc_feature 1..22: note = chemically synthesized
  source 1..22: mol_type = other DNA
aaattcccttctctaagtgata

SEQ ID NO: 55342 - DNA, 22 bp, synthetic construct
  misc_feature 1..22: note = chemically synthesized
  source 1..22: mol_type = other DNA
aattcccttctctaagtgataa

SEQ ID NO: 55343 - DNA, 22 bp, synthetic construct
  misc_feature 1..22: note = chemically synthesized
  source 1..22: mol_type = other DNA
ccttctctaagtgataaacagt

SEQ ID NO: 55344 - DNA, 22 bp, synthetic construct
  misc_feature 1..22: note = chemically synthesized
  source 1..22: mol_type = other DNA
ctctaagtgataaacagtaaca

SEQ ID NO: 55345 - DNA, 22 bp, synthetic construct
  misc_feature 1..22: note = chemically synthesized
  source 1..22: mol_type = other DNA
tctaagtgataaacagtaacac

SEQ ID NO: 55346 - DNA, 22 bp, synthetic construct
  misc_feature 1..22: note = chemically synthesized
  source 1..22: mol_type = other DNA
taagtgataaacagtaacacta

SEQ ID NO: 55347 - DNA, 22 bp, synthetic construct
  misc_feature 1..22: note = chemically synthesized
  source 1..22: mol_type = other DNA
agtgataaacagtaacactata

SEQ ID NO: 55348 - DNA, 22 bp, synthetic construct
  misc_feature 1..22: note = chemically synthesized
  source 1..22: mol_type = other DNA
tatagtgaccctcaaaacattt

SEQ ID NO: 55349 - DNA, 22 bp, synthetic construct
  misc_feature 1..22: note = chemically synthesized
  source 1..22: mol_type = other DNA
aaaacattttttgcttgagcat

SEQ ID NO: 55350 - DNA, 22 bp, synthetic construct
  misc_feature 1..22: note = chemically synthesized
  source 1..22: mol_type = other DNA
tttgcttgagcatgttagacaa

SEQ ID NO: 55351 - DNA, 22 bp, synthetic construct
  misc_feature 1..22: note = chemically synthesized
  source 1..22: mol_type = other DNA
ttgcttgagcatgttagacaaa

SEQ ID NO: 55352 - DNA, 22 bp, synthetic construct
  misc_feature 1..22: note = chemically synthesized
  source 1..22: mol_type = other DNA
tgcttgagcatgttagacaaaa

SEQ ID NO: 55353 - DNA, 22 bp, synthetic construct
  misc_feature 1..22: note = chemically synthesized
  source 1..22: mol_type = other DNA
gcttgagcatgttagacaaaag

SEQ ID NO: 55354 - DNA, 22 bp, synthetic construct
  misc_feature 1..22: note = chemically synthesized
  source 1..22: mol_type = other DNA
cttgagcatgttagacaaaagt

SEQ ID NO: 55355 - DNA, 22 bp, synthetic construct
  misc_feature 1..22: note = chemically synthesized
  source 1..22: mol_type = other DNA
gagcatgttagacaaaagtcaa

SEQ ID NO: 55356 - DNA, 22 bp, synthetic construct
  misc_feature 1..22: note = chemically synthesized
  source 1..22: mol_type = other DNA
agcatgttagacaaaagtcaat

SEQ ID NO: 55357 - DNA, 22 bp, synthetic construct
  misc_feature 1..22: note = chemically synthesized
  source 1..22: mol_type = other DNA
gacaaaagtcaatgcagattct

SEQ ID NO: 55358 - DNA, 22 bp, synthetic construct
  misc_feature 1..22: note = chemically synthesized
  source 1..22: mol_type = other DNA
tgtgatgacagacatgccatgc

SEQ ID NO: 55359 - DNA, 22 bp, synthetic construct
  misc_feature 1..22: note = chemically synthesized
  source 1..22: mol_type = other DNA
tgatgacagacatgccatgcct

SEQ ID NO: 55360 - DNA, 22 bp, synthetic construct
  misc_feature 1..22: note = chemically synthesized
  source 1..22: mol_type = other DNA
ttggtggatcgctttcttccat

SEQ ID NO: 55361 - DNA, 22 bp, synthetic construct
  misc_feature 1..22: note = chemically synthesized
  source 1..22: mol_type = other DNA
gtggatcgctttcttccatcta

SEQ ID NO: 55362 - DNA, 22 bp, synthetic construct
  misc_feature 1..22: note = chemically synthesized
  source 1..22: mol_type = other DNA
tcttccatctacctaccaccca

SEQ ID NO: 55363 - DNA, 22 bp, synthetic construct
  misc_feature 1..22: note = chemically synthesized
  source 1..22: mol_type = other DNA
cttccatctacctaccacccag

SEQ ID NO: 55364 - DNA, 22 bp, synthetic construct
  misc_feature 1..22: note = chemically synthesized
  source 1..22: mol_type = other DNA
ttccatctacctaccacccagc

SEQ ID NO: 55365 - DNA, 22 bp, synthetic construct
  misc_feature 1..22: note = chemically synthesized
  source 1..22: mol_type = other DNA
ccatctacctaccacccagctc

SEQ ID NO: 55366 - DNA, 22 bp, synthetic construct
  misc_feature 1..22: note = chemically synthesized
  source 1..22: mol_type = other DNA
catctacctaccacccagctcc

SEQ ID NO: 55367 - DNA, 22 bp, synthetic construct
  misc_feature 1..22: note = chemically synthesized
  source 1..22: mol_type = other DNA
cctaccacccagctcccgaaag

SEQ ID NO: 55368 - DNA, 22 bp, synthetic construct
  misc_feature 1..22: note = chemically synthesized
  source 1..22: mol_type = other DNA
ccacccagctcccgaaaggcaa

SEQ ID NO: 55369 - DNA, 22 bp, synthetic construct
  misc_feature 1..22: note = chemically synthesized
  source 1..22: mol_type = other DNA
ccgaaaggcaagaggtttgttc

SEQ ID NO: 55370 - DNA, 22 bp, synthetic construct
  misc_feature 1..22: note = chemically synthesized
  source 1..22: mol_type = other DNA
gttcagttttaggaaaggtagt

SEQ ID NO: 55371 - DNA, 22 bp, synthetic construct
  misc_feature 1..22: note = chemically synthesized
  source 1..22: mol_type = other DNA
ttcagttttaggaaaggtagtg

SEQ ID NO: 55372 - DNA, 22 bp, synthetic construct
  misc_feature 1..22: note = chemically synthesized
  source 1..22: mol_type = other DNA
agttttaggaaaggtagtgcat

SEQ ID NO: 55373 - DNA, 22 bp, synthetic construct
  misc_feature 1..22: note = chemically synthesized
  source 1..22: mol_type = other DNA
taggaaaggtagtgcatatcat

SEQ ID NO: 55374 - DNA, 22 bp, synthetic construct
  misc_feature 1..22: note = chemically synthesized
  source 1..22: mol_type = other DNA
aggaaaggtagtgcatatcatg

SEQ ID NO: 55375 - DNA, 22 bp, synthetic construct
  misc_feature 1..22: note = chemically synthesized
  source 1..22: mol_type = other DNA
ggaaaggtagtgcatatcatga

SEQ ID NO: 55376 - DNA, 22 bp, synthetic construct
  misc_feature 1..22: note = chemically synthesized
  source 1..22: mol_type = other DNA
attcactggaacttgtctctcc

SEQ ID NO: 55377 - DNA, 22 bp, synthetic construct
  misc_feature 1..22: note = chemically synthesized
  source 1..22: mol_type = other DNA
actggaacttgtctctccgacc

SEQ ID NO: 55378 - DNA, 22 bp, synthetic construct
  misc_feature 1..22: note = chemically synthesized
  source 1..22: mol_type = other DNA
gaacttgtctctccgacctagt

SEQ ID NO: 55379 - DNA, 22 bp, synthetic construct
  misc_feature 1..22: note = chemically synthesized
  source 1..22: mol_type = other DNA
gtctctccgacctagtttgacc

SEQ ID NO: 55380 - DNA, 22 bp, synthetic construct
  misc_feature 1..22: note = chemically synthesized
  source 1..22: mol_type = other DNA
tctctccgacctagtttgacca

SEQ ID NO: 55381 - DNA, 22 bp, synthetic construct
  misc_feature 1..22: note = chemically synthesized
  source 1..22: mol_type = other DNA
tccgacctagtttgaccacaaa

SEQ ID NO: 55382 - DNA, 22 bp, synthetic construct
  misc_feature 1..22: note = chemically synthesized
  source 1..22: mol_type = other DNA
cgacctagtttgaccacaaagt

SEQ ID NO: 55383 - DNA, 22 bp, synthetic construct
  misc_feature 1..22: note = chemically synthesized
  source 1..22: mol_type = other DNA
gtttgaccacaaagttgaacca

SEQ ID NO: 55384 - DNA, 22 bp, synthetic construct
  misc_feature 1..22: note = chemically synthesized
  source 1..22: mol_type = other DNA
gaccacaaagttgaaccataat

SEQ ID NO: 55385 - DNA, 22 bp, synthetic construct
  misc_feature 1..22: note = chemically synthesized
  source 1..22: mol_type = other DNA
accacaaagttgaaccataata

SEQ ID NO: 55386 - DNA, 22 bp, synthetic construct
  misc_feature 1..22: note = chemically synthesized
  source 1..22: mol_type = other DNA
aaccataataggtcagtggtct

SEQ ID NO: 55387 - DNA, 22 bp, synthetic construct
  misc_feature 1..22: note = chemically synthesized
  source 1..22: mol_type = other DNA
gaggggattaaatgtcatatta

SEQ ID NO: 55388 - DNA, 22 bp, synthetic construct
  misc_feature 1..22: note = chemically synthesized
  source 1..22: mol_type = other DNA
aatgtcatattatttctcctct

SEQ ID NO: 55389 - DNA, 22 bp, synthetic construct
  misc_feature 1..22: note = chemically synthesized
  source 1..22: mol_type = other DNA
tttctcctctccccctctagaa

SEQ ID NO: 55390 - DNA, 22 bp, synthetic construct
  misc_feature 1..22: note = chemically synthesized
  source 1..22: mol_type = other DNA
ctcctctccccctctagaattt

SEQ ID NO: 55391 - DNA, 22 bp, synthetic construct
  misc_feature 1..22: note = chemically synthesized
  source 1..22: mol_type = other DNA
tcctctccccctctagaatttg

SEQ ID NO: 55392 - DNA, 22 bp, synthetic construct
  misc_feature 1..22: note = chemically synthesized
  source 1..22: mol_type = other DNA
ctctccccctctagaatttgat

SEQ ID NO: 55393 - DNA, 22 bp, synthetic construct
  misc_feature 1..22: note = chemically synthesized
  source 1..22: mol_type = other DNA
tccccctctagaatttgatcat

SEQ ID NO: 55394 - DNA, 22 bp, synthetic construct
  misc_feature 1..22: note = chemically synthesized
  source 1..22: mol_type = other DNA
cccctctagaatttgatcatta

SEQ ID NO: 55395 - DNA, 22 bp, synthetic construct
  misc_feature 1..22: note = chemically synthesized
  source 1..22: mol_type = other DNA
tagaatttgatcattaaaacca

SEQ ID NO: 55396 - DNA, 22 bp, synthetic construct
  misc_feature 1..22: note = chemically synthesized
  source 1..22: mol_type = other DNA
gaatttgatcattaaaaccaaa

SEQ ID NO: 55397 - DNA, 22 bp, synthetic construct
  misc_feature 1..22: note = chemically synthesized
  source 1..22: mol_type = other DNA
gatcattaaaaccaaacatggc

SEQ ID NO: 55398 - DNA, 22 bp, synthetic construct
  misc_feature 1..22: note = chemically synthesized
  source 1..22: mol_type = other DNA
atcattaaaaccaaacatggca

SEQ ID NO: 55399 - DNA, 22 bp, synthetic construct
  misc_feature 1..22: note = chemically synthesized
  source 1..22: mol_type = other DNA
aaaccaaacatggcattttctt

SEQ ID NO: 55400 - DNA, 22 bp, synthetic construct
  misc_feature 1..22: note = chemically synthesized
  source 1..22: mol_type = other DNA
tctttctttttttagtgctttc

SEQ ID NO: 55401 - DNA, 22 bp, synthetic construct
  misc_feature 1..22: note = chemically synthesized
  source 1..22: mol_type = other DNA
ctttctttttttagtgctttct

SEQ ID NO: 55402 - DNA, 22 bp, synthetic construct
  misc_feature 1..22: note = chemically synthesized
  source 1..22: mol_type = other DNA
tttctttttttagtgctttctg

SEQ ID NO: 55403 - DNA, 22 bp, synthetic construct
  misc_feature 1..22: note = chemically synthesized
  source 1..22: mol_type = other DNA
tctttttttagtgctttctgtg

SEQ ID NO: 55404 - DNA, 22 bp, synthetic construct
  misc_feature 1..22: note = chemically synthesized
  source 1..22: mol_type = other DNA
ctttttttagtgctttctgtga

SEQ ID NO: 55405 - DNA, 22 bp, synthetic construct
  misc_feature 1..22: note = chemically synthesized
  source 1..22: mol_type = other DNA
tttttttagtgctttctgtgat

SEQ ID NO: 55406 - DNA, 22 bp, synthetic construct
  misc_feature 1..22: note = chemically synthesized
  source 1..22: mol_type = other DNA
tttttagtgctttctgtgatag

SEQ ID NO: 55407 - DNA, 22 bp, synthetic construct
  misc_feature 1..22: note = chemically synthesized
  source 1..22: mol_type = other DNA
ttttagtgctttctgtgatagc

SEQ ID NO: 55408 - DNA, 22 bp, synthetic construct
  misc_feature 1..22: note = chemically synthesized
  source 1..22: mol_type = other DNA
tttagtgctttctgtgatagca

SEQ ID NO: 55409 - DNA, 22 bp, synthetic construct
  misc_feature 1..22: note = chemically synthesized
  source 1..22: mol_type = other DNA
ttagtgctttctgtgatagcac

SEQ ID NO: 55410 - DNA, 22 bp, synthetic construct
  misc_feature 1..22: note = chemically synthesized
  source 1..22: mol_type = other DNA
tagtgctttctgtgatagcact

SEQ ID NO: 55411 - DNA, 22 bp, synthetic construct
  misc_feature 1..22: note = chemically synthesized
  source 1..22: mol_type = other DNA
agtgctttctgtgatagcactc

SEQ ID NO: 55412 - DNA, 22 bp, synthetic construct
  misc_feature 1..22: note = chemically synthesized
  source 1..22: mol_type = other DNA
gtgctttctgtgatagcactca

SEQ ID NO: 55413 - DNA, 22 bp, synthetic construct
  misc_feature 1..22: note = chemically synthesized
  source 1..22: mol_type = other DNA
tctgtgatagcactcagatact

SEQ ID NO: 55414 - DNA, 22 bp, synthetic construct
  misc_feature 1..22: note = chemically synthesized
  source 1..22: mol_type = other DNA
ctgtgatagcactcagatactt

SEQ ID NO: 55415 - DNA, 22 bp, synthetic construct
  misc_feature 1..22: note = chemically synthesized
  source 1..22: mol_type = other DNA
tgtgatagcactcagatacttt

SEQ ID NO: 55416 - DNA, 22 bp, synthetic construct
  misc_feature 1..22: note = chemically synthesized
  source 1..22: mol_type = other DNA
tgatagcactcagatactttcc

SEQ ID NO: 55417 - DNA, 22 bp, synthetic construct
  misc_feature 1..22: note = chemically synthesized
  source 1..22: mol_type = other DNA
agatactttccctttagtgaaa

SEQ ID NO: 55418 - DNA, 22 bp, synthetic construct
  misc_feature 1..22: note = chemically synthesized
  source 1..22: mol_type = other DNA
tccctttagtgaaatgggaaat

SEQ ID NO: 55419 - DNA, 22 bp, synthetic construct
  misc_feature 1..22: note = chemically synthesized
  source 1..22: mol_type = other DNA
ccctttagtgaaatgggaaatc

SEQ ID NO: 55420 - DNA, 22 bp, synthetic construct
  misc_feature 1..22: note = chemically synthesized
  source 1..22: mol_type = other DNA
cctttagtgaaatgggaaatct

SEQ ID NO: 55421 - DNA, 22 bp, synthetic construct
  misc_feature 1..22: note = chemically synthesized
  source 1..22: mol_type = other DNA
tagtgaaatgggaaatctgctg

SEQ ID NO: 55422 - DNA, 22 bp, synthetic construct
  misc_feature 1..22: note = chemically synthesized
  source 1..22: mol_type = other DNA
agtgaaatgggaaatctgctgc

SEQ ID NO: 55423 - DNA, 22 bp, synthetic construct
  misc_feature 1..22: note = chemically synthesized
  source 1..22: mol_type = other DNA
gtgaaatgggaaatctgctgct

SEQ ID NO: 55424 - DNA, 22 bp, synthetic construct
  misc_feature 1..22: note = chemically synthesized
  source 1..22: mol_type = other DNA
ctgctagggaagctgcatttgt

SEQ ID NO: 55425 - DNA, 22 bp, synthetic construct
  misc_feature 1..22: note = chemically synthesized
  source 1..22: mol_type = other DNA
ctagggaagctgcatttgtgga

SEQ ID NO: 55426 - DNA, 22 bp, synthetic construct
  misc_feature 1..22: note = chemically synthesized
  source 1..22: mol_type = other DNA
gggaagctgcatttgtggagtg

SEQ ID NO: 55427 - DNA, 22 bp, synthetic construct
  misc_feature 1..22: note = chemically synthesized
  source 1..22: mol_type = other DNA
catttgtggagtgtatttcttg

SEQ ID NO: 55428 - DNA, 22 bp, synthetic construct
  misc_feature 1..22: note = chemically synthesized
  source 1..22: mol_type = other DNA
gtggagtgtatttcttgaatcc

SEQ ID NO: 55429 - DNA, 22 bp, synthetic construct
  misc_feature 1..22: note = chemically synthesized
  source 1..22: mol_type = other DNA
tggagtgtatttcttgaatcca

SEQ ID NO: 55430 - DNA, 22 bp, synthetic construct
  misc_feature 1..22: note = chemically synthesized
  source 1..22: mol_type = other DNA
cttgaatccaccacatttacct

SEQ ID NO: 55431 - DNA, 22 bp, synthetic construct
  misc_feature 1..22: note = chemically synthesized
  source 1..22: mol_type = other DNA
ttgaatccaccacatttacctt

SEQ ID NO: 55432 - DNA, 22 bp, synthetic construct
  misc_feature 1..22: note = chemically synthesized
  source 1..22: mol_type = other DNA
gaatccaccacatttaccttat

SEQ ID NO: 55433 - DNA, 22 bp, synthetic construct
  misc_feature 1..22: note = chemically synthesized
  source 1..22: mol_type = other DNA
aatccaccacatttaccttatg

SEQ ID NO: 55434 - DNA, 22 bp, synthetic construct
  misc_feature 1..22: note = chemically synthesized
  source 1..22: mol_type = other DNA
accttatgtgacatgtaggtga

SEQ ID NO: 55435 - DNA, 22 bp, synthetic construct
  misc_feature 1..22: note = chemically synthesized
  source 1..22: mol_type = other DNA
ccttatgtgacatgtaggtgaa

SEQ ID NO: 55436 - DNA, 22 bp, synthetic construct
  misc_feature 1..22: note = chemically synthesized
  source 1..22: mol_type = other DNA
atgtgacatgtaggtgaagatt

SEQ ID NO: 55437 - DNA, 22 bp, synthetic construct
  misc_feature 1..22: note = chemically synthesized
  source 1..22: mol_type = other DNA
tgtgacatgtaggtgaagattt

SEQ ID NO: 55438 - DNA, 22 bp, synthetic construct
  misc_feature 1..22: note = chemically synthesized
  source 1..22: mol_type = other DNA
tatctcccctaccccccagcag

SEQ ID NO: 55439 - DNA, 22 bp, synthetic construct
  misc_feature 1..22: note = chemically synthesized
  source 1..22: mol_type = other DNA
atctcccctaccccccagcagg

SEQ ID NO: 55440 - DNA, 22 bp, synthetic construct
  misc_feature 1..22: note = chemically synthesized
  source 1..22: mol_type = other DNA
tctcccctaccccccagcagga

SEQ ID NO: 55441 - DNA, 22 bp, synthetic construct
  misc_feature 1..22: note = chemically synthesized
  source 1..22: mol_type = other DNA
ccctaccccccagcaggatgtg

SEQ ID NO: 55442 - DNA, 22 bp, synthetic construct
  misc_feature 1..22: note = chemically synthesized
  source 1..22: mol_type = other DNA
ccccccagcaggatgtgggaat

SEQ ID NO: 55443 - DNA, 22 bp, synthetic construct
  misc_feature 1..22: note = chemically synthesized
  source 1..22: mol_type = other DNA
ccatgtgttgtcttgtgactgg

SEQ ID NO: 55444 - DNA, 22 bp, synthetic construct
  misc_feature 1..22: note = chemically synthesized
  source 1..22: mol_type = other DNA
catgtgttgtcttgtgactgga

SEQ ID NO: 55445 - DNA, 22 bp, synthetic construct
  misc_feature 1..22: note = chemically synthesized
  source 1..22: mol_type = other DNA
tcttgtgactggaaggaaaatg

SEQ ID NO: 55446 - DNA, 22 bp, synthetic construct
  misc_feature 1..22: note = chemically synthesized
  source 1..22: mol_type = other DNA
gtgactggaaggaaaatgaaca

SEQ ID NO: 55447 - DNA, 22 bp, synthetic construct
  misc_feature 1..22: note = chemically synthesized
  source 1..22: mol_type = other DNA
tgactggaaggaaaatgaacag

SEQ ID NO: 55448 - DNA, 22 bp, synthetic construct
  misc_feature 1..22: note = chemically synthesized
  source 1..22: mol_type = other DNA
gaaggaaaatgaacagaagtgt

SEQ ID NO: 55449 - DNA, 22 bp, synthetic construct
  misc_feature 1..22: note = chemically synthesized
  source 1..22: mol_type = other DNA
atgaagcaagagcaggcggaag

SEQ ID NO: 55450 - DNA, 22 bp, synthetic construct
  misc_feature 1..22: note = chemically synthesized
  source 1..22: mol_type = other DNA
gtcgtcttcggagatccaaagc

SEQ ID NO: 55451 - DNA, 22 bp, synthetic construct
  misc_feature 1..22: note = chemically synthesized
  source 1..22: mol_type = other DNA
tcgtcttcggagatccaaagcc

SEQ ID NO: 55452 - DNA, 22 bp, synthetic construct
  misc_feature 1..22: note = chemically synthesized
  source 1..22: mol_type = other DNA
cggagatccaaagccttgctaa

SEQ ID NO: 55453 - DNA, 22 bp, synthetic construct
  misc_feature 1..22: note = chemically synthesized
  source 1..22: mol_type = other DNA
ggagatccaaagccttgctaaa

SEQ ID NO: 55454 - DNA, 22 bp, synthetic construct
  misc_feature 1..22: note = chemically synthesized
  source 1..22: mol_type = other DNA
gctaaatcaccaaatatggagt

SEQ ID NO: 55455 - DNA, 22 bp, synthetic construct
  misc_feature 1..22: note = chemically synthesized
  source 1..22: mol_type = other DNA
ctaaatcaccaaatatggagta

SEQ ID NO: 55456 - DNA, 22 bp, synthetic construct
  misc_feature 1..22: note = chemically synthesized
  source 1..22: mol_type = other DNA
aatcaccaaatatggagtaaca

SEQ ID NO: 55457 - DNA, 22 bp, synthetic construct
  misc_feature 1..22: note = chemically synthesized
  source 1..22: mol_type = other DNA
gcgtgatgtaacatcgtattta

SEQ ID NO: 55458 - DNA, 22 bp, synthetic construct
  misc_feature 1..22: note = chemically synthesized
  source 1..22: mol_type = other DNA
cgtgatgtaacatcgtatttac

SEQ ID NO: 55459 - DNA, 22 bp, synthetic construct
  misc_feature 1..22: note = chemically synthesized
  source 1..22: mol_type = other DNA
acatatcgagctgctcgtttaa

SEQ ID NO: 55460 - DNA, 22 bp, synthetic construct
  misc_feature 1..22: note = chemically synthesized
  source 1..22: mol_type = other DNA
catatcgagctgctcgtttaaa

SEQ ID NO: 55461 - DNA, 22 bp, synthetic construct
  misc_feature 1..22: note = chemically synthesized
  source 1..22: mol_type = other DNA
ctcgtttaaaagacaaaacaca

SEQ ID NO: 55462 - DNA, 22 bp, synthetic construct
  misc_feature 1..22: note = chemically synthesized
  source 1..22: mol_type = other DNA
gtttaaaagacaaaacacagtg

SEQ ID NO: 55463 - DNA, 22 bp, synthetic construct
  misc_feature 1..22: note = chemically synthesized
  source 1..22: mol_type = other DNA
aaaagacaaaacacagtgtctg

SEQ ID NO: 55464 - DNA, 22 bp, synthetic construct
  misc_feature 1..22: note = chemically synthesized
  source 1..22: mol_type = other DNA
aaagacaaaacacagtgtctgt

SEQ ID NO: 55465 - DNA, 22 bp, synthetic construct
  misc_feature 1..22: note = chemically synthesized
  source 1..22: mol_type = other DNA
tcaagcaagaattaaaaccaca

SEQ ID NO: 55466 - DNA, 22 bp, synthetic construct
  misc_feature 1..22: note = chemically synthesized
  source 1..22: mol_type = other DNA
aaaccacacttcttactgaggt

SEQ ID NO: 55467 - DNA, 22 bp, synthetic construct
  misc_feature 1..22: note = chemically synthesized
  source 1..22: mol_type = other DNA
cttactgaggtcccaaataggt

SEQ ID NO: 55468 - DNA, 22 bp, synthetic construct
  misc_feature 1..22: note = chemically synthesized
  source 1..22: mol_type = other DNA
ttactgaggtcccaaataggtt

SEQ ID NO: 55469 - DNA, 22 bp, synthetic construct
  misc_feature 1..22: note = chemically synthesized
  source 1..22: mol_type = other DNA
actgaggtcccaaataggttat

SEQ ID NO: 55470 - DNA, 22 bp, synthetic construct
  misc_feature 1..22: note = chemically synthesized
  source 1..22: mol_type = other DNA
ctgaggtcccaaataggttatt

SEQ ID NO: 55471 - DNA, 22 bp, synthetic construct
  misc_feature 1..22: note = chemically synthesized
  source 1..22: mol_type = other DNA
aggtcccaaataggttattcag

SEQ ID NO: 55472 - DNA, 22 bp, synthetic construct
  misc_feature 1..22: note = chemically synthesized
  source 1..22: mol_type = other DNA
ttcagtcttagattaaccagct

SEQ ID NO: 55473 - DNA, 22 bp, synthetic construct
  misc_feature 1..22: note = chemically synthesized
  source 1..22: mol_type = other DNA
agtcttagattaaccagctcaa

SEQ ID NO: 55474 - DNA, 22 bp, synthetic construct
  misc_feature 1..22: note = chemically synthesized
  source 1..22: mol_type = other DNA
agattaaccagctcaaaaattc

SEQ ID NO: 55475 - DNA, 22 bp, synthetic construct
  misc_feature 1..22: note = chemically synthesized
  source 1..22: mol_type = other DNA
gattaaccagctcaaaaattct

SEQ ID NO: 55476 - DNA, 22 bp, synthetic construct
  misc_feature 1..22: note = chemically synthesized
  source 1..22: mol_type = other DNA
accagctcaaaaattctgtgcc

SEQ ID NO: 55477 - DNA, 22 bp, synthetic construct
  misc_feature 1..22: note = chemically synthesized
  source 1..22: mol_type = other DNA
aaaaattctgtgcctctgtatt

SEQ ID NO: 55478 - DNA, 22 bp, synthetic construct
  misc_feature 1..22: note = chemically synthesized
  source 1..22: mol_type = other DNA
tgtgcctctgtatttagaggag

SEQ ID NO: 55479 - DNA, 22 bp, synthetic construct
  misc_feature 1..22: note = chemically synthesized
  source 1..22: mol_type = other DNA
tgcctctgtatttagaggagga

SEQ ID NO: 55480 - DNA, 22 bp, synthetic construct
  misc_feature 1..22: note = chemically synthesized
  source 1..22: mol_type = other DNA
tgtatttagaggaggaatctaa

SEQ ID NO: 55481 - DNA, 22 bp, synthetic construct
  misc_feature 1..22: note = chemically synthesized
  source 1..22: mol_type = other DNA
tatttagaggaggaatctaaat

SEQ ID NO: 55482 - DNA, 22 bp, synthetic construct
  misc_feature 1..22: note = chemically synthesized
  source 1..22: mol_type = other DNA
agaggaggaatctaaatgctgg

SEQ ID NO: 55483 - DNA, 22 bp, synthetic construct
  misc_feature 1..22: note = chemically synthesized
  source 1..22: mol_type = other DNA
gaggaggaatctaaatgctggg

SEQ ID NO: 55484 - DNA, 22 bp, synthetic construct
  misc_feature 1..22: note = chemically synthesized
  source 1..22: mol_type = other DNA
aatgctggggggaaggccttac

SEQ ID NO: 55485 - DNA, 22 bp, synthetic construct
  misc_feature 1..22: note = chemically synthesized
  source 1..22: mol_type = other DNA
gggggaaggccttacatatagt

SEQ ID NO: 55486 - DNA, 22 bp, synthetic construct
  misc_feature 1..22: note = chemically synthesized
  source 1..22: mol_type = other DNA
acatatagttaagacttttact

SEQ ID NO: 55487 - DNA, 22 bp, synthetic construct
  misc_feature 1..22: note = chemically synthesized
  source 1..22: mol_type = other DNA
catatagttaagacttttactg

SEQ ID NO: 55488 - DNA, 22 bp, synthetic construct
  misc_feature 1..22: note = chemically synthesized
  source 1..22: mol_type = other DNA
agacttttactgctatagttgt

SEQ ID NO: 55489 - DNA, 22 bp, synthetic construct
  misc_feature 1..22: note = chemically synthesized
  source 1..22: mol_type = other DNA
ttactgctatagttgtgaatct

SEQ ID NO: 55490 - DNA, 22 bp, synthetic construct
  misc_feature 1..22: note = chemically synthesized
  source 1..22: mol_type = other DNA
tactgctatagttgtgaatcta

SEQ ID NO: 55491 - DNA, 22 bp, synthetic construct
  misc_feature 1..22: note = chemically synthesized
  source 1..22: mol_type = other DNA
actgctatagttgtgaatctat

SEQ ID NO: 55492 - DNA, 22 bp, synthetic construct
  misc_feature 1..22: note = chemically synthesized
  source 1..22: mol_type = other DNA
ctgctatagttgtgaatctatg

SEQ ID NO: 55493 - DNA, 22 bp, synthetic construct
  misc_feature 1..22: note = chemically synthesized
  source 1..22: mol_type = other DNA
ctatagttgtgaatctatgtag

SEQ ID NO: 55494 - DNA, 22 bp, synthetic construct
  misc_feature 1..22: note = chemically synthesized
  source 1..22: mol_type = other DNA
tagttgtgaatctatgtaggga

SEQ ID NO: 55495 - DNA, 22 bp, synthetic construct
  misc_feature 1..22: note = chemically synthesized
  source 1..22: mol_type = other DNA
tgaatctatgtagggaaataag

SEQ ID NO: 55496 - DNA, 22 bp, synthetic construct
  misc_feature 1..22: note = chemically synthesized
  source 1..22: mol_type = other DNA
tgtagggaaataagagatattt

SEQ ID NO: 55497 - DNA, 22 bp, synthetic construct
  misc_feature 1..22: note = chemically synthesized
  source 1..22: mol_type = other DNA
gcttgaactccctggttgtcta

SEQ ID NO: 55498 - DNA, 22 bp, synthetic construct
  misc_feature 1..22: note = chemically synthesized
  source 1..22: mol_type = other DNA
cttgaactccctggttgtctaa

SEQ ID NO: 55499 - DNA, 22 bp, synthetic construct
  misc_feature 1..22: note = chemically synthesized
  source 1..22: mol_type = other DNA
gaactccctggttgtctaaagg

SEQ ID NO: 55500 - DNA, 22 bp, synthetic construct
  misc_feature 1..22: note = chemically synthesized
  source 1..22: mol_type = other DNA
aactccctggttgtctaaaggt

SEQ ID NO: 55501 - DNA, 22 bp, synthetic construct
  misc_feature 1..22: note = chemically synthesized
  source 1..22: mol_type = other DNA
cctggttgtctaaaggttctgt

SEQ ID NO: 55502 - DNA, 22 bp, synthetic construct
  misc_feature 1..22: note = chemically synthesized
  source 1..22: mol_type = other DNA
gttgtctaaaggttctgttatt

SEQ ID NO: 55503 - DNA, 22 bp, synthetic construct
  misc_feature 1..22: note = chemically synthesized
  source 1..22: mol_type = other DNA
tctaaaggttctgttattattt

SEQ ID NO: 55504 - DNA, 22 bp, synthetic construct
  misc_feature 1..22: note = chemically synthesized
  source 1..22: mol_type = other DNA
aaggttctgttattattttttt

SEQ ID NO: 55505 - DNA, 22 bp, synthetic construct
  misc_feature 1..22: note = chemically synthesized
  source 1..22: mol_type = other DNA
tgttattatttttttaaagaac

SEQ ID NO: 55506 - DNA, 22 bp, synthetic construct
  misc_feature 1..22: note = chemically synthesized
  source 1..22: mol_type = other DNA
ttattatttttttaaagaacaa

SEQ ID NO: 55507 - DNA, 22 bp, synthetic construct
  misc_feature 1..22: note = chemically synthesized
  source 1..22: mol_type = other DNA
ttatttttttaaagaacaagta

SEQ ID NO: 55508 - DNA, 22 bp, synthetic construct
  misc_feature 1..22: note = chemically synthesized
  source 1..22: mol_type = other DNA
tttttttaaagaacaagtataa

SEQ ID NO: 55509 - DNA, 22 bp, synthetic construct
  misc_feature 1..22: note = chemically synthesized
  source 1..22: mol_type = other DNA
ttttaaagaacaagtataatag

SEQ ID NO: 55510 - DNA, 22 bp, synthetic construct
  misc_feature 1..22: note = chemically synthesized
  source 1..22: mol_type = other DNA
tttaaagaacaagtataatagc

SEQ ID NO: 55511 - DNA, 22 bp, synthetic construct
  misc_feature 1..22: note = chemically synthesized
  source 1..22: mol_type = other DNA
ttaaagaacaagtataatagca

SEQ ID NO: 55512 - DNA, 22 bp, synthetic construct
  misc_feature 1..22: note = chemically synthesized
  source 1..22: mol_type = other DNA
taaagaacaagtataatagcag

SEQ ID NO: 55513 - DNA, 22 bp, synthetic construct
  misc_feature 1..22: note = chemically synthesized
  source 1..22: mol_type = other DNA
aaagaacaagtataatagcaga

SEQ ID NO: 55514 - DNA, 22 bp, synthetic construct
  misc_feature 1..22: note = chemically synthesized
  source 1..22: mol_type = other DNA
aagaacaagtataatagcagag

SEQ ID NO: 55515 - DNA, 22 bp, synthetic construct
  misc_feature 1..22: note = chemically synthesized
  source 1..22: mol_type = other DNA
gagaagccaaaaccaaaagcaa

SEQ ID NO: 55516 - DNA, 22 bp, synthetic construct
  misc_feature 1..22: note = chemically synthesized
  source 1..22: mol_type = other DNA
aaaatatattttatagcgctaa

SEQ ID NO: 55517 - DNA, 22 bp, synthetic construct
  misc_feature 1..22: note = chemically synthesized
  source 1..22: mol_type = other DNA
aaatatattttatagcgctaat

SEQ ID NO: 55518 - DNA, 22 bp, synthetic construct
  misc_feature 1..22: note = chemically synthesized
  source 1..22: mol_type = other DNA
tatagcgctaataatcaatcat

SEQ ID NO: 55519 - DNA, 22 bp, synthetic construct
  misc_feature 1..22: note = chemically synthesized
  source 1..22: mol_type = other DNA
atagcgctaataatcaatcatt

SEQ ID NO: 55520 - DNA, 22 bp, synthetic construct
  misc_feature 1..22: note = chemically synthesized
  source 1..22: mol_type = other DNA
tagcgctaataatcaatcattt

SEQ ID NO: 55521 - DNA, 22 bp, synthetic construct
  misc_feature 1..22: note = chemically synthesized
  source 1..22: mol_type = other DNA
ataatcaatcatttaactgaga

SEQ ID NO: 55522 - DNA, 22 bp, synthetic construct
  misc_feature 1..22: note = chemically synthesized
  source 1..22: mol_type = other DNA
aactgagacgaaaagctctcta

SEQ ID NO: 55523 - DNA, 22 bp, synthetic construct
  misc_feature 1..22: note = chemically synthesized
  source 1..22: mol_type = other DNA
actgagacgaaaagctctctaa

SEQ ID NO: 55524 - DNA, 22 bp, synthetic construct
  misc_feature 1..22: note = chemically synthesized
  source 1..22: mol_type = other DNA
agacgaaaagctctctaagatg

SEQ ID NO: 55525 - DNA, 22 bp, synthetic construct
  misc_feature 1..22: note = chemically synthesized
  source 1..22: mol_type = other DNA
tctaagatgtctaagatattca

SEQ ID NO: 55526 - DNA, 22 bp, synthetic construct
  misc_feature 1..22: note = chemically synthesized
  source 1..22: mol_type = other DNA
taagatgtctaagatattcaat

SEQ ID NO: 55527 - DNA, 22 bp, synthetic construct
  misc_feature 1..22: note = chemically synthesized
  source 1..22: mol_type = other DNA
agatgtctaagatattcaatgg

SEQ ID NO: 55528 - DNA, 22 bp, synthetic construct
  misc_feature 1..22: note = chemically synthesized
  source 1..22: mol_type = other DNA
agatattcaatgggcgcacaac

SEQ ID NO: 55529 - DNA, 22 bp, synthetic construct
  misc_feature 1..22: note = chemically synthesized
  source 1..22: mol_type = other DNA
aatgggcgcacaacaagtgctg

SEQ ID NO: 55530 - DNA, 22 bp, synthetic construct
  misc_feature 1..22: note = chemically synthesized
  source 1..22: mol_type = other DNA
tgacccaggtgaggtaaacctt

SEQ ID NO: 55531 - DNA, 22 bp, synthetic construct
  misc_feature 1..22: note = chemically synthesized
  source 1..22: mol_type = other DNA
tcgtgcatgaataattacaaag

SEQ ID NO: 55532 - DNA, 22 bp, synthetic construct
  misc_feature 1..22: note = chemically synthesized
  source 1..22: mol_type = other DNA
cgtgcatgaataattacaaagt

SEQ ID NO: 55533 - DNA, 22 bp, synthetic construct
  misc_feature 1..22: note = chemically synthesized
  source 1..22: mol_type = other DNA
gtgcatgaataattacaaagtc

SEQ ID NO: 55534 - DNA, 22 bp, synthetic construct
  misc_feature 1..22: note = chemically synthesized
  source 1..22: mol_type = other DNA
caaagtcttgatttctttcatt

SEQ ID NO: 55535 - DNA, 22 bp, synthetic construct
  misc_feature 1..22: note = chemically synthesized
  source 1..22: mol_type = other DNA
gatttctttcattgtgtttaat

SEQ ID NO: 55536 - DNA, 22 bp, synthetic construct
  misc_feature 1..22: note = chemically synthesized
  source 1..22: mol_type = other DNA
atttctttcattgtgtttaatc

SEQ ID NO: 55537 - DNA, 22 bp, synthetic construct
  misc_feature 1..22: note = chemically synthesized
  source 1..22: mol_type = other DNA
ctttcattgtgtttaatcacct

SEQ ID NO: 55538 - DNA, 22 bp, synthetic construct
  misc_feature 1..22: note = chemically synthesized
  source 1..22: mol_type = other DNA
tttcattgtgtttaatcacctg

SEQ ID NO: 55539 - DNA, 22 bp, synthetic construct
  misc_feature 1..22: note = chemically synthesized
  source 1..22: mol_type = other DNA
tcattgtgtttaatcacctgtt

SEQ ID NO: 55540 - DNA, 22 bp, synthetic construct
  misc_feature 1..22: note = chemically synthesized
  source 1..22: mol_type = other DNA
cattgtgtttaatcacctgttc

SEQ ID NO: 55541 - DNA, 22 bp, synthetic construct
  misc_feature 1..22: note = chemically synthesized
  source 1..22: mol_type = other DNA
attgtgtttaatcacctgttcc

SEQ ID NO: 55542 - DNA, 22 bp, synthetic construct
  misc_feature 1..22: note = chemically synthesized
  source 1..22: mol_type = other DNA
tgtttaatcacctgttcccacc

SEQ ID NO: 55543 - DNA, 22 bp, synthetic construct
  misc_feature 1..22: note = chemically synthesized
  source 1..22: mol_type = other DNA
aatcacctgttcccaccctgga

SEQ ID NO: 55544 - DNA, 22 bp, synthetic construct
  misc_feature 1..22: note = chemically synthesized
  source 1..22: mol_type = other DNA
atcacctgttcccaccctggaa

SEQ ID NO: 55545 - DNA, 22 bp, synthetic construct
  misc_feature 1..22: note = chemically synthesized
  source 1..22: mol_type = other DNA
ttcccaccctggaactggctga

SEQ ID NO: 55546 - DNA, 22 bp, synthetic construct
  misc_feature 1..22: note = chemically synthesized
  source 1..22: mol_type = other DNA
ccaccctggaactggctgaaca

SEQ ID NO: 55547 - DNA, 22 bp, synthetic construct
  misc_feature 1..22: note = chemically synthesized
  source 1..22: mol_type = other DNA
gaactggctgaacataaatagt

SEQ ID NO: 55548 - DNA, 22 bp, synthetic construct
  misc_feature 1..22: note = chemically synthesized
  source 1..22: mol_type = other DNA
gctgaacataaatagtgtggtc

SEQ ID NO: 55549 - DNA, 22 bp, synthetic construct
  misc_feature 1..22: note = chemically synthesized
  source 1..22: mol_type = other DNA
aacataaatagtgtggtcacat

SEQ ID NO: 55550 - DNA, 22 bp, synthetic construct
  misc_feature 1..22: note = chemically synthesized
  source 1..22: mol_type = other DNA
aaagtgagatgtcagtaactag

SEQ ID NO: 55551 - DNA, 22 bp, synthetic construct
  misc_feature 1..22: note = chemically synthesized
  source 1..22: mol_type = other DNA
gaatcacgacttctcataattc

SEQ ID NO: 55552 - DNA, 22 bp, synthetic construct
  misc_feature 1..22: note = chemically synthesized
  source 1..22: mol_type = other DNA
ctcataattcacagtaatgaat

SEQ ID NO: 55553 - DNA, 22 bp, synthetic construct
  misc_feature 1..22: note = chemically synthesized
  source 1..22: mol_type = other DNA
tcataattcacagtaatgaatt

SEQ ID NO: 55554 - DNA, 22 bp, synthetic construct
  misc_feature 1..22: note = chemically synthesized
  source 1..22: mol_type = other DNA
ataattcacagtaatgaattaa

SEQ ID NO: 55555 - DNA, 22 bp, synthetic construct
  misc_feature 1..22: note = chemically synthesized
  source 1..22: mol_type = other DNA
acagtaatgaattaagagtttc

SEQ ID NO: 55556 - DNA, 22 bp, synthetic construct
  misc_feature 1..22: note = chemically synthesized
  source 1..22: mol_type = other DNA
agagtttcctatggtgaagtta

SEQ ID NO: 55557 - DNA, 22 bp, synthetic construct
  misc_feature 1..22: note = chemically synthesized
  source 1..22: mol_type = other DNA
cctatggtgaagttaacattct

SEQ ID NO: 55558 - DNA, 22 bp, synthetic construct
  misc_feature 1..22: note = chemically synthesized
  source 1..22: mol_type = other DNA
ctatggtgaagttaacattcta

SEQ ID NO: 55559 - DNA, 22 bp, synthetic construct
  misc_feature 1..22: note = chemically synthesized
  source 1..22: mol_type = other DNA
tggtgaagttaacattctacca

SEQ ID NO: 55560 - DNA, 22 bp, synthetic construct
  misc_feature 1..22: note = chemically synthesized
  source 1..22: mol_type = other DNA
acattctaccattgcacataaa

SEQ ID NO: 55561 - DNA, 22 bp, synthetic construct
  misc_feature 1..22: note = chemically synthesized
  source 1..22: mol_type = other DNA
taccattgcacataaattccga

SEQ ID NO: 55562 - DNA, 22 bp, synthetic construct
  misc_feature 1..22: note = chemically synthesized
  source 1..22: mol_type = other DNA
ccattgcacataaattccgacg

SEQ ID NO: 55563 - DNA, 22 bp, synthetic construct
  misc_feature 1..22: note = chemically synthesized
  source 1..22: mol_type = other DNA
cacataaattccgacgctctgg

SEQ ID NO: 55564 - DNA, 22 bp, synthetic construct
  misc_feature 1..22: note = chemically synthesized
  source 1..22: mol_type = other DNA
cgacgctctggccctcaggtgc

SEQ ID NO: 55565 - DNA, 22 bp, synthetic construct
  misc_feature 1..22: note = chemically synthesized
  source 1..22: mol_type = other DNA
tggccctcaggtgcccctgaag

SEQ ID NO: 55566 - DNA, 22 bp, synthetic construct
  misc_feature 1..22: note = chemically synthesized
  source 1..22: mol_type = other DNA
gccctcaggtgcccctgaagcg

SEQ ID NO: 55567 - DNA, 22 bp, synthetic construct
  misc_feature 1..22: note = chemically synthesized
  source 1..22: mol_type = other DNA
aggtgcccctgaagcgaagttc

SEQ ID NO: 55568 - DNA, 22 bp, synthetic construct
  misc_feature 1..22: note = chemically synthesized
  source 1..22: mol_type = other DNA
aagcgaagttctggaagacggc

SEQ ID NO: 55569 - DNA, 22 bp, synthetic construct
  misc_feature 1..22: note = chemically synthesized
  source 1..22: mol_type = other DNA
tggaagacggctgtgtgtgtac

SEQ ID NO: 55570 - DNA, 22 bp, synthetic construct
  misc_feature 1..22: note = chemically synthesized
  source 1..22: mol_type = other DNA
gaagacggctgtgtgtgtaccc

SEQ ID NO: 55571 - DNA, 22 bp, synthetic construct
  misc_feature 1..22: note = chemically synthesized
  source 1..22: mol_type = other DNA
tgtgtgtacccccagcccattt

SEQ ID NO: 55572 - DNA, 22 bp, synthetic construct
  misc_feature 1..22: note = chemically synthesized
  source 1..22: mol_type = other DNA
ctctaaagcacgtctgcacaat

SEQ ID NO: 55573 - DNA, 22 bp, synthetic construct
  misc_feature 1..22: note = chemically synthesized
  source 1..22: mol_type = other DNA
tctaaagcacgtctgcacaatt

SEQ ID NO: 55574 - DNA, 22 bp, synthetic construct
  misc_feature 1..22: note = chemically synthesized
  source 1..22: mol_type = other DNA
taaagcacgtctgcacaattcc

SEQ ID NO: 55575 - DNA, 22 bp, synthetic construct
  misc_feature 1..22: note = chemically synthesized
  source 1..22: mol_type = other DNA
aagcacgtctgcacaattccaa

SEQ ID NO: 55576 - DNA, 22 bp, synthetic construct
  misc_feature 1..22: note = chemically synthesized
  source 1..22: mol_type = other DNA
cacaattccaagtctgcttttc

SEQ ID NO: 55577 - DNA, 22 bp, synthetic construct
  misc_feature 1..22: note = chemically synthesized
  source 1..22: mol_type = other DNA
caagtctgcttttctttttatg

SEQ ID NO: 55578 - DNA, 22 bp, synthetic construct
  misc_feature 1..22: note = chemically synthesized
  source 1..22: mol_type = other DNA
cttttctttttatgatgaggaa

SEQ ID NO: 55579 - DNA, 22 bp, synthetic construct
  misc_feature 1..22: note = chemically synthesized
  source 1..22: mol_type = other DNA
ttctttttatgatgaggaagga

SEQ ID NO: 55580 - DNA, 22 bp, synthetic construct
  misc_feature 1..22: note = chemically synthesized
  source 1..22: mol_type = other DNA
tctttttatgatgaggaaggaa

SEQ ID NO: 55581 - DNA, 22 bp, synthetic construct
  misc_feature 1..22: note = chemically synthesized
  source 1..22: mol_type = other DNA
ctttttatgatgaggaaggaaa

SEQ ID NO: 55582 - DNA, 22 bp, synthetic construct
  misc_feature 1..22: note = chemically synthesized
  source 1..22: mol_type = other DNA
tttttatgatgaggaaggaaac

SEQ ID NO: 55583 - DNA, 22 bp, synthetic construct
  misc_feature 1..22: note = chemically synthesized
  source 1..22: mol_type = other DNA
tttatgatgaggaaggaaacaa

SEQ ID NO: 55584 - DNA, 22 bp, synthetic construct
  misc_feature 1..22: note = chemically synthesized
  source 1..22: mol_type = other DNA
ttatgatgaggaaggaaacaat

SEQ ID NO: 55585 - DNA, 22 bp, synthetic construct
  misc_feature 1..22: note = chemically synthesized
  source 1..22: mol_type = other DNA
tatgatgaggaaggaaacaata

SEQ ID NO: 55586 - DNA, 22 bp, synthetic construct
  misc_feature 1..22: note = chemically synthesized
  source 1..22: mol_type = other DNA
atgatgaggaaggaaacaataa

SEQ ID NO: 55587 - DNA, 22 bp, synthetic construct
  misc_feature 1..22: note = chemically synthesized
  source 1..22: mol_type = other DNA
tgatgaggaaggaaacaataac

SEQ ID NO: 55588 - DNA, 22 bp, synthetic construct
  misc_feature 1..22: note = chemically synthesized
  source 1..22: mol_type = other DNA
agtagatatttgaattgtgtca

SEQ ID NO: 55589 - DNA, 22 bp, synthetic construct
  misc_feature 1..22: note = chemically synthesized
  source 1..22: mol_type = other DNA
gaattgtgtcacaaaaagaaag

SEQ ID NO: 55590 - DNA, 22 bp, synthetic construct
  misc_feature 1..22: note = chemically synthesized
  source 1..22: mol_type = other DNA
aattgtgtcacaaaaagaaagg

SEQ ID NO: 55591 - DNA, 22 bp, synthetic construct
  misc_feature 1..22: note = chemically synthesized
  source 1..22: mol_type = other DNA
tgtcacaaaaagaaaggagaag

SEQ ID NO: 55592 - DNA, 22 bp, synthetic construct
  misc_feature 1..22: note = chemically synthesized
  source 1..22: mol_type = other DNA
gtattaaggaaagagatatatt

SEQ ID NO: 55593 - DNA, 22 bp, synthetic construct
  misc_feature 1..22: note = chemically synthesized
  source 1..22: mol_type = other DNA
tattaaggaaagagatatattg

SEQ ID NO: 55594 - DNA, 22 bp, synthetic construct
  misc_feature 1..22: note = chemically synthesized
  source 1..22: mol_type = other DNA
aggaaagagatatattgatgaa

SEQ ID NO: 55595 - DNA, 22 bp, synthetic construct
  misc_feature 1..22: note = chemically synthesized
  source 1..22: mol_type = other DNA
atgaatctctagaagaatgtgt

SEQ ID NO: 55596 - DNA, 22 bp, synthetic construct
  misc_feature 1..22: note = chemically synthesized
  source 1..22: mol_type = other DNA
tagaagaatgtgtttggcaacc

SEQ ID NO: 55597 - DNA, 22 bp, synthetic construct
  misc_feature 1..22: note = chemically synthesized
  source 1..22: mol_type = other DNA
gaagaatgtgtttggcaaccac

SEQ ID NO: 55598 - DNA, 22 bp, synthetic construct
  misc_feature 1..22: note = chemically synthesized
  source 1..22: mol_type = other DNA
ggcaaccacataaaaggtagtc

SEQ ID NO: 55599 - DNA, 22 bp, synthetic construct
  misc_feature 1..22: note = chemically synthesized
  source 1..22: mol_type = other DNA
gcaaccacataaaaggtagtca

SEQ ID NO: 55600 - DNA, 22 bp, synthetic construct
  misc_feature 1..22: note = chemically synthesized
  source 1..22: mol_type = other DNA
aagcgtgctgggtaggaaaggc

SEQ ID NO: 55601 - DNA, 22 bp, synthetic construct
  misc_feature 1..22: note = chemically synthesized
  source 1..22: mol_type = other DNA
agcgtgctgggtaggaaaggct

SEQ ID NO: 55602 - DNA, 22 bp, synthetic construct
  misc_feature 1..22: note = chemically synthesized
  source 1..22: mol_type = other DNA
ggtaggaaaggctttattaaag

SEQ ID NO: 55603 - DNA, 22 bp, synthetic construct
  misc_feature 1..22: note = chemically synthesized
  source 1..22: mol_type = other DNA
tattaaagtgatgtaagttgga

SEQ ID NO: 55604 - DNA, 22 bp, synthetic construct
  misc_feature 1..22: note = chemically synthesized
  source 1..22: mol_type = other DNA
attaaagtgatgtaagttggat

SEQ ID NO: 55605 - DNA, 22 bp, synthetic construct
  misc_feature 1..22: note = chemically synthesized
  source 1..22: mol_type = other DNA
ttaaagtgatgtaagttggatt

SEQ ID NO: 55606 - DNA, 22 bp, synthetic construct
  misc_feature 1..22: note = chemically synthesized
  source 1..22: mol_type = other DNA
aagtgatgtaagttggatttga

SEQ ID NO: 55607 - DNA, 22 bp, synthetic construct
  misc_feature 1..22: note = chemically synthesized
  source 1..22: mol_type = other DNA
gatttgagttcactgtgagcct

SEQ ID NO: 55608 - DNA, 22 bp, synthetic construct
  misc_feature 1..22: note = chemically synthesized
  source 1..22: mol_type = other DNA
gagttcactgtgagcctgtact

SEQ ID NO: 55609 - DNA, 22 bp, synthetic construct
  misc_feature 1..22: note = chemically synthesized
  source 1..22: mol_type = other DNA
agttcactgtgagcctgtacta

SEQ ID NO: 55610 - DNA, 22 bp, synthetic construct
  misc_feature 1..22: note = chemically synthesized
  source 1..22: mol_type = other DNA
actgtgagcctgtactatttta

SEQ ID NO: 55611 - DNA, 22 bp, synthetic construct
  misc_feature 1..22: note = chemically synthesized
  source 1..22: mol_type = other DNA
tgagcctgtactattttatagg

SEQ ID NO: 55612 - DNA, 22 bp, synthetic construct
  misc_feature 1..22: note = chemically synthesized
  source 1..22: mol_type = other DNA
tactattttataggcaggaagc

SEQ ID NO: 55613 - DNA, 22 bp, synthetic construct
  misc_feature 1..22: note = chemically synthesized
  source 1..22: mol_type = other DNA
ttttataggcaggaagcaagaa

SEQ ID NO: 55614 - DNA, 22 bp, synthetic construct
  misc_feature 1..22: note = chemically synthesized
  source 1..22: mol_type = other DNA
tataggcaggaagcaagaataa

SEQ ID NO: 55615 - DNA, 22 bp, synthetic construct
  misc_feature 1..22: note = chemically synthesized
  source 1..22: mol_type = other DNA
ataggcaggaagcaagaataaa

SEQ ID NO: 55616 - DNA, 22 bp, synthetic construct
  misc_feature 1..22: note = chemically synthesized
  source 1..22: mol_type = other DNA
taggcaggaagcaagaataaaa

SEQ ID NO: 55617 - DNA, 22 bp, synthetic construct
  misc_feature 1..22: note = chemically synthesized
  source 1..22: mol_type = other DNA
cttcctaagataaataaagctt

SEQ ID NO: 55618 - DNA, 22 bp, synthetic construct
  misc_feature 1..22: note = chemically synthesized
  source 1..22: mol_type = other DNA
ttcctaagataaataaagctta

SEQ ID NO: 55619 - DNA, 22 bp, synthetic construct
  misc_feature 1..22: note = chemically synthesized
  source 1..22: mol_type = other DNA
cctaagataaataaagcttaga

SEQ ID NO: 55620 - DNA, 22 bp, synthetic construct
  misc_feature 1..22: note = chemically synthesized
  source 1..22: mol_type = other DNA
ctaagataaataaagcttagaa

SEQ ID NO: 55621 - DNA, 22 bp, synthetic construct
  misc_feature 1..22: note = chemically synthesized
  source 1..22: mol_type = other DNA
agataaataaagcttagaattc

SEQ ID NO: 55622 - DNA, 22 bp, synthetic construct
  misc_feature 1..22: note = chemically synthesized
  source 1..22: mol_type = other DNA
agaattcgggactttcagatag

SEQ ID NO: 55623 - DNA, 22 bp, synthetic construct
  misc_feature 1..22: note = chemically synthesized
  source 1..22: mol_type = other DNA
gaattcgggactttcagatagg

SEQ ID NO: 55624 - DNA, 22 bp, synthetic construct
  misc_feature 1..22: note = chemically synthesized
  source 1..22: mol_type = other DNA
gggactttcagataggagaata

SEQ ID NO: 55625 - DNA, 22 bp, synthetic construct
  misc_feature 1..22: note = chemically synthesized
  source 1..22: mol_type = other DNA
tcagataggagaataaggcaga

SEQ ID NO: 55626 - DNA, 22 bp, synthetic construct
  misc_feature 1..22: note = chemically synthesized
  source 1..22: mol_type = other DNA
cagataggagaataaggcagag

SEQ ID NO: 55627 - DNA, 22 bp, synthetic construct
  misc_feature 1..22: note = chemically synthesized
  source 1..22: mol_type = other DNA
agataggagaataaggcagagt

SEQ ID NO: 55628 - DNA, 22 bp, synthetic construct
  misc_feature 1..22: note = chemically synthesized
  source 1..22: mol_type = other DNA
tttaaatcttgagtaaaatggt

SEQ ID NO: 55629 - DNA, 22 bp, synthetic construct
  misc_feature 1..22: note = chemically synthesized
  source 1..22: mol_type = other DNA
taaatcttgagtaaaatggtat

SEQ ID NO: 55630 - DNA, 22 bp, synthetic construct
  misc_feature 1..22: note = chemically synthesized
  source 1..22: mol_type = other DNA
aaatcttgagtaaaatggtatg

SEQ ID NO: 55631 - DNA, 22 bp, synthetic construct
  misc_feature 1..22: note = chemically synthesized
  source 1..22: mol_type = other DNA
aatcttgagtaaaatggtatgc

SEQ ID NO: 55632 - DNA, 22 bp, synthetic construct
  misc_feature 1..22: note = chemically synthesized
  source 1..22: mol_type = other DNA
gagtaaaatggtatgcattttc

SEQ ID NO: 55633 - DNA, 22 bp, synthetic construct
  misc_feature 1..22: note = chemically synthesized
  source 1..22: mol_type = other DNA
agtaaaatggtatgcattttca

SEQ ID NO: 55634 - DNA, 22 bp, synthetic construct
  misc_feature 1..22: note = chemically synthesized
  source 1..22: mol_type = other DNA
tcactgtactcaggcctctcca

SEQ ID NO: 55635 - DNA, 22 bp, synthetic construct
  misc_feature 1..22: note = chemically synthesized
  source 1..22: mol_type = other DNA
cactgtactcaggcctctccaa

SEQ ID NO: 55636 - DNA, 22 bp, synthetic construct
  misc_feature 1..22: note = chemically synthesized
  source 1..22: mol_type = other DNA
actgtactcaggcctctccaag

SEQ ID NO: 55637 - DNA, 22 bp, synthetic construct
  misc_feature 1..22: note = chemically synthesized
  source 1..22: mol_type = other DNA
tactcaggcctctccaagctga

SEQ ID NO: 55638 - DNA, 22 bp, synthetic construct
  misc_feature 1..22: note = chemically synthesized
  source 1..22: mol_type = other DNA
aggcctctccaagctgagtttt

SEQ ID NO: 55639 - DNA, 22 bp, synthetic construct
  misc_feature 1..22: note = chemically synthesized
  source 1..22: mol_type = other DNA
tccaagctgagttttttttttt

SEQ ID NO: 55640 - DNA, 22 bp, synthetic construct
  misc_feature 1..22: note = chemically synthesized
  source 1..22: mol_type = other DNA
caagctgagttttttttttttt

SEQ ID NO: 55641 - DNA, 22 bp, synthetic construct
  misc_feature 1..22: note = chemically synthesized
  source 1..22: mol_type = other DNA
agtttttttttttttttttttt

SEQ ID NO: 55642 - DNA, 22 bp, synthetic construct
  misc_feature 1..22: note = chemically synthesized
  source 1..22: mol_type = other DNA
ttttttttttttttttttttta

SEQ ID NO: 55643 - DNA, 22 bp, synthetic construct
  misc_feature 1..22: note = chemically synthesized
  source 1..22: mol_type = other DNA
ttttttttttttttttttttag

SEQ ID NO: 55644 - DNA, 22 bp, synthetic construct
  misc_feature 1..22: note = chemically synthesized
  source 1..22: mol_type = other DNA
tttttttttttttttttttaga

SEQ ID NO: 55645 - DNA, 22 bp, synthetic construct
  misc_feature 1..22: note = chemically synthesized
  source 1..22: mol_type = other DNA
ttttttttttttttttttagac

SEQ ID NO: 55646 - DNA, 22 bp, synthetic construct
  misc_feature 1..22: note = chemically synthesized
  source 1..22: mol_type = other DNA
tttttttttttttttttagaca

SEQ ID NO: 55647 - DNA, 22 bp, synthetic construct
  misc_feature 1..22: note = chemically synthesized
  source 1..22: mol_type = other DNA
ttttttttttttttttagacag

SEQ ID NO: 55648 - DNA, 22 bp, synthetic construct
  misc_feature 1..22: note = chemically synthesized
  source 1..22: mol_type = other DNA
tttttttttttttttagacaga

SEQ ID NO: 55649 - DNA, 22 bp, synthetic construct
  misc_feature 1..22: note = chemically synthesized
  source 1..22: mol_type = other DNA
ttttttttttttttagacagag

SEQ ID NO: 55650 - DNA, 22 bp, synthetic construct
  misc_feature 1..22: note = chemically synthesized
  source 1..22: mol_type = other DNA
tttttttttttttagacagagt

SEQ ID NO: 55651 - DNA, 22 bp, synthetic construct
  misc_feature 1..22: note = chemically synthesized
  source 1..22: mol_type = other DNA
ttttttttttttagacagagtt

SEQ ID NO: 55652 - DNA, 22 bp, synthetic construct
  misc_feature 1..22: note = chemically synthesized
  source 1..22: mol_type = other DNA
tttttttttttagacagagttt

SEQ ID NO: 55653 - DNA, 22 bp, synthetic construct
  misc_feature 1..22: note = chemically synthesized
  source 1..22: mol_type = other DNA
ttttttttttagacagagtttt

SEQ ID NO: 55654 - DNA, 22 bp, synthetic construct
  misc_feature 1..22: note = chemically synthesized
  source 1..22: mol_type = other DNA
tttttttttagacagagttttg

SEQ ID NO: 55655 - DNA, 22 bp, synthetic construct
  misc_feature 1..22: note = chemically synthesized
  source 1..22: mol_type = other DNA
ttttttttagacagagttttgc

SEQ ID NO: 55656 - DNA, 22 bp, synthetic construct
  misc_feature 1..22: note = chemically synthesized
  source 1..22: mol_type = other DNA
tttttttagacagagttttgct

SEQ ID NO: 55657 - DNA, 22 bp, synthetic construct
  misc_feature 1..22: note = chemically synthesized
  source 1..22: mol_type = other DNA
ttttttagacagagttttgctc

SEQ ID NO: 55658 - DNA, 22 bp, synthetic construct
  misc_feature 1..22: note = chemically synthesized
  source 1..22: mol_type = other DNA
tttttagacagagttttgctct

SEQ ID NO: 55659 - DNA, 22 bp, synthetic construct
  misc_feature 1..22: note = chemically synthesized
  source 1..22: mol_type = other DNA
ttttagacagagttttgctctt

SEQ ID NO: 55660 - DNA, 22 bp, synthetic construct
  misc_feature 1..22: note = chemically synthesized
  source 1..22: mol_type = other DNA
tttagacagagttttgctcttg

SEQ ID NO: 55661 - DNA, 22 bp, synthetic construct
  misc_feature 1..22: note = chemically synthesized
  source 1..22: mol_type = other DNA
ttagacagagttttgctcttgt

SEQ ID NO: 55662 - DNA, 22 bp, synthetic construct
  misc_feature 1..22: note = chemically synthesized
  source 1..22: mol_type = other DNA
tagacagagttttgctcttgtt

SEQ ID NO: 55663 - DNA, 22 bp, synthetic construct
  misc_feature 1..22: note = chemically synthesized
  source 1..22: mol_type = other DNA
agacagagttttgctcttgttg

SEQ ID NO: 55664 - DNA, 22 bp, synthetic construct
  misc_feature 1..22: note = chemically synthesized
  source 1..22: mol_type = other DNA
gacagagttttgctcttgttgc

SEQ ID NO: 55665 - DNA, 22 bp, synthetic construct
  misc_feature 1..22: note = chemically synthesized
  source 1..22: mol_type = other DNA
tgctcttgttgcccaggctgga

SEQ ID NO: 55666 - DNA, 22 bp, synthetic construct
  misc_feature 1..22: note = chemically synthesized
  source 1..22: mol_type = other DNA
gctcttgttgcccaggctggag

SEQ ID NO: 55667 - DNA, 22 bp, synthetic construct
  misc_feature 1..22: note = chemically synthesized
  source 1..22: mol_type = other DNA
ctcttgttgcccaggctggagt

SEQ ID NO: 55668 - DNA, 22 bp, synthetic construct
  misc_feature 1..22: note = chemically synthesized
  source 1..22: mol_type = other DNA
ttgttgcccaggctggagtgca

SEQ ID NO: 55669 - DNA, 22 bp, synthetic construct
  misc_feature 1..22: note = chemically synthesized
  source 1..22: mol_type = other DNA
gttgcccaggctggagtgcagt

SEQ ID NO: 55670 - DNA, 22 bp, synthetic construct
  misc_feature 1..22: note = chemically synthesized
  source 1..22: mol_type = other DNA
ttgcccaggctggagtgcagtg

SEQ ID NO: 55671 - DNA, 22 bp, synthetic construct
  misc_feature 1..22: note = chemically synthesized
  source 1..22: mol_type = other DNA
cccaggctggagtgcagtggca

SEQ ID NO: 55672 - DNA, 22 bp, synthetic construct
  misc_feature 1..22: note = chemically synthesized
  source 1..22: mol_type = other DNA
gagtgcagtggcatgattttgg

SEQ ID NO: 55673 - DNA, 22 bp, synthetic construct
  misc_feature 1..22: note = chemically synthesized
  source 1..22: mol_type = other DNA
tggctcactgcaacctctgcct

SEQ ID NO: 55674 - DNA, 22 bp, synthetic construct
  misc_feature 1..22: note = chemically synthesized
  source 1..22: mol_type = other DNA
ggctcactgcaacctctgcctc

SEQ ID NO: 55675 - DNA, 22 bp, synthetic construct
  misc_feature 1..22: note = chemically synthesized
  source 1..22: mol_type = other DNA
gctcactgcaacctctgcctcc

SEQ ID NO: 55676 - DNA, 22 bp, synthetic construct
  misc_feature 1..22: note = chemically synthesized
  source 1..22: mol_type = other DNA
actgcaacctctgcctcctagg

SEQ ID NO: 55677 - DNA, 22 bp, synthetic construct
  misc_feature 1..22: note = chemically synthesized
  source 1..22: mol_type = other DNA
caacctctgcctcctaggttca

SEQ ID NO: 55678 - DNA, 22 bp, synthetic construct
  misc_feature 1..22: note = chemically synthesized
  source 1..22: mol_type = other DNA
tgcctcctaggttcaagcgatt

SEQ ID NO: 55679 - DNA, 22 bp, synthetic construct
  misc_feature 1..22: note = chemically synthesized
  source 1..22: mol_type = other DNA
cctcctaggttcaagcgattct

SEQ ID NO: 55680 - DNA, 22 bp, synthetic construct
  misc_feature 1..22: note = chemically synthesized
  source 1..22: mol_type = other DNA
ctaggttcaagcgattctcctg

SEQ ID NO: 55681 - DNA, 22 bp, synthetic construct
  misc_feature 1..22: note = chemically synthesized
  source 1..22: mol_type = other DNA
ggttcaagcgattctcctgcct

SEQ ID NO: 55682 - DNA, 22 bp, synthetic construct
  misc_feature 1..22: note = chemically synthesized
  source 1..22: mol_type = other DNA
aagcgattctcctgcctcagcc

SEQ ID NO: 55683 - DNA, 22 bp, synthetic construct
  misc_feature 1..22: note = chemically synthesized
  source 1..22: mol_type = other DNA
tcctgcctcagcctcccaagta

SEQ ID NO: 55684 - DNA, 22 bp, synthetic construct
  misc_feature 1..22: note = chemically synthesized
  source 1..22: mol_type = other DNA
ctgcctcagcctcccaagtagc

SEQ ID NO: 55685 - DNA, 22 bp, synthetic construct
  misc_feature 1..22: note = chemically synthesized
  source 1..22: mol_type = other DNA
cctcagcctcccaagtagctgg

SEQ ID NO: 55686 - DNA, 22 bp, synthetic construct
  misc_feature 1..22: note = chemically synthesized
  source 1..22: mol_type = other DNA
agcctcccaagtagctgggatt

SEQ ID NO: 55687 - DNA, 22 bp, synthetic construct
  misc_feature 1..22: note = chemically synthesized
  source 1..22: mol_type = other DNA
ccaagtagctgggattacaggc

SEQ ID NO: 55688 - DNA, 22 bp, synthetic construct
  misc_feature 1..22: note = chemically synthesized
  source 1..22: mol_type = other DNA
ggattacaggcgtgtgccacta

SEQ ID NO: 55689 - DNA, 22 bp, synthetic construct
  misc_feature 1..22: note = chemically synthesized
  source 1..22: mol_type = other DNA
caggcgtgtgccactacgccca

SEQ ID NO: 55690 - DNA, 22 bp, synthetic construct
  misc_feature 1..22: note = chemically synthesized
  source 1..22: mol_type = other DNA
cgcccagctagttttttgtatt

SEQ ID NO: 55691 - DNA, 22 bp, synthetic construct
  misc_feature 1..22: note = chemically synthesized
  source 1..22: mol_type = other DNA
gttttttgtattttcagtagag

SEQ ID NO: 55692 - DNA, 22 bp, synthetic construct
  misc_feature 1..22: note = chemically synthesized
  source 1..22: mol_type = other DNA
tttgtattttcagtagaggcag

SEQ ID NO: 55693 - DNA, 22 bp, synthetic construct
  misc_feature 1..22: note = chemically synthesized
  source 1..22: mol_type = other DNA
ttgtattttcagtagaggcagg

SEQ ID NO: 55694 - DNA, 22 bp, synthetic construct
  misc_feature 1..22: note = chemically synthesized
  source 1..22: mol_type = other DNA
tgtattttcagtagaggcaggg

SEQ ID NO: 55695 - DNA, 22 bp, synthetic construct
  misc_feature 1..22: note = chemically synthesized
  source 1..22: mol_type = other DNA
gtattttcagtagaggcagggt

SEQ ID NO: 55696 - DNA, 22 bp, synthetic construct
  misc_feature 1..22: note = chemically synthesized
  source 1..22: mol_type = other DNA
tattttcagtagaggcagggtt

SEQ ID NO: 55697 - DNA, 22 bp, synthetic construct
  misc_feature 1..22: note = chemically synthesized
  source 1..22: mol_type = other DNA
tcagtagaggcagggtttcacc

SEQ ID NO: 55698 - DNA, 22 bp, synthetic construct
  misc_feature 1..22: note = chemically synthesized
  source 1..22: mol_type = other DNA
cagtagaggcagggtttcacca

SEQ ID NO: 55699 - DNA, 22 bp, synthetic construct
  misc_feature 1..22: note = chemically synthesized
  source 1..22: mol_type = other DNA
agtagaggcagggtttcaccat

SEQ ID NO: 55700 - DNA, 22 bp, synthetic construct
  misc_feature 1..22: note = chemically synthesized
  source 1..22: mol_type = other DNA
caccatgttggccaggctggtc

SEQ ID NO: 55701 - DNA, 22 bp, synthetic construct
  misc_feature 1..22: note = chemically synthesized
  source 1..22: mol_type = other DNA
accatgttggccaggctggtct

SEQ ID NO: 55702 - DNA, 22 bp, synthetic construct
  misc_feature 1..22: note = chemically synthesized
  source 1..22: mol_type = other DNA
gccaggctggtcttgaactcct

SEQ ID NO: 55703 - DNA, 22 bp, synthetic construct
  misc_feature 1..22: note = chemically synthesized
  source 1..22: mol_type = other DNA
gtcttgaactcctgacctcagg

SEQ ID NO: 55704 - DNA, 22 bp, synthetic construct
  misc_feature 1..22: note = chemically synthesized
  source 1..22: mol_type = other DNA
gaactcctgacctcaggtgatc

SEQ ID NO: 55705 - DNA, 22 bp, synthetic construct
  misc_feature 1..22: note = chemically synthesized
  source 1..22: mol_type = other DNA
aactcctgacctcaggtgatcc

SEQ ID NO: 55706 - DNA, 22 bp, synthetic construct
  misc_feature 1..22: note = chemically synthesized
  source 1..22: mol_type = other DNA
ctgacctcaggtgatccacctg

SEQ ID NO: 55707 - DNA, 22 bp, synthetic construct
  misc_feature 1..22: note = chemically synthesized
  source 1..22: mol_type = other DNA
acctcaggtgatccacctggct

SEQ ID NO: 55708 - DNA, 22 bp, synthetic construct
  misc_feature 1..22: note = chemically synthesized
  source 1..22: mol_type = other DNA
aggtgatccacctggcttggcc

SEQ ID NO: 55709 - DNA, 22 bp, synthetic construct
  misc_feature 1..22: note = chemically synthesized
  source 1..22: mol_type = other DNA
gcttggcctcccaaagtgctgg

SEQ ID NO: 55710 - DNA, 22 bp, synthetic construct
  misc_feature 1..22: note = chemically synthesized
  source 1..22: mol_type = other DNA
ggcctcccaaagtgctgggatt

SEQ ID NO: 55711 - DNA, 22 bp, synthetic construct
  misc_feature 1..22: note = chemically synthesized
  source 1..22: mol_type = other DNA
gcctcccaaagtgctgggatta

SEQ ID NO: 55712 - DNA, 22 bp, synthetic construct
  misc_feature 1..22: note = chemically synthesized
  source 1..22: mol_type = other DNA
ccaaagtgctgggattacaggc

SEQ ID NO: 55713 - DNA, 22 bp, synthetic construct
  misc_feature 1..22: note = chemically synthesized
  source 1..22: mol_type = other DNA
ggattacaggcttgagcgaccg

SEQ ID NO: 55714 - DNA, 22 bp, synthetic construct
  misc_feature 1..22: note = chemically synthesized
  source 1..22: mol_type = other DNA
caggcttgagcgaccgcacctg

SEQ ID NO: 55715 - DNA, 22 bp, synthetic construct
  misc_feature 1..22: note = chemically synthesized
  source 1..22: mol_type = other DNA
gagcgaccgcacctggcccaaa

SEQ ID NO: 55716 - DNA, 22 bp, synthetic construct
  misc_feature 1..22: note = chemically synthesized
  source 1..22: mol_type = other DNA
agcgaccgcacctggcccaaac

SEQ ID NO: 55717 - DNA, 22 bp, synthetic construct
  misc_feature 1..22: note = chemically synthesized
  source 1..22: mol_type = other DNA
gcccaaactgagtattttttag

SEQ ID NO: 55718 - DNA, 22 bp, synthetic construct
  misc_feature 1..22: note = chemically synthesized
  source 1..22: mol_type = other DNA
agtattttttagaggattcttt

SEQ ID NO: 55719 - DNA, 22 bp, synthetic construct
  misc_feature 1..22: note = chemically synthesized
  source 1..22: mol_type = other DNA
tttagaggattctttttacctg

SEQ ID NO: 55720 - DNA, 22 bp, synthetic construct
  misc_feature 1..22: note = chemically synthesized
  source 1..22: mol_type = other DNA
ttagaggattctttttacctgg

SEQ ID NO: 55721 - DNA, 22 bp, synthetic construct
  misc_feature 1..22: note = chemically synthesized
  source 1..22: mol_type = other DNA
tagaggattctttttacctggt

SEQ ID NO: 55722 - DNA, 22 bp, synthetic construct
  misc_feature 1..22: note = chemically synthesized
  source 1..22: mol_type = other DNA
agaggattctttttacctggtg

SEQ ID NO: 55723 - DNA, 22 bp, synthetic construct
  misc_feature 1..22: note = chemically synthesized
  source 1..22: mol_type = other DNA
gaggattctttttacctggtga

SEQ ID NO: 55724 - DNA, 22 bp, synthetic construct
  misc_feature 1..22: note = chemically synthesized
  source 1..22: mol_type = other DNA
tttttacctggtgaatagatgg

SEQ ID NO: 55725 - DNA, 22 bp, synthetic construct
  misc_feature 1..22: note = chemically synthesized
  source 1..22: mol_type = other DNA
tttacctggtgaatagatgggt

SEQ ID NO: 55726 - DNA, 22 bp, synthetic construct
  misc_feature 1..22: note = chemically synthesized
  source 1..22: mol_type = other DNA
ttacctggtgaatagatgggta

SEQ ID NO: 55727 - DNA, 22 bp, synthetic construct
  misc_feature 1..22: note = chemically synthesized
  source 1..22: mol_type = other DNA
tacctggtgaatagatgggtat

SEQ ID NO: 55728 - DNA, 22 bp, synthetic construct
  misc_feature 1..22: note = chemically synthesized
  source 1..22: mol_type = other DNA
acctggtgaatagatgggtatg

SEQ ID NO: 55729 - DNA, 22 bp, synthetic construct
  misc_feature 1..22: note = chemically synthesized
  source 1..22: mol_type = other DNA
cctggtgaatagatgggtatgt

SEQ ID NO: 55730 - DNA, 22 bp, synthetic construct
  misc_feature 1..22: note = chemically synthesized
  source 1..22: mol_type = other DNA
gtgaatagatgggtatgtgctc

SEQ ID NO: 55731 - DNA, 22 bp, synthetic construct
  misc_feature 1..22: note = chemically synthesized
  source 1..22: mol_type = other DNA
ccccacttcatccacgtacaca

SEQ ID NO: 55732 - DNA, 22 bp, synthetic construct
  misc_feature 1..22: note = chemically synthesized
  source 1..22: mol_type = other DNA
catccacgtacacatatgagct

SEQ ID NO: 55733 - DNA, 22 bp, synthetic construct
  misc_feature 1..22: note = chemically synthesized
  source 1..22: mol_type = other DNA
atccacgtacacatatgagctg

SEQ ID NO: 55734 - DNA, 22 bp, synthetic construct
  misc_feature 1..22: note = chemically synthesized
  source 1..22: mol_type = other DNA
tacacatagatgttaatcaggt

SEQ ID NO: 55735 - DNA, 22 bp, synthetic construct
  misc_feature 1..22: note = chemically synthesized
  source 1..22: mol_type = other DNA
atcaggttgcttttttcatttt

SEQ ID NO: 55736 - DNA, 22 bp, synthetic construct
  misc_feature 1..22: note = chemically synthesized
  source 1..22: mol_type = other DNA
cttttttcattttatttaaata

SEQ ID NO: 55737 - DNA, 22 bp, synthetic construct
  misc_feature 1..22: note = chemically synthesized
  source 1..22: mol_type = other DNA
ttttcattttatttaaatattc

SEQ ID NO: 55738 - DNA, 22 bp, synthetic construct
  misc_feature 1..22: note = chemically synthesized
  source 1..22: mol_type = other DNA
tttcattttatttaaatattca

SEQ ID NO: 55739 - DNA, 22 bp, synthetic construct
  misc_feature 1..22: note = chemically synthesized
  source 1..22: mol_type = other DNA
ttcattttatttaaatattcaa

SEQ ID NO: 55740 - DNA, 22 bp, synthetic construct
  misc_feature 1..22: note = chemically synthesized
  source 1..22: mol_type = other DNA
tcattttatttaaatattcaaa

SEQ ID NO: 55741 - DNA, 22 bp, synthetic construct
  misc_feature 1..22: note = chemically synthesized
  source 1..22: mol_type = other DNA
cattttatttaaatattcaaaa

SEQ ID NO: 55742 - DNA, 22 bp, synthetic construct
  misc_feature 1..22: note = chemically synthesized
  source 1..22: mol_type = other DNA
attttatttaaatattcaaaat

SEQ ID NO: 55743 - DNA, 22 bp, synthetic construct
  misc_feature 1..22: note = chemically synthesized
  source 1..22: mol_type = other DNA
tatttaaatattcaaaatattg

SEQ ID NO: 55744 - DNA, 22 bp, synthetic construct
  misc_feature 1..22: note = chemically synthesized
  source 1..22: mol_type = other DNA
atttaaatattcaaaatattgt

SEQ ID NO: 55745 - DNA, 22 bp, synthetic construct
  misc_feature 1..22: note = chemically synthesized
  source 1..22: mol_type = other DNA
tttaaatattcaaaatattgtg

SEQ ID NO: 55746 - DNA, 22 bp, synthetic construct
  misc_feature 1..22: note = chemically synthesized
  source 1..22: mol_type = other DNA
aaatattcaaaatattgtgtga

SEQ ID NO: 55747 - DNA, 22 bp, synthetic construct
  misc_feature 1..22: note = chemically synthesized
  source 1..22: mol_type = other DNA
aatattcaaaatattgtgtgat

SEQ ID NO: 55748 - DNA, 22 bp, synthetic construct
  misc_feature 1..22: note = chemically synthesized
  source 1..22: mol_type = other DNA
aaaatattgtgtgattgtgatc

SEQ ID NO: 55749 - DNA, 22 bp, synthetic construct
  misc_feature 1..22: note = chemically synthesized
  source 1..22: mol_type = other DNA
tgtgattgtgatccattgagat

SEQ ID NO: 55750 - DNA, 22 bp, synthetic construct
  misc_feature 1..22: note = chemically synthesized
  source 1..22: mol_type = other DNA
tgatccattgagatcattgaag

SEQ ID NO: 55751 - DNA, 22 bp, synthetic construct
  misc_feature 1..22: note = chemically synthesized
  source 1..22: mol_type = other DNA
agatcattgaagtagtattaat

SEQ ID NO: 55752 - DNA, 22 bp, synthetic construct
  misc_feature 1..22: note = chemically synthesized
  source 1..22: mol_type = other DNA
aagtagtattaatttagctggg

SEQ ID NO: 55753 - DNA, 22 bp, synthetic construct
  misc_feature 1..22: note = chemically synthesized
  source 1..22: mol_type = other DNA
atttagctgggaattagcagct

SEQ ID NO: 55754 - DNA, 22 bp, synthetic construct
  misc_feature 1..22: note = chemically synthesized
  source 1..22: mol_type = other DNA
agctgggaattagcagcttatg

SEQ ID NO: 55755 - DNA, 22 bp, synthetic construct
  misc_feature 1..22: note = chemically synthesized
  source 1..22: mol_type = other DNA
gctgggaattagcagcttatgt

SEQ ID NO: 55756 - DNA, 22 bp, synthetic construct
  misc_feature 1..22: note = chemically synthesized
  source 1..22: mol_type = other DNA
ggaattagcagcttatgttgtg

SEQ ID NO: 55757 - DNA, 22 bp, synthetic construct
  misc_feature 1..22: note = chemically synthesized
  source 1..22: mol_type = other DNA
gcagcttatgttgtgtgggccc

SEQ ID NO: 55758 - DNA, 22 bp, synthetic construct
  misc_feature 1..22: note = chemically synthesized
  source 1..22: mol_type = other DNA
atgttgtgtgggcccagttcat

SEQ ID NO: 55759 - DNA, 22 bp, synthetic construct
  misc_feature 1..22: note = chemically synthesized
  source 1..22: mol_type = other DNA
tgttgtgtgggcccagttcatc

SEQ ID NO: 55760 - DNA, 22 bp, synthetic construct
  misc_feature 1..22: note = chemically synthesized
  source 1..22: mol_type = other DNA
tgtgggcccagttcatcaatat

SEQ ID NO: 55761 - DNA, 22 bp, synthetic construct
  misc_feature 1..22: note = chemically synthesized
  source 1..22: mol_type = other DNA
atcaatatgtgtgtcaaatatc

SEQ ID NO: 55762 - DNA, 22 bp, synthetic construct
  misc_feature 1..22: note = chemically synthesized
  source 1..22: mol_type = other DNA
agatatcagcagcctttgactt

SEQ ID NO: 55763 - DNA, 22 bp, synthetic construct
  misc_feature 1..22: note = chemically synthesized
  source 1..22: mol_type = other DNA
tgacttgcagtcagagctttca

SEQ ID NO: 55764 - DNA, 22 bp, synthetic construct
  misc_feature 1..22: note = chemically synthesized
  source 1..22: mol_type = other DNA
gacttgcagtcagagctttcaa

SEQ ID NO: 55765 - DNA, 22 bp, synthetic construct
  misc_feature 1..22: note = chemically synthesized
  source 1..22: mol_type = other DNA
acttgcagtcagagctttcaat

SEQ ID NO: 55766 - DNA, 22 bp, synthetic construct
  misc_feature 1..22: note = chemically synthesized
  source 1..22: mol_type = other DNA
gcagtcagagctttcaataggg

SEQ ID NO: 55767 - DNA, 22 bp, synthetic construct
  misc_feature 1..22: note = chemically synthesized
  source 1..22: mol_type = other DNA
cagtcagagctttcaatagggg

SEQ ID NO: 55768 - DNA, 22 bp, synthetic construct
  misc_feature 1..22: note = chemically synthesized
  source 1..22: mol_type = other DNA
tcaataggggttttgttttgtt

SEQ ID NO: 55769 - DNA, 22 bp, synthetic construct
  misc_feature 1..22: note = chemically synthesized
  source 1..22: mol_type = other DNA
caataggggttttgttttgttt

SEQ ID NO: 55770 - DNA, 22 bp, synthetic construct
  misc_feature 1..22: note = chemically synthesized
  source 1..22: mol_type = other DNA
aataggggttttgttttgtttt

SEQ ID NO: 55771 - DNA, 22 bp, synthetic construct
  misc_feature 1..22: note = chemically synthesized
  source 1..22: mol_type = other DNA
tgttttgttttgttttcttttt

SEQ ID NO: 55772 - DNA, 22 bp, synthetic construct
  misc_feature 1..22: note = chemically synthesized
  source 1..22: mol_type = other DNA
gttttgttttgttttctttttt

SEQ ID NO: 55773 - DNA, 22 bp, synthetic construct
  misc_feature 1..22: note = chemically synthesized
  source 1..22: mol_type = other DNA
ttttgttttgttttcttttttt

SEQ ID NO: 55774 - DNA, 22 bp, synthetic construct
  misc_feature 1..22: note = chemically synthesized
  source 1..22: mol_type = other DNA
tgttttgttttcttttttttta

SEQ ID NO: 55775 - DNA, 22 bp, synthetic construct
  misc_feature 1..22: note = chemically synthesized
  source 1..22: mol_type = other DNA
gttttgttttctttttttttag

SEQ ID NO: 55776 - DNA, 22 bp, synthetic construct
  misc_feature 1..22: note = chemically synthesized
  source 1..22: mol_type = other DNA
ttttgttttctttttttttagt

SEQ ID NO: 55777 - DNA, 22 bp, synthetic construct
  misc_feature 1..22: note = chemically synthesized
  source 1..22: mol_type = other DNA
tgttttctttttttttagtctc

SEQ ID NO: 55778 - DNA, 22 bp, synthetic construct
  misc_feature 1..22: note = chemically synthesized
  source 1..22: mol_type = other DNA
gttttctttttttttagtctca

SEQ ID NO: 55779 - DNA, 22 bp, synthetic construct
  misc_feature 1..22: note = chemically synthesized
  source 1..22: mol_type = other DNA
ttttctttttttttagtctcat

SEQ ID NO: 55780 - DNA, 22 bp, synthetic construct
  misc_feature 1..22: note = chemically synthesized
  source 1..22: mol_type = other DNA
tctttttttttagtctcatatt

SEQ ID NO: 55781 - DNA, 22 bp, synthetic construct
  misc_feature 1..22: note = chemically synthesized
  source 1..22: mol_type = other DNA
ctttttttttagtctcatattt

SEQ ID NO: 55782 - DNA, 22 bp, synthetic construct
  misc_feature 1..22: note = chemically synthesized
  source 1..22: mol_type = other DNA
tttttttttagtctcatatttt

SEQ ID NO: 55783 - DNA, 22 bp, synthetic construct
  misc_feature 1..22: note = chemically synthesized
  source 1..22: mol_type = other DNA
tttttttagtctcatattttat

SEQ ID NO: 55784 - DNA, 22 bp, synthetic construct
  misc_feature 1..22: note = chemically synthesized
  source 1..22: mol_type = other DNA
ttttttagtctcatattttatg

SEQ ID NO: 55785 - DNA, 22 bp, synthetic construct
  misc_feature 1..22: note = chemically synthesized
  source 1..22: mol_type = other DNA
tttttagtctcatattttatga

SEQ ID NO: 55786 - DNA, 22 bp, synthetic construct
  misc_feature 1..22: note = chemically synthesized
  source 1..22: mol_type = other DNA
ttttagtctcatattttatgat

SEQ ID NO: 55787 - DNA, 22 bp, synthetic construct
  misc_feature 1..22: note = chemically synthesized
  source 1..22: mol_type = other DNA
tttagtctcatattttatgatg

SEQ ID NO: 55788 - DNA, 22 bp, synthetic construct
  misc_feature 1..22: note = chemically synthesized
  source 1..22: mol_type = other DNA
ttagtctcatattttatgatgg

SEQ ID NO: 55789 - DNA, 22 bp, synthetic construct
  misc_feature 1..22: note = chemically synthesized
  source 1..22: mol_type = other DNA
tagtctcatattttatgatggg

SEQ ID NO: 55790 - DNA, 22 bp, synthetic construct
  misc_feature 1..22: note = chemically synthesized
  source 1..22: mol_type = other DNA
agtctcatattttatgatgggg

SEQ ID NO: 55791 - DNA, 22 bp, synthetic construct
  misc_feature 1..22: note = chemically synthesized
  source 1..22: mol_type = other DNA
gtctcatattttatgatggggg

SEQ ID NO: 55792 - DNA, 22 bp, synthetic construct
  misc_feature 1..22: note = chemically synthesized
  source 1..22: mol_type = other DNA
atattttatgatggggggaaat

SEQ ID NO: 55793 - DNA, 22 bp, synthetic construct
  misc_feature 1..22: note = chemically synthesized
  source 1..22: mol_type = other DNA
tatgatggggggaaatattcat

SEQ ID NO: 55794 - DNA, 22 bp, synthetic construct
  misc_feature 1..22: note = chemically synthesized
  source 1..22: mol_type = other DNA
atgatggggggaaatattcatg

SEQ ID NO: 55795 - DNA, 22 bp, synthetic construct
  misc_feature 1..22: note = chemically synthesized
  source 1..22: mol_type = other DNA
tgatggggggaaatattcatgg

SEQ ID NO: 55796 - DNA, 22 bp, synthetic construct
  misc_feature 1..22: note = chemically synthesized
  source 1..22: mol_type = other DNA
atggaagattactgaatgtgaa

SEQ ID NO: 55797 - DNA, 22 bp, synthetic construct
  misc_feature 1..22: note = chemically synthesized
  source 1..22: mol_type = other DNA
ctgaatgtgaaactgctgttcc

SEQ ID NO: 55798 - DNA, 22 bp, synthetic construct
  misc_feature 1..22: note = chemically synthesized
  source 1..22: mol_type = other DNA
aatgtgaaactgctgttccctt

SEQ ID NO: 55799 - DNA, 22 bp, synthetic construct
  misc_feature 1..22: note = chemically synthesized
  source 1..22: mol_type = other DNA
ctgttcccttatagaaaagacc

SEQ ID NO: 55800 - DNA, 22 bp, synthetic construct
  misc_feature 1..22: note = chemically synthesized
  source 1..22: mol_type = other DNA
ttcccttatagaaaagacccaa

SEQ ID NO: 55801 - DNA, 22 bp, synthetic construct
  misc_feature 1..22: note = chemically synthesized
  source 1..22: mol_type = other DNA
ccttatagaaaagacccaaaca

SEQ ID NO: 55802 - DNA, 22 bp, synthetic construct
  misc_feature 1..22: note = chemically synthesized
  source 1..22: mol_type = other DNA
atagaaaagacccaaacattat

SEQ ID NO: 55803 - DNA, 22 bp, synthetic construct
  misc_feature 1..22: note = chemically synthesized
  source 1..22: mol_type = other DNA
tagaaaagacccaaacattatc

SEQ ID NO: 55804 - DNA, 22 bp, synthetic construct
  misc_feature 1..22: note = chemically synthesized
  source 1..22: mol_type = other DNA
tcccatcatgtcagatttgagg

SEQ ID NO: 55805 - DNA, 22 bp, synthetic construct
  misc_feature 1..22: note = chemically synthesized
  source 1..22: mol_type = other DNA
gaggttttggcttattgcacat

SEQ ID NO: 55806 - DNA, 22 bp, synthetic construct
  misc_feature 1..22: note = chemically synthesized
  source 1..22: mol_type = other DNA
aggttttggcttattgcacata

SEQ ID NO: 55807 - DNA, 22 bp, synthetic construct
  misc_feature 1..22: note = chemically synthesized
  source 1..22: mol_type = other DNA
tggcttattgcacataggaatc

SEQ ID NO: 55808 - DNA, 22 bp, synthetic construct
  misc_feature 1..22: note = chemically synthesized
  source 1..22: mol_type = other DNA
ggcttattgcacataggaatct

SEQ ID NO: 55809 - DNA, 22 bp, synthetic construct
  misc_feature 1..22: note = chemically synthesized
  source 1..22: mol_type = other DNA
gcttattgcacataggaatctt

SEQ ID NO: 55810 - DNA, 22 bp, synthetic construct
  misc_feature 1..22: note = chemically synthesized
  source 1..22: mol_type = other DNA
attgcacataggaatctttaaa

SEQ ID NO: 55811 - DNA, 22 bp, synthetic construct
  misc_feature 1..22: note = chemically synthesized
  source 1..22: mol_type = other DNA
ttgcacataggaatctttaaat

SEQ ID NO: 55812 - DNA, 22 bp, synthetic construct
  misc_feature 1..22: note = chemically synthesized
  source 1..22: mol_type = other DNA
cacataggaatctttaaattag

SEQ ID NO: 55813 - DNA, 22 bp, synthetic construct
  misc_feature 1..22: note = chemically synthesized
  source 1..22: mol_type = other DNA
taaattaggtttgggctgtcat

SEQ ID NO: 55814 - DNA, 22 bp, synthetic construct
  misc_feature 1..22: note = chemically synthesized
  source 1..22: mol_type = other DNA
aaattaggtttgggctgtcata

SEQ ID NO: 55815 - DNA, 22 bp, synthetic construct
  misc_feature 1..22: note = chemically synthesized
  source 1..22: mol_type = other DNA
aattaggtttgggctgtcataa

SEQ ID NO: 55816 - DNA, 22 bp, synthetic construct
  misc_feature 1..22: note = chemically synthesized
  source 1..22: mol_type = other DNA
ggtttgggctgtcataaagtta

SEQ ID NO: 55817 - DNA, 22 bp, synthetic construct
  misc_feature 1..22: note = chemically synthesized
  source 1..22: mol_type = other DNA
gggctgtcataaagttagcttt

SEQ ID NO: 55818 - DNA, 22 bp, synthetic construct
  misc_feature 1..22: note = chemically synthesized
  source 1..22: mol_type = other DNA
ggctgtcataaagttagctttt

SEQ ID NO: 55819 - DNA, 22 bp, synthetic construct
  misc_feature 1..22: note = chemically synthesized
  source 1..22: mol_type = other DNA
tcataaagttagctttttgaga

SEQ ID NO: 55820 - DNA, 22 bp, synthetic construct
  misc_feature 1..22: note = chemically synthesized
  source 1..22: mol_type = other DNA
gctttttgagagactagagaaa

SEQ ID NO: 55821 - DNA, 22 bp, synthetic construct
  misc_feature 1..22: note = chemically synthesized
  source 1..22: mol_type = other DNA
tttgagagactagagaaaaaat

SEQ ID NO: 55822 - DNA, 22 bp, synthetic construct
  misc_feature 1..22: note = chemically synthesized
  source 1..22: mol_type = other DNA
ttgagagactagagaaaaaata

SEQ ID NO: 55823 - DNA, 22 bp, synthetic construct
  misc_feature 1..22: note = chemically synthesized
  source 1..22: mol_type = other DNA
tgagagactagagaaaaaatat

SEQ ID NO: 55824 - DNA, 22 bp, synthetic construct
  misc_feature 1..22: note = chemically synthesized
  source 1..22: mol_type = other DNA
gagagactagagaaaaaatatg

SEQ ID NO: 55825 - DNA, 22 bp, synthetic construct
  misc_feature 1..22: note = chemically synthesized
  source 1..22: mol_type = other DNA
agagactagagaaaaaatatga

SEQ ID NO: 55826 - DNA, 22 bp, synthetic construct
  misc_feature 1..22: note = chemically synthesized
  source 1..22: mol_type = other DNA
gagaaaaaatatgacaagtcct

SEQ ID NO: 55827 - DNA, 22 bp, synthetic construct
  misc_feature 1..22: note = chemically synthesized
  source 1..22: mol_type = other DNA
taaaatgtagtaaagtctgctc

SEQ ID NO: 55828 - DNA, 22 bp, synthetic construct
  misc_feature 1..22: note = chemically synthesized
  source 1..22: mol_type = other DNA
ctcctgttgatatataacattt

SEQ ID NO: 55829 - DNA, 22 bp, synthetic construct
  misc_feature 1..22: note = chemically synthesized
  source 1..22: mol_type = other DNA
ctgttgatatataacatttttt

SEQ ID NO: 55830 - DNA, 22 bp, synthetic construct
  misc_feature 1..22: note = chemically synthesized
  source 1..22: mol_type = other DNA
ttgatatataacattttttctc

SEQ ID NO: 55831 - DNA, 22 bp, synthetic construct
  misc_feature 1..22: note = chemically synthesized
  source 1..22: mol_type = other DNA
atatataacattttttctcttt

SEQ ID NO: 55832 - DNA, 22 bp, synthetic construct
  misc_feature 1..22: note = chemically synthesized
  source 1..22: mol_type = other DNA
tttctctttaaaatcatgaaca

SEQ ID NO: 55833 - DNA, 22 bp, synthetic construct
  misc_feature 1..22: note = chemically synthesized
  source 1..22: mol_type = other DNA
ttctctttaaaatcatgaacat

SEQ ID NO: 55834 - DNA, 22 bp, synthetic construct
  misc_feature 1..22: note = chemically synthesized
  source 1..22: mol_type = other DNA
tctctttaaaatcatgaacata

SEQ ID NO: 55835 - DNA, 22 bp, synthetic construct
  misc_feature 1..22: note = chemically synthesized
  source 1..22: mol_type = other DNA
ctctttaaaatcatgaacatag

SEQ ID NO: 55836 - DNA, 22 bp, synthetic construct
  misc_feature 1..22: note = chemically synthesized
  source 1..22: mol_type = other DNA
tctttaaaatcatgaacataga

SEQ ID NO: 55837 - DNA, 22 bp, synthetic construct
  misc_feature 1..22: note = chemically synthesized
  source 1..22: mol_type = other DNA
tttaaaatcatgaacatagaca

SEQ ID NO: 55838 - DNA, 22 bp, synthetic construct
  misc_feature 1..22: note = chemically synthesized
  source 1..22: mol_type = other DNA
taaaatcatgaacatagacatt

SEQ ID NO: 55839 - DNA, 22 bp, synthetic construct
  misc_feature 1..22: note = chemically synthesized
  source 1..22: mol_type = other DNA
aaaatcatgaacatagacattt

SEQ ID NO: 55840 - DNA, 22 bp, synthetic construct
  misc_feature 1..22: note = chemically synthesized
  source 1..22: mol_type = other DNA
aaatcatgaacatagacattta

SEQ ID NO: 55841 - DNA, 22 bp, synthetic construct
  misc_feature 1..22: note = chemically synthesized
  source 1..22: mol_type = other DNA
atatcagggtatttaaaattat

SEQ ID NO: 55842 - DNA, 22 bp, synthetic construct
  misc_feature 1..22: note = chemically synthesized
  source 1..22: mol_type = other DNA
tatcagggtatttaaaattatt

SEQ ID NO: 55843 - DNA, 22 bp, synthetic construct
  misc_feature 1..22: note = chemically synthesized
  source 1..22: mol_type = other DNA
aaaattatttgcctagacagta

SEQ ID NO: 55844 - DNA, 22 bp, synthetic construct
  misc_feature 1..22: note = chemically synthesized
  source 1..22: mol_type = other DNA
aaattatttgcctagacagtat

SEQ ID NO: 55845 - DNA, 22 bp, synthetic construct
  misc_feature 1..22: note = chemically synthesized
  source 1..22: mol_type = other DNA
tttgcctagacagtatagctgg

SEQ ID NO: 55846 - DNA, 22 bp, synthetic construct
  misc_feature 1..22: note = chemically synthesized
  source 1..22: mol_type = other DNA
gcctagacagtatagctggtat

SEQ ID NO: 55847 - DNA, 22 bp, synthetic construct
  misc_feature 1..22: note = chemically synthesized
  source 1..22: mol_type = other DNA
cctagacagtatagctggtatt

SEQ ID NO: 55848 - DNA, 22 bp, synthetic construct
  misc_feature 1..22: note = chemically synthesized
  source 1..22: mol_type = other DNA
gacagtatagctggtatttaga

SEQ ID NO: 55849 - DNA, 22 bp, synthetic construct
  misc_feature 1..22: note = chemically synthesized
  source 1..22: mol_type = other DNA
gtatttagataatgatatatca

SEQ ID NO: 55850 - DNA, 22 bp, synthetic construct
  misc_feature 1..22: note = chemically synthesized
  source 1..22: mol_type = other DNA
agataatgatatatcagacaga

SEQ ID NO: 55851 - DNA, 22 bp, synthetic construct
  misc_feature 1..22: note = chemically synthesized
  source 1..22: mol_type = other DNA
gataatgatatatcagacagat

SEQ ID NO: 55852 - DNA, 22 bp, synthetic construct
  misc_feature 1..22: note = chemically synthesized
  source 1..22: mol_type = other DNA
taaagaagggagatatagtaat

SEQ ID NO: 55853 - DNA, 22 bp, synthetic construct
  misc_feature 1..22: note = chemically synthesized
  source 1..22: mol_type = other DNA
aagaagggagatatagtaattc

SEQ ID NO: 55854 - DNA, 22 bp, synthetic construct
  misc_feature 1..22: note = chemically synthesized
  source 1..22: mol_type = other DNA
aaaatggaaatacattagcatg

SEQ ID NO: 55855 - DNA, 22 bp, synthetic construct
  misc_feature 1..22: note = chemically synthesized
  source 1..22: mol_type = other DNA
gcatgctcttaaaagtaaatca

SEQ ID NO: 55856 - DNA, 22 bp, synthetic construct
  misc_feature 1..22: note = chemically synthesized
  source 1..22: mol_type = other DNA
ttaaaagtaaatcaaatacaat

SEQ ID NO: 55857 - DNA, 22 bp, synthetic construct
  misc_feature 1..22: note = chemically synthesized
  source 1..22: mol_type = other DNA
aaaagtaaatcaaatacaatat

SEQ ID NO: 55858 - DNA, 22 bp, synthetic construct
  misc_feature 1..22: note = chemically synthesized
  source 1..22: mol_type = other DNA
aaagtaaatcaaatacaatatg

SEQ ID NO: 55859 - DNA, 22 bp, synthetic construct
  misc_feature 1..22: note = chemically synthesized
  source 1..22: mol_type = other DNA
ttcagaatttagaaaatgaact

SEQ ID NO: 55860 - DNA, 22 bp, synthetic construct
  misc_feature 1..22: note = chemically synthesized
  source 1..22: mol_type = other DNA
tcagaatttagaaaatgaactt

SEQ ID NO: 55861 - DNA, 22 bp, synthetic construct
  misc_feature 1..22: note = chemically synthesized
  source 1..22: mol_type = other DNA
cagaatttagaaaatgaactta

SEQ ID NO: 55862 - DNA, 22 bp, synthetic construct
  misc_feature 1..22: note = chemically synthesized
  source 1..22: mol_type = other DNA
agaatttagaaaatgaacttac

SEQ ID NO: 55863 - DNA, 22 bp, synthetic construct
  misc_feature 1..22: note = chemically synthesized
  source 1..22: mol_type = other DNA
agaaaatgaacttaccttttct

SEQ ID NO: 55864 - DNA, 22 bp, synthetic construct
  misc_feature 1..22: note = chemically synthesized
  source 1..22: mol_type = other DNA
gaaaatgaacttaccttttctt

SEQ ID NO: 55865 - DNA, 22 bp, synthetic construct
  misc_feature 1..22: note = chemically synthesized
  source 1..22: mol_type = other DNA
accttttctttttgtatccatt

SEQ ID NO: 55866 - DNA, 22 bp, synthetic construct
  misc_feature 1..22: note = chemically synthesized
  source 1..22: mol_type = other DNA
ccttttctttttgtatccattc

SEQ ID NO: 55867 - DNA, 22 bp, synthetic construct
  misc_feature 1..22: note = chemically synthesized
  source 1..22: mol_type = other DNA
ttctttttgtatccattctgat

SEQ ID NO: 55868 - DNA, 22 bp, synthetic construct
  misc_feature 1..22: note = chemically synthesized
  source 1..22: mol_type = other DNA
tctttttgtatccattctgatt

SEQ ID NO: 55869 - DNA, 22 bp, synthetic construct
  misc_feature 1..22: note = chemically synthesized
  source 1..22: mol_type = other DNA
ctttttgtatccattctgattc

SEQ ID NO: 55870 - DNA, 22 bp, synthetic construct
  misc_feature 1..22: note = chemically synthesized
  source 1..22: mol_type = other DNA
tttttgtatccattctgattct

SEQ ID NO: 55871 - DNA, 22 bp, synthetic construct
  misc_feature 1..22: note = chemically synthesized
  source 1..22: mol_type = other DNA
tttgtatccattctgattctct

SEQ ID NO: 55872 - DNA, 22 bp, synthetic construct
  misc_feature 1..22: note = chemically synthesized
  source 1..22: mol_type = other DNA
ttgtatccattctgattctctc

SEQ ID NO: 55873 - DNA, 22 bp, synthetic construct
  misc_feature 1..22: note = chemically synthesized
  source 1..22: mol_type = other DNA
tgtatccattctgattctctcc

SEQ ID NO: 55874 - DNA, 22 bp, synthetic construct
  misc_feature 1..22: note = chemically synthesized
  source 1..22: mol_type = other DNA
gtatccattctgattctctcct

SEQ ID NO: 55875 - DNA, 22 bp, synthetic construct
  misc_feature 1..22: note = chemically synthesized
  source 1..22: mol_type = other DNA
tatccattctgattctctccta

SEQ ID NO: 55876 - DNA, 22 bp, synthetic construct
  misc_feature 1..22: note = chemically synthesized
  source 1..22: mol_type = other DNA
tgattctctcctagctcagact

SEQ ID NO: 55877 - DNA, 22 bp, synthetic construct
  misc_feature 1..22: note = chemically synthesized
  source 1..22: mol_type = other DNA
attctctcctagctcagactga

SEQ ID NO: 55878 - DNA, 22 bp, synthetic construct
  misc_feature 1..22: note = chemically synthesized
  source 1..22: mol_type = other DNA
tctcctagctcagactgaactg

SEQ ID NO: 55879 - DNA, 22 bp, synthetic construct
  misc_feature 1..22: note = chemically synthesized
  source 1..22: mol_type = other DNA
tcctagctcagactgaactgga

SEQ ID NO: 55880 - DNA, 22 bp, synthetic construct
  misc_feature 1..22: note = chemically synthesized
  source 1..22: mol_type = other DNA
ctagctcagactgaactggagg

SEQ ID NO: 55881 - DNA, 22 bp, synthetic construct
  misc_feature 1..22: note = chemically synthesized
  source 1..22: mol_type = other DNA
gctcagactgaactggaggatg

SEQ ID NO: 55882 - DNA, 22 bp, synthetic construct
  misc_feature 1..22: note = chemically synthesized
  source 1..22: mol_type = other DNA
agactgaactggaggatgtatt

SEQ ID NO: 55883 - DNA, 22 bp, synthetic construct
  misc_feature 1..22: note = chemically synthesized
  source 1..22: mol_type = other DNA
aactggaggatgtatttgtgta

SEQ ID NO: 55884 - DNA, 22 bp, synthetic construct
  misc_feature 1..22: note = chemically synthesized
  source 1..22: mol_type = other DNA
gaggatgtatttgtgtacctta

SEQ ID NO: 55885 - DNA, 22 bp, synthetic construct
  misc_feature 1..22: note = chemically synthesized
  source 1..22: mol_type = other DNA
gtgtaccttatggtgtaattgt

SEQ ID NO: 55886 - DNA, 22 bp, synthetic construct
  misc_feature 1..22: note = chemically synthesized
  source 1..22: mol_type = other DNA
tgtaccttatggtgtaattgta

SEQ ID NO: 55887 - DNA, 22 bp, synthetic construct
  misc_feature 1..22: note = chemically synthesized
  source 1..22: mol_type = other DNA
atggtgtaattgtaaatgagac

SEQ ID NO: 55888 - DNA, 22 bp, synthetic construct
  misc_feature 1..22: note = chemically synthesized
  source 1..22: mol_type = other DNA
tggtgtaattgtaaatgagact

SEQ ID NO: 55889 - DNA, 22 bp, synthetic construct
  misc_feature 1..22: note = chemically synthesized
  source 1..22: mol_type = other DNA
taaatgagactataaattatag

SEQ ID NO: 55890 - DNA, 22 bp, synthetic construct
  misc_feature 1..22: note = chemically synthesized
  source 1..22: mol_type = other DNA
taaattatagtatgctattatg

SEQ ID NO: 55891 - DNA, 22 bp, synthetic construct
  misc_feature 1..22: note = chemically synthesized
  source 1..22: mol_type = other DNA
tagtatgctattatgactactt

SEQ ID NO: 55892 - DNA, 22 bp, synthetic construct
  misc_feature 1..22: note = chemically synthesized
  source 1..22: mol_type = other DNA
ttatgactacttatttttcttt

SEQ ID NO: 55893 - DNA, 22 bp, synthetic construct
  misc_feature 1..22: note = chemically synthesized
  source 1..22: mol_type = other DNA
tgactacttatttttcttttct

SEQ ID NO: 55894 - DNA, 22 bp, synthetic construct
  misc_feature 1..22: note = chemically synthesized
  source 1..22: mol_type = other DNA
cttatttttcttttctctttat

SEQ ID NO: 55895 - DNA, 22 bp, synthetic construct
  misc_feature 1..22: note = chemically synthesized
  source 1..22: mol_type = other DNA
atttttcttttctctttattta

SEQ ID NO: 55896 - DNA, 22 bp, synthetic construct
  misc_feature 1..22: note = chemically synthesized
  source 1..22: mol_type = other DNA
tttttcttttctctttatttat

SEQ ID NO: 55897 - DNA, 22 bp, synthetic construct
  misc_feature 1..22: note = chemically synthesized
  source 1..22: mol_type = other DNA
ttcttttctctttatttatgtg

SEQ ID NO: 55898 - DNA, 22 bp, synthetic construct
  misc_feature 1..22: note = chemically synthesized
  source 1..22: mol_type = other DNA
tcttttctctttatttatgtga

SEQ ID NO: 55899 - DNA, 22 bp, synthetic construct
  misc_feature 1..22: note = chemically synthesized
  source 1..22: mol_type = other DNA
cttttctctttatttatgtgat

SEQ ID NO: 55900 - DNA, 22 bp, synthetic construct
  misc_feature 1..22: note = chemically synthesized
  source 1..22: mol_type = other DNA
ttttctctttatttatgtgatt

SEQ ID NO: 55901 - DNA, 22 bp, synthetic construct
  misc_feature 1..22: note = chemically synthesized
  source 1..22: mol_type = other DNA
ttctctttatttatgtgattct

SEQ ID NO: 55902 - DNA, 22 bp, synthetic construct
  misc_feature 1..22: note = chemically synthesized
  source 1..22: mol_type = other DNA
tctctttatttatgtgattctg

SEQ ID NO: 55903 - DNA, 22 bp, synthetic construct
  misc_feature 1..22: note = chemically synthesized
  source 1..22: mol_type = other DNA
ctctttatttatgtgattctga

SEQ ID NO: 55904 - DNA, 22 bp, synthetic construct
  misc_feature 1..22: note = chemically synthesized
  source 1..22: mol_type = other DNA
tctttatttatgtgattctgaa

SEQ ID NO: 55905 - DNA, 22 bp, synthetic construct
  misc_feature 1..22: note = chemically synthesized
  source 1..22: mol_type = other DNA
tttatttatgtgattctgaata

SEQ ID NO: 55906 - DNA, 22 bp, synthetic construct
  misc_feature 1..22: note = chemically synthesized
  source 1..22: mol_type = other DNA
tatttatgtgattctgaataaa

SEQ ID NO: 55907 - DNA, 22 bp, synthetic construct
  misc_feature 1..22: note = chemically synthesized
  source 1..22: mol_type = other DNA
atttatgtgattctgaataaaa

SEQ ID NO: 55908 - DNA, 22 bp, synthetic construct
  misc_feature 1..22: note = chemically synthesized
  source 1..22: mol_type = other DNA
tttatgtgattctgaataaaaa

SEQ ID NO: 55909 - DNA, 22 bp, synthetic construct
  misc_feature 1..22: note = chemically synthesized
  source 1..22: mol_type = other DNA
atgtgattctgaataaaaacga

SEQ ID NO: 55910 - DNA, 22 bp, synthetic construct
  misc_feature 1..22: note = chemically synthesized
  source 1..22: mol_type = other DNA
tgtgattctgaataaaaacgac

SEQ ID NO: 55911 - DNA, 22 bp, synthetic construct
  misc_feature 1..22: note = chemically synthesized
  source 1..22: mol_type = other DNA
tgaataaaaacgactgacttct

SEQ ID NO: 55912 - DNA, 22 bp, synthetic construct
  misc_feature 1..22: note = chemically synthesized
  source 1..22: mol_type = other DNA
aataaaaacgactgacttctga

SEQ ID NO: 55913 - DNA, 22 bp, synthetic construct
  misc_feature 1..22: note = chemically synthesized
  source 1..22: mol_type = other DNA
acttctgaagtgaattttcagc

SEQ ID NO: 55914 - DNA, 22 bp, synthetic construct
  misc_feature 1..22: note = chemically synthesized
  source 1..22: mol_type = other DNA
ctgaagtgaattttcagcatgg

SEQ ID NO: 55915 - DNA, 22 bp, synthetic construct
  misc_feature 1..22: note = chemically synthesized
  source 1..22: mol_type = other DNA
tgaagtgaattttcagcatggc

SEQ ID NO: 55916 - DNA, 22 bp, synthetic construct
  misc_feature 1..22: note = chemically synthesized
  source 1..22: mol_type = other DNA
aagtgaattttcagcatggcag

SEQ ID NO: 55917 - DNA, 22 bp, synthetic construct
  misc_feature 1..22: note = chemically synthesized
  source 1..22: mol_type = other DNA
tcagcatggcagttaaaacaaa

SEQ ID NO: 55918 - DNA, 22 bp, synthetic construct
  misc_feature 1..22: note = chemically synthesized
  source 1..22: mol_type = other DNA
cagcatggcagttaaaacaaaa

SEQ ID NO: 55919 - DNA, 22 bp, synthetic construct
  misc_feature 1..22: note = chemically synthesized
  source 1..22: mol_type = other DNA
agcatggcagttaaaacaaaaa

SEQ ID NO: 55920 - DNA, 22 bp, synthetic construct
  misc_feature 1..22: note = chemically synthesized
  source 1..22: mol_type = other DNA
aaacaaaaaaacaccactacca

SEQ ID NO: 55921 - DNA, 22 bp, synthetic construct
  misc_feature 1..22: note = chemically synthesized
  source 1..22: mol_type = other DNA
ccacaaaaaacaatatactggt

SEQ ID NO: 55922 - DNA, 22 bp, synthetic construct
  misc_feature 1..22: note = chemically synthesized
  source 1..22: mol_type = other DNA
gtgaacattttacttaccttca

SEQ ID NO: 55923 - DNA, 22 bp, synthetic construct
  misc_feature 1..22: note = chemically synthesized
  source 1..22: mol_type = other DNA
tacttaccttcaaaatccagag

SEQ ID NO: 55924 - DNA, 22 bp, synthetic construct
  misc_feature 1..22: note = chemically synthesized
  source 1..22: mol_type = other DNA
acttaccttcaaaatccagaga

SEQ ID NO: 55925 - DNA, 22 bp, synthetic construct
  misc_feature 1..22: note = chemically synthesized
  source 1..22: mol_type = other DNA
cttaccttcaaaatccagagag

SEQ ID NO: 55926 - DNA, 22 bp, synthetic construct
  misc_feature 1..22: note = chemically synthesized
  source 1..22: mol_type = other DNA
accttcaaaatccagagagtag

SEQ ID NO: 55927 - DNA, 22 bp, synthetic construct
  misc_feature 1..22: note = chemically synthesized
  source 1..22: mol_type = other DNA
ccttcaaaatccagagagtaga

SEQ ID NO: 55928 - DNA, 22 bp, synthetic construct
  misc_feature 1..22: note = chemically synthesized
  source 1..22: mol_type = other DNA
caaaatccagagagtagagaat

SEQ ID NO: 55929 - DNA, 22 bp, synthetic construct
  misc_feature 1..22: note = chemically synthesized
  source 1..22: mol_type = other DNA
aaaatccagagagtagagaata

SEQ ID NO: 55930 - DNA, 22 bp, synthetic construct
  misc_feature 1..22: note = chemically synthesized
  source 1..22: mol_type = other DNA
ttttctaataagtacctaggat

SEQ ID NO: 55931 - DNA, 22 bp, synthetic construct
  misc_feature 1..22: note = chemically synthesized
  source 1..22: mol_type = other DNA
tctaataagtacctaggatttt

SEQ ID NO: 55932 - DNA, 22 bp, synthetic construct
  misc_feature 1..22: note = chemically synthesized
  source 1..22: mol_type = other DNA
ctaataagtacctaggattttc

SEQ ID NO: 55933 - DNA, 22 bp, synthetic construct
  misc_feature 1..22: note = chemically synthesized
  source 1..22: mol_type = other DNA
taataagtacctaggattttca

SEQ ID NO: 55934 - DNA, 22 bp, synthetic construct
  misc_feature 1..22: note = chemically synthesized
  source 1..22: mol_type = other DNA
ataagtacctaggattttcata

SEQ ID NO: 55935 - DNA, 22 bp, synthetic construct
  misc_feature 1..22: note = chemically synthesized
  source 1..22: mol_type = other DNA
ggattttcatagggagcctatg

SEQ ID NO: 55936 - DNA, 22 bp, synthetic construct
  misc_feature 1..22: note = chemically synthesized
  source 1..22: mol_type = other DNA
tcatagggagcctatgtttgtg

SEQ ID NO: 55937 - DNA, 22 bp, synthetic construct
  misc_feature 1..22: note = chemically synthesized
  source 1..22: mol_type = other DNA
catagggagcctatgtttgtga

SEQ ID NO: 55938 - DNA, 22 bp, synthetic construct
  misc_feature 1..22: note = chemically synthesized
  source 1..22: mol_type = other DNA
atagggagcctatgtttgtgag

SEQ ID NO: 55939 - DNA, 22 bp, synthetic construct
  misc_feature 1..22: note = chemically synthesized
  source 1..22: mol_type = other DNA
tgtttgtgaggccactatccaa

SEQ ID NO: 55940 - DNA, 22 bp, synthetic construct
  misc_feature 1..22: note = chemically synthesized
  source 1..22: mol_type = other DNA
gtgaggccactatccaaagact

SEQ ID NO: 55941 - DNA, 22 bp, synthetic construct
  misc_feature 1..22: note = chemically synthesized
  source 1..22: mol_type = other DNA
tgaggccactatccaaagacta

SEQ ID NO: 55942 - DNA, 22 bp, synthetic construct
  misc_feature 1..22: note = chemically synthesized
  source 1..22: mol_type = other DNA
tccaaagactaatgttcatgaa

SEQ ID NO: 55943 - DNA, 22 bp, synthetic construct
  misc_feature 1..22: note = chemically synthesized
  source 1..22: mol_type = other DNA
atgttcatgaaactgggagtcc

SEQ ID NO: 55944 - DNA, 22 bp, synthetic construct
  misc_feature 1..22: note = chemically synthesized
  source 1..22: mol_type = other DNA
atgaaactgggagtcctatata

SEQ ID NO: 55945 - DNA, 22 bp, synthetic construct
  misc_feature 1..22: note = chemically synthesized
  source 1..22: mol_type = other DNA
ggagtcctatatacaagctgta

SEQ ID NO: 55946 - DNA, 22 bp, synthetic construct
  misc_feature 1..22: note = chemically synthesized
  source 1..22: mol_type = other DNA
tatacaagctgtatttgtaaat

SEQ ID NO: 55947 - DNA, 22 bp, synthetic construct
  misc_feature 1..22: note = chemically synthesized
  source 1..22: mol_type = other DNA
tatttgtaaataagacagagaa

SEQ ID NO: 55948 - DNA, 22 bp, synthetic construct
  misc_feature 1..22: note = chemically synthesized
  source 1..22: mol_type = other DNA
gtaaataagacagagaaaggtt

SEQ ID NO: 55949 - DNA, 22 bp, synthetic construct
  misc_feature 1..22: note = chemically synthesized
  source 1..22: mol_type = other DNA
taaataagacagagaaaggttg

SEQ ID NO: 55950 - DNA, 22 bp, synthetic construct
  misc_feature 1..22: note = chemically synthesized
  source 1..22: mol_type = other DNA
tgaactggcagcttggatgttt

SEQ ID NO: 55951 - DNA, 22 bp, synthetic construct
  misc_feature 1..22: note = chemically synthesized
  source 1..22: mol_type = other DNA
gcagcttggatgttttgtcaaa

SEQ ID NO: 55952 - DNA, 22 bp, synthetic construct
  misc_feature 1..22: note = chemically synthesized
  source 1..22: mol_type = other DNA
ggatgttttgtcaaagtacaat

SEQ ID NO: 55953 - DNA, 22 bp, synthetic construct
  misc_feature 1..22: note = chemically synthesized
  source 1..22: mol_type = other DNA
gatgttttgtcaaagtacaatg

SEQ ID NO: 55954 - DNA, 22 bp, synthetic construct
  misc_feature 1..22: note = chemically synthesized
  source 1..22: mol_type = other DNA
tgtcaaagtacaatgtcagaga

SEQ ID NO: 55955 - DNA, 22 bp, synthetic construct
  misc_feature 1..22: note = chemically synthesized
  source 1..22: mol_type = other DNA
gtcaaagtacaatgtcagagaa

SEQ ID NO: 55956 - DNA, 22 bp, synthetic construct
  misc_feature 1..22: note = chemically synthesized
  source 1..22: mol_type = other DNA
tcaaagtacaatgtcagagaaa

SEQ ID NO: 55957 - DNA, 22 bp, synthetic construct
  misc_feature 1..22: note = chemically synthesized
  source 1..22: mol_type = other DNA
tttctaagacaaattgtaaata

SEQ ID NO: 55958 - DNA, 22 bp, synthetic construct
  misc_feature 1..22: note = chemically synthesized
  source 1..22: mol_type = other DNA
tctaagacaaattgtaaataga

SEQ ID NO: 55959 - DNA, 22 bp, synthetic construct
  misc_feature 1..22: note = chemically synthesized
  source 1..22: mol_type = other DNA
ctaagacaaattgtaaatagaa

SEQ ID NO: 55960 - DNA, 22 bp, synthetic construct
  misc_feature 1..22: note = chemically synthesized
  source 1..22: mol_type = other DNA
taagacaaattgtaaatagaac

SEQ ID NO: 55961 - DNA, 22 bp, synthetic construct
  misc_feature 1..22: note = chemically synthesized
  source 1..22: mol_type = other DNA
agacaaattgtaaatagaactg

SEQ ID NO: 55962 - DNA, 22 bp, synthetic construct
  misc_feature 1..22: note = chemically synthesized
  source 1..22: mol_type = other DNA
taaatagaactgtcacagtgat

SEQ ID NO: 55963 - DNA, 22 bp, synthetic construct
  misc_feature 1..22: note = chemically synthesized
  source 1..22: mol_type = other DNA
tcacagtgattgcatgattgag

SEQ ID NO: 55964 - DNA, 22 bp, synthetic construct
  misc_feature 1..22: note = chemically synthesized
  source 1..22: mol_type = other DNA
catgattgagccgcagaagtgt

SEQ ID NO: 55965 - DNA, 22 bp, synthetic construct
  misc_feature 1..22: note = chemically synthesized
  source 1..22: mol_type = other DNA
agccgcagaagtgtcctacaat

SEQ ID NO: 55966 - DNA, 22 bp, synthetic construct
  misc_feature 1..22: note = chemically synthesized
  source 1..22: mol_type = other DNA
caattgttggcattgtcaggac

SEQ ID NO: 55967 - DNA, 22 bp, synthetic construct
  misc_feature 1..22: note = chemically synthesized
  source 1..22: mol_type = other DNA
ttggcattgtcaggacttttga

SEQ ID NO: 55968 - DNA, 22 bp, synthetic construct
  misc_feature 1..22: note = chemically synthesized
  source 1..22: mol_type = other DNA
gcattgtcaggacttttgaaag

SEQ ID NO: 55969 - DNA, 22 bp, synthetic construct
  misc_feature 1..22: note = chemically synthesized
  source 1..22: mol_type = other DNA
tcaggacttttgaaagcttaat

SEQ ID NO: 55970 - DNA, 22 bp, synthetic construct
  misc_feature 1..22: note = chemically synthesized
  source 1..22: mol_type = other DNA
ttgaaagcttaattaaacacag

SEQ ID NO: 55971 - DNA, 22 bp, synthetic construct
  misc_feature 1..22: note = chemically synthesized
  source 1..22: mol_type = other DNA
tgaaagcttaattaaacacagt

SEQ ID NO: 55972 - DNA, 22 bp, synthetic construct
  misc_feature 1..22: note = chemically synthesized
  source 1..22: mol_type = other DNA
gaaagcttaattaaacacagtg

SEQ ID NO: 55973 - DNA, 22 bp, synthetic construct
  misc_feature 1..22: note = chemically synthesized
  source 1..22: mol_type = other DNA
aaagcttaattaaacacagtgg

SEQ ID NO: 55974 - DNA, 22 bp, synthetic construct
  misc_feature 1..22: note = chemically synthesized
  source 1..22: mol_type = other DNA
aattaaacacagtggcccgcat

SEQ ID NO: 55975 - DNA, 22 bp, synthetic construct
  misc_feature 1..22: note = chemically synthesized
  source 1..22: mol_type = other DNA
attaaacacagtggcccgcatg

SEQ ID NO: 55976 - DNA, 22 bp, synthetic construct
  misc_feature 1..22: note = chemically synthesized
  source 1..22: mol_type = other DNA
aacacagtggcccgcatggctg

SEQ ID NO: 55977 - DNA, 22 bp, synthetic construct
  misc_feature 1..22: note = chemically synthesized
  source 1..22: mol_type = other DNA
ctaaacttactaaggaaagcca

SEQ ID NO: 55978 - DNA, 22 bp, synthetic construct
  misc_feature 1..22: note = chemically synthesized
  source 1..22: mol_type = other DNA
aacttactaaggaaagccaaaa

SEQ ID NO: 55979 - DNA, 22 bp, synthetic construct
  misc_feature 1..22: note = chemically synthesized
  source 1..22: mol_type = other DNA
actaaggaaagccaaaaggaaa

SEQ ID NO: 55980 - DNA, 22 bp, synthetic construct
  misc_feature 1..22: note = chemically synthesized
  source 1..22: mol_type = other DNA
ctaaggaaagccaaaaggaaaa

SEQ ID NO: 55981 - DNA, 22 bp, synthetic construct
  misc_feature 1..22: note = chemically synthesized
  source 1..22: mol_type = other DNA
aggaaagccaaaaggaaaaaaa

SEQ ID NO: 55982 - DNA, 22 bp, synthetic construct
  misc_feature 1..22: note = chemically synthesized
  source 1..22: mol_type = other DNA
aaatgtagaagatcctaaagat

SEQ ID NO: 55983 - DNA, 22 bp, synthetic construct
  misc_feature 1..22: note = chemically synthesized
  source 1..22: mol_type = other DNA
aagatcccaaacttcttcagac

SEQ ID NO: 55984 - DNA, 22 bp, synthetic construct
  misc_feature 1..22: note = chemically synthesized
  source 1..22: mol_type = other DNA
cttcagacattacccttgtggt

SEQ ID NO: 55985 - DNA, 22 bp, synthetic construct
  misc_feature 1..22: note = chemically synthesized
  source 1..22: mol_type = other DNA
ttcagacattacccttgtggtg

SEQ ID NO: 55986 - DNA, 22 bp, synthetic construct
  misc_feature 1..22: note = chemically synthesized
  source 1..22: mol_type = other DNA
cagacattacccttgtggtgac

SEQ ID NO: 55987 - DNA, 22 bp, synthetic construct
  misc_feature 1..22: note = chemically synthesized
  source 1..22: mol_type = other DNA
agacattacccttgtggtgaca

SEQ ID NO: 55988 - DNA, 22 bp, synthetic construct
  misc_feature 1..22: note = chemically synthesized
  source 1..22: mol_type = other DNA
cccttgtggtgacacagaaaag

SEQ ID NO: 55989 - DNA, 22 bp, synthetic construct
  misc_feature 1..22: note = chemically synthesized
  source 1..22: mol_type = other DNA
gtggtgacacagaaaagatgca

SEQ ID NO: 55990 - DNA, 22 bp, synthetic construct
  misc_feature 1..22: note = chemically synthesized
  source 1..22: mol_type = other DNA
tggtgacacagaaaagatgcat

SEQ ID NO: 55991 - DNA, 22 bp, synthetic construct
  misc_feature 1..22: note = chemically synthesized
  source 1..22: mol_type = other DNA
tgcattttcctagtcatctttt

SEQ ID NO: 55992 - DNA, 22 bp, synthetic construct
  misc_feature 1..22: note = chemically synthesized
  source 1..22: mol_type = other DNA
tcctagtcatcttttataaata

SEQ ID NO: 55993 - DNA, 22 bp, synthetic construct
  misc_feature 1..22: note = chemically synthesized
  source 1..22: mol_type = other DNA
cctagtcatcttttataaataa

SEQ ID NO: 55994 - DNA, 22 bp, synthetic construct
  misc_feature 1..22: note = chemically synthesized
  source 1..22: mol_type = other DNA
ctagtcatcttttataaataat

SEQ ID NO: 55995 - DNA, 22 bp, synthetic construct
  misc_feature 1..22: note = chemically synthesized
  source 1..22: mol_type = other DNA
gtcatcttttataaataatgtt

SEQ ID NO: 55996 - DNA, 22 bp, synthetic construct
  misc_feature 1..22: note = chemically synthesized
  source 1..22: mol_type = other DNA
ttataaataatgttttgagaat

SEQ ID NO: 55997 - DNA, 22 bp, synthetic construct
  misc_feature 1..22: note = chemically synthesized
  source 1..22: mol_type = other DNA
tataaataatgttttgagaata

SEQ ID NO: 55998 - DNA, 22 bp, synthetic construct
  misc_feature 1..22: note = chemically synthesized
  source 1..22: mol_type = other DNA
ataaataatgttttgagaatag

SEQ ID NO: 55999 - DNA, 22 bp, synthetic construct
  misc_feature 1..22: note = chemically synthesized
  source 1..22: mol_type = other DNA
taaataatgttttgagaatagg

SEQ ID NO: 56000 - DNA, 22 bp, synthetic construct
  misc_feature 1..22: note = chemically synthesized
  source 1..22: mol_type = other DNA
tgagaataggtccacgtgatat

SEQ ID NO: 56001 - DNA, 22 bp, synthetic construct
  misc_feature 1..22: note = chemically synthesized
  source 1..22: mol_type = other DNA
gagaataggtccacgtgatatg

SEQ ID NO: 56002 - DNA, 22 bp, synthetic construct
  misc_feature 1..22: note = chemically synthesized
  source 1..22: mol_type = other DNA
agaataggtccacgtgatatga

SEQ ID NO: 56003 - DNA, 22 bp, synthetic construct
  misc_feature 1..22: note = chemically synthesized
  source 1..22: mol_type = other DNA
tgtgtgatgtggagattgtgtt

SEQ ID NO: 56004 - DNA, 22 bp, synthetic construct
  misc_feature 1..22: note = chemically synthesized
  source 1..22: mol_type = other DNA
tgttagtttttctgtctcctgc

SEQ ID NO: 56005 - DNA, 22 bp, synthetic construct
  misc_feature 1..22: note = chemically synthesized
  source 1..22: mol_type = other DNA
gtttttctgtctcctgctgtta

SEQ ID NO: 56006 - DNA, 22 bp, synthetic construct
  misc_feature 1..22: note = chemically synthesized
  source 1..22: mol_type = other DNA
ttctgtctcctgctgttacaga

SEQ ID NO: 56007 - DNA, 22 bp, synthetic construct
  misc_feature 1..22: note = chemically synthesized
  source 1..22: mol_type = other DNA
tctgtctcctgctgttacagac

SEQ ID NO: 56008 - DNA, 22 bp, synthetic construct
  misc_feature 1..22: note = chemically synthesized
  source 1..22: mol_type = other DNA
ctgtctcctgctgttacagaca

SEQ ID NO: 56009 - DNA, 22 bp, synthetic construct
  misc_feature 1..22: note = chemically synthesized
  source 1..22: mol_type = other DNA
tgtctcctgctgttacagacag

SEQ ID NO: 56010 - DNA, 22 bp, synthetic construct
  misc_feature 1..22: note = chemically synthesized
  source 1..22: mol_type = other DNA
tctcctgctgttacagacagtt

SEQ ID NO: 56011 - DNA, 22 bp, synthetic construct
  misc_feature 1..22: note = chemically synthesized
  source 1..22: mol_type = other DNA
ctgctgttacagacagttaatg

SEQ ID NO: 56012 - DNA, 22 bp, synthetic construct
  misc_feature 1..22: note = chemically synthesized
  source 1..22: mol_type = other DNA
ctgttacagacagttaatgtaa

SEQ ID NO: 56013 - DNA, 22 bp, synthetic construct
  misc_feature 1..22: note = chemically synthesized
  source 1..22: mol_type = other DNA
ttacagacagttaatgtaaaaa

SEQ ID NO: 56014 - DNA, 22 bp, synthetic construct
  misc_feature 1..22: note = chemically synthesized
  source 1..22: mol_type = other DNA
cagacagttaatgtaaaaatgg

SEQ ID NO: 56015 - DNA, 22 bp, synthetic construct
  misc_feature 1..22: note = chemically synthesized
  source 1..22: mol_type = other DNA
atgtaaaaatggccttttattg

SEQ ID NO: 56016 - DNA, 22 bp, synthetic construct
  misc_feature 1..22: note = chemically synthesized
  source 1..22: mol_type = other DNA
ttattggaaacacaaatatgta

SEQ ID NO: 56017 - DNA, 22 bp, synthetic construct
  misc_feature 1..22: note = chemically synthesized
  source 1..22: mol_type = other DNA
tattggaaacacaaatatgtat

SEQ ID NO: 56018 - DNA, 22 bp, synthetic construct
  misc_feature 1..22: note = chemically synthesized
  source 1..22: mol_type = other DNA
attggaaacacaaatatgtatt

SEQ ID NO: 56019 - DNA, 22 bp, synthetic construct
  misc_feature 1..22: note = chemically synthesized
  source 1..22: mol_type = other DNA
ttggaaacacaaatatgtattc

SEQ ID NO: 56020 - DNA, 22 bp, synthetic construct
  misc_feature 1..22: note = chemically synthesized
  source 1..22: mol_type = other DNA
gaaacacaaatatgtattcact

SEQ ID NO: 56021 - DNA, 22 bp, synthetic construct
  misc_feature 1..22: note = chemically synthesized
  source 1..22: mol_type = other DNA
acttcaagaacaggagcagagg

SEQ ID NO: 56022 - DNA, 22 bp, synthetic construct
  misc_feature 1..22: note = chemically synthesized
  source 1..22: mol_type = other DNA
caagaacaggagcagaggggga

SEQ ID NO: 56023 - DNA, 22 bp, synthetic construct
  misc_feature 1..22: note = chemically synthesized
  source 1..22: mol_type = other DNA
aagaacaggagcagagggggac

SEQ ID NO: 56024 - DNA, 22 bp, synthetic construct
  misc_feature 1..22: note = chemically synthesized
  source 1..22: mol_type = other DNA
ccctcccgttctctgtgtttat

SEQ ID NO: 56025 - DNA, 22 bp, synthetic construct
  misc_feature 1..22: note = chemically synthesized
  source 1..22: mol_type = other DNA
cctcccgttctctgtgtttatt

SEQ ID NO: 56026 - DNA, 22 bp, synthetic construct
  misc_feature 1..22: note = chemically synthesized
  source 1..22: mol_type = other DNA
ccgttctctgtgtttattctgt

SEQ ID NO: 56027 - DNA, 22 bp, synthetic construct
  misc_feature 1..22: note = chemically synthesized
  source 1..22: mol_type = other DNA
tctgtgtttattctgtgaaagc

SEQ ID NO: 56028 - DNA, 22 bp, synthetic construct
  misc_feature 1..22: note = chemically synthesized
  source 1..22: mol_type = other DNA
tgtgtttattctgtgaaagctt

SEQ ID NO: 56029 - DNA, 22 bp, synthetic construct
  misc_feature 1..22: note = chemically synthesized
  source 1..22: mol_type = other DNA
tgtttattctgtgaaagcttaa

SEQ ID NO: 56030 - DNA, 22 bp, synthetic construct
  misc_feature 1..22: note = chemically synthesized
  source 1..22: mol_type = other DNA
attctgtgaaagcttaaaaaaa

SEQ ID NO: 56031 - DNA, 22 bp, synthetic construct
  misc_feature 1..22: note = chemically synthesized
  source 1..22: mol_type = other DNA
ttctgtgaaagcttaaaaaaac

SEQ ID NO: 56032 - DNA, 22 bp, synthetic construct
  misc_feature 1..22: note = chemically synthesized
  source 1..22: mol_type = other DNA
tgtgaaagcttaaaaaaacaaa

SEQ ID NO: 56033 - DNA, 22 bp, synthetic construct
  misc_feature 1..22: note = chemically synthesized
  source 1..22: mol_type = other DNA
tgaaagcttaaaaaaacaaaaa

SEQ ID NO: 56034 - DNA, 22 bp, synthetic construct
  misc_feature 1..22: note = chemically synthesized
  source 1..22: mol_type = other DNA
aaaaaaacaaaaaaacaaaata

SEQ ID NO: 56035 - DNA, 22 bp, synthetic construct
  misc_feature 1..22: note = chemically synthesized
  source 1..22: mol_type = other DNA
aaaaaacaaaaaaacaaaataa

SEQ ID NO: 56036 - DNA, 22 bp, synthetic construct
  misc_feature 1..22: note = chemically synthesized
  source 1..22: mol_type = other DNA
taatttcttaaatcaccccatt

SEQ ID NO: 56037 - DNA, 22 bp, synthetic construct
  misc_feature 1..22: note = chemically synthesized
  source 1..22: mol_type = other DNA
cttaaatcaccccattccttgt

SEQ ID NO: 56038 - DNA, 22 bp, synthetic construct
  misc_feature 1..22: note = chemically synthesized
  source 1..22: mol_type = other DNA
ttaaatcaccccattccttgtt

SEQ ID NO: 56039 - DNA, 22 bp, synthetic construct
  misc_feature 1..22: note = chemically synthesized
  source 1..22: mol_type = other DNA
aaatcaccccattccttgttgt

SEQ ID NO: 56040 - DNA, 22 bp, synthetic construct
  misc_feature 1..22: note = chemically synthesized
  source 1..22: mol_type = other DNA
aatcaccccattccttgttgtg

SEQ ID NO: 56041 - DNA, 22 bp, synthetic construct
  misc_feature 1..22: note = chemically synthesized
  source 1..22: mol_type = other DNA
cttgttgtgttgcaagttgtgc

SEQ ID NO: 56042 - DNA, 22 bp, synthetic construct
  misc_feature 1..22: note = chemically synthesized
  source 1..22: mol_type = other DNA
gttgtgttgcaagttgtgcctt

SEQ ID NO: 56043 - DNA, 22 bp, synthetic construct
  misc_feature 1..22: note = chemically synthesized
  source 1..22: mol_type = other DNA
ttgtgttgcaagttgtgccttt

SEQ ID NO: 56044 - DNA, 22 bp, synthetic construct
  misc_feature 1..22: note = chemically synthesized
  source 1..22: mol_type = other DNA
tgttgcaagttgtgcctttact

SEQ ID NO: 56045 - DNA, 22 bp, synthetic construct
  misc_feature 1..22: note = chemically synthesized
  source 1..22: mol_type = other DNA
caagttgtgcctttactataaa

SEQ ID NO: 56046 - DNA, 22 bp, synthetic construct
  misc_feature 1..22: note = chemically synthesized
  source 1..22: mol_type = other DNA
tgcctttactataaaggatctg

SEQ ID NO: 56047 - DNA, 22 bp, synthetic construct
  misc_feature 1..22: note = chemically synthesized
  source 1..22: mol_type = other DNA
tactataaaggatctgaaatat

SEQ ID NO: 56048 - DNA, 22 bp, synthetic construct
  misc_feature 1..22: note = chemically synthesized
  source 1..22: mol_type = other DNA
actataaaggatctgaaatatg

SEQ ID NO: 56049 - DNA, 22 bp, synthetic construct
  misc_feature 1..22: note = chemically synthesized
  source 1..22: mol_type = other DNA
ctataaaggatctgaaatatgt

SEQ ID NO: 56050 - DNA, 22 bp, synthetic construct
  misc_feature 1..22: note = chemically synthesized
  source 1..22: mol_type = other DNA
taaaggatctgaaatatgtttt

SEQ ID NO: 56051 - DNA, 22 bp, synthetic construct
  misc_feature 1..22: note = chemically synthesized
  source 1..22: mol_type = other DNA
aaatatgttttgcacacctttc

SEQ ID NO: 56052 - DNA, 22 bp, synthetic construct
  misc_feature 1..22: note = chemically synthesized
  source 1..22: mol_type = other DNA
tgcacacctttctcttagtgaa

SEQ ID NO: 56053 - DNA, 22 bp, synthetic construct
  misc_feature 1..22: note = chemically synthesized
  source 1..22: mol_type = other DNA
gcacacctttctcttagtgaat

SEQ ID NO: 56054 - DNA, 22 bp, synthetic construct
  misc_feature 1..22: note = chemically synthesized
  source 1..22: mol_type = other DNA
cacacctttctcttagtgaatg

SEQ ID NO: 56055 - DNA, 22 bp, synthetic construct
  misc_feature 1..22: note = chemically synthesized
  source 1..22: mol_type = other DNA
tctcttagtgaatgtggcatat

SEQ ID NO: 56056 - DNA, 22 bp, synthetic construct
  misc_feature 1..22: note = chemically synthesized
  source 1..22: mol_type = other DNA
ctcttagtgaatgtggcatata

SEQ ID NO: 56057 - DNA, 22 bp, synthetic construct
  misc_feature 1..22: note = chemically synthesized
  source 1..22: mol_type = other DNA
tcttagtgaatgtggcatataa

SEQ ID NO: 56058 - DNA, 22 bp, synthetic construct
  misc_feature 1..22: note = chemically synthesized
  source 1..22: mol_type = other DNA
ttagtgaatgtggcatataatt

SEQ ID NO: 56059 - DNA, 22 bp, synthetic construct
  misc_feature 1..22: note = chemically synthesized
  source 1..22: mol_type = other DNA
agtgaatgtggcatataattgt

SEQ ID NO: 56060 - DNA, 22 bp, synthetic construct
  misc_feature 1..22: note = chemically synthesized
  source 1..22: mol_type = other DNA
gtgaatgtggcatataattgtg

SEQ ID NO: 56061 - DNA, 22 bp, synthetic construct
  misc_feature 1..22: note = chemically synthesized
  source 1..22: mol_type = other DNA
tggagctgcacatgggctggaa

SEQ ID NO: 56062 - DNA, 22 bp, synthetic construct
  misc_feature 1..22: note = chemically synthesized
  source 1..22: mol_type = other DNA
cacatgggctggaaaatgcaac

SEQ ID NO: 56063 - DNA, 22 bp, synthetic construct
  misc_feature 1..22: note = chemically synthesized
  source 1..22: mol_type = other DNA
gaaaatgcaactgggtgtagaa

SEQ ID NO: 56064 - DNA, 22 bp, synthetic construct
  misc_feature 1..22: note = chemically synthesized
  source 1..22: mol_type = other DNA
ggtgtagaaacgtgcaggcagg

SEQ ID NO: 56065 - DNA, 22 bp, synthetic construct
  misc_feature 1..22: note = chemically synthesized
  source 1..22: mol_type = other DNA
cagctcagggaggaggcgagtt

SEQ ID NO: 56066 - DNA, 22 bp, synthetic construct
  misc_feature 1..22: note = chemically synthesized
  source 1..22: mol_type = other DNA
agctcagggaggaggcgagttg

SEQ ID NO: 56067 - DNA, 22 bp, synthetic construct
  misc_feature 1..22: note = chemically synthesized
  source 1..22: mol_type = other DNA
agggaggaggcgagttggatgc

SEQ ID NO: 56068 - DNA, 22 bp, synthetic construct
  misc_feature 1..22: note = chemically synthesized
  source 1..22: mol_type = other DNA
gatgcttattaatggcatcttt

SEQ ID NO: 56069 - DNA, 22 bp, synthetic construct
  misc_feature 1..22: note = chemically synthesized
  source 1..22: mol_type = other DNA
attaatggcatcttttagagtc

SEQ ID NO: 56070 - DNA, 22 bp, synthetic construct
  misc_feature 1..22: note = chemically synthesized
  source 1..22: mol_type = other DNA
ttaatggcatcttttagagtcc

SEQ ID NO: 56071 - DNA, 22 bp, synthetic construct
  misc_feature 1..22: note = chemically synthesized
  source 1..22: mol_type = other DNA
atggcatcttttagagtcctgg

SEQ ID NO: 56072 - DNA, 22 bp, synthetic construct
  misc_feature 1..22: note = chemically synthesized
  source 1..22: mol_type = other DNA
ttagagtcctggaaaatcatta

SEQ ID NO: 56073 - DNA, 22 bp, synthetic construct
  misc_feature 1..22: note = chemically synthesized
  source 1..22: mol_type = other DNA
tagagtcctggaaaatcattaa

SEQ ID NO: 56074 - DNA, 22 bp, synthetic construct
  misc_feature 1..22: note = chemically synthesized
  source 1..22: mol_type = other DNA
agagtcctggaaaatcattaat

SEQ ID NO: 56075 - DNA, 22 bp, synthetic construct
  misc_feature 1..22: note = chemically synthesized
  source 1..22: mol_type = other DNA
gagtcctggaaaatcattaatt

SEQ ID NO: 56076 - DNA, 22 bp, synthetic construct
  misc_feature 1..22: note = chemically synthesized
  source 1..22: mol_type = other DNA
gaaaatcattaatttcacactg

SEQ ID NO: 56077 - DNA, 22 bp, synthetic construct
  misc_feature 1..22: note = chemically synthesized
  source 1..22: mol_type = other DNA
atttcacactgcagcttccatg

SEQ ID NO: 56078 - DNA, 22 bp, synthetic construct
  misc_feature 1..22: note = chemically synthesized
  source 1..22: mol_type = other DNA
cacactgcagcttccatgtagt

SEQ ID NO: 56079 - DNA, 22 bp, synthetic construct
  misc_feature 1..22: note = chemically synthesized
  source 1..22: mol_type = other DNA
acactgcagcttccatgtagtt

SEQ ID NO: 56080 - DNA, 22 bp, synthetic construct
  misc_feature 1..22: note = chemically synthesized
  source 1..22: mol_type = other DNA
cagcttccatgtagtttggcta

SEQ ID NO: 56081 - DNA, 22 bp, synthetic construct
  misc_feature 1..22: note = chemically synthesized
  source 1..22: mol_type = other DNA
ccatgtagtttggctaatgtgg

SEQ ID NO: 56082 - DNA, 22 bp, synthetic construct
  misc_feature 1..22: note = chemically synthesized
  source 1..22: mol_type = other DNA
catgtagtttggctaatgtggg

SEQ ID NO: 56083 - DNA, 22 bp, synthetic construct
  misc_feature 1..22: note = chemically synthesized
  source 1..22: mol_type = other DNA
ggctaatgtgggagtactaaat

SEQ ID NO: 56084 - DNA, 22 bp, synthetic construct
  misc_feature 1..22: note = chemically synthesized
  source 1..22: mol_type = other DNA
gctaatgtgggagtactaaatt

SEQ ID NO: 56085 - DNA, 22 bp, synthetic construct
  misc_feature 1..22: note = chemically synthesized
  source 1..22: mol_type = other DNA
atgtgggagtactaaattgggg

SEQ ID NO: 56086 - DNA, 22 bp, synthetic construct
  misc_feature 1..22: note = chemically synthesized
  source 1..22: mol_type = other DNA
aattggggtacataaaaaacat

SEQ ID NO: 56087 - DNA, 22 bp, synthetic construct
  misc_feature 1..22: note = chemically synthesized
  source 1..22: mol_type = other DNA
gggtacataaaaaacatgcaaa

SEQ ID NO: 56088 - DNA, 22 bp, synthetic construct
  misc_feature 1..22: note = chemically synthesized
  source 1..22: mol_type = other DNA
gggaaacattttttagattttt

SEQ ID NO: 56089 - DNA, 22 bp, synthetic construct
  misc_feature 1..22: note = chemically synthesized
  source 1..22: mol_type = other DNA
tttagatttttgtgatttctca

SEQ ID NO: 56090 - DNA, 22 bp, synthetic construct
  misc_feature 1..22: note = chemically synthesized
  source 1..22: mol_type = other DNA
ttagatttttgtgatttctcaa

SEQ ID NO: 56091 - DNA, 22 bp, synthetic construct
  misc_feature 1..22: note = chemically synthesized
  source 1..22: mol_type = other DNA
tagatttttgtgatttctcaat

SEQ ID NO: 56092 - DNA, 22 bp, synthetic construct
  misc_feature 1..22: note = chemically synthesized
  source 1..22: mol_type = other DNA
agatttttgtgatttctcaatg

SEQ ID NO: 56093 - DNA, 22 bp, synthetic construct
  misc_feature 1..22: note = chemically synthesized
  source 1..22: mol_type = other DNA
gatttttgtgatttctcaatga

SEQ ID NO: 56094 - DNA, 22 bp, synthetic construct
  misc_feature 1..22: note = chemically synthesized
  source 1..22: mol_type = other DNA
ttgtgatttctcaatgaaaatg

SEQ ID NO: 56095 - DNA, 22 bp, synthetic construct
  misc_feature 1..22: note = chemically synthesized
  source 1..22: mol_type = other DNA
tgtgatttctcaatgaaaatgt

SEQ ID NO: 56096 - DNA, 22 bp, synthetic construct
  misc_feature 1..22: note = chemically synthesized
  source 1..22: mol_type = other DNA
gtgatttctcaatgaaaatgtt

SEQ ID NO: 56097 - DNA, 22 bp, synthetic construct
  misc_feature 1..22: note = chemically synthesized
  source 1..22: mol_type = other DNA
tgatttctcaatgaaaatgttt

SEQ ID NO: 56098 - DNA, 22 bp, synthetic construct
  misc_feature 1..22: note = chemically synthesized
  source 1..22: mol_type = other DNA
ctcaatgaaaatgtttaataaa

SEQ ID NO: 56099 - DNA, 22 bp, synthetic construct
  misc_feature 1..22: note = chemically synthesized
  source 1..22: mol_type = other DNA
tcaatgaaaatgtttaataaag

SEQ ID NO: 56100 - DNA, 22 bp, synthetic construct
  misc_feature 1..22: note = chemically synthesized
  source 1..22: mol_type = other DNA
aatgaaaatgtttaataaagga

SEQ ID NO: 56101 - DNA, 22 bp, synthetic construct
  misc_feature 1..22: note = chemically synthesized
  source 1..22: mol_type = other DNA
aataaaggagaataggtgaatg

SEQ ID NO: 56102 - DNA, 22 bp, synthetic construct
  misc_feature 1..22: note = chemically synthesized
  source 1..22: mol_type = other DNA
ataaaggagaataggtgaatgg

SEQ ID NO: 56103 - DNA, 22 bp, synthetic construct
  misc_feature 1..22: note = chemically synthesized
  source 1..22: mol_type = other DNA
tgcgtgctggtcagtaagaaag

SEQ ID NO: 56104 - DNA, 22 bp, synthetic construct
  misc_feature 1..22: note = chemically synthesized
  source 1..22: mol_type = other DNA
gcgtgctggtcagtaagaaagg

SEQ ID NO: 56105 - DNA, 22 bp, synthetic construct
  misc_feature 1..22: note = chemically synthesized
  source 1..22: mol_type = other DNA
cgtgctggtcagtaagaaagga

SEQ ID NO: 56106 - DNA, 22 bp, synthetic construct
  misc_feature 1..22: note = chemically synthesized
  source 1..22: mol_type = other DNA
gtcagtaagaaaggaaacaaat

SEQ ID NO: 56107 - DNA, 22 bp, synthetic construct
  misc_feature 1..22: note = chemically synthesized
  source 1..22: mol_type = other DNA
tggctttcctttggggggaaat

SEQ ID NO: 56108 - DNA, 22 bp, synthetic construct
  misc_feature 1..22: note = chemically synthesized
  source 1..22: mol_type = other DNA
ggctttcctttggggggaaata

SEQ ID NO: 56109 - DNA, 22 bp, synthetic construct
  misc_feature 1..22: note = chemically synthesized
  source 1..22: mol_type = other DNA
gctttcctttggggggaaatat

SEQ ID NO: 56110 - DNA, 22 bp, synthetic construct
  misc_feature 1..22: note = chemically synthesized
  source 1..22: mol_type = other DNA
tcctttggggggaaatattaaa

SEQ ID NO: 56111 - DNA, 22 bp, synthetic construct
  misc_feature 1..22: note = chemically synthesized
  source 1..22: mol_type = other DNA
cctttggggggaaatattaaat

SEQ ID NO: 56112 - DNA, 22 bp, synthetic construct
  misc_feature 1..22: note = chemically synthesized
  source 1..22: mol_type = other DNA
ctttggggggaaatattaaatt

SEQ ID NO: 56113 - DNA, 22 bp, synthetic construct
  misc_feature 1..22: note = chemically synthesized
  source 1..22: mol_type = other DNA
tggggggaaatattaaatttaa

SEQ ID NO: 56114 - DNA, 22 bp, synthetic construct
  misc_feature 1..22: note = chemically synthesized
  source 1..22: mol_type = other DNA
ggggggaaatattaaatttaac

SEQ ID NO: 56115 - DNA, 22 bp, synthetic construct
  misc_feature 1..22: note = chemically synthesized
  source 1..22: mol_type = other DNA
gggggaaatattaaatttaacc

SEQ ID NO: 56116 - DNA, 22 bp, synthetic construct
  misc_feature 1..22: note = chemically synthesized
  source 1..22: mol_type = other DNA
aatttaaccgaagtagaaagca

SEQ ID NO: 56117 - DNA, 22 bp, synthetic construct
  misc_feature 1..22: note = chemically synthesized
  source 1..22: mol_type = other DNA
aaccgaagtagaaagcacagct

SEQ ID NO: 56118 - DNA, 22 bp, synthetic construct
  misc_feature 1..22: note = chemically synthesized
  source 1..22: mol_type = other DNA
accgaagtagaaagcacagcta

SEQ ID NO: 56119 - DNA, 22 bp, synthetic construct
  misc_feature 1..22: note = chemically synthesized
  source 1..22: mol_type = other DNA
gggagatgcaccaagattgcgt

SEQ ID NO: 56120 - DNA, 22 bp, synthetic construct
  misc_feature 1..22: note = chemically synthesized
  source 1..22: mol_type = other DNA
cgtcactggatgttaatttaat

SEQ ID NO: 56121 - DNA, 22 bp, synthetic construct
  misc_feature 1..22: note = chemically synthesized
  source 1..22: mol_type = other DNA
gatgttaatttaatctactttg

SEQ ID NO: 56122 - DNA, 22 bp, synthetic construct
  misc_feature 1..22: note = chemically synthesized
  source 1..22: mol_type = other DNA
atttaatctactttggttggtc

SEQ ID NO: 56123 - DNA, 22 bp, synthetic construct
  misc_feature 1..22: note = chemically synthesized
  source 1..22: mol_type = other DNA
aatctactttggttggtctgtt

SEQ ID NO: 56124 - DNA, 22 bp, synthetic construct
  misc_feature 1..22: note = chemically synthesized
  source 1..22: mol_type = other DNA
atctactttggttggtctgttc

SEQ ID NO: 56125 - DNA, 22 bp, synthetic construct
  misc_feature 1..22: note = chemically synthesized
  source 1..22: mol_type = other DNA
ctttggttggtctgttcacacc

SEQ ID NO: 56126 - DNA, 22 bp, synthetic construct
  misc_feature 1..22: note = chemically synthesized
  source 1..22: mol_type = other DNA
tggttggtctgttcacaccctt

SEQ ID NO: 56127 - DNA, 22 bp, synthetic construct
  misc_feature 1..22: note = chemically synthesized
  source 1..22: mol_type = other DNA
ggttggtctgttcacacccttt

SEQ ID NO: 56128 - DNA, 22 bp, synthetic construct
  misc_feature 1..22: note = chemically synthesized
  source 1..22: mol_type = other DNA
gttggtctgttcacacccttta

SEQ ID NO: 56129 - DNA, 22 bp, synthetic construct
  misc_feature 1..22: note = chemically synthesized
  source 1..22: mol_type = other DNA
gtctgttcacaccctttattgc

SEQ ID NO: 56130 - DNA, 22 bp, synthetic construct
  misc_feature 1..22: note = chemically synthesized
  source 1..22: mol_type = other DNA
ttcacaccctttattgcacaaa

SEQ ID NO: 56131 - DNA, 22 bp, synthetic construct
  misc_feature 1..22: note = chemically synthesized
  source 1..22: mol_type = other DNA
acaccctttattgcacaaagaa

SEQ ID NO: 56132 - DNA, 22 bp, synthetic construct
  misc_feature 1..22: note = chemically synthesized
  source 1..22: mol_type = other DNA
tattgcacaaagaagtcatttg

SEQ ID NO: 56133 - DNA, 22 bp, synthetic construct
  misc_feature 1..22: note = chemically synthesized
  source 1..22: mol_type = other DNA
attgcacaaagaagtcatttga

SEQ ID NO: 56134 - DNA, 22 bp, synthetic construct
  misc_feature 1..22: note = chemically synthesized
  source 1..22: mol_type = other DNA
ttgcacaaagaagtcatttgac

SEQ ID NO: 56135 - DNA, 22 bp, synthetic construct
  misc_feature 1..22: note = chemically synthesized
  source 1..22: mol_type = other DNA
cacaaagaagtcatttgacaaa

SEQ ID NO: 56136 - DNA, 22 bp, synthetic construct
  misc_feature 1..22: note = chemically synthesized
  source 1..22: mol_type = other DNA
gacaaaatttaccccaagccca

SEQ ID NO: 56137 - DNA, 22 bp, synthetic construct
  misc_feature 1..22: note = chemically synthesized
  source 1..22: mol_type = other DNA
acaaaatttaccccaagcccaa

SEQ ID NO: 56138 - DNA, 22 bp, synthetic construct
  misc_feature 1..22: note = chemically synthesized
  source 1..22: mol_type = other DNA
accccaagcccaagtctgtttt

SEQ ID NO: 56139 - DNA, 22 bp, synthetic construct
  misc_feature 1..22: note = chemically synthesized
  source 1..22: mol_type = other DNA
ccccaagcccaagtctgttttt

SEQ ID NO: 56140 - DNA, 22 bp, synthetic construct
  misc_feature 1..22: note = chemically synthesized
  source 1..22: mol_type = other DNA
tttttacatacagtagtaccag

SEQ ID NO: 56141 - DNA, 22 bp, synthetic construct
  misc_feature 1..22: note = chemically synthesized
  source 1..22: mol_type = other DNA
ttacatacagtagtaccagctt

SEQ ID NO: 56142 - DNA, 22 bp, synthetic construct
  misc_feature 1..22: note = chemically synthesized
  source 1..22: mol_type = other DNA
tacatacagtagtaccagcttt

SEQ ID NO: 56143 - DNA, 22 bp, synthetic construct
  misc_feature 1..22: note = chemically synthesized
  source 1..22: mol_type = other DNA
acatacagtagtaccagctttg

SEQ ID NO: 56144 - DNA, 22 bp, synthetic construct
  misc_feature 1..22: note = chemically synthesized
  source 1..22: mol_type = other DNA
catacagtagtaccagctttgt

SEQ ID NO: 56145 - DNA, 22 bp, synthetic construct
  misc_feature 1..22: note = chemically synthesized
  source 1..22: mol_type = other DNA
tgtgcaataaaaagcacttagc

SEQ ID NO: 56146 - DNA, 22 bp, synthetic construct
  misc_feature 1..22: note = chemically synthesized
  source 1..22: mol_type = other DNA
gtgcaataaaaagcacttagca

SEQ ID NO: 56147 - DNA, 22 bp, synthetic construct
  misc_feature 1..22: note = chemically synthesized
  source 1..22: mol_type = other DNA
tgcaataaaaagcacttagcat

SEQ ID NO: 56148 - DNA, 22 bp, synthetic construct
  misc_feature 1..22: note = chemically synthesized
  source 1..22: mol_type = other DNA
agcatcaagctggacccagcct

SEQ ID NO: 56149 - DNA, 22 bp, synthetic construct
  misc_feature 1..22: note = chemically synthesized
  source 1..22: mol_type = other DNA
gcatcaagctggacccagcctg

SEQ ID NO: 56150 - DNA, 22 bp, synthetic construct
  misc_feature 1..22: note = chemically synthesized
  source 1..22: mol_type = other DNA
gacccagcctggcaccttgcca

SEQ ID NO: 56151 - DNA, 22 bp, synthetic construct
  misc_feature 1..22: note = chemically synthesized
  source 1..22: mol_type = other DNA
gcaccttgccacttttttagca

SEQ ID NO: 56152 - DNA, 22 bp, synthetic construct
  misc_feature 1..22: note = chemically synthesized
  source 1..22: mol_type = other DNA
gccacttttttagcatgagatt

SEQ ID NO: 56153 - DNA, 22 bp, synthetic construct
  misc_feature 1..22: note = chemically synthesized
  source 1..22: mol_type = other DNA
ccacttttttagcatgagattt

SEQ ID NO: 56154 - DNA, 22 bp, synthetic construct
  misc_feature 1..22: note = chemically synthesized
  source 1..22: mol_type = other DNA
ttttagcatgagatttaatcac

SEQ ID NO: 56155 - DNA, 22 bp, synthetic construct
  misc_feature 1..22: note = chemically synthesized
  source 1..22: mol_type = other DNA
tttagcatgagatttaatcacc

SEQ ID NO: 56156 - DNA, 22 bp, synthetic construct
  misc_feature 1..22: note = chemically synthesized
  source 1..22: mol_type = other DNA
ttagcatgagatttaatcacca

SEQ ID NO: 56157 - DNA, 22 bp, synthetic construct
  misc_feature 1..22: note = chemically synthesized
  source 1..22: mol_type = other DNA
tagcatgagatttaatcaccaa

SEQ ID NO: 56158 - DNA, 22 bp, synthetic construct
  misc_feature 1..22: note = chemically synthesized
  source 1..22: mol_type = other DNA
agcatgagatttaatcaccaag

SEQ ID NO: 56159 - DNA, 22 bp, synthetic construct
  misc_feature 1..22: note = chemically synthesized
  source 1..22: mol_type = other DNA
gcatgagatttaatcaccaagc

SEQ ID NO: 56160 - DNA, 22 bp, synthetic construct
  misc_feature 1..22: note = chemically synthesized
  source 1..22: mol_type = other DNA
aatcaccaagcatctttagtac

SEQ ID NO: 56161 - DNA, 22 bp, synthetic construct
  misc_feature 1..22: note = chemically synthesized
  source 1..22: mol_type = other DNA
atcaccaagcatctttagtacc

SEQ ID NO: 56162 - DNA, 22 bp, synthetic construct
  misc_feature 1..22: note = chemically synthesized
  source 1..22: mol_type = other DNA
tagtacctttctgcttgttcag

SEQ ID NO: 56163 - DNA, 22 bp, synthetic construct
  misc_feature 1..22: note = chemically synthesized
  source 1..22: mol_type = other DNA
agtacctttctgcttgttcaga

SEQ ID NO: 56164 - DNA, 22 bp, synthetic construct
  misc_feature 1..22: note = chemically synthesized
  source 1..22: mol_type = other DNA
gtacctttctgcttgttcagat

SEQ ID NO: 56165 - DNA, 22 bp, synthetic construct
  misc_feature 1..22: note = chemically synthesized
  source 1..22: mol_type = other DNA
tctgcttgttcagatttcattt

SEQ ID NO: 56166 - DNA, 22 bp, synthetic construct
  misc_feature 1..22: note = chemically synthesized
  source 1..22: mol_type = other DNA
ctgcttgttcagatttcatttg

SEQ ID NO: 56167 - DNA, 22 bp, synthetic construct
  misc_feature 1..22: note = chemically synthesized
  source 1..22: mol_type = other DNA
tgcttgttcagatttcatttgg

SEQ ID NO: 56168 - DNA, 22 bp, synthetic construct
  misc_feature 1..22: note = chemically synthesized
  source 1..22: mol_type = other DNA
cttgttcagatttcatttgggt

SEQ ID NO: 56169 - DNA, 22 bp, synthetic construct
  misc_feature 1..22: note = chemically synthesized
  source 1..22: mol_type = other DNA
gttcagatttcatttgggtcat

SEQ ID NO: 56170 - DNA, 22 bp, synthetic construct
  misc_feature 1..22: note = chemically synthesized
  source 1..22: mol_type = other DNA
ttcagatttcatttgggtcatg

SEQ ID NO: 56171 - DNA, 22 bp, synthetic construct
  misc_feature 1..22: note = chemically synthesized
  source 1..22: mol_type = other DNA
agatttcatttgggtcatggct

SEQ ID NO: 56172 - DNA, 22 bp, synthetic construct
  misc_feature 1..22: note = chemically synthesized
  source 1..22: mol_type = other DNA
catttgggtcatggctatgtca

SEQ ID NO: 56173 - DNA, 22 bp, synthetic construct
  misc_feature 1..22: note = chemically synthesized
  source 1..22: mol_type = other DNA
atttgggtcatggctatgtcag

SEQ ID NO: 56174 - DNA, 22 bp, synthetic construct
  misc_feature 1..22: note = chemically synthesized
  source 1..22: mol_type = other DNA
gggtcatggctatgtcagcagt

SEQ ID NO: 56175 - DNA, 22 bp, synthetic construct
  misc_feature 1..22: note = chemically synthesized
  source 1..22: mol_type = other DNA
ggtcatggctatgtcagcagtg

SEQ ID NO: 56176 - DNA, 22 bp, synthetic construct
  misc_feature 1..22: note = chemically synthesized
  source 1..22: mol_type = other DNA
tgtcagcagtgttgttatttca

SEQ ID NO: 56177 - DNA, 22 bp, synthetic construct
  misc_feature 1..22: note = chemically synthesized
  source 1..22: mol_type = other DNA
ttatttcaaggattaaaaaaaa

SEQ ID NO: 56178 - DNA, 22 bp, synthetic construct
  misc_feature 1..22: note = chemically synthesized
  source 1..22: mol_type = other DNA
tttcaaggattaaaaaaaaaga

SEQ ID NO: 56179 - DNA, 22 bp, synthetic construct
  misc_feature 1..22: note = chemically synthesized
  source 1..22: mol_type = other DNA
caaggattaaaaaaaaagattc

SEQ ID NO: 56180 - DNA, 22 bp, synthetic construct
  misc_feature 1..22: note = chemically synthesized
  source 1..22: mol_type = other DNA
aaggattaaaaaaaaagattct

SEQ ID NO: 56181 - DNA, 22 bp, synthetic construct
  misc_feature 1..22: note = chemically synthesized
  source 1..22: mol_type = other DNA
aaaaaaaagattctaacttaga

SEQ ID NO: 56182 - DNA, 22 bp, synthetic construct
  misc_feature 1..22: note = chemically synthesized
  source 1..22: mol_type = other DNA
taacttagagcccacttttaac

SEQ ID NO: 56183 - DNA, 22 bp, synthetic construct
  misc_feature 1..22: note = chemically synthesized
  source 1..22: mol_type = other DNA
acttagagcccacttttaacat

SEQ ID NO: 56184 - DNA, 22 bp, synthetic construct
  misc_feature 1..22: note = chemically synthesized
  source 1..22: mol_type = other DNA
agagcccacttttaacattatt

SEQ ID NO: 56185 - DNA, 22 bp, synthetic construct
  misc_feature 1..22: note = chemically synthesized
  source 1..22: mol_type = other DNA
gagcccacttttaacattattt

SEQ ID NO: 56186 - DNA, 22 bp, synthetic construct
  misc_feature 1..22: note = chemically synthesized
  source 1..22: mol_type = other DNA
ttaacattatttcaaatcaagc

SEQ ID NO: 56187 - DNA, 22 bp, synthetic construct
  misc_feature 1..22: note = chemically synthesized
  source 1..22: mol_type = other DNA
taacattatttcaaatcaagca

SEQ ID NO: 56188 - DNA, 22 bp, synthetic construct
  misc_feature 1..22: note = chemically synthesized
  source 1..22: mol_type = other DNA
aacattatttcaaatcaagcag

SEQ ID NO: 56189 - DNA, 22 bp, synthetic construct
  misc_feature 1..22: note = chemically synthesized
  source 1..22: mol_type = other DNA
acattatttcaaatcaagcagg

SEQ ID NO: 56190 - DNA, 22 bp, synthetic construct
  misc_feature 1..22: note = chemically synthesized
  source 1..22: mol_type = other DNA
tttcaaatcaagcaggttttta

SEQ ID NO: 56191 - DNA, 22 bp, synthetic construct
  misc_feature 1..22: note = chemically synthesized
  source 1..22: mol_type = other DNA
caaatcaagcaggtttttatgt

SEQ ID NO: 56192 - DNA, 22 bp, synthetic construct
  misc_feature 1..22: note = chemically synthesized
  source 1..22: mol_type = other DNA
aaatcaagcaggtttttatgtt

SEQ ID NO: 56193 - DNA, 22 bp, synthetic construct
  misc_feature 1..22: note = chemically synthesized
  source 1..22: mol_type = other DNA
ttatgttatgtatcaatttgga

SEQ ID NO: 56194 - DNA, 22 bp, synthetic construct
  misc_feature 1..22: note = chemically synthesized
  source 1..22: mol_type = other DNA
tatgttatgtatcaatttggat

SEQ ID NO: 56195 - DNA, 22 bp, synthetic construct
  misc_feature 1..22: note = chemically synthesized
  source 1..22: mol_type = other DNA
atgttatgtatcaatttggatg

SEQ ID NO: 56196 - DNA, 22 bp, synthetic construct
  misc_feature 1..22: note = chemically synthesized
  source 1..22: mol_type = other DNA
tgttatgtatcaatttggatga

SEQ ID NO: 56197 - DNA, 22 bp, synthetic construct
  misc_feature 1..22: note = chemically synthesized
  source 1..22: mol_type = other DNA
tgtatcaatttggatgacatta

SEQ ID NO: 56198 - DNA, 22 bp, synthetic construct
  misc_feature 1..22: note = chemically synthesized
  source 1..22: mol_type = other DNA
ggatgacattaatgaagttcat

SEQ ID NO: 56199 - DNA, 22 bp, synthetic construct
  misc_feature 1..22: note = chemically synthesized
  source 1..22: mol_type = other DNA
gatgacattaatgaagttcata

SEQ ID NO: 56200 - DNA, 22 bp, synthetic construct
  misc_feature 1..22: note = chemically synthesized
  source 1..22: mol_type = other DNA
atgaagttcataaaatatgttc

SEQ ID NO: 56201 - DNA, 22 bp, synthetic construct
  misc_feature 1..22: note = chemically synthesized
  source 1..22: mol_type = other DNA
ataaaatatgttcagactatat

SEQ ID NO: 56202 - DNA, 22 bp, synthetic construct
  misc_feature 1..22: note = chemically synthesized
  source 1..22: mol_type = other DNA
agactatataatttaatggata

SEQ ID NO: 56203 - DNA, 22 bp, synthetic construct
  misc_feature 1..22: note = chemically synthesized
  source 1..22: mol_type = other DNA
tataatttaatggataatgact

SEQ ID NO: 56204 - DNA, 22 bp, synthetic construct
  misc_feature 1..22: note = chemically synthesized
  source 1..22: mol_type = other DNA
aatggataatgactactatttt

SEQ ID NO: 56205 - DNA, 22 bp, synthetic construct
  misc_feature 1..22: note = chemically synthesized
  source 1..22: mol_type = other DNA
atggataatgactactattttt

SEQ ID NO: 56206 - DNA, 22 bp, synthetic construct
  misc_feature 1..22: note = chemically synthesized
  source 1..22: mol_type = other DNA
ctatttttatttgtaatacaaa

SEQ ID NO: 56207 - DNA, 22 bp, synthetic construct
  misc_feature 1..22: note = chemically synthesized
  source 1..22: mol_type = other DNA
tttttatttgtaatacaaatag

SEQ ID NO: 56208 - DNA, 22 bp, synthetic construct
  misc_feature 1..22: note = chemically synthesized
  source 1..22: mol_type = other DNA
ttatttgtaatacaaataggaa

SEQ ID NO: 56209 - DNA, 22 bp, synthetic construct
  misc_feature 1..22: note = chemically synthesized
  source 1..22: mol_type = other DNA
tatttgtaatacaaataggaaa

SEQ ID NO: 56210 - DNA, 22 bp, synthetic construct
  misc_feature 1..22: note = chemically synthesized
  source 1..22: mol_type = other DNA
atttgtaatacaaataggaaat

SEQ ID NO: 56211 - DNA, 22 bp, synthetic construct
  misc_feature 1..22: note = chemically synthesized
  source 1..22: mol_type = other DNA
tttgtaatacaaataggaaatt

SEQ ID NO: 56212 - DNA, 22 bp, synthetic construct
  misc_feature 1..22: note = chemically synthesized
  source 1..22: mol_type = other DNA
gtaatacaaataggaaattgac

SEQ ID NO: 56213 - DNA, 22 bp, synthetic construct
  misc_feature 1..22: note = chemically synthesized
  source 1..22: mol_type = other DNA
taatacaaataggaaattgact

SEQ ID NO: 56214 - DNA, 22 bp, synthetic construct
  misc_feature 1..22: note = chemically synthesized
  source 1..22: mol_type = other DNA
actgttgtctccctccctcctt

SEQ ID NO: 56215 - DNA, 22 bp, synthetic construct
  misc_feature 1..22: note = chemically synthesized
  source 1..22: mol_type = other DNA
ttgtctccctccctccttggtt

SEQ ID NO: 56216 - DNA, 22 bp, synthetic construct
  misc_feature 1..22: note = chemically synthesized
  source 1..22: mol_type = other DNA
tctccctccctccttggttctt

SEQ ID NO: 56217 - DNA, 22 bp, synthetic construct
  misc_feature 1..22: note = chemically synthesized
  source 1..22: mol_type = other DNA
cctccctccttggttcttttct

SEQ ID NO: 56218 - DNA, 22 bp, synthetic construct
  misc_feature 1..22: note = chemically synthesized
  source 1..22: mol_type = other DNA
cctccttggttcttttctccta

SEQ ID NO: 56219 - DNA, 22 bp, synthetic construct
  misc_feature 1..22: note = chemically synthesized
  source 1..22: mol_type = other DNA
cttggttcttttctcctaccta

SEQ ID NO: 56220 - DNA, 22 bp, synthetic construct
  misc_feature 1..22: note = chemically synthesized
  source 1..22: mol_type = other DNA
ggttcttttctcctacctaggt

SEQ ID NO: 56221 - DNA, 22 bp, synthetic construct
  misc_feature 1..22: note = chemically synthesized
  source 1..22: mol_type = other DNA
gttcttttctcctacctaggta

SEQ ID NO: 56222 - DNA, 22 bp, synthetic construct
  misc_feature 1..22: note = chemically synthesized
  source 1..22: mol_type = other DNA
ttttctcctacctaggtaaatg

SEQ ID NO: 56223 - DNA, 22 bp, synthetic construct
  misc_feature 1..22: note = chemically synthesized
  source 1..22: mol_type = other DNA
ttctcctacctaggtaaatggg

SEQ ID NO: 56224 - DNA, 22 bp, synthetic construct
  misc_feature 1..22: note = chemically synthesized
  source 1..22: mol_type = other DNA
tctcctacctaggtaaatgggc

SEQ ID NO: 56225 - DNA, 22 bp, synthetic construct
  misc_feature 1..22: note = chemically synthesized
  source 1..22: mol_type = other DNA
ctcctacctaggtaaatgggca

SEQ ID NO: 56226 - DNA, 22 bp, synthetic construct
  misc_feature 1..22: note = chemically synthesized
  source 1..22: mol_type = other DNA
tcctacctaggtaaatgggcat

SEQ ID NO: 56227 - DNA, 22 bp, synthetic construct
  misc_feature 1..22: note = chemically synthesized
  source 1..22: mol_type = other DNA
ctacctaggtaaatgggcatcc

SEQ ID NO: 56228 - DNA, 22 bp, synthetic construct
  misc_feature 1..22: note = chemically synthesized
  source 1..22: mol_type = other DNA
cctaggtaaatgggcatcctta

SEQ ID NO: 56229 - DNA, 22 bp, synthetic construct
  misc_feature 1..22: note = chemically synthesized
  source 1..22: mol_type = other DNA
ggtaaatgggcatccttaaaca

SEQ ID NO: 56230 - DNA, 22 bp, synthetic construct
  misc_feature 1..22: note = chemically synthesized
  source 1..22: mol_type = other DNA
aaacagcttctcccctttacga

SEQ ID NO: 56231 - DNA, 22 bp, synthetic construct
  misc_feature 1..22: note = chemically synthesized
  source 1..22: mol_type = other DNA
aacagcttctcccctttacgac

SEQ ID NO: 56232 - DNA, 22 bp, synthetic construct
  misc_feature 1..22: note = chemically synthesized
  source 1..22: mol_type = other DNA
ctcccctttacgaccagggtat

SEQ ID NO: 56233 - DNA, 22 bp, synthetic construct
  misc_feature 1..22: note = chemically synthesized
  source 1..22: mol_type = other DNA
tcccctttacgaccagggtata

SEQ ID NO: 56234 - DNA, 22 bp, synthetic construct
  misc_feature 1..22: note = chemically synthesized
  source 1..22: mol_type = other DNA
ccctttacgaccagggtataga

SEQ ID NO: 56235 - DNA, 22 bp, synthetic construct
  misc_feature 1..22: note = chemically synthesized
  source 1..22: mol_type = other DNA
tacgaccagggtatagagcact

SEQ ID NO: 56236 - DNA, 22 bp, synthetic construct
  misc_feature 1..22: note = chemically synthesized
  source 1..22: mol_type = other DNA
acgaccagggtatagagcactg

SEQ ID NO: 56237 - DNA, 22 bp, synthetic construct
  misc_feature 1..22: note = chemically synthesized
  source 1..22: mol_type = other DNA
cgaccagggtatagagcactgg

SEQ ID NO: 56238 - DNA, 22 bp, synthetic construct
  misc_feature 1..22: note = chemically synthesized
  source 1..22: mol_type = other DNA
gccaatatcagtaaatttacct

SEQ ID NO: 56239 - DNA, 22 bp, synthetic construct
  misc_feature 1..22: note = chemically synthesized
  source 1..22: mol_type = other DNA
acctttgtaatttgccacgtag

SEQ ID NO: 56240 - DNA, 22 bp, synthetic construct
  misc_feature 1..22: note = chemically synthesized
  source 1..22: mol_type = other DNA
cctttgtaatttgccacgtagt

SEQ ID NO: 56241 - DNA, 22 bp, synthetic construct
  misc_feature 1..22: note = chemically synthesized
  source 1..22: mol_type = other DNA
tgtaatttgccacgtagttttt

SEQ ID NO: 56242 - DNA, 22 bp, synthetic construct
  misc_feature 1..22: note = chemically synthesized
  source 1..22: mol_type = other DNA
gtaatttgccacgtagttttta

SEQ ID NO: 56243 - DNA, 22 bp, synthetic construct
  misc_feature 1..22: note = chemically synthesized
  source 1..22: mol_type = other DNA
taatttgccacgtagtttttac

SEQ ID NO: 56244 - DNA, 22 bp, synthetic construct
  misc_feature 1..22: note = chemically synthesized
  source 1..22: mol_type = other DNA
gccacgtagtttttacaacatg

SEQ ID NO: 56245 - DNA, 22 bp, synthetic construct
  misc_feature 1..22: note = chemically synthesized
  source 1..22: mol_type = other DNA
ccacgtagtttttacaacatga

SEQ ID NO: 56246 - DNA, 22 bp, synthetic construct
  misc_feature 1..22: note = chemically synthesized
  source 1..22: mol_type = other DNA
ttacaacatgacctaattaatt

SEQ ID NO: 56247 - DNA, 22 bp, synthetic construct
  misc_feature 1..22: note = chemically synthesized
  source 1..22: mol_type = other DNA
tacaacatgacctaattaattt

SEQ ID NO: 56248 - DNA, 22 bp, synthetic construct
  misc_feature 1..22: note = chemically synthesized
  source 1..22: mol_type = other DNA
acaacatgacctaattaatttg

SEQ ID NO: 56249 - DNA, 22 bp, synthetic construct
  misc_feature 1..22: note = chemically synthesized
  source 1..22: mol_type = other DNA
caacatgacctaattaatttga

SEQ ID NO: 56250 - DNA, 22 bp, synthetic construct
  misc_feature 1..22: note = chemically synthesized
  source 1..22: mol_type = other DNA
attaatttgagcacgaaccata

SEQ ID NO: 56251 - DNA, 22 bp, synthetic construct
  misc_feature 1..22: note = chemically synthesized
  source 1..22: mol_type = other DNA
atttgagcacgaaccatattat

SEQ ID NO: 56252 - DNA, 22 bp, synthetic construct
  misc_feature 1..22: note = chemically synthesized
  source 1..22: mol_type = other DNA
gagcacgaaccatattattgct

SEQ ID NO: 56253 - DNA, 22 bp, synthetic construct
  misc_feature 1..22: note = chemically synthesized
  source 1..22: mol_type = other DNA
agcacgaaccatattattgcta

SEQ ID NO: 56254 - DNA, 22 bp, synthetic construct
  misc_feature 1..22: note = chemically synthesized
  source 1..22: mol_type = other DNA
ttgctactggagtcattttctg

SEQ ID NO: 56255 - DNA, 22 bp, synthetic construct
  misc_feature 1..22: note = chemically synthesized
  source 1..22: mol_type = other DNA
ctactggagtcattttctgtca

SEQ ID NO: 56256 - DNA, 22 bp, synthetic construct
  misc_feature 1..22: note = chemically synthesized
  source 1..22: mol_type = other DNA
ctggagtcattttctgtcacaa

SEQ ID NO: 56257 - DNA, 22 bp, synthetic construct
  misc_feature 1..22: note = chemically synthesized
  source 1..22: mol_type = other DNA
gagtcattttctgtcacaaact

SEQ ID NO: 56258 - DNA, 22 bp, synthetic construct
  misc_feature 1..22: note = chemically synthesized
  source 1..22: mol_type = other DNA
tctgtcacaaacttaatttcca

SEQ ID NO: 56259 - DNA, 22 bp, synthetic construct
  misc_feature 1..22: note = chemically synthesized
  source 1..22: mol_type = other DNA
ctgtcacaaacttaatttccag

SEQ ID NO: 56260 - DNA, 22 bp, synthetic construct
  misc_feature 1..22: note = chemically synthesized
  source 1..22: mol_type = other DNA
tgtcacaaacttaatttccagg

SEQ ID NO: 56261 - DNA, 22 bp, synthetic construct
  misc_feature 1..22: note = chemically synthesized
  source 1..22: mol_type = other DNA
tcacaaacttaatttccaggaa

SEQ ID NO: 56262 - DNA, 22 bp, synthetic construct
  misc_feature 1..22: note = chemically synthesized
  source 1..22: mol_type = other DNA
aatttccaggaaatgtaacctg

SEQ ID NO: 56263 - DNA, 22 bp, synthetic construct
  misc_feature 1..22: note = chemically synthesized
  source 1..22: mol_type = other DNA
atttccaggaaatgtaacctga

SEQ ID NO: 56264 - DNA, 22 bp, synthetic construct
  misc_feature 1..22: note = chemically synthesized
  source 1..22: mol_type = other DNA
ccaggaaatgtaacctgacaaa

SEQ ID NO: 56265 - DNA, 22 bp, synthetic construct
  misc_feature 1..22: note = chemically synthesized
  source 1..22: mol_type = other DNA
caggaaatgtaacctgacaaat

SEQ ID NO: 56266 - DNA, 22 bp, synthetic construct
  misc_feature 1..22: note = chemically synthesized
  source 1..22: mol_type = other DNA
acaaataagaattctttagctc

SEQ ID NO: 56267 - DNA, 22 bp, synthetic construct
  misc_feature 1..22: note = chemically synthesized
  source 1..22: mol_type = other DNA
tttagctctctacatgtgctcc

SEQ ID NO: 56268 - DNA, 22 bp, synthetic construct
  misc_feature 1..22: note = chemically synthesized
  source 1..22: mol_type = other DNA
tagctctctacatgtgctccta

SEQ ID NO: 56269 - DNA, 22 bp, synthetic construct
  misc_feature 1..22: note = chemically synthesized
  source 1..22: mol_type = other DNA
agctctctacatgtgctcctag

SEQ ID NO: 56270 - DNA, 22 bp, synthetic construct
  misc_feature 1..22: note = chemically synthesized
  source 1..22: mol_type = other DNA
gctctctacatgtgctcctaga

SEQ ID NO: 56271 - DNA, 22 bp, synthetic construct
  misc_feature 1..22: note = chemically synthesized
  source 1..22: mol_type = other DNA
tctacatgtgctcctagagacc

SEQ ID NO: 56272 - DNA, 22 bp, synthetic construct
  misc_feature 1..22: note = chemically synthesized
  source 1..22: mol_type = other DNA
tacatgtgctcctagagaccaa

SEQ ID NO: 56273 - DNA, 22 bp, synthetic construct
  misc_feature 1..22: note = chemically synthesized
  source 1..22: mol_type = other DNA
catgtgctcctagagaccaaag

SEQ ID NO: 56274 - DNA, 22 bp, synthetic construct
  misc_feature 1..22: note = chemically synthesized
  source 1..22: mol_type = other DNA
ctagagaccaaaggcagattta

SEQ ID NO: 56275 - DNA, 22 bp, synthetic construct
  misc_feature 1..22: note = chemically synthesized
  source 1..22: mol_type = other DNA
gagaccaaaggcagatttaaaa

SEQ ID NO: 56276 - DNA, 22 bp, synthetic construct
  misc_feature 1..22: note = chemically synthesized
  source 1..22: mol_type = other DNA
aaaataataataattttaaaag

SEQ ID NO: 56277 - DNA, 22 bp, synthetic construct
  misc_feature 1..22: note = chemically synthesized
  source 1..22: mol_type = other DNA
aaataataataattttaaaagt

SEQ ID NO: 56278 - DNA, 22 bp, synthetic construct
  misc_feature 1..22: note = chemically synthesized
  source 1..22: mol_type = other DNA
taaaagtgccagcattattaaa

SEQ ID NO: 56279 - DNA, 22 bp, synthetic construct
  misc_feature 1..22: note = chemically synthesized
  source 1..22: mol_type = other DNA
aaaagtgccagcattattaaag

SEQ ID NO: 56280 - DNA, 22 bp, synthetic construct
  misc_feature 1..22: note = chemically synthesized
  source 1..22: mol_type = other DNA
aaagtgccagcattattaaagc

SEQ ID NO: 56281 - DNA, 22 bp, synthetic construct
  misc_feature 1..22: note = chemically synthesized
  source 1..22: mol_type = other DNA
ttaaagccagtatacttgatgc

SEQ ID NO: 56282 - DNA, 22 bp, synthetic construct
  misc_feature 1..22: note = chemically synthesized
  source 1..22: mol_type = other DNA
aagccagtatacttgatgccaa

SEQ ID NO: 56283 - DNA, 22 bp, synthetic construct
  misc_feature 1..22: note = chemically synthesized
  source 1..22: mol_type = other DNA
gatgccaaactcaatttgaagc

SEQ ID NO: 56284 - DNA, 22 bp, synthetic construct
  misc_feature 1..22: note = chemically synthesized
  source 1..22: mol_type = other DNA
atgccaaactcaatttgaagcc

SEQ ID NO: 56285 - DNA, 22 bp, synthetic construct
  misc_feature 1..22: note = chemically synthesized
  source 1..22: mol_type = other DNA
aatttgaagccagtaaacatca

SEQ ID NO: 56286 - DNA, 22 bp, synthetic construct
  misc_feature 1..22: note = chemically synthesized
  source 1..22: mol_type = other DNA
gaagccagtaaacatcagactg

SEQ ID NO: 56287 - DNA, 22 bp, synthetic construct
  misc_feature 1..22: note = chemically synthesized
  source 1..22: mol_type = other DNA
aagccagtaaacatcagactgt

SEQ ID NO: 56288 - DNA, 22 bp, synthetic construct
  misc_feature 1..22: note = chemically synthesized
  source 1..22: mol_type = other DNA
tatttctaatcagttttaaaat

SEQ ID NO: 56289 - DNA, 22 bp, synthetic construct
  misc_feature 1..22: note = chemically synthesized
  source 1..22: mol_type = other DNA
ctaatcagttttaaaatgtaac

SEQ ID NO: 56290 - DNA, 22 bp, synthetic construct
  misc_feature 1..22: note = chemically synthesized
  source 1..22: mol_type = other DNA
taatcagttttaaaatgtaact

SEQ ID NO: 56291 - DNA, 22 bp, synthetic construct
  misc_feature 1..22: note = chemically synthesized
  source 1..22: mol_type = other DNA
atcagttttaaaatgtaactta

SEQ ID NO: 56292 - DNA, 22 bp, synthetic construct
  misc_feature 1..22: note = chemically synthesized
  source 1..22: mol_type = other DNA
taaaatgtaacttattccatat

SEQ ID NO: 56293 - DNA, 22 bp, synthetic construct
  misc_feature 1..22: note = chemically synthesized
  source 1..22: mol_type = other DNA
aaaatgtaacttattccatatt

SEQ ID NO: 56294 - DNA, 22 bp, synthetic construct
  misc_feature 1..22: note = chemically synthesized
  source 1..22: mol_type = other DNA
aaatgtaacttattccatattg

SEQ ID NO: 56295 - DNA, 22 bp, synthetic construct
  misc_feature 1..22: note = chemically synthesized
  source 1..22: mol_type = other DNA
attccatattgggttcattgga

SEQ ID NO: 56296 - DNA, 22 bp, synthetic construct
  misc_feature 1..22: note = chemically synthesized
  source 1..22: mol_type = other DNA
ttccatattgggttcattggaa

SEQ ID NO: 56297 - DNA, 22 bp, synthetic construct
  misc_feature 1..22: note = chemically synthesized
  source 1..22: mol_type = other DNA
catattgggttcattggaattt

SEQ ID NO: 56298 - DNA, 22 bp, synthetic construct
  misc_feature 1..22: note = chemically synthesized
  source 1..22: mol_type = other DNA
ggttcattggaatttgtctccc

SEQ ID NO: 56299 - DNA, 22 bp, synthetic construct
  misc_feature 1..22: note = chemically synthesized
  source 1..22: mol_type = other DNA
attggaatttgtctccctgctt

SEQ ID NO: 56300 - DNA, 22 bp, synthetic construct
  misc_feature 1..22: note = chemically synthesized
  source 1..22: mol_type = other DNA
gaatttgtctccctgcttttta

SEQ ID NO: 56301 - DNA, 22 bp, synthetic construct
  misc_feature 1..22: note = chemically synthesized
  source 1..22: mol_type = other DNA
gtctccctgctttttactggcc

SEQ ID NO: 56302 - DNA, 22 bp, synthetic construct
  misc_feature 1..22: note = chemically synthesized
  source 1..22: mol_type = other DNA
tctccctgctttttactggcca

SEQ ID NO: 56303 - DNA, 22 bp, synthetic construct
  misc_feature 1..22: note = chemically synthesized
  source 1..22: mol_type = other DNA
cctgctttttactggccagctg

SEQ ID NO: 56304 - DNA, 22 bp, synthetic construct
  misc_feature 1..22: note = chemically synthesized
  source 1..22: mol_type = other DNA
ctttttactggccagctgcact

SEQ ID NO: 56305 - DNA, 22 bp, synthetic construct
  misc_feature 1..22: note = chemically synthesized
  source 1..22: mol_type = other DNA
tttactggccagctgcactccc

SEQ ID NO: 56306 - DNA, 22 bp, synthetic construct
  misc_feature 1..22: note = chemically synthesized
  source 1..22: mol_type = other DNA
ttactggccagctgcactccct

SEQ ID NO: 56307 - DNA, 22 bp, synthetic construct
  misc_feature 1..22: note = chemically synthesized
  source 1..22: mol_type = other DNA
tactggccagctgcactcccta

SEQ ID NO: 56308 - DNA, 22 bp, synthetic construct
  misc_feature 1..22: note = chemically synthesized
  source 1..22: mol_type = other DNA
actggccagctgcactccctat

SEQ ID NO: 56309 - DNA, 22 bp, synthetic construct
  misc_feature 1..22: note = chemically synthesized
  source 1..22: mol_type = other DNA
ctggccagctgcactccctatg

SEQ ID NO: 56310 - DNA, 22 bp, synthetic construct
  misc_feature 1..22: note = chemically synthesized
  source 1..22: mol_type = other DNA
gccagctgcactccctatgcat

SEQ ID NO: 56311 - DNA, 22 bp, synthetic construct
  misc_feature 1..22: note = chemically synthesized
  source 1..22: mol_type = other DNA
cactccctatgcatttttaaaa

SEQ ID NO: 56312 - DNA, 22 bp, synthetic construct
  misc_feature 1..22: note = chemically synthesized
  source 1..22: mol_type = other DNA
cctatgcatttttaaaacattt

SEQ ID NO: 56313 - DNA, 22 bp, synthetic construct
  misc_feature 1..22: note = chemically synthesized
  source 1..22: mol_type = other DNA
tgcatttttaaaacatttcagc

SEQ ID NO: 56314 - DNA, 22 bp, synthetic construct
  misc_feature 1..22: note = chemically synthesized
  source 1..22: mol_type = other DNA
ttaaaacatttcagcaaaggct

SEQ ID NO: 56315 - DNA, 22 bp, synthetic construct
  misc_feature 1..22: note = chemically synthesized
  source 1..22: mol_type = other DNA
taaaacatttcagcaaaggctt

SEQ ID NO: 56316 - DNA, 22 bp, synthetic construct
  misc_feature 1..22: note = chemically synthesized
  source 1..22: mol_type = other DNA
aaaacatttcagcaaaggcttt

SEQ ID NO: 56317 - DNA, 22 bp, synthetic construct
  misc_feature 1..22: note = chemically synthesized
  source 1..22: mol_type = other DNA
aaacatttcagcaaaggctttt

SEQ ID NO: 56318 - DNA, 22 bp, synthetic construct
  misc_feature 1..22: note = chemically synthesized
  source 1..22: mol_type = other DNA
cagcaaaggcttttgctgttct

SEQ ID NO: 56319 - DNA, 22 bp, synthetic construct
  misc_feature 1..22: note = chemically synthesized
  source 1..22: mol_type = other DNA
agcaaaggcttttgctgttctt

SEQ ID NO: 56320 - DNA, 22 bp, synthetic construct
  misc_feature 1..22: note = chemically synthesized
  source 1..22: mol_type = other DNA
ttgctgttcttagcagggttag

SEQ ID NO: 56321 - DNA, 22 bp, synthetic construct
  misc_feature 1..22: note = chemically synthesized
  source 1..22: mol_type = other DNA
tgctgttcttagcagggttagt

SEQ ID NO: 56322 - DNA, 22 bp, synthetic construct
  misc_feature 1..22: note = chemically synthesized
  source 1..22: mol_type = other DNA
gctgttcttagcagggttagta

SEQ ID NO: 56323 - DNA, 22 bp, synthetic construct
  misc_feature 1..22: note = chemically synthesized
  source 1..22: mol_type = other DNA
ctgttcttagcagggttagtaa

SEQ ID NO: 56324 - DNA, 22 bp, synthetic construct
  misc_feature 1..22: note = chemically synthesized
  source 1..22: mol_type = other DNA
ttcttagcagggttagtaactt

SEQ ID NO: 56325 - DNA, 22 bp, synthetic construct
  misc_feature 1..22: note = chemically synthesized
  source 1..22: mol_type = other DNA
ttagcagggttagtaacttggg

SEQ ID NO: 56326 - DNA, 22 bp, synthetic construct
  misc_feature 1..22: note = chemically synthesized
  source 1..22: mol_type = other DNA
agcagggttagtaacttggggt

SEQ ID NO: 56327 - DNA, 22 bp, synthetic construct
  misc_feature 1..22: note = chemically synthesized
  source 1..22: mol_type = other DNA
gcagggttagtaacttggggtc

SEQ ID NO: 56328 - DNA, 22 bp, synthetic construct
  misc_feature 1..22: note = chemically synthesized
  source 1..22: mol_type = other DNA
gtaacttggggtctatttctga

SEQ ID NO: 56329 - DNA, 22 bp, synthetic construct
  misc_feature 1..22: note = chemically synthesized
  source 1..22: mol_type = other DNA
ggggtctatttctgagctcatt

SEQ ID NO: 56330 - DNA, 22 bp, synthetic construct
  misc_feature 1..22: note = chemically synthesized
  source 1..22: mol_type = other DNA
gggtctatttctgagctcattc

SEQ ID NO: 56331 - DNA, 22 bp, synthetic construct
  misc_feature 1..22: note = chemically synthesized
  source 1..22: mol_type = other DNA
tttctgagctcattcgtcattc

SEQ ID NO: 56332 - DNA, 22 bp, synthetic construct
  misc_feature 1..22: note = chemically synthesized
  source 1..22: mol_type = other DNA
ctgagctcattcgtcattctgc

SEQ ID NO: 56333 - DNA, 22 bp, synthetic construct
  misc_feature 1..22: note = chemically synthesized
  source 1..22: mol_type = other DNA
tgagctcattcgtcattctgca

SEQ ID NO: 56334 - DNA, 22 bp, synthetic construct
  misc_feature 1..22: note = chemically synthesized
  source 1..22: mol_type = other DNA
agctcattcgtcattctgcaat

SEQ ID NO: 56335 - DNA, 22 bp, synthetic construct
  misc_feature 1..22: note = chemically synthesized
  source 1..22: mol_type = other DNA
attcgtcattctgcaatggcat

SEQ ID NO: 56336 - DNA, 22 bp, synthetic construct
  misc_feature 1..22: note = chemically synthesized
  source 1..22: mol_type = other DNA
gtcattctgcaatggcattgag

SEQ ID NO: 56337 - DNA, 22 bp, synthetic construct
  misc_feature 1..22: note = chemically synthesized
  source 1..22: mol_type = other DNA
tgcaatggcattgagttaggtt

SEQ ID NO: 56338 - DNA, 22 bp, synthetic construct
  misc_feature 1..22: note = chemically synthesized
  source 1..22: mol_type = other DNA
caatggcattgagttaggttgg

SEQ ID NO: 56339 - DNA, 22 bp, synthetic construct
  misc_feature 1..22: note = chemically synthesized
  source 1..22: mol_type = other DNA
agttaggttggcaagggaagga

SEQ ID NO: 56340 - DNA, 22 bp, synthetic construct
  misc_feature 1..22: note = chemically synthesized
  source 1..22: mol_type = other DNA
ggttggcaagggaaggatttga

SEQ ID NO: 56341 - DNA, 22 bp, synthetic construct
  misc_feature 1..22: note = chemically synthesized
  source 1..22: mol_type = other DNA
gcaagggaaggatttgaggcat

SEQ ID NO: 56342 - DNA, 22 bp, synthetic construct
  misc_feature 1..22: note = chemically synthesized
  source 1..22: mol_type = other DNA
gaggcatggggggtggtgaggt

SEQ ID NO: 56343 - DNA, 22 bp, synthetic construct
  misc_feature 1..22: note = chemically synthesized
  source 1..22: mol_type = other DNA
aggcatggggggtggtgaggtc

SEQ ID NO: 56344 - DNA, 22 bp, synthetic construct
  misc_feature 1..22: note = chemically synthesized
  source 1..22: mol_type = other DNA
ctgatcccagcagggaataggt

SEQ ID NO: 56345 - DNA, 22 bp, synthetic construct
  misc_feature 1..22: note = chemically synthesized
  source 1..22: mol_type = other DNA
tgatcccagcagggaataggtg

SEQ ID NO: 56346 - DNA, 22 bp, synthetic construct
  misc_feature 1..22: note = chemically synthesized
  source 1..22: mol_type = other DNA
atcccagcagggaataggtgag

SEQ ID NO: 56347 - DNA, 22 bp, synthetic construct
  misc_feature 1..22: note = chemically synthesized
  source 1..22: mol_type = other DNA
catttgcctttacaataggcgc

SEQ ID NO: 56348 - DNA, 22 bp, synthetic construct
  misc_feature 1..22: note = chemically synthesized
  source 1..22: mol_type = other DNA
atttgcctttacaataggcgca

SEQ ID NO: 56349 - DNA, 22 bp, synthetic construct
  misc_feature 1..22: note = chemically synthesized
  source 1..22: mol_type = other DNA
gcctttacaataggcgcacagt

SEQ ID NO: 56350 - DNA, 22 bp, synthetic construct
  misc_feature 1..22: note = chemically synthesized
  source 1..22: mol_type = other DNA
cctttacaataggcgcacagtt

SEQ ID NO: 56351 - DNA, 22 bp, synthetic construct
  misc_feature 1..22: note = chemically synthesized
  source 1..22: mol_type = other DNA
tacaataggcgcacagttactg

SEQ ID NO: 56352 - DNA, 22 bp, synthetic construct
  misc_feature 1..22: note = chemically synthesized
  source 1..22: mol_type = other DNA
acaataggcgcacagttactgc

SEQ ID NO: 56353 - DNA, 22 bp, synthetic construct
  misc_feature 1..22: note = chemically synthesized
  source 1..22: mol_type = other DNA
caataggcgcacagttactgca

SEQ ID NO: 56354 - DNA, 22 bp, synthetic construct
  misc_feature 1..22: note = chemically synthesized
  source 1..22: mol_type = other DNA
ctgcaccttggaggagctctca

SEQ ID NO: 56355 - DNA, 22 bp, synthetic construct
  misc_feature 1..22: note = chemically synthesized
  source 1..22: mol_type = other DNA
caccttggaggagctctcaggt

SEQ ID NO: 56356 - DNA, 22 bp, synthetic construct
  misc_feature 1..22: note = chemically synthesized
  source 1..22: mol_type = other DNA
ggaggagctctcaggtgccgct

SEQ ID NO: 56357 - DNA, 22 bp, synthetic construct
  misc_feature 1..22: note = chemically synthesized
  source 1..22: mol_type = other DNA
gaggagctctcaggtgccgctc

SEQ ID NO: 56358 - DNA, 22 bp, synthetic construct
  misc_feature 1..22: note = chemically synthesized
  source 1..22: mol_type = other DNA
tcaggtgccgctcagatgggcg

SEQ ID NO: 56359 - DNA, 22 bp, synthetic construct
  misc_feature 1..22: note = chemically synthesized
  source 1..22: mol_type = other DNA
aggtgccgctcagatgggcgca

SEQ ID NO: 56360 - DNA, 22 bp, synthetic construct
  misc_feature 1..22: note = chemically synthesized
  source 1..22: mol_type = other DNA
agatgggcgcatgtaaatgccc

SEQ ID NO: 56361 - DNA, 22 bp, synthetic construct
  misc_feature 1..22: note = chemically synthesized
  source 1..22: mol_type = other DNA
tcagatgcggagctggaatatt

SEQ ID NO: 56362 - DNA, 22 bp, synthetic construct
  misc_feature 1..22: note = chemically synthesized
  source 1..22: mol_type = other DNA
gaatattaatgcttcttccacc

SEQ ID NO: 56363 - DNA, 22 bp, synthetic construct
  misc_feature 1..22: note = chemically synthesized
  source 1..22: mol_type = other DNA
atgcttcttccaccaccacacc

SEQ ID NO: 56364 - DNA, 22 bp, synthetic construct
  misc_feature 1..22: note = chemically synthesized
  source 1..22: mol_type = other DNA
cttccaccaccacaccataata

SEQ ID NO: 56365 - DNA, 22 bp, synthetic construct
  misc_feature 1..22: note = chemically synthesized
  source 1..22: mol_type = other DNA
ttccaccaccacaccataataa

SEQ ID NO: 56366 - DNA, 22 bp, synthetic construct
  misc_feature 1..22: note = chemically synthesized
  source 1..22: mol_type = other DNA
ccaccaccacaccataataaag

SEQ ID NO: 56367 - DNA, 22 bp, synthetic construct
  misc_feature 1..22: note = chemically synthesized
  source 1..22: mol_type = other DNA
caccaccacaccataataaagc

SEQ ID NO: 56368 - DNA, 22 bp, synthetic construct
  misc_feature 1..22: note = chemically synthesized
  source 1..22: mol_type = other DNA
tacacagcaagcttaatatgca

SEQ ID NO: 56369 - DNA, 22 bp, synthetic construct
  misc_feature 1..22: note = chemically synthesized
  source 1..22: mol_type = other DNA
aatatgcagctagtctggggaa

SEQ ID NO: 56370 - DNA, 22 bp, synthetic construct
  misc_feature 1..22: note = chemically synthesized
  source 1..22: mol_type = other DNA
atatgcagctagtctggggaat

SEQ ID NO: 56371 - DNA, 22 bp, synthetic construct
  misc_feature 1..22: note = chemically synthesized
  source 1..22: mol_type = other DNA
gtctggggaattgtataaactt

SEQ ID NO: 56372 - DNA, 22 bp, synthetic construct
  misc_feature 1..22: note = chemically synthesized
  source 1..22: mol_type = other DNA
gggaattgtataaacttagata

SEQ ID NO: 56373 - DNA, 22 bp, synthetic construct
  misc_feature 1..22: note = chemically synthesized
  source 1..22: mol_type = other DNA
tataaacttagatagcccagtg

SEQ ID NO: 56374 - DNA, 22 bp, synthetic construct
  misc_feature 1..22: note = chemically synthesized
  source 1..22: mol_type = other DNA
agatagcccagtgtgaaagaca

SEQ ID NO: 56375 - DNA, 22 bp, synthetic construct
  misc_feature 1..22: note = chemically synthesized
  source 1..22: mol_type = other DNA
gatagcccagtgtgaaagacag

SEQ ID NO: 56376 - DNA, 22 bp, synthetic construct
  misc_feature 1..22: note = chemically synthesized
  source 1..22: mol_type = other DNA
gatatgccacagtttccattct

SEQ ID NO: 56377 - DNA, 22 bp, synthetic construct
  misc_feature 1..22: note = chemically synthesized
  source 1..22: mol_type = other DNA
ccattcttgttctcctttgatc

SEQ ID NO: 56378 - DNA, 22 bp, synthetic construct
  misc_feature 1..22: note = chemically synthesized
  source 1..22: mol_type = other DNA
cattcttgttctcctttgatct

SEQ ID NO: 56379 - DNA, 22 bp, synthetic construct
  misc_feature 1..22: note = chemically synthesized
  source 1..22: mol_type = other DNA
ttgttctcctttgatctatagc

SEQ ID NO: 56380 - DNA, 22 bp, synthetic construct
  misc_feature 1..22: note = chemically synthesized
  source 1..22: mol_type = other DNA
gttctcctttgatctatagcga

SEQ ID NO: 56381 - DNA, 22 bp, synthetic construct
  misc_feature 1..22: note = chemically synthesized
  source 1..22: mol_type = other DNA
ttctcctttgatctatagcgaa

SEQ ID NO: 56382 - DNA, 22 bp, synthetic construct
  misc_feature 1..22: note = chemically synthesized
  source 1..22: mol_type = other DNA
tcctttgatctatagcgaaatg

SEQ ID NO: 56383 - DNA, 22 bp, synthetic construct
  misc_feature 1..22: note = chemically synthesized
  source 1..22: mol_type = other DNA
ctttgatctatagcgaaatgaa

SEQ ID NO: 56384 - DNA, 22 bp, synthetic construct
  misc_feature 1..22: note = chemically synthesized
  source 1..22: mol_type = other DNA
tgatctatagcgaaatgaaaac

SEQ ID NO: 56385 - DNA, 22 bp, synthetic construct
  misc_feature 1..22: note = chemically synthesized
  source 1..22: mol_type = other DNA
gatctatagcgaaatgaaaaca

SEQ ID NO: 56386 - DNA, 22 bp, synthetic construct
  misc_feature 1..22: note = chemically synthesized
  source 1..22: mol_type = other DNA
atctatagcgaaatgaaaacat

SEQ ID NO: 56387 - DNA, 22 bp, synthetic construct
  misc_feature 1..22: note = chemically synthesized
  source 1..22: mol_type = other DNA
tagcgaaatgaaaacatcatcc

SEQ ID NO: 56388 - DNA, 22 bp, synthetic construct
  misc_feature 1..22: note = chemically synthesized
  source 1..22: mol_type = other DNA
ttcttctcttggagttgtctcc

SEQ ID NO: 56389 - DNA, 22 bp, synthetic construct
  misc_feature 1..22: note = chemically synthesized
  source 1..22: mol_type = other DNA
tcttctcttggagttgtctccc

SEQ ID NO: 56390 - DNA, 22 bp, synthetic construct
  misc_feature 1..22: note = chemically synthesized
  source 1..22: mol_type = other DNA
cttctcttggagttgtctcccc

SEQ ID NO: 56391 - DNA, 22 bp, synthetic construct
  misc_feature 1..22: note = chemically synthesized
  source 1..22: mol_type = other DNA
ttctcttggagttgtctcccca

SEQ ID NO: 56392 - DNA, 22 bp, synthetic construct
  misc_feature 1..22: note = chemically synthesized
  source 1..22: mol_type = other DNA
ctcttggagttgtctccccaac

SEQ ID NO: 56393 - DNA, 22 bp, synthetic construct
  misc_feature 1..22: note = chemically synthesized
  source 1..22: mol_type = other DNA
tcttggagttgtctccccaact

SEQ ID NO: 56394 - DNA, 22 bp, synthetic construct
  misc_feature 1..22: note = chemically synthesized
  source 1..22: mol_type = other DNA
ttggagttgtctccccaactct

SEQ ID NO: 56395 - DNA, 22 bp, synthetic construct
  misc_feature 1..22: note = chemically synthesized
  source 1..22: mol_type = other DNA
ggagttgtctccccaactctgc

SEQ ID NO: 56396 - DNA, 22 bp, synthetic construct
  misc_feature 1..22: note = chemically synthesized
  source 1..22: mol_type = other DNA
gagttgtctccccaactctgcc

SEQ ID NO: 56397 - DNA, 22 bp, synthetic construct
  misc_feature 1..22: note = chemically synthesized
  source 1..22: mol_type = other DNA
tctccccaactctgccacctcc

SEQ ID NO: 56398 - DNA, 22 bp, synthetic construct
  misc_feature 1..22: note = chemically synthesized
  source 1..22: mol_type = other DNA
cccaactctgccacctcccaat

SEQ ID NO: 56399 - DNA, 22 bp, synthetic construct
  misc_feature 1..22: note = chemically synthesized
  source 1..22: mol_type = other DNA
tgccacctcccaattcaccacc

SEQ ID NO: 56400 - DNA, 22 bp, synthetic construct
  misc_feature 1..22: note = chemically synthesized
  source 1..22: mol_type = other DNA
ccacctcccaattcaccaccag

SEQ ID NO: 56401 - DNA, 22 bp, synthetic construct
  misc_feature 1..22: note = chemically synthesized
  source 1..22: mol_type = other DNA
ccaattcaccaccagaattttt

SEQ ID NO: 56402 - DNA, 22 bp, synthetic construct
  misc_feature 1..22: note = chemically synthesized
  source 1..22: mol_type = other DNA
accaccagaatttttttgcatg

SEQ ID NO: 56403 - DNA, 22 bp, synthetic construct
  misc_feature 1..22: note = chemically synthesized
  source 1..22: mol_type = other DNA
ttttgcatgtgctggtatggag

SEQ ID NO: 56404 - DNA, 22 bp, synthetic construct
  misc_feature 1..22: note = chemically synthesized
  source 1..22: mol_type = other DNA
tttgcatgtgctggtatggaga

SEQ ID NO: 56405 - DNA, 22 bp, synthetic construct
  misc_feature 1..22: note = chemically synthesized
  source 1..22: mol_type = other DNA
ttgcatgtgctggtatggagaa

SEQ ID NO: 56406 - DNA, 22 bp, synthetic construct
  misc_feature 1..22: note = chemically synthesized
  source 1..22: mol_type = other DNA
tgcatgtgctggtatggagaaa

SEQ ID NO: 56407 - DNA, 22 bp, synthetic construct
  misc_feature 1..22: note = chemically synthesized
  source 1..22: mol_type = other DNA
gcatgtgctggtatggagaaat

SEQ ID NO: 56408 - DNA, 22 bp, synthetic construct
  misc_feature 1..22: note = chemically synthesized
  source 1..22: mol_type = other DNA
catgtgctggtatggagaaatg

SEQ ID NO: 56409 - DNA, 22 bp, synthetic construct
  misc_feature 1..22: note = chemically synthesized
  source 1..22: mol_type = other DNA
gtatggagaaatgcaacataat

SEQ ID NO: 56410 - DNA, 22 bp, synthetic construct
  misc_feature 1..22: note = chemically synthesized
  source 1..22: mol_type = other DNA
gtttcatatggttaattacagg

SEQ ID NO: 56411 - DNA, 22 bp, synthetic construct
  misc_feature 1..22: note = chemically synthesized
  source 1..22: mol_type = other DNA
tttcatatggttaattacaggc

SEQ ID NO: 56412 - DNA, 22 bp, synthetic construct
  misc_feature 1..22: note = chemically synthesized
  source 1..22: mol_type = other DNA
catatggttaattacaggcgtt

SEQ ID NO: 56413 - DNA, 22 bp, synthetic construct
  misc_feature 1..22: note = chemically synthesized
  source 1..22: mol_type = other DNA
atatggttaattacaggcgttt

SEQ ID NO: 56414 - DNA, 22 bp, synthetic construct
  misc_feature 1..22: note = chemically synthesized
  source 1..22: mol_type = other DNA
attacaggcgtttgaatattta

SEQ ID NO: 56415 - DNA, 22 bp, synthetic construct
  misc_feature 1..22: note = chemically synthesized
  source 1..22: mol_type = other DNA
caggcgtttgaatatttaaaat

SEQ ID NO: 56416 - DNA, 22 bp, synthetic construct
  misc_feature 1..22: note = chemically synthesized
  source 1..22: mol_type = other DNA
gaatatttaaaattttaaatag

SEQ ID NO: 56417 - DNA, 22 bp, synthetic construct
  misc_feature 1..22: note = chemically synthesized
  source 1..22: mol_type = other DNA
aatatttaaaattttaaatagc

SEQ ID NO: 56418 - DNA, 22 bp, synthetic construct
  misc_feature 1..22: note = chemically synthesized
  source 1..22: mol_type = other DNA
aaaattttaaatagccacagtt

SEQ ID NO: 56419 - DNA, 22 bp, synthetic construct
  misc_feature 1..22: note = chemically synthesized
  source 1..22: mol_type = other DNA
aaattttaaatagccacagttc

SEQ ID NO: 56420 - DNA, 22 bp, synthetic construct
  misc_feature 1..22: note = chemically synthesized
  source 1..22: mol_type = other DNA
taaatagccacagttccagctt

SEQ ID NO: 56421 - DNA, 22 bp, synthetic construct
  misc_feature 1..22: note = chemically synthesized
  source 1..22: mol_type = other DNA
aaatagccacagttccagcttt

SEQ ID NO: 56422 - DNA, 22 bp, synthetic construct
  misc_feature 1..22: note = chemically synthesized
  source 1..22: mol_type = other DNA
aatagccacagttccagctttt

SEQ ID NO: 56423 - DNA, 22 bp, synthetic construct
  misc_feature 1..22: note = chemically synthesized
  source 1..22: mol_type = other DNA
cagcttttcccgttaaaagtat

SEQ ID NO: 56424 - DNA, 22 bp, synthetic construct
  misc_feature 1..22: note = chemically synthesized
  source 1..22: mol_type = other DNA
ttcccgttaaaagtatgtgatt

SEQ ID NO: 56425 - DNA, 22 bp, synthetic construct
  misc_feature 1..22: note = chemically synthesized
  source 1..22: mol_type = other DNA
tcccgttaaaagtatgtgattt

SEQ ID NO: 56426 - DNA, 22 bp, synthetic construct
  misc_feature 1..22: note = chemically synthesized
  source 1..22: mol_type = other DNA
cccgttaaaagtatgtgatttg

SEQ ID NO: 56427 - DNA, 22 bp, synthetic construct
  misc_feature 1..22: note = chemically synthesized
  source 1..22: mol_type = other DNA
ccgttaaaagtatgtgatttga

SEQ ID NO: 56428 - DNA, 22 bp, synthetic construct
  misc_feature 1..22: note = chemically synthesized
  source 1..22: mol_type = other DNA
aaagtatgtgatttgaacaaag

SEQ ID NO: 56429 - DNA, 22 bp, synthetic construct
  misc_feature 1..22: note = chemically synthesized
  source 1..22: mol_type = other DNA
gaacaaagggagtacagtgtaa

SEQ ID NO: 56430 - DNA, 22 bp, synthetic construct
  misc_feature 1..22: note = chemically synthesized
  source 1..22: mol_type = other DNA
aacaaagggagtacagtgtaaa

SEQ ID NO: 56431 - DNA, 22 bp, synthetic construct
  misc_feature 1..22: note = chemically synthesized
  source 1..22: mol_type = other DNA
gtggtgatttgcaacacccctc

SEQ ID NO: 56432 - DNA, 22 bp, synthetic construct
  misc_feature 1..22: note = chemically synthesized
  source 1..22: mol_type = other DNA
tggtgatttgcaacacccctct

SEQ ID NO: 56433 - DNA, 22 bp, synthetic construct
  misc_feature 1..22: note = chemically synthesized
  source 1..22: mol_type = other DNA
gcaacacccctctttccccatt

SEQ ID NO: 56434 - DNA, 22 bp, synthetic construct
  misc_feature 1..22: note = chemically synthesized
  source 1..22: mol_type = other DNA
caacacccctctttccccatta

SEQ ID NO: 56435 - DNA, 22 bp, synthetic construct
  misc_feature 1..22: note = chemically synthesized
  source 1..22: mol_type = other DNA
tttccccattacacacacacac

SEQ ID NO: 56436 - DNA, 22 bp, synthetic construct
  misc_feature 1..22: note = chemically synthesized
  source 1..22: mol_type = other DNA
tccccattacacacacacacac

SEQ ID NO: 56437 - DNA, 22 bp, synthetic construct
  misc_feature 1..22: note = chemically synthesized
  source 1..22: mol_type = other DNA
ccccattacacacacacacaca

SEQ ID NO: 56438 - DNA, 22 bp, synthetic construct
  misc_feature 1..22: note = chemically synthesized
  source 1..22: mol_type = other DNA
cccattacacacacacacacac

SEQ ID NO: 56439 - DNA, 22 bp, synthetic construct
  misc_feature 1..22: note = chemically synthesized
  source 1..22: mol_type = other DNA
cacacacacacacacacacaca

SEQ ID NO: 56440 - DNA, 22 bp, synthetic construct
  misc_feature 1..22: note = chemically synthesized
  source 1..22: mol_type = other DNA
agtttaaatctagtactgatct

SEQ ID NO: 56441 - DNA, 22 bp, synthetic construct
  misc_feature 1..22: note = chemically synthesized
  source 1..22: mol_type = other DNA
aaatctagtactgatctaaagg

SEQ ID NO: 56442 - DNA, 22 bp, synthetic construct
  misc_feature 1..22: note = chemically synthesized
  source 1..22: mol_type = other DNA
aatctagtactgatctaaagga

SEQ ID NO: 56443 - DNA, 22 bp, synthetic construct
  misc_feature 1..22: note = chemically synthesized
  source 1..22: mol_type = other DNA
gtactgatctaaaggacttctg

SEQ ID NO: 56444 - DNA, 22 bp, synthetic construct
  misc_feature 1..22: note = chemically synthesized
  source 1..22: mol_type = other DNA
atctaaaggacttctgtacctt

SEQ ID NO: 56445 - DNA, 22 bp, synthetic construct
  misc_feature 1..22: note = chemically synthesized
  source 1..22: mol_type = other DNA
aaggacttctgtaccttcattt

SEQ ID NO: 56446 - DNA, 22 bp, synthetic construct
  misc_feature 1..22: note = chemically synthesized
  source 1..22: mol_type = other DNA
ctgtaccttcatttgtactttt

SEQ ID NO: 56447 - DNA, 22 bp, synthetic construct
  misc_feature 1..22: note = chemically synthesized
  source 1..22: mol_type = other DNA
tgtaccttcatttgtacttttt

SEQ ID NO: 56448 - DNA, 22 bp, synthetic construct
  misc_feature 1..22: note = chemically synthesized
  source 1..22: mol_type = other DNA
taccttcatttgtacttttttt

SEQ ID NO: 56449 - DNA, 22 bp, synthetic construct
  misc_feature 1..22: note = chemically synthesized
  source 1..22: mol_type = other DNA
catttgtactttttttaaaaaa

SEQ ID NO: 56450 - DNA, 22 bp, synthetic construct
  misc_feature 1..22: note = chemically synthesized
  source 1..22: mol_type = other DNA
atttgtactttttttaaaaaac

SEQ ID NO: 56451 - DNA, 22 bp, synthetic construct
  misc_feature 1..22: note = chemically synthesized
  source 1..22: mol_type = other DNA
gtactttttttaaaaaacaact

SEQ ID NO: 56452 - DNA, 22 bp, synthetic construct
  misc_feature 1..22: note = chemically synthesized
  source 1..22: mol_type = other DNA
tactttttttaaaaaacaactt

SEQ ID NO: 56453 - DNA, 22 bp, synthetic construct
  misc_feature 1..22: note = chemically synthesized
  source 1..22: mol_type = other DNA
tttttaaaaaacaactttcaac

SEQ ID NO: 56454 - DNA, 22 bp, synthetic construct
  misc_feature 1..22: note = chemically synthesized
  source 1..22: mol_type = other DNA
ttttaaaaaacaactttcaact

SEQ ID NO: 56455 - DNA, 22 bp, synthetic construct
  misc_feature 1..22: note = chemically synthesized
  source 1..22: mol_type = other DNA
tttaaaaaacaactttcaactg

SEQ ID NO: 56456 - DNA, 22 bp, synthetic construct
  misc_feature 1..22: note = chemically synthesized
  source 1..22: mol_type = other DNA
ttaaaaaacaactttcaactgg

SEQ ID NO: 56457 - DNA, 22 bp, synthetic construct
  misc_feature 1..22: note = chemically synthesized
  source 1..22: mol_type = other DNA
taaaaaacaactttcaactgga

SEQ ID NO: 56458 - DNA, 22 bp, synthetic construct
  misc_feature 1..22: note = chemically synthesized
  source 1..22: mol_type = other DNA
aaaaaacaactttcaactggaa

SEQ ID NO: 56459 - DNA, 22 bp, synthetic construct
  misc_feature 1..22: note = chemically synthesized
  source 1..22: mol_type = other DNA
aaaaacaactttcaactggaat

SEQ ID NO: 56460 - DNA, 22 bp, synthetic construct
  misc_feature 1..22: note = chemically synthesized
  source 1..22: mol_type = other DNA
tcaactggaattccattaaaat

SEQ ID NO: 56461 - DNA, 22 bp, synthetic construct
  misc_feature 1..22: note = chemically synthesized
  source 1..22: mol_type = other DNA
caactggaattccattaaaata

SEQ ID NO: 56462 - DNA, 22 bp, synthetic construct
  misc_feature 1..22: note = chemically synthesized
  source 1..22: mol_type = other DNA
aactggaattccattaaaatat

SEQ ID NO: 56463 - DNA, 22 bp, synthetic construct
  misc_feature 1..22: note = chemically synthesized
  source 1..22: mol_type = other DNA
gaattccattaaaatatttcac

SEQ ID NO: 56464 - DNA, 22 bp, synthetic construct
  misc_feature 1..22: note = chemically synthesized
  source 1..22: mol_type = other DNA
cattaaaatatttcaccattat

SEQ ID NO: 56465 - DNA, 22 bp, synthetic construct
  misc_feature 1..22: note = chemically synthesized
  source 1..22: mol_type = other DNA
aaatatttcaccattatatttt

SEQ ID NO: 56466 - DNA, 22 bp, synthetic construct
  misc_feature 1..22: note = chemically synthesized
  source 1..22: mol_type = other DNA
caccattatatttttgagtcca

SEQ ID NO: 56467 - DNA, 22 bp, synthetic construct
  misc_feature 1..22: note = chemically synthesized
  source 1..22: mol_type = other DNA
accattatatttttgagtccac

SEQ ID NO: 56468 - DNA, 22 bp, synthetic construct
  misc_feature 1..22: note = chemically synthesized
  source 1..22: mol_type = other DNA
tatttttgagtccacattgctt

SEQ ID NO: 56469 - DNA, 22 bp, synthetic construct
  misc_feature 1..22: note = chemically synthesized
  source 1..22: mol_type = other DNA
ttgagtccacattgcttgaggt

SEQ ID NO: 56470 - DNA, 22 bp, synthetic construct
  misc_feature 1..22: note = chemically synthesized
  source 1..22: mol_type = other DNA
tgagtccacattgcttgaggtt

SEQ ID NO: 56471 - DNA, 22 bp, synthetic construct
  misc_feature 1..22: note = chemically synthesized
  source 1..22: mol_type = other DNA
gagtccacattgcttgaggttt

SEQ ID NO: 56472 - DNA, 22 bp, synthetic construct
  misc_feature 1..22: note = chemically synthesized
  source 1..22: mol_type = other DNA
agtccacattgcttgaggtttt

SEQ ID NO: 56473 - DNA, 22 bp, synthetic construct
  misc_feature 1..22: note = chemically synthesized
  source 1..22: mol_type = other DNA
cttgaggttttaaagaagattt

SEQ ID NO: 56474 - DNA, 22 bp, synthetic construct
  misc_feature 1..22: note = chemically synthesized
  source 1..22: mol_type = other DNA
gaggttttaaagaagattttta

SEQ ID NO: 56475 - DNA, 22 bp, synthetic construct
  misc_feature 1..22: note = chemically synthesized
  source 1..22: mol_type = other DNA
aggttttaaagaagatttttat

SEQ ID NO: 56476 - DNA, 22 bp, synthetic construct
  misc_feature 1..22: note = chemically synthesized
  source 1..22: mol_type = other DNA
taaagaagatttttataatgtg

SEQ ID NO: 56477 - DNA, 22 bp, synthetic construct
  misc_feature 1..22: note = chemically synthesized
  source 1..22: mol_type = other DNA
aaagaagatttttataatgtgt

SEQ ID NO: 56478 - DNA, 22 bp, synthetic construct
  misc_feature 1..22: note = chemically synthesized
  source 1..22: mol_type = other DNA
aagaagatttttataatgtgtt

SEQ ID NO: 56479 - DNA, 22 bp, synthetic construct
  misc_feature 1..22: note = chemically synthesized
  source 1..22: mol_type = other DNA
ttataatgtgttcctttaacag

SEQ ID NO: 56480 - DNA, 22 bp, synthetic construct
  misc_feature 1..22: note = chemically synthesized
  source 1..22: mol_type = other DNA
tataatgtgttcctttaacaga

SEQ ID NO: 56481 - DNA, 22 bp, synthetic construct
  misc_feature 1..22: note = chemically synthesized
  source 1..22: mol_type = other DNA
ataatgtgttcctttaacagaa

SEQ ID NO: 56482 - DNA, 22 bp, synthetic construct
  misc_feature 1..22: note = chemically synthesized
  source 1..22: mol_type = other DNA
taatgtgttcctttaacagaat

SEQ ID NO: 56483 - DNA, 22 bp, synthetic construct
  misc_feature 1..22: note = chemically synthesized
  source 1..22: mol_type = other DNA
ctttaacagaatcaacagctgt

SEQ ID NO: 56484 - DNA, 22 bp, synthetic construct
  misc_feature 1..22: note = chemically synthesized
  source 1..22: mol_type = other DNA
taacagaatcaacagctgtcag

SEQ ID NO: 56485 - DNA, 22 bp, synthetic construct
  misc_feature 1..22: note = chemically synthesized
  source 1..22: mol_type = other DNA
aacagaatcaacagctgtcaga

SEQ ID NO: 56486 - DNA, 22 bp, synthetic construct
  misc_feature 1..22: note = chemically synthesized
  source 1..22: mol_type = other DNA
acagaatcaacagctgtcagaa

SEQ ID NO: 56487 - DNA, 22 bp, synthetic construct
  misc_feature 1..22: note = chemically synthesized
  source 1..22: mol_type = other DNA
tcagaagcagttgtggtagatc

SEQ ID NO: 56488 - DNA, 22 bp, synthetic construct
  misc_feature 1..22: note = chemically synthesized
  source 1..22: mol_type = other DNA
tggtagatccacaaaacgtata

SEQ ID NO: 56489 - DNA, 22 bp, synthetic construct
  misc_feature 1..22: note = chemically synthesized
  source 1..22: mol_type = other DNA
cctgaaacaaaacacttggaaa

SEQ ID NO: 56490 - DNA, 22 bp, synthetic construct
  misc_feature 1..22: note = chemically synthesized
  source 1..22: mol_type = other DNA
ctgaaacaaaacacttggaaaa

SEQ ID NO: 56491 - DNA, 22 bp, synthetic construct
  misc_feature 1..22: note = chemically synthesized
  source 1..22: mol_type = other DNA
aaacaaaacacttggaaaaata

SEQ ID NO: 56492 - DNA, 22 bp, synthetic construct
  misc_feature 1..22: note = chemically synthesized
  source 1..22: mol_type = other DNA
ggaaaaataagctgctaagaac

SEQ ID NO: 56493 - DNA, 22 bp, synthetic construct
  misc_feature 1..22: note = chemically synthesized
  source 1..22: mol_type = other DNA
gaaaaataagctgctaagaact

SEQ ID NO: 56494 - DNA, 22 bp, synthetic construct
  misc_feature 1..22: note = chemically synthesized
  source 1..22: mol_type = other DNA
ctaagaactggcgaattagaag

SEQ ID NO: 56495 - DNA, 22 bp, synthetic construct
  misc_feature 1..22: note = chemically synthesized
  source 1..22: mol_type = other DNA
agaactggcgaattagaagttt

SEQ ID NO: 56496 - DNA, 22 bp, synthetic construct
  misc_feature 1..22: note = chemically synthesized
  source 1..22: mol_type = other DNA
gcgaattagaagtttgcagaca

SEQ ID NO: 56497 - DNA, 22 bp, synthetic construct
  misc_feature 1..22: note = chemically synthesized
  source 1..22: mol_type = other DNA
gaagtttgcagacagggaactg

SEQ ID NO: 56498 - DNA, 22 bp, synthetic construct
  misc_feature 1..22: note = chemically synthesized
  source 1..22: mol_type = other DNA
gcagacagggaactgaagtgtc

SEQ ID NO: 56499 - DNA, 22 bp, synthetic construct
  misc_feature 1..22: note = chemically synthesized
  source 1..22: mol_type = other DNA
cagacagggaactgaagtgtca

SEQ ID NO: 56500 - DNA, 22 bp, synthetic construct
  misc_feature 1..22: note = chemically synthesized
  source 1..22: mol_type = other DNA
aagtgtcatctcttggttcacc

SEQ ID NO: 56501 - DNA, 22 bp, synthetic construct
  misc_feature 1..22: note = chemically synthesized
  source 1..22: mol_type = other DNA
ttggttcaccctggagactgat

SEQ ID NO: 56502 - DNA, 22 bp, synthetic construct
  misc_feature 1..22: note = chemically synthesized
  source 1..22: mol_type = other DNA
ggttcaccctggagactgatgt

SEQ ID NO: 56503 - DNA, 22 bp, synthetic construct
  misc_feature 1..22: note = chemically synthesized
  source 1..22: mol_type = other DNA
gttcaccctggagactgatgtg

SEQ ID NO: 56504 - DNA, 22 bp, synthetic construct
  misc_feature 1..22: note = chemically synthesized
  source 1..22: mol_type = other DNA
accctggagactgatgtgagtg

SEQ ID NO: 56505 - DNA, 22 bp, synthetic construct
  misc_feature 1..22: note = chemically synthesized
  source 1..22: mol_type = other DNA
gagactgatgtgagtggatctg

SEQ ID NO: 56506 - DNA, 22 bp, synthetic construct
  misc_feature 1..22: note = chemically synthesized
  source 1..22: mol_type = other DNA
atgtgagtggatctgatgcaat

SEQ ID NO: 56507 - DNA, 22 bp, synthetic construct
  misc_feature 1..22: note = chemically synthesized
  source 1..22: mol_type = other DNA
atgcaatgctgctggaagattt

SEQ ID NO: 56508 - DNA, 22 bp, synthetic construct
  misc_feature 1..22: note = chemically synthesized
  source 1..22: mol_type = other DNA
ctggaagatttacctgcacagg

SEQ ID NO: 56509 - DNA, 22 bp, synthetic construct
  misc_feature 1..22: note = chemically synthesized
  source 1..22: mol_type = other DNA
gaagatttacctgcacaggttg

SEQ ID NO: 56510 - DNA, 22 bp, synthetic construct
  misc_feature 1..22: note = chemically synthesized
  source 1..22: mol_type = other DNA
acctgcacaggttgctcctcta

SEQ ID NO: 56511 - DNA, 22 bp, synthetic construct
  misc_feature 1..22: note = chemically synthesized
  source 1..22: mol_type = other DNA
cctgcacaggttgctcctctaa

SEQ ID NO: 56512 - DNA, 22 bp, synthetic construct
  misc_feature 1..22: note = chemically synthesized
  source 1..22: mol_type = other DNA
cacaggttgctcctctaaggca

SEQ ID NO: 56513 - DNA, 22 bp, synthetic construct
  misc_feature 1..22: note = chemically synthesized
  source 1..22: mol_type = other DNA
ctcctctaaggcaacgcgcagt

SEQ ID NO: 56514 - DNA, 22 bp, synthetic construct
  misc_feature 1..22: note = chemically synthesized
  source 1..22: mol_type = other DNA
ctctaaggcaacgcgcagtgca

SEQ ID NO: 56515 - DNA, 22 bp, synthetic construct
  misc_feature 1..22: note = chemically synthesized
  source 1..22: mol_type = other DNA
taaggcaacgcgcagtgcacga

SEQ ID NO: 56516 - DNA, 22 bp, synthetic construct
  misc_feature 1..22: note = chemically synthesized
  source 1..22: mol_type = other DNA
aggcaacgcgcagtgcacgatt

SEQ ID NO: 56517 - DNA, 22 bp, synthetic construct
  misc_feature 1..22: note = chemically synthesized
  source 1..22: mol_type = other DNA
acgtatgcaccagagctaggct

SEQ ID NO: 56518 - DNA, 22 bp, synthetic construct
  misc_feature 1..22: note = chemically synthesized
  source 1..22: mol_type = other DNA
ggctgggcctcagctcgctcca

SEQ ID NO: 56519 - DNA, 22 bp, synthetic construct
  misc_feature 1..22: note = chemically synthesized
  source 1..22: mol_type = other DNA
ggcctcagctcgctccatcttt

SEQ ID NO: 56520 - DNA, 22 bp, synthetic construct
  misc_feature 1..22: note = chemically synthesized
  source 1..22: mol_type = other DNA
agctcgctccatcttttgccct

SEQ ID NO: 56521 - DNA, 22 bp, synthetic construct
  misc_feature 1..22: note = chemically synthesized
  source 1..22: mol_type = other DNA
gctccatcttttgccctttttg

SEQ ID NO: 56522 - DNA, 22 bp, synthetic construct
  misc_feature 1..22: note = chemically synthesized
  source 1..22: mol_type = other DNA
catcttttgccctttttgatct

SEQ ID NO: 56523 - DNA, 22 bp, synthetic construct
  misc_feature 1..22: note = chemically synthesized
  source 1..22: mol_type = other DNA
ttgccctttttgatctctttag

SEQ ID NO: 56524 - DNA, 22 bp, synthetic construct
  misc_feature 1..22: note = chemically synthesized
  source 1..22: mol_type = other DNA
tgccctttttgatctctttaga

SEQ ID NO: 56525 - DNA, 22 bp, synthetic construct
  misc_feature 1..22: note = chemically synthesized
  source 1..22: mol_type = other DNA
gccctttttgatctctttagat

SEQ ID NO: 56526 - DNA, 22 bp, synthetic construct
  misc_feature 1..22: note = chemically synthesized
  source 1..22: mol_type = other DNA
ccctttttgatctctttagata

SEQ ID NO: 56527 - DNA, 22 bp, synthetic construct
  misc_feature 1..22: note = chemically synthesized
  source 1..22: mol_type = other DNA
tttgatctctttagatagataa

SEQ ID NO: 56528 - DNA, 22 bp, synthetic construct
  misc_feature 1..22: note = chemically synthesized
  source 1..22: mol_type = other DNA
ttgatctctttagatagataaa

SEQ ID NO: 56529 - DNA, 22 bp, synthetic construct
  misc_feature 1..22: note = chemically synthesized
  source 1..22: mol_type = other DNA
tgatctctttagatagataaaa

SEQ ID NO: 56530 - DNA, 22 bp, synthetic construct
  misc_feature 1..22: note = chemically synthesized
  source 1..22: mol_type = other DNA
gatctctttagatagataaaat

SEQ ID NO: 56531 - DNA, 22 bp, synthetic construct
  misc_feature 1..22: note = chemically synthesized
  source 1..22: mol_type = other DNA
atctctttagatagataaaata

SEQ ID NO: 56532 - DNA, 22 bp, synthetic construct
  misc_feature 1..22: note = chemically synthesized
  source 1..22: mol_type = other DNA
tttagatagataaaataccaag

SEQ ID NO: 56533 - DNA, 22 bp, synthetic construct
  misc_feature 1..22: note = chemically synthesized
  source 1..22: mol_type = other DNA
tagatagataaaataccaagtt

SEQ ID NO: 56534 - DNA, 22 bp, synthetic construct
  misc_feature 1..22: note = chemically synthesized
  source 1..22: mol_type = other DNA
agatagataaaataccaagttc

SEQ ID NO: 56535 - DNA, 22 bp, synthetic construct
  misc_feature 1..22: note = chemically synthesized
  source 1..22: mol_type = other DNA
gatagataaaataccaagttct

SEQ ID NO: 56536 - DNA, 22 bp, synthetic construct
  misc_feature 1..22: note = chemically synthesized
  source 1..22: mol_type = other DNA
tcagagtgctaaacaacaaatt

SEQ ID NO: 56537 - DNA, 22 bp, synthetic construct
  misc_feature 1..22: note = chemically synthesized
  source 1..22: mol_type = other DNA
agagtgctaaacaacaaattat

SEQ ID NO: 56538 - DNA, 22 bp, synthetic construct
  misc_feature 1..22: note = chemically synthesized
  source 1..22: mol_type = other DNA
aacaacaaattatatataccta

SEQ ID NO: 56539 - DNA, 22 bp, synthetic construct
  misc_feature 1..22: note = chemically synthesized
  source 1..22: mol_type = other DNA
tatatacctaaaggtgagatga

SEQ ID NO: 56540 - DNA, 22 bp, synthetic construct
  misc_feature 1..22: note = chemically synthesized
  source 1..22: mol_type = other DNA
aaggtgagatgatcaggtttaa

SEQ ID NO: 56541 - DNA, 22 bp, synthetic construct
  misc_feature 1..22: note = chemically synthesized
  source 1..22: mol_type = other DNA
aaacttcctgtaaaagaggcga

SEQ ID NO: 56542 - DNA, 22 bp, synthetic construct
  misc_feature 1..22: note = chemically synthesized
  source 1..22: mol_type = other DNA
aacttcctgtaaaagaggcgag

SEQ ID NO: 56543 - DNA, 22 bp, synthetic construct
  misc_feature 1..22: note = chemically synthesized
  source 1..22: mol_type = other DNA
cctgtaaaagaggcgagaaggc

SEQ ID NO: 56544 - DNA, 22 bp, synthetic construct
  misc_feature 1..22: note = chemically synthesized
  source 1..22: mol_type = other DNA
ctgtaaaagaggcgagaaggcg

SEQ ID NO: 56545 - DNA, 22 bp, synthetic construct
  misc_feature 1..22: note = chemically synthesized
  source 1..22: mol_type = other DNA
taaaagaggcgagaaggcgcct

SEQ ID NO: 56546 - DNA, 22 bp, synthetic construct
  misc_feature 1..22: note = chemically synthesized
  source 1..22: mol_type = other DNA
gcacacccttttccagataggg

SEQ ID NO: 56547 - DNA, 22 bp, synthetic construct
  misc_feature 1..22: note = chemically synthesized
  source 1..22: mol_type = other DNA
cacacccttttccagatagggc

SEQ ID NO: 56548 - DNA, 22 bp, synthetic construct
  misc_feature 1..22: note = chemically synthesized
  source 1..22: mol_type = other DNA
ttccagatagggctggcagcat

SEQ ID NO: 56549 - DNA, 22 bp, synthetic construct
  misc_feature 1..22: note = chemically synthesized
  source 1..22: mol_type = other DNA
tccagatagggctggcagcatg

SEQ ID NO: 56550 - DNA, 22 bp, synthetic construct
  misc_feature 1..22: note = chemically synthesized
  source 1..22: mol_type = other DNA
ccagatagggctggcagcatgt

SEQ ID NO: 56551 - DNA, 22 bp, synthetic construct
  misc_feature 1..22: note = chemically synthesized
  source 1..22: mol_type = other DNA
cagatagggctggcagcatgtt

SEQ ID NO: 56552 - DNA, 22 bp, synthetic construct
  misc_feature 1..22: note = chemically synthesized
  source 1..22: mol_type = other DNA
gcagcatgttattcagaactga

SEQ ID NO: 56553 - DNA, 22 bp, synthetic construct
  misc_feature 1..22: note = chemically synthesized
  source 1..22: mol_type = other DNA
ttcagaactgaatcagtctctg

SEQ ID NO: 56554 - DNA, 22 bp, synthetic construct
  misc_feature 1..22: note = chemically synthesized
  source 1..22: mol_type = other DNA
agaactgaatcagtctctgcca

SEQ ID NO: 56555 - DNA, 22 bp, synthetic construct
  misc_feature 1..22: note = chemically synthesized
  source 1..22: mol_type = other DNA
aatcagtctctgccagagaatt

SEQ ID NO: 56556 - DNA, 22 bp, synthetic construct
  misc_feature 1..22: note = chemically synthesized
  source 1..22: mol_type = other DNA
tgccagagaattcccagtggga

SEQ ID NO: 56557 - DNA, 22 bp, synthetic construct
  misc_feature 1..22: note = chemically synthesized
  source 1..22: mol_type = other DNA
ccagagaattcccagtgggaac

SEQ ID NO: 56558 - DNA, 22 bp, synthetic construct
  misc_feature 1..22: note = chemically synthesized
  source 1..22: mol_type = other DNA
ccagtgggaacctggagcaggt

SEQ ID NO: 56559 - DNA, 22 bp, synthetic construct
  misc_feature 1..22: note = chemically synthesized
  source 1..22: mol_type = other DNA
gagcaggtatgttgatgaaggg

SEQ ID NO: 56560 - DNA, 22 bp, synthetic construct
  misc_feature 1..22: note = chemically synthesized
  source 1..22: mol_type = other DNA
atgaaggggatacctggggacc

SEQ ID NO: 56561 - DNA, 22 bp, synthetic construct
  misc_feature 1..22: note = chemically synthesized
  source 1..22: mol_type = other DNA
gggacctttggtcactcacaat

SEQ ID NO: 56562 - DNA, 22 bp, synthetic construct
  misc_feature 1..22: note = chemically synthesized
  source 1..22: mol_type = other DNA
tggtcactcacaatgagttttt

SEQ ID NO: 56563 - DNA, 22 bp, synthetic construct
  misc_feature 1..22: note = chemically synthesized
  source 1..22: mol_type = other DNA
ggtcactcacaatgagtttttg

SEQ ID NO: 56564 - DNA, 22 bp, synthetic construct
  misc_feature 1..22: note = chemically synthesized
  source 1..22: mol_type = other DNA
gtcactcacaatgagtttttgt

SEQ ID NO: 56565 - DNA, 22 bp, synthetic construct
  misc_feature 1..22: note = chemically synthesized
  source 1..22: mol_type = other DNA
acaatgagtttttgtttgtatt

SEQ ID NO: 56566 - DNA, 22 bp, synthetic construct
  misc_feature 1..22: note = chemically synthesized
  source 1..22: mol_type = other DNA
ttgtttgtattctcactgttgt

SEQ ID NO: 56567 - DNA, 22 bp, synthetic construct
  misc_feature 1..22: note = chemically synthesized
  source 1..22: mol_type = other DNA
tgtttgtattctcactgttgtt

SEQ ID NO: 56568 - DNA, 22 bp, synthetic construct
  misc_feature 1..22: note = chemically synthesized
  source 1..22: mol_type = other DNA
gtttgtattctcactgttgtta

SEQ ID NO: 56569 - DNA, 22 bp, synthetic construct
  misc_feature 1..22: note = chemically synthesized
  source 1..22: mol_type = other DNA
tttgtattctcactgttgttag

SEQ ID NO: 56570 - DNA, 22 bp, synthetic construct
  misc_feature 1..22: note = chemically synthesized
  source 1..22: mol_type = other DNA
gtattctcactgttgttagcat

SEQ ID NO: 56571 - DNA, 22 bp, synthetic construct
  misc_feature 1..22: note = chemically synthesized
  source 1..22: mol_type = other DNA
tattctcactgttgttagcatt

SEQ ID NO: 56572 - DNA, 22 bp, synthetic construct
  misc_feature 1..22: note = chemically synthesized
  source 1..22: mol_type = other DNA
tcactgttgttagcattgccaa

SEQ ID NO: 56573 - DNA, 22 bp, synthetic construct
  misc_feature 1..22: note = chemically synthesized
  source 1..22: mol_type = other DNA
actgttgttagcattgccaatg

SEQ ID NO: 56574 - DNA, 22 bp, synthetic construct
  misc_feature 1..22: note = chemically synthesized
  source 1..22: mol_type = other DNA
ttgttagcattgccaatgaaca

SEQ ID NO: 56575 - DNA, 22 bp, synthetic construct
  misc_feature 1..22: note = chemically synthesized
  source 1..22: mol_type = other DNA
ttagcattgccaatgaacaatt

SEQ ID NO: 56576 - DNA, 22 bp, synthetic construct
  misc_feature 1..22: note = chemically synthesized
  source 1..22: mol_type = other DNA
gcattgccaatgaacaattgca

SEQ ID NO: 56577 - DNA, 22 bp, synthetic construct
  misc_feature 1..22: note = chemically synthesized
  source 1..22: mol_type = other DNA
ccaatgaacaattgcacctaca

SEQ ID NO: 56578 - DNA, 22 bp, synthetic construct
  misc_feature 1..22: note = chemically synthesized
  source 1..22: mol_type = other DNA
cacctacaatttgattttagtt

SEQ ID NO: 56579 - DNA, 22 bp, synthetic construct
  misc_feature 1..22: note = chemically synthesized
  source 1..22: mol_type = other DNA
caatttgattttagttttagat

SEQ ID NO: 56580 - DNA, 22 bp, synthetic construct
  misc_feature 1..22: note = chemically synthesized
  source 1..22: mol_type = other DNA
gattttagttttagatagaggc

SEQ ID NO: 56581 - DNA, 22 bp, synthetic construct
  misc_feature 1..22: note = chemically synthesized
  source 1..22: mol_type = other DNA
attttagttttagatagaggcg

SEQ ID NO: 56582 - DNA, 22 bp, synthetic construct
  misc_feature 1..22: note = chemically synthesized
  source 1..22: mol_type = other DNA
tagttttagatagaggcgaatc

SEQ ID NO: 56583 - DNA, 22 bp, synthetic construct
  misc_feature 1..22: note = chemically synthesized
  source 1..22: mol_type = other DNA
agttttagatagaggcgaatcc

SEQ ID NO: 56584 - DNA, 22 bp, synthetic construct
  misc_feature 1..22: note = chemically synthesized
  source 1..22: mol_type = other DNA
gttttagatagaggcgaatcca

SEQ ID NO: 56585 - DNA, 22 bp, synthetic construct
  misc_feature 1..22: note = chemically synthesized
  source 1..22: mol_type = other DNA
tagatagaggcgaatccactga

SEQ ID NO: 56586 - DNA, 22 bp, synthetic construct
  misc_feature 1..22: note = chemically synthesized
  source 1..22: mol_type = other DNA
agatagaggcgaatccactgat

SEQ ID NO: 56587 - DNA, 22 bp, synthetic construct
  misc_feature 1..22: note = chemically synthesized
  source 1..22: mol_type = other DNA
gatagaggcgaatccactgatt

SEQ ID NO: 56588 - DNA, 22 bp, synthetic construct
  misc_feature 1..22: note = chemically synthesized
  source 1..22: mol_type = other DNA
attaaaaactcccattaaaata

SEQ ID NO: 56589 - DNA, 22 bp, synthetic construct
  misc_feature 1..22: note = chemically synthesized
  source 1..22: mol_type = other DNA
aaaactcccattaaaataaaga

SEQ ID NO: 56590 - DNA, 22 bp, synthetic construct
  misc_feature 1..22: note = chemically synthesized
  source 1..22: mol_type = other DNA
ccattaaaataaagaatggaat

SEQ ID NO: 56591 - DNA, 22 bp, synthetic construct
  misc_feature 1..22: note = chemically synthesized
  source 1..22: mol_type = other DNA
aaataaagaatggaattattgt

SEQ ID NO: 56592 - DNA, 22 bp, synthetic construct
  misc_feature 1..22: note = chemically synthesized
  source 1..22: mol_type = other DNA
ttgtgaaacctgcaagggtgcc

SEQ ID NO: 56593 - DNA, 22 bp, synthetic construct
  misc_feature 1..22: note = chemically synthesized
  source 1..22: mol_type = other DNA
tgaaacctgcaagggtgccttc

SEQ ID NO: 56594 - DNA, 22 bp, synthetic construct
  misc_feature 1..22: note = chemically synthesized
  source 1..22: mol_type = other DNA
caagggtgccttcaaaaagaaa

SEQ ID NO: 56595 - DNA, 22 bp, synthetic construct
  misc_feature 1..22: note = chemically synthesized
  source 1..22: mol_type = other DNA
caaaaagaaaaccagtgctgtt

SEQ ID NO: 56596 - DNA, 22 bp, synthetic construct
  misc_feature 1..22: note = chemically synthesized
  source 1..22: mol_type = other DNA
aaaaagaaaaccagtgctgttg

SEQ ID NO: 56597 - DNA, 22 bp, synthetic construct
  misc_feature 1..22: note = chemically synthesized
  source 1..22: mol_type = other DNA
ttgtatacctacctcgcctttc

SEQ ID NO: 56598 - DNA, 22 bp, synthetic construct
  misc_feature 1..22: note = chemically synthesized
  source 1..22: mol_type = other DNA
tatacctacctcgcctttctat

SEQ ID NO: 56599 - DNA, 22 bp, synthetic construct
  misc_feature 1..22: note = chemically synthesized
  source 1..22: mol_type = other DNA
cctcgcctttctatttgctttt

SEQ ID NO: 56600 - DNA, 22 bp, synthetic construct
  misc_feature 1..22: note = chemically synthesized
  source 1..22: mol_type = other DNA
gcctttctatttgctttttgaa

SEQ ID NO: 56601 - DNA, 22 bp, synthetic construct
  misc_feature 1..22: note = chemically synthesized
  source 1..22: mol_type = other DNA
tctatttgctttttgaactttc

SEQ ID NO: 56602 - DNA, 22 bp, synthetic construct
  misc_feature 1..22: note = chemically synthesized
  source 1..22: mol_type = other DNA
ctatttgctttttgaactttct

SEQ ID NO: 56603 - DNA, 22 bp, synthetic construct
  misc_feature 1..22: note = chemically synthesized
  source 1..22: mol_type = other DNA
tatttgctttttgaactttcta

SEQ ID NO: 56604 - DNA, 22 bp, synthetic construct
  misc_feature 1..22: note = chemically synthesized
  source 1..22: mol_type = other DNA
tttgctttttgaactttctaaa

SEQ ID NO: 56605 - DNA, 22 bp, synthetic construct
  misc_feature 1..22: note = chemically synthesized
  source 1..22: mol_type = other DNA
gctttttgaactttctaaaaaa

SEQ ID NO: 56606 - DNA, 22 bp, synthetic construct
  misc_feature 1..22: note = chemically synthesized
  source 1..22: mol_type = other DNA
ctttttgaactttctaaaaaac

SEQ ID NO: 56607 - DNA, 22 bp, synthetic construct
  misc_feature 1..22: note = chemically synthesized
  source 1..22: mol_type = other DNA
tttgaactttctaaaaaacaca

SEQ ID NO: 56608 - DNA, 22 bp, synthetic construct
  misc_feature 1..22: note = chemically synthesized
  source 1..22: mol_type = other DNA
ttgaactttctaaaaaacacaa

SEQ ID NO: 56609 - DNA, 22 bp, synthetic construct
  misc_feature 1..22: note = chemically synthesized
  source 1..22: mol_type = other DNA
tgaactttctaaaaaacacaag

SEQ ID NO: 56610 - DNA, 22 bp, synthetic construct
  misc_feature 1..22: note = chemically synthesized
  source 1..22: mol_type = other DNA
gaactttctaaaaaacacaagg

SEQ ID NO: 56611 - DNA, 22 bp, synthetic construct
  misc_feature 1..22: note = chemically synthesized
  source 1..22: mol_type = other DNA
aactttctaaaaaacacaagga

SEQ ID NO: 56612 - DNA, 22 bp, synthetic construct
  misc_feature 1..22: note = chemically synthesized
  source 1..22: mol_type = other DNA
tctaaaaaacacaaggaagctt

SEQ ID NO: 56613 - DNA, 22 bp, synthetic construct
  misc_feature 1..22: note = chemically synthesized
  source 1..22: mol_type = other DNA
ctaaaaaacacaaggaagcttt

SEQ ID NO: 56614 - DNA, 22 bp, synthetic construct
  misc_feature 1..22: note = chemically synthesized
  source 1..22: mol_type = other DNA
taaaaaacacaaggaagctttt

SEQ ID NO: 56615 - DNA, 22 bp, synthetic construct
  misc_feature 1..22: note = chemically synthesized
  source 1..22: mol_type = other DNA
aaaaacacaaggaagctttttg

SEQ ID NO: 56616 - DNA, 22 bp, synthetic construct
  misc_feature 1..22: note = chemically synthesized
  source 1..22: mol_type = other DNA
tttgctaagcatcagggcattt

SEQ ID NO: 56617 - DNA, 22 bp, synthetic construct
  misc_feature 1..22: note = chemically synthesized
  source 1..22: mol_type = other DNA
ttgctaagcatcagggcattta

SEQ ID NO: 56618 - DNA, 22 bp, synthetic construct
  misc_feature 1..22: note = chemically synthesized
  source 1..22: mol_type = other DNA
tgctaagcatcagggcatttaa

SEQ ID NO: 56619 - DNA, 22 bp, synthetic construct
  misc_feature 1..22: note = chemically synthesized
  source 1..22: mol_type = other DNA
gctaagcatcagggcatttaaa

SEQ ID NO: 56620 - DNA, 22 bp, synthetic construct
  misc_feature 1..22: note = chemically synthesized
  source 1..22: mol_type = other DNA
ctaagcatcagggcatttaaat

SEQ ID NO: 56621 - DNA, 22 bp, synthetic construct
  misc_feature 1..22: note = chemically synthesized
  source 1..22: mol_type = other DNA
agcatcagggcatttaaattta

SEQ ID NO: 56622 - DNA, 22 bp, synthetic construct
  misc_feature 1..22: note = chemically synthesized
  source 1..22: mol_type = other DNA
aaatttatattcatcagttgtt

SEQ ID NO: 56623 - DNA, 22 bp, synthetic construct
  misc_feature 1..22: note = chemically synthesized
  source 1..22: mol_type = other DNA
aatttatattcatcagttgttc

SEQ ID NO: 56624 - DNA, 22 bp, synthetic construct
  misc_feature 1..22: note = chemically synthesized
  source 1..22: mol_type = other DNA
atattcatcagttgttcatttt

SEQ ID NO: 56625 - DNA, 22 bp, synthetic construct
  misc_feature 1..22: note = chemically synthesized
  source 1..22: mol_type = other DNA
tattcatcagttgttcattttc

SEQ ID NO: 56626 - DNA, 22 bp, synthetic construct
  misc_feature 1..22: note = chemically synthesized
  source 1..22: mol_type = other DNA
atcagttgttcattttcttaat

SEQ ID NO: 56627 - DNA, 22 bp, synthetic construct
  misc_feature 1..22: note = chemically synthesized
  source 1..22: mol_type = other DNA
ttcattttcttaatatgtaatg

SEQ ID NO: 56628 - DNA, 22 bp, synthetic construct
  misc_feature 1..22: note = chemically synthesized
  source 1..22: mol_type = other DNA
attttcttaatatgtaatgatg

SEQ ID NO: 56629 - DNA, 22 bp, synthetic construct
  misc_feature 1..22: note = chemically synthesized
  source 1..22: mol_type = other DNA
tcttaatatgtaatgatgcata

SEQ ID NO: 56630 - DNA, 22 bp, synthetic construct
  misc_feature 1..22: note = chemically synthesized
  source 1..22: mol_type = other DNA
cttaatatgtaatgatgcataa

SEQ ID NO: 56631 - DNA, 22 bp, synthetic construct
  misc_feature 1..22: note = chemically synthesized
  source 1..22: mol_type = other DNA
ttaatatgtaatgatgcataaa

SEQ ID NO: 56632 - DNA, 22 bp, synthetic construct
  misc_feature 1..22: note = chemically synthesized
  source 1..22: mol_type = other DNA
aatatgtaatgatgcataaaaa

SEQ ID NO: 56633 - DNA, 22 bp, synthetic construct
  misc_feature 1..22: note = chemically synthesized
  source 1..22: mol_type = other DNA
atatgtaatgatgcataaaaag

SEQ ID NO: 56634 - DNA, 22 bp, synthetic construct
  misc_feature 1..22: note = chemically synthesized
  source 1..22: mol_type = other DNA
caaggaaatcacatctgttaat

SEQ ID NO: 56635 - DNA, 22 bp, synthetic construct
  misc_feature 1..22: note = chemically synthesized
  source 1..22: mol_type = other DNA
ttaatttttagggaaataaagt

SEQ ID NO: 56636 - DNA, 22 bp, synthetic construct
  misc_feature 1..22: note = chemically synthesized
  source 1..22: mol_type = other DNA
atttttagggaaataaagtgta

SEQ ID NO: 56637 - DNA, 22 bp, synthetic construct
  misc_feature 1..22: note = chemically synthesized
  source 1..22: mol_type = other DNA
ttagggaaataaagtgtagctt

SEQ ID NO: 56638 - DNA, 22 bp, synthetic construct
  misc_feature 1..22: note = chemically synthesized
  source 1..22: mol_type = other DNA
tagggaaataaagtgtagcttg

SEQ ID NO: 56639 - DNA, 22 bp, synthetic construct
  misc_feature 1..22: note = chemically synthesized
  source 1..22: mol_type = other DNA
agggaaataaagtgtagcttgg

SEQ ID NO: 56640 - DNA, 22 bp, synthetic construct
  misc_feature 1..22: note = chemically synthesized
  source 1..22: mol_type = other DNA
gggaaataaagtgtagcttgga

SEQ ID NO: 56641 - DNA, 22 bp, synthetic construct
  misc_feature 1..22: note = chemically synthesized
  source 1..22: mol_type = other DNA
ggattcttatgttggagcacaa

SEQ ID NO: 56642 - DNA, 22 bp, synthetic construct
  misc_feature 1..22: note = chemically synthesized
  source 1..22: mol_type = other DNA
gattcttatgttggagcacaaa

SEQ ID NO: 56643 - DNA, 22 bp, synthetic construct
  misc_feature 1..22: note = chemically synthesized
  source 1..22: mol_type = other DNA
ttatgttggagcacaaagcact

SEQ ID NO: 56644 - DNA, 22 bp, synthetic construct
  misc_feature 1..22: note = chemically synthesized
  source 1..22: mol_type = other DNA
atgttggagcacaaagcactat

SEQ ID NO: 56645 - DNA, 22 bp, synthetic construct
  misc_feature 1..22: note = chemically synthesized
  source 1..22: mol_type = other DNA
tgttggagcacaaagcactatg

SEQ ID NO: 56646 - DNA, 22 bp, synthetic construct
  misc_feature 1..22: note = chemically synthesized
  source 1..22: mol_type = other DNA
gagcacaaagcactatgtgcca

SEQ ID NO: 56647 - DNA, 22 bp, synthetic construct
  misc_feature 1..22: note = chemically synthesized
  source 1..22: mol_type = other DNA
tgtgccaagtctgttcctgtac

SEQ ID NO: 56648 - DNA, 22 bp, synthetic construct
  misc_feature 1..22: note = chemically synthesized
  source 1..22: mol_type = other DNA
ttcctgtacattttaaatatag

SEQ ID NO: 56649 - DNA, 22 bp, synthetic construct
  misc_feature 1..22: note = chemically synthesized
  source 1..22: mol_type = other DNA
ctgtacattttaaatatagagt

SEQ ID NO: 56650 - DNA, 22 bp, synthetic construct
  misc_feature 1..22: note = chemically synthesized
  source 1..22: mol_type = other DNA
tacattttaaatatagagtttt

SEQ ID NO: 56651 - DNA, 22 bp, synthetic construct
  misc_feature 1..22: note = chemically synthesized
  source 1..22: mol_type = other DNA
taaatatagagttttaatattt

SEQ ID NO: 56652 - DNA, 22 bp, synthetic construct
  misc_feature 1..22: note = chemically synthesized
  source 1..22: mol_type = other DNA
aaatatagagttttaatatttg

SEQ ID NO: 56653 - DNA, 22 bp, synthetic construct
  misc_feature 1..22: note = chemically synthesized
  source 1..22: mol_type = other DNA
aatatagagttttaatatttgg

SEQ ID NO: 56654 - DNA, 22 bp, synthetic construct
  misc_feature 1..22: note = chemically synthesized
  source 1..22: mol_type = other DNA
taatatttggccaatccctgca

SEQ ID NO: 56655 - DNA, 22 bp, synthetic construct
  misc_feature 1..22: note = chemically synthesized
  source 1..22: mol_type = other DNA
aatatttggccaatccctgcac

SEQ ID NO: 56656 - DNA, 22 bp, synthetic construct
  misc_feature 1..22: note = chemically synthesized
  source 1..22: mol_type = other DNA
atatttggccaatccctgcacc

SEQ ID NO: 56657 - DNA, 22 bp, synthetic construct
  misc_feature 1..22: note = chemically synthesized
  source 1..22: mol_type = other DNA
ggccaatccctgcacctcctca

SEQ ID NO: 56658 - DNA, 22 bp, synthetic construct
  misc_feature 1..22: note = chemically synthesized
  source 1..22: mol_type = other DNA
gccaatccctgcacctcctcaa

SEQ ID NO: 56659 - DNA, 22 bp, synthetic construct
  misc_feature 1..22: note = chemically synthesized
  source 1..22: mol_type = other DNA
cacctcctcaaacaaaaacaaa

SEQ ID NO: 56660 - DNA, 22 bp, synthetic construct
  misc_feature 1..22: note = chemically synthesized
  source 1..22: mol_type = other DNA
ctcaaacaaaaacaaacctcaa

SEQ ID NO: 56661 - DNA, 22 bp, synthetic construct
  misc_feature 1..22: note = chemically synthesized
  source 1..22: mol_type = other DNA
aaacaaaaacaaacctcaaaaa

SEQ ID NO: 56662 - DNA, 22 bp, synthetic construct
  misc_feature 1..22: note = chemically synthesized
  source 1..22: mol_type = other DNA
aaaaaactaagagaaccaaacc

SEQ ID NO: 56663 - DNA, 22 bp, synthetic construct
  misc_feature 1..22: note = chemically synthesized
  source 1..22: mol_type = other DNA
agagaaccaaacctgaagtatt

SEQ ID NO: 56664 - DNA, 22 bp, synthetic construct
  misc_feature 1..22: note = chemically synthesized
  source 1..22: mol_type = other DNA
aagtattctccttcaccaactc

SEQ ID NO: 56665 - DNA, 22 bp, synthetic construct
  misc_feature 1..22: note = chemically synthesized
  source 1..22: mol_type = other DNA
tccttcaccaactcaaggtata

SEQ ID NO: 56666 - DNA, 22 bp, synthetic construct
  misc_feature 1..22: note = chemically synthesized
  source 1..22: mol_type = other DNA
cttcaccaactcaaggtatacc

SEQ ID NO: 56667 - DNA, 22 bp, synthetic construct
  misc_feature 1..22: note = chemically synthesized
  source 1..22: mol_type = other DNA
caccaactcaaggtataccatg

SEQ ID NO: 56668 - DNA, 22 bp, synthetic construct
  misc_feature 1..22: note = chemically synthesized
  source 1..22: mol_type = other DNA
accaactcaaggtataccatga

SEQ ID NO: 56669 - DNA, 22 bp, synthetic construct
  misc_feature 1..22: note = chemically synthesized
  source 1..22: mol_type = other DNA
aaggtataccatgattttatga

SEQ ID NO: 56670 - DNA, 22 bp, synthetic construct
  misc_feature 1..22: note = chemically synthesized
  source 1..22: mol_type = other DNA
tatgatttatttacatttaggg

SEQ ID NO: 56671 - DNA, 22 bp, synthetic construct
  misc_feature 1..22: note = chemically synthesized
  source 1..22: mol_type = other DNA
atgatttatttacatttagggg

SEQ ID NO: 56672 - DNA, 22 bp, synthetic construct
  misc_feature 1..22: note = chemically synthesized
  source 1..22: mol_type = other DNA
tgatttatttacatttaggggg

SEQ ID NO: 56673 - DNA, 22 bp, synthetic construct
  misc_feature 1..22: note = chemically synthesized
  source 1..22: mol_type = other DNA
atttacatttaggggggaaccc

SEQ ID NO: 56674 - DNA, 22 bp, synthetic construct
  misc_feature 1..22: note = chemically synthesized
  source 1..22: mol_type = other DNA
tttacatttaggggggaacccc

SEQ ID NO: 56675 - DNA, 22 bp, synthetic construct
  misc_feature 1..22: note = chemically synthesized
  source 1..22: mol_type = other DNA
acatttaggggggaacccctca

SEQ ID NO: 56676 - DNA, 22 bp, synthetic construct
  misc_feature 1..22: note = chemically synthesized
  source 1..22: mol_type = other DNA
catttaggggggaacccctcag

SEQ ID NO: 56677 - DNA, 22 bp, synthetic construct
  misc_feature 1..22: note = chemically synthesized
  source 1..22: mol_type = other DNA
aggggggaacccctcagtgaac

SEQ ID NO: 56678 - DNA, 22 bp, synthetic construct
  misc_feature 1..22: note = chemically synthesized
  source 1..22: mol_type = other DNA
ggggggaacccctcagtgaacc

SEQ ID NO: 56679 - DNA, 22 bp, synthetic construct
  misc_feature 1..22: note = chemically synthesized
  source 1..22: mol_type = other DNA
agtgaaccatttactccccatt

SEQ ID NO: 56680 - DNA, 22 bp, synthetic construct
  misc_feature 1..22: note = chemically synthesized
  source 1..22: mol_type = other DNA
actccccattttaactcccctg

SEQ ID NO: 56681 - DNA, 22 bp, synthetic construct
  misc_feature 1..22: note = chemically synthesized
  source 1..22: mol_type = other DNA
ctccccattttaactcccctgc

SEQ ID NO: 56682 - DNA, 22 bp, synthetic construct
  misc_feature 1..22: note = chemically synthesized
  source 1..22: mol_type = other DNA
cccattttaactcccctgcccc

SEQ ID NO: 56683 - DNA, 22 bp, synthetic construct
  misc_feature 1..22: note = chemically synthesized
  source 1..22: mol_type = other DNA
taactcccctgccccgatcctt

SEQ ID NO: 56684 - DNA, 22 bp, synthetic construct
  misc_feature 1..22: note = chemically synthesized
  source 1..22: mol_type = other DNA
aactcccctgccccgatccttt

SEQ ID NO: 56685 - DNA, 22 bp, synthetic construct
  misc_feature 1..22: note = chemically synthesized
  source 1..22: mol_type = other DNA
actcccctgccccgatcctttc

SEQ ID NO: 56686 - DNA, 22 bp, synthetic construct
  misc_feature 1..22: note = chemically synthesized
  source 1..22: mol_type = other DNA
ccctgccccgatcctttcagtt

SEQ ID NO: 56687 - DNA, 22 bp, synthetic construct
  misc_feature 1..22: note = chemically synthesized
  source 1..22: mol_type = other DNA
ccccgatcctttcagtttccag

SEQ ID NO: 56688 - DNA, 22 bp, synthetic construct
  misc_feature 1..22: note = chemically synthesized
  source 1..22: mol_type = other DNA
tcagtttccagttaaaacaatg

SEQ ID NO: 56689 - DNA, 22 bp, synthetic construct
  misc_feature 1..22: note = chemically synthesized
  source 1..22: mol_type = other DNA
cagtttccagttaaaacaatgc

SEQ ID NO: 56690 - DNA, 22 bp, synthetic construct
  misc_feature 1..22: note = chemically synthesized
  source 1..22: mol_type = other DNA
agtttccagttaaaacaatgca

SEQ ID NO: 56691 - DNA, 22 bp, synthetic construct
  misc_feature 1..22: note = chemically synthesized
  source 1..22: mol_type = other DNA
ccagttaaaacaatgcattaac

SEQ ID NO: 56692 - DNA, 22 bp, synthetic construct
  misc_feature 1..22: note = chemically synthesized
  source 1..22: mol_type = other DNA
cagttaaaacaatgcattaacc

SEQ ID NO: 56693 - DNA, 22 bp, synthetic construct
  misc_feature 1..22: note = chemically synthesized
  source 1..22: mol_type = other DNA
aaacaatgcattaaccaatgtt

SEQ ID NO: 56694 - DNA, 22 bp, synthetic construct
  misc_feature 1..22: note = chemically synthesized
  source 1..22: mol_type = other DNA
accaatgttaaatcttaaatct

SEQ ID NO: 56695 - DNA, 22 bp, synthetic construct
  misc_feature 1..22: note = chemically synthesized
  source 1..22: mol_type = other DNA
aatcttaaatctcgtgagtttc

SEQ ID NO: 56696 - DNA, 22 bp, synthetic construct
  misc_feature 1..22: note = chemically synthesized
  source 1..22: mol_type = other DNA
aaatctcgtgagtttctctcca

SEQ ID NO: 56697 - DNA, 22 bp, synthetic construct
  misc_feature 1..22: note = chemically synthesized
  source 1..22: mol_type = other DNA
aatctcgtgagtttctctccat

SEQ ID NO: 56698 - DNA, 22 bp, synthetic construct
  misc_feature 1..22: note = chemically synthesized
  source 1..22: mol_type = other DNA
gtgagtttctctccatcacacc

SEQ ID NO: 56699 - DNA, 22 bp, synthetic construct
  misc_feature 1..22: note = chemically synthesized
  source 1..22: mol_type = other DNA
ctctccatcacaccctaatatt

SEQ ID NO: 56700 - DNA, 22 bp, synthetic construct
  misc_feature 1..22: note = chemically synthesized
  source 1..22: mol_type = other DNA
tctccatcacaccctaatattt

SEQ ID NO: 56701 - DNA, 22 bp, synthetic construct
  misc_feature 1..22: note = chemically synthesized
  source 1..22: mol_type = other DNA
tccatcacaccctaatatttta

SEQ ID NO: 56702 - DNA, 22 bp, synthetic construct
  misc_feature 1..22: note = chemically synthesized
  source 1..22: mol_type = other DNA
catcacaccctaatattttaaa

SEQ ID NO: 56703 - DNA, 22 bp, synthetic construct
  misc_feature 1..22: note = chemically synthesized
  source 1..22: mol_type = other DNA
atattttaaaaaaattattcct

SEQ ID NO: 56704 - DNA, 22 bp, synthetic construct
  misc_feature 1..22: note = chemically synthesized
  source 1..22: mol_type = other DNA
taaaaaaattattcctttacat

SEQ ID NO: 56705 - DNA, 22 bp, synthetic construct
  misc_feature 1..22: note = chemically synthesized
  source 1..22: mol_type = other DNA
aaaaaaattattcctttacatt

SEQ ID NO: 56706 - DNA, 22 bp, synthetic construct
  misc_feature 1..22: note = chemically synthesized
  source 1..22: mol_type = other DNA
aaaaaattattcctttacattt

SEQ ID NO: 56707 - DNA, 22 bp, synthetic construct
  misc_feature 1..22: note = chemically synthesized
  source 1..22: mol_type = other DNA
ttcctttacatttaaaactgaa

SEQ ID NO: 56708 - DNA, 22 bp, synthetic construct
  misc_feature 1..22: note = chemically synthesized
  source 1..22: mol_type = other DNA
ctttacatttaaaactgaacat

SEQ ID NO: 56709 - DNA, 22 bp, synthetic construct
  misc_feature 1..22: note = chemically synthesized
  source 1..22: mol_type = other DNA
tacatttaaaactgaacattgg

SEQ ID NO: 56710 - DNA, 22 bp, synthetic construct
  misc_feature 1..22: note = chemically synthesized
  source 1..22: mol_type = other DNA
acatttaaaactgaacattggc

SEQ ID NO: 56711 - DNA, 22 bp, synthetic construct
  misc_feature 1..22: note = chemically synthesized
  source 1..22: mol_type = other DNA
catttaaaactgaacattggct

SEQ ID NO: 56712 - DNA, 22 bp, synthetic construct
  misc_feature 1..22: note = chemically synthesized
  source 1..22: mol_type = other DNA
aaaactgaacattggctactga

SEQ ID NO: 56713 - DNA, 22 bp, synthetic construct
  misc_feature 1..22: note = chemically synthesized
  source 1..22: mol_type = other DNA
aaactgaacattggctactgaa

SEQ ID NO: 56714 - DNA, 22 bp, synthetic construct
  misc_feature 1..22: note = chemically synthesized
  source 1..22: mol_type = other DNA
aacattggctactgaagaatga

SEQ ID NO: 56715 - DNA, 22 bp, synthetic construct
  misc_feature 1..22: note = chemically synthesized
  source 1..22: mol_type = other DNA
gctactgaagaatgatttaaag

SEQ ID NO: 56716 - DNA, 22 bp, synthetic construct
  misc_feature 1..22: note = chemically synthesized
  source 1..22: mol_type = other DNA
ctgaagaatgatttaaaggctg

SEQ ID NO: 56717 - DNA, 22 bp, synthetic construct
  misc_feature 1..22: note = chemically synthesized
  source 1..22: mol_type = other DNA
aagaatgatttaaaggctgaaa

SEQ ID NO: 56718 - DNA, 22 bp, synthetic construct
  misc_feature 1..22: note = chemically synthesized
  source 1..22: mol_type = other DNA
aaaggctgaaaaaaattttaat

SEQ ID NO: 56719 - DNA, 22 bp, synthetic construct
  misc_feature 1..22: note = chemically synthesized
  source 1..22: mol_type = other DNA
aaggctgaaaaaaattttaata

SEQ ID NO: 56720 - DNA, 22 bp, synthetic construct
  misc_feature 1..22: note = chemically synthesized
  source 1..22: mol_type = other DNA
aaaaaaattttaataataaatc

SEQ ID NO: 56721 - DNA, 22 bp, synthetic construct
  misc_feature 1..22: note = chemically synthesized
  source 1..22: mol_type = other DNA
taataataaatcgtaaccttct

SEQ ID NO: 56722 - DNA, 22 bp, synthetic construct
  misc_feature 1..22: note = chemically synthesized
  source 1..22: mol_type = other DNA
aataataaatcgtaaccttctc

SEQ ID NO: 56723 - DNA, 22 bp, synthetic construct
  misc_feature 1..22: note = chemically synthesized
  source 1..22: mol_type = other DNA
ataataaatcgtaaccttctca

SEQ ID NO: 56724 - DNA, 22 bp, synthetic construct
  misc_feature 1..22: note = chemically synthesized
  source 1..22: mol_type = other DNA
ctcatgttatgtttttgttatg

SEQ ID NO: 56725 - DNA, 22 bp, synthetic construct
  misc_feature 1..22: note = chemically synthesized
  source 1..22: mol_type = other DNA
tcatgttatgtttttgttatgt

SEQ ID NO: 56726 - DNA, 22 bp, synthetic construct
  misc_feature 1..22: note = chemically synthesized
  source 1..22: mol_type = other DNA
atgttatgtttttgttatgtta

SEQ ID NO: 56727 - DNA, 22 bp, synthetic construct
  misc_feature 1..22: note = chemically synthesized
  source 1..22: mol_type = other DNA
tgtttttgttatgttaaggaga

SEQ ID NO: 56728 - DNA, 22 bp, synthetic construct
  misc_feature 1..22: note = chemically synthesized
  source 1..22: mol_type = other DNA
ttgttatgttaaggagaaaaaa

SEQ ID NO: 56729 - DNA, 22 bp, synthetic construct
  misc_feature 1..22: note = chemically synthesized
  source 1..22: mol_type = other DNA
tgttatgttaaggagaaaaaaa

SEQ ID NO: 56730 - DNA, 22 bp, synthetic construct
  misc_feature 1..22: note = chemically synthesized
  source 1..22: mol_type = other DNA
gttatgttaaggagaaaaaaat

SEQ ID NO: 56731 - DNA, 22 bp, synthetic construct
  misc_feature 1..22: note = chemically synthesized
  source 1..22: mol_type = other DNA
ttatgttaaggagaaaaaaatc

SEQ ID NO: 56732 - DNA, 22 bp, synthetic construct
  misc_feature 1..22: note = chemically synthesized
  source 1..22: mol_type = other DNA
tgttaaggagaaaaaaatcaat

SEQ ID NO: 56733 - DNA, 22 bp, synthetic construct
  misc_feature 1..22: note = chemically synthesized
  source 1..22: mol_type = other DNA
aggagaaaaaaatcaataagga

SEQ ID NO: 56734 - DNA, 22 bp, synthetic construct
  misc_feature 1..22: note = chemically synthesized
  source 1..22: mol_type = other DNA
aattctgataaagatactcttg

SEQ ID NO: 56735 - DNA, 22 bp, synthetic construct
  misc_feature 1..22: note = chemically synthesized
  source 1..22: mol_type = other DNA
attctgataaagatactcttgg

SEQ ID NO: 56736 - DNA, 22 bp, synthetic construct
  misc_feature 1..22: note = chemically synthesized
  source 1..22: mol_type = other DNA
tgataaagatactcttggatct

SEQ ID NO: 56737 - DNA, 22 bp, synthetic construct
  misc_feature 1..22: note = chemically synthesized
  source 1..22: mol_type = other DNA
ataaagatactcttggatcttt

SEQ ID NO: 56738 - DNA, 22 bp, synthetic construct
  misc_feature 1..22: note = chemically synthesized
  source 1..22: mol_type = other DNA
ttggatctttgaaaacaactgc

SEQ ID NO: 56739 - DNA, 22 bp, synthetic construct
  misc_feature 1..22: note = chemically synthesized
  source 1..22: mol_type = other DNA
ggatctttgaaaacaactgctg

SEQ ID NO: 56740 - DNA, 22 bp, synthetic construct
  misc_feature 1..22: note = chemically synthesized
  source 1..22: mol_type = other DNA
gatctttgaaaacaactgctgt

SEQ ID NO: 56741 - DNA, 22 bp, synthetic construct
  misc_feature 1..22: note = chemically synthesized
  source 1..22: mol_type = other DNA
tgaaaacaactgctgtcctttt

SEQ ID NO: 56742 - DNA, 22 bp, synthetic construct
  misc_feature 1..22: note = chemically synthesized
  source 1..22: mol_type = other DNA
gaaaacaactgctgtcctttta

SEQ ID NO: 56743 - DNA, 22 bp, synthetic construct
  misc_feature 1..22: note = chemically synthesized
  source 1..22: mol_type = other DNA
aaaacaactgctgtccttttaa

SEQ ID NO: 56744 - DNA, 22 bp, synthetic construct
  misc_feature 1..22: note = chemically synthesized
  source 1..22: mol_type = other DNA
ctgtccttttaactaaaacatt

SEQ ID NO: 56745 - DNA, 22 bp, synthetic construct
  misc_feature 1..22: note = chemically synthesized
  source 1..22: mol_type = other DNA
tccttttaactaaaacatttga

SEQ ID NO: 56746 - DNA, 22 bp, synthetic construct
  misc_feature 1..22: note = chemically synthesized
  source 1..22: mol_type = other DNA
ttaactaaaacatttgagcagc

SEQ ID NO: 56747 - DNA, 22 bp, synthetic construct
  misc_feature 1..22: note = chemically synthesized
  source 1..22: mol_type = other DNA
taactaaaacatttgagcagct

SEQ ID NO: 56748 - DNA, 22 bp, synthetic construct
  misc_feature 1..22: note = chemically synthesized
  source 1..22: mol_type = other DNA
aactaaaacatttgagcagctt

SEQ ID NO: 56749 - DNA, 22 bp, synthetic construct
  misc_feature 1..22: note = chemically synthesized
  source 1..22: mol_type = other DNA
actaaaacatttgagcagcttc

SEQ ID NO: 56750 - DNA, 22 bp, synthetic construct
  misc_feature 1..22: note = chemically synthesized
  source 1..22: mol_type = other DNA
aaacatttgagcagcttcaaag

SEQ ID NO: 56751 - DNA, 22 bp, synthetic construct
  misc_feature 1..22: note = chemically synthesized
  source 1..22: mol_type = other DNA
gagcagcttcaaagactatgta

SEQ ID NO: 56752 - DNA, 22 bp, synthetic construct
  misc_feature 1..22: note = chemically synthesized
  source 1..22: mol_type = other DNA
agcagcttcaaagactatgtat

SEQ ID NO: 56753 - DNA, 22 bp, synthetic construct
  misc_feature 1..22: note = chemically synthesized
  source 1..22: mol_type = other DNA
caaagactatgtatttcttctg

SEQ ID NO: 56754 - DNA, 22 bp, synthetic construct
  misc_feature 1..22: note = chemically synthesized
  source 1..22: mol_type = other DNA
aaagactatgtatttcttctga

SEQ ID NO: 56755 - DNA, 22 bp, synthetic construct
  misc_feature 1..22: note = chemically synthesized
  source 1..22: mol_type = other DNA
tgtatttcttctgatcttggag

SEQ ID NO: 56756 - DNA, 22 bp, synthetic construct
  misc_feature 1..22: note = chemically synthesized
  source 1..22: mol_type = other DNA
cttctgatcttggagctgtgtg

SEQ ID NO: 56757 - DNA, 22 bp, synthetic construct
  misc_feature 1..22: note = chemically synthesized
  source 1..22: mol_type = other DNA
ttctgatcttggagctgtgtga

SEQ ID NO: 56758 - DNA, 22 bp, synthetic construct
  misc_feature 1..22: note = chemically synthesized
  source 1..22: mol_type = other DNA
ctgatcttggagctgtgtgact

SEQ ID NO: 56759 - DNA, 22 bp, synthetic construct
  misc_feature 1..22: note = chemically synthesized
  source 1..22: mol_type = other DNA
tgatcttggagctgtgtgactg

SEQ ID NO: 56760 - DNA, 22 bp, synthetic construct
  misc_feature 1..22: note = chemically synthesized
  source 1..22: mol_type = other DNA
atcttggagctgtgtgactggt

SEQ ID NO: 56761 - DNA, 22 bp, synthetic construct
  misc_feature 1..22: note = chemically synthesized
  source 1..22: mol_type = other DNA
ggagctgtgtgactggtagcaa

SEQ ID NO: 56762 - DNA, 22 bp, synthetic construct
  misc_feature 1..22: note = chemically synthesized
  source 1..22: mol_type = other DNA
gagctgtgtgactggtagcaag

SEQ ID NO: 56763 - DNA, 22 bp, synthetic construct
  misc_feature 1..22: note = chemically synthesized
  source 1..22: mol_type = other DNA
tgtgactggtagcaagaaagaa

SEQ ID NO: 56764 - DNA, 22 bp, synthetic construct
  misc_feature 1..22: note = chemically synthesized
  source 1..22: mol_type = other DNA
gtagcaagaaagaaaaaaaatc

SEQ ID NO: 56765 - DNA, 22 bp, synthetic construct
  misc_feature 1..22: note = chemically synthesized
  source 1..22: mol_type = other DNA
attctacatacaagtggattgc

SEQ ID NO: 56766 - DNA, 22 bp, synthetic construct
  misc_feature 1..22: note = chemically synthesized
  source 1..22: mol_type = other DNA
ttctacatacaagtggattgct

SEQ ID NO: 56767 - DNA, 22 bp, synthetic construct
  misc_feature 1..22: note = chemically synthesized
  source 1..22: mol_type = other DNA
tacatacaagtggattgcttaa

SEQ ID NO: 56768 - DNA, 22 bp, synthetic construct
  misc_feature 1..22: note = chemically synthesized
  source 1..22: mol_type = other DNA
catacaagtggattgcttaaca

SEQ ID NO: 56769 - DNA, 22 bp, synthetic construct
  misc_feature 1..22: note = chemically synthesized
  source 1..22: mol_type = other DNA
cttaacaagtcagcacagacac

SEQ ID NO: 56770 - DNA, 22 bp, synthetic construct
  misc_feature 1..22: note = chemically synthesized
  source 1..22: mol_type = other DNA
aacaagtcagcacagacacgta

SEQ ID NO: 56771 - DNA, 22 bp, synthetic construct
  misc_feature 1..22: note = chemically synthesized
  source 1..22: mol_type = other DNA
acaagtcagcacagacacgtac

SEQ ID NO: 56772 - DNA, 22 bp, synthetic construct
  misc_feature 1..22: note = chemically synthesized
  source 1..22: mol_type = other DNA
gtttgtacaatagagataaaaa

SEQ ID NO: 56773 - DNA, 22 bp, synthetic construct
  misc_feature 1..22: note = chemically synthesized
  source 1..22: mol_type = other DNA
tttgtacaatagagataaaaat

SEQ ID NO: 56774 - DNA, 22 bp, synthetic construct
  misc_feature 1..22: note = chemically synthesized
  source 1..22: mol_type = other DNA
gtacaatagagataaaaattcc

SEQ ID NO: 56775 - DNA, 22 bp, synthetic construct
  misc_feature 1..22: note = chemically synthesized
  source 1..22: mol_type = other DNA
tacaatagagataaaaattcct

SEQ ID NO: 56776 - DNA, 22 bp, synthetic construct
  misc_feature 1..22: note = chemically synthesized
  source 1..22: mol_type = other DNA
ctgtataaaaataattcagctg

SEQ ID NO: 56777 - DNA, 22 bp, synthetic construct
  misc_feature 1..22: note = chemically synthesized
  source 1..22: mol_type = other DNA
tataaaaataattcagctgctg

SEQ ID NO: 56778 - DNA, 22 bp, synthetic construct
  misc_feature 1..22: note = chemically synthesized
  source 1..22: mol_type = other DNA
agctgctgacagcaggcattgt

SEQ ID NO: 56779 - DNA, 22 bp, synthetic construct
  misc_feature 1..22: note = chemically synthesized
  source 1..22: mol_type = other DNA
ctgacagcaggcattgttgttg

SEQ ID NO: 56780 - DNA, 22 bp, synthetic construct
  misc_feature 1..22: note = chemically synthesized
  source 1..22: mol_type = other DNA
acagcaggcattgttgttggac

SEQ ID NO: 56781 - DNA, 22 bp, synthetic construct
  misc_feature 1..22: note = chemically synthesized
  source 1..22: mol_type = other DNA
ttgttggacctgtcttttgtgc

SEQ ID NO: 56782 - DNA, 22 bp, synthetic construct
  misc_feature 1..22: note = chemically synthesized
  source 1..22: mol_type = other DNA
ttggacctgtcttttgtgcttg

SEQ ID NO: 56783 - DNA, 22 bp, synthetic construct
  misc_feature 1..22: note = chemically synthesized
  source 1..22: mol_type = other DNA
gacctgtcttttgtgcttgtcc

SEQ ID NO: 56784 - DNA, 22 bp, synthetic construct
  misc_feature 1..22: note = chemically synthesized
  source 1..22: mol_type = other DNA
tcttttgtgcttgtcccagctc

SEQ ID NO: 56785 - DNA, 22 bp, synthetic construct
  misc_feature 1..22: note = chemically synthesized
  source 1..22: mol_type = other DNA
ttgtgcttgtcccagctctggg

SEQ ID NO: 56786 - DNA, 22 bp, synthetic construct
  misc_feature 1..22: note = chemically synthesized
  source 1..22: mol_type = other DNA
tgtgcttgtcccagctctgggt

SEQ ID NO: 56787 - DNA, 22 bp, synthetic construct
  misc_feature 1..22: note = chemically synthesized
  source 1..22: mol_type = other DNA
gtgcttgtcccagctctgggtc

SEQ ID NO: 56788 - DNA, 22 bp, synthetic construct
  misc_feature 1..22: note = chemically synthesized
  source 1..22: mol_type = other DNA
tgcttgtcccagctctgggtcc

SEQ ID NO: 56789 - DNA, 22 bp, synthetic construct
  misc_feature 1..22: note = chemically synthesized
  source 1..22: mol_type = other DNA
gtcccagctctgggtccccctc

SEQ ID NO: 56790 - DNA, 22 bp, synthetic construct
  misc_feature 1..22: note = chemically synthesized
  source 1..22: mol_type = other DNA
tcccagctctgggtccccctcc

SEQ ID NO: 56791 - DNA, 22 bp, synthetic construct
  misc_feature 1..22: note = chemically synthesized
  source 1..22: mol_type = other DNA
tgggtccccctcccctcctatc

SEQ ID NO: 56792 - DNA, 22 bp, synthetic construct
  misc_feature 1..22: note = chemically synthesized
  source 1..22: mol_type = other DNA
ggtccccctcccctcctatctg

SEQ ID NO: 56793 - DNA, 22 bp, synthetic construct
  misc_feature 1..22: note = chemically synthesized
  source 1..22: mol_type = other DNA
ccctcctatctgcttggggcag

SEQ ID NO: 56794 - DNA, 22 bp, synthetic construct
  misc_feature 1..22: note = chemically synthesized
  source 1..22: mol_type = other DNA
ctatctgcttggggcagcctgc

SEQ ID NO: 56795 - DNA, 22 bp, synthetic construct
  misc_feature 1..22: note = chemically synthesized
  source 1..22: mol_type = other DNA
tctgcttggggcagcctgctgc

SEQ ID NO: 56796 - DNA, 22 bp, synthetic construct
  misc_feature 1..22: note = chemically synthesized
  source 1..22: mol_type = other DNA
cttggggcagcctgctgcctgc

SEQ ID NO: 56797 - DNA, 22 bp, synthetic construct
  misc_feature 1..22: note = chemically synthesized
  source 1..22: mol_type = other DNA
ggggcagcctgctgcctgcaca

SEQ ID NO: 56798 - DNA, 22 bp, synthetic construct
  misc_feature 1..22: note = chemically synthesized
  source 1..22: mol_type = other DNA
gggcagcctgctgcctgcacac

SEQ ID NO: 56799 - DNA, 22 bp, synthetic construct
  misc_feature 1..22: note = chemically synthesized
  source 1..22: mol_type = other DNA
ctgcctgcacactgctgaccag

SEQ ID NO: 56800 - DNA, 22 bp, synthetic construct
  misc_feature 1..22: note = chemically synthesized
  source 1..22: mol_type = other DNA
cctgcacactgctgaccagaag

SEQ ID NO: 56801 - DNA, 22 bp, synthetic construct
  misc_feature 1..22: note = chemically synthesized
  source 1..22: mol_type = other DNA
cacactgctgaccagaagttaa

SEQ ID NO: 56802 - DNA, 22 bp, synthetic construct
  misc_feature 1..22: note = chemically synthesized
  source 1..22: mol_type = other DNA
ctgaccagaagttaattgctat

SEQ ID NO: 56803 - DNA, 22 bp, synthetic construct
  misc_feature 1..22: note = chemically synthesized
  source 1..22: mol_type = other DNA
accagaagttaattgctatata

SEQ ID NO: 56804 - DNA, 22 bp, synthetic construct
  misc_feature 1..22: note = chemically synthesized
  source 1..22: mol_type = other DNA
attgctatatattaagtatata

SEQ ID NO: 56805 - DNA, 22 bp, synthetic construct
  misc_feature 1..22: note = chemically synthesized
  source 1..22: mol_type = other DNA
ctatatattaagtatataggta

SEQ ID NO: 56806 - DNA, 22 bp, synthetic construct
  misc_feature 1..22: note = chemically synthesized
  source 1..22: mol_type = other DNA
tatattaagtatataggtattg

SEQ ID NO: 56807 - DNA, 22 bp, synthetic construct
  misc_feature 1..22: note = chemically synthesized
  source 1..22: mol_type = other DNA
agtatataggtattgtatttaa

SEQ ID NO: 56808 - DNA, 22 bp, synthetic construct
  misc_feature 1..22: note = chemically synthesized
  source 1..22: mol_type = other DNA
tatttaaagaggaatatctcaa

SEQ ID NO: 56809 - DNA, 22 bp, synthetic construct
  misc_feature 1..22: note = chemically synthesized
  source 1..22: mol_type = other DNA
aaagaggaatatctcaaggctt

SEQ ID NO: 56810 - DNA, 22 bp, synthetic construct
  misc_feature 1..22: note = chemically synthesized
  source 1..22: mol_type = other DNA
aagaggaatatctcaaggcttc

SEQ ID NO: 56811 - DNA, 22 bp, synthetic construct
  misc_feature 1..22: note = chemically synthesized
  source 1..22: mol_type = other DNA
aaggcttcctatatgcattcca

SEQ ID NO: 56812 - DNA, 22 bp, synthetic construct
  misc_feature 1..22: note = chemically synthesized
  source 1..22: mol_type = other DNA
cctatatgcattccactttact

SEQ ID NO: 56813 - DNA, 22 bp, synthetic construct
  misc_feature 1..22: note = chemically synthesized
  source 1..22: mol_type = other DNA
ctatatgcattccactttactt

SEQ ID NO: 56814 - DNA, 22 bp, synthetic construct
  misc_feature 1..22: note = chemically synthesized
  source 1..22: mol_type = other DNA
tatgcattccactttactttct

SEQ ID NO: 56815 - DNA, 22 bp, synthetic construct
  misc_feature 1..22: note = chemically synthesized
  source 1..22: mol_type = other DNA
cactttactttctgatgtgatt

SEQ ID NO: 56816 - DNA, 22 bp, synthetic construct
  misc_feature 1..22: note = chemically synthesized
  source 1..22: mol_type = other DNA
tactttctgatgtgattgcggt

SEQ ID NO: 56817 - DNA, 22 bp, synthetic construct
  misc_feature 1..22: note = chemically synthesized
  source 1..22: mol_type = other DNA
actttctgatgtgattgcggtg

SEQ ID NO: 56818 - DNA, 22 bp, synthetic construct
  misc_feature 1..22: note = chemically synthesized
  source 1..22: mol_type = other DNA
ctttctgatgtgattgcggtgt

SEQ ID NO: 56819 - DNA, 22 bp, synthetic construct
  misc_feature 1..22: note = chemically synthesized
  source 1..22: mol_type = other DNA
tctgatgtgattgcggtgttgc

SEQ ID NO: 56820 - DNA, 22 bp, synthetic construct
  misc_feature 1..22: note = chemically synthesized
  source 1..22: mol_type = other DNA
ctgatgtgattgcggtgttgcc

SEQ ID NO: 56821 - DNA, 22 bp, synthetic construct
  misc_feature 1..22: note = chemically synthesized
  source 1..22: mol_type = other DNA
tgatgtgattgcggtgttgcca

SEQ ID NO: 56822 - DNA, 22 bp, synthetic construct
  misc_feature 1..22: note = chemically synthesized
  source 1..22: mol_type = other DNA
atgtgattgcggtgttgccagc

SEQ ID NO: 56823 - DNA, 22 bp, synthetic construct
  misc_feature 1..22: note = chemically synthesized
  source 1..22: mol_type = other DNA
cggtgttgccagcaggggggtg

SEQ ID NO: 56824 - DNA, 22 bp, synthetic construct
  misc_feature 1..22: note = chemically synthesized
  source 1..22: mol_type = other DNA
ccagcaggggggtggcaggcaa

SEQ ID NO: 56825 - DNA, 22 bp, synthetic construct
  misc_feature 1..22: note = chemically synthesized
  source 1..22: mol_type = other DNA
taatagggaaaatcacttgaag

SEQ ID NO: 56826 - DNA, 22 bp, synthetic construct
  misc_feature 1..22: note = chemically synthesized
  source 1..22: mol_type = other DNA
atagggaaaatcacttgaaggc

SEQ ID NO: 56827 - DNA, 22 bp, synthetic construct
  misc_feature 1..22: note = chemically synthesized
  source 1..22: mol_type = other DNA
gaaggcagttaggggaaatttg

SEQ ID NO: 56828 - DNA, 22 bp, synthetic construct
  misc_feature 1..22: note = chemically synthesized
  source 1..22: mol_type = other DNA
aaggcagttaggggaaatttgg

SEQ ID NO: 56829 - DNA, 22 bp, synthetic construct
  misc_feature 1..22: note = chemically synthesized
  source 1..22: mol_type = other DNA
ggggaaatttggccttcaagtc

SEQ ID NO: 56830 - DNA, 22 bp, synthetic construct
  misc_feature 1..22: note = chemically synthesized
  source 1..22: mol_type = other DNA
ggccttcaagtcccatttgctc

SEQ ID NO: 56831 - DNA, 22 bp, synthetic construct
  misc_feature 1..22: note = chemically synthesized
  source 1..22: mol_type = other DNA
gccttcaagtcccatttgctct

SEQ ID NO: 56832 - DNA, 22 bp, synthetic construct
  misc_feature 1..22: note = chemically synthesized
  source 1..22: mol_type = other DNA
caagtcccatttgctctgtagt

SEQ ID NO: 56833 - DNA, 22 bp, synthetic construct
  misc_feature 1..22: note = chemically synthesized
  source 1..22: mol_type = other DNA
aagtcccatttgctctgtagtg

SEQ ID NO: 56834 - DNA, 22 bp, synthetic construct
  misc_feature 1..22: note = chemically synthesized
  source 1..22: mol_type = other DNA
gctctgtagtgtagcattggtt

SEQ ID NO: 56835 - DNA, 22 bp, synthetic construct
  misc_feature 1..22: note = chemically synthesized
  source 1..22: mol_type = other DNA
ctctgtagtgtagcattggttt

SEQ ID NO: 56836 - DNA, 22 bp, synthetic construct
  misc_feature 1..22: note = chemically synthesized
  source 1..22: mol_type = other DNA
tgtagtgtagcattggtttcta

SEQ ID NO: 56837 - DNA, 22 bp, synthetic construct
  misc_feature 1..22: note = chemically synthesized
  source 1..22: mol_type = other DNA
tagtgtagcattggtttctaaa

SEQ ID NO: 56838 - DNA, 22 bp, synthetic construct
  misc_feature 1..22: note = chemically synthesized
  source 1..22: mol_type = other DNA
gtttctaaacttttgtttttaa

SEQ ID NO: 56839 - DNA, 22 bp, synthetic construct
  misc_feature 1..22: note = chemically synthesized
  source 1..22: mol_type = other DNA
ctaaacttttgtttttaatcta

SEQ ID NO: 56840 - DNA, 22 bp, synthetic construct
  misc_feature 1..22: note = chemically synthesized
  source 1..22: mol_type = other DNA
taaacttttgtttttaatctaa

SEQ ID NO: 56841 - DNA, 22 bp, synthetic construct
  misc_feature 1..22: note = chemically synthesized
  source 1..22: mol_type = other DNA
aacttttgtttttaatctaatt

SEQ ID NO: 56842 - DNA, 22 bp, synthetic construct
  misc_feature 1..22: note = chemically synthesized
  source 1..22: mol_type = other DNA
ttgtttttaatctaattctgat

SEQ ID NO: 56843 - DNA, 22 bp, synthetic construct
  misc_feature 1..22: note = chemically synthesized
  source 1..22: mol_type = other DNA
tgtttttaatctaattctgatt

SEQ ID NO: 56844 - DNA, 22 bp, synthetic construct
  misc_feature 1..22: note = chemically synthesized
  source 1..22: mol_type = other DNA
gtttttaatctaattctgattt

SEQ ID NO: 56845 - DNA, 22 bp, synthetic construct
  misc_feature 1..22: note = chemically synthesized
  source 1..22: mol_type = other DNA
tttttaatctaattctgatttg

SEQ ID NO: 56846 - DNA, 22 bp, synthetic construct
  misc_feature 1..22: note = chemically synthesized
  source 1..22: mol_type = other DNA
ttaatctaattctgatttgccc

SEQ ID NO: 56847 - DNA, 22 bp, synthetic construct
  misc_feature 1..22: note = chemically synthesized
  source 1..22: mol_type = other DNA
taatctaattctgatttgccct

SEQ ID NO: 56848 - DNA, 22 bp, synthetic construct
  misc_feature 1..22: note = chemically synthesized
  source 1..22: mol_type = other DNA
aatctaattctgatttgccctg

SEQ ID NO: 56849 - DNA, 22 bp, synthetic construct
  misc_feature 1..22: note = chemically synthesized
  source 1..22: mol_type = other DNA
atctaattctgatttgccctgt

SEQ ID NO: 56850 - DNA, 22 bp, synthetic construct
  misc_feature 1..22: note = chemically synthesized
  source 1..22: mol_type = other DNA
attctgatttgccctgtcacat

SEQ ID NO: 56851 - DNA, 22 bp, synthetic construct
  misc_feature 1..22: note = chemically synthesized
  source 1..22: mol_type = other DNA
tgatttgccctgtcacatccca

SEQ ID NO: 56852 - DNA, 22 bp, synthetic construct
  misc_feature 1..22: note = chemically synthesized
  source 1..22: mol_type = other DNA
atttgccctgtcacatcccata

SEQ ID NO: 56853 - DNA, 22 bp, synthetic construct
  misc_feature 1..22: note = chemically synthesized
  source 1..22: mol_type = other DNA
gccctgtcacatcccatatcaa

SEQ ID NO: 56854 - DNA, 22 bp, synthetic construct
  misc_feature 1..22: note = chemically synthesized
  source 1..22: mol_type = other DNA
ccctgtcacatcccatatcaac

SEQ ID NO: 56855 - DNA, 22 bp, synthetic construct
  misc_feature 1..22: note = chemically synthesized
  source 1..22: mol_type = other DNA
tcacatcccatatcaaccctca

SEQ ID NO: 56856 - DNA, 22 bp, synthetic construct
  misc_feature 1..22: note = chemically synthesized
  source 1..22: mol_type = other DNA
attgaactctactcatgtagag

SEQ ID NO: 56857 - DNA, 22 bp, synthetic construct
  misc_feature 1..22: note = chemically synthesized
  source 1..22: mol_type = other DNA
aactctactcatgtagagtaac

SEQ ID NO: 56858 - DNA, 22 bp, synthetic construct
  misc_feature 1..22: note = chemically synthesized
  source 1..22: mol_type = other DNA
tactcatgtagagtaacattag

SEQ ID NO: 56859 - DNA, 22 bp, synthetic construct
  misc_feature 1..22: note = chemically synthesized
  source 1..22: mol_type = other DNA
ctcatgtagagtaacattagtg

SEQ ID NO: 56860 - DNA, 22 bp, synthetic construct
  misc_feature 1..22: note = chemically synthesized
  source 1..22: mol_type = other DNA
atgtagagtaacattagtgtca

SEQ ID NO: 56861 - DNA, 22 bp, synthetic construct
  misc_feature 1..22: note = chemically synthesized
  source 1..22: mol_type = other DNA
gtgtcaaacggaattggtcagg

SEQ ID NO: 56862 - DNA, 22 bp, synthetic construct
  misc_feature 1..22: note = chemically synthesized
  source 1..22: mol_type = other DNA
gtcaggactgtggacctgtggc

SEQ ID NO: 56863 - DNA, 22 bp, synthetic construct
  misc_feature 1..22: note = chemically synthesized
  source 1..22: mol_type = other DNA
tggacctgtggctcatacagat

SEQ ID NO: 56864 - DNA, 22 bp, synthetic construct
  misc_feature 1..22: note = chemically synthesized
  source 1..22: mol_type = other DNA
tggctcatacagatggttgtgg

SEQ ID NO: 56865 - DNA, 22 bp, synthetic construct
  misc_feature 1..22: note = chemically synthesized
  source 1..22: mol_type = other DNA
atacagatggttgtggatgtgg

SEQ ID NO: 56866 - DNA, 22 bp, synthetic construct
  misc_feature 1..22: note = chemically synthesized
  source 1..22: mol_type = other DNA
tggatgtgggttccatgcagct

SEQ ID NO: 56867 - DNA, 22 bp, synthetic construct
  misc_feature 1..22: note = chemically synthesized
  source 1..22: mol_type = other DNA
catgcagctctgcatcctatcc

SEQ ID NO: 56868 - DNA, 22 bp, synthetic construct
  misc_feature 1..22: note = chemically synthesized
  source 1..22: mol_type = other DNA
tgcatcctatcctttctaataa

SEQ ID NO: 56869 - DNA, 22 bp, synthetic construct
  misc_feature 1..22: note = chemically synthesized
  source 1..22: mol_type = other DNA
catcctatcctttctaataaat

SEQ ID NO: 56870 - DNA, 22 bp, synthetic construct
  misc_feature 1..22: note = chemically synthesized
  source 1..22: mol_type = other DNA
tcctttctaataaatgttaaaa

SEQ ID NO: 56871 - DNA, 22 bp, synthetic construct
  misc_feature 1..22: note = chemically synthesized
  source 1..22: mol_type = other DNA
tctaataaatgttaaaatgtgg

SEQ ID NO: 56872 - DNA, 22 bp, synthetic construct
  misc_feature 1..22: note = chemically synthesized
  source 1..22: mol_type = other DNA
ctaataaatgttaaaatgtggc

SEQ ID NO: 56873 - DNA, 22 bp, synthetic construct
  misc_feature 1..22: note = chemically synthesized
  source 1..22: mol_type = other DNA
taataaatgttaaaatgtggca

SEQ ID NO: 56874 - DNA, 22 bp, synthetic construct
  misc_feature 1..22: note = chemically synthesized
  source 1..22: mol_type = other DNA
ataaatgttaaaatgtggcaca

SEQ ID NO: 56875 - DNA, 22 bp, synthetic construct
  misc_feature 1..22: note = chemically synthesized
  source 1..22: mol_type = other DNA
aaatgtggcacatttctgagca

SEQ ID NO: 56876 - DNA, 22 bp, synthetic construct
  misc_feature 1..22: note = chemically synthesized
  source 1..22: mol_type = other DNA
ctgagcagggcccaaggataag

SEQ ID NO: 56877 - DNA, 22 bp, synthetic construct
  misc_feature 1..22: note = chemically synthesized
  source 1..22: mol_type = other DNA
tgagcagggcccaaggataaga

SEQ ID NO: 56878 - DNA, 22 bp, synthetic construct
  misc_feature 1..22: note = chemically synthesized
  source 1..22: mol_type = other DNA
agcagggcccaaggataagaga

SEQ ID NO: 56879 - DNA, 22 bp, synthetic construct
  misc_feature 1..22: note = chemically synthesized
  source 1..22: mol_type = other DNA
agaaatcagggggtagtacctg

SEQ ID NO: 56880 - DNA, 22 bp, synthetic construct
  misc_feature 1..22: note = chemically synthesized
  source 1..22: mol_type = other DNA
agatttttctcccttctctttc

SEQ ID NO: 56881 - DNA, 22 bp, synthetic construct
  misc_feature 1..22: note = chemically synthesized
  source 1..22: mol_type = other DNA
ttctcccttctctttccgattt

SEQ ID NO: 56882 - DNA, 22 bp, synthetic construct
  misc_feature 1..22: note = chemically synthesized
  source 1..22: mol_type = other DNA
tctcccttctctttccgatttc

SEQ ID NO: 56883 - DNA, 22 bp, synthetic construct
  misc_feature 1..22: note = chemically synthesized
  source 1..22: mol_type = other DNA
ctcccttctctttccgatttcc

SEQ ID NO: 56884 - DNA, 22 bp, synthetic construct
  misc_feature 1..22: note = chemically synthesized
  source 1..22: mol_type = other DNA
tcccttctctttccgatttcct

SEQ ID NO: 56885 - DNA, 22 bp, synthetic construct
  misc_feature 1..22: note = chemically synthesized
  source 1..22: mol_type = other DNA
ccttctctttccgatttccttg

SEQ ID NO: 56886 - DNA, 22 bp, synthetic construct
  misc_feature 1..22: note = chemically synthesized
  source 1..22: mol_type = other DNA
ctctttccgatttccttgataa

SEQ ID NO: 56887 - DNA, 22 bp, synthetic construct
  misc_feature 1..22: note = chemically synthesized
  source 1..22: mol_type = other DNA
tctttccgatttccttgataac

SEQ ID NO: 56888 - DNA, 22 bp, synthetic construct
  misc_feature 1..22: note = chemically synthesized
  source 1..22: mol_type = other DNA
tttccgatttccttgataacat

SEQ ID NO: 56889 - DNA, 22 bp, synthetic construct
  misc_feature 1..22: note = chemically synthesized
  source 1..22: mol_type = other DNA
tccgatttccttgataacatcc

SEQ ID NO: 56890 - DNA, 22 bp, synthetic construct
  misc_feature 1..22: note = chemically synthesized
  source 1..22: mol_type = other DNA
ccgatttccttgataacatcca

SEQ ID NO: 56891 - DNA, 22 bp, synthetic construct
  misc_feature 1..22: note = chemically synthesized
  source 1..22: mol_type = other DNA
cgatttccttgataacatccac

SEQ ID NO: 56892 - DNA, 22 bp, synthetic construct
  misc_feature 1..22: note = chemically synthesized
  source 1..22: mol_type = other DNA
ccttgataacatccacatttcc

SEQ ID NO: 56893 - DNA, 22 bp, synthetic construct
  misc_feature 1..22: note = chemically synthesized
  source 1..22: mol_type = other DNA
cttgataacatccacatttccg

SEQ ID NO: 56894 - DNA, 22 bp, synthetic construct
  misc_feature 1..22: note = chemically synthesized
  source 1..22: mol_type = other DNA
gataacatccacatttccggta

SEQ ID NO: 56895 - DNA, 22 bp, synthetic construct
  misc_feature 1..22: note = chemically synthesized
  source 1..22: mol_type = other DNA
ataacatccacatttccggtaa

SEQ ID NO: 56896 - DNA, 22 bp, synthetic construct
  misc_feature 1..22: note = chemically synthesized
  source 1..22: mol_type = other DNA
ccggtaagatcaactctaggag

SEQ ID NO: 56897 - DNA, 22 bp, synthetic construct
  misc_feature 1..22: note = chemically synthesized
  source 1..22: mol_type = other DNA
cggtaagatcaactctaggaga

SEQ ID NO: 56898 - DNA, 22 bp, synthetic construct
  misc_feature 1..22: note = chemically synthesized
  source 1..22: mol_type = other DNA
taggagaaagtctgaggctggg

SEQ ID NO: 56899 - DNA, 22 bp, synthetic construct
  misc_feature 1..22: note = chemically synthesized
  source 1..22: mol_type = other DNA
ggagaaagtctgaggctggggg

SEQ ID NO: 56900 - DNA, 22 bp, synthetic construct
  misc_feature 1..22: note = chemically synthesized
  source 1..22: mol_type = other DNA
aggctgggggagagagggggag

SEQ ID NO: 56901 - DNA, 22 bp, synthetic construct
  misc_feature 1..22: note = chemically synthesized
  source 1..22: mol_type = other DNA
ggggagagagggggagaagggt

SEQ ID NO: 56902 - DNA, 22 bp, synthetic construct
  misc_feature 1..22: note = chemically synthesized
  source 1..22: mol_type = other DNA
ttggaatattcttcgatagcag

SEQ ID NO: 56903 - DNA, 22 bp, synthetic construct
  misc_feature 1..22: note = chemically synthesized
  source 1..22: mol_type = other DNA
ggaatattcttcgatagcagtt

SEQ ID NO: 56904 - DNA, 22 bp, synthetic construct
  misc_feature 1..22: note = chemically synthesized
  source 1..22: mol_type = other DNA
gaatattcttcgatagcagttc

SEQ ID NO: 56905 - DNA, 22 bp, synthetic construct
  misc_feature 1..22: note = chemically synthesized
  source 1..22: mol_type = other DNA
ttcgatagcagttcaaatgaaa

SEQ ID NO: 56906 - DNA, 22 bp, synthetic construct
  misc_feature 1..22: note = chemically synthesized
  source 1..22: mol_type = other DNA
cgatagcagttcaaatgaaatc

SEQ ID NO: 56907 - DNA, 22 bp, synthetic construct
  misc_feature 1..22: note = chemically synthesized
  source 1..22: mol_type = other DNA
gatagcagttcaaatgaaatcc

SEQ ID NO: 56908 - DNA, 22 bp, synthetic construct
  misc_feature 1..22: note = chemically synthesized
  source 1..22: mol_type = other DNA
aaatgaaatccccacagcagag

SEQ ID NO: 56909 - DNA, 22 bp, synthetic construct
  misc_feature 1..22: note = chemically synthesized
  source 1..22: mol_type = other DNA
ttgggtctagcagtggagcggt

SEQ ID NO: 56910 - DNA, 22 bp, synthetic construct
  misc_feature 1..22: note = chemically synthesized
  source 1..22: mol_type = other DNA
tgggtctagcagtggagcggta

SEQ ID NO: 56911 - DNA, 22 bp, synthetic construct
  misc_feature 1..22: note = chemically synthesized
  source 1..22: mol_type = other DNA
gggtctagcagtggagcggtaa

SEQ ID NO: 56912 - DNA, 22 bp, synthetic construct
  misc_feature 1..22: note = chemically synthesized
  source 1..22: mol_type = other DNA
ggtctagcagtggagcggtaag

SEQ ID NO: 56913 - DNA, 22 bp, synthetic construct
  misc_feature 1..22: note = chemically synthesized
  source 1..22: mol_type = other DNA
gcagtggagcggtaagctggga

SEQ ID NO: 56914 - DNA, 22 bp, synthetic construct
  misc_feature 1..22: note = chemically synthesized
  source 1..22: mol_type = other DNA
ggacacgtggcctttcgaagct

SEQ ID NO: 56915 - DNA, 22 bp, synthetic construct
  misc_feature 1..22: note = chemically synthesized
  source 1..22: mol_type = other DNA
tcgaagctgttattctcagtct

SEQ ID NO: 56916 - DNA, 22 bp, synthetic construct
  misc_feature 1..22: note = chemically synthesized
  source 1..22: mol_type = other DNA
cgaagctgttattctcagtctg

SEQ ID NO: 56917 - DNA, 22 bp, synthetic construct
  misc_feature 1..22: note = chemically synthesized
  source 1..22: mol_type = other DNA
gaagctgttattctcagtctga

SEQ ID NO: 56918 - DNA, 22 bp, synthetic construct
  misc_feature 1..22: note = chemically synthesized
  source 1..22: mol_type = other DNA
ttattctcagtctgacttgcac

SEQ ID NO: 56919 - DNA, 22 bp, synthetic construct
  misc_feature 1..22: note = chemically synthesized
  source 1..22: mol_type = other DNA
ttctcagtctgacttgcacacc

SEQ ID NO: 56920 - DNA, 22 bp, synthetic construct
  misc_feature 1..22: note = chemically synthesized
  source 1..22: mol_type = other DNA
tcagtctgacttgcacaccagc

SEQ ID NO: 56921 - DNA, 22 bp, synthetic construct
  misc_feature 1..22: note = chemically synthesized
  source 1..22: mol_type = other DNA
agtctgacttgcacaccagctg

SEQ ID NO: 56922 - DNA, 22 bp, synthetic construct
  misc_feature 1..22: note = chemically synthesized
  source 1..22: mol_type = other DNA
acttgcacaccagctgagatag

SEQ ID NO: 56923 - DNA, 22 bp, synthetic construct
  misc_feature 1..22: note = chemically synthesized
  source 1..22: mol_type = other DNA
gcacaccagctgagataggact

SEQ ID NO: 56924 - DNA, 22 bp, synthetic construct
  misc_feature 1..22: note = chemically synthesized
  source 1..22: mol_type = other DNA
cacaccagctgagataggactt

SEQ ID NO: 56925 - DNA, 22 bp, synthetic construct
  misc_feature 1..22: note = chemically synthesized
  source 1..22: mol_type = other DNA
agataggacttaacatatactt

SEQ ID NO: 56926 - DNA, 22 bp, synthetic construct
  misc_feature 1..22: note = chemically synthesized
  source 1..22: mol_type = other DNA
aacatatactttcttgctttca

SEQ ID NO: 56927 - DNA, 22 bp, synthetic construct
  misc_feature 1..22: note = chemically synthesized
  source 1..22: mol_type = other DNA
acatatactttcttgctttcac

SEQ ID NO: 56928 - DNA, 22 bp, synthetic construct
  misc_feature 1..22: note = chemically synthesized
  source 1..22: mol_type = other DNA
tcttgctttcacctgggttgga

SEQ ID NO: 56929 - DNA, 22 bp, synthetic construct
  misc_feature 1..22: note = chemically synthesized
  source 1..22: mol_type = other DNA
cttgctttcacctgggttggag

SEQ ID NO: 56930 - DNA, 22 bp, synthetic construct
  misc_feature 1..22: note = chemically synthesized
  source 1..22: mol_type = other DNA
ttgctttcacctgggttggaga

SEQ ID NO: 56931 - DNA, 22 bp, synthetic construct
  misc_feature 1..22: note = chemically synthesized
  source 1..22: mol_type = other DNA
gctttcacctgggttggagagg

SEQ ID NO: 56932 - DNA, 22 bp, synthetic construct
  misc_feature 1..22: note = chemically synthesized
  source 1..22: mol_type = other DNA
ctttcacctgggttggagaggt

SEQ ID NO: 56933 - DNA, 22 bp, synthetic construct
  misc_feature 1..22: note = chemically synthesized
  source 1..22: mol_type = other DNA
tcacctgggttggagaggttgg

SEQ ID NO: 56934 - DNA, 22 bp, synthetic construct
  misc_feature 1..22: note = chemically synthesized
  source 1..22: mol_type = other DNA
cacctgggttggagaggttggg

SEQ ID NO: 56935 - DNA, 22 bp, synthetic construct
  misc_feature 1..22: note = chemically synthesized
  source 1..22: mol_type = other DNA
acctgggttggagaggttgggg

SEQ ID NO: 56936 - DNA, 22 bp, synthetic construct
  misc_feature 1..22: note = chemically synthesized
  source 1..22: mol_type = other DNA
ggttggagaggttggggttggg

SEQ ID NO: 56937 - DNA, 22 bp, synthetic construct
  misc_feature 1..22: note = chemically synthesized
  source 1..22: mol_type = other DNA
gagaggttggggttgggaggaa

SEQ ID NO: 56938 - DNA, 22 bp, synthetic construct
  misc_feature 1..22: note = chemically synthesized
  source 1..22: mol_type = other DNA
gggttgggaggaagaggaggag

SEQ ID NO: 56939 - DNA, 22 bp, synthetic construct
  misc_feature 1..22: note = chemically synthesized
  source 1..22: mol_type = other DNA
ggaggaagaggaggagttcatt

SEQ ID NO: 56940 - DNA, 22 bp, synthetic construct
  misc_feature 1..22: note = chemically synthesized
  source 1..22: mol_type = other DNA
attgggaattctgtcactagaa

SEQ ID NO: 56941 - DNA, 22 bp, synthetic construct
  misc_feature 1..22: note = chemically synthesized
  source 1..22: mol_type = other DNA
ggaattctgtcactagaatttt

SEQ ID NO: 56942 - DNA, 22 bp, synthetic construct
  misc_feature 1..22: note = chemically synthesized
  source 1..22: mol_type = other DNA
tgtcactagaattttttaaatg

SEQ ID NO: 56943 - DNA, 22 bp, synthetic construct
  misc_feature 1..22: note = chemically synthesized
  source 1..22: mol_type = other DNA
tcactagaattttttaaatgtc

SEQ ID NO: 56944 - DNA, 22 bp, synthetic construct
  misc_feature 1..22: note = chemically synthesized
  source 1..22: mol_type = other DNA
gaattttttaaatgtcaggagg

SEQ ID NO: 56945 - DNA, 22 bp, synthetic construct
  misc_feature 1..22: note = chemically synthesized
  source 1..22: mol_type = other DNA
tttaaatgtcaggaggttagca

SEQ ID NO: 56946 - DNA, 22 bp, synthetic construct
  misc_feature 1..22: note = chemically synthesized
  source 1..22: mol_type = other DNA
ttaaatgtcaggaggttagcaa

SEQ ID NO: 56947 - DNA, 22 bp, synthetic construct
  misc_feature 1..22: note = chemically synthesized
  source 1..22: mol_type = other DNA
taaatgtcaggaggttagcaag

SEQ ID NO: 56948 - DNA, 22 bp, synthetic construct
  misc_feature 1..22: note = chemically synthesized
  source 1..22: mol_type = other DNA
aaatgtcaggaggttagcaagg

SEQ ID NO: 56949 - DNA, 22 bp, synthetic construct
  misc_feature 1..22: note = chemically synthesized
  source 1..22: mol_type = other DNA
aatgtcaggaggttagcaaggt

SEQ ID NO: 56950 - DNA, 22 bp, synthetic construct
  misc_feature 1..22: note = chemically synthesized
  source 1..22: mol_type = other DNA
gcaaggtgtgagttagcattca

SEQ ID NO: 56951 - DNA, 22 bp, synthetic construct
  misc_feature 1..22: note = chemically synthesized
  source 1..22: mol_type = other DNA
gcattcaagcaaaggattcttc

SEQ ID NO: 56952 - DNA, 22 bp, synthetic construct
  misc_feature 1..22: note = chemically synthesized
  source 1..22: mol_type = other DNA
aagcaaaggattcttctccaga

SEQ ID NO: 56953 - DNA, 22 bp, synthetic construct
  misc_feature 1..22: note = chemically synthesized
  source 1..22: mol_type = other DNA
ttctccagactagtaattggaa

SEQ ID NO: 56954 - DNA, 22 bp, synthetic construct
  misc_feature 1..22: note = chemically synthesized
  source 1..22: mol_type = other DNA
ctccagactagtaattggaaag

SEQ ID NO: 56955 - DNA, 22 bp, synthetic construct
  misc_feature 1..22: note = chemically synthesized
  source 1..22: mol_type = other DNA
tccagactagtaattggaaagc

SEQ ID NO: 56956 - DNA, 22 bp, synthetic construct
  misc_feature 1..22: note = chemically synthesized
  source 1..22: mol_type = other DNA
cagactagtaattggaaagcct

SEQ ID NO: 56957 - DNA, 22 bp, synthetic construct
  misc_feature 1..22: note = chemically synthesized
  source 1..22: mol_type = other DNA
gtaattggaaagcctgcaaatc

SEQ ID NO: 56958 - DNA, 22 bp, synthetic construct
  misc_feature 1..22: note = chemically synthesized
  source 1..22: mol_type = other DNA
gaaagcctgcaaatccaggttc

SEQ ID NO: 56959 - DNA, 22 bp, synthetic construct
  misc_feature 1..22: note = chemically synthesized
  source 1..22: mol_type = other DNA
caaatccaggttcccacgatac

SEQ ID NO: 56960 - DNA, 22 bp, synthetic construct
  misc_feature 1..22: note = chemically synthesized
  source 1..22: mol_type = other DNA
ccacgatactctctaataactg

SEQ ID NO: 56961 - DNA, 22 bp, synthetic construct
  misc_feature 1..22: note = chemically synthesized
  source 1..22: mol_type = other DNA
tctaataactggggtgggatgg

SEQ ID NO: 56962 - DNA, 22 bp, synthetic construct
  misc_feature 1..22: note = chemically synthesized
  source 1..22: mol_type = other DNA
taataactggggtgggatggtg

SEQ ID NO: 56963 - DNA, 22 bp, synthetic construct
  misc_feature 1..22: note = chemically synthesized
  source 1..22: mol_type = other DNA
ataactggggtgggatggtggt

SEQ ID NO: 56964 - DNA, 22 bp, synthetic construct
  misc_feature 1..22: note = chemically synthesized
  source 1..22: mol_type = other DNA
gggtgggatggtggtggtgggt

SEQ ID NO: 56965 - DNA, 22 bp, synthetic construct
  misc_feature 1..22: note = chemically synthesized
  source 1..22: mol_type = other DNA
tctgaatgtcagctgatgtctg

SEQ ID NO: 56966 - DNA, 22 bp, synthetic construct
  misc_feature 1..22: note = chemically synthesized
  source 1..22: mol_type = other DNA
ctgaatgtcagctgatgtctgc

SEQ ID NO: 56967 - DNA, 22 bp, synthetic construct
  misc_feature 1..22: note = chemically synthesized
  source 1..22: mol_type = other DNA
tgaatgtcagctgatgtctgca

SEQ ID NO: 56968 - DNA, 22 bp, synthetic construct
  misc_feature 1..22: note = chemically synthesized
  source 1..22: mol_type = other DNA
aatgtcagctgatgtctgcatg

SEQ ID NO: 56969 - DNA, 22 bp, synthetic construct
  misc_feature 1..22: note = chemically synthesized
  source 1..22: mol_type = other DNA
atgtctgcatgacccgttcacc

SEQ ID NO: 56970 - DNA, 22 bp, synthetic construct
  misc_feature 1..22: note = chemically synthesized
  source 1..22: mol_type = other DNA
catgacccgttcaccatggatt

SEQ ID NO: 56971 - DNA, 22 bp, synthetic construct
  misc_feature 1..22: note = chemically synthesized
  source 1..22: mol_type = other DNA
accatggattaaatgcggctgg

SEQ ID NO: 56972 - DNA, 22 bp, synthetic construct
  misc_feature 1..22: note = chemically synthesized
  source 1..22: mol_type = other DNA
aatgcggctggtgccgaatgga

SEQ ID NO: 56973 - DNA, 22 bp, synthetic construct
  misc_feature 1..22: note = chemically synthesized
  source 1..22: mol_type = other DNA
gtgccgaatggaggaaatcaga

SEQ ID NO: 56974 - DNA, 22 bp, synthetic construct
  misc_feature 1..22: note = chemically synthesized
  source 1..22: mol_type = other DNA
aagcaacaggatttgcactcct

SEQ ID NO: 56975 - DNA, 22 bp, synthetic construct
  misc_feature 1..22: note = chemically synthesized
  source 1..22: mol_type = other DNA
gcactcctcagaagtaaaccag

SEQ ID NO: 56976 - DNA, 22 bp, synthetic construct
  misc_feature 1..22: note = chemically synthesized
  source 1..22: mol_type = other DNA
cactcctcagaagtaaaccaga

SEQ ID NO: 56977 - DNA, 22 bp, synthetic construct
  misc_feature 1..22: note = chemically synthesized
  source 1..22: mol_type = other DNA
ctcagaagtaaaccagaccttg

SEQ ID NO: 56978 - DNA, 22 bp, synthetic construct
  misc_feature 1..22: note = chemically synthesized
  source 1..22: mol_type = other DNA
agaagtaaaccagaccttgctc

SEQ ID NO: 56979 - DNA, 22 bp, synthetic construct
  misc_feature 1..22: note = chemically synthesized
  source 1..22: mol_type = other DNA
gctcctctccctcctgtgcttc

SEQ ID NO: 56980 - DNA, 22 bp, synthetic construct
  misc_feature 1..22: note = chemically synthesized
  source 1..22: mol_type = other DNA
ctcctctccctcctgtgcttct

SEQ ID NO: 56981 - DNA, 22 bp, synthetic construct
  misc_feature 1..22: note = chemically synthesized
  source 1..22: mol_type = other DNA
ctctccctcctgtgcttctcct

SEQ ID NO: 56982 - DNA, 22 bp, synthetic construct
  misc_feature 1..22: note = chemically synthesized
  source 1..22: mol_type = other DNA
tccctcctgtgcttctcctttc

SEQ ID NO: 56983 - DNA, 22 bp, synthetic construct
  misc_feature 1..22: note = chemically synthesized
  source 1..22: mol_type = other DNA
cctcctgtgcttctcctttctt

SEQ ID NO: 56984 - DNA, 22 bp, synthetic construct
  misc_feature 1..22: note = chemically synthesized
  source 1..22: mol_type = other DNA
ctgtgcttctcctttcttgctg

SEQ ID NO: 56985 - DNA, 22 bp, synthetic construct
  misc_feature 1..22: note = chemically synthesized
  source 1..22: mol_type = other DNA
tgcttctcctttcttgctggtt

SEQ ID NO: 56986 - DNA, 22 bp, synthetic construct
  misc_feature 1..22: note = chemically synthesized
  source 1..22: mol_type = other DNA
ctcctttcttgctggtttccct

SEQ ID NO: 56987 - DNA, 22 bp, synthetic construct
  misc_feature 1..22: note = chemically synthesized
  source 1..22: mol_type = other DNA
tcctttcttgctggtttccctt

SEQ ID NO: 56988 - DNA, 22 bp, synthetic construct
  misc_feature 1..22: note = chemically synthesized
  source 1..22: mol_type = other DNA
ctttcttgctggtttccctttg

SEQ ID NO: 56989 - DNA, 22 bp, synthetic construct
  misc_feature 1..22: note = chemically synthesized
  source 1..22: mol_type = other DNA
tcttgctggtttccctttggaa

SEQ ID NO: 56990 - DNA, 22 bp, synthetic construct
  misc_feature 1..22: note = chemically synthesized
  source 1..22: mol_type = other DNA
cttgctggtttccctttggaag

SEQ ID NO: 56991 - DNA, 22 bp, synthetic construct
  misc_feature 1..22: note = chemically synthesized
  source 1..22: mol_type = other DNA
ttgctggtttccctttggaagc

SEQ ID NO: 56992 - DNA, 22 bp, synthetic construct
  misc_feature 1..22: note = chemically synthesized
  source 1..22: mol_type = other DNA
gctggtttccctttggaagcag

SEQ ID NO: 56993 - DNA, 22 bp, synthetic construct
  misc_feature 1..22: note = chemically synthesized
  source 1..22: mol_type = other DNA
ctggtttccctttggaagcaga

SEQ ID NO: 56994 - DNA, 22 bp, synthetic construct
  misc_feature 1..22: note = chemically synthesized
  source 1..22: mol_type = other DNA
gtttccctttggaagcagaaac

SEQ ID NO: 56995 - DNA, 22 bp, synthetic construct
  misc_feature 1..22: note = chemically synthesized
  source 1..22: mol_type = other DNA
ccctttggaagcagaaacttct

SEQ ID NO: 56996 - DNA, 22 bp, synthetic construct
  misc_feature 1..22: note = chemically synthesized
  source 1..22: mol_type = other DNA
cctttggaagcagaaacttcta

SEQ ID NO: 56997 - DNA, 22 bp, synthetic construct
  misc_feature 1..22: note = chemically synthesized
  source 1..22: mol_type = other DNA
tggaagcagaaacttctaaaat

SEQ ID NO: 56998 - DNA, 22 bp, synthetic construct
  misc_feature 1..22: note = chemically synthesized
  source 1..22: mol_type = other DNA
ggaagcagaaacttctaaaatt

SEQ ID NO: 56999 - DNA, 22 bp, synthetic construct
  misc_feature 1..22: note = chemically synthesized
  source 1..22: mol_type = other DNA
gaagcagaaacttctaaaatta

SEQ ID NO: 57000 - DNA, 22 bp, synthetic construct
  misc_feature 1..22: note = chemically synthesized
  source 1..22: mol_type = other DNA
ctaaaattaatgccactccaag

SEQ ID NO: 57001 - DNA, 22 bp, synthetic construct
  misc_feature 1..22: note = chemically synthesized
  source 1..22: mol_type = other DNA
taaaattaatgccactccaagc

SEQ ID NO: 57002 - DNA, 22 bp, synthetic construct
  misc_feature 1..22: note = chemically synthesized
  source 1..22: mol_type = other DNA
aaattaatgccactccaagcca

SEQ ID NO: 57003 - DNA, 22 bp, synthetic construct
  misc_feature 1..22: note = chemically synthesized
  source 1..22: mol_type = other DNA
atgccactccaagccaatgaaa

SEQ ID NO: 57004 - DNA, 22 bp, synthetic construct
  misc_feature 1..22: note = chemically synthesized
  source 1..22: mol_type = other DNA
caagccaatgaaaaagctgttt

SEQ ID NO: 57005 - DNA, 22 bp, synthetic construct
  misc_feature 1..22: note = chemically synthesized
  source 1..22: mol_type = other DNA
tttttataccacagtggatgtt

SEQ ID NO: 57006 - DNA, 22 bp, synthetic construct
  misc_feature 1..22: note = chemically synthesized
  source 1..22: mol_type = other DNA
ttataccacagtggatgtttac

SEQ ID NO: 57007 - DNA, 22 bp, synthetic construct
  misc_feature 1..22: note = chemically synthesized
  source 1..22: mol_type = other DNA
tataccacagtggatgtttaca

SEQ ID NO: 57008 - DNA, 22 bp, synthetic construct
  misc_feature 1..22: note = chemically synthesized
  source 1..22: mol_type = other DNA
ataccacagtggatgtttacac

SEQ ID NO: 57009 - DNA, 22 bp, synthetic construct
  misc_feature 1..22: note = chemically synthesized
  source 1..22: mol_type = other DNA
taccacagtggatgtttacaca

SEQ ID NO: 57010 - DNA, 22 bp, synthetic construct
  misc_feature 1..22: note = chemically synthesized
  source 1..22: mol_type = other DNA
acacaggagagacaacttgagg

SEQ ID NO: 57011 - DNA, 22 bp, synthetic construct
  misc_feature 1..22: note = chemically synthesized
  source 1..22: mol_type = other DNA
cacaggagagacaacttgaggg

SEQ ID NO: 57012 - DNA, 22 bp, synthetic construct
  misc_feature 1..22: note = chemically synthesized
  source 1..22: mol_type = other DNA
gagggggaaaaggctttttgga

SEQ ID NO: 57013 - DNA, 22 bp, synthetic construct
  misc_feature 1..22: note = chemically synthesized
  source 1..22: mol_type = other DNA
agggggaaaaggctttttggaa

SEQ ID NO: 57014 - DNA, 22 bp, synthetic construct
  misc_feature 1..22: note = chemically synthesized
  source 1..22: mol_type = other DNA
tttggaagggtggagggactcg

SEQ ID NO: 57015 - DNA, 22 bp, synthetic construct
  misc_feature 1..22: note = chemically synthesized
  source 1..22: mol_type = other DNA
ttggaagggtggagggactcgt

SEQ ID NO: 57016 - DNA, 22 bp, synthetic construct
  misc_feature 1..22: note = chemically synthesized
  source 1..22: mol_type = other DNA
tggaagggtggagggactcgtg

SEQ ID NO: 57017 - DNA, 22 bp, synthetic construct
  misc_feature 1..22: note = chemically synthesized
  source 1..22: mol_type = other DNA
ggaagggtggagggactcgtgt

SEQ ID NO: 57018 - DNA, 22 bp, synthetic construct
  misc_feature 1..22: note = chemically synthesized
  source 1..22: mol_type = other DNA
gaagggtggagggactcgtgtt

SEQ ID NO: 57019 - DNA, 22 bp, synthetic construct
  misc_feature 1..22: note = chemically synthesized
  source 1..22: mol_type = other DNA
gtgttaatctgttctgttggag

SEQ ID NO: 57020 - DNA, 22 bp, synthetic construct
  misc_feature 1..22: note = chemically synthesized
  source 1..22: mol_type = other DNA
atctgttctgttggaggactat

SEQ ID NO: 57021 - DNA, 22 bp, synthetic construct
  misc_feature 1..22: note = chemically synthesized
  source 1..22: mol_type = other DNA
ttctgttggaggactatgcagt

SEQ ID NO: 57022 - DNA, 22 bp, synthetic construct
  misc_feature 1..22: note = chemically synthesized
  source 1..22: mol_type = other DNA
tgttggaggactatgcagtatt

SEQ ID NO: 57023 - DNA, 22 bp, synthetic construct
  misc_feature 1..22: note = chemically synthesized
  source 1..22: mol_type = other DNA
ttggaggactatgcagtattgc

SEQ ID NO: 57024 - DNA, 22 bp, synthetic construct
  misc_feature 1..22: note = chemically synthesized
  source 1..22: mol_type = other DNA
gaggactatgcagtattgccta

SEQ ID NO: 57025 - DNA, 22 bp, synthetic construct
  misc_feature 1..22: note = chemically synthesized
  source 1..22: mol_type = other DNA
tgcagtattgcctatgagcgac

SEQ ID NO: 57026 - DNA, 22 bp, synthetic construct
  misc_feature 1..22: note = chemically synthesized
  source 1..22: mol_type = other DNA
cctatgagcgactctgggctgt

SEQ ID NO: 57027 - DNA, 22 bp, synthetic construct
  misc_feature 1..22: note = chemically synthesized
  source 1..22: mol_type = other DNA
tgagcgactctgggctgttttt

SEQ ID NO: 57028 - DNA, 22 bp, synthetic construct
  misc_feature 1..22: note = chemically synthesized
  source 1..22: mol_type = other DNA
tgggctgtttttgataaattac

SEQ ID NO: 57029 - DNA, 22 bp, synthetic construct
  misc_feature 1..22: note = chemically synthesized
  source 1..22: mol_type = other DNA
ggctgtttttgataaattacca

SEQ ID NO: 57030 - DNA, 22 bp, synthetic construct
  misc_feature 1..22: note = chemically synthesized
  source 1..22: mol_type = other DNA
tttttgataaattaccatgttt

SEQ ID NO: 57031 - DNA, 22 bp, synthetic construct
  misc_feature 1..22: note = chemically synthesized
  source 1..22: mol_type = other DNA
ttgataaattaccatgtttaga

SEQ ID NO: 57032 - DNA, 22 bp, synthetic construct
  misc_feature 1..22: note = chemically synthesized
  source 1..22: mol_type = other DNA
tgataaattaccatgtttagag

SEQ ID NO: 57033 - DNA, 22 bp, synthetic construct
  misc_feature 1..22: note = chemically synthesized
  source 1..22: mol_type = other DNA
gataaattaccatgtttagaga

SEQ ID NO: 57034 - DNA, 22 bp, synthetic construct
  misc_feature 1..22: note = chemically synthesized
  source 1..22: mol_type = other DNA
ataaattaccatgtttagagat

SEQ ID NO: 57035 - DNA, 22 bp, synthetic construct
  misc_feature 1..22: note = chemically synthesized
  source 1..22: mol_type = other DNA
ccatgtttagagataggtttgg

SEQ ID NO: 57036 - DNA, 22 bp, synthetic construct
  misc_feature 1..22: note = chemically synthesized
  source 1..22: mol_type = other DNA
agagataggtttggctcttaag

SEQ ID NO: 57037 - DNA, 22 bp, synthetic construct
  misc_feature 1..22: note = chemically synthesized
  source 1..22: mol_type = other DNA
gagataggtttggctcttaagg

SEQ ID NO: 57038 - DNA, 22 bp, synthetic construct
  misc_feature 1..22: note = chemically synthesized
  source 1..22: mol_type = other DNA
ggctcttaagggcttagtttta

SEQ ID NO: 57039 - DNA, 22 bp, synthetic construct
  misc_feature 1..22: note = chemically synthesized
  source 1..22: mol_type = other DNA
gctcttaagggcttagttttat

SEQ ID NO: 57040 - DNA, 22 bp, synthetic construct
  misc_feature 1..22: note = chemically synthesized
  source 1..22: mol_type = other DNA
ttaagggcttagttttatgaac

SEQ ID NO: 57041 - DNA, 22 bp, synthetic construct
  misc_feature 1..22: note = chemically synthesized
  source 1..22: mol_type = other DNA
aagggcttagttttatgaacaa

SEQ ID NO: 57042 - DNA, 22 bp, synthetic construct
  misc_feature 1..22: note = chemically synthesized
  source 1..22: mol_type = other DNA
agggcttagttttatgaacaaa

SEQ ID NO: 57043 - DNA, 22 bp, synthetic construct
  misc_feature 1..22: note = chemically synthesized
  source 1..22: mol_type = other DNA
agttttatgaacaaagtccgtg

SEQ ID NO: 57044 - DNA, 22 bp, synthetic construct
  misc_feature 1..22: note = chemically synthesized
  source 1..22: mol_type = other DNA
gttttatgaacaaagtccgtga

SEQ ID NO: 57045 - DNA, 22 bp, synthetic construct
  misc_feature 1..22: note = chemically synthesized
  source 1..22: mol_type = other DNA
tatgaacaaagtccgtgacgat

SEQ ID NO: 57046 - DNA, 22 bp, synthetic construct
  misc_feature 1..22: note = chemically synthesized
  source 1..22: mol_type = other DNA
atgaacaaagtccgtgacgatg

SEQ ID NO: 57047 - DNA, 22 bp, synthetic construct
  misc_feature 1..22: note = chemically synthesized
  source 1..22: mol_type = other DNA
tgaacaaagtccgtgacgatgt

SEQ ID NO: 57048 - DNA, 22 bp, synthetic construct
  misc_feature 1..22: note = chemically synthesized
  source 1..22: mol_type = other DNA
gcagcctctgtttgtatcttag

SEQ ID NO: 57049 - DNA, 22 bp, synthetic construct
  misc_feature 1..22: note = chemically synthesized
  source 1..22: mol_type = other DNA
cagcctctgtttgtatcttagc

SEQ ID NO: 57050 - DNA, 22 bp, synthetic construct
  misc_feature 1..22: note = chemically synthesized
  source 1..22: mol_type = other DNA
tgtttgtatcttagcccctttg

SEQ ID NO: 57051 - DNA, 22 bp, synthetic construct
  misc_feature 1..22: note = chemically synthesized
  source 1..22: mol_type = other DNA
tttgtatcttagcccctttggc

SEQ ID NO: 57052 - DNA, 22 bp, synthetic construct
  misc_feature 1..22: note = chemically synthesized
  source 1..22: mol_type = other DNA
gtatcttagcccctttggcttg

SEQ ID NO: 57053 - DNA, 22 bp, synthetic construct
  misc_feature 1..22: note = chemically synthesized
  source 1..22: mol_type = other DNA
tatcttagcccctttggcttga

SEQ ID NO: 57054 - DNA, 22 bp, synthetic construct
  misc_feature 1..22: note = chemically synthesized
  source 1..22: mol_type = other DNA
agcccctttggcttgactagaa

SEQ ID NO: 57055 - DNA, 22 bp, synthetic construct
  misc_feature 1..22: note = chemically synthesized
  source 1..22: mol_type = other DNA
gcccctttggcttgactagaag

SEQ ID NO: 57056 - DNA, 22 bp, synthetic construct
  misc_feature 1..22: note = chemically synthesized
  source 1..22: mol_type = other DNA
tggcttgactagaagctctatg

SEQ ID NO: 57057 - DNA, 22 bp, synthetic construct
  misc_feature 1..22: note = chemically synthesized
  source 1..22: mol_type = other DNA
ggcttgactagaagctctatgt

SEQ ID NO: 57058 - DNA, 22 bp, synthetic construct
  misc_feature 1..22: note = chemically synthesized
  source 1..22: mol_type = other DNA
gcttgactagaagctctatgtt

SEQ ID NO: 57059 - DNA, 22 bp, synthetic construct
  misc_feature 1..22: note = chemically synthesized
  source 1..22: mol_type = other DNA
gactagaagctctatgtttagt

SEQ ID NO: 57060 - DNA, 22 bp, synthetic construct
  misc_feature 1..22: note = chemically synthesized
  source 1..22: mol_type = other DNA
actagaagctctatgtttagtt

SEQ ID NO: 57061 - DNA, 22 bp, synthetic construct
  misc_feature 1..22: note = chemically synthesized
  source 1..22: mol_type = other DNA
gaagctctatgtttagtttaag

SEQ ID NO: 57062 - DNA, 22 bp, synthetic construct
  misc_feature 1..22: note = chemically synthesized
  source 1..22: mol_type = other DNA
tatgtttagtttaagctcagtc

SEQ ID NO: 57063 - DNA, 22 bp, synthetic construct
  misc_feature 1..22: note = chemically synthesized
  source 1..22: mol_type = other DNA
tgtttagtttaagctcagtctg

SEQ ID NO: 57064 - DNA, 22 bp, synthetic construct
  misc_feature 1..22: note = chemically synthesized
  source 1..22: mol_type = other DNA
agtttaagctcagtctggaaga

SEQ ID NO: 57065 - DNA, 22 bp, synthetic construct
  misc_feature 1..22: note = chemically synthesized
  source 1..22: mol_type = other DNA
gtttaagctcagtctggaagat

SEQ ID NO: 57066 - DNA, 22 bp, synthetic construct
  misc_feature 1..22: note = chemically synthesized
  source 1..22: mol_type = other DNA
aagctcagtctggaagatatta

SEQ ID NO: 57067 - DNA, 22 bp, synthetic construct
  misc_feature 1..22: note = chemically synthesized
  source 1..22: mol_type = other DNA
agctcagtctggaagatattac

SEQ ID NO: 57068 - DNA, 22 bp, synthetic construct
  misc_feature 1..22: note = chemically synthesized
  source 1..22: mol_type = other DNA
agtctggaagatattacaattt

SEQ ID NO: 57069 - DNA, 22 bp, synthetic construct
  misc_feature 1..22: note = chemically synthesized
  source 1..22: mol_type = other DNA
gaagatattacaattttgcatt

SEQ ID NO: 57070 - DNA, 22 bp, synthetic construct
  misc_feature 1..22: note = chemically synthesized
  source 1..22: mol_type = other DNA
caattttgcattaaaaaaatga

SEQ ID NO: 57071 - DNA, 22 bp, synthetic construct
  misc_feature 1..22: note = chemically synthesized
  source 1..22: mol_type = other DNA
tgcattaaaaaaatgaggaaat

SEQ ID NO: 57072 - DNA, 22 bp, synthetic construct
  misc_feature 1..22: note = chemically synthesized
  source 1..22: mol_type = other DNA
gcattaaaaaaatgaggaaatc

SEQ ID NO: 57073 - DNA, 22 bp, synthetic construct
  misc_feature 1..22: note = chemically synthesized
  source 1..22: mol_type = other DNA
cattaaaaaaatgaggaaatca

SEQ ID NO: 57074 - DNA, 22 bp, synthetic construct
  misc_feature 1..22: note = chemically synthesized
  source 1..22: mol_type = other DNA
aaaaaatgaggaaatcatagga

SEQ ID NO: 57075 - DNA, 22 bp, synthetic construct
  misc_feature 1..22: note = chemically synthesized
  source 1..22: mol_type = other DNA
tgctttttggatgaatcttact

SEQ ID NO: 57076 - DNA, 22 bp, synthetic construct
  misc_feature 1..22: note = chemically synthesized
  source 1..22: mol_type = other DNA
gctttttggatgaatcttactg

SEQ ID NO: 57077 - DNA, 22 bp, synthetic construct
  misc_feature 1..22: note = chemically synthesized
  source 1..22: mol_type = other DNA
ctttttggatgaatcttactga

SEQ ID NO: 57078 - DNA, 22 bp, synthetic construct
  misc_feature 1..22: note = chemically synthesized
  source 1..22: mol_type = other DNA
tttggatgaatcttactgataa

SEQ ID NO: 57079 - DNA, 22 bp, synthetic construct
  misc_feature 1..22: note = chemically synthesized
  source 1..22: mol_type = other DNA
ttggatgaatcttactgataat

SEQ ID NO: 57080 - DNA, 22 bp, synthetic construct
  misc_feature 1..22: note = chemically synthesized
  source 1..22: mol_type = other DNA
tggatgaatcttactgataatt

SEQ ID NO: 57081 - DNA, 22 bp, synthetic construct
  misc_feature 1..22: note = chemically synthesized
  source 1..22: mol_type = other DNA
ggatgaatcttactgataattt

SEQ ID NO: 57082 - DNA, 22 bp, synthetic construct
  misc_feature 1..22: note = chemically synthesized
  source 1..22: mol_type = other DNA
gatgaatcttactgataatttg

SEQ ID NO: 57083 - DNA, 22 bp, synthetic construct
  misc_feature 1..22: note = chemically synthesized
  source 1..22: mol_type = other DNA
actgataatttgctaaagctca

SEQ ID NO: 57084 - DNA, 22 bp, synthetic construct
  misc_feature 1..22: note = chemically synthesized
  source 1..22: mol_type = other DNA
ctgataatttgctaaagctcat

SEQ ID NO: 57085 - DNA, 22 bp, synthetic construct
  misc_feature 1..22: note = chemically synthesized
  source 1..22: mol_type = other DNA
ataatttgctaaagctcatttg

SEQ ID NO: 57086 - DNA, 22 bp, synthetic construct
  misc_feature 1..22: note = chemically synthesized
  source 1..22: mol_type = other DNA
gctaaagctcatttgaatttta

SEQ ID NO: 57087 - DNA, 22 bp, synthetic construct
  misc_feature 1..22: note = chemically synthesized
  source 1..22: mol_type = other DNA
ctaaagctcatttgaattttaa

SEQ ID NO: 57088 - DNA, 22 bp, synthetic construct
  misc_feature 1..22: note = chemically synthesized
  source 1..22: mol_type = other DNA
aagctcatttgaattttaagca

SEQ ID NO: 57089 - DNA, 22 bp, synthetic construct
  misc_feature 1..22: note = chemically synthesized
  source 1..22: mol_type = other DNA
atttgaattttaagcacttctt

SEQ ID NO: 57090 - DNA, 22 bp, synthetic construct
  misc_feature 1..22: note = chemically synthesized
  source 1..22: mol_type = other DNA
gaattttaagcacttctttaat

SEQ ID NO: 57091 - DNA, 22 bp, synthetic construct
  misc_feature 1..22: note = chemically synthesized
  source 1..22: mol_type = other DNA
aattttaagcacttctttaatc

SEQ ID NO: 57092 - DNA, 22 bp, synthetic construct
  misc_feature 1..22: note = chemically synthesized
  source 1..22: mol_type = other DNA
taagcacttctttaatcttcaa

SEQ ID NO: 57093 - DNA, 22 bp, synthetic construct
  misc_feature 1..22: note = chemically synthesized
  source 1..22: mol_type = other DNA
aagcacttctttaatcttcaaa

SEQ ID NO: 57094 - DNA, 22 bp, synthetic construct
  misc_feature 1..22: note = chemically synthesized
  source 1..22: mol_type = other DNA
agcacttctttaatcttcaaag

SEQ ID NO: 57095 - DNA, 22 bp, synthetic construct
  misc_feature 1..22: note = chemically synthesized
  source 1..22: mol_type = other DNA
ctttaatcttcaaaggctaaat

SEQ ID NO: 57096 - DNA, 22 bp, synthetic construct
  misc_feature 1..22: note = chemically synthesized
  source 1..22: mol_type = other DNA
tttaatcttcaaaggctaaatt

SEQ ID NO: 57097 - DNA, 22 bp, synthetic construct
  misc_feature 1..22: note = chemically synthesized
  source 1..22: mol_type = other DNA
taatcttcaaaggctaaattgc

SEQ ID NO: 57098 - DNA, 22 bp, synthetic construct
  misc_feature 1..22: note = chemically synthesized
  source 1..22: mol_type = other DNA
aatcttcaaaggctaaattgct

SEQ ID NO: 57099 - DNA, 22 bp, synthetic construct
  misc_feature 1..22: note = chemically synthesized
  source 1..22: mol_type = other DNA
atcttcaaaggctaaattgctt

SEQ ID NO: 57100 - DNA, 22 bp, synthetic construct
  misc_feature 1..22: note = chemically synthesized
  source 1..22: mol_type = other DNA
caaaggctaaattgctttatga

SEQ ID NO: 57101 - DNA, 22 bp, synthetic construct
  misc_feature 1..22: note = chemically synthesized
  source 1..22: mol_type = other DNA
aaaggctaaattgctttatgaa

SEQ ID NO: 57102 - DNA, 22 bp, synthetic construct
  misc_feature 1..22: note = chemically synthesized
  source 1..22: mol_type = other DNA
aattgctttatgaatatgcatg

SEQ ID NO: 57103 - DNA, 22 bp, synthetic construct
  misc_feature 1..22: note = chemically synthesized
  source 1..22: mol_type = other DNA
ctttatgaatatgcatggtgtg

SEQ ID NO: 57104 - DNA, 22 bp, synthetic construct
  misc_feature 1..22: note = chemically synthesized
  source 1..22: mol_type = other DNA
tatgaatatgcatggtgtgggc

SEQ ID NO: 57105 - DNA, 22 bp, synthetic construct
  misc_feature 1..22: note = chemically synthesized
  source 1..22: mol_type = other DNA
atgaatatgcatggtgtgggca

SEQ ID NO: 57106 - DNA, 22 bp, synthetic construct
  misc_feature 1..22: note = chemically synthesized
  source 1..22: mol_type = other DNA
tgaatatgcatggtgtgggcag

SEQ ID NO: 57107 - DNA, 22 bp, synthetic construct
  misc_feature 1..22: note = chemically synthesized
  source 1..22: mol_type = other DNA
cagttcattacctagttgtaaa

SEQ ID NO: 57108 - DNA, 22 bp, synthetic construct
  misc_feature 1..22: note = chemically synthesized
  source 1..22: mol_type = other DNA
agttcattacctagttgtaaat

SEQ ID NO: 57109 - DNA, 22 bp, synthetic construct
  misc_feature 1..22: note = chemically synthesized
  source 1..22: mol_type = other DNA
attacctagttgtaaattctaa

SEQ ID NO: 57110 - DNA, 22 bp, synthetic construct
  misc_feature 1..22: note = chemically synthesized
  source 1..22: mol_type = other DNA
cctagttgtaaattctaatgac

SEQ ID NO: 57111 - DNA, 22 bp, synthetic construct
  misc_feature 1..22: note = chemically synthesized
  source 1..22: mol_type = other DNA
gttgtaaattctaatgaccatt

SEQ ID NO: 57112 - DNA, 22 bp, synthetic construct
  misc_feature 1..22: note = chemically synthesized
  source 1..22: mol_type = other DNA
taaattctaatgaccattaggt

SEQ ID NO: 57113 - DNA, 22 bp, synthetic construct
  misc_feature 1..22: note = chemically synthesized
  source 1..22: mol_type = other DNA
taatgaccattaggtccttcca

SEQ ID NO: 57114 - DNA, 22 bp, synthetic construct
  misc_feature 1..22: note = chemically synthesized
  source 1..22: mol_type = other DNA
atgaccattaggtccttccagt

SEQ ID NO: 57115 - DNA, 22 bp, synthetic construct
  misc_feature 1..22: note = chemically synthesized
  source 1..22: mol_type = other DNA
ggtccttccagtaattgcgaat

SEQ ID NO: 57116 - DNA, 22 bp, synthetic construct
  misc_feature 1..22: note = chemically synthesized
  source 1..22: mol_type = other DNA
ccagtaattgcgaattgttttg

SEQ ID NO: 57117 - DNA, 22 bp, synthetic construct
  misc_feature 1..22: note = chemically synthesized
  source 1..22: mol_type = other DNA
cagtaattgcgaattgttttgc

SEQ ID NO: 57118 - DNA, 22 bp, synthetic construct
  misc_feature 1..22: note = chemically synthesized
  source 1..22: mol_type = other DNA
cgaattgttttgcatttttgat

SEQ ID NO: 57119 - DNA, 22 bp, synthetic construct
  misc_feature 1..22: note = chemically synthesized
  source 1..22: mol_type = other DNA
ttttgcatttttgattggccta

SEQ ID NO: 57120 - DNA, 22 bp, synthetic construct
  misc_feature 1..22: note = chemically synthesized
  source 1..22: mol_type = other DNA
tgcatttttgattggcctatta

SEQ ID NO: 57121 - DNA, 22 bp, synthetic construct
  misc_feature 1..22: note = chemically synthesized
  source 1..22: mol_type = other DNA
gcatttttgattggcctattaa

SEQ ID NO: 57122 - DNA, 22 bp, synthetic construct
  misc_feature 1..22: note = chemically synthesized
  source 1..22: mol_type = other DNA
catttttgattggcctattaac

SEQ ID NO: 57123 - DNA, 22 bp, synthetic construct
  misc_feature 1..22: note = chemically synthesized
  source 1..22: mol_type = other DNA
ttgattggcctattaacatgta

SEQ ID NO: 57124 - DNA, 22 bp, synthetic construct
  misc_feature 1..22: note = chemically synthesized
  source 1..22: mol_type = other DNA
tgattggcctattaacatgtac

SEQ ID NO: 57125 - DNA, 22 bp, synthetic construct
  misc_feature 1..22: note = chemically synthesized
  source 1..22: mol_type = other DNA
gattggcctattaacatgtaca

SEQ ID NO: 57126 - DNA, 22 bp, synthetic construct
  misc_feature 1..22: note = chemically synthesized
  source 1..22: mol_type = other DNA
attggcctattaacatgtacat

SEQ ID NO: 57127 - DNA, 22 bp, synthetic construct
  misc_feature 1..22: note = chemically synthesized
  source 1..22: mol_type = other DNA
gcctattaacatgtacattcgg

SEQ ID NO: 57128 - DNA, 22 bp, synthetic construct
  misc_feature 1..22: note = chemically synthesized
  source 1..22: mol_type = other DNA
ttaacatgtacattcggtgcac

SEQ ID NO: 57129 - DNA, 22 bp, synthetic construct
  misc_feature 1..22: note = chemically synthesized
  source 1..22: mol_type = other DNA
acatgtacattcggtgcacatc

SEQ ID NO: 57130 - DNA, 22 bp, synthetic construct
  misc_feature 1..22: note = chemically synthesized
  source 1..22: mol_type = other DNA
ggtgcacatcaggctggcctgt

SEQ ID NO: 57131 - DNA, 22 bp, synthetic construct
  misc_feature 1..22: note = chemically synthesized
  source 1..22: mol_type = other DNA
gcctgtcagcctgctgaaggag

SEQ ID NO: 57132 - DNA, 22 bp, synthetic construct
  misc_feature 1..22: note = chemically synthesized
  source 1..22: mol_type = other DNA
tcagcctgctgaaggagaaaaa

SEQ ID NO: 57133 - DNA, 22 bp, synthetic construct
  misc_feature 1..22: note = chemically synthesized
  source 1..22: mol_type = other DNA
ctgaaggagaaaaaaaaggtga

SEQ ID NO: 57134 - DNA, 22 bp, synthetic construct
  misc_feature 1..22: note = chemically synthesized
  source 1..22: mol_type = other DNA
aaggagaaaaaaaaggtgaaaa

SEQ ID NO: 57135 - DNA, 22 bp, synthetic construct
  misc_feature 1..22: note = chemically synthesized
  source 1..22: mol_type = other DNA
tttatagcaccaagattcttag

SEQ ID NO: 57136 - DNA, 22 bp, synthetic construct
  misc_feature 1..22: note = chemically synthesized
  source 1..22: mol_type = other DNA
atagcaccaagattcttagatt

SEQ ID NO: 57137 - DNA, 22 bp, synthetic construct
  misc_feature 1..22: note = chemically synthesized
  source 1..22: mol_type = other DNA
tagcaccaagattcttagattt

SEQ ID NO: 57138 - DNA, 22 bp, synthetic construct
  misc_feature 1..22: note = chemically synthesized
  source 1..22: mol_type = other DNA
ttagattttcaatcttgcaaaa

SEQ ID NO: 57139 - DNA, 22 bp, synthetic construct
  misc_feature 1..22: note = chemically synthesized
  source 1..22: mol_type = other DNA
agattttcaatcttgcaaaatt

SEQ ID NO: 57140 - DNA, 22 bp, synthetic construct
  misc_feature 1..22: note = chemically synthesized
  source 1..22: mol_type = other DNA
gattttcaatcttgcaaaattg

SEQ ID NO: 57141 - DNA, 22 bp, synthetic construct
  misc_feature 1..22: note = chemically synthesized
  source 1..22: mol_type = other DNA
tcaatcttgcaaaattgatgat

SEQ ID NO: 57142 - DNA, 22 bp, synthetic construct
  misc_feature 1..22: note = chemically synthesized
  source 1..22: mol_type = other DNA
caatcttgcaaaattgatgatg

SEQ ID NO: 57143 - DNA, 22 bp, synthetic construct
  misc_feature 1..22: note = chemically synthesized
  source 1..22: mol_type = other DNA
aatcttgcaaaattgatgatgt

SEQ ID NO: 57144 - DNA, 22 bp, synthetic construct
  misc_feature 1..22: note = chemically synthesized
  source 1..22: mol_type = other DNA
gcaaaattgatgatgtaaaaaa

SEQ ID NO: 57145 - DNA, 22 bp, synthetic construct
  misc_feature 1..22: note = chemically synthesized
  source 1..22: mol_type = other DNA
caaaattgatgatgtaaaaaaa

SEQ ID NO: 57146 - DNA, 22 bp, synthetic construct
  misc_feature 1..22: note = chemically synthesized
  source 1..22: mol_type = other DNA
atgatgtaaaaaaattaaagca

SEQ ID NO: 57147 - DNA, 22 bp, synthetic construct
  misc_feature 1..22: note = chemically synthesized
  source 1..22: mol_type = other DNA
aagcagtgttttttcttctcaa

SEQ ID NO: 57148 - DNA, 22 bp, synthetic construct
  misc_feature 1..22: note = chemically synthesized
  source 1..22: mol_type = other DNA
tttcttctcaagattaaaagtt

SEQ ID NO: 57149 - DNA, 22 bp, synthetic construct
  misc_feature 1..22: note = chemically synthesized
  source 1..22: mol_type = other DNA
ttcttctcaagattaaaagttc

SEQ ID NO: 57150 - DNA, 22 bp, synthetic construct
  misc_feature 1..22: note = chemically synthesized
  source 1..22: mol_type = other DNA
tcttctcaagattaaaagttca

SEQ ID NO: 57151 - DNA, 22 bp, synthetic construct
  misc_feature 1..22: note = chemically synthesized
  source 1..22: mol_type = other DNA
cttctcaagattaaaagttcac

SEQ ID NO: 57152 - DNA, 22 bp, synthetic construct
  misc_feature 1..22: note = chemically synthesized
  source 1..22: mol_type = other DNA
ttctcaagattaaaagttcacc

SEQ ID NO: 57153 - DNA, 22 bp, synthetic construct
  misc_feature 1..22: note = chemically synthesized
  source 1..22: mol_type = other DNA
ctcaagattaaaagttcaccaa

SEQ ID NO: 57154 - DNA, 22 bp, synthetic construct
  misc_feature 1..22: note = chemically synthesized
  source 1..22: mol_type = other DNA
tcaagattaaaagttcaccaag

SEQ ID NO: 57155 - DNA, 22 bp, synthetic construct
  misc_feature 1..22: note = chemically synthesized
  source 1..22: mol_type = other DNA
aagattaaaagttcaccaagag

SEQ ID NO: 57156 - DNA, 22 bp, synthetic construct
  misc_feature 1..22: note = chemically synthesized
  source 1..22: mol_type = other DNA
aaagttcaccaagagatttgac

SEQ ID NO: 57157 - DNA, 22 bp, synthetic construct
  misc_feature 1..22: note = chemically synthesized
  source 1..22: mol_type = other DNA
accaagagatttgacatattta

SEQ ID NO: 57158 - DNA, 22 bp, synthetic construct
  misc_feature 1..22: note = chemically synthesized
  source 1..22: mol_type = other DNA
gacatatttaatttacatgatg

SEQ ID NO: 57159 - DNA, 22 bp, synthetic construct
  misc_feature 1..22: note = chemically synthesized
  source 1..22: mol_type = other DNA
acatatttaatttacatgatga

SEQ ID NO: 57160 - DNA, 22 bp, synthetic construct
  misc_feature 1..22: note = chemically synthesized
  source 1..22: mol_type = other DNA
aatttacatgatgactttgcac

SEQ ID NO: 57161 - DNA, 22 bp, synthetic construct
  misc_feature 1..22: note = chemically synthesized
  source 1..22: mol_type = other DNA
atttacatgatgactttgcact

SEQ ID NO: 57162 - DNA, 22 bp, synthetic construct
  misc_feature 1..22: note = chemically synthesized
  source 1..22: mol_type = other DNA
acatgatgactttgcactcctt

SEQ ID NO: 57163 - DNA, 22 bp, synthetic construct
  misc_feature 1..22: note = chemically synthesized
  source 1..22: mol_type = other DNA
catgatgactttgcactccttc

SEQ ID NO: 57164 - DNA, 22 bp, synthetic construct
  misc_feature 1..22: note = chemically synthesized
  source 1..22: mol_type = other DNA
tgcactccttcattaatgtaat

SEQ ID NO: 57165 - DNA, 22 bp, synthetic construct
  misc_feature 1..22: note = chemically synthesized
  source 1..22: mol_type = other DNA
gcactccttcattaatgtaatt

SEQ ID NO: 57166 - DNA, 22 bp, synthetic construct
  misc_feature 1..22: note = chemically synthesized
  source 1..22: mol_type = other DNA
cactccttcattaatgtaattt

SEQ ID NO: 57167 - DNA, 22 bp, synthetic construct
  misc_feature 1..22: note = chemically synthesized
  source 1..22: mol_type = other DNA
cttcattaatgtaatttgcata

SEQ ID NO: 57168 - DNA, 22 bp, synthetic construct
  misc_feature 1..22: note = chemically synthesized
  source 1..22: mol_type = other DNA
cattaatgtaatttgcatatga

SEQ ID NO: 57169 - DNA, 22 bp, synthetic construct
  misc_feature 1..22: note = chemically synthesized
  source 1..22: mol_type = other DNA
attaatgtaatttgcatatgaa

SEQ ID NO: 57170 - DNA, 22 bp, synthetic construct
  misc_feature 1..22: note = chemically synthesized
  source 1..22: mol_type = other DNA
atgtaatttgcatatgaagctg

SEQ ID NO: 57171 - DNA, 22 bp, synthetic construct
  misc_feature 1..22: note = chemically synthesized
  source 1..22: mol_type = other DNA
gcatatgaagctgttgttaatc

SEQ ID NO: 57172 - DNA, 22 bp, synthetic construct
  misc_feature 1..22: note = chemically synthesized
  source 1..22: mol_type = other DNA
catatgaagctgttgttaatca

SEQ ID NO: 57173 - DNA, 22 bp, synthetic construct
  misc_feature 1..22: note = chemically synthesized
  source 1..22: mol_type = other DNA
ttgttaatcacttttgatcatg

SEQ ID NO: 57174 - DNA, 22 bp, synthetic construct
  misc_feature 1..22: note = chemically synthesized
  source 1..22: mol_type = other DNA
ttaatcacttttgatcatgttt

SEQ ID NO: 57175 - DNA, 22 bp, synthetic construct
  misc_feature 1..22: note = chemically synthesized
  source 1..22: mol_type = other DNA
atcacttttgatcatgttttgt

SEQ ID NO: 57176 - DNA, 22 bp, synthetic construct
  misc_feature 1..22: note = chemically synthesized
  source 1..22: mol_type = other DNA
ttgatcatgttttgtgtattag

SEQ ID NO: 57177 - DNA, 22 bp, synthetic construct
  misc_feature 1..22: note = chemically synthesized
  source 1..22: mol_type = other DNA
tgatcatgttttgtgtattagc

SEQ ID NO: 57178 - DNA, 22 bp, synthetic construct
  misc_feature 1..22: note = chemically synthesized
  source 1..22: mol_type = other DNA
gatcatgttttgtgtattagct

SEQ ID NO: 57179 - DNA, 22 bp, synthetic construct
  misc_feature 1..22: note = chemically synthesized
  source 1..22: mol_type = other DNA
atcatgttttgtgtattagctg

SEQ ID NO: 57180 - DNA, 22 bp, synthetic construct
  misc_feature 1..22: note = chemically synthesized
  source 1..22: mol_type = other DNA
tgtgtattagctgcctcagtgg

SEQ ID NO: 57181 - DNA, 22 bp, synthetic construct
  misc_feature 1..22: note = chemically synthesized
  source 1..22: mol_type = other DNA
gtgtattagctgcctcagtggc

SEQ ID NO: 57182 - DNA, 22 bp, synthetic construct
  misc_feature 1..22: note = chemically synthesized
  source 1..22: mol_type = other DNA
tgtattagctgcctcagtggct

SEQ ID NO: 57183 - DNA, 22 bp, synthetic construct
  misc_feature 1..22: note = chemically synthesized
  source 1..22: mol_type = other DNA
gctgcctcagtggctctcctcc

SEQ ID NO: 57184 - DNA, 22 bp, synthetic construct
  misc_feature 1..22: note = chemically synthesized
  source 1..22: mol_type = other DNA
cctcagtggctctcctcctcag

SEQ ID NO: 57185 - DNA, 22 bp, synthetic construct
  misc_feature 1..22: note = chemically synthesized
  source 1..22: mol_type = other DNA
agtggctctcctcctcagatgc

SEQ ID NO: 57186 - DNA, 22 bp, synthetic construct
  misc_feature 1..22: note = chemically synthesized
  source 1..22: mol_type = other DNA
tcctcctcagatgccccagtag

SEQ ID NO: 57187 - DNA, 22 bp, synthetic construct
  misc_feature 1..22: note = chemically synthesized
  source 1..22: mol_type = other DNA
ctcctcagatgccccagtagaa

SEQ ID NO: 57188 - DNA, 22 bp, synthetic construct
  misc_feature 1..22: note = chemically synthesized
  source 1..22: mol_type = other DNA
ctcagatgccccagtagaaagg

SEQ ID NO: 57189 - DNA, 22 bp, synthetic construct
  misc_feature 1..22: note = chemically synthesized
  source 1..22: mol_type = other DNA
agatgccccagtagaaaggagc

SEQ ID NO: 57190 - DNA, 22 bp, synthetic construct
  misc_feature 1..22: note = chemically synthesized
  source 1..22: mol_type = other DNA
cttgccaagtttcctttagtga

SEQ ID NO: 57191 - DNA, 22 bp, synthetic construct
  misc_feature 1..22: note = chemically synthesized
  source 1..22: mol_type = other DNA
ttgccaagtttcctttagtgaa

SEQ ID NO: 57192 - DNA, 22 bp, synthetic construct
  misc_feature 1..22: note = chemically synthesized
  source 1..22: mol_type = other DNA
gccaagtttcctttagtgaatt

SEQ ID NO: 57193 - DNA, 22 bp, synthetic construct
  misc_feature 1..22: note = chemically synthesized
  source 1..22: mol_type = other DNA
ccaagtttcctttagtgaattg

SEQ ID NO: 57194 - DNA, 22 bp, synthetic construct
  misc_feature 1..22: note = chemically synthesized
  source 1..22: mol_type = other DNA
cctttagtgaattgaggaatta

SEQ ID NO: 57195 - DNA, 22 bp, synthetic construct
  misc_feature 1..22: note = chemically synthesized
  source 1..22: mol_type = other DNA
ctttagtgaattgaggaattag

SEQ ID NO: 57196 - DNA, 22 bp, synthetic construct
  misc_feature 1..22: note = chemically synthesized
  source 1..22: mol_type = other DNA
tagtgaattgaggaattagaag

SEQ ID NO: 57197 - DNA, 22 bp, synthetic construct
  misc_feature 1..22: note = chemically synthesized
  source 1..22: mol_type = other DNA
agtgaattgaggaattagaagt

SEQ ID NO: 57198 - DNA, 22 bp, synthetic construct
  misc_feature 1..22: note = chemically synthesized
  source 1..22: mol_type = other DNA
gtgaattgaggaattagaagtc

SEQ ID NO: 57199 - DNA, 22 bp, synthetic construct
  misc_feature 1..22: note = chemically synthesized
  source 1..22: mol_type = other DNA
aggaattagaagtctaaccttg

SEQ ID NO: 57200 - DNA, 22 bp, synthetic construct
  misc_feature 1..22: note = chemically synthesized
  source 1..22: mol_type = other DNA
gaagtctaaccttgagtaatta

SEQ ID NO: 57201 - DNA, 22 bp, synthetic construct
  misc_feature 1..22: note = chemically synthesized
  source 1..22: mol_type = other DNA
accttgagtaattacatatgtt

SEQ ID NO: 57202 - DNA, 22 bp, synthetic construct
  misc_feature 1..22: note = chemically synthesized
  source 1..22: mol_type = other DNA
gagtaattacatatgttttatc

SEQ ID NO: 57203 - DNA, 22 bp, synthetic construct
  misc_feature 1..22: note = chemically synthesized
  source 1..22: mol_type = other DNA
agtaattacatatgttttatcc

SEQ ID NO: 57204 - DNA, 22 bp, synthetic construct
  misc_feature 1..22: note = chemically synthesized
  source 1..22: mol_type = other DNA
catatgttttatccgttttctt

SEQ ID NO: 57205 - DNA, 22 bp, synthetic construct
  misc_feature 1..22: note = chemically synthesized
  source 1..22: mol_type = other DNA
tatccgttttcttttaacgtta

SEQ ID NO: 57206 - DNA, 22 bp, synthetic construct
  misc_feature 1..22: note = chemically synthesized
  source 1..22: mol_type = other DNA
atccgttttcttttaacgttaa

SEQ ID NO: 57207 - DNA, 22 bp, synthetic construct
  misc_feature 1..22: note = chemically synthesized
  source 1..22: mol_type = other DNA
tccgttttcttttaacgttaag

SEQ ID NO: 57208 - DNA, 22 bp, synthetic construct
  misc_feature 1..22: note = chemically synthesized
  source 1..22: mol_type = other DNA
tcttttaacgttaagtacagtt

SEQ ID NO: 57209 - DNA, 22 bp, synthetic construct
  misc_feature 1..22: note = chemically synthesized
  source 1..22: mol_type = other DNA
cttttaacgttaagtacagttt

SEQ ID NO: 57210 - DNA, 22 bp, synthetic construct
  misc_feature 1..22: note = chemically synthesized
  source 1..22: mol_type = other DNA
ttttaacgttaagtacagtttg

SEQ ID NO: 57211 - DNA, 22 bp, synthetic construct
  misc_feature 1..22: note = chemically synthesized
  source 1..22: mol_type = other DNA
ttaacgttaagtacagtttgtg

SEQ ID NO: 57212 - DNA, 22 bp, synthetic construct
  misc_feature 1..22: note = chemically synthesized
  source 1..22: mol_type = other DNA
taacgttaagtacagtttgtga

SEQ ID NO: 57213 - DNA, 22 bp, synthetic construct
  misc_feature 1..22: note = chemically synthesized
  source 1..22: mol_type = other DNA
aacgttaagtacagtttgtgaa

SEQ ID NO: 57214 - DNA, 22 bp, synthetic construct
  misc_feature 1..22: note = chemically synthesized
  source 1..22: mol_type = other DNA
acgttaagtacagtttgtgaac

SEQ ID NO: 57215 - DNA, 22 bp, synthetic construct
  misc_feature 1..22: note = chemically synthesized
  source 1..22: mol_type = other DNA
agtacagtttgtgaacgtgttg

SEQ ID NO: 57216 - DNA, 22 bp, synthetic construct
  misc_feature 1..22: note = chemically synthesized
  source 1..22: mol_type = other DNA
gtgaacgtgttggctggaaatc

SEQ ID NO: 57217 - DNA, 22 bp, synthetic construct
  misc_feature 1..22: note = chemically synthesized
  source 1..22: mol_type = other DNA
tgaacgtgttggctggaaatcg

SEQ ID NO: 57218 - DNA, 22 bp, synthetic construct
  misc_feature 1..22: note = chemically synthesized
  source 1..22: mol_type = other DNA
gctggaaatcgttctcatttgg

SEQ ID NO: 57219 - DNA, 22 bp, synthetic construct
  misc_feature 1..22: note = chemically synthesized
  source 1..22: mol_type = other DNA
gaaatcgttctcatttggggag

SEQ ID NO: 57220 - DNA, 22 bp, synthetic construct
  misc_feature 1..22: note = chemically synthesized
  source 1..22: mol_type = other DNA
tcatttggggagaagactgtaa

SEQ ID NO: 57221 - DNA, 22 bp, synthetic construct
  misc_feature 1..22: note = chemically synthesized
  source 1..22: mol_type = other DNA
atttggggagaagactgtaaaa

SEQ ID NO: 57222 - DNA, 22 bp, synthetic construct
  misc_feature 1..22: note = chemically synthesized
  source 1..22: mol_type = other DNA
ggggagaagactgtaaaattta

SEQ ID NO: 57223 - DNA, 22 bp, synthetic construct
  misc_feature 1..22: note = chemically synthesized
  source 1..22: mol_type = other DNA
gggagaagactgtaaaatttaa

SEQ ID NO: 57224 - DNA, 22 bp, synthetic construct
  misc_feature 1..22: note = chemically synthesized
  source 1..22: mol_type = other DNA
taaaatttaagtatatgattga

SEQ ID NO: 57225 - DNA, 22 bp, synthetic construct
  misc_feature 1..22: note = chemically synthesized
  source 1..22: mol_type = other DNA
aagtatatgattgaggcacttc

SEQ ID NO: 57226 - DNA, 22 bp, synthetic construct
  misc_feature 1..22: note = chemically synthesized
  source 1..22: mol_type = other DNA
agtatatgattgaggcacttcc

SEQ ID NO: 57227 - DNA, 22 bp, synthetic construct
  misc_feature 1..22: note = chemically synthesized
  source 1..22: mol_type = other DNA
aggcacttccagatacatagag

SEQ ID NO: 57228 - DNA, 22 bp, synthetic construct
  misc_feature 1..22: note = chemically synthesized
  source 1..22: mol_type = other DNA
ccagatacatagagaaatatgt

SEQ ID NO: 57229 - DNA, 22 bp, synthetic construct
  misc_feature 1..22: note = chemically synthesized
  source 1..22: mol_type = other DNA
cagatacatagagaaatatgta

SEQ ID NO: 57230 - DNA, 22 bp, synthetic construct
  misc_feature 1..22: note = chemically synthesized
  source 1..22: mol_type = other DNA
cctgtttctgttccccacgaac

SEQ ID NO: 57231 - DNA, 22 bp, synthetic construct
  misc_feature 1..22: note = chemically synthesized
  source 1..22: mol_type = other DNA
tttctgttccccacgaacattg

SEQ ID NO: 57232 - DNA, 22 bp, synthetic construct
  misc_feature 1..22: note = chemically synthesized
  source 1..22: mol_type = other DNA
ctgttccccacgaacattgcag

SEQ ID NO: 57233 - DNA, 22 bp, synthetic construct
  misc_feature 1..22: note = chemically synthesized
  source 1..22: mol_type = other DNA
tgttccccacgaacattgcagg

SEQ ID NO: 57234 - DNA, 22 bp, synthetic construct
  misc_feature 1..22: note = chemically synthesized
  source 1..22: mol_type = other DNA
ttccccacgaacattgcagggc

SEQ ID NO: 57235 - DNA, 22 bp, synthetic construct
  misc_feature 1..22: note = chemically synthesized
  source 1..22: mol_type = other DNA
cccacgaacattgcagggcagt

SEQ ID NO: 57236 - DNA, 22 bp, synthetic construct
  misc_feature 1..22: note = chemically synthesized
  source 1..22: mol_type = other DNA
cagggcagttttattgttagca

SEQ ID NO: 57237 - DNA, 22 bp, synthetic construct
  misc_feature 1..22: note = chemically synthesized
  source 1..22: mol_type = other DNA
tattgttagcagtttgatggca

SEQ ID NO: 57238 - DNA, 22 bp, synthetic construct
  misc_feature 1..22: note = chemically synthesized
  source 1..22: mol_type = other DNA
attgttagcagtttgatggcag

SEQ ID NO: 57239 - DNA, 22 bp, synthetic construct
  misc_feature 1..22: note = chemically synthesized
  source 1..22: mol_type = other DNA
ttgttagcagtttgatggcagg

SEQ ID NO: 57240 - DNA, 22 bp, synthetic construct
  misc_feature 1..22: note = chemically synthesized
  source 1..22: mol_type = other DNA
ttagcagtttgatggcaggaag

SEQ ID NO: 57241 - DNA, 22 bp, synthetic construct
  misc_feature 1..22: note = chemically synthesized
  source 1..22: mol_type = other DNA
gcagtttgatggcaggaagcct

SEQ ID NO: 57242 - DNA, 22 bp, synthetic construct
  misc_feature 1..22: note = chemically synthesized
  source 1..22: mol_type = other DNA
gatggcaggaagccttggctat

SEQ ID NO: 57243 - DNA, 22 bp, synthetic construct
  misc_feature 1..22: note = chemically synthesized
  source 1..22: mol_type = other DNA
atggcaggaagccttggctatt

SEQ ID NO: 57244 - DNA, 22 bp, synthetic construct
  misc_feature 1..22: note = chemically synthesized
  source 1..22: mol_type = other DNA
ggctattatagtgtattaagac

SEQ ID NO: 57245 - DNA, 22 bp, synthetic construct
  misc_feature 1..22: note = chemically synthesized
  source 1..22: mol_type = other DNA
gctattatagtgtattaagaca

SEQ ID NO: 57246 - DNA, 22 bp, synthetic construct
  misc_feature 1..22: note = chemically synthesized
  source 1..22: mol_type = other DNA
ttatagtgtattaagacatcag

SEQ ID NO: 57247 - DNA, 22 bp, synthetic construct
  misc_feature 1..22: note = chemically synthesized
  source 1..22: mol_type = other DNA
tagtgtattaagacatcaggtt

SEQ ID NO: 57248 - DNA, 22 bp, synthetic construct
  misc_feature 1..22: note = chemically synthesized
  source 1..22: mol_type = other DNA
agacatcaggttcctcctttgg

SEQ ID NO: 57249 - DNA, 22 bp, synthetic construct
  misc_feature 1..22: note = chemically synthesized
  source 1..22: mol_type = other DNA
ctcctttggaggagggaaggct

SEQ ID NO: 57250 - DNA, 22 bp, synthetic construct
  misc_feature 1..22: note = chemically synthesized
  source 1..22: mol_type = other DNA
ctttggaggagggaaggctaca

SEQ ID NO: 57251 - DNA, 22 bp, synthetic construct
  misc_feature 1..22: note = chemically synthesized
  source 1..22: mol_type = other DNA
tggaggagggaaggctacagaa

SEQ ID NO: 57252 - DNA, 22 bp, synthetic construct
  misc_feature 1..22: note = chemically synthesized
  source 1..22: mol_type = other DNA
ggaggagggaaggctacagaac

SEQ ID NO: 57253 - DNA, 22 bp, synthetic construct
  misc_feature 1..22: note = chemically synthesized
  source 1..22: mol_type = other DNA
gaggagggaaggctacagaact

SEQ ID NO: 57254 - DNA, 22 bp, synthetic construct
  misc_feature 1..22: note = chemically synthesized
  source 1..22: mol_type = other DNA
cagaactacaaacctttctaac

SEQ ID NO: 57255 - DNA, 22 bp, synthetic construct
  misc_feature 1..22: note = chemically synthesized
  source 1..22: mol_type = other DNA
caaacctttctaacaatgcttt

SEQ ID NO: 57256 - DNA, 22 bp, synthetic construct
  misc_feature 1..22: note = chemically synthesized
  source 1..22: mol_type = other DNA
tctaacaatgctttaggtttct

SEQ ID NO: 57257 - DNA, 22 bp, synthetic construct
  misc_feature 1..22: note = chemically synthesized
  source 1..22: mol_type = other DNA
ctaacaatgctttaggtttctt

SEQ ID NO: 57258 - DNA, 22 bp, synthetic construct
  misc_feature 1..22: note = chemically synthesized
  source 1..22: mol_type = other DNA
taacaatgctttaggtttcttc

SEQ ID NO: 57259 - DNA, 22 bp, synthetic construct
  misc_feature 1..22: note = chemically synthesized
  source 1..22: mol_type = other DNA
acaatgctttaggtttcttctt

SEQ ID NO: 57260 - DNA, 22 bp, synthetic construct
  misc_feature 1..22: note = chemically synthesized
  source 1..22: mol_type = other DNA
taggtttcttctttagatagat

SEQ ID NO: 57261 - DNA, 22 bp, synthetic construct
  misc_feature 1..22: note = chemically synthesized
  source 1..22: mol_type = other DNA
aggtttcttctttagatagatg

SEQ ID NO: 57262 - DNA, 22 bp, synthetic construct
  misc_feature 1..22: note = chemically synthesized
  source 1..22: mol_type = other DNA
ggtttcttctttagatagatgg

SEQ ID NO: 57263 - DNA, 22 bp, synthetic construct
  misc_feature 1..22: note = chemically synthesized
  source 1..22: mol_type = other DNA
cttctttagatagatggctggc

SEQ ID NO: 57264 - DNA, 22 bp, synthetic construct
  misc_feature 1..22: note = chemically synthesized
  source 1..22: mol_type = other DNA
ttctttagatagatggctggca

SEQ ID NO: 57265 - DNA, 22 bp, synthetic construct
  misc_feature 1..22: note = chemically synthesized
  source 1..22: mol_type = other DNA
ctttagatagatggctggcacc

SEQ ID NO: 57266 - DNA, 22 bp, synthetic construct
  misc_feature 1..22: note = chemically synthesized
  source 1..22: mol_type = other DNA
tttagatagatggctggcacct

SEQ ID NO: 57267 - DNA, 22 bp, synthetic construct
  misc_feature 1..22: note = chemically synthesized
  source 1..22: mol_type = other DNA
tagatagatggctggcacctaa

SEQ ID NO: 57268 - DNA, 22 bp, synthetic construct
  misc_feature 1..22: note = chemically synthesized
  source 1..22: mol_type = other DNA
agatagatggctggcacctaaa

SEQ ID NO: 57269 - DNA, 22 bp, synthetic construct
  misc_feature 1..22: note = chemically synthesized
  source 1..22: mol_type = other DNA
gatagatggctggcacctaaag

SEQ ID NO: 57270 - DNA, 22 bp, synthetic construct
  misc_feature 1..22: note = chemically synthesized
  source 1..22: mol_type = other DNA
gcacctaaaggacttgggcctg

SEQ ID NO: 57271 - DNA, 22 bp, synthetic construct
  misc_feature 1..22: note = chemically synthesized
  source 1..22: mol_type = other DNA
aaggacttgggcctgggtttgg

SEQ ID NO: 57272 - DNA, 22 bp, synthetic construct
  misc_feature 1..22: note = chemically synthesized
  source 1..22: mol_type = other DNA
gggcctgggtttggctgactct

SEQ ID NO: 57273 - DNA, 22 bp, synthetic construct
  misc_feature 1..22: note = chemically synthesized
  source 1..22: mol_type = other DNA
ggcctgggtttggctgactctt

SEQ ID NO: 57274 - DNA, 22 bp, synthetic construct
  misc_feature 1..22: note = chemically synthesized
  source 1..22: mol_type = other DNA
ggtttggctgactcttttatct

SEQ ID NO: 57275 - DNA, 22 bp, synthetic construct
  misc_feature 1..22: note = chemically synthesized
  source 1..22: mol_type = other DNA
ggctgactcttttatcttttag

SEQ ID NO: 57276 - DNA, 22 bp, synthetic construct
  misc_feature 1..22: note = chemically synthesized
  source 1..22: mol_type = other DNA
gctgactcttttatcttttaga

SEQ ID NO: 57277 - DNA, 22 bp, synthetic construct
  misc_feature 1..22: note = chemically synthesized
  source 1..22: mol_type = other DNA
actcttttatcttttagatcaa

SEQ ID NO: 57278 - DNA, 22 bp, synthetic construct
  misc_feature 1..22: note = chemically synthesized
  source 1..22: mol_type = other DNA
ttttatcttttagatcaagtaa

SEQ ID NO: 57279 - DNA, 22 bp, synthetic construct
  misc_feature 1..22: note = chemically synthesized
  source 1..22: mol_type = other DNA
ttatcttttagatcaagtaagt

SEQ ID NO: 57280 - DNA, 22 bp, synthetic construct
  misc_feature 1..22: note = chemically synthesized
  source 1..22: mol_type = other DNA
tatcttttagatcaagtaagtt

SEQ ID NO: 57281 - DNA, 22 bp, synthetic construct
  misc_feature 1..22: note = chemically synthesized
  source 1..22: mol_type = other DNA
atcttttagatcaagtaagttt

SEQ ID NO: 57282 - DNA, 22 bp, synthetic construct
  misc_feature 1..22: note = chemically synthesized
  source 1..22: mol_type = other DNA
tcttttagatcaagtaagtttt

SEQ ID NO: 57283 - DNA, 22 bp, synthetic construct
  misc_feature 1..22: note = chemically synthesized
  source 1..22: mol_type = other DNA
ttagatcaagtaagttttctca

SEQ ID NO: 57284 - DNA, 22 bp, synthetic construct
  misc_feature 1..22: note = chemically synthesized
  source 1..22: mol_type = other DNA
tagatcaagtaagttttctcat

SEQ ID NO: 57285 - DNA, 22 bp, synthetic construct
  misc_feature 1..22: note = chemically synthesized
  source 1..22: mol_type = other DNA
agatcaagtaagttttctcatt

SEQ ID NO: 57286 - DNA, 22 bp, synthetic construct
  misc_feature 1..22: note = chemically synthesized
  source 1..22: mol_type = other DNA
gatcaagtaagttttctcattc

SEQ ID NO: 57287 - DNA, 22 bp, synthetic construct
  misc_feature 1..22: note = chemically synthesized
  source 1..22: mol_type = other DNA
tctcattcagctgctgctctga

SEQ ID NO: 57288 - DNA, 22 bp, synthetic construct
  misc_feature 1..22: note = chemically synthesized
  source 1..22: mol_type = other DNA
ctcattcagctgctgctctgag

SEQ ID NO: 57289 - DNA, 22 bp, synthetic construct
  misc_feature 1..22: note = chemically synthesized
  source 1..22: mol_type = other DNA
tcattcagctgctgctctgagc

SEQ ID NO: 57290 - DNA, 22 bp, synthetic construct
  misc_feature 1..22: note = chemically synthesized
  source 1..22: mol_type = other DNA
attcagctgctgctctgagcta

SEQ ID NO: 57291 - DNA, 22 bp, synthetic construct
  misc_feature 1..22: note = chemically synthesized
  source 1..22: mol_type = other DNA
agctgctgctctgagctacaat

SEQ ID NO: 57292 - DNA, 22 bp, synthetic construct
  misc_feature 1..22: note = chemically synthesized
  source 1..22: mol_type = other DNA
ctgctctgagctacaatgtgtc

SEQ ID NO: 57293 - DNA, 22 bp, synthetic construct
  misc_feature 1..22: note = chemically synthesized
  source 1..22: mol_type = other DNA
ctctgagctacaatgtgtcctc

SEQ ID NO: 57294 - DNA, 22 bp, synthetic construct
  misc_feature 1..22: note = chemically synthesized
  source 1..22: mol_type = other DNA
tgagctacaatgtgtcctcccc

SEQ ID NO: 57295 - DNA, 22 bp, synthetic construct
  misc_feature 1..22: note = chemically synthesized
  source 1..22: mol_type = other DNA
agctacaatgtgtcctcccctc

SEQ ID NO: 57296 - DNA, 22 bp, synthetic construct
  misc_feature 1..22: note = chemically synthesized
  source 1..22: mol_type = other DNA
caatgtgtcctcccctcatcac

SEQ ID NO: 57297 - DNA, 22 bp, synthetic construct
  misc_feature 1..22: note = chemically synthesized
  source 1..22: mol_type = other DNA
ccctcatcaccaaagtatatcc

SEQ ID NO: 57298 - DNA, 22 bp, synthetic construct
  misc_feature 1..22: note = chemically synthesized
  source 1..22: mol_type = other DNA
atcaccaaagtatatcctggtc

SEQ ID NO: 57299 - DNA, 22 bp, synthetic construct
  misc_feature 1..22: note = chemically synthesized
  source 1..22: mol_type = other DNA
gtctccaggctccctgggctcc

SEQ ID NO: 57300 - DNA, 22 bp, synthetic construct
  misc_feature 1..22: note = chemically synthesized
  source 1..22: mol_type = other DNA
caggctccctgggctcccagtg

SEQ ID NO: 57301 - DNA, 22 bp, synthetic construct
  misc_feature 1..22: note = chemically synthesized
  source 1..22: mol_type = other DNA
cctgggctcccagtgtctccct

SEQ ID NO: 57302 - DNA, 22 bp, synthetic construct
  misc_feature 1..22: note = chemically synthesized
  source 1..22: mol_type = other DNA
ggctcccagtgtctccctcaag

SEQ ID NO: 57303 - DNA, 22 bp, synthetic construct
  misc_feature 1..22: note = chemically synthesized
  source 1..22: mol_type = other DNA
ccagtgtctccctcaaggtaca

SEQ ID NO: 57304 - DNA, 22 bp, synthetic construct
  misc_feature 1..22: note = chemically synthesized
  source 1..22: mol_type = other DNA
cctcaaggtacacgagtgccct

SEQ ID NO: 57305 - DNA, 22 bp, synthetic construct
  misc_feature 1..22: note = chemically synthesized
  source 1..22: mol_type = other DNA
aaggtacacgagtgccctggtg

SEQ ID NO: 57306 - DNA, 22 bp, synthetic construct
  misc_feature 1..22: note = chemically synthesized
  source 1..22: mol_type = other DNA
gtggtgaaaacaaggtgctaac

SEQ ID NO: 57307 - DNA, 22 bp, synthetic construct
  misc_feature 1..22: note = chemically synthesized
  source 1..22: mol_type = other DNA
actaacggtttccgatttttga

SEQ ID NO: 57308 - DNA, 22 bp, synthetic construct
  misc_feature 1..22: note = chemically synthesized
  source 1..22: mol_type = other DNA
acggtttccgatttttgagagc

SEQ ID NO: 57309 - DNA, 22 bp, synthetic construct
  misc_feature 1..22: note = chemically synthesized
  source 1..22: mol_type = other DNA
ccgatttttgagagcctgtgat

SEQ ID NO: 57310 - DNA, 22 bp, synthetic construct
  misc_feature 1..22: note = chemically synthesized
  source 1..22: mol_type = other DNA
cgatttttgagagcctgtgatt

SEQ ID NO: 57311 - DNA, 22 bp, synthetic construct
  misc_feature 1..22: note = chemically synthesized
  source 1..22: mol_type = other DNA
ttgagagcctgtgattttggtg

SEQ ID NO: 57312 - DNA, 22 bp, synthetic construct
  misc_feature 1..22: note = chemically synthesized
  source 1..22: mol_type = other DNA
tgagagcctgtgattttggtgt

SEQ ID NO: 57313 - DNA, 22 bp, synthetic construct
  misc_feature 1..22: note = chemically synthesized
  source 1..22: mol_type = other DNA
gagagcctgtgattttggtgtt

SEQ ID NO: 57314 - DNA, 22 bp, synthetic construct
  misc_feature 1..22: note = chemically synthesized
  source 1..22: mol_type = other DNA
agagcctgtgattttggtgttt

SEQ ID NO: 57315 - DNA, 22 bp, synthetic construct
  misc_feature 1..22: note = chemically synthesized
  source 1..22: mol_type = other DNA
tgattttggtgtttgcctttgc

SEQ ID NO: 57316 - DNA, 22 bp, synthetic construct
  misc_feature 1..22: note = chemically synthesized
  source 1..22: mol_type = other DNA
tggtgtttgcctttgctgttga

SEQ ID NO: 57317 - DNA, 22 bp, synthetic construct
  misc_feature 1..22: note = chemically synthesized
  source 1..22: mol_type = other DNA
ggtgtttgcctttgctgttgaa

SEQ ID NO: 57318 - DNA, 22 bp, synthetic construct
  misc_feature 1..22: note = chemically synthesized
  source 1..22: mol_type = other DNA
gtgtttgcctttgctgttgaat

SEQ ID NO: 57319 - DNA, 22 bp, synthetic construct
  misc_feature 1..22: note = chemically synthesized
  source 1..22: mol_type = other DNA
gcctttgctgttgaataacctg

SEQ ID NO: 57320 - DNA, 22 bp, synthetic construct
  misc_feature 1..22: note = chemically synthesized
  source 1..22: mol_type = other DNA
cctttgctgttgaataacctgt

SEQ ID NO: 57321 - DNA, 22 bp, synthetic construct
  misc_feature 1..22: note = chemically synthesized
  source 1..22: mol_type = other DNA
tgctgttgaataacctgtgctg

SEQ ID NO: 57322 - DNA, 22 bp, synthetic construct
  misc_feature 1..22: note = chemically synthesized
  source 1..22: mol_type = other DNA
gctgttgaataacctgtgctgt

SEQ ID NO: 57323 - DNA, 22 bp, synthetic construct
  misc_feature 1..22: note = chemically synthesized
  source 1..22: mol_type = other DNA
ctgttgaataacctgtgctgta

SEQ ID NO: 57324 - DNA, 22 bp, synthetic construct
  misc_feature 1..22: note = chemically synthesized
  source 1..22: mol_type = other DNA
ttgaataacctgtgctgtatta

SEQ ID NO: 57325 - DNA, 22 bp, synthetic construct
  misc_feature 1..22: note = chemically synthesized
  source 1..22: mol_type = other DNA
aataacctgtgctgtattattg

SEQ ID NO: 57326 - DNA, 22 bp, synthetic construct
  misc_feature 1..22: note = chemically synthesized
  source 1..22: mol_type = other DNA
tgctgtattattgatgttcatc

SEQ ID NO: 57327 - DNA, 22 bp, synthetic construct
  misc_feature 1..22: note = chemically synthesized
  source 1..22: mol_type = other DNA
tattattgatgttcatctttgg

SEQ ID NO: 57328 - DNA, 22 bp, synthetic construct
  misc_feature 1..22: note = chemically synthesized
  source 1..22: mol_type = other DNA
ttgatgttcatctttggtttat

SEQ ID NO: 57329 - DNA, 22 bp, synthetic construct
  misc_feature 1..22: note = chemically synthesized
  source 1..22: mol_type = other DNA
atgttcatctttggtttatgag

SEQ ID NO: 57330 - DNA, 22 bp, synthetic construct
  misc_feature 1..22: note = chemically synthesized
  source 1..22: mol_type = other DNA
atctttggtttatgagtttatc

SEQ ID NO: 57331 - DNA, 22 bp, synthetic construct
  misc_feature 1..22: note = chemically synthesized
  source 1..22: mol_type = other DNA
tggtttatgagtttatcactgg

SEQ ID NO: 57332 - DNA, 22 bp, synthetic construct
  misc_feature 1..22: note = chemically synthesized
  source 1..22: mol_type = other DNA
ggtttatgagtttatcactggt

SEQ ID NO: 57333 - DNA, 22 bp, synthetic construct
  misc_feature 1..22: note = chemically synthesized
  source 1..22: mol_type = other DNA
gtttatgagtttatcactggtt

SEQ ID NO: 57334 - DNA, 22 bp, synthetic construct
  misc_feature 1..22: note = chemically synthesized
  source 1..22: mol_type = other DNA
atgagtttatcactggttaaca

SEQ ID NO: 57335 - DNA, 22 bp, synthetic construct
  misc_feature 1..22: note = chemically synthesized
  source 1..22: mol_type = other DNA
tgagtttatcactggttaacaa

SEQ ID NO: 57336 - DNA, 22 bp, synthetic construct
  misc_feature 1..22: note = chemically synthesized
  source 1..22: mol_type = other DNA
atcactggttaacaagcagaat

SEQ ID NO: 57337 - DNA, 22 bp, synthetic construct
  misc_feature 1..22: note = chemically synthesized
  source 1..22: mol_type = other DNA
tcactggttaacaagcagaatc

SEQ ID NO: 57338 - DNA, 22 bp, synthetic construct
  misc_feature 1..22: note = chemically synthesized
  source 1..22: mol_type = other DNA
gttaacaagcagaatcagaaca

SEQ ID NO: 57339 - DNA, 22 bp, synthetic construct
  misc_feature 1..22: note = chemically synthesized
  source 1..22: mol_type = other DNA
acaagcagaatcagaacagtgt

SEQ ID NO: 57340 - DNA, 22 bp, synthetic construct
  misc_feature 1..22: note = chemically synthesized
  source 1..22: mol_type = other DNA
atattctgattaaaacgaatgt

SEQ ID NO: 57341 - DNA, 22 bp, synthetic construct
  misc_feature 1..22: note = chemically synthesized
  source 1..22: mol_type = other DNA
tgattaaaacgaatgtttaatg

SEQ ID NO: 57342 - DNA, 22 bp, synthetic construct
  misc_feature 1..22: note = chemically synthesized
  source 1..22: mol_type = other DNA
attaaaacgaatgtttaatgaa

SEQ ID NO: 57343 - DNA, 22 bp, synthetic construct
  misc_feature 1..22: note = chemically synthesized
  source 1..22: mol_type = other DNA
aaacgaatgtttaatgaaagaa

SEQ ID NO: 57344 - DNA, 22 bp, synthetic construct
  misc_feature 1..22: note = chemically synthesized
  source 1..22: mol_type = other DNA
aatgaaagaaaataaattgtga

SEQ ID NO: 57345 - DNA, 22 bp, synthetic construct
  misc_feature 1..22: note = chemically synthesized
  source 1..22: mol_type = other DNA
atgaaagaaaataaattgtgat

SEQ ID NO: 57346 - DNA, 22 bp, synthetic construct
  misc_feature 1..22: note = chemically synthesized
  source 1..22: mol_type = other DNA
tgatggaaaatgaacagtgtgt

SEQ ID NO: 57347 - DNA, 22 bp, synthetic construct
  misc_feature 1..22: note = chemically synthesized
  source 1..22: mol_type = other DNA
taattttaacctccgagggacc

SEQ ID NO: 57348 - DNA, 22 bp, synthetic construct
  misc_feature 1..22: note = chemically synthesized
  source 1..22: mol_type = other DNA
taacctccgagggacctagcac

SEQ ID NO: 57349 - DNA, 22 bp, synthetic construct
  misc_feature 1..22: note = chemically synthesized
  source 1..22: mol_type = other DNA
aacctccgagggacctagcact

SEQ ID NO: 57350 - DNA, 22 bp, synthetic construct
  misc_feature 1..22: note = chemically synthesized
  source 1..22: mol_type = other DNA
acctccgagggacctagcactg

SEQ ID NO: 57351 - DNA, 22 bp, synthetic construct
  misc_feature 1..22: note = chemically synthesized
  source 1..22: mol_type = other DNA
cgagggacctagcactgcccta

SEQ ID NO: 57352 - DNA, 22 bp, synthetic construct
  misc_feature 1..22: note = chemically synthesized
  source 1..22: mol_type = other DNA
gcactgccctaccgtgacttcc

SEQ ID NO: 57353 - DNA, 22 bp, synthetic construct
  misc_feature 1..22: note = chemically synthesized
  source 1..22: mol_type = other DNA
ccctaccgtgacttccatccat

SEQ ID NO: 57354 - DNA, 22 bp, synthetic construct
  misc_feature 1..22: note = chemically synthesized
  source 1..22: mol_type = other DNA
ccgtgacttccatccataccat

SEQ ID NO: 57355 - DNA, 22 bp, synthetic construct
  misc_feature 1..22: note = chemically synthesized
  source 1..22: mol_type = other DNA
ccatccataccatgctaaaagc

SEQ ID NO: 57356 - DNA, 22 bp, synthetic construct
  misc_feature 1..22: note = chemically synthesized
  source 1..22: mol_type = other DNA
catccataccatgctaaaagca

SEQ ID NO: 57357 - DNA, 22 bp, synthetic construct
  misc_feature 1..22: note = chemically synthesized
  source 1..22: mol_type = other DNA
aaagcatgcttcagtttaaagt

SEQ ID NO: 57358 - DNA, 22 bp, synthetic construct
  misc_feature 1..22: note = chemically synthesized
  source 1..22: mol_type = other DNA
cagtttaaagttgttaatattc

SEQ ID NO: 57359 - DNA, 22 bp, synthetic construct
  misc_feature 1..22: note = chemically synthesized
  source 1..22: mol_type = other DNA
agtttaaagttgttaatattca

SEQ ID NO: 57360 - DNA, 22 bp, synthetic construct
  misc_feature 1..22: note = chemically synthesized
  source 1..22: mol_type = other DNA
aaagttgttaatattcagctgg

SEQ ID NO: 57361 - DNA, 22 bp, synthetic construct
  misc_feature 1..22: note = chemically synthesized
  source 1..22: mol_type = other DNA
aagttgttaatattcagctggg

SEQ ID NO: 57362 - DNA, 22 bp, synthetic construct
  misc_feature 1..22: note = chemically synthesized
  source 1..22: mol_type = other DNA
ttaatattcagctgggaaacag

SEQ ID NO: 57363 - DNA, 22 bp, synthetic construct
  misc_feature 1..22: note = chemically synthesized
  source 1..22: mol_type = other DNA
atattcagctgggaaacagtat

SEQ ID NO: 57364 - DNA, 22 bp, synthetic construct
  misc_feature 1..22: note = chemically synthesized
  source 1..22: mol_type = other DNA
agctgggaaacagtatccagaa

SEQ ID NO: 57365 - DNA, 22 bp, synthetic construct
  misc_feature 1..22: note = chemically synthesized
  source 1..22: mol_type = other DNA
ggaaacagtatccagaacacaa

SEQ ID NO: 57366 - DNA, 22 bp, synthetic construct
  misc_feature 1..22: note = chemically synthesized
  source 1..22: mol_type = other DNA
ttaagtgcatgaactttttagg

SEQ ID NO: 57367 - DNA, 22 bp, synthetic construct
  misc_feature 1..22: note = chemically synthesized
  source 1..22: mol_type = other DNA
agtgcatgaactttttaggcag

SEQ ID NO: 57368 - DNA, 22 bp, synthetic construct
  misc_feature 1..22: note = chemically synthesized
  source 1..22: mol_type = other DNA
tttaggcagtaagatgaactga

SEQ ID NO: 57369 - DNA, 22 bp, synthetic construct
  misc_feature 1..22: note = chemically synthesized
  source 1..22: mol_type = other DNA
ttaggcagtaagatgaactgat

SEQ ID NO: 57370 - DNA, 22 bp, synthetic construct
  misc_feature 1..22: note = chemically synthesized
  source 1..22: mol_type = other DNA
taggcagtaagatgaactgatg

SEQ ID NO: 57371 - DNA, 22 bp, synthetic construct
  misc_feature 1..22: note = chemically synthesized
  source 1..22: mol_type = other DNA
aggcagtaagatgaactgatgg

SEQ ID NO: 57372 - DNA, 22 bp, synthetic construct
  misc_feature 1..22: note = chemically synthesized
  source 1..22: mol_type = other DNA
ggcagtaagatgaactgatggg

SEQ ID NO: 57373 - DNA, 22 bp, synthetic construct
  misc_feature 1..22: note = chemically synthesized
  source 1..22: mol_type = other DNA
atggggtccatctgtgagatcc

SEQ ID NO: 57374 - DNA, 22 bp, synthetic construct
  misc_feature 1..22: note = chemically synthesized
  source 1..22: mol_type = other DNA
tgagatccaggggctttttatt

SEQ ID NO: 57375 - DNA, 22 bp, synthetic construct
  misc_feature 1..22: note = chemically synthesized
  source 1..22: mol_type = other DNA
tttatttgtgtgtgtcgagcga

SEQ ID NO: 57376 - DNA, 22 bp, synthetic construct
  misc_feature 1..22: note = chemically synthesized
  source 1..22: mol_type = other DNA
ttatttgtgtgtgtcgagcgat

SEQ ID NO: 57377 - DNA, 22 bp, synthetic construct
  misc_feature 1..22: note = chemically synthesized
  source 1..22: mol_type = other DNA
tatttgtgtgtgtcgagcgatt

SEQ ID NO: 57378 - DNA, 22 bp, synthetic construct
  misc_feature 1..22: note = chemically synthesized
  source 1..22: mol_type = other DNA
atttgtgtgtgtcgagcgattc

SEQ ID NO: 57379 - DNA, 22 bp, synthetic construct
  misc_feature 1..22: note = chemically synthesized
  source 1..22: mol_type = other DNA
tttgtgtgtgtcgagcgattct

SEQ ID NO: 57380 - DNA, 22 bp, synthetic construct
  misc_feature 1..22: note = chemically synthesized
  source 1..22: mol_type = other DNA
gtgtgtgtcgagcgattctgcc

SEQ ID NO: 57381 - DNA, 22 bp, synthetic construct
  misc_feature 1..22: note = chemically synthesized
  source 1..22: mol_type = other DNA
tgtgtgtcgagcgattctgccc

SEQ ID NO: 57382 - DNA, 22 bp, synthetic construct
  misc_feature 1..22: note = chemically synthesized
  source 1..22: mol_type = other DNA
tgccctctccgacttcacagcc

SEQ ID NO: 57383 - DNA, 22 bp, synthetic construct
  misc_feature 1..22: note = chemically synthesized
  source 1..22: mol_type = other DNA
ccctctccgacttcacagcctt

SEQ ID NO: 57384 - DNA, 22 bp, synthetic construct
  misc_feature 1..22: note = chemically synthesized
  source 1..22: mol_type = other DNA
tccgacttcacagcctttggtc

SEQ ID NO: 57385 - DNA, 22 bp, synthetic construct
  misc_feature 1..22: note = chemically synthesized
  source 1..22: mol_type = other DNA
cgacttcacagcctttggtctc

SEQ ID NO: 57386 - DNA, 22 bp, synthetic construct
  misc_feature 1..22: note = chemically synthesized
  source 1..22: mol_type = other DNA
cacagcctttggtctccggcca

SEQ ID NO: 57387 - DNA, 22 bp, synthetic construct
  misc_feature 1..22: note = chemically synthesized
  source 1..22: mol_type = other DNA
acagcctttggtctccggccaa

SEQ ID NO: 57388 - DNA, 22 bp, synthetic construct
  misc_feature 1..22: note = chemically synthesized
  source 1..22: mol_type = other DNA
tggtctccggccaactgcatgc

SEQ ID NO: 57389 - DNA, 22 bp, synthetic construct
  misc_feature 1..22: note = chemically synthesized
  source 1..22: mol_type = other DNA
ggtctccggccaactgcatgca

SEQ ID NO: 57390 - DNA, 22 bp, synthetic construct
  misc_feature 1..22: note = chemically synthesized
  source 1..22: mol_type = other DNA
gtctccggccaactgcatgcat

SEQ ID NO: 57391 - DNA, 22 bp, synthetic construct
  misc_feature 1..22: note = chemically synthesized
  source 1..22: mol_type = other DNA
cggccaactgcatgcataattg

SEQ ID NO: 57392 - DNA, 22 bp, synthetic construct
  misc_feature 1..22: note = chemically synthesized
  source 1..22: mol_type = other DNA
catgcataattgattccacacg

SEQ ID NO: 57393 - DNA, 22 bp, synthetic construct
  misc_feature 1..22: note = chemically synthesized
  source 1..22: mol_type = other DNA
attccacacgcactatcatttt

SEQ ID NO: 57394 - DNA, 22 bp, synthetic construct
  misc_feature 1..22: note = chemically synthesized
  source 1..22: mol_type = other DNA
cacacgcactatcattttcttg

SEQ ID NO: 57395 - DNA, 22 bp, synthetic construct
  misc_feature 1..22: note = chemically synthesized
  source 1..22: mol_type = other DNA
tcattttcttgatgtaattgct

SEQ ID NO: 57396 - DNA, 22 bp, synthetic construct
  misc_feature 1..22: note = chemically synthesized
  source 1..22: mol_type = other DNA
tcttgatgtaattgctttacta

SEQ ID NO: 57397 - DNA, 22 bp, synthetic construct
  misc_feature 1..22: note = chemically synthesized
  source 1..22: mol_type = other DNA
cttgatgtaattgctttactaa

SEQ ID NO: 57398 - DNA, 22 bp, synthetic construct
  misc_feature 1..22: note = chemically synthesized
  source 1..22: mol_type = other DNA
ttgatgtaattgctttactaag

SEQ ID NO: 57399 - DNA, 22 bp, synthetic construct
  misc_feature 1..22: note = chemically synthesized
  source 1..22: mol_type = other DNA
gatgtaattgctttactaagat

SEQ ID NO: 57400 - DNA, 22 bp, synthetic construct
  misc_feature 1..22: note = chemically synthesized
  source 1..22: mol_type = other DNA
atgtaattgctttactaagata

SEQ ID NO: 57401 - DNA, 22 bp, synthetic construct
  misc_feature 1..22: note = chemically synthesized
  source 1..22: mol_type = other DNA
ctttactaagatatgatgaaat

SEQ ID NO: 57402 - DNA, 22 bp, synthetic construct
  misc_feature 1..22: note = chemically synthesized
  source 1..22: mol_type = other DNA
tactaagatatgatgaaatcta

SEQ ID NO: 57403 - DNA, 22 bp, synthetic construct
  misc_feature 1..22: note = chemically synthesized
  source 1..22: mol_type = other DNA
actaagatatgatgaaatctaa

SEQ ID NO: 57404 - DNA, 22 bp, synthetic construct
  misc_feature 1..22: note = chemically synthesized
  source 1..22: mol_type = other DNA
ctaagatatgatgaaatctaat

SEQ ID NO: 57405 - DNA, 22 bp, synthetic construct
  misc_feature 1..22: note = chemically synthesized
  source 1..22: mol_type = other DNA
agatatgatgaaatctaatgga

SEQ ID NO: 57406 - DNA, 22 bp, synthetic construct
  misc_feature 1..22: note = chemically synthesized
  source 1..22: mol_type = other DNA
atggataatttgctatttgaaa

SEQ ID NO: 57407 - DNA, 22 bp, synthetic construct
  misc_feature 1..22: note = chemically synthesized
  source 1..22: mol_type = other DNA
gctatttgaaaatggtcaaaaa

SEQ ID NO: 57408 - DNA, 22 bp, synthetic construct
  misc_feature 1..22: note = chemically synthesized
  source 1..22: mol_type = other DNA
ctatttgaaaatggtcaaaaaa

SEQ ID NO: 57409 - DNA, 22 bp, synthetic construct
  misc_feature 1..22: note = chemically synthesized
  source 1..22: mol_type = other DNA
tttgaaaatggtcaaaaaaaat

SEQ ID NO: 57410 - DNA, 22 bp, synthetic construct
  misc_feature 1..22: note = chemically synthesized
  source 1..22: mol_type = other DNA
gaaaatggtcaaaaaaaatctt

SEQ ID NO: 57411 - DNA, 22 bp, synthetic construct
  misc_feature 1..22: note = chemically synthesized
  source 1..22: mol_type = other DNA
aaaatggtcaaaaaaaatcttc

SEQ ID NO: 57412 - DNA, 22 bp, synthetic construct
  misc_feature 1..22: note = chemically synthesized
  source 1..22: mol_type = other DNA
catactttatgtggggctgagt

SEQ ID NO: 57413 - DNA, 22 bp, synthetic construct
  misc_feature 1..22: note = chemically synthesized
  source 1..22: mol_type = other DNA
atactttatgtggggctgagtg

SEQ ID NO: 57414 - DNA, 22 bp, synthetic construct
  misc_feature 1..22: note = chemically synthesized
  source 1..22: mol_type = other DNA
tatgtggggctgagtgggcagt

SEQ ID NO: 57415 - DNA, 22 bp, synthetic construct
  misc_feature 1..22: note = chemically synthesized
  source 1..22: mol_type = other DNA
atgtggggctgagtgggcagtg

SEQ ID NO: 57416 - DNA, 22 bp, synthetic construct
  misc_feature 1..22: note = chemically synthesized
  source 1..22: mol_type = other DNA
tgtggggctgagtgggcagtgg

SEQ ID NO: 57417 - DNA, 22 bp, synthetic construct
  misc_feature 1..22: note = chemically synthesized
  source 1..22: mol_type = other DNA
agtgggcagtggagaaaggggt

SEQ ID NO: 57418 - DNA, 22 bp, synthetic construct
  misc_feature 1..22: note = chemically synthesized
  source 1..22: mol_type = other DNA
agctgacccggtatttaagaaa

SEQ ID NO: 57419 - DNA, 22 bp, synthetic construct
  misc_feature 1..22: note = chemically synthesized
  source 1..22: mol_type = other DNA
acccggtatttaagaaaacaaa

SEQ ID NO: 57420 - DNA, 22 bp, synthetic construct
  misc_feature 1..22: note = chemically synthesized
  source 1..22: mol_type = other DNA
aagaaaacaaaacaagcaacac

SEQ ID NO: 57421 - DNA, 22 bp, synthetic construct
  misc_feature 1..22: note = chemically synthesized
  source 1..22: mol_type = other DNA
agaaaacaaaacaagcaacact

SEQ ID NO: 57422 - DNA, 22 bp, synthetic construct
  misc_feature 1..22: note = chemically synthesized
  source 1..22: mol_type = other DNA
acttatgcatgctgcttcagtc

SEQ ID NO: 57423 - DNA, 22 bp, synthetic construct
  misc_feature 1..22: note = chemically synthesized
  source 1..22: mol_type = other DNA
atgcatgctgcttcagtcgcgt

SEQ ID NO: 57424 - DNA, 22 bp, synthetic construct
  misc_feature 1..22: note = chemically synthesized
  source 1..22: mol_type = other DNA
tgcatgctgcttcagtcgcgtt

SEQ ID NO: 57425 - DNA, 22 bp, synthetic construct
  misc_feature 1..22: note = chemically synthesized
  source 1..22: mol_type = other DNA
cttcagtcgcgttggctgtgga

SEQ ID NO: 57426 - DNA, 22 bp, synthetic construct
  misc_feature 1..22: note = chemically synthesized
  source 1..22: mol_type = other DNA
cagtcgcgttggctgtggatag

SEQ ID NO: 57427 - DNA, 22 bp, synthetic construct
  misc_feature 1..22: note = chemically synthesized
  source 1..22: mol_type = other DNA
agtcgcgttggctgtggatagg

SEQ ID NO: 57428 - DNA, 22 bp, synthetic construct
  misc_feature 1..22: note = chemically synthesized
  source 1..22: mol_type = other DNA
gctgtggataggaaggtctttg

SEQ ID NO: 57429 - DNA, 22 bp, synthetic construct
  misc_feature 1..22: note = chemically synthesized
  source 1..22: mol_type = other DNA
tggataggaaggtctttgtgac

SEQ ID NO: 57430 - DNA, 22 bp, synthetic construct
  misc_feature 1..22: note = chemically synthesized
  source 1..22: mol_type = other DNA
tgtgacatatggaagccagtgt

SEQ ID NO: 57431 - DNA, 22 bp, synthetic construct
  misc_feature 1..22: note = chemically synthesized
  source 1..22: mol_type = other DNA
gtgacatatggaagccagtgta

SEQ ID NO: 57432 - DNA, 22 bp, synthetic construct
  misc_feature 1..22: note = chemically synthesized
  source 1..22: mol_type = other DNA
tgacatatggaagccagtgtat

SEQ ID NO: 57433 - DNA, 22 bp, synthetic construct
  misc_feature 1..22: note = chemically synthesized
  source 1..22: mol_type = other DNA
tctccttctatcttgcatcacc

SEQ ID NO: 57434 - DNA, 22 bp, synthetic construct
  misc_feature 1..22: note = chemically synthesized
  source 1..22: mol_type = other DNA
tccttctatcttgcatcacccc

SEQ ID NO: 57435 - DNA, 22 bp, synthetic construct
  misc_feature 1..22: note = chemically synthesized
  source 1..22: mol_type = other DNA
cttctatcttgcatcaccccct

SEQ ID NO: 57436 - DNA, 22 bp, synthetic construct
  misc_feature 1..22: note = chemically synthesized
  source 1..22: mol_type = other DNA
ctatcttgcatcacccccttca

SEQ ID NO: 57437 - DNA, 22 bp, synthetic construct
  misc_feature 1..22: note = chemically synthesized
  source 1..22: mol_type = other DNA
tatcttgcatcacccccttcat

SEQ ID NO: 57438 - DNA, 22 bp, synthetic construct
  misc_feature 1..22: note = chemically synthesized
  source 1..22: mol_type = other DNA
tcttgcatcacccccttcattc

SEQ ID NO: 57439 - DNA, 22 bp, synthetic construct
  misc_feature 1..22: note = chemically synthesized
  source 1..22: mol_type = other DNA
gcatcacccccttcattccttc

SEQ ID NO: 57440 - DNA, 22 bp, synthetic construct
  misc_feature 1..22: note = chemically synthesized
  source 1..22: mol_type = other DNA
catcacccccttcattccttct

SEQ ID NO: 57441 - DNA, 22 bp, synthetic construct
  misc_feature 1..22: note = chemically synthesized
  source 1..22: mol_type = other DNA
cattccttctctctttctctcc

SEQ ID NO: 57442 - DNA, 22 bp, synthetic construct
  misc_feature 1..22: note = chemically synthesized
  source 1..22: mol_type = other DNA
attccttctctctttctctcct

SEQ ID NO: 57443 - DNA, 22 bp, synthetic construct
  misc_feature 1..22: note = chemically synthesized
  source 1..22: mol_type = other DNA
cttctctctttctctcctctct

SEQ ID NO: 57444 - DNA, 22 bp, synthetic construct
  misc_feature 1..22: note = chemically synthesized
  source 1..22: mol_type = other DNA
ctctctttctctcctctctctc

SEQ ID NO: 57445 - DNA, 22 bp, synthetic construct
  misc_feature 1..22: note = chemically synthesized
  source 1..22: mol_type = other DNA
tctctttctctcctctctctct

SEQ ID NO: 57446 - DNA, 22 bp, synthetic construct
  misc_feature 1..22: note = chemically synthesized
  source 1..22: mol_type = other DNA
tctttctctcctctctctctcc

SEQ ID NO: 57447 - DNA, 22 bp, synthetic construct
  misc_feature 1..22: note = chemically synthesized
  source 1..22: mol_type = other DNA
tttctctcctctctctctcccc

SEQ ID NO: 57448 - DNA, 22 bp, synthetic construct
  misc_feature 1..22: note = chemically synthesized
  source 1..22: mol_type = other DNA
tctctcctctctctctccccca

SEQ ID NO: 57449 - DNA, 22 bp, synthetic construct
  misc_feature 1..22: note = chemically synthesized
  source 1..22: mol_type = other DNA
ctctcctctctctctcccccaa

SEQ ID NO: 57450 - DNA, 22 bp, synthetic construct
  misc_feature 1..22: note = chemically synthesized
  source 1..22: mol_type = other DNA
tctcctctctctctcccccaaa

SEQ ID NO: 57451 - DNA, 22 bp, synthetic construct
  misc_feature 1..22: note = chemically synthesized
  source 1..22: mol_type = other DNA
tcctctctctctcccccaaact

SEQ ID NO: 57452 - DNA, 22 bp, synthetic construct
  misc_feature 1..22: note = chemically synthesized
  source 1..22: mol_type = other DNA
ctctctctctcccccaaacttt

SEQ ID NO: 57453 - DNA, 22 bp, synthetic construct
  misc_feature 1..22: note = chemically synthesized
  source 1..22: mol_type = other DNA
tctctctcccccaaactttaca

SEQ ID NO: 57454 - DNA, 22 bp, synthetic construct
  misc_feature 1..22: note = chemically synthesized
  source 1..22: mol_type = other DNA
tctctcccccaaactttacaag

SEQ ID NO: 57455 - DNA, 22 bp, synthetic construct
  misc_feature 1..22: note = chemically synthesized
  source 1..22: mol_type = other DNA
tctcccccaaactttacaagaa

SEQ ID NO: 57456 - DNA, 22 bp, synthetic construct
  misc_feature 1..22: note = chemically synthesized
  source 1..22: mol_type = other DNA
tcccccaaactttacaagaaag

SEQ ID NO: 57457 - DNA, 22 bp, synthetic construct
  misc_feature 1..22: note = chemically synthesized
  source 1..22: mol_type = other DNA
ccccaaactttacaagaaaggg

SEQ ID NO: 57458 - DNA, 22 bp, synthetic construct
  misc_feature 1..22: note = chemically synthesized
  source 1..22: mol_type = other DNA
tacaagaaagggatcctaacaa

SEQ ID NO: 57459 - DNA, 22 bp, synthetic construct
  misc_feature 1..22: note = chemically synthesized
  source 1..22: mol_type = other DNA
acaagaaagggatcctaacaag

SEQ ID NO: 57460 - DNA, 22 bp, synthetic construct
  misc_feature 1..22: note = chemically synthesized
  source 1..22: mol_type = other DNA
caagaaagggatcctaacaagg

SEQ ID NO: 57461 - DNA, 22 bp, synthetic construct
  misc_feature 1..22: note = chemically synthesized
  source 1..22: mol_type = other DNA
acaaggtaaaaagtaaacaatt

SEQ ID NO: 57462 - DNA, 22 bp, synthetic construct
  misc_feature 1..22: note = chemically synthesized
  source 1..22: mol_type = other DNA
agtcatcacaagccttattatt

SEQ ID NO: 57463 - DNA, 22 bp, synthetic construct
  misc_feature 1..22: note = chemically synthesized
  source 1..22: mol_type = other DNA
gtcatcacaagccttattattc

SEQ ID NO: 57464 - DNA, 22 bp, synthetic construct
  misc_feature 1..22: note = chemically synthesized
  source 1..22: mol_type = other DNA
attattcagtctatccaggagt

SEQ ID NO: 57465 - DNA, 22 bp, synthetic construct
  misc_feature 1..22: note = chemically synthesized
  source 1..22: mol_type = other DNA
ttattcagtctatccaggagtt

SEQ ID NO: 57466 - DNA, 22 bp, synthetic construct
  misc_feature 1..22: note = chemically synthesized
  source 1..22: mol_type = other DNA
ttcagtctatccaggagttttg

SEQ ID NO: 57467 - DNA, 22 bp, synthetic construct
  misc_feature 1..22: note = chemically synthesized
  source 1..22: mol_type = other DNA
agtctatccaggagttttgcca

SEQ ID NO: 57468 - DNA, 22 bp, synthetic construct
  misc_feature 1..22: note = chemically synthesized
  source 1..22: mol_type = other DNA
tccaggagttttgccatgtcgg

SEQ ID NO: 57469 - DNA, 22 bp, synthetic construct
  misc_feature 1..22: note = chemically synthesized
  source 1..22: mol_type = other DNA
tgccatgtcggtttatttaact

SEQ ID NO: 57470 - DNA, 22 bp, synthetic construct
  misc_feature 1..22: note = chemically synthesized
  source 1..22: mol_type = other DNA
gccatgtcggtttatttaactt

SEQ ID NO: 57471 - DNA, 22 bp, synthetic construct
  misc_feature 1..22: note = chemically synthesized
  source 1..22: mol_type = other DNA
ccatgtcggtttatttaacttc

SEQ ID NO: 57472 - DNA, 22 bp, synthetic construct
  misc_feature 1..22: note = chemically synthesized
  source 1..22: mol_type = other DNA
atttaacttccaggaatgtaaa

SEQ ID NO: 57473 - DNA, 22 bp, synthetic construct
  misc_feature 1..22: note = chemically synthesized
  source 1..22: mol_type = other DNA
tttaacttccaggaatgtaaac

SEQ ID NO: 57474 - DNA, 22 bp, synthetic construct
  misc_feature 1..22: note = chemically synthesized
  source 1..22: mol_type = other DNA
aacttccaggaatgtaaacact

SEQ ID NO: 57475 - DNA, 22 bp, synthetic construct
  misc_feature 1..22: note = chemically synthesized
  source 1..22: mol_type = other DNA
acttccaggaatgtaaacactg

SEQ ID NO: 57476 - DNA, 22 bp, synthetic construct
  misc_feature 1..22: note = chemically synthesized
  source 1..22: mol_type = other DNA
ccaggaatgtaaacactgacac

SEQ ID NO: 57477 - DNA, 22 bp, synthetic construct
  misc_feature 1..22: note = chemically synthesized
  source 1..22: mol_type = other DNA
caggaatgtaaacactgacaca

SEQ ID NO: 57478 - DNA, 22 bp, synthetic construct
  misc_feature 1..22: note = chemically synthesized
  source 1..22: mol_type = other DNA
acacagccctagaagcagcaag

SEQ ID NO: 57479 - DNA, 22 bp, synthetic construct
  misc_feature 1..22: note = chemically synthesized
  source 1..22: mol_type = other DNA
gaagcagcaagaaagattacag

SEQ ID NO: 57480 - DNA, 22 bp, synthetic construct
  misc_feature 1..22: note = chemically synthesized
  source 1..22: mol_type = other DNA
cagtattagagttaaaaacgtg

SEQ ID NO: 57481 - DNA, 22 bp, synthetic construct
  misc_feature 1..22: note = chemically synthesized
  source 1..22: mol_type = other DNA
gagttaaaaacgtgagcatgga

SEQ ID NO: 57482 - DNA, 22 bp, synthetic construct
  misc_feature 1..22: note = chemically synthesized
  source 1..22: mol_type = other DNA
aaaacgtgagcatggaggagct

SEQ ID NO: 57483 - DNA, 22 bp, synthetic construct
  misc_feature 1..22: note = chemically synthesized
  source 1..22: mol_type = other DNA
tgctttatactctgctataata

SEQ ID NO: 57484 - DNA, 22 bp, synthetic construct
  misc_feature 1..22: note = chemically synthesized
  source 1..22: mol_type = other DNA
tatactctgctataataacact

SEQ ID NO: 57485 - DNA, 22 bp, synthetic construct
  misc_feature 1..22: note = chemically synthesized
  source 1..22: mol_type = other DNA
atactctgctataataacactt

SEQ ID NO: 57486 - DNA, 22 bp, synthetic construct
  misc_feature 1..22: note = chemically synthesized
  source 1..22: mol_type = other DNA
tactctgctataataacacttt

SEQ ID NO: 57487 - DNA, 22 bp, synthetic construct
  misc_feature 1..22: note = chemically synthesized
  source 1..22: mol_type = other DNA
tgctataataacactttacatt

SEQ ID NO: 57488 - DNA, 22 bp, synthetic construct
  misc_feature 1..22: note = chemically synthesized
  source 1..22: mol_type = other DNA
ctataataacactttacattga

SEQ ID NO: 57489 - DNA, 22 bp, synthetic construct
  misc_feature 1..22: note = chemically synthesized
  source 1..22: mol_type = other DNA
taataacactttacattgaaac

SEQ ID NO: 57490 - DNA, 22 bp, synthetic construct
  misc_feature 1..22: note = chemically synthesized
  source 1..22: mol_type = other DNA
tacattgaaacataatggtaag

SEQ ID NO: 57491 - DNA, 22 bp, synthetic construct
  misc_feature 1..22: note = chemically synthesized
  source 1..22: mol_type = other DNA
acattgaaacataatggtaagt

SEQ ID NO: 57492 - DNA, 22 bp, synthetic construct
  misc_feature 1..22: note = chemically synthesized
  source 1..22: mol_type = other DNA
cattgaaacataatggtaagtc

SEQ ID NO: 57493 - DNA, 22 bp, synthetic construct
  misc_feature 1..22: note = chemically synthesized
  source 1..22: mol_type = other DNA
aaacataatggtaagtcaaaag

SEQ ID NO: 57494 - DNA, 22 bp, synthetic construct
  misc_feature 1..22: note = chemically synthesized
  source 1..22: mol_type = other DNA
gaaacttctgcttatatggagt

SEQ ID NO: 57495 - DNA, 22 bp, synthetic construct
  misc_feature 1..22: note = chemically synthesized
  source 1..22: mol_type = other DNA
ctgcttatatggagtacaaatt

SEQ ID NO: 57496 - DNA, 22 bp, synthetic construct
  misc_feature 1..22: note = chemically synthesized
  source 1..22: mol_type = other DNA
tgcttatatggagtacaaattt

SEQ ID NO: 57497 - DNA, 22 bp, synthetic construct
  misc_feature 1..22: note = chemically synthesized
  source 1..22: mol_type = other DNA
cttatatggagtacaaatttca

SEQ ID NO: 57498 - DNA, 22 bp, synthetic construct
  misc_feature 1..22: note = chemically synthesized
  source 1..22: mol_type = other DNA
atatggagtacaaatttcattc

SEQ ID NO: 57499 - DNA, 22 bp, synthetic construct
  misc_feature 1..22: note = chemically synthesized
  source 1..22: mol_type = other DNA
tatggagtacaaatttcattct

SEQ ID NO: 57500 - DNA, 22 bp, synthetic construct
  misc_feature 1..22: note = chemically synthesized
  source 1..22: mol_type = other DNA
cattctaatagattggcataat

SEQ ID NO: 57501 - DNA, 22 bp, synthetic construct
  misc_feature 1..22: note = chemically synthesized
  source 1..22: mol_type = other DNA
attctaatagattggcataatc

SEQ ID NO: 57502 - DNA, 22 bp, synthetic construct
  misc_feature 1..22: note = chemically synthesized
  source 1..22: mol_type = other DNA
taatagattggcataatctagt

SEQ ID NO: 57503 - DNA, 22 bp, synthetic construct
  misc_feature 1..22: note = chemically synthesized
  source 1..22: mol_type = other DNA
atagattggcataatctagtgt

SEQ ID NO: 57504 - DNA, 22 bp, synthetic construct
  misc_feature 1..22: note = chemically synthesized
  source 1..22: mol_type = other DNA
gcataatctagtgtacccaggg

SEQ ID NO: 57505 - DNA, 22 bp, synthetic construct
  misc_feature 1..22: note = chemically synthesized
  source 1..22: mol_type = other DNA
gtgtacccagggtagattgtta

SEQ ID NO: 57506 - DNA, 22 bp, synthetic construct
  misc_feature 1..22: note = chemically synthesized
  source 1..22: mol_type = other DNA
ttatataatggagaaactgtat

SEQ ID NO: 57507 - DNA, 22 bp, synthetic construct
  misc_feature 1..22: note = chemically synthesized
  source 1..22: mol_type = other DNA
tataatggagaaactgtataaa

SEQ ID NO: 57508 - DNA, 22 bp, synthetic construct
  misc_feature 1..22: note = chemically synthesized
  source 1..22: mol_type = other DNA
tataaatgtcaagtacacaaat

SEQ ID NO: 57509 - DNA, 22 bp, synthetic construct
  misc_feature 1..22: note = chemically synthesized
  source 1..22: mol_type = other DNA
tacaggaagtaaataaaaagta

SEQ ID NO: 57510 - DNA, 22 bp, synthetic construct
  misc_feature 1..22: note = chemically synthesized
  source 1..22: mol_type = other DNA
caggaagtaaataaaaagtatt

SEQ ID NO: 57511 - DNA, 22 bp, synthetic construct
  misc_feature 1..22: note = chemically synthesized
  source 1..22: mol_type = other DNA
gaatttcttaagtcaccattaa

SEQ ID NO: 57512 - DNA, 22 bp, synthetic construct
  misc_feature 1..22: note = chemically synthesized
  source 1..22: mol_type = other DNA
cttaagtcaccattaaattttg

SEQ ID NO: 57513 - DNA, 22 bp, synthetic construct
  misc_feature 1..22: note = chemically synthesized
  source 1..22: mol_type = other DNA
ttaagtcaccattaaattttgg

SEQ ID NO: 57514 - DNA, 22 bp, synthetic construct
  misc_feature 1..22: note = chemically synthesized
  source 1..22: mol_type = other DNA
aagtcaccattaaattttggtg

SEQ ID NO: 57515 - DNA, 22 bp, synthetic construct
  misc_feature 1..22: note = chemically synthesized
  source 1..22: mol_type = other DNA
agtcaccattaaattttggtgg

SEQ ID NO: 57516 - DNA, 22 bp, synthetic construct
  misc_feature 1..22: note = chemically synthesized
  source 1..22: mol_type = other DNA
aattttggtggtgggacaatct

SEQ ID NO: 57517 - DNA, 22 bp, synthetic construct
  misc_feature 1..22: note = chemically synthesized
  source 1..22: mol_type = other DNA
tggtggtgggacaatctcatta

SEQ ID NO: 57518 - DNA, 22 bp, synthetic construct
  misc_feature 1..22: note = chemically synthesized
  source 1..22: mol_type = other DNA
ggtggtgggacaatctcattag

SEQ ID NO: 57519 - DNA, 22 bp, synthetic construct
  misc_feature 1..22: note = chemically synthesized
  source 1..22: mol_type = other DNA
gtggtgggacaatctcattagc

SEQ ID NO: 57520 - DNA, 22 bp, synthetic construct
  misc_feature 1..22: note = chemically synthesized
  source 1..22: mol_type = other DNA
attagctccttcaaaatcatgt

SEQ ID NO: 57521 - DNA, 22 bp, synthetic construct
  misc_feature 1..22: note = chemically synthesized
  source 1..22: mol_type = other DNA
gctccttcaaaatcatgtggct

SEQ ID NO: 57522 - DNA, 22 bp, synthetic construct
  misc_feature 1..22: note = chemically synthesized
  source 1..22: mol_type = other DNA
cttcaaaatcatgtggctttgc

SEQ ID NO: 57523 - DNA, 22 bp, synthetic construct
  misc_feature 1..22: note = chemically synthesized
  source 1..22: mol_type = other DNA
caaaatcatgtggctttgcata

SEQ ID NO: 57524 - DNA, 22 bp, synthetic construct
  misc_feature 1..22: note = chemically synthesized
  source 1..22: mol_type = other DNA
aaaatcatgtggctttgcataa

SEQ ID NO: 57525 - DNA, 22 bp, synthetic construct
  misc_feature 1..22: note = chemically synthesized
  source 1..22: mol_type = other DNA
tgcataagtcttttgaaaatgt

SEQ ID NO: 57526 - DNA, 22 bp, synthetic construct
  misc_feature 1..22: note = chemically synthesized
  source 1..22: mol_type = other DNA
gcataagtcttttgaaaatgta

SEQ ID NO: 57527 - DNA, 22 bp, synthetic construct
  misc_feature 1..22: note = chemically synthesized
  source 1..22: mol_type = other DNA
cataagtcttttgaaaatgtat

SEQ ID NO: 57528 - DNA, 22 bp, synthetic construct
  misc_feature 1..22: note = chemically synthesized
  source 1..22: mol_type = other DNA
ttgaaaatgtattttcagggaa

SEQ ID NO: 57529 - DNA, 22 bp, synthetic construct
  misc_feature 1..22: note = chemically synthesized
  source 1..22: mol_type = other DNA
tgaaaatgtattttcagggaat

SEQ ID NO: 57530 - DNA, 22 bp, synthetic construct
  misc_feature 1..22: note = chemically synthesized
  source 1..22: mol_type = other DNA
gaaaatgtattttcagggaatt

SEQ ID NO: 57531 - DNA, 22 bp, synthetic construct
  misc_feature 1..22: note = chemically synthesized
  source 1..22: mol_type = other DNA
aaaatgtattttcagggaattt

SEQ ID NO: 57532 - DNA, 22 bp, synthetic construct
  misc_feature 1..22: note = chemically synthesized
  source 1..22: mol_type = other DNA
tcagggaatttacagatggtga

SEQ ID NO: 57533 - DNA, 22 bp, synthetic construct
  misc_feature 1..22: note = chemically synthesized
  source 1..22: mol_type = other DNA
cagggaatttacagatggtgaa

SEQ ID NO: 57534 - DNA, 22 bp, synthetic construct
  misc_feature 1..22: note = chemically synthesized
  source 1..22: mol_type = other DNA
agggaatttacagatggtgaaa

SEQ ID NO: 57535 - DNA, 22 bp, synthetic construct
  misc_feature 1..22: note = chemically synthesized
  source 1..22: mol_type = other DNA
acagatggtgaaacattgtttt

SEQ ID NO: 57536 - DNA, 22 bp, synthetic construct
  misc_feature 1..22: note = chemically synthesized
  source 1..22: mol_type = other DNA
cagatggtgaaacattgtttta

SEQ ID NO: 57537 - DNA, 22 bp, synthetic construct
  misc_feature 1..22: note = chemically synthesized
  source 1..22: mol_type = other DNA
ttttaatccaaaccagttaatg

SEQ ID NO: 57538 - DNA, 22 bp, synthetic construct
  misc_feature 1..22: note = chemically synthesized
  source 1..22: mol_type = other DNA
taatccaaaccagttaatgctt

SEQ ID NO: 57539 - DNA, 22 bp, synthetic construct
  misc_feature 1..22: note = chemically synthesized
  source 1..22: mol_type = other DNA
aatccaaaccagttaatgcttt

SEQ ID NO: 57540 - DNA, 22 bp, synthetic construct
  misc_feature 1..22: note = chemically synthesized
  source 1..22: mol_type = other DNA
atccaaaccagttaatgcttta

SEQ ID NO: 57541 - DNA, 22 bp, synthetic construct
  misc_feature 1..22: note = chemically synthesized
  source 1..22: mol_type = other DNA
atgctttaaatctacctttaaa

SEQ ID NO: 57542 - DNA, 22 bp, synthetic construct
  misc_feature 1..22: note = chemically synthesized
  source 1..22: mol_type = other DNA
taaatctacctttaaaaaaatt

SEQ ID NO: 57543 - DNA, 22 bp, synthetic construct
  misc_feature 1..22: note = chemically synthesized
  source 1..22: mol_type = other DNA
aaatctacctttaaaaaaattg

SEQ ID NO: 57544 - DNA, 22 bp, synthetic construct
  misc_feature 1..22: note = chemically synthesized
  source 1..22: mol_type = other DNA
aatctacctttaaaaaaattgt

SEQ ID NO: 57545 - DNA, 22 bp, synthetic construct
  misc_feature 1..22: note = chemically synthesized
  source 1..22: mol_type = other DNA
cctttaaaaaaattgtactgtt

SEQ ID NO: 57546 - DNA, 22 bp, synthetic construct
  misc_feature 1..22: note = chemically synthesized
  source 1..22: mol_type = other DNA
taaaaaaattgtactgtttttc

SEQ ID NO: 57547 - DNA, 22 bp, synthetic construct
  misc_feature 1..22: note = chemically synthesized
  source 1..22: mol_type = other DNA
aaaaaaattgtactgtttttcg

SEQ ID NO: 57548 - DNA, 22 bp, synthetic construct
  misc_feature 1..22: note = chemically synthesized
  source 1..22: mol_type = other DNA
aaaaaattgtactgtttttcga

SEQ ID NO: 57549 - DNA, 22 bp, synthetic construct
  misc_feature 1..22: note = chemically synthesized
  source 1..22: mol_type = other DNA
tactgtttttcgaagtacttaa

SEQ ID NO: 57550 - DNA, 22 bp, synthetic construct
  misc_feature 1..22: note = chemically synthesized
  source 1..22: mol_type = other DNA
tttttcgaagtacttaaaggga

SEQ ID NO: 57551 - DNA, 22 bp, synthetic construct
  misc_feature 1..22: note = chemically synthesized
  source 1..22: mol_type = other DNA
ttcgaagtacttaaagggagtg

SEQ ID NO: 57552 - DNA, 22 bp, synthetic construct
  misc_feature 1..22: note = chemically synthesized
  source 1..22: mol_type = other DNA
tcgaagtacttaaagggagtgg

SEQ ID NO: 57553 - DNA, 22 bp, synthetic construct
  misc_feature 1..22: note = chemically synthesized
  source 1..22: mol_type = other DNA
cgaagtacttaaagggagtgga

SEQ ID NO: 57554 - DNA, 22 bp, synthetic construct
  misc_feature 1..22: note = chemically synthesized
  source 1..22: mol_type = other DNA
gaagtacttaaagggagtggag

SEQ ID NO: 57555 - DNA, 22 bp, synthetic construct
  misc_feature 1..22: note = chemically synthesized
  source 1..22: mol_type = other DNA
aaagggagtggaggggtagaaa

SEQ ID NO: 57556 - DNA, 22 bp, synthetic construct
  misc_feature 1..22: note = chemically synthesized
  source 1..22: mol_type = other DNA
aagggagtggaggggtagaaag

SEQ ID NO: 57557 - DNA, 22 bp, synthetic construct
  misc_feature 1..22: note = chemically synthesized
  source 1..22: mol_type = other DNA
actgtggcaaactgtttttcaa

SEQ ID NO: 57558 - DNA, 22 bp, synthetic construct
  misc_feature 1..22: note = chemically synthesized
  source 1..22: mol_type = other DNA
tggcaaactgtttttcaagtaa

SEQ ID NO: 57559 - DNA, 22 bp, synthetic construct
  misc_feature 1..22: note = chemically synthesized
  source 1..22: mol_type = other DNA
tttttcaagtaaagtcataata

SEQ ID NO: 57560 - DNA, 22 bp, synthetic construct
  misc_feature 1..22: note = chemically synthesized
  source 1..22: mol_type = other DNA
ttcaagtaaagtcataataatg

SEQ ID NO: 57561 - DNA, 22 bp, synthetic construct
  misc_feature 1..22: note = chemically synthesized
  source 1..22: mol_type = other DNA
tcaagtaaagtcataataatga

SEQ ID NO: 57562 - DNA, 22 bp, synthetic construct
  misc_feature 1..22: note = chemically synthesized
  source 1..22: mol_type = other DNA
caagtaaagtcataataatgaa

SEQ ID NO: 57563 - DNA, 22 bp, synthetic construct
  misc_feature 1..22: note = chemically synthesized
  source 1..22: mol_type = other DNA
aagtaaagtcataataatgaac

SEQ ID NO: 57564 - DNA, 22 bp, synthetic construct
  misc_feature 1..22: note = chemically synthesized
  source 1..22: mol_type = other DNA
aaatttgatcagcaaacatatc

SEQ ID NO: 57565 - DNA, 22 bp, synthetic construct
  misc_feature 1..22: note = chemically synthesized
  source 1..22: mol_type = other DNA
gatcagcaaacatatccttatg

SEQ ID NO: 57566 - DNA, 22 bp, synthetic construct
  misc_feature 1..22: note = chemically synthesized
  source 1..22: mol_type = other DNA
atcagcaaacatatccttatgc

SEQ ID NO: 57567 - DNA, 22 bp, synthetic construct
  misc_feature 1..22: note = chemically synthesized
  source 1..22: mol_type = other DNA
atgccaaggaattttctttttt

SEQ ID NO: 57568 - DNA, 22 bp, synthetic construct
  misc_feature 1..22: note = chemically synthesized
  source 1..22: mol_type = other DNA
tgccaaggaattttcttttttt

SEQ ID NO: 57569 - DNA, 22 bp, synthetic construct
  misc_feature 1..22: note = chemically synthesized
  source 1..22: mol_type = other DNA
tctttttttctttccttttttt

SEQ ID NO: 57570 - DNA, 22 bp, synthetic construct
  misc_feature 1..22: note = chemically synthesized
  source 1..22: mol_type = other DNA
ctttttttctttcctttttttt

SEQ ID NO: 57571 - DNA, 22 bp, synthetic construct
  misc_feature 1..22: note = chemically synthesized
  source 1..22: mol_type = other DNA
tttttttctttccttttttttc

SEQ ID NO: 57572 - DNA, 22 bp, synthetic construct
  misc_feature 1..22: note = chemically synthesized
  source 1..22: mol_type = other DNA
tttttctttccttttttttctt

SEQ ID NO: 57573 - DNA, 22 bp, synthetic construct
  misc_feature 1..22: note = chemically synthesized
  source 1..22: mol_type = other DNA
ttttctttccttttttttcttt

SEQ ID NO: 57574 - DNA, 22 bp, synthetic construct
  misc_feature 1..22: note = chemically synthesized
  source 1..22: mol_type = other DNA
tttctttccttttttttctttt

SEQ ID NO: 57575 - DNA, 22 bp, synthetic construct
  misc_feature 1..22: note = chemically synthesized
  source 1..22: mol_type = other DNA
ttctttccttttttttcttttt

SEQ ID NO: 57576 - DNA, 22 bp, synthetic construct
  misc_feature 1..22: note = chemically synthesized
  source 1..22: mol_type = other DNA
tctttccttttttttctttttc

SEQ ID NO: 57577 - DNA, 22 bp, synthetic construct
  misc_feature 1..22: note = chemically synthesized
  source 1..22: mol_type = other DNA
ctttccttttttttctttttcg

SEQ ID NO: 57578 - DNA, 22 bp, synthetic construct
  misc_feature 1..22: note = chemically synthesized
  source 1..22: mol_type = other DNA
tttccttttttttctttttcgc

SEQ ID NO: 57579 - DNA, 22 bp, synthetic construct
  misc_feature 1..22: note = chemically synthesized
  source 1..22: mol_type = other DNA
tccttttttttctttttcgcca

SEQ ID NO: 57580 - DNA, 22 bp, synthetic construct
  misc_feature 1..22: note = chemically synthesized
  source 1..22: mol_type = other DNA
ccttttttttctttttcgccat

SEQ ID NO: 57581 - DNA, 22 bp, synthetic construct
  misc_feature 1..22: note = chemically synthesized
  source 1..22: mol_type = other DNA
cttttttttctttttcgccatt

SEQ ID NO: 57582 - DNA, 22 bp, synthetic construct
  misc_feature 1..22: note = chemically synthesized
  source 1..22: mol_type = other DNA
ttttttctttttcgccattcac

SEQ ID NO: 57583 - DNA, 22 bp, synthetic construct
  misc_feature 1..22: note = chemically synthesized
  source 1..22: mol_type = other DNA
tttttctttttcgccattcaca

SEQ ID NO: 57584 - DNA, 22 bp, synthetic construct
  misc_feature 1..22: note = chemically synthesized
  source 1..22: mol_type = other DNA
ttttctttttcgccattcacat

SEQ ID NO: 57585 - DNA, 22 bp, synthetic construct
  misc_feature 1..22: note = chemically synthesized
  source 1..22: mol_type = other DNA
tttctttttcgccattcacata

SEQ ID NO: 57586 - DNA, 22 bp, synthetic construct
  misc_feature 1..22: note = chemically synthesized
  source 1..22: mol_type = other DNA
ttctttttcgccattcacatac

SEQ ID NO: 57587 - DNA, 22 bp, synthetic construct
  misc_feature 1..22: note = chemically synthesized
  source 1..22: mol_type = other DNA
tctttttcgccattcacatacc

SEQ ID NO: 57588 - DNA, 22 bp, synthetic construct
  misc_feature 1..22: note = chemically synthesized
  source 1..22: mol_type = other DNA
ctttttcgccattcacatacca

SEQ ID NO: 57589 - DNA, 22 bp, synthetic construct
  misc_feature 1..22: note = chemically synthesized
  source 1..22: mol_type = other DNA
tttttcgccattcacataccaa

SEQ ID NO: 57590 - DNA, 22 bp, synthetic construct
  misc_feature 1..22: note = chemically synthesized
  source 1..22: mol_type = other DNA
tttcgccattcacataccaagg

SEQ ID NO: 57591 - DNA, 22 bp, synthetic construct
  misc_feature 1..22: note = chemically synthesized
  source 1..22: mol_type = other DNA
ttcgccattcacataccaaggt

SEQ ID NO: 57592 - DNA, 22 bp, synthetic construct
  misc_feature 1..22: note = chemically synthesized
  source 1..22: mol_type = other DNA
tcgccattcacataccaaggtt

SEQ ID NO: 57593 - DNA, 22 bp, synthetic construct
  misc_feature 1..22: note = chemically synthesized
  source 1..22: mol_type = other DNA
cgccattcacataccaaggttc

SEQ ID NO: 57594 - DNA, 22 bp, synthetic construct
  misc_feature 1..22: note = chemically synthesized
  source 1..22: mol_type = other DNA
gccattcacataccaaggttct

SEQ ID NO: 57595 - DNA, 22 bp, synthetic construct
  misc_feature 1..22: note = chemically synthesized
  source 1..22: mol_type = other DNA
acataccaaggttctgtaaatc

SEQ ID NO: 57596 - DNA, 22 bp, synthetic construct
  misc_feature 1..22: note = chemically synthesized
  source 1..22: mol_type = other DNA
tgtaaatcagtaaaccaggcag

SEQ ID NO: 57597 - DNA, 22 bp, synthetic construct
  misc_feature 1..22: note = chemically synthesized
  source 1..22: mol_type = other DNA
taaatcagtaaaccaggcagag

SEQ ID NO: 57598 - DNA, 22 bp, synthetic construct
  misc_feature 1..22: note = chemically synthesized
  source 1..22: mol_type = other DNA
ttgtaagggggaaaccaaatca

SEQ ID NO: 57599 - DNA, 22 bp, synthetic construct
  misc_feature 1..22: note = chemically synthesized
  source 1..22: mol_type = other DNA
taagggggaaaccaaatcataa

SEQ ID NO: 57600 - DNA, 22 bp, synthetic construct
  misc_feature 1..22: note = chemically synthesized
  source 1..22: mol_type = other DNA
tctttctgaagaaacattaacg

SEQ ID NO: 57601 - DNA, 22 bp, synthetic construct
  misc_feature 1..22: note = chemically synthesized
  source 1..22: mol_type = other DNA
tctgaagaaacattaacgccac

SEQ ID NO: 57602 - DNA, 22 bp, synthetic construct
  misc_feature 1..22: note = chemically synthesized
  source 1..22: mol_type = other DNA
ctgaagaaacattaacgccacc

SEQ ID NO: 57603 - DNA, 22 bp, synthetic construct
  misc_feature 1..22: note = chemically synthesized
  source 1..22: mol_type = other DNA
tgaagaaacattaacgccacca

SEQ ID NO: 57604 - DNA, 22 bp, synthetic construct
  misc_feature 1..22: note = chemically synthesized
  source 1..22: mol_type = other DNA
aagaaacattaacgccaccacc

SEQ ID NO: 57605 - DNA, 22 bp, synthetic construct
  misc_feature 1..22: note = chemically synthesized
  source 1..22: mol_type = other DNA
acgccaccaccaccaaaaaaag

SEQ ID NO: 57606 - DNA, 22 bp, synthetic construct
  misc_feature 1..22: note = chemically synthesized
  source 1..22: mol_type = other DNA
tttaaaaaactggaaatgacag

SEQ ID NO: 57607 - DNA, 22 bp, synthetic construct
  misc_feature 1..22: note = chemically synthesized
  source 1..22: mol_type = other DNA
ttaaaaaactggaaatgacaga

SEQ ID NO: 57608 - DNA, 22 bp, synthetic construct
  misc_feature 1..22: note = chemically synthesized
  source 1..22: mol_type = other DNA
taaaaaactggaaatgacagaa

SEQ ID NO: 57609 - DNA, 22 bp, synthetic construct
  misc_feature 1..22: note = chemically synthesized
  source 1..22: mol_type = other DNA
aaaaaactggaaatgacagaat

SEQ ID NO: 57610 - DNA, 22 bp, synthetic construct
  misc_feature 1..22: note = chemically synthesized
  source 1..22: mol_type = other DNA
aaaaactggaaatgacagaata

SEQ ID NO: 57611 - DNA, 22 bp, synthetic construct
  misc_feature 1..22: note = chemically synthesized
  source 1..22: mol_type = other DNA
gaaatgacagaatagttttaaa

SEQ ID NO: 57612 - DNA, 22 bp, synthetic construct
  misc_feature 1..22: note = chemically synthesized
  source 1..22: mol_type = other DNA
taaaaggaaaaaaaaaaaaacc

SEQ ID NO: 57613 - DNA, 22 bp, synthetic construct
  misc_feature 1..22: note = chemically synthesized
  source 1..22: mol_type = other DNA
aaaaggaaaaaaaaaaaaaccc

SEQ ID NO: 57614 - DNA, 22 bp, synthetic construct
  misc_feature 1..22: note = chemically synthesized
  source 1..22: mol_type = other DNA
aaaggaaaaaaaaaaaaaccca

SEQ ID NO: 57615 - DNA, 22 bp, synthetic construct
  misc_feature 1..22: note = chemically synthesized
  source 1..22: mol_type = other DNA
ctgacgctcaaaacttcaaact

SEQ ID NO: 57616 - DNA, 22 bp, synthetic construct
  misc_feature 1..22: note = chemically synthesized
  source 1..22: mol_type = other DNA
tgacgctcaaaacttcaaacta

SEQ ID NO: 57617 - DNA, 22 bp, synthetic construct
  misc_feature 1..22: note = chemically synthesized
  source 1..22: mol_type = other DNA
acgctcaaaacttcaaactatt

SEQ ID NO: 57618 - DNA, 22 bp, synthetic construct
  misc_feature 1..22: note = chemically synthesized
  source 1..22: mol_type = other DNA
aaaacttcaaactattaataga

SEQ ID NO: 57619 - DNA, 22 bp, synthetic construct
  misc_feature 1..22: note = chemically synthesized
  source 1..22: mol_type = other DNA
caaactattaatagaccaccag

SEQ ID NO: 57620 - DNA, 22 bp, synthetic construct
  misc_feature 1..22: note = chemically synthesized
  source 1..22: mol_type = other DNA
aaactattaatagaccaccagt

SEQ ID NO: 57621 - DNA, 22 bp, synthetic construct
  misc_feature 1..22: note = chemically synthesized
  source 1..22: mol_type = other DNA
ttaatagaccaccagtgagata

SEQ ID NO: 57622 - DNA, 22 bp, synthetic construct
  misc_feature 1..22: note = chemically synthesized
  source 1..22: mol_type = other DNA
atagaccaccagtgagatagac

SEQ ID NO: 57623 - DNA, 22 bp, synthetic construct
  misc_feature 1..22: note = chemically synthesized
  source 1..22: mol_type = other DNA
tctttgtgccttgaaatgcaaa

SEQ ID NO: 57624 - DNA, 22 bp, synthetic construct
  misc_feature 1..22: note = chemically synthesized
  source 1..22: mol_type = other DNA
tgtgccttgaaatgcaaaatga

SEQ ID NO: 57625 - DNA, 22 bp, synthetic construct
  misc_feature 1..22: note = chemically synthesized
  source 1..22: mol_type = other DNA
gtgccttgaaatgcaaaatgag

SEQ ID NO: 57626 - DNA, 22 bp, synthetic construct
  misc_feature 1..22: note = chemically synthesized
  source 1..22: mol_type = other DNA
tgccttgaaatgcaaaatgagg

SEQ ID NO: 57627 - DNA, 22 bp, synthetic construct
  misc_feature 1..22: note = chemically synthesized
  source 1..22: mol_type = other DNA
gaaatgcaaaatgagggaaata

SEQ ID NO: 57628 - DNA, 22 bp, synthetic construct
  misc_feature 1..22: note = chemically synthesized
  source 1..22: mol_type = other DNA
aaatgcaaaatgagggaaataa

SEQ ID NO: 57629 - DNA, 22 bp, synthetic construct
  misc_feature 1..22: note = chemically synthesized
  source 1..22: mol_type = other DNA
gcagaggaacaaaattctcaaa

SEQ ID NO: 57630 - DNA, 22 bp, synthetic construct
  misc_feature 1..22: note = chemically synthesized
  source 1..22: mol_type = other DNA
tcaaaatttgaagaacttctgt

SEQ ID NO: 57631 - DNA, 22 bp, synthetic construct
  misc_feature 1..22: note = chemically synthesized
  source 1..22: mol_type = other DNA
aaaatttgaagaacttctgtga

SEQ ID NO: 57632 - DNA, 22 bp, synthetic construct
  misc_feature 1..22: note = chemically synthesized
  source 1..22: mol_type = other DNA
gaagaacttctgtgattactgg

SEQ ID NO: 57633 - DNA, 22 bp, synthetic construct
  misc_feature 1..22: note = chemically synthesized
  source 1..22: mol_type = other DNA
aagaacttctgtgattactggg

SEQ ID NO: 57634 - DNA, 22 bp, synthetic construct
  misc_feature 1..22: note = chemically synthesized
  source 1..22: mol_type = other DNA
ctgtgattactgggggtacagt

SEQ ID NO: 57635 - DNA, 22 bp, synthetic construct
  misc_feature 1..22: note = chemically synthesized
  source 1..22: mol_type = other DNA
tgtgattactgggggtacagtg

SEQ ID NO: 57636 - DNA, 22 bp, synthetic construct
  misc_feature 1..22: note = chemically synthesized
  source 1..22: mol_type = other DNA
tgattactgggggtacagtgaa

SEQ ID NO: 57637 - DNA, 22 bp, synthetic construct
  misc_feature 1..22: note = chemically synthesized
  source 1..22: mol_type = other DNA
ctgggggtacagtgaaaagaaa

SEQ ID NO: 57638 - DNA, 22 bp, synthetic construct
  misc_feature 1..22: note = chemically synthesized
  source 1..22: mol_type = other DNA
ggggtacagtgaaaagaaaatg

SEQ ID NO: 57639 - DNA, 22 bp, synthetic construct
  misc_feature 1..22: note = chemically synthesized
  source 1..22: mol_type = other DNA
cttcctgatcttaattagattc

SEQ ID NO: 57640 - DNA, 22 bp, synthetic construct
  misc_feature 1..22: note = chemically synthesized
  source 1..22: mol_type = other DNA
ttcctgatcttaattagattcg

SEQ ID NO: 57641 - DNA, 22 bp, synthetic construct
  misc_feature 1..22: note = chemically synthesized
  source 1..22: mol_type = other DNA
cctgatcttaattagattcgat

SEQ ID NO: 57642 - DNA, 22 bp, synthetic construct
  misc_feature 1..22: note = chemically synthesized
  source 1..22: mol_type = other DNA
ctgatcttaattagattcgatt

SEQ ID NO: 57643 - DNA, 22 bp, synthetic construct
  misc_feature 1..22: note = chemically synthesized
  source 1..22: mol_type = other DNA
atcttaattagattcgattgtg

SEQ ID NO: 57644 - DNA, 22 bp, synthetic construct
  misc_feature 1..22: note = chemically synthesized
  source 1..22: mol_type = other DNA
aattagattcgattgtgcggtg

SEQ ID NO: 57645 - DNA, 22 bp, synthetic construct
  misc_feature 1..22: note = chemically synthesized
  source 1..22: mol_type = other DNA
attagattcgattgtgcggtgg

SEQ ID NO: 57646 - DNA, 22 bp, synthetic construct
  misc_feature 1..22: note = chemically synthesized
  source 1..22: mol_type = other DNA
gattcgattgtgcggtgggtgt

SEQ ID NO: 57647 - DNA, 22 bp, synthetic construct
  misc_feature 1..22: note = chemically synthesized
  source 1..22: mol_type = other DNA
gattgtgcggtgggtgtgttgg

SEQ ID NO: 57648 - DNA, 22 bp, synthetic construct
  misc_feature 1..22: note = chemically synthesized
  source 1..22: mol_type = other DNA
tgcggtgggtgtgttggatttg

SEQ ID NO: 57649 - DNA, 22 bp, synthetic construct
  misc_feature 1..22: note = chemically synthesized
  source 1..22: mol_type = other DNA
gatttggggggaggggcagagg

SEQ ID NO: 57650 - DNA, 22 bp, synthetic construct
  misc_feature 1..22: note = chemically synthesized
  source 1..22: mol_type = other DNA
ggggggaggggcagaggcaggg

SEQ ID NO: 57651 - DNA, 22 bp, synthetic construct
  misc_feature 1..22: note = chemically synthesized
  source 1..22: mol_type = other DNA
gggggaggggcagaggcaggga

SEQ ID NO: 57652 - DNA, 22 bp, synthetic construct
  misc_feature 1..22: note = chemically synthesized
  source 1..22: mol_type = other DNA
gggtgaggcgtgaggctgagtg

SEQ ID NO: 57653 - DNA, 22 bp, synthetic construct
  misc_feature 1..22: note = chemically synthesized
  source 1..22: mol_type = other DNA
agtgttgtggagacaggttagc

SEQ ID NO: 57654 - DNA, 22 bp, synthetic construct
  misc_feature 1..22: note = chemically synthesized
  source 1..22: mol_type = other DNA
tggagacaggttagcaggggcc

SEQ ID NO: 57655 - DNA, 22 bp, synthetic construct
  misc_feature 1..22: note = chemically synthesized
  source 1..22: mol_type = other DNA
gcaggggcccggcggtgtggca

SEQ ID NO: 57656 - DNA, 22 bp, synthetic construct
  misc_feature 1..22: note = chemically synthesized
  source 1..22: mol_type = other DNA
ccaacgctggtgcaggattccg

SEQ ID NO: 57657 - DNA, 22 bp, synthetic construct
  misc_feature 1..22: note = chemically synthesized
  source 1..22: mol_type = other DNA
caacgctggtgcaggattccga

SEQ ID NO: 57658 - DNA, 22 bp, synthetic construct
  misc_feature 1..22: note = chemically synthesized
  source 1..22: mol_type = other DNA
gtgcaggattccgagccttaac

SEQ ID NO: 57659 - DNA, 22 bp, synthetic construct
  misc_feature 1..22: note = chemically synthesized
  source 1..22: mol_type = other DNA
cgagccttaacccagatgctca

SEQ ID NO: 57660 - DNA, 22 bp, synthetic construct
  misc_feature 1..22: note = chemically synthesized
  source 1..22: mol_type = other DNA
aacccagatgctcatggtgccc

SEQ ID NO: 57661 - DNA, 22 bp, synthetic construct
  misc_feature 1..22: note = chemically synthesized
  source 1..22: mol_type = other DNA
acccagatgctcatggtgccct

SEQ ID NO: 57662 - DNA, 22 bp, synthetic construct
  misc_feature 1..22: note = chemically synthesized
  source 1..22: mol_type = other DNA
atggtgccctagtcttgagttc

SEQ ID NO: 57663 - DNA, 22 bp, synthetic construct
  misc_feature 1..22: note = chemically synthesized
  source 1..22: mol_type = other DNA
gtcttgagttcttcatttaggt

SEQ ID NO: 57664 - DNA, 22 bp, synthetic construct
  misc_feature 1..22: note = chemically synthesized
  source 1..22: mol_type = other DNA
gagttcttcatttaggtgggct

SEQ ID NO: 57665 - DNA, 22 bp, synthetic construct
  misc_feature 1..22: note = chemically synthesized
  source 1..22: mol_type = other DNA
agttcttcatttaggtgggctt

SEQ ID NO: 57666 - DNA, 22 bp, synthetic construct
  misc_feature 1..22: note = chemically synthesized
  source 1..22: mol_type = other DNA
ttcatttaggtgggcttatttc

SEQ ID NO: 57667 - DNA, 22 bp, synthetic construct
  misc_feature 1..22: note = chemically synthesized
  source 1..22: mol_type = other DNA
catttaggtgggcttatttccc

SEQ ID NO: 57668 - DNA, 22 bp, synthetic construct
  misc_feature 1..22: note = chemically synthesized
  source 1..22: mol_type = other DNA
atttaggtgggcttatttccca

SEQ ID NO: 57669 - DNA, 22 bp, synthetic construct
  misc_feature 1..22: note = chemically synthesized
  source 1..22: mol_type = other DNA
aggtgggcttatttcccactgg

SEQ ID NO: 57670 - DNA, 22 bp, synthetic construct
  misc_feature 1..22: note = chemically synthesized
  source 1..22: mol_type = other DNA
ggtgggcttatttcccactggg

SEQ ID NO: 57671 - DNA, 22 bp, synthetic construct
  misc_feature 1..22: note = chemically synthesized
  source 1..22: mol_type = other DNA
atttcccactgggtctggggga

SEQ ID NO: 57672 - DNA, 22 bp, synthetic construct
  misc_feature 1..22: note = chemically synthesized
  source 1..22: mol_type = other DNA
tttcccactgggtctgggggat

SEQ ID NO: 57673 - DNA, 22 bp, synthetic construct
  misc_feature 1..22: note = chemically synthesized
  source 1..22: mol_type = other DNA
cccactgggtctgggggatttc

SEQ ID NO: 57674 - DNA, 22 bp, synthetic construct
  misc_feature 1..22: note = chemically synthesized
  source 1..22: mol_type = other DNA
ccactgggtctgggggatttca

SEQ ID NO: 57675 - DNA, 22 bp, synthetic construct
  misc_feature 1..22: note = chemically synthesized
  source 1..22: mol_type = other DNA
ggtctgggggatttcatttgtc

SEQ ID NO: 57676 - DNA, 22 bp, synthetic construct
  misc_feature 1..22: note = chemically synthesized
  source 1..22: mol_type = other DNA
ggggatttcatttgtcctttga

SEQ ID NO: 57677 - DNA, 22 bp, synthetic construct
  misc_feature 1..22: note = chemically synthesized
  source 1..22: mol_type = other DNA
catttgtcctttgaggggcagg

SEQ ID NO: 57678 - DNA, 22 bp, synthetic construct
  misc_feature 1..22: note = chemically synthesized
  source 1..22: mol_type = other DNA
atttgtcctttgaggggcaggg

SEQ ID NO: 57679 - DNA, 22 bp, synthetic construct
  misc_feature 1..22: note = chemically synthesized
  source 1..22: mol_type = other DNA
gtcctttgaggggcagggtgga

SEQ ID NO: 57680 - DNA, 22 bp, synthetic construct
  misc_feature 1..22: note = chemically synthesized
  source 1..22: mol_type = other DNA
tcctttgaggggcagggtggac

SEQ ID NO: 57681 - DNA, 22 bp, synthetic construct
  misc_feature 1..22: note = chemically synthesized
  source 1..22: mol_type = other DNA
tgaggggcagggtggacactga

SEQ ID NO: 57682 - DNA, 22 bp, synthetic construct
  misc_feature 1..22: note = chemically synthesized
  source 1..22: mol_type = other DNA
gaggggcagggtggacactgac

SEQ ID NO: 57683 - DNA, 22 bp, synthetic construct
  misc_feature 1..22: note = chemically synthesized
  source 1..22: mol_type = other DNA
aggggcagggtggacactgaca

SEQ ID NO: 57684 - DNA, 22 bp, synthetic construct
  misc_feature 1..22: note = chemically synthesized
  source 1..22: mol_type = other DNA
acagaacagctgcggccggcag

SEQ ID NO: 57685 - DNA, 22 bp, synthetic construct
  misc_feature 1..22: note = chemically synthesized
  source 1..22: mol_type = other DNA
cggccggcagagagggtggtta

SEQ ID NO: 57686 - DNA, 22 bp, synthetic construct
  misc_feature 1..22: note = chemically synthesized
  source 1..22: mol_type = other DNA
ggaagagggaagcagcctgtgg

SEQ ID NO: 57687 - DNA, 22 bp, synthetic construct
  misc_feature 1..22: note = chemically synthesized
  source 1..22: mol_type = other DNA
tgggtaacttcccgaccacatg

SEQ ID NO: 57688 - DNA, 22 bp, synthetic construct
  misc_feature 1..22: note = chemically synthesized
  source 1..22: mol_type = other DNA
cccgaccacatggaaaggctga

SEQ ID NO: 57689 - DNA, 22 bp, synthetic construct
  misc_feature 1..22: note = chemically synthesized
  source 1..22: mol_type = other DNA
ccgaccacatggaaaggctgaa

SEQ ID NO: 57690 - DNA, 22 bp, synthetic construct
  misc_feature 1..22: note = chemically synthesized
  source 1..22: mol_type = other DNA
aataagacgttatggaccctgc

SEQ ID NO: 57691 - DNA, 22 bp, synthetic construct
  misc_feature 1..22: note = chemically synthesized
  source 1..22: mol_type = other DNA
tggaccctgccttgggtactgg

SEQ ID NO: 57692 - DNA, 22 bp, synthetic construct
  misc_feature 1..22: note = chemically synthesized
  source 1..22: mol_type = other DNA
ccttgggtactggggtcagcgt

SEQ ID NO: 57693 - DNA, 22 bp, synthetic construct
  misc_feature 1..22: note = chemically synthesized
  source 1..22: mol_type = other DNA
gggtactggggtcagcgtctcc

SEQ ID NO: 57694 - DNA, 22 bp, synthetic construct
  misc_feature 1..22: note = chemically synthesized
  source 1..22: mol_type = other DNA
ggtactggggtcagcgtctcct

SEQ ID NO: 57695 - DNA, 22 bp, synthetic construct
  misc_feature 1..22: note = chemically synthesized
  source 1..22: mol_type = other DNA
gggtcagcgtctcctggtggtg

SEQ ID NO: 57696 - DNA, 22 bp, synthetic construct
  misc_feature 1..22: note = chemically synthesized
  source 1..22: mol_type = other DNA
ctggtggtgtctgcacagggcc

SEQ ID NO: 57697 - DNA, 22 bp, synthetic construct
  misc_feature 1..22: note = chemically synthesized
  source 1..22: mol_type = other DNA
gtggtgtctgcacagggccccc

SEQ ID NO: 57698 - DNA, 22 bp, synthetic construct
  misc_feature 1..22: note = chemically synthesized
  source 1..22: mol_type = other DNA
cacagggccccccaatgccagg

SEQ ID NO: 57699 - DNA, 22 bp, synthetic construct
  misc_feature 1..22: note = chemically synthesized
  source 1..22: mol_type = other DNA
ccaaaacacgctcttgagttta

SEQ ID NO: 57700 - DNA, 22 bp, synthetic construct
  misc_feature 1..22: note = chemically synthesized
  source 1..22: mol_type = other DNA
ttgagtttaatggtagtggttg

SEQ ID NO: 57701 - DNA, 22 bp, synthetic construct
  misc_feature 1..22: note = chemically synthesized
  source 1..22: mol_type = other DNA
gagtttaatggtagtggttggt

SEQ ID NO: 57702 - DNA, 22 bp, synthetic construct
  misc_feature 1..22: note = chemically synthesized
  source 1..22: mol_type = other DNA
agtttaatggtagtggttggtc

SEQ ID NO: 57703 - DNA, 22 bp, synthetic construct
  misc_feature 1..22: note = chemically synthesized
  source 1..22: mol_type = other DNA
aatggtagtggttggtctgagt

SEQ ID NO: 57704 - DNA, 22 bp, synthetic construct
  misc_feature 1..22: note = chemically synthesized
  source 1..22: mol_type = other DNA
atggtagtggttggtctgagtc

SEQ ID NO: 57705 - DNA, 22 bp, synthetic construct
  misc_feature 1..22: note = chemically synthesized
  source 1..22: mol_type = other DNA
gtctgagtcctgccaaagtgta

SEQ ID NO: 57706 - DNA, 22 bp, synthetic construct
  misc_feature 1..22: note = chemically synthesized
  source 1..22: mol_type = other DNA
agtcctgccaaagtgtatggag

SEQ ID NO: 57707 - DNA, 22 bp, synthetic construct
  misc_feature 1..22: note = chemically synthesized
  source 1..22: mol_type = other DNA
ccaaagtgtatggagcaagttt

SEQ ID NO: 57708 - DNA, 22 bp, synthetic construct
  misc_feature 1..22: note = chemically synthesized
  source 1..22: mol_type = other DNA
cattggctggactttccccttg

SEQ ID NO: 57709 - DNA, 22 bp, synthetic construct
  misc_feature 1..22: note = chemically synthesized
  source 1..22: mol_type = other DNA
attggctggactttccccttgc

SEQ ID NO: 57710 - DNA, 22 bp, synthetic construct
  misc_feature 1..22: note = chemically synthesized
  source 1..22: mol_type = other DNA
gctggactttccccttgcatga

SEQ ID NO: 57711 - DNA, 22 bp, synthetic construct
  misc_feature 1..22: note = chemically synthesized
  source 1..22: mol_type = other DNA
gactttccccttgcatgaaata

SEQ ID NO: 57712 - DNA, 22 bp, synthetic construct
  misc_feature 1..22: note = chemically synthesized
  source 1..22: mol_type = other DNA
tccccttgcatgaaataataaa

SEQ ID NO: 57713 - DNA, 22 bp, synthetic construct
  misc_feature 1..22: note = chemically synthesized
  source 1..22: mol_type = other DNA
ccccttgcatgaaataataaaa

SEQ ID NO: 57714 - DNA, 22 bp, synthetic construct
  misc_feature 1..22: note = chemically synthesized
  source 1..22: mol_type = other DNA
cccttgcatgaaataataaaag

SEQ ID NO: 57715 - DNA, 22 bp, synthetic construct
  misc_feature 1..22: note = chemically synthesized
  source 1..22: mol_type = other DNA
gcatgaaataataaaagccctg

SEQ ID NO: 57716 - DNA, 22 bp, synthetic construct
  misc_feature 1..22: note = chemically synthesized
  source 1..22: mol_type = other DNA
catgaaataataaaagccctgg

SEQ ID NO: 57717 - DNA, 22 bp, synthetic construct
  misc_feature 1..22: note = chemically synthesized
  source 1..22: mol_type = other DNA
gccaaggcttatgaatctattt

SEQ ID NO: 57718 - DNA, 22 bp, synthetic construct
  misc_feature 1..22: note = chemically synthesized
  source 1..22: mol_type = other DNA
atgaatctatttttgtttcatt

SEQ ID NO: 57719 - DNA, 22 bp, synthetic construct
  misc_feature 1..22: note = chemically synthesized
  source 1..22: mol_type = other DNA
tgaatctatttttgtttcatta

SEQ ID NO: 57720 - DNA, 22 bp, synthetic construct
  misc_feature 1..22: note = chemically synthesized
  source 1..22: mol_type = other DNA
tttttgtttcattaatattatt

SEQ ID NO: 57721 - DNA, 22 bp, synthetic construct
  misc_feature 1..22: note = chemically synthesized
  source 1..22: mol_type = other DNA
ttgtttcattaatattatttat

SEQ ID NO: 57722 - DNA, 22 bp, synthetic construct
  misc_feature 1..22: note = chemically synthesized
  source 1..22: mol_type = other DNA
tgtttcattaatattatttatt

SEQ ID NO: 57723 - DNA, 22 bp, synthetic construct
  misc_feature 1..22: note = chemically synthesized
  source 1..22: mol_type = other DNA
gtttcattaatattatttatta

SEQ ID NO: 57724 - DNA, 22 bp, synthetic construct
  misc_feature 1..22: note = chemically synthesized
  source 1..22: mol_type = other DNA
tttcattaatattatttattat

SEQ ID NO: 57725 - DNA, 22 bp, synthetic construct
  misc_feature 1..22: note = chemically synthesized
  source 1..22: mol_type = other DNA
cattaatattatttattatgta

SEQ ID NO: 57726 - DNA, 22 bp, synthetic construct
  misc_feature 1..22: note = chemically synthesized
  source 1..22: mol_type = other DNA
attaatattatttattatgtat

SEQ ID NO: 57727 - DNA, 22 bp, synthetic construct
  misc_feature 1..22: note = chemically synthesized
  source 1..22: mol_type = other DNA
atattatttattatgtatttta

SEQ ID NO: 57728 - DNA, 22 bp, synthetic construct
  misc_feature 1..22: note = chemically synthesized
  source 1..22: mol_type = other DNA
tttattatgtattttattaata

SEQ ID NO: 57729 - DNA, 22 bp, synthetic construct
  misc_feature 1..22: note = chemically synthesized
  source 1..22: mol_type = other DNA
attatgtattttattaatattt

SEQ ID NO: 57730 - DNA, 22 bp, synthetic construct
  misc_feature 1..22: note = chemically synthesized
  source 1..22: mol_type = other DNA
ttatgtattttattaatatttt

SEQ ID NO: 57731 - DNA, 22 bp, synthetic construct
  misc_feature 1..22: note = chemically synthesized
  source 1..22: mol_type = other DNA
tgtattttattaatattttttg

SEQ ID NO: 57732 - DNA, 22 bp, synthetic construct
  misc_feature 1..22: note = chemically synthesized
  source 1..22: mol_type = other DNA
tattaatattttttggagggac

SEQ ID NO: 57733 - DNA, 22 bp, synthetic construct
  misc_feature 1..22: note = chemically synthesized
  source 1..22: mol_type = other DNA
attaatattttttggagggacc

SEQ ID NO: 57734 - DNA, 22 bp, synthetic construct
  misc_feature 1..22: note = chemically synthesized
  source 1..22: mol_type = other DNA
ttaatattttttggagggacct

SEQ ID NO: 57735 - DNA, 22 bp, synthetic construct
  misc_feature 1..22: note = chemically synthesized
  source 1..22: mol_type = other DNA
atattttttggagggaccttgc

SEQ ID NO: 57736 - DNA, 22 bp, synthetic construct
  misc_feature 1..22: note = chemically synthesized
  source 1..22: mol_type = other DNA
tttggagggaccttgctctcat

SEQ ID NO: 57737 - DNA, 22 bp, synthetic construct
  misc_feature 1..22: note = chemically synthesized
  source 1..22: mol_type = other DNA
ttggagggaccttgctctcatt

SEQ ID NO: 57738 - DNA, 22 bp, synthetic construct
  misc_feature 1..22: note = chemically synthesized
  source 1..22: mol_type = other DNA
tggagggaccttgctctcattt

SEQ ID NO: 57739 - DNA, 22 bp, synthetic construct
  misc_feature 1..22: note = chemically synthesized
  source 1..22: mol_type = other DNA
ggagggaccttgctctcatttg

SEQ ID NO: 57740 - DNA, 22 bp, synthetic construct
  misc_feature 1..22: note = chemically synthesized
  source 1..22: mol_type = other DNA
gagggaccttgctctcatttga

SEQ ID NO: 57741 - DNA, 22 bp, synthetic construct
  misc_feature 1..22: note = chemically synthesized
  source 1..22: mol_type = other DNA
gctctcatttgaccatttgtag

SEQ ID NO: 57742 - DNA, 22 bp, synthetic construct
  misc_feature 1..22: note = chemically synthesized
  source 1..22: mol_type = other DNA
ctctcatttgaccatttgtagt

SEQ ID NO: 57743 - DNA, 22 bp, synthetic construct
  misc_feature 1..22: note = chemically synthesized
  source 1..22: mol_type = other DNA
tcatttgaccatttgtagttat

SEQ ID NO: 57744 - DNA, 22 bp, synthetic construct
  misc_feature 1..22: note = chemically synthesized
  source 1..22: mol_type = other DNA
atttgaccatttgtagttataa

SEQ ID NO: 57745 - DNA, 22 bp, synthetic construct
  misc_feature 1..22: note = chemically synthesized
  source 1..22: mol_type = other DNA
gaccatttgtagttataattaa

SEQ ID NO: 57746 - DNA, 22 bp, synthetic construct
  misc_feature 1..22: note = chemically synthesized
  source 1..22: mol_type = other DNA
accatttgtagttataattaat

SEQ ID NO: 57747 - DNA, 22 bp, synthetic construct
  misc_feature 1..22: note = chemically synthesized
  source 1..22: mol_type = other DNA
gtagttataattaatgcattcc

SEQ ID NO: 57748 - DNA, 22 bp, synthetic construct
  misc_feature 1..22: note = chemically synthesized
  source 1..22: mol_type = other DNA
tagttataattaatgcattccg

SEQ ID NO: 57749 - DNA, 22 bp, synthetic construct
  misc_feature 1..22: note = chemically synthesized
  source 1..22: mol_type = other DNA
taattaatgcattccgtactgg

SEQ ID NO: 57750 - DNA, 22 bp, synthetic construct
  misc_feature 1..22: note = chemically synthesized
  source 1..22: mol_type = other DNA
atgcattccgtactggttgtaa

SEQ ID NO: 57751 - DNA, 22 bp, synthetic construct
  misc_feature 1..22: note = chemically synthesized
  source 1..22: mol_type = other DNA
cgtactggttgtaaaaagtgtg

SEQ ID NO: 57752 - DNA, 22 bp, synthetic construct
  misc_feature 1..22: note = chemically synthesized
  source 1..22: mol_type = other DNA
gttgtaaaaagtgtgcttgcat

SEQ ID NO: 57753 - DNA, 22 bp, synthetic construct
  misc_feature 1..22: note = chemically synthesized
  source 1..22: mol_type = other DNA
taaaaagtgtgcttgcatttaa

SEQ ID NO: 57754 - DNA, 22 bp, synthetic construct
  misc_feature 1..22: note = chemically synthesized
  source 1..22: mol_type = other DNA
gcatttaattgcaagtcagggt

SEQ ID NO: 57755 - DNA, 22 bp, synthetic construct
  misc_feature 1..22: note = chemically synthesized
  source 1..22: mol_type = other DNA
catttaattgcaagtcagggta

SEQ ID NO: 57756 - DNA, 22 bp, synthetic construct
  misc_feature 1..22: note = chemically synthesized
  source 1..22: mol_type = other DNA
aattgcaagtcagggtaaatta

SEQ ID NO: 57757 - DNA, 22 bp, synthetic construct
  misc_feature 1..22: note = chemically synthesized
  source 1..22: mol_type = other DNA
attgcaagtcagggtaaattaa

SEQ ID NO: 57758 - DNA, 22 bp, synthetic construct
  misc_feature 1..22: note = chemically synthesized
  source 1..22: mol_type = other DNA
caagtcagggtaaattaatgga

SEQ ID NO: 57759 - DNA, 22 bp, synthetic construct
  misc_feature 1..22: note = chemically synthesized
  source 1..22: mol_type = other DNA
atggatatgatttaaaacaaaa

SEQ ID NO: 57760 - DNA, 22 bp, synthetic construct
  misc_feature 1..22: note = chemically synthesized
  source 1..22: mol_type = other DNA
aaaacaaaactcacttaaaata

SEQ ID NO: 57761 - DNA, 22 bp, synthetic construct
  misc_feature 1..22: note = chemically synthesized
  source 1..22: mol_type = other DNA
aaacaaaactcacttaaaatat

SEQ ID NO: 57762 - DNA, 22 bp, synthetic construct
  misc_feature 1..22: note = chemically synthesized
  source 1..22: mol_type = other DNA
acttaaaatattcttgcagaac

SEQ ID NO: 57763 - DNA, 22 bp, synthetic construct
  misc_feature 1..22: note = chemically synthesized
  source 1..22: mol_type = other DNA
aaaatattcttgcagaacgcaa

SEQ ID NO: 57764 - DNA, 22 bp, synthetic construct
  misc_feature 1..22: note = chemically synthesized
  source 1..22: mol_type = other DNA
aaatattcttgcagaacgcaaa

SEQ ID NO: 57765 - DNA, 22 bp, synthetic construct
  misc_feature 1..22: note = chemically synthesized
  source 1..22: mol_type = other DNA
ttgcagaacgcaaaggaggggg

SEQ ID NO: 57766 - DNA, 22 bp, synthetic construct
  misc_feature 1..22: note = chemically synthesized
  source 1..22: mol_type = other DNA
gcagaacgcaaaggagggggca

SEQ ID NO: 57767 - DNA, 22 bp, synthetic construct
  misc_feature 1..22: note = chemically synthesized
  source 1..22: mol_type = other DNA
cagaacgcaaaggagggggcag

SEQ ID NO: 57768 - DNA, 22 bp, synthetic construct
  misc_feature 1..22: note = chemically synthesized
  source 1..22: mol_type = other DNA
aatttattttctggtttagtgt

SEQ ID NO: 57769 - DNA, 22 bp, synthetic construct
  misc_feature 1..22: note = chemically synthesized
  source 1..22: mol_type = other DNA
atttattttctggtttagtgtt

SEQ ID NO: 57770 - DNA, 22 bp, synthetic construct
  misc_feature 1..22: note = chemically synthesized
  source 1..22: mol_type = other DNA
attttctggtttagtgttagtg

SEQ ID NO: 57771 - DNA, 22 bp, synthetic construct
  misc_feature 1..22: note = chemically synthesized
  source 1..22: mol_type = other DNA
ttttctggtttagtgttagtgt

SEQ ID NO: 57772 - DNA, 22 bp, synthetic construct
  misc_feature 1..22: note = chemically synthesized
  source 1..22: mol_type = other DNA
tctggtttagtgttagtgtgag

SEQ ID NO: 57773 - DNA, 22 bp, synthetic construct
  misc_feature 1..22: note = chemically synthesized
  source 1..22: mol_type = other DNA
ctggtttagtgttagtgtgaga

SEQ ID NO: 57774 - DNA, 22 bp, synthetic construct
  misc_feature 1..22: note = chemically synthesized
  source 1..22: mol_type = other DNA
tggtttagtgttagtgtgagag

SEQ ID NO: 57775 - DNA, 22 bp, synthetic construct
  misc_feature 1..22: note = chemically synthesized
  source 1..22: mol_type = other DNA
gtttagtgttagtgtgagaggg

SEQ ID NO: 57776 - DNA, 22 bp, synthetic construct
  misc_feature 1..22: note = chemically synthesized
  source 1..22: mol_type = other DNA
agtgttagtgtgagagggtcga

SEQ ID NO: 57777 - DNA, 22 bp, synthetic construct
  misc_feature 1..22: note = chemically synthesized
  source 1..22: mol_type = other DNA
gtgttagtgtgagagggtcgaa

SEQ ID NO: 57778 - DNA, 22 bp, synthetic construct
  misc_feature 1..22: note = chemically synthesized
  source 1..22: mol_type = other DNA
gtgtgagagggtcgaaaagatt

SEQ ID NO: 57779 - DNA, 22 bp, synthetic construct
  misc_feature 1..22: note = chemically synthesized
  source 1..22: mol_type = other DNA
tgtgggtccaacgggatttgtg

SEQ ID NO: 57780 - DNA, 22 bp, synthetic construct
  misc_feature 1..22: note = chemically synthesized
  source 1..22: mol_type = other DNA
tgggtccaacgggatttgtgtc

SEQ ID NO: 57781 - DNA, 22 bp, synthetic construct
  misc_feature 1..22: note = chemically synthesized
  source 1..22: mol_type = other DNA
gtgtctgtgtgtgcaggaccgt

SEQ ID NO: 57782 - DNA, 22 bp, synthetic construct
  misc_feature 1..22: note = chemically synthesized
  source 1..22: mol_type = other DNA
tgtctgtgtgtgcaggaccgtc

SEQ ID NO: 57783 - DNA, 22 bp, synthetic construct
  misc_feature 1..22: note = chemically synthesized
  source 1..22: mol_type = other DNA
tgtgtgcaggaccgtcgggcaa

SEQ ID NO: 57784 - DNA, 22 bp, synthetic construct
  misc_feature 1..22: note = chemically synthesized
  source 1..22: mol_type = other DNA
gaccggagtagggtagccagga

SEQ ID NO: 57785 - DNA, 22 bp, synthetic construct
  misc_feature 1..22: note = chemically synthesized
  source 1..22: mol_type = other DNA
tttttttttttttctctaattt

SEQ ID NO: 57786 - DNA, 22 bp, synthetic construct
  misc_feature 1..22: note = chemically synthesized
  source 1..22: mol_type = other DNA
tttttttttttctctaatttct

SEQ ID NO: 57787 - DNA, 22 bp, synthetic construct
  misc_feature 1..22: note = chemically synthesized
  source 1..22: mol_type = other DNA
ttttttttttctctaatttctg

SEQ ID NO: 57788 - DNA, 22 bp, synthetic construct
  misc_feature 1..22: note = chemically synthesized
  source 1..22: mol_type = other DNA
tttttttttctctaatttctga

SEQ ID NO: 57789 - DNA, 22 bp, synthetic construct
  misc_feature 1..22: note = chemically synthesized
  source 1..22: mol_type = other DNA
ttttttttctctaatttctgag

SEQ ID NO: 57790 - DNA, 22 bp, synthetic construct
  misc_feature 1..22: note = chemically synthesized
  source 1..22: mol_type = other DNA
tttttttctctaatttctgagg

SEQ ID NO: 57791 - DNA, 22 bp, synthetic construct
  misc_feature 1..22: note = chemically synthesized
  source 1..22: mol_type = other DNA
ttttttctctaatttctgaggt

SEQ ID NO: 57792 - DNA, 22 bp, synthetic construct
  misc_feature 1..22: note = chemically synthesized
  source 1..22: mol_type = other DNA
tttttctctaatttctgaggtt

SEQ ID NO: 57793 - DNA, 22 bp, synthetic construct
  misc_feature 1..22: note = chemically synthesized
  source 1..22: mol_type = other DNA
ttttctctaatttctgaggttg

SEQ ID NO: 57794 - DNA, 22 bp, synthetic construct
  misc_feature 1..22: note = chemically synthesized
  source 1..22: mol_type = other DNA
tttctctaatttctgaggttgc

SEQ ID NO: 57795 - DNA, 22 bp, synthetic construct
  misc_feature 1..22: note = chemically synthesized
  source 1..22: mol_type = other DNA
ttctctaatttctgaggttgcc

SEQ ID NO: 57796 - DNA, 22 bp, synthetic construct
  misc_feature 1..22: note = chemically synthesized
  source 1..22: mol_type = other DNA
tctctaatttctgaggttgcca

SEQ ID NO: 57797 - DNA, 22 bp, synthetic construct
  misc_feature 1..22: note = chemically synthesized
  source 1..22: mol_type = other DNA
ctctaatttctgaggttgccag

SEQ ID NO: 57798 - DNA, 22 bp, synthetic construct
  misc_feature 1..22: note = chemically synthesized
  source 1..22: mol_type = other DNA
tctaatttctgaggttgccagg

SEQ ID NO: 57799 - DNA, 22 bp, synthetic construct
  misc_feature 1..22: note = chemically synthesized
  source 1..22: mol_type = other DNA
taatttctgaggttgccaggag

SEQ ID NO: 57800 - DNA, 22 bp, synthetic construct
  misc_feature 1..22: note = chemically synthesized
  source 1..22: mol_type = other DNA
atttctgaggttgccaggaggg

SEQ ID NO: 57801 - DNA, 22 bp, synthetic construct
  misc_feature 1..22: note = chemically synthesized
  source 1..22: mol_type = other DNA
ctgaggttgccaggaggggctt

SEQ ID NO: 57802 - DNA, 22 bp, synthetic construct
  misc_feature 1..22: note = chemically synthesized
  source 1..22: mol_type = other DNA
tgaggttgccaggaggggctta

SEQ ID NO: 57803 - DNA, 22 bp, synthetic construct
  misc_feature 1..22: note = chemically synthesized
  source 1..22: mol_type = other DNA
aggttgccaggaggggcttaag

SEQ ID NO: 57804 - DNA, 22 bp, synthetic construct
  misc_feature 1..22: note = chemically synthesized
  source 1..22: mol_type = other DNA
ccaggaggggcttaagcaaagt

SEQ ID NO: 57805 - DNA, 22 bp, synthetic construct
  misc_feature 1..22: note = chemically synthesized
  source 1..22: mol_type = other DNA
aagcaaagtggtcaagtccatc

SEQ ID NO: 57806 - DNA, 22 bp, synthetic construct
  misc_feature 1..22: note = chemically synthesized
  source 1..22: mol_type = other DNA
agcaaagtggtcaagtccatct

SEQ ID NO: 57807 - DNA, 22 bp, synthetic construct
  misc_feature 1..22: note = chemically synthesized
  source 1..22: mol_type = other DNA
ctccggagaaggtggtaaagaa

SEQ ID NO: 57808 - DNA, 22 bp, synthetic construct
  misc_feature 1..22: note = chemically synthesized
  source 1..22: mol_type = other DNA
cggagaaggtggtaaagaaaag

SEQ ID NO: 57809 - DNA, 22 bp, synthetic construct
  misc_feature 1..22: note = chemically synthesized
  source 1..22: mol_type = other DNA
gtggcaagagggaaggagcaca

SEQ ID NO: 57810 - DNA, 22 bp, synthetic construct
  misc_feature 1..22: note = chemically synthesized
  source 1..22: mol_type = other DNA
tacattgggagcgttactctcc

SEQ ID NO: 57811 - DNA, 22 bp, synthetic construct
  misc_feature 1..22: note = chemically synthesized
  source 1..22: mol_type = other DNA
ggagcgttactctccctggcca

SEQ ID NO: 57812 - DNA, 22 bp, synthetic construct
  misc_feature 1..22: note = chemically synthesized
  source 1..22: mol_type = other DNA
ctctccctggccatggtgtagc

SEQ ID NO: 57813 - DNA, 22 bp, synthetic construct
  misc_feature 1..22: note = chemically synthesized
  source 1..22: mol_type = other DNA
tccctggccatggtgtagccag

SEQ ID NO: 57814 - DNA, 22 bp, synthetic construct
  misc_feature 1..22: note = chemically synthesized
  source 1..22: mol_type = other DNA
cctggccatggtgtagccagac

SEQ ID NO: 57815 - DNA, 22 bp, synthetic construct
  misc_feature 1..22: note = chemically synthesized
  source 1..22: mol_type = other DNA
gccatggtgtagccagactggt

SEQ ID NO: 57816 - DNA, 22 bp, synthetic construct
  misc_feature 1..22: note = chemically synthesized
  source 1..22: mol_type = other DNA
gtttagcagacagaatgataga

SEQ ID NO: 57817 - DNA, 22 bp, synthetic construct
  misc_feature 1..22: note = chemically synthesized
  source 1..22: mol_type = other DNA
agcagacagaatgatagattgt

SEQ ID NO: 57818 - DNA, 22 bp, synthetic construct
  misc_feature 1..22: note = chemically synthesized
  source 1..22: mol_type = other DNA
gcagacagaatgatagattgtt

SEQ ID NO: 57819 - DNA, 22 bp, synthetic construct
  misc_feature 1..22: note = chemically synthesized
  source 1..22: mol_type = other DNA
ttttgtcaggggtcccagggtg

SEQ ID NO: 57820 - DNA, 22 bp, synthetic construct
  misc_feature 1..22: note = chemically synthesized
  source 1..22: mol_type = other DNA
tgtcaggggtcccagggtgcgc

SEQ ID NO: 57821 - DNA, 22 bp, synthetic construct
  misc_feature 1..22: note = chemically synthesized
  source 1..22: mol_type = other DNA
gtcaggggtcccagggtgcgcc

SEQ ID NO: 57822 - DNA, 22 bp, synthetic construct
  misc_feature 1..22: note = chemically synthesized
  source 1..22: mol_type = other DNA
tcaggggtcccagggtgcgccc

SEQ ID NO: 57823 - DNA, 22 bp, synthetic construct
  misc_feature 1..22: note = chemically synthesized
  source 1..22: mol_type = other DNA
aacttgaagcactttgtttatc

SEQ ID NO: 57824 - DNA, 22 bp, synthetic construct
  misc_feature 1..22: note = chemically synthesized
  source 1..22: mol_type = other DNA
gaagcactttgtttatcttgaa

SEQ ID NO: 57825 - DNA, 22 bp, synthetic construct
  misc_feature 1..22: note = chemically synthesized
  source 1..22: mol_type = other DNA
aagcactttgtttatcttgaat

SEQ ID NO: 57826 - DNA, 22 bp, synthetic construct
  misc_feature 1..22: note = chemically synthesized
  source 1..22: mol_type = other DNA
tgtttatcttgaatagaaaggg

SEQ ID NO: 57827 - DNA, 22 bp, synthetic construct
  misc_feature 1..22: note = chemically synthesized
  source 1..22: mol_type = other DNA
gtttatcttgaatagaaaggga

SEQ ID NO: 57828 - DNA, 22 bp, synthetic construct
  misc_feature 1..22: note = chemically synthesized
  source 1..22: mol_type = other DNA
tttatcttgaatagaaagggaa

SEQ ID NO: 57829 - DNA, 22 bp, synthetic construct
  misc_feature 1..22: note = chemically synthesized
  source 1..22: mol_type = other DNA
atcttgaatagaaagggaaaag

SEQ ID NO: 57830 - DNA, 22 bp, synthetic construct
  misc_feature 1..22: note = chemically synthesized
  source 1..22: mol_type = other DNA
tcttgaatagaaagggaaaagc

SEQ ID NO: 57831 - DNA, 22 bp, synthetic construct
  misc_feature 1..22: note = chemically synthesized
  source 1..22: mol_type = other DNA
gaatagaaagggaaaagcgcag

SEQ ID NO: 57832 - DNA, 22 bp, synthetic construct
  misc_feature 1..22: note = chemically synthesized
  source 1..22: mol_type = other DNA
aatagaaagggaaaagcgcaga

SEQ ID NO: 57833 - DNA, 22 bp, synthetic construct
  misc_feature 1..22: note = chemically synthesized
  source 1..22: mol_type = other DNA
gtttttaggagctcgaaagagg

SEQ ID NO: 57834 - DNA, 22 bp, synthetic construct
  misc_feature 1..22: note = chemically synthesized
  source 1..22: mol_type = other DNA
ttaggagctcgaaagaggtagg

SEQ ID NO: 57835 - DNA, 22 bp, synthetic construct
  misc_feature 1..22: note = chemically synthesized
  source 1..22: mol_type = other DNA
taggagctcgaaagaggtagga

SEQ ID NO: 57836 - DNA, 22 bp, synthetic construct
  misc_feature 1..22: note = chemically synthesized
  source 1..22: mol_type = other DNA
aggagctcgaaagaggtaggag

SEQ ID NO: 57837 - DNA, 22 bp, synthetic construct
  misc_feature 1..22: note = chemically synthesized
  source 1..22: mol_type = other DNA
ggagctcgaaagaggtaggaga

SEQ ID NO: 57838 - DNA, 22 bp, synthetic construct
  misc_feature 1..22: note = chemically synthesized
  source 1..22: mol_type = other DNA
gaaagaggtaggagaacagaga

SEQ ID NO: 57839 - DNA, 22 bp, synthetic construct
  misc_feature 1..22: note = chemically synthesized
  source 1..22: mol_type = other DNA
aggaggggtagtgggaggtggg

SEQ ID NO: 57840 - DNA, 22 bp, synthetic construct
  misc_feature 1..22: note = chemically synthesized
  source 1..22: mol_type = other DNA
gttgtggttgtccattaacaga

SEQ ID NO: 57841 - DNA, 22 bp, synthetic construct
  misc_feature 1..22: note = chemically synthesized
  source 1..22: mol_type = other DNA
tggttgtccattaacagatgaa

SEQ ID NO: 57842 - DNA, 22 bp, synthetic construct
  misc_feature 1..22: note = chemically synthesized
  source 1..22: mol_type = other DNA
tccattaacagatgaacttggc

SEQ ID NO: 57843 - DNA, 22 bp, synthetic construct
  misc_feature 1..22: note = chemically synthesized
  source 1..22: mol_type = other DNA
acagatgaacttggccgagggc

SEQ ID NO: 57844 - DNA, 22 bp, synthetic construct
  misc_feature 1..22: note = chemically synthesized
  source 1..22: mol_type = other DNA
ggccgagggccaggctttagat

SEQ ID NO: 57845 - DNA, 22 bp, synthetic construct
  misc_feature 1..22: note = chemically synthesized
  source 1..22: mol_type = other DNA
gccgagggccaggctttagatg

SEQ ID NO: 57846 - DNA, 22 bp, synthetic construct
  misc_feature 1..22: note = chemically synthesized
  source 1..22: mol_type = other DNA
tagatgagagcgtgtcagggcc

SEQ ID NO: 57847 - DNA, 22 bp, synthetic construct
  misc_feature 1..22: note = chemically synthesized
  source 1..22: mol_type = other DNA
agatgagagcgtgtcagggccc

SEQ ID NO: 57848 - DNA, 22 bp, synthetic construct
  misc_feature 1..22: note = chemically synthesized
  source 1..22: mol_type = other DNA
gatgagagcgtgtcagggcccc

SEQ ID NO: 57849 - DNA, 22 bp, synthetic construct
  misc_feature 1..22: note = chemically synthesized
  source 1..22: mol_type = other DNA
ttcagtgttttttttttccttt

SEQ ID NO: 57850 - DNA, 22 bp, synthetic construct
  misc_feature 1..22: note = chemically synthesized
  source 1..22: mol_type = other DNA
tcagtgttttttttttcctttt

SEQ ID NO: 57851 - DNA, 22 bp, synthetic construct
  misc_feature 1..22: note = chemically synthesized
  source 1..22: mol_type = other DNA
cagtgttttttttttccttttt

SEQ ID NO: 57852 - DNA, 22 bp, synthetic construct
  misc_feature 1..22: note = chemically synthesized
  source 1..22: mol_type = other DNA
agtgttttttttttcctttttc

SEQ ID NO: 57853 - DNA, 22 bp, synthetic construct
  misc_feature 1..22: note = chemically synthesized
  source 1..22: mol_type = other DNA
tttttttcctttttctttcttt

SEQ ID NO: 57854 - DNA, 22 bp, synthetic construct
  misc_feature 1..22: note = chemically synthesized
  source 1..22: mol_type = other DNA
ttttttcctttttctttctttc

SEQ ID NO: 57855 - DNA, 22 bp, synthetic construct
  misc_feature 1..22: note = chemically synthesized
  source 1..22: mol_type = other DNA
tttttcctttttctttctttct

SEQ ID NO: 57856 - DNA, 22 bp, synthetic construct
  misc_feature 1..22: note = chemically synthesized
  source 1..22: mol_type = other DNA
ttttcctttttctttctttctt

SEQ ID NO: 57857 - DNA, 22 bp, synthetic construct
  misc_feature 1..22: note = chemically synthesized
  source 1..22: mol_type = other DNA
tttcctttttctttctttcttt

SEQ ID NO: 57858 - DNA, 22 bp, synthetic construct
  misc_feature 1..22: note = chemically synthesized
  source 1..22: mol_type = other DNA
ttcctttttctttctttctttt

SEQ ID NO: 57859 - DNA, 22 bp, synthetic construct
  misc_feature 1..22: note = chemically synthesized
  source 1..22: mol_type = other DNA
tcctttttctttctttcttttt

SEQ ID NO: 57860 - DNA, 22 bp, synthetic construct
  misc_feature 1..22: note = chemically synthesized
  source 1..22: mol_type = other DNA
cctttttctttctttctttttt

SEQ ID NO: 57861 - DNA, 22 bp, synthetic construct
  misc_feature 1..22: note = chemically synthesized
  source 1..22: mol_type = other DNA
ctttttctttctttctttttta

SEQ ID NO: 57862 - DNA, 22 bp, synthetic construct
  misc_feature 1..22: note = chemically synthesized
  source 1..22: mol_type = other DNA
tttctttctttcttttttaaat

SEQ ID NO: 57863 - DNA, 22 bp, synthetic construct
  misc_feature 1..22: note = chemically synthesized
  source 1..22: mol_type = other DNA
ttctttctttcttttttaaata

SEQ ID NO: 57864 - DNA, 22 bp, synthetic construct
  misc_feature 1..22: note = chemically synthesized
  source 1..22: mol_type = other DNA
tctttctttcttttttaaatac

SEQ ID NO: 57865 - DNA, 22 bp, synthetic construct
  misc_feature 1..22: note = chemically synthesized
  source 1..22: mol_type = other DNA
ctttctttcttttttaaatacc

SEQ ID NO: 57866 - DNA, 22 bp, synthetic construct
  misc_feature 1..22: note = chemically synthesized
  source 1..22: mol_type = other DNA
tttctttcttttttaaatacct

SEQ ID NO: 57867 - DNA, 22 bp, synthetic construct
  misc_feature 1..22: note = chemically synthesized
  source 1..22: mol_type = other DNA
tctttcttttttaaatacctgc

SEQ ID NO: 57868 - DNA, 22 bp, synthetic construct
  misc_feature 1..22: note = chemically synthesized
  source 1..22: mol_type = other DNA
ctttcttttttaaatacctgct

SEQ ID NO: 57869 - DNA, 22 bp, synthetic construct
  misc_feature 1..22: note = chemically synthesized
  source 1..22: mol_type = other DNA
tttcttttttaaatacctgctg

SEQ ID NO: 57870 - DNA, 22 bp, synthetic construct
  misc_feature 1..22: note = chemically synthesized
  source 1..22: mol_type = other DNA
tcttttttaaatacctgctgac

SEQ ID NO: 57871 - DNA, 22 bp, synthetic construct
  misc_feature 1..22: note = chemically synthesized
  source 1..22: mol_type = other DNA
cttttttaaatacctgctgact

SEQ ID NO: 57872 - DNA, 22 bp, synthetic construct
  misc_feature 1..22: note = chemically synthesized
  source 1..22: mol_type = other DNA
ttttttaaatacctgctgactg

SEQ ID NO: 57873 - DNA, 22 bp, synthetic construct
  misc_feature 1..22: note = chemically synthesized
  source 1..22: mol_type = other DNA
ttttaaatacctgctgactgta

SEQ ID NO: 57874 - DNA, 22 bp, synthetic construct
  misc_feature 1..22: note = chemically synthesized
  source 1..22: mol_type = other DNA
tttaaatacctgctgactgtac

SEQ ID NO: 57875 - DNA, 22 bp, synthetic construct
  misc_feature 1..22: note = chemically synthesized
  source 1..22: mol_type = other DNA
ttaaatacctgctgactgtaca

SEQ ID NO: 57876 - DNA, 22 bp, synthetic construct
  misc_feature 1..22: note = chemically synthesized
  source 1..22: mol_type = other DNA
taaatacctgctgactgtacat

SEQ ID NO: 57877 - DNA, 22 bp, synthetic construct
  misc_feature 1..22: note = chemically synthesized
  source 1..22: mol_type = other DNA
aaatacctgctgactgtacatc

SEQ ID NO: 57878 - DNA, 22 bp, synthetic construct
  misc_feature 1..22: note = chemically synthesized
  source 1..22: mol_type = other DNA
aatacctgctgactgtacatca

SEQ ID NO: 57879 - DNA, 22 bp, synthetic construct
  misc_feature 1..22: note = chemically synthesized
  source 1..22: mol_type = other DNA
ctgactgtacatcaaatgctcc

SEQ ID NO: 57880 - DNA, 22 bp, synthetic construct
  misc_feature 1..22: note = chemically synthesized
  source 1..22: mol_type = other DNA
actgtacatcaaatgctccctg

SEQ ID NO: 57881 - DNA, 22 bp, synthetic construct
  misc_feature 1..22: note = chemically synthesized
  source 1..22: mol_type = other DNA
tacatcaaatgctccctggtct

SEQ ID NO: 57882 - DNA, 22 bp, synthetic construct
  misc_feature 1..22: note = chemically synthesized
  source 1..22: mol_type = other DNA
cctggtcttttggctaaaggca

SEQ ID NO: 57883 - DNA, 22 bp, synthetic construct
  misc_feature 1..22: note = chemically synthesized
  source 1..22: mol_type = other DNA
gtcttttggctaaaggcaaaaa

SEQ ID NO: 57884 - DNA, 22 bp, synthetic construct
  misc_feature 1..22: note = chemically synthesized
  source 1..22: mol_type = other DNA
ttggctaaaggcaaaaaaataa

SEQ ID NO: 57885 - DNA, 22 bp, synthetic construct
  misc_feature 1..22: note = chemically synthesized
  source 1..22: mol_type = other DNA
tggctaaaggcaaaaaaataaa

SEQ ID NO: 57886 - DNA, 22 bp, synthetic construct
  misc_feature 1..22: note = chemically synthesized
  source 1..22: mol_type = other DNA
ggctaaaggcaaaaaaataaaa

SEQ ID NO: 57887 - DNA, 22 bp, synthetic construct
  misc_feature 1..22: note = chemically synthesized
  source 1..22: mol_type = other DNA
gctaaaggcaaaaaaataaaaa

SEQ ID NO: 57888 - DNA, 22 bp, synthetic construct
  misc_feature 1..22: note = chemically synthesized
  source 1..22: mol_type = other DNA
aaggcaaaaaaataaaaaataa

SEQ ID NO: 57889 - DNA, 22 bp, synthetic construct
  misc_feature 1..22: note = chemically synthesized
  source 1..22: mol_type = other DNA
aattttttccctcctctgaacc

SEQ ID NO: 57890 - DNA, 22 bp, synthetic construct
  misc_feature 1..22: note = chemically synthesized
  source 1..22: mol_type = other DNA
tttccctcctctgaaccagttg

SEQ ID NO: 57891 - DNA, 22 bp, synthetic construct
  misc_feature 1..22: note = chemically synthesized
  source 1..22: mol_type = other DNA
ttccctcctctgaaccagttga

SEQ ID NO: 57892 - DNA, 22 bp, synthetic construct
  misc_feature 1..22: note = chemically synthesized
  source 1..22: mol_type = other DNA
tccctcctctgaaccagttgag

SEQ ID NO: 57893 - DNA, 22 bp, synthetic construct
  misc_feature 1..22: note = chemically synthesized
  source 1..22: mol_type = other DNA
ccctcctctgaaccagttgagg

SEQ ID NO: 57894 - DNA, 22 bp, synthetic construct
  misc_feature 1..22: note = chemically synthesized
  source 1..22: mol_type = other DNA
cctcctctgaaccagttgaggc

SEQ ID NO: 57895 - DNA, 22 bp, synthetic construct
  misc_feature 1..22: note = chemically synthesized
  source 1..22: mol_type = other DNA
ctctgaaccagttgaggccagt

SEQ ID NO: 57896 - DNA, 22 bp, synthetic construct
  misc_feature 1..22: note = chemically synthesized
  source 1..22: mol_type = other DNA
tgaaccagttgaggccagtctt

SEQ ID NO: 57897 - DNA, 22 bp, synthetic construct
  misc_feature 1..22: note = chemically synthesized
  source 1..22: mol_type = other DNA
aaccagttgaggccagtctttt

SEQ ID NO: 57898 - DNA, 22 bp, synthetic construct
  misc_feature 1..22: note = chemically synthesized
  source 1..22: mol_type = other DNA
aggccagtcttttggctacata

SEQ ID NO: 57899 - DNA, 22 bp, synthetic construct
  misc_feature 1..22: note = chemically synthesized
  source 1..22: mol_type = other DNA
ttggctacatatgcgggttcta

SEQ ID NO: 57900 - DNA, 22 bp, synthetic construct
  misc_feature 1..22: note = chemically synthesized
  source 1..22: mol_type = other DNA
tggctacatatgcgggttctat

SEQ ID NO: 57901 - DNA, 22 bp, synthetic construct
  misc_feature 1..22: note = chemically synthesized
  source 1..22: mol_type = other DNA
ggctacatatgcgggttctatc

SEQ ID NO: 57902 - DNA, 22 bp, synthetic construct
  misc_feature 1..22: note = chemically synthesized
  source 1..22: mol_type = other DNA
gctacatatgcgggttctatca

SEQ ID NO: 57903 - DNA, 22 bp, synthetic construct
  misc_feature 1..22: note = chemically synthesized
  source 1..22: mol_type = other DNA
catatgcgggttctatcatctt

SEQ ID NO: 57904 - DNA, 22 bp, synthetic construct
  misc_feature 1..22: note = chemically synthesized
  source 1..22: mol_type = other DNA
tatcatctttcctggcttgccg

SEQ ID NO: 57905 - DNA, 22 bp, synthetic construct
  misc_feature 1..22: note = chemically synthesized
  source 1..22: mol_type = other DNA
tcatctttcctggcttgccgtt

SEQ ID NO: 57906 - DNA, 22 bp, synthetic construct
  misc_feature 1..22: note = chemically synthesized
  source 1..22: mol_type = other DNA
tcctggcttgccgttgggaaaa

SEQ ID NO: 57907 - DNA, 22 bp, synthetic construct
  misc_feature 1..22: note = chemically synthesized
  source 1..22: mol_type = other DNA
cctggcttgccgttgggaaaaa

SEQ ID NO: 57908 - DNA, 22 bp, synthetic construct
  misc_feature 1..22: note = chemically synthesized
  source 1..22: mol_type = other DNA
ctggcttgccgttgggaaaaaa

SEQ ID NO: 57909 - DNA, 22 bp, synthetic construct
  misc_feature 1..22: note = chemically synthesized
  source 1..22: mol_type = other DNA
gcttgccgttgggaaaaaaagt

SEQ ID NO: 57910 - DNA, 22 bp, synthetic construct
  misc_feature 1..22: note = chemically synthesized
  source 1..22: mol_type = other DNA
gccgttgggaaaaaaagttgtg

SEQ ID NO: 57911 - DNA, 22 bp, synthetic construct
  misc_feature 1..22: note = chemically synthesized
  source 1..22: mol_type = other DNA
ccgttgggaaaaaaagttgtga

SEQ ID NO: 57912 - DNA, 22 bp, synthetic construct
  misc_feature 1..22: note = chemically synthesized
  source 1..22: mol_type = other DNA
ggaaaaaaagttgtgataacgc

SEQ ID NO: 57913 - DNA, 22 bp, synthetic construct
  misc_feature 1..22: note = chemically synthesized
  source 1..22: mol_type = other DNA
tgataacgccagtaacccgagg

SEQ ID NO: 57914 - DNA, 22 bp, synthetic construct
  misc_feature 1..22: note = chemically synthesized
  source 1..22: mol_type = other DNA
ggttgtgttcaggcgaccaggt

SEQ ID NO: 57915 - DNA, 22 bp, synthetic construct
  misc_feature 1..22: note = chemically synthesized
  source 1..22: mol_type = other DNA
gttgtgttcaggcgaccaggtg

SEQ ID NO: 57916 - DNA, 22 bp, synthetic construct
  misc_feature 1..22: note = chemically synthesized
  source 1..22: mol_type = other DNA
tgttcaggcgaccaggtgtgag

SEQ ID NO: 57917 - DNA, 22 bp, synthetic construct
  misc_feature 1..22: note = chemically synthesized
  source 1..22: mol_type = other DNA
aggcgaccaggtgtgagagctc

SEQ ID NO: 57918 - DNA, 22 bp, synthetic construct
  misc_feature 1..22: note = chemically synthesized
  source 1..22: mol_type = other DNA
gtggtgcagtggggtggggcgt

SEQ ID NO: 57919 - DNA, 22 bp, synthetic construct
  misc_feature 1..22: note = chemically synthesized
  source 1..22: mol_type = other DNA
cgtgtgcaggtaagaaatcagt

SEQ ID NO: 57920 - DNA, 22 bp, synthetic construct
  misc_feature 1..22: note = chemically synthesized
  source 1..22: mol_type = other DNA
ttttttttttttttttttaaat

SEQ ID NO: 57921 - DNA, 22 bp, synthetic construct
  misc_feature 1..22: note = chemically synthesized
  source 1..22: mol_type = other DNA
ttttttttttttttttaaatgg

SEQ ID NO: 57922 - DNA, 22 bp, synthetic construct
  misc_feature 1..22: note = chemically synthesized
  source 1..22: mol_type = other DNA
tttttttttttttttaaatggc

SEQ ID NO: 57923 - DNA, 22 bp, synthetic construct
  misc_feature 1..22: note = chemically synthesized
  source 1..22: mol_type = other DNA
ttttttttttttttaaatggct

SEQ ID NO: 57924 - DNA, 22 bp, synthetic construct
  misc_feature 1..22: note = chemically synthesized
  source 1..22: mol_type = other DNA
tttttttttttttaaatggctg

SEQ ID NO: 57925 - DNA, 22 bp, synthetic construct
  misc_feature 1..22: note = chemically synthesized
  source 1..22: mol_type = other DNA
ttttttttttttaaatggctga

SEQ ID NO: 57926 - DNA, 22 bp, synthetic construct
  misc_feature 1..22: note = chemically synthesized
  source 1..22: mol_type = other DNA
tttttttttttaaatggctgaa

SEQ ID NO: 57927 - DNA, 22 bp, synthetic construct
  misc_feature 1..22: note = chemically synthesized
  source 1..22: mol_type = other DNA
ttttttttttaaatggctgaag

SEQ ID NO: 57928 - DNA, 22 bp, synthetic construct
  misc_feature 1..22: note = chemically synthesized
  source 1..22: mol_type = other DNA
tttttttttaaatggctgaagt

SEQ ID NO: 57929 - DNA, 22 bp, synthetic construct
  misc_feature 1..22: note = chemically synthesized
  source 1..22: mol_type = other DNA
ttttttttaaatggctgaagtt

SEQ ID NO: 57930 - DNA, 22 bp, synthetic construct
  misc_feature 1..22: note = chemically synthesized
  source 1..22: mol_type = other DNA
tttttttaaatggctgaagttt

SEQ ID NO: 57931 - DNA, 22 bp, synthetic construct
  misc_feature 1..22: note = chemically synthesized
  source 1..22: mol_type = other DNA
ttttttaaatggctgaagttta

SEQ ID NO: 57932 - DNA, 22 bp, synthetic construct
  misc_feature 1..22: note = chemically synthesized
  source 1..22: mol_type = other DNA
tttttaaatggctgaagtttaa

SEQ ID NO: 57933 - DNA, 22 bp, synthetic construct
  misc_feature 1..22: note = chemically synthesized
  source 1..22: mol_type = other DNA
ttttaaatggctgaagtttaac

SEQ ID NO: 57934 - DNA, 22 bp, synthetic construct
  misc_feature 1..22: note = chemically synthesized
  source 1..22: mol_type = other DNA
tttaaatggctgaagtttaact

SEQ ID NO: 57935 - DNA, 22 bp, synthetic construct
  misc_feature 1..22: note = chemically synthesized
  source 1..22: mol_type = other DNA
ttaaatggctgaagtttaactt

SEQ ID NO: 57936 - DNA, 22 bp, synthetic construct
  misc_feature 1..22: note = chemically synthesized
  source 1..22: mol_type = other DNA
taaatggctgaagtttaacttg

SEQ ID NO: 57937 - DNA, 22 bp, synthetic construct
  misc_feature 1..22: note = chemically synthesized
  source 1..22: mol_type = other DNA
aaatggctgaagtttaacttgt

SEQ ID NO: 57938 - DNA, 22 bp, synthetic construct
  misc_feature 1..22: note = chemically synthesized
  source 1..22: mol_type = other DNA
aatggctgaagtttaacttgtt

SEQ ID NO: 57939 - DNA, 22 bp, synthetic construct
  misc_feature 1..22: note = chemically synthesized
  source 1..22: mol_type = other DNA
aagtttaacttgttggaagggc

SEQ ID NO: 57940 - DNA, 22 bp, synthetic construct
  misc_feature 1..22: note = chemically synthesized
  source 1..22: mol_type = other DNA
aacttgttggaagggcctgtga

SEQ ID NO: 57941 - DNA, 22 bp, synthetic construct
  misc_feature 1..22: note = chemically synthesized
  source 1..22: mol_type = other DNA
acttgttggaagggcctgtgaa

SEQ ID NO: 57942 - DNA, 22 bp, synthetic construct
  misc_feature 1..22: note = chemically synthesized
  source 1..22: mol_type = other DNA
gttggaagggcctgtgaattaa

SEQ ID NO: 57943 - DNA, 22 bp, synthetic construct
  misc_feature 1..22: note = chemically synthesized
  source 1..22: mol_type = other DNA
ttggaagggcctgtgaattaag

SEQ ID NO: 57944 - DNA, 22 bp, synthetic construct
  misc_feature 1..22: note = chemically synthesized
  source 1..22: mol_type = other DNA
gaagggcctgtgaattaagctg

SEQ ID NO: 57945 - DNA, 22 bp, synthetic construct
  misc_feature 1..22: note = chemically synthesized
  source 1..22: mol_type = other DNA
tgaattaagctgtcggtggctg

SEQ ID NO: 57946 - DNA, 22 bp, synthetic construct
  misc_feature 1..22: note = chemically synthesized
  source 1..22: mol_type = other DNA
agctgtcggtggctgagaacga

SEQ ID NO: 57947 - DNA, 22 bp, synthetic construct
  misc_feature 1..22: note = chemically synthesized
  source 1..22: mol_type = other DNA
tcggtggctgagaacgataata

SEQ ID NO: 57948 - DNA, 22 bp, synthetic construct
  misc_feature 1..22: note = chemically synthesized
  source 1..22: mol_type = other DNA
agaacgataatatgcaaggaag

SEQ ID NO: 57949 - DNA, 22 bp, synthetic construct
  misc_feature 1..22: note = chemically synthesized
  source 1..22: mol_type = other DNA
aaggaaggctcaagaaaggcca

SEQ ID NO: 57950 - DNA, 22 bp, synthetic construct
  misc_feature 1..22: note = chemically synthesized
  source 1..22: mol_type = other DNA
aagaaaggccaggggtggggaa

SEQ ID NO: 57951 - DNA, 22 bp, synthetic construct
  misc_feature 1..22: note = chemically synthesized
  source 1..22: mol_type = other DNA
ttgttagaggcgcagcctttcc

SEQ ID NO: 57952 - DNA, 22 bp, synthetic construct
  misc_feature 1..22: note = chemically synthesized
  source 1..22: mol_type = other DNA
gttagaggcgcagcctttcctg

SEQ ID NO: 57953 - DNA, 22 bp, synthetic construct
  misc_feature 1..22: note = chemically synthesized
  source 1..22: mol_type = other DNA
ttagaggcgcagcctttcctgg

SEQ ID NO: 57954 - DNA, 22 bp, synthetic construct
  misc_feature 1..22: note = chemically synthesized
  source 1..22: mol_type = other DNA
gaggcgcagcctttcctgggca

SEQ ID NO: 57955 - DNA, 22 bp, synthetic construct
  misc_feature 1..22: note = chemically synthesized
  source 1..22: mol_type = other DNA
tcctgggcaggacccaggaccg

SEQ ID NO: 57956 - DNA, 22 bp, synthetic construct
  misc_feature 1..22: note = chemically synthesized
  source 1..22: mol_type = other DNA
cctgggcaggacccaggaccga

SEQ ID NO: 57957 - DNA, 22 bp, synthetic construct
  misc_feature 1..22: note = chemically synthesized
  source 1..22: mol_type = other DNA
ctgggcaggacccaggaccgat

SEQ ID NO: 57958 - DNA, 22 bp, synthetic construct
  misc_feature 1..22: note = chemically synthesized
  source 1..22: mol_type = other DNA
ggcaggacccaggaccgatggc

SEQ ID NO: 57959 - DNA, 22 bp, synthetic construct
  misc_feature 1..22: note = chemically synthesized
  source 1..22: mol_type = other DNA
gggcttgttttgttctcgattt

SEQ ID NO: 57960 - DNA, 22 bp, synthetic construct
  misc_feature 1..22: note = chemically synthesized
  source 1..22: mol_type = other DNA
ggcttgttttgttctcgatttt

SEQ ID NO: 57961 - DNA, 22 bp, synthetic construct
  misc_feature 1..22: note = chemically synthesized
  source 1..22: mol_type = other DNA
gttttgttctcgattttcttat

SEQ ID NO: 57962 - DNA, 22 bp, synthetic construct
  misc_feature 1..22: note = chemically synthesized
  source 1..22: mol_type = other DNA
ttttgttctcgattttcttatc

SEQ ID NO: 57963 - DNA, 22 bp, synthetic construct
  misc_feature 1..22: note = chemically synthesized
  source 1..22: mol_type = other DNA
tgttctcgattttcttatcttc

SEQ ID NO: 57964 - DNA, 22 bp, synthetic construct
  misc_feature 1..22: note = chemically synthesized
  source 1..22: mol_type = other DNA
gttctcgattttcttatcttct

SEQ ID NO: 57965 - DNA, 22 bp, synthetic construct
  misc_feature 1..22: note = chemically synthesized
  source 1..22: mol_type = other DNA
ttctcgattttcttatcttctt

SEQ ID NO: 57966 - DNA, 22 bp, synthetic construct
  misc_feature 1..22: note = chemically synthesized
  source 1..22: mol_type = other DNA
tcgattttcttatcttcttggc

SEQ ID NO: 57967 - DNA, 22 bp, synthetic construct
  misc_feature 1..22: note = chemically synthesized
  source 1..22: mol_type = other DNA
gattttcttatcttcttggcct

SEQ ID NO: 57968 - DNA, 22 bp, synthetic construct
  misc_feature 1..22: note = chemically synthesized
  source 1..22: mol_type = other DNA
tcttatcttcttggcctcttcc

SEQ ID NO: 57969 - DNA, 22 bp, synthetic construct
  misc_feature 1..22: note = chemically synthesized
  source 1..22: mol_type = other DNA
cttatcttcttggcctcttcct

SEQ ID NO: 57970 - DNA, 22 bp, synthetic construct
  misc_feature 1..22: note = chemically synthesized
  source 1..22: mol_type = other DNA
ttatcttcttggcctcttcctg

SEQ ID NO: 57971 - DNA, 22 bp, synthetic construct
  misc_feature 1..22: note = chemically synthesized
  source 1..22: mol_type = other DNA
atcttcttggcctcttcctgtg

SEQ ID NO: 57972 - DNA, 22 bp, synthetic construct
  misc_feature 1..22: note = chemically synthesized
  source 1..22: mol_type = other DNA
tcttcttggcctcttcctgtgt

SEQ ID NO: 57973 - DNA, 22 bp, synthetic construct
  misc_feature 1..22: note = chemically synthesized
  source 1..22: mol_type = other DNA
cttggcctcttcctgtgttttt

SEQ ID NO: 57974 - DNA, 22 bp, synthetic construct
  misc_feature 1..22: note = chemically synthesized
  source 1..22: mol_type = other DNA
ttggcctcttcctgtgtttttt

SEQ ID NO: 57975 - DNA, 22 bp, synthetic construct
  misc_feature 1..22: note = chemically synthesized
  source 1..22: mol_type = other DNA
ggcctcttcctgtgttttttag

SEQ ID NO: 57976 - DNA, 22 bp, synthetic construct
  misc_feature 1..22: note = chemically synthesized
  source 1..22: mol_type = other DNA
gcctcttcctgtgttttttagt

SEQ ID NO: 57977 - DNA, 22 bp, synthetic construct
  misc_feature 1..22: note = chemically synthesized
  source 1..22: mol_type = other DNA
ttcctgtgttttttagtttatt

SEQ ID NO: 57978 - DNA, 22 bp, synthetic construct
  misc_feature 1..22: note = chemically synthesized
  source 1..22: mol_type = other DNA
cctgtgttttttagtttattgt

SEQ ID NO: 57979 - DNA, 22 bp, synthetic construct
  misc_feature 1..22: note = chemically synthesized
  source 1..22: mol_type = other DNA
ctgtgttttttagtttattgtg

SEQ ID NO: 57980 - DNA, 22 bp, synthetic construct
  misc_feature 1..22: note = chemically synthesized
  source 1..22: mol_type = other DNA
tgttttttagtttattgtgaca

SEQ ID NO: 57981 - DNA, 22 bp, synthetic construct
  misc_feature 1..22: note = chemically synthesized
  source 1..22: mol_type = other DNA
tttagtttattgtgacattatg

SEQ ID NO: 57982 - DNA, 22 bp, synthetic construct
  misc_feature 1..22: note = chemically synthesized
  source 1..22: mol_type = other DNA
ttagtttattgtgacattatgc

SEQ ID NO: 57983 - DNA, 22 bp, synthetic construct
  misc_feature 1..22: note = chemically synthesized
  source 1..22: mol_type = other DNA
tagtttattgtgacattatgca

SEQ ID NO: 57984 - DNA, 22 bp, synthetic construct
  misc_feature 1..22: note = chemically synthesized
  source 1..22: mol_type = other DNA
agtttattgtgacattatgcat

SEQ ID NO: 57985 - DNA, 22 bp, synthetic construct
  misc_feature 1..22: note = chemically synthesized
  source 1..22: mol_type = other DNA
gtttattgtgacattatgcatt

SEQ ID NO: 57986 - DNA, 22 bp, synthetic construct
  misc_feature 1..22: note = chemically synthesized
  source 1..22: mol_type = other DNA
attgtgacattatgcattcata

SEQ ID NO: 57987 - DNA, 22 bp, synthetic construct
  misc_feature 1..22: note = chemically synthesized
  source 1..22: mol_type = other DNA
ttgtgacattatgcattcatat

SEQ ID NO: 57988 - DNA, 22 bp, synthetic construct
  misc_feature 1..22: note = chemically synthesized
  source 1..22: mol_type = other DNA
tgacattatgcattcatatatg

SEQ ID NO: 57989 - DNA, 22 bp, synthetic construct
  misc_feature 1..22: note = chemically synthesized
  source 1..22: mol_type = other DNA
tgcattcatatatgaatgttgg

SEQ ID NO: 57990 - DNA, 22 bp, synthetic construct
  misc_feature 1..22: note = chemically synthesized
  source 1..22: mol_type = other DNA
atatatgaatgttggcaagcag

SEQ ID NO: 57991 - DNA, 22 bp, synthetic construct
  misc_feature 1..22: note = chemically synthesized
  source 1..22: mol_type = other DNA
gcaagcaggagtcatcatccca

SEQ ID NO: 57992 - DNA, 22 bp, synthetic construct
  misc_feature 1..22: note = chemically synthesized
  source 1..22: mol_type = other DNA
cctgacatttttagctctttta

SEQ ID NO: 57993 - DNA, 22 bp, synthetic construct
  misc_feature 1..22: note = chemically synthesized
  source 1..22: mol_type = other DNA
ctgacatttttagctcttttaa

SEQ ID NO: 57994 - DNA, 22 bp, synthetic construct
  misc_feature 1..22: note = chemically synthesized
  source 1..22: mol_type = other DNA
acatttttagctcttttaatgt

SEQ ID NO: 57995 - DNA, 22 bp, synthetic construct
  misc_feature 1..22: note = chemically synthesized
  source 1..22: mol_type = other DNA
ttagctcttttaatgtgcagtc

SEQ ID NO: 57996 - DNA, 22 bp, synthetic construct
  misc_feature 1..22: note = chemically synthesized
  source 1..22: mol_type = other DNA
tagctcttttaatgtgcagtct

SEQ ID NO: 57997 - DNA, 22 bp, synthetic construct
  misc_feature 1..22: note = chemically synthesized
  source 1..22: mol_type = other DNA
agctcttttaatgtgcagtctt

SEQ ID NO: 57998 - DNA, 22 bp, synthetic construct
  misc_feature 1..22: note = chemically synthesized
  source 1..22: mol_type = other DNA
gctcttttaatgtgcagtcttt

SEQ ID NO: 57999 - DNA, 22 bp, synthetic construct
  misc_feature 1..22: note = chemically synthesized
  source 1..22: mol_type = other DNA
ttttaatgtgcagtctttgccc

SEQ ID NO: 58000 - DNA, 22 bp, synthetic construct
  misc_feature 1..22: note = chemically synthesized
  source 1..22: mol_type = other DNA
ttaatgtgcagtctttgccctc

SEQ ID NO: 58001 - DNA, 22 bp, synthetic construct
  misc_feature 1..22: note = chemically synthesized
  source 1..22: mol_type = other DNA
taatgtgcagtctttgccctcc

SEQ ID NO: 58002 - DNA, 22 bp, synthetic construct
  misc_feature 1..22: note = chemically synthesized
  source 1..22: mol_type = other DNA
aatgtgcagtctttgccctcct

SEQ ID NO: 58003 - DNA, 22 bp, synthetic construct
  misc_feature 1..22: note = chemically synthesized
  source 1..22: mol_type = other DNA
atgtgcagtctttgccctcctg

SEQ ID NO: 58004 - DNA, 22 bp, synthetic construct
  misc_feature 1..22: note = chemically synthesized
  source 1..22: mol_type = other DNA
tgccctcctgccacaagtggcg

SEQ ID NO: 58005 - DNA, 22 bp, synthetic construct
  misc_feature 1..22: note = chemically synthesized
  source 1..22: mol_type = other DNA
gccctcctgccacaagtggcga

SEQ ID NO: 58006 - DNA, 22 bp, synthetic construct
  misc_feature 1..22: note = chemically synthesized
  source 1..22: mol_type = other DNA
ccctcctgccacaagtggcgaa

SEQ ID NO: 58007 - DNA, 22 bp, synthetic construct
  misc_feature 1..22: note = chemically synthesized
  source 1..22: mol_type = other DNA
ctgccacaagtggcgaagtaat

SEQ ID NO: 58008 - DNA, 22 bp, synthetic construct
  misc_feature 1..22: note = chemically synthesized
  source 1..22: mol_type = other DNA
ccacaagtggcgaagtaattga

SEQ ID NO: 58009 - DNA, 22 bp, synthetic construct
  misc_feature 1..22: note = chemically synthesized
  source 1..22: mol_type = other DNA
aatttccctgttactaactggc

SEQ ID NO: 58010 - DNA, 22 bp, synthetic construct
  misc_feature 1..22: note = chemically synthesized
  source 1..22: mol_type = other DNA
ccctgttactaactggcaggag

SEQ ID NO: 58011 - DNA, 22 bp, synthetic construct
  misc_feature 1..22: note = chemically synthesized
  source 1..22: mol_type = other DNA
cctgttactaactggcaggagg

SEQ ID NO: 58012 - DNA, 22 bp, synthetic construct
  misc_feature 1..22: note = chemically synthesized
  source 1..22: mol_type = other DNA
ttactaactggcaggaggcatg

SEQ ID NO: 58013 - DNA, 22 bp, synthetic construct
  misc_feature 1..22: note = chemically synthesized
  source 1..22: mol_type = other DNA
ctaactggcaggaggcatgttc

SEQ ID NO: 58014 - DNA, 22 bp, synthetic construct
  misc_feature 1..22: note = chemically synthesized
  source 1..22: mol_type = other DNA
actggcaggaggcatgttctag

SEQ ID NO: 58015 - DNA, 22 bp, synthetic construct
  misc_feature 1..22: note = chemically synthesized
  source 1..22: mol_type = other DNA
gcaggaggcatgttctagttcc

SEQ ID NO: 58016 - DNA, 22 bp, synthetic construct
  misc_feature 1..22: note = chemically synthesized
  source 1..22: mol_type = other DNA
tagttcccaccagaggagctgc

SEQ ID NO: 58017 - DNA, 22 bp, synthetic construct
  misc_feature 1..22: note = chemically synthesized
  source 1..22: mol_type = other DNA
gttcccaccagaggagctgctg

SEQ ID NO: 58018 - DNA, 22 bp, synthetic construct
  misc_feature 1..22: note = chemically synthesized
  source 1..22: mol_type = other DNA
ccaccagaggagctgctggggc

SEQ ID NO: 58019 - DNA, 22 bp, synthetic construct
  misc_feature 1..22: note = chemically synthesized
  source 1..22: mol_type = other DNA
ctggggctaaagctgggttcat

SEQ ID NO: 58020 - DNA, 22 bp, synthetic construct
  misc_feature 1..22: note = chemically synthesized
  source 1..22: mol_type = other DNA
gggctaaagctgggttcataga

SEQ ID NO: 58021 - DNA, 22 bp, synthetic construct
  misc_feature 1..22: note = chemically synthesized
  source 1..22: mol_type = other DNA
aagctgggttcatagaatccca

SEQ ID NO: 58022 - DNA, 22 bp, synthetic construct
  misc_feature 1..22: note = chemically synthesized
  source 1..22: mol_type = other DNA
ggttcatagaatcccacctagg

SEQ ID NO: 58023 - DNA, 22 bp, synthetic construct
  misc_feature 1..22: note = chemically synthesized
  source 1..22: mol_type = other DNA
atagaatcccacctaggggaca

SEQ ID NO: 58024 - DNA, 22 bp, synthetic construct
  misc_feature 1..22: note = chemically synthesized
  source 1..22: mol_type = other DNA
ggggacaccagggctttcaagt

SEQ ID NO: 58025 - DNA, 22 bp, synthetic construct
  misc_feature 1..22: note = chemically synthesized
  source 1..22: mol_type = other DNA
tcaagtggtttggggacctgtc

SEQ ID NO: 58026 - DNA, 22 bp, synthetic construct
  misc_feature 1..22: note = chemically synthesized
  source 1..22: mol_type = other DNA
caagtggtttggggacctgtct

SEQ ID NO: 58027 - DNA, 22 bp, synthetic construct
  misc_feature 1..22: note = chemically synthesized
  source 1..22: mol_type = other DNA
aagtggtttggggacctgtctg

SEQ ID NO: 58028 - DNA, 22 bp, synthetic construct
  misc_feature 1..22: note = chemically synthesized
  source 1..22: mol_type = other DNA
ggggacctgtctgaaatgatat

SEQ ID NO: 58029 - DNA, 22 bp, synthetic construct
  misc_feature 1..22: note = chemically synthesized
  source 1..22: mol_type = other DNA
gggacctgtctgaaatgatatt

SEQ ID NO: 58030 - DNA, 22 bp, synthetic construct
  misc_feature 1..22: note = chemically synthesized
  source 1..22: mol_type = other DNA
tctgaaatgatattcacacaat

SEQ ID NO: 58031 - DNA, 22 bp, synthetic construct
  misc_feature 1..22: note = chemically synthesized
  source 1..22: mol_type = other DNA
aaatgatattcacacaataaaa

SEQ ID NO: 58032 - DNA, 22 bp, synthetic construct
  misc_feature 1..22: note = chemically synthesized
  source 1..22: mol_type = other DNA
acacaataaaaaatatttttcc

SEQ ID NO: 58033 - DNA, 22 bp, synthetic construct
  misc_feature 1..22: note = chemically synthesized
  source 1..22: mol_type = other DNA
ttcccatcatagacttgaaaag

SEQ ID NO: 58034 - DNA, 22 bp, synthetic construct
  misc_feature 1..22: note = chemically synthesized
  source 1..22: mol_type = other DNA
tcccatcatagacttgaaaagg

SEQ ID NO: 58035 - DNA, 22 bp, synthetic construct
  misc_feature 1..22: note = chemically synthesized
  source 1..22: mol_type = other DNA
cccatcatagacttgaaaaggc

SEQ ID NO: 58036 - DNA, 22 bp, synthetic construct
  misc_feature 1..22: note = chemically synthesized
  source 1..22: mol_type = other DNA
ccatcatagacttgaaaaggca

SEQ ID NO: 58037 - DNA, 22 bp, synthetic construct
  misc_feature 1..22: note = chemically synthesized
  source 1..22: mol_type = other DNA
gaaaaggcaccattgtgcacat

SEQ ID NO: 58038 - DNA, 22 bp, synthetic construct
  misc_feature 1..22: note = chemically synthesized
  source 1..22: mol_type = other DNA
aaaaggcaccattgtgcacatc

SEQ ID NO: 58039 - DNA, 22 bp, synthetic construct
  misc_feature 1..22: note = chemically synthesized
  source 1..22: mol_type = other DNA
tgcacatctatataaaatgtga

SEQ ID NO: 58040 - DNA, 22 bp, synthetic construct
  misc_feature 1..22: note = chemically synthesized
  source 1..22: mol_type = other DNA
tataaaatgtgataaaatcaca

SEQ ID NO: 58041 - DNA, 22 bp, synthetic construct
  misc_feature 1..22: note = chemically synthesized
  source 1..22: mol_type = other DNA
acttcccctggctaggcctcat

SEQ ID NO: 58042 - DNA, 22 bp, synthetic construct
  misc_feature 1..22: note = chemically synthesized
  source 1..22: mol_type = other DNA
cttcccctggctaggcctcata

SEQ ID NO: 58043 - DNA, 22 bp, synthetic construct
  misc_feature 1..22: note = chemically synthesized
  source 1..22: mol_type = other DNA
cccctggctaggcctcataagg

SEQ ID NO: 58044 - DNA, 22 bp, synthetic construct
  misc_feature 1..22: note = chemically synthesized
  source 1..22: mol_type = other DNA
ccctggctaggcctcataaggg

SEQ ID NO: 58045 - DNA, 22 bp, synthetic construct
  misc_feature 1..22: note = chemically synthesized
  source 1..22: mol_type = other DNA
gctaggcctcataagggaggca

SEQ ID NO: 58046 - DNA, 22 bp, synthetic construct
  misc_feature 1..22: note = chemically synthesized
  source 1..22: mol_type = other DNA
ggcctcataagggaggcaggat

SEQ ID NO: 58047 - DNA, 22 bp, synthetic construct
  misc_feature 1..22: note = chemically synthesized
  source 1..22: mol_type = other DNA
ataagggaggcaggatttcctt

SEQ ID NO: 58048 - DNA, 22 bp, synthetic construct
  misc_feature 1..22: note = chemically synthesized
  source 1..22: mol_type = other DNA
ccttctccttttctagtagcaa

SEQ ID NO: 58049 - DNA, 22 bp, synthetic construct
  misc_feature 1..22: note = chemically synthesized
  source 1..22: mol_type = other DNA
cttctccttttctagtagcaaa

SEQ ID NO: 58050 - DNA, 22 bp, synthetic construct
  misc_feature 1..22: note = chemically synthesized
  source 1..22: mol_type = other DNA
ctccttttctagtagcaaataa

SEQ ID NO: 58051 - DNA, 22 bp, synthetic construct
  misc_feature 1..22: note = chemically synthesized
  source 1..22: mol_type = other DNA
tccttttctagtagcaaataaa

SEQ ID NO: 58052 - DNA, 22 bp, synthetic construct
  misc_feature 1..22: note = chemically synthesized
  source 1..22: mol_type = other DNA
cttttctagtagcaaataaaaa

SEQ ID NO: 58053 - DNA, 22 bp, synthetic construct
  misc_feature 1..22: note = chemically synthesized
  source 1..22: mol_type = other DNA
ttctagtagcaaataaaaactg

SEQ ID NO: 58054 - DNA, 22 bp, synthetic construct
  misc_feature 1..22: note = chemically synthesized
  source 1..22: mol_type = other DNA
tctagtagcaaataaaaactgg

SEQ ID NO: 58055 - DNA, 22 bp, synthetic construct
  misc_feature 1..22: note = chemically synthesized
  source 1..22: mol_type = other DNA
ctagtagcaaataaaaactggg

SEQ ID NO: 58056 - DNA, 22 bp, synthetic construct
  misc_feature 1..22: note = chemically synthesized
  source 1..22: mol_type = other DNA
tagtagcaaataaaaactggga

SEQ ID NO: 58057 - DNA, 22 bp, synthetic construct
  misc_feature 1..22: note = chemically synthesized
  source 1..22: mol_type = other DNA
gtagcaaataaaaactgggaaa

SEQ ID NO: 58058 - DNA, 22 bp, synthetic construct
  misc_feature 1..22: note = chemically synthesized
  source 1..22: mol_type = other DNA
ggaaaatttgggggcctctggg

SEQ ID NO: 58059 - DNA, 22 bp, synthetic construct
  misc_feature 1..22: note = chemically synthesized
  source 1..22: mol_type = other DNA
gggggcctctgggtttatccca

SEQ ID NO: 58060 - DNA, 22 bp, synthetic construct
  misc_feature 1..22: note = chemically synthesized
  source 1..22: mol_type = other DNA
ggggcctctgggtttatcccat

SEQ ID NO: 58061 - DNA, 22 bp, synthetic construct
  misc_feature 1..22: note = chemically synthesized
  source 1..22: mol_type = other DNA
tgggtttatcccatggatacct

SEQ ID NO: 58062 - DNA, 22 bp, synthetic construct
  misc_feature 1..22: note = chemically synthesized
  source 1..22: mol_type = other DNA
ggtttatcccatggatacctgc

SEQ ID NO: 58063 - DNA, 22 bp, synthetic construct
  misc_feature 1..22: note = chemically synthesized
  source 1..22: mol_type = other DNA
atcccatggatacctgcccccg

SEQ ID NO: 58064 - DNA, 22 bp, synthetic construct
  misc_feature 1..22: note = chemically synthesized
  source 1..22: mol_type = other DNA
tcccatggatacctgcccccgc

SEQ ID NO: 58065 - DNA, 22 bp, synthetic construct
  misc_feature 1..22: note = chemically synthesized
  source 1..22: mol_type = other DNA
cccccgctcccgcccgccaact

SEQ ID NO: 58066 - DNA, 22 bp, synthetic construct
  misc_feature 1..22: note = chemically synthesized
  source 1..22: mol_type = other DNA
ccgcccgccaactcagccaagc

SEQ ID NO: 58067 - DNA, 22 bp, synthetic construct
  misc_feature 1..22: note = chemically synthesized
  source 1..22: mol_type = other DNA
agccaagcccttagaggcagtc

SEQ ID NO: 58068 - DNA, 22 bp, synthetic construct
  misc_feature 1..22: note = chemically synthesized
  source 1..22: mol_type = other DNA
agaggcagtcttctctcccacc

SEQ ID NO: 58069 - DNA, 22 bp, synthetic construct
  misc_feature 1..22: note = chemically synthesized
  source 1..22: mol_type = other DNA
gaggcagtcttctctcccacct

SEQ ID NO: 58070 - DNA, 22 bp, synthetic construct
  misc_feature 1..22: note = chemically synthesized
  source 1..22: mol_type = other DNA
ctctcccacctagatgtctttg

SEQ ID NO: 58071 - DNA, 22 bp, synthetic construct
  misc_feature 1..22: note = chemically synthesized
  source 1..22: mol_type = other DNA
tctcccacctagatgtctttgt

SEQ ID NO: 58072 - DNA, 22 bp, synthetic construct
  misc_feature 1..22: note = chemically synthesized
  source 1..22: mol_type = other DNA
tcccacctagatgtctttgtaa

SEQ ID NO: 58073 - DNA, 22 bp, synthetic construct
  misc_feature 1..22: note = chemically synthesized
  source 1..22: mol_type = other DNA
ccacctagatgtctttgtaacc

SEQ ID NO: 58074 - DNA, 22 bp, synthetic construct
  misc_feature 1..22: note = chemically synthesized
  source 1..22: mol_type = other DNA
gatgtctttgtaacctgagctg

SEQ ID NO: 58075 - DNA, 22 bp, synthetic construct
  misc_feature 1..22: note = chemically synthesized
  source 1..22: mol_type = other DNA
tgtaacctgagctggtaagaaa

SEQ ID NO: 58076 - DNA, 22 bp, synthetic construct
  misc_feature 1..22: note = chemically synthesized
  source 1..22: mol_type = other DNA
gtaacctgagctggtaagaaag

SEQ ID NO: 58077 - DNA, 22 bp, synthetic construct
  misc_feature 1..22: note = chemically synthesized
  source 1..22: mol_type = other DNA
taacctgagctggtaagaaagg

SEQ ID NO: 58078 - DNA, 22 bp, synthetic construct
  misc_feature 1..22: note = chemically synthesized
  source 1..22: mol_type = other DNA
agctggtaagaaagggaggagg

SEQ ID NO: 58079 - DNA, 22 bp, synthetic construct
  misc_feature 1..22: note = chemically synthesized
  source 1..22: mol_type = other DNA
gtaagaaagggaggagggacag

SEQ ID NO: 58080 - DNA, 22 bp, synthetic construct
  misc_feature 1..22: note = chemically synthesized
  source 1..22: mol_type = other DNA
gacatatgatgtatcttctttc

SEQ ID NO: 58081 - DNA, 22 bp, synthetic construct
  misc_feature 1..22: note = chemically synthesized
  source 1..22: mol_type = other DNA
acatatgatgtatcttctttct

SEQ ID NO: 58082 - DNA, 22 bp, synthetic construct
  misc_feature 1..22: note = chemically synthesized
  source 1..22: mol_type = other DNA
ctttcttttcttcttctctttg

SEQ ID NO: 58083 - DNA, 22 bp, synthetic construct
  misc_feature 1..22: note = chemically synthesized
  source 1..22: mol_type = other DNA
tttcttttcttcttctctttga

SEQ ID NO: 58084 - DNA, 22 bp, synthetic construct
  misc_feature 1..22: note = chemically synthesized
  source 1..22: mol_type = other DNA
tcttttcttcttctctttgatt

SEQ ID NO: 58085 - DNA, 22 bp, synthetic construct
  misc_feature 1..22: note = chemically synthesized
  source 1..22: mol_type = other DNA
cttttcttcttctctttgatta

SEQ ID NO: 58086 - DNA, 22 bp, synthetic construct
  misc_feature 1..22: note = chemically synthesized
  source 1..22: mol_type = other DNA
ttttcttcttctctttgattac

SEQ ID NO: 58087 - DNA, 22 bp, synthetic construct
  misc_feature 1..22: note = chemically synthesized
  source 1..22: mol_type = other DNA
ttcttcttctctttgattacac

SEQ ID NO: 58088 - DNA, 22 bp, synthetic construct
  misc_feature 1..22: note = chemically synthesized
  source 1..22: mol_type = other DNA
tcttcttctctttgattacacg

SEQ ID NO: 58089 - DNA, 22 bp, synthetic construct
  misc_feature 1..22: note = chemically synthesized
  source 1..22: mol_type = other DNA
cttcttctctttgattacacga

SEQ ID NO: 58090 - DNA, 22 bp, synthetic construct
  misc_feature 1..22: note = chemically synthesized
  source 1..22: mol_type = other DNA
ttcttctctttgattacacgaa

SEQ ID NO: 58091 - DNA, 22 bp, synthetic construct
  misc_feature 1..22: note = chemically synthesized
  source 1..22: mol_type = other DNA
cttctctttgattacacgaaat

SEQ ID NO: 58092 - DNA, 22 bp, synthetic construct
  misc_feature 1..22: note = chemically synthesized
  source 1..22: mol_type = other DNA
ttctctttgattacacgaaata

SEQ ID NO: 58093 - DNA, 22 bp, synthetic construct
  misc_feature 1..22: note = chemically synthesized
  source 1..22: mol_type = other DNA
ctctttgattacacgaaataaa

SEQ ID NO: 58094 - DNA, 22 bp, synthetic construct
  misc_feature 1..22: note = chemically synthesized
  source 1..22: mol_type = other DNA
tctttgattacacgaaataaaa

SEQ ID NO: 58095 - DNA, 22 bp, synthetic construct
  misc_feature 1..22: note = chemically synthesized
  source 1..22: mol_type = other DNA
tttgattacacgaaataaaatg

SEQ ID NO: 58096 - DNA, 22 bp, synthetic construct
  misc_feature 1..22: note = chemically synthesized
  source 1..22: mol_type = other DNA
tgattacacgaaataaaatggt

SEQ ID NO: 58097 - DNA, 22 bp, synthetic construct
  misc_feature 1..22: note = chemically synthesized
  source 1..22: mol_type = other DNA
gattacacgaaataaaatggtt

SEQ ID NO: 58098 - DNA, 22 bp, synthetic construct
  misc_feature 1..22: note = chemically synthesized
  source 1..22: mol_type = other DNA
attacacgaaataaaatggttt

SEQ ID NO: 58099 - DNA, 22 bp, synthetic construct
  misc_feature 1..22: note = chemically synthesized
  source 1..22: mol_type = other DNA
cacgaaataaaatggtttaggc

SEQ ID NO: 58100 - DNA, 22 bp, synthetic construct
  misc_feature 1..22: note = chemically synthesized
  source 1..22: mol_type = other DNA
aggctgagggtaaagaagtaat

SEQ ID NO: 58101 - DNA, 22 bp, synthetic construct
  misc_feature 1..22: note = chemically synthesized
  source 1..22: mol_type = other DNA
ggctgagggtaaagaagtaata

SEQ ID NO: 58102 - DNA, 22 bp, synthetic construct
  misc_feature 1..22: note = chemically synthesized
  source 1..22: mol_type = other DNA
agggtaaagaagtaataccatt

SEQ ID NO: 58103 - DNA, 22 bp, synthetic construct
  misc_feature 1..22: note = chemically synthesized
  source 1..22: mol_type = other DNA
ctagttgtgcaaccttgggcag

SEQ ID NO: 58104 - DNA, 22 bp, synthetic construct
  misc_feature 1..22: note = chemically synthesized
  source 1..22: mol_type = other DNA
tagttgtgcaaccttgggcaga

SEQ ID NO: 58105 - DNA, 22 bp, synthetic construct
  misc_feature 1..22: note = chemically synthesized
  source 1..22: mol_type = other DNA
gttgtgcaaccttgggcagatt

SEQ ID NO: 58106 - DNA, 22 bp, synthetic construct
  misc_feature 1..22: note = chemically synthesized
  source 1..22: mol_type = other DNA
tgcaaccttgggcagatttcat

SEQ ID NO: 58107 - DNA, 22 bp, synthetic construct
  misc_feature 1..22: note = chemically synthesized
  source 1..22: mol_type = other DNA
gggcagatttcattccctaagc

SEQ ID NO: 58108 - DNA, 22 bp, synthetic construct
  misc_feature 1..22: note = chemically synthesized
  source 1..22: mol_type = other DNA
ggcagatttcattccctaagcc

SEQ ID NO: 58109 - DNA, 22 bp, synthetic construct
  misc_feature 1..22: note = chemically synthesized
  source 1..22: mol_type = other DNA
cattccctaagcctccgcttcc

SEQ ID NO: 58110 - DNA, 22 bp, synthetic construct
  misc_feature 1..22: note = chemically synthesized
  source 1..22: mol_type = other DNA
attccctaagcctccgcttcct

SEQ ID NO: 58111 - DNA, 22 bp, synthetic construct
  misc_feature 1..22: note = chemically synthesized
  source 1..22: mol_type = other DNA
cctaagcctccgcttcctcaat

SEQ ID NO: 58112 - DNA, 22 bp, synthetic construct
  misc_feature 1..22: note = chemically synthesized
  source 1..22: mol_type = other DNA
agcctccgcttcctcaatctgt

SEQ ID NO: 58113 - DNA, 22 bp, synthetic construct
  misc_feature 1..22: note = chemically synthesized
  source 1..22: mol_type = other DNA
cgcttcctcaatctgtaaagtg

SEQ ID NO: 58114 - DNA, 22 bp, synthetic construct
  misc_feature 1..22: note = chemically synthesized
  source 1..22: mol_type = other DNA
cctcaatctgtaaagtggggag

SEQ ID NO: 58115 - DNA, 22 bp, synthetic construct
  misc_feature 1..22: note = chemically synthesized
  source 1..22: mol_type = other DNA
ctcaatctgtaaagtggggaga

SEQ ID NO: 58116 - DNA, 22 bp, synthetic construct
  misc_feature 1..22: note = chemically synthesized
  source 1..22: mol_type = other DNA
aatctgtaaagtggggagaatc

SEQ ID NO: 58117 - DNA, 22 bp, synthetic construct
  misc_feature 1..22: note = chemically synthesized
  source 1..22: mol_type = other DNA
taaagtggggagaatcacgggg

SEQ ID NO: 58118 - DNA, 22 bp, synthetic construct
  misc_feature 1..22: note = chemically synthesized
  source 1..22: mol_type = other DNA
gcctcatagggcctttgagcat

SEQ ID NO: 58119 - DNA, 22 bp, synthetic construct
  misc_feature 1..22: note = chemically synthesized
  source 1..22: mol_type = other DNA
cctcatagggcctttgagcatc

SEQ ID NO: 58120 - DNA, 22 bp, synthetic construct
  misc_feature 1..22: note = chemically synthesized
  source 1..22: mol_type = other DNA
atagggcctttgagcatcctat

SEQ ID NO: 58121 - DNA, 22 bp, synthetic construct
  misc_feature 1..22: note = chemically synthesized
  source 1..22: mol_type = other DNA
tgagcatcctatgagagcatgt

SEQ ID NO: 58122 - DNA, 22 bp, synthetic construct
  misc_feature 1..22: note = chemically synthesized
  source 1..22: mol_type = other DNA
gagcatcctatgagagcatgtg

SEQ ID NO: 58123 - DNA, 22 bp, synthetic construct
  misc_feature 1..22: note = chemically synthesized
  source 1..22: mol_type = other DNA
agcatcctatgagagcatgtgg

SEQ ID NO: 58124 - DNA, 22 bp, synthetic construct
  misc_feature 1..22: note = chemically synthesized
  source 1..22: mol_type = other DNA
tgagagcatgtgggggcgctgg

SEQ ID NO: 58125 - DNA, 22 bp, synthetic construct
  misc_feature 1..22: note = chemically synthesized
  source 1..22: mol_type = other DNA
ggctcagtgctgggcacatggt

SEQ ID NO: 58126 - DNA, 22 bp, synthetic construct
  misc_feature 1..22: note = chemically synthesized
  source 1..22: mol_type = other DNA
agtgctgggcacatggtaaaac

SEQ ID NO: 58127 - DNA, 22 bp, synthetic construct
  misc_feature 1..22: note = chemically synthesized
  source 1..22: mol_type = other DNA
ggcacatggtaaaacatgtcac

SEQ ID NO: 58128 - DNA, 22 bp, synthetic construct
  misc_feature 1..22: note = chemically synthesized
  source 1..22: mol_type = other DNA
attactattacggttatgactc

SEQ ID NO: 58129 - DNA, 22 bp, synthetic construct
  misc_feature 1..22: note = chemically synthesized
  source 1..22: mol_type = other DNA
ctattacggttatgactcatgg

SEQ ID NO: 58130 - DNA, 22 bp, synthetic construct
  misc_feature 1..22: note = chemically synthesized
  source 1..22: mol_type = other DNA
ttacggttatgactcatggctt

SEQ ID NO: 58131 - DNA, 22 bp, synthetic construct
  misc_feature 1..22: note = chemically synthesized
  source 1..22: mol_type = other DNA
cggttatgactcatggcttgga

SEQ ID NO: 58132 - DNA, 22 bp, synthetic construct
  misc_feature 1..22: note = chemically synthesized
  source 1..22: mol_type = other DNA
tgactcatggcttggaactgtg

SEQ ID NO: 58133 - DNA, 22 bp, synthetic construct
  misc_feature 1..22: note = chemically synthesized
  source 1..22: mol_type = other DNA
atggcttggaactgtgtgctcc

SEQ ID NO: 58134 - DNA, 22 bp, synthetic construct
  misc_feature 1..22: note = chemically synthesized
  source 1..22: mol_type = other DNA
ggaactgtgtgctcctggggtc

SEQ ID NO: 58135 - DNA, 22 bp, synthetic construct
  misc_feature 1..22: note = chemically synthesized
  source 1..22: mol_type = other DNA
gaactgtgtgctcctggggtct

SEQ ID NO: 58136 - DNA, 22 bp, synthetic construct
  misc_feature 1..22: note = chemically synthesized
  source 1..22: mol_type = other DNA
tgtgctcctggggtctcaaagt

SEQ ID NO: 58137 - DNA, 22 bp, synthetic construct
  misc_feature 1..22: note = chemically synthesized
  source 1..22: mol_type = other DNA
ctggggtctcaaagtagttccc

SEQ ID NO: 58138 - DNA, 22 bp, synthetic construct
  misc_feature 1..22: note = chemically synthesized
  source 1..22: mol_type = other DNA
gggtctcaaagtagttccccca

SEQ ID NO: 58139 - DNA, 22 bp, synthetic construct
  misc_feature 1..22: note = chemically synthesized
  source 1..22: mol_type = other DNA
aaagtagttcccccattatggg

SEQ ID NO: 58140 - DNA, 22 bp, synthetic construct
  misc_feature 1..22: note = chemically synthesized
  source 1..22: mol_type = other DNA
ccccattatggggtgagcaggt

SEQ ID NO: 58141 - DNA, 22 bp, synthetic construct
  misc_feature 1..22: note = chemically synthesized
  source 1..22: mol_type = other DNA
tggggtgagcaggttgggatga

SEQ ID NO: 58142 - DNA, 22 bp, synthetic construct
  misc_feature 1..22: note = chemically synthesized
  source 1..22: mol_type = other DNA
ggatgagagaagagcagggcag

SEQ ID NO: 58143 - DNA, 22 bp, synthetic construct
  misc_feature 1..22: note = chemically synthesized
  source 1..22: mol_type = other DNA
aagagctcagggtctcattatg

SEQ ID NO: 58144 - DNA, 22 bp, synthetic construct
  misc_feature 1..22: note = chemically synthesized
  source 1..22: mol_type = other DNA
agggtctcattatgtttctggt

SEQ ID NO: 58145 - DNA, 22 bp, synthetic construct
  misc_feature 1..22: note = chemically synthesized
  source 1..22: mol_type = other DNA
attatgtttctggtggcagctc

SEQ ID NO: 58146 - DNA, 22 bp, synthetic construct
  misc_feature 1..22: note = chemically synthesized
  source 1..22: mol_type = other DNA
tgtttctggtggcagctccctc

SEQ ID NO: 58147 - DNA, 22 bp, synthetic construct
  misc_feature 1..22: note = chemically synthesized
  source 1..22: mol_type = other DNA
ctggtggcagctccctcgtggg

SEQ ID NO: 58148 - DNA, 22 bp, synthetic construct
  misc_feature 1..22: note = chemically synthesized
  source 1..22: mol_type = other DNA
tggtggcagctccctcgtgggt

SEQ ID NO: 58149 - DNA, 22 bp, synthetic construct
  misc_feature 1..22: note = chemically synthesized
  source 1..22: mol_type = other DNA
gtggcagctccctcgtgggtgg

SEQ ID NO: 58150 - DNA, 22 bp, synthetic construct
  misc_feature 1..22: note = chemically synthesized
  source 1..22: mol_type = other DNA
cctcgtgggtgggagtcccctc

SEQ ID NO: 58151 - DNA, 22 bp, synthetic construct
  misc_feature 1..22: note = chemically synthesized
  source 1..22: mol_type = other DNA
gtgggtgggagtcccctctccc

SEQ ID NO: 58152 - DNA, 22 bp, synthetic construct
  misc_feature 1..22: note = chemically synthesized
  source 1..22: mol_type = other DNA
tccccatagacgtgtgttgcct

SEQ ID NO: 58153 - DNA, 22 bp, synthetic construct
  misc_feature 1..22: note = chemically synthesized
  source 1..22: mol_type = other DNA
cccatagacgtgtgttgcctta

SEQ ID NO: 58154 - DNA, 22 bp, synthetic construct
  misc_feature 1..22: note = chemically synthesized
  source 1..22: mol_type = other DNA
ccttacgagaggcttgtgcctg

SEQ ID NO: 58155 - DNA, 22 bp, synthetic construct
  misc_feature 1..22: note = chemically synthesized
  source 1..22: mol_type = other DNA
acgagaggcttgtgcctgcctg

SEQ ID NO: 58156 - DNA, 22 bp, synthetic construct
  misc_feature 1..22: note = chemically synthesized
  source 1..22: mol_type = other DNA
cgagaggcttgtgcctgcctgg

SEQ ID NO: 58157 - DNA, 22 bp, synthetic construct
  misc_feature 1..22: note = chemically synthesized
  source 1..22: mol_type = other DNA
gtgcctgcctgggtgtgtgaca

SEQ ID NO: 58158 - DNA, 22 bp, synthetic construct
  misc_feature 1..22: note = chemically synthesized
  source 1..22: mol_type = other DNA
tgcctgcctgggtgtgtgacac

SEQ ID NO: 58159 - DNA, 22 bp, synthetic construct
  misc_feature 1..22: note = chemically synthesized
  source 1..22: mol_type = other DNA
cctgggtgtgtgacacagttac

SEQ ID NO: 58160 - DNA, 22 bp, synthetic construct
  misc_feature 1..22: note = chemically synthesized
  source 1..22: mol_type = other DNA
ggtgtgtgacacagttactctg

SEQ ID NO: 58161 - DNA, 22 bp, synthetic construct
  misc_feature 1..22: note = chemically synthesized
  source 1..22: mol_type = other DNA
ctctgggttcagatttctatgt

SEQ ID NO: 58162 - DNA, 22 bp, synthetic construct
  misc_feature 1..22: note = chemically synthesized
  source 1..22: mol_type = other DNA
tgggttcagatttctatgttac

SEQ ID NO: 58163 - DNA, 22 bp, synthetic construct
  misc_feature 1..22: note = chemically synthesized
  source 1..22: mol_type = other DNA
ggttcagatttctatgttactg

SEQ ID NO: 58164 - DNA, 22 bp, synthetic construct
  misc_feature 1..22: note = chemically synthesized
  source 1..22: mol_type = other DNA
agatttctatgttactgctagc

SEQ ID NO: 58165 - DNA, 22 bp, synthetic construct
  misc_feature 1..22: note = chemically synthesized
  source 1..22: mol_type = other DNA
ctatgttactgctagctggttg

SEQ ID NO: 58166 - DNA, 22 bp, synthetic construct
  misc_feature 1..22: note = chemically synthesized
  source 1..22: mol_type = other DNA
tatgttactgctagctggttgg

SEQ ID NO: 58167 - DNA, 22 bp, synthetic construct
  misc_feature 1..22: note = chemically synthesized
  source 1..22: mol_type = other DNA
tgttactgctagctggttggga

SEQ ID NO: 58168 - DNA, 22 bp, synthetic construct
  misc_feature 1..22: note = chemically synthesized
  source 1..22: mol_type = other DNA
ctgctagctggttgggagagtc

SEQ ID NO: 58169 - DNA, 22 bp, synthetic construct
  misc_feature 1..22: note = chemically synthesized
  source 1..22: mol_type = other DNA
ctagctggttgggagagtctga

SEQ ID NO: 58170 - DNA, 22 bp, synthetic construct
  misc_feature 1..22: note = chemically synthesized
  source 1..22: mol_type = other DNA
gctggttgggagagtctgaggg

SEQ ID NO: 58171 - DNA, 22 bp, synthetic construct
  misc_feature 1..22: note = chemically synthesized
  source 1..22: mol_type = other DNA
gttgggagagtctgagggaatc

SEQ ID NO: 58172 - DNA, 22 bp, synthetic construct
  misc_feature 1..22: note = chemically synthesized
  source 1..22: mol_type = other DNA
ggagagtctgagggaatcattt

SEQ ID NO: 58173 - DNA, 22 bp, synthetic construct
  misc_feature 1..22: note = chemically synthesized
  source 1..22: mol_type = other DNA
agggaatcatttcacctctctg

SEQ ID NO: 58174 - DNA, 22 bp, synthetic construct
  misc_feature 1..22: note = chemically synthesized
  source 1..22: mol_type = other DNA
cacctctctgtgaaatggagat

SEQ ID NO: 58175 - DNA, 22 bp, synthetic construct
  misc_feature 1..22: note = chemically synthesized
  source 1..22: mol_type = other DNA
acctctctgtgaaatggagata

SEQ ID NO: 58176 - DNA, 22 bp, synthetic construct
  misc_feature 1..22: note = chemically synthesized
  source 1..22: mol_type = other DNA
tctgtgaaatggagataactca

SEQ ID NO: 58177 - DNA, 22 bp, synthetic construct
  misc_feature 1..22: note = chemically synthesized
  source 1..22: mol_type = other DNA
tgtgaaatggagataactcaag

SEQ ID NO: 58178 - DNA, 22 bp, synthetic construct
  misc_feature 1..22: note = chemically synthesized
  source 1..22: mol_type = other DNA
tgaaatggagataactcaaggt

SEQ ID NO: 58179 - DNA, 22 bp, synthetic construct
  misc_feature 1..22: note = chemically synthesized
  source 1..22: mol_type = other DNA
aaggtcccttacctcatagagt

SEQ ID NO: 58180 - DNA, 22 bp, synthetic construct
  misc_feature 1..22: note = chemically synthesized
  source 1..22: mol_type = other DNA
acctcatagagtccatgtgaga

SEQ ID NO: 58181 - DNA, 22 bp, synthetic construct
  misc_feature 1..22: note = chemically synthesized
  source 1..22: mol_type = other DNA
cctcatagagtccatgtgagaa

SEQ ID NO: 58182 - DNA, 22 bp, synthetic construct
  misc_feature 1..22: note = chemically synthesized
  source 1..22: mol_type = other DNA
atagagtccatgtgagaagtaa

SEQ ID NO: 58183 - DNA, 22 bp, synthetic construct
  misc_feature 1..22: note = chemically synthesized
  source 1..22: mol_type = other DNA
ctcgctccgggggctgcacctc

SEQ ID NO: 58184 - DNA, 22 bp, synthetic construct
  misc_feature 1..22: note = chemically synthesized
  source 1..22: mol_type = other DNA
gctccgggggctgcacctccag

SEQ ID NO: 58185 - DNA, 22 bp, synthetic construct
  misc_feature 1..22: note = chemically synthesized
  source 1..22: mol_type = other DNA
cgggggctgcacctccagaatt

SEQ ID NO: 58186 - DNA, 22 bp, synthetic construct
  misc_feature 1..22: note = chemically synthesized
  source 1..22: mol_type = other DNA
cacctccagaattgctgttgtc

SEQ ID NO: 58187 - DNA, 22 bp, synthetic construct
  misc_feature 1..22: note = chemically synthesized
  source 1..22: mol_type = other DNA
cagaattgctgttgtcattatt

SEQ ID NO: 58188 - DNA, 22 bp, synthetic construct
  misc_feature 1..22: note = chemically synthesized
  source 1..22: mol_type = other DNA
ctgttgtcattattaccatgtg

SEQ ID NO: 58189 - DNA, 22 bp, synthetic construct
  misc_feature 1..22: note = chemically synthesized
  source 1..22: mol_type = other DNA
ttgtcattattaccatgtgtct

SEQ ID NO: 58190 - DNA, 22 bp, synthetic construct
  misc_feature 1..22: note = chemically synthesized
  source 1..22: mol_type = other DNA
tcattattaccatgtgtctgac

SEQ ID NO: 58191 - DNA, 22 bp, synthetic construct
  misc_feature 1..22: note = chemically synthesized
  source 1..22: mol_type = other DNA
ttaccatgtgtctgacacattg

SEQ ID NO: 58192 - DNA, 22 bp, synthetic construct
  misc_feature 1..22: note = chemically synthesized
  source 1..22: mol_type = other DNA
ccatgtgtctgacacattgata

SEQ ID NO: 58193 - DNA, 22 bp, synthetic construct
  misc_feature 1..22: note = chemically synthesized
  source 1..22: mol_type = other DNA
acacattgatattccatcccac

SEQ ID NO: 58194 - DNA, 22 bp, synthetic construct
  misc_feature 1..22: note = chemically synthesized
  source 1..22: mol_type = other DNA
atattccatcccacaacaacct

SEQ ID NO: 58195 - DNA, 22 bp, synthetic construct
  misc_feature 1..22: note = chemically synthesized
  source 1..22: mol_type = other DNA
catcccacaacaacctcggaaa

SEQ ID NO: 58196 - DNA, 22 bp, synthetic construct
  misc_feature 1..22: note = chemically synthesized
  source 1..22: mol_type = other DNA
ggaaaggaaacactcccattag

SEQ ID NO: 58197 - DNA, 22 bp, synthetic construct
  misc_feature 1..22: note = chemically synthesized
  source 1..22: mol_type = other DNA
ccattagcctcatttggtagag

SEQ ID NO: 58198 - DNA, 22 bp, synthetic construct
  misc_feature 1..22: note = chemically synthesized
  source 1..22: mol_type = other DNA
gcctcatttggtagaggaggaa

SEQ ID NO: 58199 - DNA, 22 bp, synthetic construct
  misc_feature 1..22: note = chemically synthesized
  source 1..22: mol_type = other DNA
atttggtagaggaggaaattgg

SEQ ID NO: 58200 - DNA, 22 bp, synthetic construct
  misc_feature 1..22: note = chemically synthesized
  source 1..22: mol_type = other DNA
ggtagaggaggaaattggggtt

SEQ ID NO: 58201 - DNA, 22 bp, synthetic construct
  misc_feature 1..22: note = chemically synthesized
  source 1..22: mol_type = other DNA
gtagaggaggaaattggggttc

SEQ ID NO: 58202 - DNA, 22 bp, synthetic construct
  misc_feature 1..22: note = chemically synthesized
  source 1..22: mol_type = other DNA
gggttcatcaagggttaaatga

SEQ ID NO: 58203 - DNA, 22 bp, synthetic construct
  misc_feature 1..22: note = chemically synthesized
  source 1..22: mol_type = other DNA
atcaagggttaaatgacttccc

SEQ ID NO: 58204 - DNA, 22 bp, synthetic construct
  misc_feature 1..22: note = chemically synthesized
  source 1..22: mol_type = other DNA
aatgacttccctgagggtccac

SEQ ID NO: 58205 - DNA, 22 bp, synthetic construct
  misc_feature 1..22: note = chemically synthesized
  source 1..22: mol_type = other DNA
ccctgagggtccacagttgttc

SEQ ID NO: 58206 - DNA, 22 bp, synthetic construct
  misc_feature 1..22: note = chemically synthesized
  source 1..22: mol_type = other DNA
cctgagggtccacagttgttca

SEQ ID NO: 58207 - DNA, 22 bp, synthetic construct
  misc_feature 1..22: note = chemically synthesized
  source 1..22: mol_type = other DNA
agggtccacagttgttcaatcc

SEQ ID NO: 58208 - DNA, 22 bp, synthetic construct
  misc_feature 1..22: note = chemically synthesized
  source 1..22: mol_type = other DNA
ttcaatcctttggcctgcggcc

SEQ ID NO: 58209 - DNA, 22 bp, synthetic construct
  misc_feature 1..22: note = chemically synthesized
  source 1..22: mol_type = other DNA
aatcctttggcctgcggccgcc

SEQ ID NO: 58210 - DNA, 22 bp, synthetic construct
  misc_feature 1..22: note = chemically synthesized
  source 1..22: mol_type = other DNA
tggcctgcggccgccaccctct

SEQ ID NO: 58211 - DNA, 22 bp, synthetic construct
  misc_feature 1..22: note = chemically synthesized
  source 1..22: mol_type = other DNA
ggcctgcggccgccaccctctg

SEQ ID NO: 58212 - DNA, 22 bp, synthetic construct
  misc_feature 1..22: note = chemically synthesized
  source 1..22: mol_type = other DNA
gcctgcggccgccaccctctgc

SEQ ID NO: 58213 - DNA, 22 bp, synthetic construct
  misc_feature 1..22: note = chemically synthesized
  source 1..22: mol_type = other DNA
cggccgccaccctctgctacct

SEQ ID NO: 58214 - DNA, 22 bp, synthetic construct
  misc_feature 1..22: note = chemically synthesized
  source 1..22: mol_type = other DNA
tgctacctcttcagtacgtttg

SEQ ID NO: 58215 - DNA, 22 bp, synthetic construct
  misc_feature 1..22: note = chemically synthesized
  source 1..22: mol_type = other DNA
ctacctcttcagtacgtttgca

SEQ ID NO: 58216 - DNA, 22 bp, synthetic construct
  misc_feature 1..22: note = chemically synthesized
  source 1..22: mol_type = other DNA
cctcttcagtacgtttgcagct

SEQ ID NO: 58217 - DNA, 22 bp, synthetic construct
  misc_feature 1..22: note = chemically synthesized
  source 1..22: mol_type = other DNA
ttcagtacgtttgcagctttct

SEQ ID NO: 58218 - DNA, 22 bp, synthetic construct
  misc_feature 1..22: note = chemically synthesized
  source 1..22: mol_type = other DNA
cagtacgtttgcagctttcttc

SEQ ID NO: 58219 - DNA, 22 bp, synthetic construct
  misc_feature 1..22: note = chemically synthesized
  source 1..22: mol_type = other DNA
agtacgtttgcagctttcttca

SEQ ID NO: 58220 - DNA, 22 bp, synthetic construct
  misc_feature 1..22: note = chemically synthesized
  source 1..22: mol_type = other DNA
gcagctttcttcagcggtgcca

SEQ ID NO: 58221 - DNA, 22 bp, synthetic construct
  misc_feature 1..22: note = chemically synthesized
  source 1..22: mol_type = other DNA
cagctttcttcagcggtgccag

SEQ ID NO: 58222 - DNA, 22 bp, synthetic construct
  misc_feature 1..22: note = chemically synthesized
  source 1..22: mol_type = other DNA
tcttcagcggtgccaggcaaca

SEQ ID NO: 58223 - DNA, 22 bp, synthetic construct
  misc_feature 1..22: note = chemically synthesized
  source 1..22: mol_type = other DNA
cttcagcggtgccaggcaacaa

SEQ ID NO: 58224 - DNA, 22 bp, synthetic construct
  misc_feature 1..22: note = chemically synthesized
  source 1..22: mol_type = other DNA
ttcagcggtgccaggcaacaac

SEQ ID NO: 58225 - DNA, 22 bp, synthetic construct
  misc_feature 1..22: note = chemically synthesized
  source 1..22: mol_type = other DNA
cagcggtgccaggcaacaactg

SEQ ID NO: 58226 - DNA, 22 bp, synthetic construct
  misc_feature 1..22: note = chemically synthesized
  source 1..22: mol_type = other DNA
agcggtgccaggcaacaactgg

SEQ ID NO: 58227 - DNA, 22 bp, synthetic construct
  misc_feature 1..22: note = chemically synthesized
  source 1..22: mol_type = other DNA
ggcaggaagctctggtgctgga

SEQ ID NO: 58228 - DNA, 22 bp, synthetic construct
  misc_feature 1..22: note = chemically synthesized
  source 1..22: mol_type = other DNA
tggtgctggacagttgtccctc

SEQ ID NO: 58229 - DNA, 22 bp, synthetic construct
  misc_feature 1..22: note = chemically synthesized
  source 1..22: mol_type = other DNA
gtgctggacagttgtccctccc

SEQ ID NO: 58230 - DNA, 22 bp, synthetic construct
  misc_feature 1..22: note = chemically synthesized
  source 1..22: mol_type = other DNA
gacagttgtccctcccatgggt

SEQ ID NO: 58231 - DNA, 22 bp, synthetic construct
  misc_feature 1..22: note = chemically synthesized
  source 1..22: mol_type = other DNA
tccctcccatgggttctgtggt

SEQ ID NO: 58232 - DNA, 22 bp, synthetic construct
  misc_feature 1..22: note = chemically synthesized
  source 1..22: mol_type = other DNA
ccatgggttctgtggtcaagtt

SEQ ID NO: 58233 - DNA, 22 bp, synthetic construct
  misc_feature 1..22: note = chemically synthesized
  source 1..22: mol_type = other DNA
tgtggtcaagtttttcaatctt

SEQ ID NO: 58234 - DNA, 22 bp, synthetic construct
  misc_feature 1..22: note = chemically synthesized
  source 1..22: mol_type = other DNA
tggtcaagtttttcaatcttct

SEQ ID NO: 58235 - DNA, 22 bp, synthetic construct
  misc_feature 1..22: note = chemically synthesized
  source 1..22: mol_type = other DNA
ttcaatcttctgggaaagagaa

SEQ ID NO: 58236 - DNA, 22 bp, synthetic construct
  misc_feature 1..22: note = chemically synthesized
  source 1..22: mol_type = other DNA
tcaatcttctgggaaagagaag

SEQ ID NO: 58237 - DNA, 22 bp, synthetic construct
  misc_feature 1..22: note = chemically synthesized
  source 1..22: mol_type = other DNA
caatcttctgggaaagagaaga

SEQ ID NO: 58238 - DNA, 22 bp, synthetic construct
  misc_feature 1..22: note = chemically synthesized
  source 1..22: mol_type = other DNA
aatcttctgggaaagagaagaa

SEQ ID NO: 58239 - DNA, 22 bp, synthetic construct
  misc_feature 1..22: note = chemically synthesized
  source 1..22: mol_type = other DNA
ctgggaaagagaagaatgttcc

SEQ ID NO: 58240 - DNA, 22 bp, synthetic construct
  misc_feature 1..22: note = chemically synthesized
  source 1..22: mol_type = other DNA
tgggaaagagaagaatgttccc

SEQ ID NO: 58241 - DNA, 22 bp, synthetic construct
  misc_feature 1..22: note = chemically synthesized
  source 1..22: mol_type = other DNA
ggaaagagaagaatgttcccct

SEQ ID NO: 58242 - DNA, 22 bp, synthetic construct
  misc_feature 1..22: note = chemically synthesized
  source 1..22: mol_type = other DNA
ccctccagttctgggcatattg

SEQ ID NO: 58243 - DNA, 22 bp, synthetic construct
  misc_feature 1..22: note = chemically synthesized
  source 1..22: mol_type = other DNA
cagttctgggcatattgaagga

SEQ ID NO: 58244 - DNA, 22 bp, synthetic construct
  misc_feature 1..22: note = chemically synthesized
  source 1..22: mol_type = other DNA
tgggcatattgaaggagcacgg

SEQ ID NO: 58245 - DNA, 22 bp, synthetic construct
  misc_feature 1..22: note = chemically synthesized
  source 1..22: mol_type = other DNA
ggcatattgaaggagcacggag

SEQ ID NO: 58246 - DNA, 22 bp, synthetic construct
  misc_feature 1..22: note = chemically synthesized
  source 1..22: mol_type = other DNA
aaggagcacggagctgttggga

SEQ ID NO: 58247 - DNA, 22 bp, synthetic construct
  misc_feature 1..22: note = chemically synthesized
  source 1..22: mol_type = other DNA
ttgggaaaagttgcaatgtaag

SEQ ID NO: 58248 - DNA, 22 bp, synthetic construct
  misc_feature 1..22: note = chemically synthesized
  source 1..22: mol_type = other DNA
ggaaaagttgcaatgtaaggaa

SEQ ID NO: 58249 - DNA, 22 bp, synthetic construct
  misc_feature 1..22: note = chemically synthesized
  source 1..22: mol_type = other DNA
caatgtaaggaatcctgctttg

SEQ ID NO: 58250 - DNA, 22 bp, synthetic construct
  misc_feature 1..22: note = chemically synthesized
  source 1..22: mol_type = other DNA
ctttgcaagtagtcatttcccc

SEQ ID NO: 58251 - DNA, 22 bp, synthetic construct
  misc_feature 1..22: note = chemically synthesized
  source 1..22: mol_type = other DNA
tgcaagtagtcatttccccatc

SEQ ID NO: 58252 - DNA, 22 bp, synthetic construct
  misc_feature 1..22: note = chemically synthesized
  source 1..22: mol_type = other DNA
gcaagtagtcatttccccatct

SEQ ID NO: 58253 - DNA, 22 bp, synthetic construct
  misc_feature 1..22: note = chemically synthesized
  source 1..22: mol_type = other DNA
caagtagtcatttccccatctg

SEQ ID NO: 58254 - DNA, 22 bp, synthetic construct
  misc_feature 1..22: note = chemically synthesized
  source 1..22: mol_type = other DNA
ccccatctgtccagaatgagcc

SEQ ID NO: 58255 - DNA, 22 bp, synthetic construct
  misc_feature 1..22: note = chemically synthesized
  source 1..22: mol_type = other DNA
cccatctgtccagaatgagcct

SEQ ID NO: 58256 - DNA, 22 bp, synthetic construct
  misc_feature 1..22: note = chemically synthesized
  source 1..22: mol_type = other DNA
tccagaatgagcctgaaatcaa

SEQ ID NO: 58257 - DNA, 22 bp, synthetic construct
  misc_feature 1..22: note = chemically synthesized
  source 1..22: mol_type = other DNA
aaatcaagtgagggtcctgaga

SEQ ID NO: 58258 - DNA, 22 bp, synthetic construct
  misc_feature 1..22: note = chemically synthesized
  source 1..22: mol_type = other DNA
agaaacagagggaggaggtttt

SEQ ID NO: 58259 - DNA, 22 bp, synthetic construct
  misc_feature 1..22: note = chemically synthesized
  source 1..22: mol_type = other DNA
tactgtttgtgtgtggcttggt

SEQ ID NO: 58260 - DNA, 22 bp, synthetic construct
  misc_feature 1..22: note = chemically synthesized
  source 1..22: mol_type = other DNA
actgtttgtgtgtggcttggtc

SEQ ID NO: 58261 - DNA, 22 bp, synthetic construct
  misc_feature 1..22: note = chemically synthesized
  source 1..22: mol_type = other DNA
ctgtttgtgtgtggcttggtca

SEQ ID NO: 58262 - DNA, 22 bp, synthetic construct
  misc_feature 1..22: note = chemically synthesized
  source 1..22: mol_type = other DNA
tttgtgtgtggcttggtcagga

SEQ ID NO: 58263 - DNA, 22 bp, synthetic construct
  misc_feature 1..22: note = chemically synthesized
  source 1..22: mol_type = other DNA
gtgtgtggcttggtcaggagac

SEQ ID NO: 58264 - DNA, 22 bp, synthetic construct
  misc_feature 1..22: note = chemically synthesized
  source 1..22: mol_type = other DNA
tgtgtggcttggtcaggagact

SEQ ID NO: 58265 - DNA, 22 bp, synthetic construct
  misc_feature 1..22: note = chemically synthesized
  source 1..22: mol_type = other DNA
ggtcaggagactgcagtgggct

SEQ ID NO: 58266 - DNA, 22 bp, synthetic construct
  misc_feature 1..22: note = chemically synthesized
  source 1..22: mol_type = other DNA
gtcaggagactgcagtgggctg

SEQ ID NO: 58267 - DNA, 22 bp, synthetic construct
  misc_feature 1..22: note = chemically synthesized
  source 1..22: mol_type = other DNA
cagtgggctgaatgagaaacta

SEQ ID NO: 58268 - DNA, 22 bp, synthetic construct
  misc_feature 1..22: note = chemically synthesized
  source 1..22: mol_type = other DNA
aatgagaaactaagctcggact

SEQ ID NO: 58269 - DNA, 22 bp, synthetic construct
  misc_feature 1..22: note = chemically synthesized
  source 1..22: mol_type = other DNA
agctcggacttttaagaagtgg

SEQ ID NO: 58270 - DNA, 22 bp, synthetic construct
  misc_feature 1..22: note = chemically synthesized
  source 1..22: mol_type = other DNA
ggacttttaagaagtggtgagg

SEQ ID NO: 58271 - DNA, 22 bp, synthetic construct
  misc_feature 1..22: note = chemically synthesized
  source 1..22: mol_type = other DNA
ttaagaagtggtgaggcttggc

SEQ ID NO: 58272 - DNA, 22 bp, synthetic construct
  misc_feature 1..22: note = chemically synthesized
  source 1..22: mol_type = other DNA
taagaagtggtgaggcttggcc

SEQ ID NO: 58273 - DNA, 22 bp, synthetic construct
  misc_feature 1..22: note = chemically synthesized
  source 1..22: mol_type = other DNA
aagaagtggtgaggcttggcct

SEQ ID NO: 58274 - DNA, 22 bp, synthetic construct
  misc_feature 1..22: note = chemically synthesized
  source 1..22: mol_type = other DNA
agaagtggtgaggcttggcctg

SEQ ID NO: 58275 - DNA, 22 bp, synthetic construct
  misc_feature 1..22: note = chemically synthesized
  source 1..22: mol_type = other DNA
ggcctgcagcagttctgtgtgt

SEQ ID NO: 58276 - DNA, 22 bp, synthetic construct
  misc_feature 1..22: note = chemically synthesized
  source 1..22: mol_type = other DNA
gcctgcagcagttctgtgtgtt

SEQ ID NO: 58277 - DNA, 22 bp, synthetic construct
  misc_feature 1..22: note = chemically synthesized
  source 1..22: mol_type = other DNA
cagcagttctgtgtgttgtctc

SEQ ID NO: 58278 - DNA, 22 bp, synthetic construct
  misc_feature 1..22: note = chemically synthesized
  source 1..22: mol_type = other DNA
tgtgtgttgtctctgtggcatt

SEQ ID NO: 58279 - DNA, 22 bp, synthetic construct
  misc_feature 1..22: note = chemically synthesized
  source 1..22: mol_type = other DNA
tgtgttgtctctgtggcattta

SEQ ID NO: 58280 - DNA, 22 bp, synthetic construct
  misc_feature 1..22: note = chemically synthesized
  source 1..22: mol_type = other DNA
tctctgtggcatttacttctcg

SEQ ID NO: 58281 - DNA, 22 bp, synthetic construct
  misc_feature 1..22: note = chemically synthesized
  source 1..22: mol_type = other DNA
tgtggcatttacttctcggatc

SEQ ID NO: 58282 - DNA, 22 bp, synthetic construct
  misc_feature 1..22: note = chemically synthesized
  source 1..22: mol_type = other DNA
tggcatttacttctcggatcgt

SEQ ID NO: 58283 - DNA, 22 bp, synthetic construct
  misc_feature 1..22: note = chemically synthesized
  source 1..22: mol_type = other DNA
acttctcggatcgtaccttcaa

SEQ ID NO: 58284 - DNA, 22 bp, synthetic construct
  misc_feature 1..22: note = chemically synthesized
  source 1..22: mol_type = other DNA
cttctcggatcgtaccttcaaa

SEQ ID NO: 58285 - DNA, 22 bp, synthetic construct
  misc_feature 1..22: note = chemically synthesized
  source 1..22: mol_type = other DNA
ctcggatcgtaccttcaaaggc

SEQ ID NO: 58286 - DNA, 22 bp, synthetic construct
  misc_feature 1..22: note = chemically synthesized
  source 1..22: mol_type = other DNA
tcggatcgtaccttcaaaggct

SEQ ID NO: 58287 - DNA, 22 bp, synthetic construct
  misc_feature 1..22: note = chemically synthesized
  source 1..22: mol_type = other DNA
ggatcgtaccttcaaaggctgg

SEQ ID NO: 58288 - DNA, 22 bp, synthetic construct
  misc_feature 1..22: note = chemically synthesized
  source 1..22: mol_type = other DNA
caaaggctggggagaatcagaa

SEQ ID NO: 58289 - DNA, 22 bp, synthetic construct
  misc_feature 1..22: note = chemically synthesized
  source 1..22: mol_type = other DNA
aaaggctggggagaatcagaat

SEQ ID NO: 58290 - DNA, 22 bp, synthetic construct
  misc_feature 1..22: note = chemically synthesized
  source 1..22: mol_type = other DNA
gggagaatcagaattatacagg

SEQ ID NO: 58291 - DNA, 22 bp, synthetic construct
  misc_feature 1..22: note = chemically synthesized
  source 1..22: mol_type = other DNA
tacagggagggagagactgagt

SEQ ID NO: 58292 - DNA, 22 bp, synthetic construct
  misc_feature 1..22: note = chemically synthesized
  source 1..22: mol_type = other DNA
agtgtgagtgagtgtgcgtggc

SEQ ID NO: 58293 - DNA, 22 bp, synthetic construct
  misc_feature 1..22: note = chemically synthesized
  source 1..22: mol_type = other DNA
cttaggacgatgggttctgggg

SEQ ID NO: 58294 - DNA, 22 bp, synthetic construct
  misc_feature 1..22: note = chemically synthesized
  source 1..22: mol_type = other DNA
ttaggacgatgggttctggggg

SEQ ID NO: 58295 - DNA, 22 bp, synthetic construct
  misc_feature 1..22: note = chemically synthesized
  source 1..22: mol_type = other DNA
aggacgatgggttctggggggt

SEQ ID NO: 58296 - DNA, 22 bp, synthetic construct
  misc_feature 1..22: note = chemically synthesized
  source 1..22: mol_type = other DNA
ggacgatgggttctggggggtc

SEQ ID NO: 58297 - DNA, 22 bp, synthetic construct
  misc_feature 1..22: note = chemically synthesized
  source 1..22: mol_type = other DNA
tggggggtcataatctgcttcg

SEQ ID NO: 58298 - DNA, 22 bp, synthetic construct
  misc_feature 1..22: note = chemically synthesized
  source 1..22: mol_type = other DNA
gggggtcataatctgcttcgag

SEQ ID NO: 58299 - DNA, 22 bp, synthetic construct
  misc_feature 1..22: note = chemically synthesized
  source 1..22: mol_type = other DNA
cttcgaggaggttttcatttct

SEQ ID NO: 58300 - DNA, 22 bp, synthetic construct
  misc_feature 1..22: note = chemically synthesized
  source 1..22: mol_type = other DNA
cgaggaggttttcatttctggc

SEQ ID NO: 58301 - DNA, 22 bp, synthetic construct
  misc_feature 1..22: note = chemically synthesized
  source 1..22: mol_type = other DNA
gaggaggttttcatttctggct

SEQ ID NO: 58302 - DNA, 22 bp, synthetic construct
  misc_feature 1..22: note = chemically synthesized
  source 1..22: mol_type = other DNA
tcatttctggctgaacaaggct

SEQ ID NO: 58303 - DNA, 22 bp, synthetic construct
  misc_feature 1..22: note = chemically synthesized
  source 1..22: mol_type = other DNA
catttctggctgaacaaggctg

SEQ ID NO: 58304 - DNA, 22 bp, synthetic construct
  misc_feature 1..22: note = chemically synthesized
  source 1..22: mol_type = other DNA
atttctggctgaacaaggctgt

SEQ ID NO: 58305 - DNA, 22 bp, synthetic construct
  misc_feature 1..22: note = chemically synthesized
  source 1..22: mol_type = other DNA
ctggctgaacaaggctgtggta

SEQ ID NO: 58306 - DNA, 22 bp, synthetic construct
  misc_feature 1..22: note = chemically synthesized
  source 1..22: mol_type = other DNA
tggctgaacaaggctgtggtaa

SEQ ID NO: 58307 - DNA, 22 bp, synthetic construct
  misc_feature 1..22: note = chemically synthesized
  source 1..22: mol_type = other DNA
gctgaacaaggctgtggtaagg

SEQ ID NO: 58308 - DNA, 22 bp, synthetic construct
  misc_feature 1..22: note = chemically synthesized
  source 1..22: mol_type = other DNA
aacaaggctgtggtaaggcaag

SEQ ID NO: 58309 - DNA, 22 bp, synthetic construct
  misc_feature 1..22: note = chemically synthesized
  source 1..22: mol_type = other DNA
tggtaaggcaagtccggaaggc

SEQ ID NO: 58310 - DNA, 22 bp, synthetic construct
  misc_feature 1..22: note = chemically synthesized
  source 1..22: mol_type = other DNA
gaaacttgagggaagttttgaa

SEQ ID NO: 58311 - DNA, 22 bp, synthetic construct
  misc_feature 1..22: note = chemically synthesized
  source 1..22: mol_type = other DNA
gagggaagttttgaatggaaac

SEQ ID NO: 58312 - DNA, 22 bp, synthetic construct
  misc_feature 1..22: note = chemically synthesized
  source 1..22: mol_type = other DNA
agggaagttttgaatggaaact

SEQ ID NO: 58313 - DNA, 22 bp, synthetic construct
  misc_feature 1..22: note = chemically synthesized
  source 1..22: mol_type = other DNA
tgaatggaaactgcagtcaaca

SEQ ID NO: 58314 - DNA, 22 bp, synthetic construct
  misc_feature 1..22: note = chemically synthesized
  source 1..22: mol_type = other DNA
gaatggaaactgcagtcaacag

SEQ ID NO: 58315 - DNA, 22 bp, synthetic construct
  misc_feature 1..22: note = chemically synthesized
  source 1..22: mol_type = other DNA
aatggaaactgcagtcaacagc

SEQ ID NO: 58316 - DNA, 22 bp, synthetic construct
  misc_feature 1..22: note = chemically synthesized
  source 1..22: mol_type = other DNA
cagtcaacagctccatatgatc

SEQ ID NO: 58317 - DNA, 22 bp, synthetic construct
  misc_feature 1..22: note = chemically synthesized
  source 1..22: mol_type = other DNA
catatgatccgcatgtggcttc

SEQ ID NO: 58318 - DNA, 22 bp, synthetic construct
  misc_feature 1..22: note = chemically synthesized
  source 1..22: mol_type = other DNA
ccccagaggcaagttttcagct

SEQ ID NO: 58319 - DNA, 22 bp, synthetic construct
  misc_feature 1..22: note = chemically synthesized
  source 1..22: mol_type = other DNA
cccagaggcaagttttcagctg

SEQ ID NO: 58320 - DNA, 22 bp, synthetic construct
  misc_feature 1..22: note = chemically synthesized
  source 1..22: mol_type = other DNA
tcagctgcgtggtggcctctcc

SEQ ID NO: 58321 - DNA, 22 bp, synthetic construct
  misc_feature 1..22: note = chemically synthesized
  source 1..22: mol_type = other DNA
cagctgcgtggtggcctctccc

SEQ ID NO: 58322 - DNA, 22 bp, synthetic construct
  misc_feature 1..22: note = chemically synthesized
  source 1..22: mol_type = other DNA
agctgcgtggtggcctctccca

SEQ ID NO: 58323 - DNA, 22 bp, synthetic construct
  misc_feature 1..22: note = chemically synthesized
  source 1..22: mol_type = other DNA
cgtggtggcctctcccagtcac

SEQ ID NO: 58324 - DNA, 22 bp, synthetic construct
  misc_feature 1..22: note = chemically synthesized
  source 1..22: mol_type = other DNA
tcccagtcactccacaggctgc

SEQ ID NO: 58325 - DNA, 22 bp, synthetic construct
  misc_feature 1..22: note = chemically synthesized
  source 1..22: mol_type = other DNA
ccagtcactccacaggctgccc

SEQ ID NO: 58326 - DNA, 22 bp, synthetic construct
  misc_feature 1..22: note = chemically synthesized
  source 1..22: mol_type = other DNA
cacaggctgccctgacgctatt

SEQ ID NO: 58327 - DNA, 22 bp, synthetic construct
  misc_feature 1..22: note = chemically synthesized
  source 1..22: mol_type = other DNA
ccctgacgctattaatatttgc

SEQ ID NO: 58328 - DNA, 22 bp, synthetic construct
  misc_feature 1..22: note = chemically synthesized
  source 1..22: mol_type = other DNA
acgctattaatatttgctgaag

SEQ ID NO: 58329 - DNA, 22 bp, synthetic construct
  misc_feature 1..22: note = chemically synthesized
  source 1..22: mol_type = other DNA
ttaatatttgctgaagcaagac

SEQ ID NO: 58330 - DNA, 22 bp, synthetic construct
  misc_feature 1..22: note = chemically synthesized
  source 1..22: mol_type = other DNA
atatttgctgaagcaagacctg

SEQ ID NO: 58331 - DNA, 22 bp, synthetic construct
  misc_feature 1..22: note = chemically synthesized
  source 1..22: mol_type = other DNA
gctgaagcaagacctgaggttc

SEQ ID NO: 58332 - DNA, 22 bp, synthetic construct
  misc_feature 1..22: note = chemically synthesized
  source 1..22: mol_type = other DNA
ctgaagcaagacctgaggttcg

SEQ ID NO: 58333 - DNA, 22 bp, synthetic construct
  misc_feature 1..22: note = chemically synthesized
  source 1..22: mol_type = other DNA
aagcaagacctgaggttcgttg

SEQ ID NO: 58334 - DNA, 22 bp, synthetic construct
  misc_feature 1..22: note = chemically synthesized
  source 1..22: mol_type = other DNA
aggttcgttgcagatggattac

SEQ ID NO: 58335 - DNA, 22 bp, synthetic construct
  misc_feature 1..22: note = chemically synthesized
  source 1..22: mol_type = other DNA
gttgcagatggattacacaatg

SEQ ID NO: 58336 - DNA, 22 bp, synthetic construct
  misc_feature 1..22: note = chemically synthesized
  source 1..22: mol_type = other DNA
cagatggattacacaatgtatt

SEQ ID NO: 58337 - DNA, 22 bp, synthetic construct
  misc_feature 1..22: note = chemically synthesized
  source 1..22: mol_type = other DNA
cacaatgtattccaaaaccaaa

SEQ ID NO: 58338 - DNA, 22 bp, synthetic construct
  misc_feature 1..22: note = chemically synthesized
  source 1..22: mol_type = other DNA
caaaaccaaatgttactgtttt

SEQ ID NO: 58339 - DNA, 22 bp, synthetic construct
  misc_feature 1..22: note = chemically synthesized
  source 1..22: mol_type = other DNA
ctgttttcctgtattctccatc

SEQ ID NO: 58340 - DNA, 22 bp, synthetic construct
  misc_feature 1..22: note = chemically synthesized
  source 1..22: mol_type = other DNA
ttttcctgtattctccatcctt

SEQ ID NO: 58341 - DNA, 22 bp, synthetic construct
  misc_feature 1..22: note = chemically synthesized
  source 1..22: mol_type = other DNA
tcctgtattctccatcctttca

SEQ ID NO: 58342 - DNA, 22 bp, synthetic construct
  misc_feature 1..22: note = chemically synthesized
  source 1..22: mol_type = other DNA
cctgtattctccatcctttcaa

SEQ ID NO: 58343 - DNA, 22 bp, synthetic construct
  misc_feature 1..22: note = chemically synthesized
  source 1..22: mol_type = other DNA
ctgtattctccatcctttcaaa

SEQ ID NO: 58344 - DNA, 22 bp, synthetic construct
  misc_feature 1..22: note = chemically synthesized
  source 1..22: mol_type = other DNA
tattctccatcctttcaaattg

SEQ ID NO: 58345 - DNA, 22 bp, synthetic construct
  misc_feature 1..22: note = chemically synthesized
  source 1..22: mol_type = other DNA
tccatcctttcaaattggccag

SEQ ID NO: 58346 - DNA, 22 bp, synthetic construct
  misc_feature 1..22: note = chemically synthesized
  source 1..22: mol_type = other DNA
catcctttcaaattggccaggc

SEQ ID NO: 58347 - DNA, 22 bp, synthetic construct
  misc_feature 1..22: note = chemically synthesized
  source 1..22: mol_type = other DNA
tcaaattggccaggctaacata

SEQ ID NO: 58348 - DNA, 22 bp, synthetic construct
  misc_feature 1..22: note = chemically synthesized
  source 1..22: mol_type = other DNA
caaattggccaggctaacatag

SEQ ID NO: 58349 - DNA, 22 bp, synthetic construct
  misc_feature 1..22: note = chemically synthesized
  source 1..22: mol_type = other DNA
aaattggccaggctaacataga

SEQ ID NO: 58350 - DNA, 22 bp, synthetic construct
  misc_feature 1..22: note = chemically synthesized
  source 1..22: mol_type = other DNA
gccaggctaacatagacctcca

SEQ ID NO: 58351 - DNA, 22 bp, synthetic construct
  misc_feature 1..22: note = chemically synthesized
  source 1..22: mol_type = other DNA
acatagacctccactgagagaa

SEQ ID NO: 58352 - DNA, 22 bp, synthetic construct
  misc_feature 1..22: note = chemically synthesized
  source 1..22: mol_type = other DNA
cactgagagaatttcagaatca

SEQ ID NO: 58353 - DNA, 22 bp, synthetic construct
  misc_feature 1..22: note = chemically synthesized
  source 1..22: mol_type = other DNA
agagaatttcagaatcatttgg

SEQ ID NO: 58354 - DNA, 22 bp, synthetic construct
  misc_feature 1..22: note = chemically synthesized
  source 1..22: mol_type = other DNA
cagaatcatttggtagttgaga

SEQ ID NO: 58355 - DNA, 22 bp, synthetic construct
  misc_feature 1..22: note = chemically synthesized
  source 1..22: mol_type = other DNA
agaatcatttggtagttgagaa

SEQ ID NO: 58356 - DNA, 22 bp, synthetic construct
  misc_feature 1..22: note = chemically synthesized
  source 1..22: mol_type = other DNA
ggtagttgagaagcgcctactt

SEQ ID NO: 58357 - DNA, 22 bp, synthetic construct
  misc_feature 1..22: note = chemically synthesized
  source 1..22: mol_type = other DNA
gtagttgagaagcgcctacttc

SEQ ID NO: 58358 - DNA, 22 bp, synthetic construct
  misc_feature 1..22: note = chemically synthesized
  source 1..22: mol_type = other DNA
agaagcgcctacttcatgcgga

SEQ ID NO: 58359 - DNA, 22 bp, synthetic construct
  misc_feature 1..22: note = chemically synthesized
  source 1..22: mol_type = other DNA
cttcatgcggaggccccgtggg

SEQ ID NO: 58360 - DNA, 22 bp, synthetic construct
  misc_feature 1..22: note = chemically synthesized
  source 1..22: mol_type = other DNA
catgcggaggccccgtgggagg

SEQ ID NO: 58361 - DNA, 22 bp, synthetic construct
  misc_feature 1..22: note = chemically synthesized
  source 1..22: mol_type = other DNA
atgcggaggccccgtgggagga

SEQ ID NO: 58362 - DNA, 22 bp, synthetic construct
  misc_feature 1..22: note = chemically synthesized
  source 1..22: mol_type = other DNA
gcctcagcactggcgagtatcg

SEQ ID NO: 58363 - DNA, 22 bp, synthetic construct
  misc_feature 1..22: note = chemically synthesized
  source 1..22: mol_type = other DNA
agcactggcgagtatcggatgg

SEQ ID NO: 58364 - DNA, 22 bp, synthetic construct
  misc_feature 1..22: note = chemically synthesized
  source 1..22: mol_type = other DNA
gcgagtatcggatgggagctct

SEQ ID NO: 58365 - DNA, 22 bp, synthetic construct
  misc_feature 1..22: note = chemically synthesized
  source 1..22: mol_type = other DNA
tgctcacttggtaagtccttct

SEQ ID NO: 58366 - DNA, 22 bp, synthetic construct
  misc_feature 1..22: note = chemically synthesized
  source 1..22: mol_type = other DNA
ctcacttggtaagtccttctgc

SEQ ID NO: 58367 - DNA, 22 bp, synthetic construct
  misc_feature 1..22: note = chemically synthesized
  source 1..22: mol_type = other DNA
acttggtaagtccttctgctag

SEQ ID NO: 58368 - DNA, 22 bp, synthetic construct
  misc_feature 1..22: note = chemically synthesized
  source 1..22: mol_type = other DNA
ggtaagtccttctgctagaacc

SEQ ID NO: 58369 - DNA, 22 bp, synthetic construct
  misc_feature 1..22: note = chemically synthesized
  source 1..22: mol_type = other DNA
gtaagtccttctgctagaacca

SEQ ID NO: 58370 - DNA, 22 bp, synthetic construct
  misc_feature 1..22: note = chemically synthesized
  source 1..22: mol_type = other DNA
ctgctagaaccaagggaggctg

SEQ ID NO: 58371 - DNA, 22 bp, synthetic construct
  misc_feature 1..22: note = chemically synthesized
  source 1..22: mol_type = other DNA
tgctagaaccaagggaggctgt

SEQ ID NO: 58372 - DNA, 22 bp, synthetic construct
  misc_feature 1..22: note = chemically synthesized
  source 1..22: mol_type = other DNA
ctagaaccaagggaggctgttc

SEQ ID NO: 58373 - DNA, 22 bp, synthetic construct
  misc_feature 1..22: note = chemically synthesized
  source 1..22: mol_type = other DNA
gaaccaagggaggctgttcaga

SEQ ID NO: 58374 - DNA, 22 bp, synthetic construct
  misc_feature 1..22: note = chemically synthesized
  source 1..22: mol_type = other DNA
ttcagatccatcacaaagaagt

SEQ ID NO: 58375 - DNA, 22 bp, synthetic construct
  misc_feature 1..22: note = chemically synthesized
  source 1..22: mol_type = other DNA
agatccatcacaaagaagttgt

SEQ ID NO: 58376 - DNA, 22 bp, synthetic construct
  misc_feature 1..22: note = chemically synthesized
  source 1..22: mol_type = other DNA
tcggtcacatccaggttgtctt

SEQ ID NO: 58377 - DNA, 22 bp, synthetic construct
  misc_feature 1..22: note = chemically synthesized
  source 1..22: mol_type = other DNA
tcttctgagtttgaggtgggat

SEQ ID NO: 58378 - DNA, 22 bp, synthetic construct
  misc_feature 1..22: note = chemically synthesized
  source 1..22: mol_type = other DNA
ctgagtttgaggtgggatggag

SEQ ID NO: 58379 - DNA, 22 bp, synthetic construct
  misc_feature 1..22: note = chemically synthesized
  source 1..22: mol_type = other DNA
tgagtttgaggtgggatggagg

SEQ ID NO: 58380 - DNA, 22 bp, synthetic construct
  misc_feature 1..22: note = chemically synthesized
  source 1..22: mol_type = other DNA
agtttgaggtgggatggaggtg

SEQ ID NO: 58381 - DNA, 22 bp, synthetic construct
  misc_feature 1..22: note = chemically synthesized
  source 1..22: mol_type = other DNA
gaggtgggatggaggtggctgc

SEQ ID NO: 58382 - DNA, 22 bp, synthetic construct
  misc_feature 1..22: note = chemically synthesized
  source 1..22: mol_type = other DNA
aggtgggatggaggtggctgct

SEQ ID NO: 58383 - DNA, 22 bp, synthetic construct
  misc_feature 1..22: note = chemically synthesized
  source 1..22: mol_type = other DNA
ctgagaatccatgtgggtcaag

SEQ ID NO: 58384 - DNA, 22 bp, synthetic construct
  misc_feature 1..22: note = chemically synthesized
  source 1..22: mol_type = other DNA
agaatccatgtgggtcaagagc

SEQ ID NO: 58385 - DNA, 22 bp, synthetic construct
  misc_feature 1..22: note = chemically synthesized
  source 1..22: mol_type = other DNA
caaagcttcacttttacttcgc

SEQ ID NO: 58386 - DNA, 22 bp, synthetic construct
  misc_feature 1..22: note = chemically synthesized
  source 1..22: mol_type = other DNA
cacttttacttcgcactctgtc

SEQ ID NO: 58387 - DNA, 22 bp, synthetic construct
  misc_feature 1..22: note = chemically synthesized
  source 1..22: mol_type = other DNA
acttttacttcgcactctgtcc

SEQ ID NO: 58388 - DNA, 22 bp, synthetic construct
  misc_feature 1..22: note = chemically synthesized
  source 1..22: mol_type = other DNA
ttacttcgcactctgtcccggg

SEQ ID NO: 58389 - DNA, 22 bp, synthetic construct
  misc_feature 1..22: note = chemically synthesized
  source 1..22: mol_type = other DNA
tacttcgcactctgtcccgggg

SEQ ID NO: 58390 - DNA, 22 bp, synthetic construct
  misc_feature 1..22: note = chemically synthesized
  source 1..22: mol_type = other DNA
acttcgcactctgtcccggggc

SEQ ID NO: 58391 - DNA, 22 bp, synthetic construct
  misc_feature 1..22: note = chemically synthesized
  source 1..22: mol_type = other DNA
cttcgcactctgtcccggggca

SEQ ID NO: 58392 - DNA, 22 bp, synthetic construct
  misc_feature 1..22: note = chemically synthesized
  source 1..22: mol_type = other DNA
cgcactctgtcccggggcatgg

SEQ ID NO: 58393 - DNA, 22 bp, synthetic construct
  misc_feature 1..22: note = chemically synthesized
  source 1..22: mol_type = other DNA
gcactctgtcccggggcatgga

SEQ ID NO: 58394 - DNA, 22 bp, synthetic construct
  misc_feature 1..22: note = chemically synthesized
  source 1..22: mol_type = other DNA
tgtcccggggcatggacgtcct

SEQ ID NO: 58395 - DNA, 22 bp, synthetic construct
  misc_feature 1..22: note = chemically synthesized
  source 1..22: mol_type = other DNA
tcccggggcatggacgtcctca

SEQ ID NO: 58396 - DNA, 22 bp, synthetic construct
  misc_feature 1..22: note = chemically synthesized
  source 1..22: mol_type = other DNA
aatggaggtcatgcaagccctt

SEQ ID NO: 58397 - DNA, 22 bp, synthetic construct
  misc_feature 1..22: note = chemically synthesized
  source 1..22: mol_type = other DNA
ccccctcaccccttctcttggc

SEQ ID NO: 58398 - DNA, 22 bp, synthetic construct
  misc_feature 1..22: note = chemically synthesized
  source 1..22: mol_type = other DNA
cccctcaccccttctcttggcc

SEQ ID NO: 58399 - DNA, 22 bp, synthetic construct
  misc_feature 1..22: note = chemically synthesized
  source 1..22: mol_type = other DNA
accccttctcttggccctcttc

SEQ ID NO: 58400 - DNA, 22 bp, synthetic construct
  misc_feature 1..22: note = chemically synthesized
  source 1..22: mol_type = other DNA
ctcttggccctcttcattgtct

SEQ ID NO: 58401 - DNA, 22 bp, synthetic construct
  misc_feature 1..22: note = chemically synthesized
  source 1..22: mol_type = other DNA
tcttggccctcttcattgtctc

SEQ ID NO: 58402 - DNA, 22 bp, synthetic construct
  misc_feature 1..22: note = chemically synthesized
  source 1..22: mol_type = other DNA
ttggccctcttcattgtctcta

SEQ ID NO: 58403 - DNA, 22 bp, synthetic construct
  misc_feature 1..22: note = chemically synthesized
  source 1..22: mol_type = other DNA
ggccctcttcattgtctctaca

SEQ ID NO: 58404 - DNA, 22 bp, synthetic construct
  misc_feature 1..22: note = chemically synthesized
  source 1..22: mol_type = other DNA
gccctcttcattgtctctacat

SEQ ID NO: 58405 - DNA, 22 bp, synthetic construct
  misc_feature 1..22: note = chemically synthesized
  source 1..22: mol_type = other DNA
ttcattgtctctacataccctt

SEQ ID NO: 58406 - DNA, 22 bp, synthetic construct
  misc_feature 1..22: note = chemically synthesized
  source 1..22: mol_type = other DNA
cattgtctctacatacccttgg

SEQ ID NO: 58407 - DNA, 22 bp, synthetic construct
  misc_feature 1..22: note = chemically synthesized
  source 1..22: mol_type = other DNA
attgtctctacatacccttggg

SEQ ID NO: 58408 - DNA, 22 bp, synthetic construct
  misc_feature 1..22: note = chemically synthesized
  source 1..22: mol_type = other DNA
tctctacatacccttgggtcaa

SEQ ID NO: 58409 - DNA, 22 bp, synthetic construct
  misc_feature 1..22: note = chemically synthesized
  source 1..22: mol_type = other DNA
tacatacccttgggtcaagagt

SEQ ID NO: 58410 - DNA, 22 bp, synthetic construct
  misc_feature 1..22: note = chemically synthesized
  source 1..22: mol_type = other DNA
catacccttgggtcaagagtgt

SEQ ID NO: 58411 - DNA, 22 bp, synthetic construct
  misc_feature 1..22: note = chemically synthesized
  source 1..22: mol_type = other DNA
gggtcaagagtgtagtggttct

SEQ ID NO: 58412 - DNA, 22 bp, synthetic construct
  misc_feature 1..22: note = chemically synthesized
  source 1..22: mol_type = other DNA
ggtcaagagtgtagtggttctc

SEQ ID NO: 58413 - DNA, 22 bp, synthetic construct
  misc_feature 1..22: note = chemically synthesized
  source 1..22: mol_type = other DNA
tcccttgtcaccctggaagaga

SEQ ID NO: 58414 - DNA, 22 bp, synthetic construct
  misc_feature 1..22: note = chemically synthesized
  source 1..22: mol_type = other DNA
ccttgtcaccctggaagagaag

SEQ ID NO: 58415 - DNA, 22 bp, synthetic construct
  misc_feature 1..22: note = chemically synthesized
  source 1..22: mol_type = other DNA
gtcaccctggaagagaagctct

SEQ ID NO: 58416 - DNA, 22 bp, synthetic construct
  misc_feature 1..22: note = chemically synthesized
  source 1..22: mol_type = other DNA
tcaccctggaagagaagctctt

SEQ ID NO: 58417 - DNA, 22 bp, synthetic construct
  misc_feature 1..22: note = chemically synthesized
  source 1..22: mol_type = other DNA
gaagagaagctcttagttttat

SEQ ID NO: 58418 - DNA, 22 bp, synthetic construct
  misc_feature 1..22: note = chemically synthesized
  source 1..22: mol_type = other DNA
ttagttttatttgctgggtctc

SEQ ID NO: 58419 - DNA, 22 bp, synthetic construct
  misc_feature 1..22: note = chemically synthesized
  source 1..22: mol_type = other DNA
agttttatttgctgggtctcct

SEQ ID NO: 58420 - DNA, 22 bp, synthetic construct
  misc_feature 1..22: note = chemically synthesized
  source 1..22: mol_type = other DNA
gttttatttgctgggtctccta

SEQ ID NO: 58421 - DNA, 22 bp, synthetic construct
  misc_feature 1..22: note = chemically synthesized
  source 1..22: mol_type = other DNA
tatttgctgggtctcctagact

SEQ ID NO: 58422 - DNA, 22 bp, synthetic construct
  misc_feature 1..22: note = chemically synthesized
  source 1..22: mol_type = other DNA
atttgctgggtctcctagactg

SEQ ID NO: 58423 - DNA, 22 bp, synthetic construct
  misc_feature 1..22: note = chemically synthesized
  source 1..22: mol_type = other DNA
tttgctgggtctcctagactga

SEQ ID NO: 58424 - DNA, 22 bp, synthetic construct
  misc_feature 1..22: note = chemically synthesized
  source 1..22: mol_type = other DNA
gctgggtctcctagactgaaat

SEQ ID NO: 58425 - DNA, 22 bp, synthetic construct
  misc_feature 1..22: note = chemically synthesized
  source 1..22: mol_type = other DNA
ctgggtctcctagactgaaatg

SEQ ID NO: 58426 - DNA, 22 bp, synthetic construct
  misc_feature 1..22: note = chemically synthesized
  source 1..22: mol_type = other DNA
ggtctcctagactgaaatgata

SEQ ID NO: 58427 - DNA, 22 bp, synthetic construct
  misc_feature 1..22: note = chemically synthesized
  source 1..22: mol_type = other DNA
ctagactgaaatgataaagctg

SEQ ID NO: 58428 - DNA, 22 bp, synthetic construct
  misc_feature 1..22: note = chemically synthesized
  source 1..22: mol_type = other DNA
gactgaaatgataaagctgaaa

SEQ ID NO: 58429 - DNA, 22 bp, synthetic construct
  misc_feature 1..22: note = chemically synthesized
  source 1..22: mol_type = other DNA
aaatgataaagctgaaatgata

SEQ ID NO: 58430 - DNA, 22 bp, synthetic construct
  misc_feature 1..22: note = chemically synthesized
  source 1..22: mol_type = other DNA
aaatgataaaaggcgtatcatg

SEQ ID NO: 58431 - DNA, 22 bp, synthetic construct
  misc_feature 1..22: note = chemically synthesized
  source 1..22: mol_type = other DNA
tagaacccttcttatttccctc

SEQ ID NO: 58432 - DNA, 22 bp, synthetic construct
  misc_feature 1..22: note = chemically synthesized
  source 1..22: mol_type = other DNA
agaacccttcttatttccctcg

SEQ ID NO: 58433 - DNA, 22 bp, synthetic construct
  misc_feature 1..22: note = chemically synthesized
  source 1..22: mol_type = other DNA
gaacccttcttatttccctcgc

SEQ ID NO: 58434 - DNA, 22 bp, synthetic construct
  misc_feature 1..22: note = chemically synthesized
  source 1..22: mol_type = other DNA
cttatttccctcgctcgcaccc

SEQ ID NO: 58435 - DNA, 22 bp, synthetic construct
  misc_feature 1..22: note = chemically synthesized
  source 1..22: mol_type = other DNA
ttatttccctcgctcgcacccc

SEQ ID NO: 58436 - DNA, 22 bp, synthetic construct
  misc_feature 1..22: note = chemically synthesized
  source 1..22: mol_type = other DNA
atttccctcgctcgcaccccct

SEQ ID NO: 58437 - DNA, 22 bp, synthetic construct
  misc_feature 1..22: note = chemically synthesized
  source 1..22: mol_type = other DNA
tttccctcgctcgcacccccta

SEQ ID NO: 58438 - DNA, 22 bp, synthetic construct
  misc_feature 1..22: note = chemically synthesized
  source 1..22: mol_type = other DNA
ccctcgctcgcaccccctagtt

SEQ ID NO: 58439 - DNA, 22 bp, synthetic construct
  misc_feature 1..22: note = chemically synthesized
  source 1..22: mol_type = other DNA
cctcgctcgcaccccctagttt

SEQ ID NO: 58440 - DNA, 22 bp, synthetic construct
  misc_feature 1..22: note = chemically synthesized
  source 1..22: mol_type = other DNA
gctcgcaccccctagttttcct

SEQ ID NO: 58441 - DNA, 22 bp, synthetic construct
  misc_feature 1..22: note = chemically synthesized
  source 1..22: mol_type = other DNA
gcaccccctagttttccttctc

SEQ ID NO: 58442 - DNA, 22 bp, synthetic construct
  misc_feature 1..22: note = chemically synthesized
  source 1..22: mol_type = other DNA
gttttccttctcttcccttgaa

SEQ ID NO: 58443 - DNA, 22 bp, synthetic construct
  misc_feature 1..22: note = chemically synthesized
  source 1..22: mol_type = other DNA
tccttctcttcccttgaaaatc

SEQ ID NO: 58444 - DNA, 22 bp, synthetic construct
  misc_feature 1..22: note = chemically synthesized
  source 1..22: mol_type = other DNA
ccttctcttcccttgaaaatca

SEQ ID NO: 58445 - DNA, 22 bp, synthetic construct
  misc_feature 1..22: note = chemically synthesized
  source 1..22: mol_type = other DNA
cttctcttcccttgaaaatcag

SEQ ID NO: 58446 - DNA, 22 bp, synthetic construct
  misc_feature 1..22: note = chemically synthesized
  source 1..22: mol_type = other DNA
ctcttcccttgaaaatcagtga

SEQ ID NO: 58447 - DNA, 22 bp, synthetic construct
  misc_feature 1..22: note = chemically synthesized
  source 1..22: mol_type = other DNA
tcttcccttgaaaatcagtgaa

SEQ ID NO: 58448 - DNA, 22 bp, synthetic construct
  misc_feature 1..22: note = chemically synthesized
  source 1..22: mol_type = other DNA
ttcccttgaaaatcagtgaaaa

SEQ ID NO: 58449 - DNA, 22 bp, synthetic construct
  misc_feature 1..22: note = chemically synthesized
  source 1..22: mol_type = other DNA
cccttgaaaatcagtgaaaatc

SEQ ID NO: 58450 - DNA, 22 bp, synthetic construct
  misc_feature 1..22: note = chemically synthesized
  source 1..22: mol_type = other DNA
ccttgaaaatcagtgaaaatca

SEQ ID NO: 58451 - DNA, 22 bp, synthetic construct
  misc_feature 1..22: note = chemically synthesized
  source 1..22: mol_type = other DNA
gaaaatcagtgaaaatcaggcc

SEQ ID NO: 58452 - DNA, 22 bp, synthetic construct
  misc_feature 1..22: note = chemically synthesized
  source 1..22: mol_type = other DNA
aaaatcagtgaaaatcaggcca

SEQ ID NO: 58453 - DNA, 22 bp, synthetic construct
  misc_feature 1..22: note = chemically synthesized
  source 1..22: mol_type = other DNA
tgatgatggccttttgtttctt

SEQ ID NO: 58454 - DNA, 22 bp, synthetic construct
  misc_feature 1..22: note = chemically synthesized
  source 1..22: mol_type = other DNA
atgatggccttttgtttctttt

SEQ ID NO: 58455 - DNA, 22 bp, synthetic construct
  misc_feature 1..22: note = chemically synthesized
  source 1..22: mol_type = other DNA
ttgtttctttttctttttctgt

SEQ ID NO: 58456 - DNA, 22 bp, synthetic construct
  misc_feature 1..22: note = chemically synthesized
  source 1..22: mol_type = other DNA
tgtttctttttctttttctgtt

SEQ ID NO: 58457 - DNA, 22 bp, synthetic construct
  misc_feature 1..22: note = chemically synthesized
  source 1..22: mol_type = other DNA
gtttctttttctttttctgttt

SEQ ID NO: 58458 - DNA, 22 bp, synthetic construct
  misc_feature 1..22: note = chemically synthesized
  source 1..22: mol_type = other DNA
tttctttttctttttctgtttc

SEQ ID NO: 58459 - DNA, 22 bp, synthetic construct
  misc_feature 1..22: note = chemically synthesized
  source 1..22: mol_type = other DNA
ctttttctttttctgtttctgc

SEQ ID NO: 58460 - DNA, 22 bp, synthetic construct
  misc_feature 1..22: note = chemically synthesized
  source 1..22: mol_type = other DNA
tttttctttttctgtttctgcc

SEQ ID NO: 58461 - DNA, 22 bp, synthetic construct
  misc_feature 1..22: note = chemically synthesized
  source 1..22: mol_type = other DNA
tttctttttctgtttctgcctt

SEQ ID NO: 58462 - DNA, 22 bp, synthetic construct
  misc_feature 1..22: note = chemically synthesized
  source 1..22: mol_type = other DNA
ttctttttctgtttctgccttc

SEQ ID NO: 58463 - DNA, 22 bp, synthetic construct
  misc_feature 1..22: note = chemically synthesized
  source 1..22: mol_type = other DNA
tctttttctgtttctgccttcg

SEQ ID NO: 58464 - DNA, 22 bp, synthetic construct
  misc_feature 1..22: note = chemically synthesized
  source 1..22: mol_type = other DNA
ctttttctgtttctgccttcgt

SEQ ID NO: 58465 - DNA, 22 bp, synthetic construct
  misc_feature 1..22: note = chemically synthesized
  source 1..22: mol_type = other DNA
tttttctgtttctgccttcgtt

SEQ ID NO: 58466 - DNA, 22 bp, synthetic construct
  misc_feature 1..22: note = chemically synthesized
  source 1..22: mol_type = other DNA
tttctgtttctgccttcgttag

SEQ ID NO: 58467 - DNA, 22 bp, synthetic construct
  misc_feature 1..22: note = chemically synthesized
  source 1..22: mol_type = other DNA
ttctgtttctgccttcgttagg

SEQ ID NO: 58468 - DNA, 22 bp, synthetic construct
  misc_feature 1..22: note = chemically synthesized
  source 1..22: mol_type = other DNA
tctgtttctgccttcgttaggt

SEQ ID NO: 58469 - DNA, 22 bp, synthetic construct
  misc_feature 1..22: note = chemically synthesized
  source 1..22: mol_type = other DNA
ctgtttctgccttcgttaggta

SEQ ID NO: 58470 - DNA, 22 bp, synthetic construct
  misc_feature 1..22: note = chemically synthesized
  source 1..22: mol_type = other DNA
tgtttctgccttcgttaggtaa

SEQ ID NO: 58471 - DNA, 22 bp, synthetic construct
  misc_feature 1..22: note = chemically synthesized
  source 1..22: mol_type = other DNA
tttctgccttcgttaggtaagc

SEQ ID NO: 58472 - DNA, 22 bp, synthetic construct
  misc_feature 1..22: note = chemically synthesized
  source 1..22: mol_type = other DNA
ctgccttcgttaggtaagcaca

SEQ ID NO: 58473 - DNA, 22 bp, synthetic construct
  misc_feature 1..22: note = chemically synthesized
  source 1..22: mol_type = other DNA
tgccttcgttaggtaagcacaa

SEQ ID NO: 58474 - DNA, 22 bp, synthetic construct
  misc_feature 1..22: note = chemically synthesized
  source 1..22: mol_type = other DNA
ccttcgttaggtaagcacaaat

SEQ ID NO: 58475 - DNA, 22 bp, synthetic construct
  misc_feature 1..22: note = chemically synthesized
  source 1..22: mol_type = other DNA
cgttaggtaagcacaaatttga

SEQ ID NO: 58476 - DNA, 22 bp, synthetic construct
  misc_feature 1..22: note = chemically synthesized
  source 1..22: mol_type = other DNA
gttaggtaagcacaaatttgat

SEQ ID NO: 58477 - DNA, 22 bp, synthetic construct
  misc_feature 1..22: note = chemically synthesized
  source 1..22: mol_type = other DNA
ggtaagcacaaatttgatgtcc

SEQ ID NO: 58478 - DNA, 22 bp, synthetic construct
  misc_feature 1..22: note = chemically synthesized
  source 1..22: mol_type = other DNA
gatgtcccaagaggcaggccgg

SEQ ID NO: 58479 - DNA, 22 bp, synthetic construct
  misc_feature 1..22: note = chemically synthesized
  source 1..22: mol_type = other DNA
atgtcccaagaggcaggccggt

SEQ ID NO: 58480 - DNA, 22 bp, synthetic construct
  misc_feature 1..22: note = chemically synthesized
  source 1..22: mol_type = other DNA
caggccaagtgcctggatgtgg

SEQ ID NO: 58481 - DNA, 22 bp, synthetic construct
  misc_feature 1..22: note = chemically synthesized
  source 1..22: mol_type = other DNA
aggccaagtgcctggatgtggc

SEQ ID NO: 58482 - DNA, 22 bp, synthetic construct
  misc_feature 1..22: note = chemically synthesized
  source 1..22: mol_type = other DNA
gatgtggcaaagctacaataaa

SEQ ID NO: 58483 - DNA, 22 bp, synthetic construct
  misc_feature 1..22: note = chemically synthesized
  source 1..22: mol_type = other DNA
caataaatatcgaatggtgaga

SEQ ID NO: 58484 - DNA, 22 bp, synthetic construct
  misc_feature 1..22: note = chemically synthesized
  source 1..22: mol_type = other DNA
agcaaagccataaccggggaga

SEQ ID NO: 58485 - DNA, 22 bp, synthetic construct
  misc_feature 1..22: note = chemically synthesized
  source 1..22: mol_type = other DNA
gcaaagccataaccggggagac

SEQ ID NO: 58486 - DNA, 22 bp, synthetic construct
  misc_feature 1..22: note = chemically synthesized
  source 1..22: mol_type = other DNA
agaggggcagtggactggttaa

SEQ ID NO: 58487 - DNA, 22 bp, synthetic construct
  misc_feature 1..22: note = chemically synthesized
  source 1..22: mol_type = other DNA
gttaagaggctgttggatgagc

SEQ ID NO: 58488 - DNA, 22 bp, synthetic construct
  misc_feature 1..22: note = chemically synthesized
  source 1..22: mol_type = other DNA
agaggctgttggatgagccggg

SEQ ID NO: 58489 - DNA, 22 bp, synthetic construct
  misc_feature 1..22: note = chemically synthesized
  source 1..22: mol_type = other DNA
ttggatgagccgggtagtattt

SEQ ID NO: 58490 - DNA, 22 bp, synthetic construct
  misc_feature 1..22: note = chemically synthesized
  source 1..22: mol_type = other DNA
gatgagccgggtagtatttcta

SEQ ID NO: 58491 - DNA, 22 bp, synthetic construct
  misc_feature 1..22: note = chemically synthesized
  source 1..22: mol_type = other DNA
ctacttcaacctgattgaaatg

SEQ ID NO: 58492 - DNA, 22 bp, synthetic construct
  misc_feature 1..22: note = chemically synthesized
  source 1..22: mol_type = other DNA
tacttcaacctgattgaaatgt

SEQ ID NO: 58493 - DNA, 22 bp, synthetic construct
  misc_feature 1..22: note = chemically synthesized
  source 1..22: mol_type = other DNA
cttcaacctgattgaaatgtcg

SEQ ID NO: 58494 - DNA, 22 bp, synthetic construct
  misc_feature 1..22: note = chemically synthesized
  source 1..22: mol_type = other DNA
caacctgattgaaatgtcgact

SEQ ID NO: 58495 - DNA, 22 bp, synthetic construct
  misc_feature 1..22: note = chemically synthesized
  source 1..22: mol_type = other DNA
aacctgattgaaatgtcgacta

SEQ ID NO: 58496 - DNA, 22 bp, synthetic construct
  misc_feature 1..22: note = chemically synthesized
  source 1..22: mol_type = other DNA
attgaaatgtcgactaaaaatc

SEQ ID NO: 58497 - DNA, 22 bp, synthetic construct
  misc_feature 1..22: note = chemically synthesized
  source 1..22: mol_type = other DNA
aaatgtcgactaaaaatcaatg

SEQ ID NO: 58498 - DNA, 22 bp, synthetic construct
  misc_feature 1..22: note = chemically synthesized
  source 1..22: mol_type = other DNA
aaaatcaatgctgttgactagt

SEQ ID NO: 58499 - DNA, 22 bp, synthetic construct
  misc_feature 1..22: note = chemically synthesized
  source 1..22: mol_type = other DNA
ttgactagtgataatttacaac

SEQ ID NO: 58500 - DNA, 22 bp, synthetic construct
  misc_feature 1..22: note = chemically synthesized
  source 1..22: mol_type = other DNA
actagtgataatttacaacgtt

SEQ ID NO: 58501 - DNA, 22 bp, synthetic construct
  misc_feature 1..22: note = chemically synthesized
  source 1..22: mol_type = other DNA
gtgataatttacaacgttcctg

SEQ ID NO: 58502 - DNA, 22 bp, synthetic construct
  misc_feature 1..22: note = chemically synthesized
  source 1..22: mol_type = other DNA
acaacgttcctggtgctaagta

SEQ ID NO: 58503 - DNA, 22 bp, synthetic construct
  misc_feature 1..22: note = chemically synthesized
  source 1..22: mol_type = other DNA
caacgttcctggtgctaagtag

SEQ ID NO: 58504 - DNA, 22 bp, synthetic construct
  misc_feature 1..22: note = chemically synthesized
  source 1..22: mol_type = other DNA
ctggtgctaagtagttccccgc

SEQ ID NO: 58505 - DNA, 22 bp, synthetic construct
  misc_feature 1..22: note = chemically synthesized
  source 1..22: mol_type = other DNA
gtgctaagtagttccccgctta

SEQ ID NO: 58506 - DNA, 22 bp, synthetic construct
  misc_feature 1..22: note = chemically synthesized
  source 1..22: mol_type = other DNA
agtagttccccgcttaagaatg

SEQ ID NO: 58507 - DNA, 22 bp, synthetic construct
  misc_feature 1..22: note = chemically synthesized
  source 1..22: mol_type = other DNA
cccgcttaagaatgcgttggct

SEQ ID NO: 58508 - DNA, 22 bp, synthetic construct
  misc_feature 1..22: note = chemically synthesized
  source 1..22: mol_type = other DNA
aagaatgcgttggctgggcaga

SEQ ID NO: 58509 - DNA, 22 bp, synthetic construct
  misc_feature 1..22: note = chemically synthesized
  source 1..22: mol_type = other DNA
agaatgcgttggctgggcagag

SEQ ID NO: 58510 - DNA, 22 bp, synthetic construct
  misc_feature 1..22: note = chemically synthesized
  source 1..22: mol_type = other DNA
gctgggcagagattagcgcagg

SEQ ID NO: 58511 - DNA, 22 bp, synthetic construct
  misc_feature 1..22: note = chemically synthesized
  source 1..22: mol_type = other DNA
ggcagagattagcgcagggagt

SEQ ID NO: 58512 - DNA, 22 bp, synthetic construct
  misc_feature 1..22: note = chemically synthesized
  source 1..22: mol_type = other DNA
gcgcagggagttgtgtgtgtca

SEQ ID NO: 58513 - DNA, 22 bp, synthetic construct
  misc_feature 1..22: note = chemically synthesized
  source 1..22: mol_type = other DNA
tgtgtgtcacaatgaatcagac

SEQ ID NO: 58514 - DNA, 22 bp, synthetic construct
  misc_feature 1..22: note = chemically synthesized
  source 1..22: mol_type = other DNA
taggtcagccctttatttgttt

SEQ ID NO: 58515 - DNA, 22 bp, synthetic construct
  misc_feature 1..22: note = chemically synthesized
  source 1..22: mol_type = other DNA
tatttgtttcatcatgactttt

SEQ ID NO: 58516 - DNA, 22 bp, synthetic construct
  misc_feature 1..22: note = chemically synthesized
  source 1..22: mol_type = other DNA
atttgtttcatcatgactttta

SEQ ID NO: 58517 - DNA, 22 bp, synthetic construct
  misc_feature 1..22: note = chemically synthesized
  source 1..22: mol_type = other DNA
tttgtttcatcatgacttttac

SEQ ID NO: 58518 - DNA, 22 bp, synthetic construct
  misc_feature 1..22: note = chemically synthesized
  source 1..22: mol_type = other DNA
gtttcatcatgacttttacaca

SEQ ID NO: 58519 - DNA, 22 bp, synthetic construct
  misc_feature 1..22: note = chemically synthesized
  source 1..22: mol_type = other DNA
tttcatcatgacttttacacag

SEQ ID NO: 58520 - DNA, 22 bp, synthetic construct
  misc_feature 1..22: note = chemically synthesized
  source 1..22: mol_type = other DNA
catcatgacttttacacagttg

SEQ ID NO: 58521 - DNA, 22 bp, synthetic construct
  misc_feature 1..22: note = chemically synthesized
  source 1..22: mol_type = other DNA
atcatgacttttacacagttgt

SEQ ID NO: 58522 - DNA, 22 bp, synthetic construct
  misc_feature 1..22: note = chemically synthesized
  source 1..22: mol_type = other DNA
ttacacagttgtcatgtaattt

SEQ ID NO: 58523 - DNA, 22 bp, synthetic construct
  misc_feature 1..22: note = chemically synthesized
  source 1..22: mol_type = other DNA
tacacagttgtcatgtaattta

SEQ ID NO: 58524 - DNA, 22 bp, synthetic construct
  misc_feature 1..22: note = chemically synthesized
  source 1..22: mol_type = other DNA
acacagttgtcatgtaatttat

SEQ ID NO: 58525 - DNA, 22 bp, synthetic construct
  misc_feature 1..22: note = chemically synthesized
  source 1..22: mol_type = other DNA
cacagttgtcatgtaatttatg

SEQ ID NO: 58526 - DNA, 22 bp, synthetic construct
  misc_feature 1..22: note = chemically synthesized
  source 1..22: mol_type = other DNA
tcatgtaatttatggctgcttt

SEQ ID NO: 58527 - DNA, 22 bp, synthetic construct
  misc_feature 1..22: note = chemically synthesized
  source 1..22: mol_type = other DNA
atggctgctttcacgttgtcaa

SEQ ID NO: 58528 - DNA, 22 bp, synthetic construct
  misc_feature 1..22: note = chemically synthesized
  source 1..22: mol_type = other DNA
tggctgctttcacgttgtcaaa

SEQ ID NO: 58529 - DNA, 22 bp, synthetic construct
  misc_feature 1..22: note = chemically synthesized
  source 1..22: mol_type = other DNA
ctttcacgttgtcaaacatttt

SEQ ID NO: 58530 - DNA, 22 bp, synthetic construct
  misc_feature 1..22: note = chemically synthesized
  source 1..22: mol_type = other DNA
tcacgttgtcaaacattttcat

SEQ ID NO: 58531 - DNA, 22 bp, synthetic construct
  misc_feature 1..22: note = chemically synthesized
  source 1..22: mol_type = other DNA
cacgttgtcaaacattttcatt

SEQ ID NO: 58532 - DNA, 22 bp, synthetic construct
  misc_feature 1..22: note = chemically synthesized
  source 1..22: mol_type = other DNA
acgttgtcaaacattttcattg

SEQ ID NO: 58533 - DNA, 22 bp, synthetic construct
  misc_feature 1..22: note = chemically synthesized
  source 1..22: mol_type = other DNA
tcaaacattttcattgcatctt

SEQ ID NO: 58534 - DNA, 22 bp, synthetic construct
  misc_feature 1..22: note = chemically synthesized
  source 1..22: mol_type = other DNA
tcattgcatcttcttctttaac

SEQ ID NO: 58535 - DNA, 22 bp, synthetic construct
  misc_feature 1..22: note = chemically synthesized
  source 1..22: mol_type = other DNA
cattgcatcttcttctttaaca

SEQ ID NO: 58536 - DNA, 22 bp, synthetic construct
  misc_feature 1..22: note = chemically synthesized
  source 1..22: mol_type = other DNA
attgcatcttcttctttaacac

SEQ ID NO: 58537 - DNA, 22 bp, synthetic construct
  misc_feature 1..22: note = chemically synthesized
  source 1..22: mol_type = other DNA
catcttcttctttaacaccctc

SEQ ID NO: 58538 - DNA, 22 bp, synthetic construct
  misc_feature 1..22: note = chemically synthesized
  source 1..22: mol_type = other DNA
cttctttaacaccctcctgaca

SEQ ID NO: 58539 - DNA, 22 bp, synthetic construct
  misc_feature 1..22: note = chemically synthesized
  source 1..22: mol_type = other DNA
ttctttaacaccctcctgacat

SEQ ID NO: 58540 - DNA, 22 bp, synthetic construct
  misc_feature 1..22: note = chemically synthesized
  source 1..22: mol_type = other DNA
ctttaacaccctcctgacatag

SEQ ID NO: 58541 - DNA, 22 bp, synthetic construct
  misc_feature 1..22: note = chemically synthesized
  source 1..22: mol_type = other DNA
tttaacaccctcctgacataga

SEQ ID NO: 58542 - DNA, 22 bp, synthetic construct
  misc_feature 1..22: note = chemically synthesized
  source 1..22: mol_type = other DNA
taacaccctcctgacatagaca

SEQ ID NO: 58543 - DNA, 22 bp, synthetic construct
  misc_feature 1..22: note = chemically synthesized
  source 1..22: mol_type = other DNA
aacaccctcctgacatagacac

SEQ ID NO: 58544 - DNA, 22 bp, synthetic construct
  misc_feature 1..22: note = chemically synthesized
  source 1..22: mol_type = other DNA
acaccctcctgacatagacaca

SEQ ID NO: 58545 - DNA, 22 bp, synthetic construct
  misc_feature 1..22: note = chemically synthesized
  source 1..22: mol_type = other DNA
ctgacatagacacactgcactt

SEQ ID NO: 58546 - DNA, 22 bp, synthetic construct
  misc_feature 1..22: note = chemically synthesized
  source 1..22: mol_type = other DNA
acatagacacactgcacttgaa

SEQ ID NO: 58547 - DNA, 22 bp, synthetic construct
  misc_feature 1..22: note = chemically synthesized
  source 1..22: mol_type = other DNA
cacttgaaggcttggtattgtt

SEQ ID NO: 58548 - DNA, 22 bp, synthetic construct
  misc_feature 1..22: note = chemically synthesized
  source 1..22: mol_type = other DNA
gaaggcttggtattgtttcata

SEQ ID NO: 58549 - DNA, 22 bp, synthetic construct
  misc_feature 1..22: note = chemically synthesized
  source 1..22: mol_type = other DNA
aaggcttggtattgtttcataa

SEQ ID NO: 58550 - DNA, 22 bp, synthetic construct
  misc_feature 1..22: note = chemically synthesized
  source 1..22: mol_type = other DNA
ggtattgtttcataatccgaga

SEQ ID NO: 58551 - DNA, 22 bp, synthetic construct
  misc_feature 1..22: note = chemically synthesized
  source 1..22: mol_type = other DNA
gtattgtttcataatccgagag

SEQ ID NO: 58552 - DNA, 22 bp, synthetic construct
  misc_feature 1..22: note = chemically synthesized
  source 1..22: mol_type = other DNA
tttcataatccgagaggaggcc

SEQ ID NO: 58553 - DNA, 22 bp, synthetic construct
  misc_feature 1..22: note = chemically synthesized
  source 1..22: mol_type = other DNA
cataatccgagaggaggcctat

SEQ ID NO: 58554 - DNA, 22 bp, synthetic construct
  misc_feature 1..22: note = chemically synthesized
  source 1..22: mol_type = other DNA
ataatccgagaggaggcctata

SEQ ID NO: 58555 - DNA, 22 bp, synthetic construct
  misc_feature 1..22: note = chemically synthesized
  source 1..22: mol_type = other DNA
taaaccatcaaattacactatc

SEQ ID NO: 58556 - DNA, 22 bp, synthetic construct
  misc_feature 1..22: note = chemically synthesized
  source 1..22: mol_type = other DNA
cactatctttgggctaatctaa

SEQ ID NO: 58557 - DNA, 22 bp, synthetic construct
  misc_feature 1..22: note = chemically synthesized
  source 1..22: mol_type = other DNA
tctttgggctaatctaaatgcg

SEQ ID NO: 58558 - DNA, 22 bp, synthetic construct
  misc_feature 1..22: note = chemically synthesized
  source 1..22: mol_type = other DNA
tgggctaatctaaatgcgctgc

SEQ ID NO: 58559 - DNA, 22 bp, synthetic construct
  misc_feature 1..22: note = chemically synthesized
  source 1..22: mol_type = other DNA
gggctaatctaaatgcgctgca

SEQ ID NO: 58560 - DNA, 22 bp, synthetic construct
  misc_feature 1..22: note = chemically synthesized
  source 1..22: mol_type = other DNA
ggctaatctaaatgcgctgcag

SEQ ID NO: 58561 - DNA, 22 bp, synthetic construct
  misc_feature 1..22: note = chemically synthesized
  source 1..22: mol_type = other DNA
atctaaatgcgctgcagattaa

SEQ ID NO: 58562 - DNA, 22 bp, synthetic construct
  misc_feature 1..22: note = chemically synthesized
  source 1..22: mol_type = other DNA
aatgcgctgcagattaaaatca

SEQ ID NO: 58563 - DNA, 22 bp, synthetic construct
  misc_feature 1..22: note = chemically synthesized
  source 1..22: mol_type = other DNA
cagattaaaatcagagctcatt

SEQ ID NO: 58564 - DNA, 22 bp, synthetic construct
  misc_feature 1..22: note = chemically synthesized
  source 1..22: mol_type = other DNA
aaatcagagctcatttgtccct

SEQ ID NO: 58565 - DNA, 22 bp, synthetic construct
  misc_feature 1..22: note = chemically synthesized
  source 1..22: mol_type = other DNA
atttgtccctgatgcaaattat

SEQ ID NO: 58566 - DNA, 22 bp, synthetic construct
  misc_feature 1..22: note = chemically synthesized
  source 1..22: mol_type = other DNA
gtccctgatgcaaattattaag

SEQ ID NO: 58567 - DNA, 22 bp, synthetic construct
  misc_feature 1..22: note = chemically synthesized
  source 1..22: mol_type = other DNA
tccctgatgcaaattattaagt

SEQ ID NO: 58568 - DNA, 22 bp, synthetic construct
  misc_feature 1..22: note = chemically synthesized
  source 1..22: mol_type = other DNA
atgcaaattattaagttctaat

SEQ ID NO: 58569 - DNA, 22 bp, synthetic construct
  misc_feature 1..22: note = chemically synthesized
  source 1..22: mol_type = other DNA
ttaagttctaattataaatacc

SEQ ID NO: 58570 - DNA, 22 bp, synthetic construct
  misc_feature 1..22: note = chemically synthesized
  source 1..22: mol_type = other DNA
agttctaattataaatacccat

SEQ ID NO: 58571 - DNA, 22 bp, synthetic construct
  misc_feature 1..22: note = chemically synthesized
  source 1..22: mol_type = other DNA
taattataaatacccatttaat

SEQ ID NO: 58572 - DNA, 22 bp, synthetic construct
  misc_feature 1..22: note = chemically synthesized
  source 1..22: mol_type = other DNA
attataaatacccatttaatta

SEQ ID NO: 58573 - DNA, 22 bp, synthetic construct
  misc_feature 1..22: note = chemically synthesized
  source 1..22: mol_type = other DNA
taaatacccatttaattacccg

SEQ ID NO: 58574 - DNA, 22 bp, synthetic construct
  misc_feature 1..22: note = chemically synthesized
  source 1..22: mol_type = other DNA
aattacccgacacatttttatt

SEQ ID NO: 58575 - DNA, 22 bp, synthetic construct
  misc_feature 1..22: note = chemically synthesized
  source 1..22: mol_type = other DNA
attacccgacacatttttattt

SEQ ID NO: 58576 - DNA, 22 bp, synthetic construct
  misc_feature 1..22: note = chemically synthesized
  source 1..22: mol_type = other DNA
cccgacacatttttattttgcg

SEQ ID NO: 58577 - DNA, 22 bp, synthetic construct
  misc_feature 1..22: note = chemically synthesized
  source 1..22: mol_type = other DNA
ttattttgcggacccttttgag

SEQ ID NO: 58578 - DNA, 22 bp, synthetic construct
  misc_feature 1..22: note = chemically synthesized
  source 1..22: mol_type = other DNA
tattttgcggacccttttgagc

SEQ ID NO: 58579 - DNA, 22 bp, synthetic construct
  misc_feature 1..22: note = chemically synthesized
  source 1..22: mol_type = other DNA
attttgcggacccttttgagca

SEQ ID NO: 58580 - DNA, 22 bp, synthetic construct
  misc_feature 1..22: note = chemically synthesized
  source 1..22: mol_type = other DNA
ttttgcggacccttttgagcac

SEQ ID NO: 58581 - DNA, 22 bp, synthetic construct
  misc_feature 1..22: note = chemically synthesized
  source 1..22: mol_type = other DNA
tgcggacccttttgagcactgc

SEQ ID NO: 58582 - DNA, 22 bp, synthetic construct
  misc_feature 1..22: note = chemically synthesized
  source 1..22: mol_type = other DNA
gcggacccttttgagcactgct

SEQ ID NO: 58583 - DNA, 22 bp, synthetic construct
  misc_feature 1..22: note = chemically synthesized
  source 1..22: mol_type = other DNA
cggacccttttgagcactgctg

SEQ ID NO: 58584 - DNA, 22 bp, synthetic construct
  misc_feature 1..22: note = chemically synthesized
  source 1..22: mol_type = other DNA
ttgagcactgctgtctgcgatg

SEQ ID NO: 58585 - DNA, 22 bp, synthetic construct
  misc_feature 1..22: note = chemically synthesized
  source 1..22: mol_type = other DNA
tgagcactgctgtctgcgatgc

SEQ ID NO: 58586 - DNA, 22 bp, synthetic construct
  misc_feature 1..22: note = chemically synthesized
  source 1..22: mol_type = other DNA
gagcactgctgtctgcgatgca

SEQ ID NO: 58587 - DNA, 22 bp, synthetic construct
  misc_feature 1..22: note = chemically synthesized
  source 1..22: mol_type = other DNA
agcactgctgtctgcgatgcag

SEQ ID NO: 58588 - DNA, 22 bp, synthetic construct
  misc_feature 1..22: note = chemically synthesized
  source 1..22: mol_type = other DNA
ctgtctgcgatgcagagggggt

SEQ ID NO: 58589 - DNA, 22 bp, synthetic construct
  misc_feature 1..22: note = chemically synthesized
  source 1..22: mol_type = other DNA
tctgcgatgcagagggggtggg

SEQ ID NO: 58590 - DNA, 22 bp, synthetic construct
  misc_feature 1..22: note = chemically synthesized
  source 1..22: mol_type = other DNA
cgatgcagagggggtgggggga

SEQ ID NO: 58591 - DNA, 22 bp, synthetic construct
  misc_feature 1..22: note = chemically synthesized
  source 1..22: mol_type = other DNA
cagtaattaatgtacacttccc

SEQ ID NO: 58592 - DNA, 22 bp, synthetic construct
  misc_feature 1..22: note = chemically synthesized
  source 1..22: mol_type = other DNA
atgtacacttcccaaatggtaa

SEQ ID NO: 58593 - DNA, 22 bp, synthetic construct
  misc_feature 1..22: note = chemically synthesized
  source 1..22: mol_type = other DNA
cccaaatggtaaaggataaaca

SEQ ID NO: 58594 - DNA, 22 bp, synthetic construct
  misc_feature 1..22: note = chemically synthesized
  source 1..22: mol_type = other DNA
ccaaatggtaaaggataaacat

SEQ ID NO: 58595 - DNA, 22 bp, synthetic construct
  misc_feature 1..22: note = chemically synthesized
  source 1..22: mol_type = other DNA
ctttgtttgtcttatttattta

SEQ ID NO: 58596 - DNA, 22 bp, synthetic construct
  misc_feature 1..22: note = chemically synthesized
  source 1..22: mol_type = other DNA
tgtttgtcttatttatttattg

SEQ ID NO: 58597 - DNA, 22 bp, synthetic construct
  misc_feature 1..22: note = chemically synthesized
  source 1..22: mol_type = other DNA
gtttgtcttatttatttattga

SEQ ID NO: 58598 - DNA, 22 bp, synthetic construct
  misc_feature 1..22: note = chemically synthesized
  source 1..22: mol_type = other DNA
tttgtcttatttatttattgat

SEQ ID NO: 58599 - DNA, 22 bp, synthetic construct
  misc_feature 1..22: note = chemically synthesized
  source 1..22: mol_type = other DNA
gtcttatttatttattgattag

SEQ ID NO: 58600 - DNA, 22 bp, synthetic construct
  misc_feature 1..22: note = chemically synthesized
  source 1..22: mol_type = other DNA
tcttatttatttattgattaga

SEQ ID NO: 58601 - DNA, 22 bp, synthetic construct
  misc_feature 1..22: note = chemically synthesized
  source 1..22: mol_type = other DNA
atttatttattgattagatgta

SEQ ID NO: 58602 - DNA, 22 bp, synthetic construct
  misc_feature 1..22: note = chemically synthesized
  source 1..22: mol_type = other DNA
tttatttattgattagatgtat

SEQ ID NO: 58603 - DNA, 22 bp, synthetic construct
  misc_feature 1..22: note = chemically synthesized
  source 1..22: mol_type = other DNA
atttattgattagatgtataga

SEQ ID NO: 58604 - DNA, 22 bp, synthetic construct
  misc_feature 1..22: note = chemically synthesized
  source 1..22: mol_type = other DNA
tttattgattagatgtatagag

SEQ ID NO: 58605 - DNA, 22 bp, synthetic construct
  misc_feature 1..22: note = chemically synthesized
  source 1..22: mol_type = other DNA
attgattagatgtatagagact

SEQ ID NO: 58606 - DNA, 22 bp, synthetic construct
  misc_feature 1..22: note = chemically synthesized
  source 1..22: mol_type = other DNA
ttgattagatgtatagagactt

SEQ ID NO: 58607 - DNA, 22 bp, synthetic construct
  misc_feature 1..22: note = chemically synthesized
  source 1..22: mol_type = other DNA
attagatgtatagagactttgg

SEQ ID NO: 58608 - DNA, 22 bp, synthetic construct
  misc_feature 1..22: note = chemically synthesized
  source 1..22: mol_type = other DNA
gatgtatagagactttggcgtg

SEQ ID NO: 58609 - DNA, 22 bp, synthetic construct
  misc_feature 1..22: note = chemically synthesized
  source 1..22: mol_type = other DNA
tggcgtgggcacaatctgaagt

SEQ ID NO: 58610 - DNA, 22 bp, synthetic construct
  misc_feature 1..22: note = chemically synthesized
  source 1..22: mol_type = other DNA
ggcgtgggcacaatctgaagtt

SEQ ID NO: 58611 - DNA, 22 bp, synthetic construct
  misc_feature 1..22: note = chemically synthesized
  source 1..22: mol_type = other DNA
gcgtgggcacaatctgaagttg

SEQ ID NO: 58612 - DNA, 22 bp, synthetic construct
  misc_feature 1..22: note = chemically synthesized
  source 1..22: mol_type = other DNA
aagttgaaatccttttaaagat

SEQ ID NO: 58613 - DNA, 22 bp, synthetic construct
  misc_feature 1..22: note = chemically synthesized
  source 1..22: mol_type = other DNA
aaatccttttaaagatgaaaac

SEQ ID NO: 58614 - DNA, 22 bp, synthetic construct
  misc_feature 1..22: note = chemically synthesized
  source 1..22: mol_type = other DNA
ttaaagatgaaaactatttaaa

SEQ ID NO: 58615 - DNA, 22 bp, synthetic construct
  misc_feature 1..22: note = chemically synthesized
  source 1..22: mol_type = other DNA
taaagatgaaaactatttaaaa

SEQ ID NO: 58616 - DNA, 22 bp, synthetic construct
  misc_feature 1..22: note = chemically synthesized
  source 1..22: mol_type = other DNA
aaagatgaaaactatttaaaaa

SEQ ID NO: 58617 - DNA, 22 bp, synthetic construct
  misc_feature 1..22: note = chemically synthesized
  source 1..22: mol_type = other DNA
aagatgaaaactatttaaaaat

SEQ ID NO: 58618 - DNA, 22 bp, synthetic construct
  misc_feature 1..22: note = chemically synthesized
  source 1..22: mol_type = other DNA
tttaaaaatcttttggggaaga

SEQ ID NO: 58619 - DNA, 22 bp, synthetic construct
  misc_feature 1..22: note = chemically synthesized
  source 1..22: mol_type = other DNA
aaaaatcttttggggaagaaag

SEQ ID NO: 58620 - DNA, 22 bp, synthetic construct
  misc_feature 1..22: note = chemically synthesized
  source 1..22: mol_type = other DNA
aaaatcttttggggaagaaaga

SEQ ID NO: 58621 - DNA, 22 bp, synthetic construct
  misc_feature 1..22: note = chemically synthesized
  source 1..22: mol_type = other DNA
ttggggaagaaagagcaaaata

SEQ ID NO: 58622 - DNA, 22 bp, synthetic construct
  misc_feature 1..22: note = chemically synthesized
  source 1..22: mol_type = other DNA
tggggaagaaagagcaaaatat

SEQ ID NO: 58623 - DNA, 22 bp, synthetic construct
  misc_feature 1..22: note = chemically synthesized
  source 1..22: mol_type = other DNA
ggggaagaaagagcaaaatata

SEQ ID NO: 58624 - DNA, 22 bp, synthetic construct
  misc_feature 1..22: note = chemically synthesized
  source 1..22: mol_type = other DNA
gggaagaaagagcaaaatatag

SEQ ID NO: 58625 - DNA, 22 bp, synthetic construct
  misc_feature 1..22: note = chemically synthesized
  source 1..22: mol_type = other DNA
tctgctagaacacatcatccca

SEQ ID NO: 58626 - DNA, 22 bp, synthetic construct
  misc_feature 1..22: note = chemically synthesized
  source 1..22: mol_type = other DNA
ctgctagaacacatcatcccaa

SEQ ID NO: 58627 - DNA, 22 bp, synthetic construct
  misc_feature 1..22: note = chemically synthesized
  source 1..22: mol_type = other DNA
tgctagaacacatcatcccaaa

SEQ ID NO: 58628 - DNA, 22 bp, synthetic construct
  misc_feature 1..22: note = chemically synthesized
  source 1..22: mol_type = other DNA
ctagaacacatcatcccaaaat

SEQ ID NO: 58629 - DNA, 22 bp, synthetic construct
  misc_feature 1..22: note = chemically synthesized
  source 1..22: mol_type = other DNA
gaacacatcatcccaaaatatg

SEQ ID NO: 58630 - DNA, 22 bp, synthetic construct
  misc_feature 1..22: note = chemically synthesized
  source 1..22: mol_type = other DNA
tgaatttgatcaaatcaccagt

SEQ ID NO: 58631 - DNA, 22 bp, synthetic construct
  misc_feature 1..22: note = chemically synthesized
  source 1..22: mol_type = other DNA
aatttgatcaaatcaccagttt

SEQ ID NO: 58632 - DNA, 22 bp, synthetic construct
  misc_feature 1..22: note = chemically synthesized
  source 1..22: mol_type = other DNA
gatcaaatcaccagtttctgaa

SEQ ID NO: 58633 - DNA, 22 bp, synthetic construct
  misc_feature 1..22: note = chemically synthesized
  source 1..22: mol_type = other DNA
atcaaatcaccagtttctgaat

SEQ ID NO: 58634 - DNA, 22 bp, synthetic construct
  misc_feature 1..22: note = chemically synthesized
  source 1..22: mol_type = other DNA
ctgaatttgatcaaatctagat

SEQ ID NO: 58635 - DNA, 22 bp, synthetic construct
  misc_feature 1..22: note = chemically synthesized
  source 1..22: mol_type = other DNA
tgaatttgatcaaatctagatt

SEQ ID NO: 58636 - DNA, 22 bp, synthetic construct
  misc_feature 1..22: note = chemically synthesized
  source 1..22: mol_type = other DNA
aatttgatcaaatctagatttt

SEQ ID NO: 58637 - DNA, 22 bp, synthetic construct
  misc_feature 1..22: note = chemically synthesized
  source 1..22: mol_type = other DNA
gatcaaatctagattttgcaga

SEQ ID NO: 58638 - DNA, 22 bp, synthetic construct
  misc_feature 1..22: note = chemically synthesized
  source 1..22: mol_type = other DNA
atcaaatctagattttgcagaa

SEQ ID NO: 58639 - DNA, 22 bp, synthetic construct
  misc_feature 1..22: note = chemically synthesized
  source 1..22: mol_type = other DNA
gattttgcagaagttcagggtg

SEQ ID NO: 58640 - DNA, 22 bp, synthetic construct
  misc_feature 1..22: note = chemically synthesized
  source 1..22: mol_type = other DNA
tgcagaagttcagggtgagaga

SEQ ID NO: 58641 - DNA, 22 bp, synthetic construct
  misc_feature 1..22: note = chemically synthesized
  source 1..22: mol_type = other DNA
gcagaagttcagggtgagagaa

SEQ ID NO: 58642 - DNA, 22 bp, synthetic construct
  misc_feature 1..22: note = chemically synthesized
  source 1..22: mol_type = other DNA
cagaagttcagggtgagagaaa

SEQ ID NO: 58643 - DNA, 22 bp, synthetic construct
  misc_feature 1..22: note = chemically synthesized
  source 1..22: mol_type = other DNA
agggtgagagaaaccatgcctg

SEQ ID NO: 58644 - DNA, 22 bp, synthetic construct
  misc_feature 1..22: note = chemically synthesized
  source 1..22: mol_type = other DNA
ttttatatctagaaagtgaaat

SEQ ID NO: 58645 - DNA, 22 bp, synthetic construct
  misc_feature 1..22: note = chemically synthesized
  source 1..22: mol_type = other DNA
tatatctagaaagtgaaatcat

SEQ ID NO: 58646 - DNA, 22 bp, synthetic construct
  misc_feature 1..22: note = chemically synthesized
  source 1..22: mol_type = other DNA
atatctagaaagtgaaatcatt

SEQ ID NO: 58647 - DNA, 22 bp, synthetic construct
  misc_feature 1..22: note = chemically synthesized
  source 1..22: mol_type = other DNA
tatctagaaagtgaaatcattg

SEQ ID NO: 58648 - DNA, 22 bp, synthetic construct
  misc_feature 1..22: note = chemically synthesized
  source 1..22: mol_type = other DNA
gaaagtgaaatcattgttatag

SEQ ID NO: 58649 - DNA, 22 bp, synthetic construct
  misc_feature 1..22: note = chemically synthesized
  source 1..22: mol_type = other DNA
ttatagaaaaaacctactgtgg

SEQ ID NO: 58650 - DNA, 22 bp, synthetic construct
  misc_feature 1..22: note = chemically synthesized
  source 1..22: mol_type = other DNA
tagaaaaaacctactgtggtta

SEQ ID NO: 58651 - DNA, 22 bp, synthetic construct
  misc_feature 1..22: note = chemically synthesized
  source 1..22: mol_type = other DNA
ctgtggttagaaaaaaaccaca

SEQ ID NO: 58652 - DNA, 22 bp, synthetic construct
  misc_feature 1..22: note = chemically synthesized
  source 1..22: mol_type = other DNA
tggttagaaaaaaaccacattc

SEQ ID NO: 58653 - DNA, 22 bp, synthetic construct
  misc_feature 1..22: note = chemically synthesized
  source 1..22: mol_type = other DNA
gaaaaaaaccacattctttttt

SEQ ID NO: 58654 - DNA, 22 bp, synthetic construct
  misc_feature 1..22: note = chemically synthesized
  source 1..22: mol_type = other DNA
ttttttcccagccctgctgcca

SEQ ID NO: 58655 - DNA, 22 bp, synthetic construct
  misc_feature 1..22: note = chemically synthesized
  source 1..22: mol_type = other DNA
ttttcccagccctgctgccatc

SEQ ID NO: 58656 - DNA, 22 bp, synthetic construct
  misc_feature 1..22: note = chemically synthesized
  source 1..22: mol_type = other DNA
tttcccagccctgctgccatcc

SEQ ID NO: 58657 - DNA, 22 bp, synthetic construct
  misc_feature 1..22: note = chemically synthesized
  source 1..22: mol_type = other DNA
ttcccagccctgctgccatcct

SEQ ID NO: 58658 - DNA, 22 bp, synthetic construct
  misc_feature 1..22: note = chemically synthesized
  source 1..22: mol_type = other DNA
tcccagccctgctgccatcctc

SEQ ID NO: 58659 - DNA, 22 bp, synthetic construct
  misc_feature 1..22: note = chemically synthesized
  source 1..22: mol_type = other DNA
cccagccctgctgccatcctct

SEQ ID NO: 58660 - DNA, 22 bp, synthetic construct
  misc_feature 1..22: note = chemically synthesized
  source 1..22: mol_type = other DNA
ccagccctgctgccatcctcta

SEQ ID NO: 58661 - DNA, 22 bp, synthetic construct
  misc_feature 1..22: note = chemically synthesized
  source 1..22: mol_type = other DNA
ctgccatcctctaccagaaaat

SEQ ID NO: 58662 - DNA, 22 bp, synthetic construct
  misc_feature 1..22: note = chemically synthesized
  source 1..22: mol_type = other DNA
ccatcctctaccagaaaataac

SEQ ID NO: 58663 - DNA, 22 bp, synthetic construct
  misc_feature 1..22: note = chemically synthesized
  source 1..22: mol_type = other DNA
taccagaaaataacagtatctg

SEQ ID NO: 58664 - DNA, 22 bp, synthetic construct
  misc_feature 1..22: note = chemically synthesized
  source 1..22: mol_type = other DNA
ccagaaaataacagtatctgcc

SEQ ID NO: 58665 - DNA, 22 bp, synthetic construct
  misc_feature 1..22: note = chemically synthesized
  source 1..22: mol_type = other DNA
cctgtagtatgaagaccttcca

SEQ ID NO: 58666 - DNA, 22 bp, synthetic construct
  misc_feature 1..22: note = chemically synthesized
  source 1..22: mol_type = other DNA
tagtatgaagaccttccaattg

SEQ ID NO: 58667 - DNA, 22 bp, synthetic construct
  misc_feature 1..22: note = chemically synthesized
  source 1..22: mol_type = other DNA
ccaattgagagcattatgataa

SEQ ID NO: 58668 - DNA, 22 bp, synthetic construct
  misc_feature 1..22: note = chemically synthesized
  source 1..22: mol_type = other DNA
caattgagagcattatgataaa

SEQ ID NO: 58669 - DNA, 22 bp, synthetic construct
  misc_feature 1..22: note = chemically synthesized
  source 1..22: mol_type = other DNA
agagcattatgataaactattt

SEQ ID NO: 58670 - DNA, 22 bp, synthetic construct
  misc_feature 1..22: note = chemically synthesized
  source 1..22: mol_type = other DNA
tgataaactatttttgattacc

SEQ ID NO: 58671 - DNA, 22 bp, synthetic construct
  misc_feature 1..22: note = chemically synthesized
  source 1..22: mol_type = other DNA
tttttgattaccaaacacgaat

SEQ ID NO: 58672 - DNA, 22 bp, synthetic construct
  misc_feature 1..22: note = chemically synthesized
  source 1..22: mol_type = other DNA
ttgattaccaaacacgaatgaa

SEQ ID NO: 58673 - DNA, 22 bp, synthetic construct
  misc_feature 1..22: note = chemically synthesized
  source 1..22: mol_type = other DNA
tgattaccaaacacgaatgaag

SEQ ID NO: 58674 - DNA, 22 bp, synthetic construct
  misc_feature 1..22: note = chemically synthesized
  source 1..22: mol_type = other DNA
gattaccaaacacgaatgaagg

SEQ ID NO: 58675 - DNA, 22 bp, synthetic construct
  misc_feature 1..22: note = chemically synthesized
  source 1..22: mol_type = other DNA
attaccaaacacgaatgaagga

SEQ ID NO: 58676 - DNA, 22 bp, synthetic construct
  misc_feature 1..22: note = chemically synthesized
  source 1..22: mol_type = other DNA
ccaaacacgaatgaaggaagaa

SEQ ID NO: 58677 - DNA, 22 bp, synthetic construct
  misc_feature 1..22: note = chemically synthesized
  source 1..22: mol_type = other DNA
gtaaaggccttccaagtagaca

SEQ ID NO: 58678 - DNA, 22 bp, synthetic construct
  misc_feature 1..22: note = chemically synthesized
  source 1..22: mol_type = other DNA
ccaagtagacatttacccttct

SEQ ID NO: 58679 - DNA, 22 bp, synthetic construct
  misc_feature 1..22: note = chemically synthesized
  source 1..22: mol_type = other DNA
caagtagacatttacccttctg

SEQ ID NO: 58680 - DNA, 22 bp, synthetic construct
  misc_feature 1..22: note = chemically synthesized
  source 1..22: mol_type = other DNA
acccttctgtgaaagccatgga

SEQ ID NO: 58681 - DNA, 22 bp, synthetic construct
  misc_feature 1..22: note = chemically synthesized
  source 1..22: mol_type = other DNA
cccttctgtgaaagccatggag

SEQ ID NO: 58682 - DNA, 22 bp, synthetic construct
  misc_feature 1..22: note = chemically synthesized
  source 1..22: mol_type = other DNA
ctgtgaaagccatggagaaatt

SEQ ID NO: 58683 - DNA, 22 bp, synthetic construct
  misc_feature 1..22: note = chemically synthesized
  source 1..22: mol_type = other DNA
tgtgaaagccatggagaaatta

SEQ ID NO: 58684 - DNA, 22 bp, synthetic construct
  misc_feature 1..22: note = chemically synthesized
  source 1..22: mol_type = other DNA
tgaaagccatggagaaattacc

SEQ ID NO: 58685 - DNA, 22 bp, synthetic construct
  misc_feature 1..22: note = chemically synthesized
  source 1..22: mol_type = other DNA
ccaagactggtttggggggagg

SEQ ID NO: 58686 - DNA, 22 bp, synthetic construct
  misc_feature 1..22: note = chemically synthesized
  source 1..22: mol_type = other DNA
gtttggggggagggcatttaag

SEQ ID NO: 58687 - DNA, 22 bp, synthetic construct
  misc_feature 1..22: note = chemically synthesized
  source 1..22: mol_type = other DNA
ggggggagggcatttaaggtct

SEQ ID NO: 58688 - DNA, 22 bp, synthetic construct
  misc_feature 1..22: note = chemically synthesized
  source 1..22: mol_type = other DNA
gggggagggcatttaaggtctt

SEQ ID NO: 58689 - DNA, 22 bp, synthetic construct
  misc_feature 1..22: note = chemically synthesized
  source 1..22: mol_type = other DNA
aaggtcttttgggcattacaga

SEQ ID NO: 58690 - DNA, 22 bp, synthetic construct
  misc_feature 1..22: note = chemically synthesized
  source 1..22: mol_type = other DNA
aggtcttttgggcattacagat

SEQ ID NO: 58691 - DNA, 22 bp, synthetic construct
  misc_feature 1..22: note = chemically synthesized
  source 1..22: mol_type = other DNA
ttgggcattacagattttccag

SEQ ID NO: 58692 - DNA, 22 bp, synthetic construct
  misc_feature 1..22: note = chemically synthesized
  source 1..22: mol_type = other DNA
tgggcattacagattttccaga

SEQ ID NO: 58693 - DNA, 22 bp, synthetic construct
  misc_feature 1..22: note = chemically synthesized
  source 1..22: mol_type = other DNA
gggcattacagattttccagaa

SEQ ID NO: 58694 - DNA, 22 bp, synthetic construct
  misc_feature 1..22: note = chemically synthesized
  source 1..22: mol_type = other DNA
ggcattacagattttccagaac

SEQ ID NO: 58695 - DNA, 22 bp, synthetic construct
  misc_feature 1..22: note = chemically synthesized
  source 1..22: mol_type = other DNA
cagattttccagaaccaaactt

SEQ ID NO: 58696 - DNA, 22 bp, synthetic construct
  misc_feature 1..22: note = chemically synthesized
  source 1..22: mol_type = other DNA
tccagaaccaaactttgacttt

SEQ ID NO: 58697 - DNA, 22 bp, synthetic construct
  misc_feature 1..22: note = chemically synthesized
  source 1..22: mol_type = other DNA
ccagaaccaaactttgactttt

SEQ ID NO: 58698 - DNA, 22 bp, synthetic construct
  misc_feature 1..22: note = chemically synthesized
  source 1..22: mol_type = other DNA
cagaaccaaactttgactttta

SEQ ID NO: 58699 - DNA, 22 bp, synthetic construct
  misc_feature 1..22: note = chemically synthesized
  source 1..22: mol_type = other DNA
tgacttttagtgttaacagaga

SEQ ID NO: 58700 - DNA, 22 bp, synthetic construct
  misc_feature 1..22: note = chemically synthesized
  source 1..22: mol_type = other DNA
gacttttagtgttaacagagag

SEQ ID NO: 58701 - DNA, 22 bp, synthetic construct
  misc_feature 1..22: note = chemically synthesized
  source 1..22: mol_type = other DNA
acttttagtgttaacagagaga

SEQ ID NO: 58702 - DNA, 22 bp, synthetic construct
  misc_feature 1..22: note = chemically synthesized
  source 1..22: mol_type = other DNA
ttagtgttaacagagagacact

SEQ ID NO: 58703 - DNA, 22 bp, synthetic construct
  misc_feature 1..22: note = chemically synthesized
  source 1..22: mol_type = other DNA
tagtgttaacagagagacactg

SEQ ID NO: 58704 - DNA, 22 bp, synthetic construct
  misc_feature 1..22: note = chemically synthesized
  source 1..22: mol_type = other DNA
agtgttaacagagagacactga

SEQ ID NO: 58705 - DNA, 22 bp, synthetic construct
  misc_feature 1..22: note = chemically synthesized
  source 1..22: mol_type = other DNA
gtgttaacagagagacactgat

SEQ ID NO: 58706 - DNA, 22 bp, synthetic construct
  misc_feature 1..22: note = chemically synthesized
  source 1..22: mol_type = other DNA
acagagagacactgatctgaaa

SEQ ID NO: 58707 - DNA, 22 bp, synthetic construct
  misc_feature 1..22: note = chemically synthesized
  source 1..22: mol_type = other DNA
atctgaaaaccaggacacctgg

SEQ ID NO: 58708 - DNA, 22 bp, synthetic construct
  misc_feature 1..22: note = chemically synthesized
  source 1..22: mol_type = other DNA
aaaaccaggacacctgggttct

SEQ ID NO: 58709 - DNA, 22 bp, synthetic construct
  misc_feature 1..22: note = chemically synthesized
  source 1..22: mol_type = other DNA
ggttctgacccttattgtatca

SEQ ID NO: 58710 - DNA, 22 bp, synthetic construct
  misc_feature 1..22: note = chemically synthesized
  source 1..22: mol_type = other DNA
tgacccttattgtatcatgctg

SEQ ID NO: 58711 - DNA, 22 bp, synthetic construct
  misc_feature 1..22: note = chemically synthesized
  source 1..22: mol_type = other DNA
acccttattgtatcatgctgtg

SEQ ID NO: 58712 - DNA, 22 bp, synthetic construct
  misc_feature 1..22: note = chemically synthesized
  source 1..22: mol_type = other DNA
attgtatcatgctgtgagattt

SEQ ID NO: 58713 - DNA, 22 bp, synthetic construct
  misc_feature 1..22: note = chemically synthesized
  source 1..22: mol_type = other DNA
ttgtatcatgctgtgagatttt

SEQ ID NO: 58714 - DNA, 22 bp, synthetic construct
  misc_feature 1..22: note = chemically synthesized
  source 1..22: mol_type = other DNA
tatcatgctgtgagattttggg

SEQ ID NO: 58715 - DNA, 22 bp, synthetic construct
  misc_feature 1..22: note = chemically synthesized
  source 1..22: mol_type = other DNA
tgagattttgggctcccttcac

SEQ ID NO: 58716 - DNA, 22 bp, synthetic construct
  misc_feature 1..22: note = chemically synthesized
  source 1..22: mol_type = other DNA
tgggctcccttcacctgttagc

SEQ ID NO: 58717 - DNA, 22 bp, synthetic construct
  misc_feature 1..22: note = chemically synthesized
  source 1..22: mol_type = other DNA
gggctcccttcacctgttagca

SEQ ID NO: 58718 - DNA, 22 bp, synthetic construct
  misc_feature 1..22: note = chemically synthesized
  source 1..22: mol_type = other DNA
ggctcccttcacctgttagcat

SEQ ID NO: 58719 - DNA, 22 bp, synthetic construct
  misc_feature 1..22: note = chemically synthesized
  source 1..22: mol_type = other DNA
ccttcacctgttagcatttgtt

SEQ ID NO: 58720 - DNA, 22 bp, synthetic construct
  misc_feature 1..22: note = chemically synthesized
  source 1..22: mol_type = other DNA
cacctgttagcatttgtttcct

SEQ ID NO: 58721 - DNA, 22 bp, synthetic construct
  misc_feature 1..22: note = chemically synthesized
  source 1..22: mol_type = other DNA
acctgttagcatttgtttcctt

SEQ ID NO: 58722 - DNA, 22 bp, synthetic construct
  misc_feature 1..22: note = chemically synthesized
  source 1..22: mol_type = other DNA
ttagcatttgtttccttgtctt

SEQ ID NO: 58723 - DNA, 22 bp, synthetic construct
  misc_feature 1..22: note = chemically synthesized
  source 1..22: mol_type = other DNA
gcatttgtttccttgtcttgta

SEQ ID NO: 58724 - DNA, 22 bp, synthetic construct
  misc_feature 1..22: note = chemically synthesized
  source 1..22: mol_type = other DNA
gtttccttgtcttgtaaagtag

SEQ ID NO: 58725 - DNA, 22 bp, synthetic construct
  misc_feature 1..22: note = chemically synthesized
  source 1..22: mol_type = other DNA
tttccttgtcttgtaaagtagg

SEQ ID NO: 58726 - DNA, 22 bp, synthetic construct
  misc_feature 1..22: note = chemically synthesized
  source 1..22: mol_type = other DNA
ccttgtcttgtaaagtaggtaa

SEQ ID NO: 58727 - DNA, 22 bp, synthetic construct
  misc_feature 1..22: note = chemically synthesized
  source 1..22: mol_type = other DNA
cttgtcttgtaaagtaggtaaa

SEQ ID NO: 58728 - DNA, 22 bp, synthetic construct
  misc_feature 1..22: note = chemically synthesized
  source 1..22: mol_type = other DNA
gtcttgtaaagtaggtaaaata

SEQ ID NO: 58729 - DNA, 22 bp, synthetic construct
  misc_feature 1..22: note = chemically synthesized
  source 1..22: mol_type = other DNA
tcttgtaaagtaggtaaaatag

SEQ ID NO: 58730 - DNA, 22 bp, synthetic construct
  misc_feature 1..22: note = chemically synthesized
  source 1..22: mol_type = other DNA
gtaaagtaggtaaaatagatag

SEQ ID NO: 58731 - DNA, 22 bp, synthetic construct
  misc_feature 1..22: note = chemically synthesized
  source 1..22: mol_type = other DNA
taaagtaggtaaaatagatagt

SEQ ID NO: 58732 - DNA, 22 bp, synthetic construct
  misc_feature 1..22: note = chemically synthesized
  source 1..22: mol_type = other DNA
ggactgggtgggtctctaagtc

SEQ ID NO: 58733 - DNA, 22 bp, synthetic construct
  misc_feature 1..22: note = chemically synthesized
  source 1..22: mol_type = other DNA
gactgggtgggtctctaagtcc

SEQ ID NO: 58734 - DNA, 22 bp, synthetic construct
  misc_feature 1..22: note = chemically synthesized
  source 1..22: mol_type = other DNA
ggtgggtctctaagtccccatg

SEQ ID NO: 58735 - DNA, 22 bp, synthetic construct
  misc_feature 1..22: note = chemically synthesized
  source 1..22: mol_type = other DNA
taagtccccatgatgttctagc

SEQ ID NO: 58736 - DNA, 22 bp, synthetic construct
  misc_feature 1..22: note = chemically synthesized
  source 1..22: mol_type = other DNA
agtccccatgatgttctagcat

SEQ ID NO: 58737 - DNA, 22 bp, synthetic construct
  misc_feature 1..22: note = chemically synthesized
  source 1..22: mol_type = other DNA
tagcatagtatgaacaccactg

SEQ ID NO: 58738 - DNA, 22 bp, synthetic construct
  misc_feature 1..22: note = chemically synthesized
  source 1..22: mol_type = other DNA
gcatagtatgaacaccactgac

SEQ ID NO: 58739 - DNA, 22 bp, synthetic construct
  misc_feature 1..22: note = chemically synthesized
  source 1..22: mol_type = other DNA
accagttttctccctgctattt

SEQ ID NO: 58740 - DNA, 22 bp, synthetic construct
  misc_feature 1..22: note = chemically synthesized
  source 1..22: mol_type = other DNA
tctccctgctattttttggaat

SEQ ID NO: 58741 - DNA, 22 bp, synthetic construct
  misc_feature 1..22: note = chemically synthesized
  source 1..22: mol_type = other DNA
ctccctgctattttttggaatc

SEQ ID NO: 58742 - DNA, 22 bp, synthetic construct
  misc_feature 1..22: note = chemically synthesized
  source 1..22: mol_type = other DNA
tccctgctattttttggaatct

SEQ ID NO: 58743 - DNA, 22 bp, synthetic construct
  misc_feature 1..22: note = chemically synthesized
  source 1..22: mol_type = other DNA
cctgctattttttggaatctag

SEQ ID NO: 58744 - DNA, 22 bp, synthetic construct
  misc_feature 1..22: note = chemically synthesized
  source 1..22: mol_type = other DNA
ctattttttggaatctagttgc

SEQ ID NO: 58745 - DNA, 22 bp, synthetic construct
  misc_feature 1..22: note = chemically synthesized
  source 1..22: mol_type = other DNA
ttttttggaatctagttgctga

SEQ ID NO: 58746 - DNA, 22 bp, synthetic construct
  misc_feature 1..22: note = chemically synthesized
  source 1..22: mol_type = other DNA
tttggaatctagttgctgaatg

SEQ ID NO: 58747 - DNA, 22 bp, synthetic construct
  misc_feature 1..22: note = chemically synthesized
  source 1..22: mol_type = other DNA
ttggaatctagttgctgaatgg

SEQ ID NO: 58748 - DNA, 22 bp, synthetic construct
  misc_feature 1..22: note = chemically synthesized
  source 1..22: mol_type = other DNA
tggaatctagttgctgaatggg

SEQ ID NO: 58749 - DNA, 22 bp, synthetic construct
  misc_feature 1..22: note = chemically synthesized
  source 1..22: mol_type = other DNA
ggaatctagttgctgaatgggg

SEQ ID NO: 58750 - DNA, 22 bp, synthetic construct
  misc_feature 1..22: note = chemically synthesized
  source 1..22: mol_type = other DNA
gaatctagttgctgaatggggc

SEQ ID NO: 58751 - DNA, 22 bp, synthetic construct
  misc_feature 1..22: note = chemically synthesized
  source 1..22: mol_type = other DNA
gttgctgaatggggctcacctg

SEQ ID NO: 58752 - DNA, 22 bp, synthetic construct
  misc_feature 1..22: note = chemically synthesized
  source 1..22: mol_type = other DNA
ctgaatggggctcacctgcaaa

SEQ ID NO: 58753 - DNA, 22 bp, synthetic construct
  misc_feature 1..22: note = chemically synthesized
  source 1..22: mol_type = other DNA
aatggggctcacctgcaaagac

SEQ ID NO: 58754 - DNA, 22 bp, synthetic construct
  misc_feature 1..22: note = chemically synthesized
  source 1..22: mol_type = other DNA
acctgcaaagacagcagaatat

SEQ ID NO: 58755 - DNA, 22 bp, synthetic construct
  misc_feature 1..22: note = chemically synthesized
  source 1..22: mol_type = other DNA
caaagacagcagaatattattt

SEQ ID NO: 58756 - DNA, 22 bp, synthetic construct
  misc_feature 1..22: note = chemically synthesized
  source 1..22: mol_type = other DNA
ttttcttgatttgcctcaaaga

SEQ ID NO: 58757 - DNA, 22 bp, synthetic construct
  misc_feature 1..22: note = chemically synthesized
  source 1..22: mol_type = other DNA
tcttgatttgcctcaaagatgg

SEQ ID NO: 58758 - DNA, 22 bp, synthetic construct
  misc_feature 1..22: note = chemically synthesized
  source 1..22: mol_type = other DNA
cttgatttgcctcaaagatgga

SEQ ID NO: 58759 - DNA, 22 bp, synthetic construct
  misc_feature 1..22: note = chemically synthesized
  source 1..22: mol_type = other DNA
ttgatttgcctcaaagatggaa

SEQ ID NO: 58760 - DNA, 22 bp, synthetic construct
  misc_feature 1..22: note = chemically synthesized
  source 1..22: mol_type = other DNA
gatttgcctcaaagatggaagc

SEQ ID NO: 58761 - DNA, 22 bp, synthetic construct
  misc_feature 1..22: note = chemically synthesized
  source 1..22: mol_type = other DNA
atttgcctcaaagatggaagct

SEQ ID NO: 58762 - DNA, 22 bp, synthetic construct
  misc_feature 1..22: note = chemically synthesized
  source 1..22: mol_type = other DNA
gcctcaaagatggaagctatgg

SEQ ID NO: 58763 - DNA, 22 bp, synthetic construct
  misc_feature 1..22: note = chemically synthesized
  source 1..22: mol_type = other DNA
cctcaaagatggaagctatggt

SEQ ID NO: 58764 - DNA, 22 bp, synthetic construct
  misc_feature 1..22: note = chemically synthesized
  source 1..22: mol_type = other DNA
aaagatggaagctatggtggag

SEQ ID NO: 58765 - DNA, 22 bp, synthetic construct
  misc_feature 1..22: note = chemically synthesized
  source 1..22: mol_type = other DNA
tggtggagattaaggcttggat

SEQ ID NO: 58766 - DNA, 22 bp, synthetic construct
  misc_feature 1..22: note = chemically synthesized
  source 1..22: mol_type = other DNA
aggcttggattcgtgattcccc

SEQ ID NO: 58767 - DNA, 22 bp, synthetic construct
  misc_feature 1..22: note = chemically synthesized
  source 1..22: mol_type = other DNA
ggattcgtgattccccaacaga

SEQ ID NO: 58768 - DNA, 22 bp, synthetic construct
  misc_feature 1..22: note = chemically synthesized
  source 1..22: mol_type = other DNA
gattcgtgattccccaacagaa

SEQ ID NO: 58769 - DNA, 22 bp, synthetic construct
  misc_feature 1..22: note = chemically synthesized
  source 1..22: mol_type = other DNA
gtgattccccaacagaaagctt

SEQ ID NO: 58770 - DNA, 22 bp, synthetic construct
  misc_feature 1..22: note = chemically synthesized
  source 1..22: mol_type = other DNA
cccaacagaaagcttaaaggca

SEQ ID NO: 58771 - DNA, 22 bp, synthetic construct
  misc_feature 1..22: note = chemically synthesized
  source 1..22: mol_type = other DNA
aaaggcatctttcaaattgctg

SEQ ID NO: 58772 - DNA, 22 bp, synthetic construct
  misc_feature 1..22: note = chemically synthesized
  source 1..22: mol_type = other DNA
aaggcatctttcaaattgctgg

SEQ ID NO: 58773 - DNA, 22 bp, synthetic construct
  misc_feature 1..22: note = chemically synthesized
  source 1..22: mol_type = other DNA
tcaaattgctggaagcaaaatt

SEQ ID NO: 58774 - DNA, 22 bp, synthetic construct
  misc_feature 1..22: note = chemically synthesized
  source 1..22: mol_type = other DNA
caaattgctggaagcaaaattg

SEQ ID NO: 58775 - DNA, 22 bp, synthetic construct
  misc_feature 1..22: note = chemically synthesized
  source 1..22: mol_type = other DNA
aaattgctggaagcaaaattga

SEQ ID NO: 58776 - DNA, 22 bp, synthetic construct
  misc_feature 1..22: note = chemically synthesized
  source 1..22: mol_type = other DNA
ctggaagcaaaattgaagtgca

SEQ ID NO: 58777 - DNA, 22 bp, synthetic construct
  misc_feature 1..22: note = chemically synthesized
  source 1..22: mol_type = other DNA
gaagcaaaattgaagtgcagta

SEQ ID NO: 58778 - DNA, 22 bp, synthetic construct
  misc_feature 1..22: note = chemically synthesized
  source 1..22: mol_type = other DNA
aagtgcagtataatggaatggt

SEQ ID NO: 58779 - DNA, 22 bp, synthetic construct
  misc_feature 1..22: note = chemically synthesized
  source 1..22: mol_type = other DNA
acagaagtttccagccttataa

SEQ ID NO: 58780 - DNA, 22 bp, synthetic construct
  misc_feature 1..22: note = chemically synthesized
  source 1..22: mol_type = other DNA
ccagccttataagatttctcca

SEQ ID NO: 58781 - DNA, 22 bp, synthetic construct
  misc_feature 1..22: note = chemically synthesized
  source 1..22: mol_type = other DNA
cagccttataagatttctccat

SEQ ID NO: 58782 - DNA, 22 bp, synthetic construct
  misc_feature 1..22: note = chemically synthesized
  source 1..22: mol_type = other DNA
ataagatttctccatcttttaa

SEQ ID NO: 58783 - DNA, 22 bp, synthetic construct
  misc_feature 1..22: note = chemically synthesized
  source 1..22: mol_type = other DNA
taagatttctccatcttttaat

SEQ ID NO: 58784 - DNA, 22 bp, synthetic construct
  misc_feature 1..22: note = chemically synthesized
  source 1..22: mol_type = other DNA
ctccatcttttaattgttgcaa

SEQ ID NO: 58785 - DNA, 22 bp, synthetic construct
  misc_feature 1..22: note = chemically synthesized
  source 1..22: mol_type = other DNA
tccatcttttaattgttgcaag

SEQ ID NO: 58786 - DNA, 22 bp, synthetic construct
  misc_feature 1..22: note = chemically synthesized
  source 1..22: mol_type = other DNA
catcttttaattgttgcaagct

SEQ ID NO: 58787 - DNA, 22 bp, synthetic construct
  misc_feature 1..22: note = chemically synthesized
  source 1..22: mol_type = other DNA
ttaattgttgcaagctgttttt

SEQ ID NO: 58788 - DNA, 22 bp, synthetic construct
  misc_feature 1..22: note = chemically synthesized
  source 1..22: mol_type = other DNA
taattgttgcaagctgtttttt

SEQ ID NO: 58789 - DNA, 22 bp, synthetic construct
  misc_feature 1..22: note = chemically synthesized
  source 1..22: mol_type = other DNA
aattgttgcaagctgttttttt

SEQ ID NO: 58790 - DNA, 22 bp, synthetic construct
  misc_feature 1..22: note = chemically synthesized
  source 1..22: mol_type = other DNA
attgttgcaagctgtttttttt

SEQ ID NO: 58791 - DNA, 22 bp, synthetic construct
  misc_feature 1..22: note = chemically synthesized
  source 1..22: mol_type = other DNA
ttgcaagctgttttttttgaaa

SEQ ID NO: 58792 - DNA, 22 bp, synthetic construct
  misc_feature 1..22: note = chemically synthesized
  source 1..22: mol_type = other DNA
caagctgttttttttgaaaaac

SEQ ID NO: 58793 - DNA, 22 bp, synthetic construct
  misc_feature 1..22: note = chemically synthesized
  source 1..22: mol_type = other DNA
ttttttttgaaaaactccaaag

SEQ ID NO: 58794 - DNA, 22 bp, synthetic construct
  misc_feature 1..22: note = chemically synthesized
  source 1..22: mol_type = other DNA
tttttgaaaaactccaaagaat

SEQ ID NO: 58795 - DNA, 22 bp, synthetic construct
  misc_feature 1..22: note = chemically synthesized
  source 1..22: mol_type = other DNA
ttttgaaaaactccaaagaatg

SEQ ID NO: 58796 - DNA, 22 bp, synthetic construct
  misc_feature 1..22: note = chemically synthesized
  source 1..22: mol_type = other DNA
tttgaaaaactccaaagaatgt

SEQ ID NO: 58797 - DNA, 22 bp, synthetic construct
  misc_feature 1..22: note = chemically synthesized
  source 1..22: mol_type = other DNA
ttgaaaaactccaaagaatgta

SEQ ID NO: 58798 - DNA, 22 bp, synthetic construct
  misc_feature 1..22: note = chemically synthesized
  source 1..22: mol_type = other DNA
tgaaaaactccaaagaatgtaa

SEQ ID NO: 58799 - DNA, 22 bp, synthetic construct
  misc_feature 1..22: note = chemically synthesized
  source 1..22: mol_type = other DNA
gaaaaactccaaagaatgtaat

SEQ ID NO: 58800 - DNA, 22 bp, synthetic construct
  misc_feature 1..22: note = chemically synthesized
  source 1..22: mol_type = other DNA
aaaaactccaaagaatgtaatg

SEQ ID NO: 58801 - DNA, 22 bp, synthetic construct
  misc_feature 1..22: note = chemically synthesized
  source 1..22: mol_type = other DNA
caaagaatgtaatgtgtatttt

SEQ ID NO: 58802 - DNA, 22 bp, synthetic construct
  misc_feature 1..22: note = chemically synthesized
  source 1..22: mol_type = other DNA
tctccaagtttgcttttttggg

SEQ ID NO: 58803 - DNA, 22 bp, synthetic construct
  misc_feature 1..22: note = chemically synthesized
  source 1..22: mol_type = other DNA
ctccaagtttgcttttttgggc

SEQ ID NO: 58804 - DNA, 22 bp, synthetic construct
  misc_feature 1..22: note = chemically synthesized
  source 1..22: mol_type = other DNA
tccaagtttgcttttttgggca

SEQ ID NO: 58805 - DNA, 22 bp, synthetic construct
  misc_feature 1..22: note = chemically synthesized
  source 1..22: mol_type = other DNA
caagtttgcttttttgggcaaa

SEQ ID NO: 58806 - DNA, 22 bp, synthetic construct
  misc_feature 1..22: note = chemically synthesized
  source 1..22: mol_type = other DNA
gcttttttgggcaaatgtaact

SEQ ID NO: 58807 - DNA, 22 bp, synthetic construct
  misc_feature 1..22: note = chemically synthesized
  source 1..22: mol_type = other DNA
cttttttgggcaaatgtaacta

SEQ ID NO: 58808 - DNA, 22 bp, synthetic construct
  misc_feature 1..22: note = chemically synthesized
  source 1..22: mol_type = other DNA
ttttgggcaaatgtaactacat

SEQ ID NO: 58809 - DNA, 22 bp, synthetic construct
  misc_feature 1..22: note = chemically synthesized
  source 1..22: mol_type = other DNA
tttgggcaaatgtaactacatc

SEQ ID NO: 58810 - DNA, 22 bp, synthetic construct
  misc_feature 1..22: note = chemically synthesized
  source 1..22: mol_type = other DNA
ttgggcaaatgtaactacatca

SEQ ID NO: 58811 - DNA, 22 bp, synthetic construct
  misc_feature 1..22: note = chemically synthesized
  source 1..22: mol_type = other DNA
tgggcaaatgtaactacatcaa

SEQ ID NO: 58812 - DNA, 22 bp, synthetic construct
  misc_feature 1..22: note = chemically synthesized
  source 1..22: mol_type = other DNA
gggcaaatgtaactacatcaaa

SEQ ID NO: 58813 - DNA, 22 bp, synthetic construct
  misc_feature 1..22: note = chemically synthesized
  source 1..22: mol_type = other DNA
ggcaaatgtaactacatcaaaa

SEQ ID NO: 58814 - DNA, 22 bp, synthetic construct
  misc_feature 1..22: note = chemically synthesized
  source 1..22: mol_type = other DNA
catcaaaatagaagtacgtttt

SEQ ID NO: 58815 - DNA, 22 bp, synthetic construct
  misc_feature 1..22: note = chemically synthesized
  source 1..22: mol_type = other DNA
ttgaaaaagaaatagttgaatt

SEQ ID NO: 58816 - DNA, 22 bp, synthetic construct
  misc_feature 1..22: note = chemically synthesized
  source 1..22: mol_type = other DNA
tgaaaaagaaatagttgaattc

SEQ ID NO: 58817 - DNA, 22 bp, synthetic construct
  misc_feature 1..22: note = chemically synthesized
  source 1..22: mol_type = other DNA
gaaaaagaaatagttgaattca

SEQ ID NO: 58818 - DNA, 22 bp, synthetic construct
  misc_feature 1..22: note = chemically synthesized
  source 1..22: mol_type = other DNA
aaaaagaaatagttgaattcaa

SEQ ID NO: 58819 - DNA, 22 bp, synthetic construct
  misc_feature 1..22: note = chemically synthesized
  source 1..22: mol_type = other DNA
aattcaaacaaccaggtatttt

SEQ ID NO: 58820 - DNA, 22 bp, synthetic construct
  misc_feature 1..22: note = chemically synthesized
  source 1..22: mol_type = other DNA
aaacaaccaggtattttaaatt

SEQ ID NO: 58821 - DNA, 22 bp, synthetic construct
  misc_feature 1..22: note = chemically synthesized
  source 1..22: mol_type = other DNA
taaattcaattaactgactgaa

SEQ ID NO: 58822 - DNA, 22 bp, synthetic construct
  misc_feature 1..22: note = chemically synthesized
  source 1..22: mol_type = other DNA
aaattcaattaactgactgaat

SEQ ID NO: 58823 - DNA, 22 bp, synthetic construct
  misc_feature 1..22: note = chemically synthesized
  source 1..22: mol_type = other DNA
aattcaattaactgactgaatt

SEQ ID NO: 58824 - DNA, 22 bp, synthetic construct
  misc_feature 1..22: note = chemically synthesized
  source 1..22: mol_type = other DNA
aattaactgactgaattcagtg

SEQ ID NO: 58825 - DNA, 22 bp, synthetic construct
  misc_feature 1..22: note = chemically synthesized
  source 1..22: mol_type = other DNA
actgactgaattcagtgatatt

SEQ ID NO: 58826 - DNA, 22 bp, synthetic construct
  misc_feature 1..22: note = chemically synthesized
  source 1..22: mol_type = other DNA
actgaattcagtgatattttcc

SEQ ID NO: 58827 - DNA, 22 bp, synthetic construct
  misc_feature 1..22: note = chemically synthesized
  source 1..22: mol_type = other DNA
aattcagtgatattttcctcct

SEQ ID NO: 58828 - DNA, 22 bp, synthetic construct
  misc_feature 1..22: note = chemically synthesized
  source 1..22: mol_type = other DNA
agtgatattttcctccttcctc

SEQ ID NO: 58829 - DNA, 22 bp, synthetic construct
  misc_feature 1..22: note = chemically synthesized
  source 1..22: mol_type = other DNA
tcctccttcctcctcccaaaag

SEQ ID NO: 58830 - DNA, 22 bp, synthetic construct
  misc_feature 1..22: note = chemically synthesized
  source 1..22: mol_type = other DNA
cctccttcctcctcccaaaagc

SEQ ID NO: 58831 - DNA, 22 bp, synthetic construct
  misc_feature 1..22: note = chemically synthesized
  source 1..22: mol_type = other DNA
ctccttcctcctcccaaaagct

SEQ ID NO: 58832 - DNA, 22 bp, synthetic construct
  misc_feature 1..22: note = chemically synthesized
  source 1..22: mol_type = other DNA
cttcctcctcccaaaagctggt

SEQ ID NO: 58833 - DNA, 22 bp, synthetic construct
  misc_feature 1..22: note = chemically synthesized
  source 1..22: mol_type = other DNA
cctcctcccaaaagctggtttc

SEQ ID NO: 58834 - DNA, 22 bp, synthetic construct
  misc_feature 1..22: note = chemically synthesized
  source 1..22: mol_type = other DNA
ctcctcccaaaagctggtttct

SEQ ID NO: 58835 - DNA, 22 bp, synthetic construct
  misc_feature 1..22: note = chemically synthesized
  source 1..22: mol_type = other DNA
ctcccaaaagctggtttctctg

SEQ ID NO: 58836 - DNA, 22 bp, synthetic construct
  misc_feature 1..22: note = chemically synthesized
  source 1..22: mol_type = other DNA
ccaaaagctggtttctctgtat

SEQ ID NO: 58837 - DNA, 22 bp, synthetic construct
  misc_feature 1..22: note = chemically synthesized
  source 1..22: mol_type = other DNA
gtttctctgtatggacatagcc

SEQ ID NO: 58838 - DNA, 22 bp, synthetic construct
  misc_feature 1..22: note = chemically synthesized
  source 1..22: mol_type = other DNA
ctctgtatggacatagcctaca

SEQ ID NO: 58839 - DNA, 22 bp, synthetic construct
  misc_feature 1..22: note = chemically synthesized
  source 1..22: mol_type = other DNA
tctgtatggacatagcctacat

SEQ ID NO: 58840 - DNA, 22 bp, synthetic construct
  misc_feature 1..22: note = chemically synthesized
  source 1..22: mol_type = other DNA
tgtatggacatagcctacatat

SEQ ID NO: 58841 - DNA, 22 bp, synthetic construct
  misc_feature 1..22: note = chemically synthesized
  source 1..22: mol_type = other DNA
tatggacatagcctacatatgc

SEQ ID NO: 58842 - DNA, 22 bp, synthetic construct
  misc_feature 1..22: note = chemically synthesized
  source 1..22: mol_type = other DNA
catatgctgagtccctggagtt

SEQ ID NO: 58843 - DNA, 22 bp, synthetic construct
  misc_feature 1..22: note = chemically synthesized
  source 1..22: mol_type = other DNA
agtccctggagttaggaatttt

SEQ ID NO: 58844 - DNA, 22 bp, synthetic construct
  misc_feature 1..22: note = chemically synthesized
  source 1..22: mol_type = other DNA
gagttaggaatttttgcttgtt

SEQ ID NO: 58845 - DNA, 22 bp, synthetic construct
  misc_feature 1..22: note = chemically synthesized
  source 1..22: mol_type = other DNA
ggaatttttgcttgttaaaggc

SEQ ID NO: 58846 - DNA, 22 bp, synthetic construct
  misc_feature 1..22: note = chemically synthesized
  source 1..22: mol_type = other DNA
ttgcttgttaaaggcatccgat

SEQ ID NO: 58847 - DNA, 22 bp, synthetic construct
  misc_feature 1..22: note = chemically synthesized
  source 1..22: mol_type = other DNA
tgcttgttaaaggcatccgatg

SEQ ID NO: 58848 - DNA, 22 bp, synthetic construct
  misc_feature 1..22: note = chemically synthesized
  source 1..22: mol_type = other DNA
gcttgttaaaggcatccgatgc

SEQ ID NO: 58849 - DNA, 22 bp, synthetic construct
  misc_feature 1..22: note = chemically synthesized
  source 1..22: mol_type = other DNA
cttgttaaaggcatccgatgca

SEQ ID NO: 58850 - DNA, 22 bp, synthetic construct
  misc_feature 1..22: note = chemically synthesized
  source 1..22: mol_type = other DNA
gttaaaggcatccgatgcaaca

SEQ ID NO: 58851 - DNA, 22 bp, synthetic construct
  misc_feature 1..22: note = chemically synthesized
  source 1..22: mol_type = other DNA
ttaaaggcatccgatgcaacat

SEQ ID NO: 58852 - DNA, 22 bp, synthetic construct
  misc_feature 1..22: note = chemically synthesized
  source 1..22: mol_type = other DNA
aaggcatccgatgcaacatgtt

SEQ ID NO: 58853 - DNA, 22 bp, synthetic construct
  misc_feature 1..22: note = chemically synthesized
  source 1..22: mol_type = other DNA
agaagaactctccctctgttag

SEQ ID NO: 58854 - DNA, 22 bp, synthetic construct
  misc_feature 1..22: note = chemically synthesized
  source 1..22: mol_type = other DNA
gaagaactctccctctgttagt

SEQ ID NO: 58855 - DNA, 22 bp, synthetic construct
  misc_feature 1..22: note = chemically synthesized
  source 1..22: mol_type = other DNA
tccctctgttagtgttgaagac

SEQ ID NO: 58856 - DNA, 22 bp, synthetic construct
  misc_feature 1..22: note = chemically synthesized
  source 1..22: mol_type = other DNA
cctctgttagtgttgaagacag

SEQ ID NO: 58857 - DNA, 22 bp, synthetic construct
  misc_feature 1..22: note = chemically synthesized
  source 1..22: mol_type = other DNA
tgttagtgttgaagacagcata

SEQ ID NO: 58858 - DNA, 22 bp, synthetic construct
  misc_feature 1..22: note = chemically synthesized
  source 1..22: mol_type = other DNA
ttagtgttgaagacagcataaa

SEQ ID NO: 58859 - DNA, 22 bp, synthetic construct
  misc_feature 1..22: note = chemically synthesized
  source 1..22: mol_type = other DNA
gtgttgaagacagcataaattg

SEQ ID NO: 58860 - DNA, 22 bp, synthetic construct
  misc_feature 1..22: note = chemically synthesized
  source 1..22: mol_type = other DNA
aagacagcataaattgagggaa

SEQ ID NO: 58861 - DNA, 22 bp, synthetic construct
  misc_feature 1..22: note = chemically synthesized
  source 1..22: mol_type = other DNA
agggaaaatgttctttttttat

SEQ ID NO: 58862 - DNA, 22 bp, synthetic construct
  misc_feature 1..22: note = chemically synthesized
  source 1..22: mol_type = other DNA
tttttttattcatcatgtaggt

SEQ ID NO: 58863 - DNA, 22 bp, synthetic construct
  misc_feature 1..22: note = chemically synthesized
  source 1..22: mol_type = other DNA
tttttattcatcatgtaggtaa

SEQ ID NO: 58864 - DNA, 22 bp, synthetic construct
  misc_feature 1..22: note = chemically synthesized
  source 1..22: mol_type = other DNA
ttttattcatcatgtaggtaaa

SEQ ID NO: 58865 - DNA, 22 bp, synthetic construct
  misc_feature 1..22: note = chemically synthesized
  source 1..22: mol_type = other DNA
tttattcatcatgtaggtaaaa

SEQ ID NO: 58866 - DNA, 22 bp, synthetic construct
  misc_feature 1..22: note = chemically synthesized
  source 1..22: mol_type = other DNA
ttattcatcatgtaggtaaaag

SEQ ID NO: 58867 - DNA, 22 bp, synthetic construct
  misc_feature 1..22: note = chemically synthesized
  source 1..22: mol_type = other DNA
tattcatcatgtaggtaaaagc

SEQ ID NO: 58868 - DNA, 22 bp, synthetic construct
  misc_feature 1..22: note = chemically synthesized
  source 1..22: mol_type = other DNA
attcatcatgtaggtaaaagca

SEQ ID NO: 58869 - DNA, 22 bp, synthetic construct
  misc_feature 1..22: note = chemically synthesized
  source 1..22: mol_type = other DNA
ttcatcatgtaggtaaaagcat

SEQ ID NO: 58870 - DNA, 22 bp, synthetic construct
  misc_feature 1..22: note = chemically synthesized
  source 1..22: mol_type = other DNA
atcatgtaggtaaaagcatatg

SEQ ID NO: 58871 - DNA, 22 bp, synthetic construct
  misc_feature 1..22: note = chemically synthesized
  source 1..22: mol_type = other DNA
ttctgggacatgcgatctttgc

SEQ ID NO: 58872 - DNA, 22 bp, synthetic construct
  misc_feature 1..22: note = chemically synthesized
  source 1..22: mol_type = other DNA
tgggacatgcgatctttgcaat

SEQ ID NO: 58873 - DNA, 22 bp, synthetic construct
  misc_feature 1..22: note = chemically synthesized
  source 1..22: mol_type = other DNA
ggacatgcgatctttgcaatcc

SEQ ID NO: 58874 - DNA, 22 bp, synthetic construct
  misc_feature 1..22: note = chemically synthesized
  source 1..22: mol_type = other DNA
tgcaatccattttttaaacttg

SEQ ID NO: 58875 - DNA, 22 bp, synthetic construct
  misc_feature 1..22: note = chemically synthesized
  source 1..22: mol_type = other DNA
gcaatccattttttaaacttgg

SEQ ID NO: 58876 - DNA, 22 bp, synthetic construct
  misc_feature 1..22: note = chemically synthesized
  source 1..22: mol_type = other DNA
caatccattttttaaacttggt

SEQ ID NO: 58877 - DNA, 22 bp, synthetic construct
  misc_feature 1..22: note = chemically synthesized
  source 1..22: mol_type = other DNA
tttaaacttggtgtttaccatt

SEQ ID NO: 58878 - DNA, 22 bp, synthetic construct
  misc_feature 1..22: note = chemically synthesized
  source 1..22: mol_type = other DNA
ttaaacttggtgtttaccattg

SEQ ID NO: 58879 - DNA, 22 bp, synthetic construct
  misc_feature 1..22: note = chemically synthesized
  source 1..22: mol_type = other DNA
taaacttggtgtttaccattgg

SEQ ID NO: 58880 - DNA, 22 bp, synthetic construct
  misc_feature 1..22: note = chemically synthesized
  source 1..22: mol_type = other DNA
aaacttggtgtttaccattggc

SEQ ID NO: 58881 - DNA, 22 bp, synthetic construct
  misc_feature 1..22: note = chemically synthesized
  source 1..22: mol_type = other DNA
aacttggtgtttaccattggct

SEQ ID NO: 58882 - DNA, 22 bp, synthetic construct
  misc_feature 1..22: note = chemically synthesized
  source 1..22: mol_type = other DNA
ggtgtttaccattggcttttag

SEQ ID NO: 58883 - DNA, 22 bp, synthetic construct
  misc_feature 1..22: note = chemically synthesized
  source 1..22: mol_type = other DNA
gtgtttaccattggcttttagc

SEQ ID NO: 58884 - DNA, 22 bp, synthetic construct
  misc_feature 1..22: note = chemically synthesized
  source 1..22: mol_type = other DNA
accattggcttttagcacggat

SEQ ID NO: 58885 - DNA, 22 bp, synthetic construct
  misc_feature 1..22: note = chemically synthesized
  source 1..22: mol_type = other DNA
ccattggcttttagcacggatg

SEQ ID NO: 58886 - DNA, 22 bp, synthetic construct
  misc_feature 1..22: note = chemically synthesized
  source 1..22: mol_type = other DNA
gcttttagcacggatgtttctg

SEQ ID NO: 58887 - DNA, 22 bp, synthetic construct
  misc_feature 1..22: note = chemically synthesized
  source 1..22: mol_type = other DNA
ttagcacggatgtttctgtttt

SEQ ID NO: 58888 - DNA, 22 bp, synthetic construct
  misc_feature 1..22: note = chemically synthesized
  source 1..22: mol_type = other DNA
tagcacggatgtttctgttttc

SEQ ID NO: 58889 - DNA, 22 bp, synthetic construct
  misc_feature 1..22: note = chemically synthesized
  source 1..22: mol_type = other DNA
agcacggatgtttctgttttcc

SEQ ID NO: 58890 - DNA, 22 bp, synthetic construct
  misc_feature 1..22: note = chemically synthesized
  source 1..22: mol_type = other DNA
gcacggatgtttctgttttcca

SEQ ID NO: 58891 - DNA, 22 bp, synthetic construct
  misc_feature 1..22: note = chemically synthesized
  source 1..22: mol_type = other DNA
ctgttttccacactgtccagca

SEQ ID NO: 58892 - DNA, 22 bp, synthetic construct
  misc_feature 1..22: note = chemically synthesized
  source 1..22: mol_type = other DNA
tgttttccacactgtccagcaa

SEQ ID NO: 58893 - DNA, 22 bp, synthetic construct
  misc_feature 1..22: note = chemically synthesized
  source 1..22: mol_type = other DNA
ttttccacactgtccagcaaat

SEQ ID NO: 58894 - DNA, 22 bp, synthetic construct
  misc_feature 1..22: note = chemically synthesized
  source 1..22: mol_type = other DNA
tccacactgtccagcaaatacc

SEQ ID NO: 58895 - DNA, 22 bp, synthetic construct
  misc_feature 1..22: note = chemically synthesized
  source 1..22: mol_type = other DNA
ccacactgtccagcaaatacca

SEQ ID NO: 58896 - DNA, 22 bp, synthetic construct
  misc_feature 1..22: note = chemically synthesized
  source 1..22: mol_type = other DNA
cacactgtccagcaaataccat

SEQ ID NO: 58897 - DNA, 22 bp, synthetic construct
  misc_feature 1..22: note = chemically synthesized
  source 1..22: mol_type = other DNA
tccagcaaataccatttatatg

SEQ ID NO: 58898 - DNA, 22 bp, synthetic construct
  misc_feature 1..22: note = chemically synthesized
  source 1..22: mol_type = other DNA
atatgtggcattgaatgagata

SEQ ID NO: 58899 - DNA, 22 bp, synthetic construct
  misc_feature 1..22: note = chemically synthesized
  source 1..22: mol_type = other DNA
tatgtggcattgaatgagatat

SEQ ID NO: 58900 - DNA, 22 bp, synthetic construct
  misc_feature 1..22: note = chemically synthesized
  source 1..22: mol_type = other DNA
aatgagatatgaaatgttttca

SEQ ID NO: 58901 - DNA, 22 bp, synthetic construct
  misc_feature 1..22: note = chemically synthesized
  source 1..22: mol_type = other DNA
tcagaagcatgctgaaaaaggg

SEQ ID NO: 58902 - DNA, 22 bp, synthetic construct
  misc_feature 1..22: note = chemically synthesized
  source 1..22: mol_type = other DNA
cagaagcatgctgaaaaagggc

SEQ ID NO: 58903 - DNA, 22 bp, synthetic construct
  misc_feature 1..22: note = chemically synthesized
  source 1..22: mol_type = other DNA
agaagcatgctgaaaaagggca

SEQ ID NO: 58904 - DNA, 22 bp, synthetic construct
  misc_feature 1..22: note = chemically synthesized
  source 1..22: mol_type = other DNA
aaaaagggcattcaaagttatc

SEQ ID NO: 58905 - DNA, 22 bp, synthetic construct
  misc_feature 1..22: note = chemically synthesized
  source 1..22: mol_type = other DNA
aaagttatcctttggataatga

SEQ ID NO: 58906 - DNA, 22 bp, synthetic construct
  misc_feature 1..22: note = chemically synthesized
  source 1..22: mol_type = other DNA
tcctttggataatgatgatcta

SEQ ID NO: 58907 - DNA, 22 bp, synthetic construct
  misc_feature 1..22: note = chemically synthesized
  source 1..22: mol_type = other DNA
tggataatgatgatctaaaact

SEQ ID NO: 58908 - DNA, 22 bp, synthetic construct
  misc_feature 1..22: note = chemically synthesized
  source 1..22: mol_type = other DNA
ggataatgatgatctaaaactt

SEQ ID NO: 58909 - DNA, 22 bp, synthetic construct
  misc_feature 1..22: note = chemically synthesized
  source 1..22: mol_type = other DNA
gataatgatgatctaaaacttt

SEQ ID NO: 58910 - DNA, 22 bp, synthetic construct
  misc_feature 1..22: note = chemically synthesized
  source 1..22: mol_type = other DNA
aaactttcttttattatcccat

SEQ ID NO: 58911 - DNA, 22 bp, synthetic construct
  misc_feature 1..22: note = chemically synthesized
  source 1..22: mol_type = other DNA
tcttttattatcccatgtgctc

SEQ ID NO: 58912 - DNA, 22 bp, synthetic construct
  misc_feature 1..22: note = chemically synthesized
  source 1..22: mol_type = other DNA
cttttattatcccatgtgctca

SEQ ID NO: 58913 - DNA, 22 bp, synthetic construct
  misc_feature 1..22: note = chemically synthesized
  source 1..22: mol_type = other DNA
ttttattatcccatgtgctcag

SEQ ID NO: 58914 - DNA, 22 bp, synthetic construct
  misc_feature 1..22: note = chemically synthesized
  source 1..22: mol_type = other DNA
ttattatcccatgtgctcagag

SEQ ID NO: 58915 - DNA, 22 bp, synthetic construct
  misc_feature 1..22: note = chemically synthesized
  source 1..22: mol_type = other DNA
tattatcccatgtgctcagagt

SEQ ID NO: 58916 - DNA, 22 bp, synthetic construct
  misc_feature 1..22: note = chemically synthesized
  source 1..22: mol_type = other DNA
attatcccatgtgctcagagta

SEQ ID NO: 58917 - DNA, 22 bp, synthetic construct
  misc_feature 1..22: note = chemically synthesized
  source 1..22: mol_type = other DNA
ttatcccatgtgctcagagtaa

SEQ ID NO: 58918 - DNA, 22 bp, synthetic construct
  misc_feature 1..22: note = chemically synthesized
  source 1..22: mol_type = other DNA
tcccatgtgctcagagtaaggg

SEQ ID NO: 58919 - DNA, 22 bp, synthetic construct
  misc_feature 1..22: note = chemically synthesized
  source 1..22: mol_type = other DNA
agagtaaggggcaaatgaatca

SEQ ID NO: 58920 - DNA, 22 bp, synthetic construct
  misc_feature 1..22: note = chemically synthesized
  source 1..22: mol_type = other DNA
tgaaatatgtgttccttgtagg

SEQ ID NO: 58921 - DNA, 22 bp, synthetic construct
  misc_feature 1..22: note = chemically synthesized
  source 1..22: mol_type = other DNA
cttgtaggacacaggcactctt

SEQ ID NO: 58922 - DNA, 22 bp, synthetic construct
  misc_feature 1..22: note = chemically synthesized
  source 1..22: mol_type = other DNA
gtaggacacaggcactcttgag

SEQ ID NO: 58923 - DNA, 22 bp, synthetic construct
  misc_feature 1..22: note = chemically synthesized
  source 1..22: mol_type = other DNA
taggacacaggcactcttgaga

SEQ ID NO: 58924 - DNA, 22 bp, synthetic construct
  misc_feature 1..22: note = chemically synthesized
  source 1..22: mol_type = other DNA
ttgagatctatagcttcaataa

SEQ ID NO: 58925 - DNA, 22 bp, synthetic construct
  misc_feature 1..22: note = chemically synthesized
  source 1..22: mol_type = other DNA
gagatctatagcttcaataaaa

SEQ ID NO: 58926 - DNA, 22 bp, synthetic construct
  misc_feature 1..22: note = chemically synthesized
  source 1..22: mol_type = other DNA
agatctatagcttcaataaaaa

SEQ ID NO: 58927 - DNA, 22 bp, synthetic construct
  misc_feature 1..22: note = chemically synthesized
  source 1..22: mol_type = other DNA
tagcttcaataaaaaggtaatt

SEQ ID NO: 58928 - DNA, 22 bp, synthetic construct
  misc_feature 1..22: note = chemically synthesized
  source 1..22: mol_type = other DNA
caataaaaaggtaatttattta

SEQ ID NO: 58929 - DNA, 22 bp, synthetic construct
  misc_feature 1..22: note = chemically synthesized
  source 1..22: mol_type = other DNA
aataaaaaggtaatttatttaa

SEQ ID NO: 58930 - DNA, 22 bp, synthetic construct
  misc_feature 1..22: note = chemically synthesized
  source 1..22: mol_type = other DNA
atttaaattactgcctctttaa

SEQ ID NO: 58931 - DNA, 22 bp, synthetic construct
  misc_feature 1..22: note = chemically synthesized
  source 1..22: mol_type = other DNA
tttaaattactgcctctttaat

SEQ ID NO: 58932 - DNA, 22 bp, synthetic construct
  misc_feature 1..22: note = chemically synthesized
  source 1..22: mol_type = other DNA
aaattactgcctctttaattta

SEQ ID NO: 58933 - DNA, 22 bp, synthetic construct
  misc_feature 1..22: note = chemically synthesized
  source 1..22: mol_type = other DNA
aattactgcctctttaatttat

SEQ ID NO: 58934 - DNA, 22 bp, synthetic construct
  misc_feature 1..22: note = chemically synthesized
  source 1..22: mol_type = other DNA
ctgcctctttaatttataatgt

SEQ ID NO: 58935 - DNA, 22 bp, synthetic construct
  misc_feature 1..22: note = chemically synthesized
  source 1..22: mol_type = other DNA
cctctttaatttataatgtttt

SEQ ID NO: 58936 - DNA, 22 bp, synthetic construct
  misc_feature 1..22: note = chemically synthesized
  source 1..22: mol_type = other DNA
tttaatttataatgttttgggg

SEQ ID NO: 58937 - DNA, 22 bp, synthetic construct
  misc_feature 1..22: note = chemically synthesized
  source 1..22: mol_type = other DNA
taatttataatgttttggggat

SEQ ID NO: 58938 - DNA, 22 bp, synthetic construct
  misc_feature 1..22: note = chemically synthesized
  source 1..22: mol_type = other DNA
aatttataatgttttggggatt

SEQ ID NO: 58939 - DNA, 22 bp, synthetic construct
  misc_feature 1..22: note = chemically synthesized
  source 1..22: mol_type = other DNA
atttataatgttttggggattt

SEQ ID NO: 58940 - DNA, 22 bp, synthetic construct
  misc_feature 1..22: note = chemically synthesized
  source 1..22: mol_type = other DNA
ataatgttttggggatttttaa

SEQ ID NO: 58941 - DNA, 22 bp, synthetic construct
  misc_feature 1..22: note = chemically synthesized
  source 1..22: mol_type = other DNA
taatgttttggggatttttaat

SEQ ID NO: 58942 - DNA, 22 bp, synthetic construct
  misc_feature 1..22: note = chemically synthesized
  source 1..22: mol_type = other DNA
tggggatttttaataggcatgc

SEQ ID NO: 58943 - DNA, 22 bp, synthetic construct
  misc_feature 1..22: note = chemically synthesized
  source 1..22: mol_type = other DNA
ggggatttttaataggcatgct

SEQ ID NO: 58944 - DNA, 22 bp, synthetic construct
  misc_feature 1..22: note = chemically synthesized
  source 1..22: mol_type = other DNA
gggatttttaataggcatgctc

SEQ ID NO: 58945 - DNA, 22 bp, synthetic construct
  misc_feature 1..22: note = chemically synthesized
  source 1..22: mol_type = other DNA
ttaataggcatgctctgtaagg

SEQ ID NO: 58946 - DNA, 22 bp, synthetic construct
  misc_feature 1..22: note = chemically synthesized
  source 1..22: mol_type = other DNA
taataggcatgctctgtaaggg

SEQ ID NO: 58947 - DNA, 22 bp, synthetic construct
  misc_feature 1..22: note = chemically synthesized
  source 1..22: mol_type = other DNA
aataggcatgctctgtaagggc

SEQ ID NO: 58948 - DNA, 22 bp, synthetic construct
  misc_feature 1..22: note = chemically synthesized
  source 1..22: mol_type = other DNA
ataggcatgctctgtaagggca

SEQ ID NO: 58949 - DNA, 22 bp, synthetic construct
  misc_feature 1..22: note = chemically synthesized
  source 1..22: mol_type = other DNA
tgtaagggcactggtaatcagc

SEQ ID NO: 58950 - DNA, 22 bp, synthetic construct
  misc_feature 1..22: note = chemically synthesized
  source 1..22: mol_type = other DNA
taagggcactggtaatcagctg

SEQ ID NO: 58951 - DNA, 22 bp, synthetic construct
  misc_feature 1..22: note = chemically synthesized
  source 1..22: mol_type = other DNA
gtaatcagctgtttctgatttt

SEQ ID NO: 58952 - DNA, 22 bp, synthetic construct
  misc_feature 1..22: note = chemically synthesized
  source 1..22: mol_type = other DNA
tttctgattttgcatgctcttc

SEQ ID NO: 58953 - DNA, 22 bp, synthetic construct
  misc_feature 1..22: note = chemically synthesized
  source 1..22: mol_type = other DNA
ctgattttgcatgctcttctat

SEQ ID NO: 58954 - DNA, 22 bp, synthetic construct
  misc_feature 1..22: note = chemically synthesized
  source 1..22: mol_type = other DNA
tgattttgcatgctcttctatc

SEQ ID NO: 58955 - DNA, 22 bp, synthetic construct
  misc_feature 1..22: note = chemically synthesized
  source 1..22: mol_type = other DNA
attttgcatgctcttctatctc

SEQ ID NO: 58956 - DNA, 22 bp, synthetic construct
  misc_feature 1..22: note = chemically synthesized
  source 1..22: mol_type = other DNA
tgcatgctcttctatctctggt

SEQ ID NO: 58957 - DNA, 22 bp, synthetic construct
  misc_feature 1..22: note = chemically synthesized
  source 1..22: mol_type = other DNA
gcatgctcttctatctctggta

SEQ ID NO: 58958 - DNA, 22 bp, synthetic construct
  misc_feature 1..22: note = chemically synthesized
  source 1..22: mol_type = other DNA
catgctcttctatctctggtaa

SEQ ID NO: 58959 - DNA, 22 bp, synthetic construct
  misc_feature 1..22: note = chemically synthesized
  source 1..22: mol_type = other DNA
ttctatctctggtaacaaaata

SEQ ID NO: 58960 - DNA, 22 bp, synthetic construct
  misc_feature 1..22: note = chemically synthesized
  source 1..22: mol_type = other DNA
ctatctctggtaacaaaataaa

SEQ ID NO: 58961 - DNA, 22 bp, synthetic construct
  misc_feature 1..22: note = chemically synthesized
  source 1..22: mol_type = other DNA
tatctctggtaacaaaataaaa

SEQ ID NO: 58962 - DNA, 22 bp, synthetic construct
  misc_feature 1..22: note = chemically synthesized
  source 1..22: mol_type = other DNA
tctctggtaacaaaataaaatc

SEQ ID NO: 58963 - DNA, 22 bp, synthetic construct
  misc_feature 1..22: note = chemically synthesized
  source 1..22: mol_type = other DNA
tggtaacaaaataaaatcttaa

SEQ ID NO: 58964 - DNA, 22 bp, synthetic construct
  misc_feature 1..22: note = chemically synthesized
  source 1..22: mol_type = other DNA
gtaacaaaataaaatcttaaaa

SEQ ID NO: 58965 - DNA, 22 bp, synthetic construct
  misc_feature 1..22: note = chemically synthesized
  source 1..22: mol_type = other DNA
aaaaaacaagaaaaaagaaaaa

SEQ ID NO: 58966 - DNA, 22 bp, synthetic construct
  misc_feature 1..22: note = chemically synthesized
  source 1..22: mol_type = other DNA
aaaaacaagaaaaaagaaaaaa

SEQ ID NO: 58967 - DNA, 22 bp, synthetic construct
  misc_feature 1..22: note = chemically synthesized
  source 1..22: mol_type = other DNA
agccctaacccaacccaaaagc

SEQ ID NO: 58968 - DNA, 22 bp, synthetic construct
  misc_feature 1..22: note = chemically synthesized
  source 1..22: mol_type = other DNA
gccctaacccaacccaaaagca

SEQ ID NO: 58969 - DNA, 22 bp, synthetic construct
  misc_feature 1..22: note = chemically synthesized
  source 1..22: mol_type = other DNA
acccaacccaaaagcaaataac

SEQ ID NO: 58970 - DNA, 22 bp, synthetic construct
  misc_feature 1..22: note = chemically synthesized
  source 1..22: mol_type = other DNA
tactttccccttccattattac

SEQ ID NO: 58971 - DNA, 22 bp, synthetic construct
  misc_feature 1..22: note = chemically synthesized
  source 1..22: mol_type = other DNA
ctttccccttccattattacct

SEQ ID NO: 58972 - DNA, 22 bp, synthetic construct
  misc_feature 1..22: note = chemically synthesized
  source 1..22: mol_type = other DNA
tccccttccattattacctgaa

SEQ ID NO: 58973 - DNA, 22 bp, synthetic construct
  misc_feature 1..22: note = chemically synthesized
  source 1..22: mol_type = other DNA
ccccttccattattacctgaaa

SEQ ID NO: 58974 - DNA, 22 bp, synthetic construct
  misc_feature 1..22: note = chemically synthesized
  source 1..22: mol_type = other DNA
cccttccattattacctgaaat

SEQ ID NO: 58975 - DNA, 22 bp, synthetic construct
  misc_feature 1..22: note = chemically synthesized
  source 1..22: mol_type = other DNA
ccattattacctgaaataaaag

SEQ ID NO: 58976 - DNA, 22 bp, synthetic construct
  misc_feature 1..22: note = chemically synthesized
  source 1..22: mol_type = other DNA
cattattacctgaaataaaagc

SEQ ID NO: 58977 - DNA, 22 bp, synthetic construct
  misc_feature 1..22: note = chemically synthesized
  source 1..22: mol_type = other DNA
ttacctgaaataaaagcatgat

SEQ ID NO: 58978 - DNA, 22 bp, synthetic construct
  misc_feature 1..22: note = chemically synthesized
  source 1..22: mol_type = other DNA
cctgaaataaaagcatgataac

SEQ ID NO: 58979 - DNA, 22 bp, synthetic construct
  misc_feature 1..22: note = chemically synthesized
  source 1..22: mol_type = other DNA
aaataaaagcatgataacattc

SEQ ID NO: 58980 - DNA, 22 bp, synthetic construct
  misc_feature 1..22: note = chemically synthesized
  source 1..22: mol_type = other DNA
atgccagagataggtgacaaaa

SEQ ID NO: 58981 - DNA, 22 bp, synthetic construct
  misc_feature 1..22: note = chemically synthesized
  source 1..22: mol_type = other DNA
tgtattcagacatgaagtttag

SEQ ID NO: 58982 - DNA, 22 bp, synthetic construct
  misc_feature 1..22: note = chemically synthesized
  source 1..22: mol_type = other DNA
agacatgaagtttaggatttca

SEQ ID NO: 58983 - DNA, 22 bp, synthetic construct
  misc_feature 1..22: note = chemically synthesized
  source 1..22: mol_type = other DNA
aggatttcatagcccaatgttc

SEQ ID NO: 58984 - DNA, 22 bp, synthetic construct
  misc_feature 1..22: note = chemically synthesized
  source 1..22: mol_type = other DNA
ggatttcatagcccaatgttct

SEQ ID NO: 58985 - DNA, 22 bp, synthetic construct
  misc_feature 1..22: note = chemically synthesized
  source 1..22: mol_type = other DNA
catagcccaatgttctctcttc

SEQ ID NO: 58986 - DNA, 22 bp, synthetic construct
  misc_feature 1..22: note = chemically synthesized
  source 1..22: mol_type = other DNA
atagcccaatgttctctcttct

SEQ ID NO: 58987 - DNA, 22 bp, synthetic construct
  misc_feature 1..22: note = chemically synthesized
  source 1..22: mol_type = other DNA
tctcttctcccccacctcttat

SEQ ID NO: 58988 - DNA, 22 bp, synthetic construct
  misc_feature 1..22: note = chemically synthesized
  source 1..22: mol_type = other DNA
tcttctcccccacctcttattg

SEQ ID NO: 58989 - DNA, 22 bp, synthetic construct
  misc_feature 1..22: note = chemically synthesized
  source 1..22: mol_type = other DNA
ttctcccccacctcttattgtg

SEQ ID NO: 58990 - DNA, 22 bp, synthetic construct
  misc_feature 1..22: note = chemically synthesized
  source 1..22: mol_type = other DNA
ctcccccacctcttattgtgtt

SEQ ID NO: 58991 - DNA, 22 bp, synthetic construct
  misc_feature 1..22: note = chemically synthesized
  source 1..22: mol_type = other DNA
tcccccacctcttattgtgttg

SEQ ID NO: 58992 - DNA, 22 bp, synthetic construct
  misc_feature 1..22: note = chemically synthesized
  source 1..22: mol_type = other DNA
ccccacctcttattgtgttgtg

SEQ ID NO: 58993 - DNA, 22 bp, synthetic construct
  misc_feature 1..22: note = chemically synthesized
  source 1..22: mol_type = other DNA
ttattgtgttgtgcaaatgtat

SEQ ID NO: 58994 - DNA, 22 bp, synthetic construct
  misc_feature 1..22: note = chemically synthesized
  source 1..22: mol_type = other DNA
attgtgttgtgcaaatgtatca

SEQ ID NO: 58995 - DNA, 22 bp, synthetic construct
  misc_feature 1..22: note = chemically synthesized
  source 1..22: mol_type = other DNA
ttgtgttgtgcaaatgtatcag

SEQ ID NO: 58996 - DNA, 22 bp, synthetic construct
  misc_feature 1..22: note = chemically synthesized
  source 1..22: mol_type = other DNA
tgttgtgcaaatgtatcagccg

SEQ ID NO: 58997 - DNA, 22 bp, synthetic construct
  misc_feature 1..22: note = chemically synthesized
  source 1..22: mol_type = other DNA
tgcaaatgtatcagccgttgta

SEQ ID NO: 58998 - DNA, 22 bp, synthetic construct
  misc_feature 1..22: note = chemically synthesized
  source 1..22: mol_type = other DNA
tattgttaatgcatgataggaa

SEQ ID NO: 58999 - DNA, 22 bp, synthetic construct
  misc_feature 1..22: note = chemically synthesized
  source 1..22: mol_type = other DNA
ttaatgcatgataggaagctgc

SEQ ID NO: 59000 - DNA, 22 bp, synthetic construct
  misc_feature 1..22: note = chemically synthesized
  source 1..22: mol_type = other DNA
atgcatgataggaagctgccgc

SEQ ID NO: 59001 - DNA, 22 bp, synthetic construct
  misc_feature 1..22: note = chemically synthesized
  source 1..22: mol_type = other DNA
ccgctaggacagtcttggctca

SEQ ID NO: 59002 - DNA, 22 bp, synthetic construct
  misc_feature 1..22: note = chemically synthesized
  source 1..22: mol_type = other DNA
ggacagtcttggctcactaatg

SEQ ID NO: 59003 - DNA, 22 bp, synthetic construct
  misc_feature 1..22: note = chemically synthesized
  source 1..22: mol_type = other DNA
ggctcactaatgcggtcagctg

SEQ ID NO: 59004 - DNA, 22 bp, synthetic construct
  misc_feature 1..22: note = chemically synthesized
  source 1..22: mol_type = other DNA
gctcactaatgcggtcagctgt

SEQ ID NO: 59005 - DNA, 22 bp, synthetic construct
  misc_feature 1..22: note = chemically synthesized
  source 1..22: mol_type = other DNA
actaatgcggtcagctgtgtca

SEQ ID NO: 59006 - DNA, 22 bp, synthetic construct
  misc_feature 1..22: note = chemically synthesized
  source 1..22: mol_type = other DNA
atgcggtcagctgtgtcacaat

SEQ ID NO: 59007 - DNA, 22 bp, synthetic construct
  misc_feature 1..22: note = chemically synthesized
  source 1..22: mol_type = other DNA
tgtcacaatgtgatatatagat

SEQ ID NO: 59008 - DNA, 22 bp, synthetic construct
  misc_feature 1..22: note = chemically synthesized
  source 1..22: mol_type = other DNA
tatttaccatggcatattttgt

SEQ ID NO: 59009 - DNA, 22 bp, synthetic construct
  misc_feature 1..22: note = chemically synthesized
  source 1..22: mol_type = other DNA
accatggcatattttgtttgcg

SEQ ID NO: 59010 - DNA, 22 bp, synthetic construct
  misc_feature 1..22: note = chemically synthesized
  source 1..22: mol_type = other DNA
ccatggcatattttgtttgcga

SEQ ID NO: 59011 - DNA, 22 bp, synthetic construct
  misc_feature 1..22: note = chemically synthesized
  source 1..22: mol_type = other DNA
tgtttgcgaaatgggagcggat

SEQ ID NO: 59012 - DNA, 22 bp, synthetic construct
  misc_feature 1..22: note = chemically synthesized
  source 1..22: mol_type = other DNA
gtttgcgaaatgggagcggatg

SEQ ID NO: 59013 - DNA, 22 bp, synthetic construct
  misc_feature 1..22: note = chemically synthesized
  source 1..22: mol_type = other DNA
tttgcgaaatgggagcggatga

SEQ ID NO: 59014 - DNA, 22 bp, synthetic construct
  misc_feature 1..22: note = chemically synthesized
  source 1..22: mol_type = other DNA
gcgaaatgggagcggatgataa

SEQ ID NO: 59015 - DNA, 22 bp, synthetic construct
  misc_feature 1..22: note = chemically synthesized
  source 1..22: mol_type = other DNA
cgaaatgggagcggatgataaa

SEQ ID NO: 59016 - DNA, 22 bp, synthetic construct
  misc_feature 1..22: note = chemically synthesized
  source 1..22: mol_type = other DNA
cagttttcacactagttcctgt

SEQ ID NO: 59017 - DNA, 22 bp, synthetic construct
  misc_feature 1..22: note = chemically synthesized
  source 1..22: mol_type = other DNA
tcacactagttcctgtggtccg

SEQ ID NO: 59018 - DNA, 22 bp, synthetic construct
  misc_feature 1..22: note = chemically synthesized
  source 1..22: mol_type = other DNA
cacactagttcctgtggtccgg

SEQ ID NO: 59019 - DNA, 22 bp, synthetic construct
  misc_feature 1..22: note = chemically synthesized
  source 1..22: mol_type = other DNA
acactagttcctgtggtccgga

SEQ ID NO: 59020 - DNA, 22 bp, synthetic construct
  misc_feature 1..22: note = chemically synthesized
  source 1..22: mol_type = other DNA
gttcctgtggtccggagtctct

SEQ ID NO: 59021 - DNA, 22 bp, synthetic construct
  misc_feature 1..22: note = chemically synthesized
  source 1..22: mol_type = other DNA
ctgtggtccggagtctctcaaa

SEQ ID NO: 59022 - DNA, 22 bp, synthetic construct
  misc_feature 1..22: note = chemically synthesized
  source 1..22: mol_type = other DNA
tggtccggagtctctcaaacaa

SEQ ID NO: 59023 - DNA, 22 bp, synthetic construct
  misc_feature 1..22: note = chemically synthesized
  source 1..22: mol_type = other DNA
tcaaacaataaagcacccctga

SEQ ID NO: 59024 - DNA, 22 bp, synthetic construct
  misc_feature 1..22: note = chemically synthesized
  source 1..22: mol_type = other DNA
aaacaataaagcacccctgata

SEQ ID NO: 59025 - DNA, 22 bp, synthetic construct
  misc_feature 1..22: note = chemically synthesized
  source 1..22: mol_type = other DNA
ataatggagaggtatttatggg

SEQ ID NO: 59026 - DNA, 22 bp, synthetic construct
  misc_feature 1..22: note = chemically synthesized
  source 1..22: mol_type = other DNA
atgggaacataattgacttcaa

SEQ ID NO: 59027 - DNA, 22 bp, synthetic construct
  misc_feature 1..22: note = chemically synthesized
  source 1..22: mol_type = other DNA
tgggaacataattgacttcaaa

SEQ ID NO: 59028 - DNA, 22 bp, synthetic construct
  misc_feature 1..22: note = chemically synthesized
  source 1..22: mol_type = other DNA
acttcaaagttttagatctctg

SEQ ID NO: 59029 - DNA, 22 bp, synthetic construct
  misc_feature 1..22: note = chemically synthesized
  source 1..22: mol_type = other DNA
caaagttttagatctctggctg

SEQ ID NO: 59030 - DNA, 22 bp, synthetic construct
  misc_feature 1..22: note = chemically synthesized
  source 1..22: mol_type = other DNA
aaagttttagatctctggctga

SEQ ID NO: 59031 - DNA, 22 bp, synthetic construct
  misc_feature 1..22: note = chemically synthesized
  source 1..22: mol_type = other DNA
tagatctctggctgaagtttaa

SEQ ID NO: 59032 - DNA, 22 bp, synthetic construct
  misc_feature 1..22: note = chemically synthesized
  source 1..22: mol_type = other DNA
agatctctggctgaagtttaag

SEQ ID NO: 59033 - DNA, 22 bp, synthetic construct
  misc_feature 1..22: note = chemically synthesized
  source 1..22: mol_type = other DNA
gatctctggctgaagtttaaga

SEQ ID NO: 59034 - DNA, 22 bp, synthetic construct
  misc_feature 1..22: note = chemically synthesized
  source 1..22: mol_type = other DNA
tggctgaagtttaagatgggat

SEQ ID NO: 59035 - DNA, 22 bp, synthetic construct
  misc_feature 1..22: note = chemically synthesized
  source 1..22: mol_type = other DNA
gctgaagtttaagatgggatag

SEQ ID NO: 59036 - DNA, 22 bp, synthetic construct
  misc_feature 1..22: note = chemically synthesized
  source 1..22: mol_type = other DNA
aagtttaagatgggatagtcca

SEQ ID NO: 59037 - DNA, 22 bp, synthetic construct
  misc_feature 1..22: note = chemically synthesized
  source 1..22: mol_type = other DNA
aagatgggatagtccattacat

SEQ ID NO: 59038 - DNA, 22 bp, synthetic construct
  misc_feature 1..22: note = chemically synthesized
  source 1..22: mol_type = other DNA
agatgggatagtccattacatt

SEQ ID NO: 59039 - DNA, 22 bp, synthetic construct
  misc_feature 1..22: note = chemically synthesized
  source 1..22: mol_type = other DNA
cattaatgtctgtgcttaaagc

SEQ ID NO: 59040 - DNA, 22 bp, synthetic construct
  misc_feature 1..22: note = chemically synthesized
  source 1..22: mol_type = other DNA
atgtctgtgcttaaagctccta

SEQ ID NO: 59041 - DNA, 22 bp, synthetic construct
  misc_feature 1..22: note = chemically synthesized
  source 1..22: mol_type = other DNA
tgcttaaagctcctatttggct

SEQ ID NO: 59042 - DNA, 22 bp, synthetic construct
  misc_feature 1..22: note = chemically synthesized
  source 1..22: mol_type = other DNA
aaagctcctatttggcttaaat

SEQ ID NO: 59043 - DNA, 22 bp, synthetic construct
  misc_feature 1..22: note = chemically synthesized
  source 1..22: mol_type = other DNA
aagctcctatttggcttaaata

SEQ ID NO: 59044 - DNA, 22 bp, synthetic construct
  misc_feature 1..22: note = chemically synthesized
  source 1..22: mol_type = other DNA
ctatttggcttaaataaattat

SEQ ID NO: 59045 - DNA, 22 bp, synthetic construct
  misc_feature 1..22: note = chemically synthesized
  source 1..22: mol_type = other DNA
tttggcttaaataaattattta

SEQ ID NO: 59046 - DNA, 22 bp, synthetic construct
  misc_feature 1..22: note = chemically synthesized
  source 1..22: mol_type = other DNA
ggcttaaataaattatttaggg

SEQ ID NO: 59047 - DNA, 22 bp, synthetic construct
  misc_feature 1..22: note = chemically synthesized
  source 1..22: mol_type = other DNA
gcttaaataaattatttagggt

SEQ ID NO: 59048 - DNA, 22 bp, synthetic construct
  misc_feature 1..22: note = chemically synthesized
  source 1..22: mol_type = other DNA
aaataaattatttagggtttac

SEQ ID NO: 59049 - DNA, 22 bp, synthetic construct
  misc_feature 1..22: note = chemically synthesized
  source 1..22: mol_type = other DNA
aataaattatttagggtttact

SEQ ID NO: 59050 - DNA, 22 bp, synthetic construct
  misc_feature 1..22: note = chemically synthesized
  source 1..22: mol_type = other DNA
tttagggtttactgcttaaacc

SEQ ID NO: 59051 - DNA, 22 bp, synthetic construct
  misc_feature 1..22: note = chemically synthesized
  source 1..22: mol_type = other DNA
agggtttactgcttaaaccttg

SEQ ID NO: 59052 - DNA, 22 bp, synthetic construct
  misc_feature 1..22: note = chemically synthesized
  source 1..22: mol_type = other DNA
gggtttactgcttaaaccttgg

SEQ ID NO: 59053 - DNA, 22 bp, synthetic construct
  misc_feature 1..22: note = chemically synthesized
  source 1..22: mol_type = other DNA
actgcttaaaccttggtcaatt

SEQ ID NO: 59054 - DNA, 22 bp, synthetic construct
  misc_feature 1..22: note = chemically synthesized
  source 1..22: mol_type = other DNA
ctgcttaaaccttggtcaattc

SEQ ID NO: 59055 - DNA, 22 bp, synthetic construct
  misc_feature 1..22: note = chemically synthesized
  source 1..22: mol_type = other DNA
cttaaaccttggtcaattcttg

SEQ ID NO: 59056 - DNA, 22 bp, synthetic construct
  misc_feature 1..22: note = chemically synthesized
  source 1..22: mol_type = other DNA
aaaccttggtcaattcttgaac

SEQ ID NO: 59057 - DNA, 22 bp, synthetic construct
  misc_feature 1..22: note = chemically synthesized
  source 1..22: mol_type = other DNA
aaccttggtcaattcttgaacg

SEQ ID NO: 59058 - DNA, 22 bp, synthetic construct
  misc_feature 1..22: note = chemically synthesized
  source 1..22: mol_type = other DNA
ggtcaattcttgaacgtttggg

SEQ ID NO: 59059 - DNA, 22 bp, synthetic construct
  misc_feature 1..22: note = chemically synthesized
  source 1..22: mol_type = other DNA
gtcaattcttgaacgtttgggc

SEQ ID NO: 59060 - DNA, 22 bp, synthetic construct
  misc_feature 1..22: note = chemically synthesized
  source 1..22: mol_type = other DNA
ttgaacgtttgggctagttaag

SEQ ID NO: 59061 - DNA, 22 bp, synthetic construct
  misc_feature 1..22: note = chemically synthesized
  source 1..22: mol_type = other DNA
gaacgtttgggctagttaagta

SEQ ID NO: 59062 - DNA, 22 bp, synthetic construct
  misc_feature 1..22: note = chemically synthesized
  source 1..22: mol_type = other DNA
aacgtttgggctagttaagtaa

SEQ ID NO: 59063 - DNA, 22 bp, synthetic construct
  misc_feature 1..22: note = chemically synthesized
  source 1..22: mol_type = other DNA
gggctagttaagtaattttcca

SEQ ID NO: 59064 - DNA, 22 bp, synthetic construct
  misc_feature 1..22: note = chemically synthesized
  source 1..22: mol_type = other DNA
ggctagttaagtaattttccag

SEQ ID NO: 59065 - DNA, 22 bp, synthetic construct
  misc_feature 1..22: note = chemically synthesized
  source 1..22: mol_type = other DNA
gttaagtaattttccagtgact

SEQ ID NO: 59066 - DNA, 22 bp, synthetic construct
  misc_feature 1..22: note = chemically synthesized
  source 1..22: mol_type = other DNA
agtaattttccagtgactttct

SEQ ID NO: 59067 - DNA, 22 bp, synthetic construct
  misc_feature 1..22: note = chemically synthesized
  source 1..22: mol_type = other DNA
tccagtgactttctgtgccttg

SEQ ID NO: 59068 - DNA, 22 bp, synthetic construct
  misc_feature 1..22: note = chemically synthesized
  source 1..22: mol_type = other DNA
ccagtgactttctgtgccttgg

SEQ ID NO: 59069 - DNA, 22 bp, synthetic construct
  misc_feature 1..22: note = chemically synthesized
  source 1..22: mol_type = other DNA
cagtgactttctgtgccttggt

SEQ ID NO: 59070 - DNA, 22 bp, synthetic construct
  misc_feature 1..22: note = chemically synthesized
  source 1..22: mol_type = other DNA
tctgtgccttggtgattcattt

SEQ ID NO: 59071 - DNA, 22 bp, synthetic construct
  misc_feature 1..22: note = chemically synthesized
  source 1..22: mol_type = other DNA
ctgtgccttggtgattcattta

SEQ ID NO: 59072 - DNA, 22 bp, synthetic construct
  misc_feature 1..22: note = chemically synthesized
  source 1..22: mol_type = other DNA
tgtgccttggtgattcatttac

SEQ ID NO: 59073 - DNA, 22 bp, synthetic construct
  misc_feature 1..22: note = chemically synthesized
  source 1..22: mol_type = other DNA
tgccttggtgattcatttactt

SEQ ID NO: 59074 - DNA, 22 bp, synthetic construct
  misc_feature 1..22: note = chemically synthesized
  source 1..22: mol_type = other DNA
ggtgattcatttacttgattga

SEQ ID NO: 59075 - DNA, 22 bp, synthetic construct
  misc_feature 1..22: note = chemically synthesized
  source 1..22: mol_type = other DNA
gtgattcatttacttgattgag

SEQ ID NO: 59076 - DNA, 22 bp, synthetic construct
  misc_feature 1..22: note = chemically synthesized
  source 1..22: mol_type = other DNA
atttacttgattgagctcctgt

SEQ ID NO: 59077 - DNA, 22 bp, synthetic construct
  misc_feature 1..22: note = chemically synthesized
  source 1..22: mol_type = other DNA
acttgattgagctcctgtgtgc

SEQ ID NO: 59078 - DNA, 22 bp, synthetic construct
  misc_feature 1..22: note = chemically synthesized
  source 1..22: mol_type = other DNA
cttgattgagctcctgtgtgct

SEQ ID NO: 59079 - DNA, 22 bp, synthetic construct
  misc_feature 1..22: note = chemically synthesized
  source 1..22: mol_type = other DNA
gattgagctcctgtgtgctcgt

SEQ ID NO: 59080 - DNA, 22 bp, synthetic construct
  misc_feature 1..22: note = chemically synthesized
  source 1..22: mol_type = other DNA
attgagctcctgtgtgctcgta

SEQ ID NO: 59081 - DNA, 22 bp, synthetic construct
  misc_feature 1..22: note = chemically synthesized
  source 1..22: mol_type = other DNA
agctcctgtgtgctcgtatgat

SEQ ID NO: 59082 - DNA, 22 bp, synthetic construct
  misc_feature 1..22: note = chemically synthesized
  source 1..22: mol_type = other DNA
ctgtgtgctcgtatgatttcta

SEQ ID NO: 59083 - DNA, 22 bp, synthetic construct
  misc_feature 1..22: note = chemically synthesized
  source 1..22: mol_type = other DNA
tgtgctcgtatgatttctaaat

SEQ ID NO: 59084 - DNA, 22 bp, synthetic construct
  misc_feature 1..22: note = chemically synthesized
  source 1..22: mol_type = other DNA
gtatgatttctaaatgtatttc

SEQ ID NO: 59085 - DNA, 22 bp, synthetic construct
  misc_feature 1..22: note = chemically synthesized
  source 1..22: mol_type = other DNA
ctaaatgtatttctcaagtttt

SEQ ID NO: 59086 - DNA, 22 bp, synthetic construct
  misc_feature 1..22: note = chemically synthesized
  source 1..22: mol_type = other DNA
taaatgtatttctcaagttttg

SEQ ID NO: 59087 - DNA, 22 bp, synthetic construct
  misc_feature 1..22: note = chemically synthesized
  source 1..22: mol_type = other DNA
aatgtatttctcaagttttgcc

SEQ ID NO: 59088 - DNA, 22 bp, synthetic construct
  misc_feature 1..22: note = chemically synthesized
  source 1..22: mol_type = other DNA
ctcaagttttgcctggcaatga

SEQ ID NO: 59089 - DNA, 22 bp, synthetic construct
  misc_feature 1..22: note = chemically synthesized
  source 1..22: mol_type = other DNA
tcaagttttgcctggcaatgaa

SEQ ID NO: 59090 - DNA, 22 bp, synthetic construct
  misc_feature 1..22: note = chemically synthesized
  source 1..22: mol_type = other DNA
aagttttgcctggcaatgaatg

SEQ ID NO: 59091 - DNA, 22 bp, synthetic construct
  misc_feature 1..22: note = chemically synthesized
  source 1..22: mol_type = other DNA
tgcctggcaatgaatgattttg

SEQ ID NO: 59092 - DNA, 22 bp, synthetic construct
  misc_feature 1..22: note = chemically synthesized
  source 1..22: mol_type = other DNA
gcctggcaatgaatgattttgc

SEQ ID NO: 59093 - DNA, 22 bp, synthetic construct
  misc_feature 1..22: note = chemically synthesized
  source 1..22: mol_type = other DNA
cctggcaatgaatgattttgct

SEQ ID NO: 59094 - DNA, 22 bp, synthetic construct
  misc_feature 1..22: note = chemically synthesized
  source 1..22: mol_type = other DNA
gcaatgaatgattttgcttact

SEQ ID NO: 59095 - DNA, 22 bp, synthetic construct
  misc_feature 1..22: note = chemically synthesized
  source 1..22: mol_type = other DNA
tgcttactggagtcttgtgtgg

SEQ ID NO: 59096 - DNA, 22 bp, synthetic construct
  misc_feature 1..22: note = chemically synthesized
  source 1..22: mol_type = other DNA
gcttactggagtcttgtgtggt

SEQ ID NO: 59097 - DNA, 22 bp, synthetic construct
  misc_feature 1..22: note = chemically synthesized
  source 1..22: mol_type = other DNA
cttactggagtcttgtgtggta

SEQ ID NO: 59098 - DNA, 22 bp, synthetic construct
  misc_feature 1..22: note = chemically synthesized
  source 1..22: mol_type = other DNA
actggagtcttgtgtggtacac

SEQ ID NO: 59099 - DNA, 22 bp, synthetic construct
  misc_feature 1..22: note = chemically synthesized
  source 1..22: mol_type = other DNA
ctggagtcttgtgtggtacacc

SEQ ID NO: 59100 - DNA, 22 bp, synthetic construct
  misc_feature 1..22: note = chemically synthesized
  source 1..22: mol_type = other DNA
gagtcttgtgtggtacacctat

SEQ ID NO: 59101 - DNA, 22 bp, synthetic construct
  misc_feature 1..22: note = chemically synthesized
  source 1..22: mol_type = other DNA
gtgtggtacacctataaaaggc

SEQ ID NO: 59102 - DNA, 22 bp, synthetic construct
  misc_feature 1..22: note = chemically synthesized
  source 1..22: mol_type = other DNA
tgtggtacacctataaaaggct

SEQ ID NO: 59103 - DNA, 22 bp, synthetic construct
  misc_feature 1..22: note = chemically synthesized
  source 1..22: mol_type = other DNA
taaaaggcttattaactctttt

SEQ ID NO: 59104 - DNA, 22 bp, synthetic construct
  misc_feature 1..22: note = chemically synthesized
  source 1..22: mol_type = other DNA
attaactctttttgaaaaaaaa

SEQ ID NO: 59105 - DNA, 22 bp, synthetic construct
  misc_feature 1..22: note = chemically synthesized
  source 1..22: mol_type = other DNA
ttaactctttttgaaaaaaaaa

SEQ ID NO: 59106 - DNA, 22 bp, synthetic construct
  misc_feature 1..22: note = chemically synthesized
  source 1..22: mol_type = other DNA
actctttttgaaaaaaaaaaaa

SEQ ID NO: 59107 - DNA, 22 bp, synthetic construct
  misc_feature 1..22: note = chemically synthesized
  source 1..22: mol_type = other DNA
tttttgaaaaaaaaaaaaatcc

SEQ ID NO: 59108 - DNA, 22 bp, synthetic construct
  misc_feature 1..22: note = chemically synthesized
  source 1..22: mol_type = other DNA
tttgaaaaaaaaaaaaatcccc

SEQ ID NO: 59109 - DNA, 22 bp, synthetic construct
  misc_feature 1..22: note = chemically synthesized
  source 1..22: mol_type = other DNA
ttgaaaaaaaaaaaaatcccca

SEQ ID NO: 59110 - DNA, 22 bp, synthetic construct
  misc_feature 1..22: note = chemically synthesized
  source 1..22: mol_type = other DNA
tgaaaaaaaaaaaaatccccaa

SEQ ID NO: 59111 - DNA, 22 bp, synthetic construct
  misc_feature 1..22: note = chemically synthesized
  source 1..22: mol_type = other DNA
gaaaaaaaaaaaaatccccaaa

SEQ ID NO: 59112 - DNA, 22 bp, synthetic construct
  misc_feature 1..22: note = chemically synthesized
  source 1..22: mol_type = other DNA
aaaaaaaaaaaaatccccaaac

SEQ ID NO: 59113 - DNA, 22 bp, synthetic construct
  misc_feature 1..22: note = chemically synthesized
  source 1..22: mol_type = other DNA
tcatcataagataaagcatata

SEQ ID NO: 59114 - DNA, 22 bp, synthetic construct
  misc_feature 1..22: note = chemically synthesized
  source 1..22: mol_type = other DNA
tatacacacatacatatgtaca

SEQ ID NO: 59115 - DNA, 22 bp, synthetic construct
  misc_feature 1..22: note = chemically synthesized
  source 1..22: mol_type = other DNA
catatatacatacgtatatgca

SEQ ID NO: 59116 - DNA, 22 bp, synthetic construct
  misc_feature 1..22: note = chemically synthesized
  source 1..22: mol_type = other DNA
tgtgcctgtgtgtgtgtagaaa

SEQ ID NO: 59117 - DNA, 22 bp, synthetic construct
  misc_feature 1..22: note = chemically synthesized
  source 1..22: mol_type = other DNA
tgtgtgtgtagaaagggagaga

SEQ ID NO: 59118 - DNA, 22 bp, synthetic construct
  misc_feature 1..22: note = chemically synthesized
  source 1..22: mol_type = other DNA
tagaattcaccatgattccatc

SEQ ID NO: 59119 - DNA, 22 bp, synthetic construct
  misc_feature 1..22: note = chemically synthesized
  source 1..22: mol_type = other DNA
agaattcaccatgattccatca

SEQ ID NO: 59120 - DNA, 22 bp, synthetic construct
  misc_feature 1..22: note = chemically synthesized
  source 1..22: mol_type = other DNA
gaattcaccatgattccatcaa

SEQ ID NO: 59121 - DNA, 22 bp, synthetic construct
  misc_feature 1..22: note = chemically synthesized
  source 1..22: mol_type = other DNA
accatgattccatcaaatcaat

SEQ ID NO: 59122 - DNA, 22 bp, synthetic construct
  misc_feature 1..22: note = chemically synthesized
  source 1..22: mol_type = other DNA
catcaaatcaatatagaagttt

SEQ ID NO: 59123 - DNA, 22 bp, synthetic construct
  misc_feature 1..22: note = chemically synthesized
  source 1..22: mol_type = other DNA
ttgaaagctatccatgtagaaa

SEQ ID NO: 59124 - DNA, 22 bp, synthetic construct
  misc_feature 1..22: note = chemically synthesized
  source 1..22: mol_type = other DNA
tgaaagctatccatgtagaaac

SEQ ID NO: 59125 - DNA, 22 bp, synthetic construct
  misc_feature 1..22: note = chemically synthesized
  source 1..22: mol_type = other DNA
gaaagctatccatgtagaaacc

SEQ ID NO: 59126 - DNA, 22 bp, synthetic construct
  misc_feature 1..22: note = chemically synthesized
  source 1..22: mol_type = other DNA
aaagctatccatgtagaaacca

SEQ ID NO: 59127 - DNA, 22 bp, synthetic construct
  misc_feature 1..22: note = chemically synthesized
  source 1..22: mol_type = other DNA
tccatgtagaaaccacttttca

SEQ ID NO: 59128 - DNA, 22 bp, synthetic construct
  misc_feature 1..22: note = chemically synthesized
  source 1..22: mol_type = other DNA
ttcatcaaaatctgacttaagc

SEQ ID NO: 59129 - DNA, 22 bp, synthetic construct
  misc_feature 1..22: note = chemically synthesized
  source 1..22: mol_type = other DNA
tcatcaaaatctgacttaagca

SEQ ID NO: 59130 - DNA, 22 bp, synthetic construct
  misc_feature 1..22: note = chemically synthesized
  source 1..22: mol_type = other DNA
catcaaaatctgacttaagcaa

SEQ ID NO: 59131 - DNA, 22 bp, synthetic construct
  misc_feature 1..22: note = chemically synthesized
  source 1..22: mol_type = other DNA
atcaaaatctgacttaagcaaa

SEQ ID NO: 59132 - DNA, 22 bp, synthetic construct
  misc_feature 1..22: note = chemically synthesized
  source 1..22: mol_type = other DNA
acttaagcaaattatctccata

SEQ ID NO: 59133 - DNA, 22 bp, synthetic construct
  misc_feature 1..22: note = chemically synthesized
  source 1..22: mol_type = other DNA
aagcaaattatctccatactat

SEQ ID NO: 59134 - DNA, 22 bp, synthetic construct
  misc_feature 1..22: note = chemically synthesized
  source 1..22: mol_type = other DNA
agcaaattatctccatactatt

SEQ ID NO: 59135 - DNA, 22 bp, synthetic construct
  misc_feature 1..22: note = chemically synthesized
  source 1..22: mol_type = other DNA
tctccatactatttatctgaaa

SEQ ID NO: 59136 - DNA, 22 bp, synthetic construct
  misc_feature 1..22: note = chemically synthesized
  source 1..22: mol_type = other DNA
catactatttatctgaaagtct

SEQ ID NO: 59137 - DNA, 22 bp, synthetic construct
  misc_feature 1..22: note = chemically synthesized
  source 1..22: mol_type = other DNA
tttatctgaaagtctgttgttc

SEQ ID NO: 59138 - DNA, 22 bp, synthetic construct
  misc_feature 1..22: note = chemically synthesized
  source 1..22: mol_type = other DNA
atctgaaagtctgttgttcaca

SEQ ID NO: 59139 - DNA, 22 bp, synthetic construct
  misc_feature 1..22: note = chemically synthesized
  source 1..22: mol_type = other DNA
tctgaaagtctgttgttcacat

SEQ ID NO: 59140 - DNA, 22 bp, synthetic construct
  misc_feature 1..22: note = chemically synthesized
  source 1..22: mol_type = other DNA
aaagtctgttgttcacatagcg

SEQ ID NO: 59141 - DNA, 22 bp, synthetic construct
  misc_feature 1..22: note = chemically synthesized
  source 1..22: mol_type = other DNA
ttgttcacatagcgctggattg

SEQ ID NO: 59142 - DNA, 22 bp, synthetic construct
  misc_feature 1..22: note = chemically synthesized
  source 1..22: mol_type = other DNA
ttcacatagcgctggattgagg

SEQ ID NO: 59143 - DNA, 22 bp, synthetic construct
  misc_feature 1..22: note = chemically synthesized
  source 1..22: mol_type = other DNA
acatagcgctggattgaggatc

SEQ ID NO: 59144 - DNA, 22 bp, synthetic construct
  misc_feature 1..22: note = chemically synthesized
  source 1..22: mol_type = other DNA
gattgaggatcatagtggcaaa

SEQ ID NO: 59145 - DNA, 22 bp, synthetic construct
  misc_feature 1..22: note = chemically synthesized
  source 1..22: mol_type = other DNA
aggatcatagtggcaaatttag

SEQ ID NO: 59146 - DNA, 22 bp, synthetic construct
  misc_feature 1..22: note = chemically synthesized
  source 1..22: mol_type = other DNA
aggagcaacagtcccaagcagg

SEQ ID NO: 59147 - DNA, 22 bp, synthetic construct
  misc_feature 1..22: note = chemically synthesized
  source 1..22: mol_type = other DNA
ggagcaacagtcccaagcagga

SEQ ID NO: 59148 - DNA, 22 bp, synthetic construct
  misc_feature 1..22: note = chemically synthesized
  source 1..22: mol_type = other DNA
gatggcaggctgtcctttgtgc

SEQ ID NO: 59149 - DNA, 22 bp, synthetic construct
  misc_feature 1..22: note = chemically synthesized
  source 1..22: mol_type = other DNA
tcctttgtgcctcccctgagtt

SEQ ID NO: 59150 - DNA, 22 bp, synthetic construct
  misc_feature 1..22: note = chemically synthesized
  source 1..22: mol_type = other DNA
tgtgcctcccctgagttgagaa

SEQ ID NO: 59151 - DNA, 22 bp, synthetic construct
  misc_feature 1..22: note = chemically synthesized
  source 1..22: mol_type = other DNA
gtgcctcccctgagttgagaag

SEQ ID NO: 59152 - DNA, 22 bp, synthetic construct
  misc_feature 1..22: note = chemically synthesized
  source 1..22: mol_type = other DNA
tgcctcccctgagttgagaaga

SEQ ID NO: 59153 - DNA, 22 bp, synthetic construct
  misc_feature 1..22: note = chemically synthesized
  source 1..22: mol_type = other DNA
ccctgagttgagaagactggtg

SEQ ID NO: 59154 - DNA, 22 bp, synthetic construct
  misc_feature 1..22: note = chemically synthesized
  source 1..22: mol_type = other DNA
agttgagaagactggtgtttat

SEQ ID NO: 59155 - DNA, 22 bp, synthetic construct
  misc_feature 1..22: note = chemically synthesized
  source 1..22: mol_type = other DNA
agaagactggtgtttattcttt

SEQ ID NO: 59156 - DNA, 22 bp, synthetic construct
  misc_feature 1..22: note = chemically synthesized
  source 1..22: mol_type = other DNA
gtgtttattctttctctaggtt

SEQ ID NO: 59157 - DNA, 22 bp, synthetic construct
  misc_feature 1..22: note = chemically synthesized
  source 1..22: mol_type = other DNA
attctttctctaggttgcaaca

SEQ ID NO: 59158 - DNA, 22 bp, synthetic construct
  misc_feature 1..22: note = chemically synthesized
  source 1..22: mol_type = other DNA
ttctttctctaggttgcaacac

SEQ ID NO: 59159 - DNA, 22 bp, synthetic construct
  misc_feature 1..22: note = chemically synthesized
  source 1..22: mol_type = other DNA
tttctctaggttgcaacacgtg

SEQ ID NO: 59160 - DNA, 22 bp, synthetic construct
  misc_feature 1..22: note = chemically synthesized
  source 1..22: mol_type = other DNA
tctctaggttgcaacacgtgtt

SEQ ID NO: 59161 - DNA, 22 bp, synthetic construct
  misc_feature 1..22: note = chemically synthesized
  source 1..22: mol_type = other DNA
ctctaggttgcaacacgtgttg

SEQ ID NO: 59162 - DNA, 22 bp, synthetic construct
  misc_feature 1..22: note = chemically synthesized
  source 1..22: mol_type = other DNA
tctaggttgcaacacgtgttgc

SEQ ID NO: 59163 - DNA, 22 bp, synthetic construct
  misc_feature 1..22: note = chemically synthesized
  source 1..22: mol_type = other DNA
taggttgcaacacgtgttgcct

SEQ ID NO: 59164 - DNA, 22 bp, synthetic construct
  misc_feature 1..22: note = chemically synthesized
  source 1..22: mol_type = other DNA
ggttgcaacacgtgttgccttg

SEQ ID NO: 59165 - DNA, 22 bp, synthetic construct
  misc_feature 1..22: note = chemically synthesized
  source 1..22: mol_type = other DNA
caacacgtgttgccttgaaatc

SEQ ID NO: 59166 - DNA, 22 bp, synthetic construct
  misc_feature 1..22: note = chemically synthesized
  source 1..22: mol_type = other DNA
ccttgaaatctcccttctttac

SEQ ID NO: 59167 - DNA, 22 bp, synthetic construct
  misc_feature 1..22: note = chemically synthesized
  source 1..22: mol_type = other DNA
gaaatctcccttctttacggtt

SEQ ID NO: 59168 - DNA, 22 bp, synthetic construct
  misc_feature 1..22: note = chemically synthesized
  source 1..22: mol_type = other DNA
aaatctcccttctttacggttc

SEQ ID NO: 59169 - DNA, 22 bp, synthetic construct
  misc_feature 1..22: note = chemically synthesized
  source 1..22: mol_type = other DNA
ccttctttacggttctgccatg

SEQ ID NO: 59170 - DNA, 22 bp, synthetic construct
  misc_feature 1..22: note = chemically synthesized
  source 1..22: mol_type = other DNA
ctttacggttctgccatgagtg

SEQ ID NO: 59171 - DNA, 22 bp, synthetic construct
  misc_feature 1..22: note = chemically synthesized
  source 1..22: mol_type = other DNA
tttacggttctgccatgagtgt

SEQ ID NO: 59172 - DNA, 22 bp, synthetic construct
  misc_feature 1..22: note = chemically synthesized
  source 1..22: mol_type = other DNA
tacggttctgccatgagtgtat

SEQ ID NO: 59173 - DNA, 22 bp, synthetic construct
  misc_feature 1..22: note = chemically synthesized
  source 1..22: mol_type = other DNA
acggttctgccatgagtgtatt

SEQ ID NO: 59174 - DNA, 22 bp, synthetic construct
  misc_feature 1..22: note = chemically synthesized
  source 1..22: mol_type = other DNA
cggttctgccatgagtgtattt

SEQ ID NO: 59175 - DNA, 22 bp, synthetic construct
  misc_feature 1..22: note = chemically synthesized
  source 1..22: mol_type = other DNA
tgccatgagtgtattttctgtg

SEQ ID NO: 59176 - DNA, 22 bp, synthetic construct
  misc_feature 1..22: note = chemically synthesized
  source 1..22: mol_type = other DNA
ccatgagtgtattttctgtgac

SEQ ID NO: 59177 - DNA, 22 bp, synthetic construct
  misc_feature 1..22: note = chemically synthesized
  source 1..22: mol_type = other DNA
tctgtgacctgcctctgcatct

SEQ ID NO: 59178 - DNA, 22 bp, synthetic construct
  misc_feature 1..22: note = chemically synthesized
  source 1..22: mol_type = other DNA
ctgtgacctgcctctgcatctg

SEQ ID NO: 59179 - DNA, 22 bp, synthetic construct
  misc_feature 1..22: note = chemically synthesized
  source 1..22: mol_type = other DNA
tgtgacctgcctctgcatctgg

SEQ ID NO: 59180 - DNA, 22 bp, synthetic construct
  misc_feature 1..22: note = chemically synthesized
  source 1..22: mol_type = other DNA
tgacctgcctctgcatctggtt

SEQ ID NO: 59181 - DNA, 22 bp, synthetic construct
  misc_feature 1..22: note = chemically synthesized
  source 1..22: mol_type = other DNA
cctctgcatctggttaaatgga

SEQ ID NO: 59182 - DNA, 22 bp, synthetic construct
  misc_feature 1..22: note = chemically synthesized
  source 1..22: mol_type = other DNA
tgcatctggttaaatggacttc

SEQ ID NO: 59183 - DNA, 22 bp, synthetic construct
  misc_feature 1..22: note = chemically synthesized
  source 1..22: mol_type = other DNA
catctggttaaatggacttcag

SEQ ID NO: 59184 - DNA, 22 bp, synthetic construct
  misc_feature 1..22: note = chemically synthesized
  source 1..22: mol_type = other DNA
gttaaatggacttcagtaatct

SEQ ID NO: 59185 - DNA, 22 bp, synthetic construct
  misc_feature 1..22: note = chemically synthesized
  source 1..22: mol_type = other DNA
aatggacttcagtaatctgtac

SEQ ID NO: 59186 - DNA, 22 bp, synthetic construct
  misc_feature 1..22: note = chemically synthesized
  source 1..22: mol_type = other DNA
cagtaatctgtacacagttact

SEQ ID NO: 59187 - DNA, 22 bp, synthetic construct
  misc_feature 1..22: note = chemically synthesized
  source 1..22: mol_type = other DNA
agtaatctgtacacagttactt

SEQ ID NO: 59188 - DNA, 22 bp, synthetic construct
  misc_feature 1..22: note = chemically synthesized
  source 1..22: mol_type = other DNA
tacacagttacttcttacttat

SEQ ID NO: 59189 - DNA, 22 bp, synthetic construct
  misc_feature 1..22: note = chemically synthesized
  source 1..22: mol_type = other DNA
cttcttacttattttatatcct

SEQ ID NO: 59190 - DNA, 22 bp, synthetic construct
  misc_feature 1..22: note = chemically synthesized
  source 1..22: mol_type = other DNA
cttacttattttatatcctgaa

SEQ ID NO: 59191 - DNA, 22 bp, synthetic construct
  misc_feature 1..22: note = chemically synthesized
  source 1..22: mol_type = other DNA
ttacttattttatatcctgaaa

SEQ ID NO: 59192 - DNA, 22 bp, synthetic construct
  misc_feature 1..22: note = chemically synthesized
  source 1..22: mol_type = other DNA
acttattttatatcctgaaaga

SEQ ID NO: 59193 - DNA, 22 bp, synthetic construct
  misc_feature 1..22: note = chemically synthesized
  source 1..22: mol_type = other DNA
cttattttatatcctgaaagat

SEQ ID NO: 59194 - DNA, 22 bp, synthetic construct
  misc_feature 1..22: note = chemically synthesized
  source 1..22: mol_type = other DNA
attttatatcctgaaagatatt

SEQ ID NO: 59195 - DNA, 22 bp, synthetic construct
  misc_feature 1..22: note = chemically synthesized
  source 1..22: mol_type = other DNA
ttttatatcctgaaagatatta

SEQ ID NO: 59196 - DNA, 22 bp, synthetic construct
  misc_feature 1..22: note = chemically synthesized
  source 1..22: mol_type = other DNA
tatatcctgaaagatattaagt

SEQ ID NO: 59197 - DNA, 22 bp, synthetic construct
  misc_feature 1..22: note = chemically synthesized
  source 1..22: mol_type = other DNA
atatcctgaaagatattaagtc

SEQ ID NO: 59198 - DNA, 22 bp, synthetic construct
  misc_feature 1..22: note = chemically synthesized
  source 1..22: mol_type = other DNA
tatcctgaaagatattaagtcc

SEQ ID NO: 59199 - DNA, 22 bp, synthetic construct
  misc_feature 1..22: note = chemically synthesized
  source 1..22: mol_type = other DNA
aaagatattaagtccaacaagc

SEQ ID NO: 59200 - DNA, 22 bp, synthetic construct
  misc_feature 1..22: note = chemically synthesized
  source 1..22: mol_type = other DNA
agtccaacaagcttttacccac

SEQ ID NO: 59201 - DNA, 22 bp, synthetic construct
  misc_feature 1..22: note = chemically synthesized
  source 1..22: mol_type = other DNA
ttacccacagagtctacagaga

SEQ ID NO: 59202 - DNA, 22 bp, synthetic construct
  misc_feature 1..22: note = chemically synthesized
  source 1..22: mol_type = other DNA
tacccacagagtctacagagaa

SEQ ID NO: 59203 - DNA, 22 bp, synthetic construct
  misc_feature 1..22: note = chemically synthesized
  source 1..22: mol_type = other DNA
acccacagagtctacagagaaa

SEQ ID NO: 59204 - DNA, 22 bp, synthetic construct
  misc_feature 1..22: note = chemically synthesized
  source 1..22: mol_type = other DNA
cccacagagtctacagagaaaa

SEQ ID NO: 59205 - DNA, 22 bp, synthetic construct
  misc_feature 1..22: note = chemically synthesized
  source 1..22: mol_type = other DNA
cagagaaaacggccaggcaatt

SEQ ID NO: 59206 - DNA, 22 bp, synthetic construct
  misc_feature 1..22: note = chemically synthesized
  source 1..22: mol_type = other DNA
ttgtttcaatctctgtgtctct

SEQ ID NO: 59207 - DNA, 22 bp, synthetic construct
  misc_feature 1..22: note = chemically synthesized
  source 1..22: mol_type = other DNA
tgtttcaatctctgtgtctctc

SEQ ID NO: 59208 - DNA, 22 bp, synthetic construct
  misc_feature 1..22: note = chemically synthesized
  source 1..22: mol_type = other DNA
gtttcaatctctgtgtctctct

SEQ ID NO: 59209 - DNA, 22 bp, synthetic construct
  misc_feature 1..22: note = chemically synthesized
  source 1..22: mol_type = other DNA
tttcaatctctgtgtctctctg

SEQ ID NO: 59210 - DNA, 22 bp, synthetic construct
  misc_feature 1..22: note = chemically synthesized
  source 1..22: mol_type = other DNA
caatctctgtgtctctctggag

SEQ ID NO: 59211 - DNA, 22 bp, synthetic construct
  misc_feature 1..22: note = chemically synthesized
  source 1..22: mol_type = other DNA
aatctctgtgtctctctggagc

SEQ ID NO: 59212 - DNA, 22 bp, synthetic construct
  misc_feature 1..22: note = chemically synthesized
  source 1..22: mol_type = other DNA
tgtgtctctctggagcactagt

SEQ ID NO: 59213 - DNA, 22 bp, synthetic construct
  misc_feature 1..22: note = chemically synthesized
  source 1..22: mol_type = other DNA
tgtctctctggagcactagttc

SEQ ID NO: 59214 - DNA, 22 bp, synthetic construct
  misc_feature 1..22: note = chemically synthesized
  source 1..22: mol_type = other DNA
tctggagcactagttccagagg

SEQ ID NO: 59215 - DNA, 22 bp, synthetic construct
  misc_feature 1..22: note = chemically synthesized
  source 1..22: mol_type = other DNA
tggagcactagttccagaggct

SEQ ID NO: 59216 - DNA, 22 bp, synthetic construct
  misc_feature 1..22: note = chemically synthesized
  source 1..22: mol_type = other DNA
gagcactagttccagaggctga

SEQ ID NO: 59217 - DNA, 22 bp, synthetic construct
  misc_feature 1..22: note = chemically synthesized
  source 1..22: mol_type = other DNA
gttccagaggctgatcaatagg

SEQ ID NO: 59218 - DNA, 22 bp, synthetic construct
  misc_feature 1..22: note = chemically synthesized
  source 1..22: mol_type = other DNA
cagaggctgatcaataggtttt

SEQ ID NO: 59219 - DNA, 22 bp, synthetic construct
  misc_feature 1..22: note = chemically synthesized
  source 1..22: mol_type = other DNA
atcaataggttttattgtagac

SEQ ID NO: 59220 - DNA, 22 bp, synthetic construct
  misc_feature 1..22: note = chemically synthesized
  source 1..22: mol_type = other DNA
tattgtagacctcactgtctct

SEQ ID NO: 59221 - DNA, 22 bp, synthetic construct
  misc_feature 1..22: note = chemically synthesized
  source 1..22: mol_type = other DNA
attgtagacctcactgtctcta

SEQ ID NO: 59222 - DNA, 22 bp, synthetic construct
  misc_feature 1..22: note = chemically synthesized
  source 1..22: mol_type = other DNA
ttgtagacctcactgtctctaa

SEQ ID NO: 59223 - DNA, 22 bp, synthetic construct
  misc_feature 1..22: note = chemically synthesized
  source 1..22: mol_type = other DNA
tagacctcactgtctctaaaag

SEQ ID NO: 59224 - DNA, 22 bp, synthetic construct
  misc_feature 1..22: note = chemically synthesized
  source 1..22: mol_type = other DNA
actgtctctaaaagcattttga

SEQ ID NO: 59225 - DNA, 22 bp, synthetic construct
  misc_feature 1..22: note = chemically synthesized
  source 1..22: mol_type = other DNA
tctctaaaagcattttgacctt

SEQ ID NO: 59226 - DNA, 22 bp, synthetic construct
  misc_feature 1..22: note = chemically synthesized
  source 1..22: mol_type = other DNA
taaaagcattttgaccttatcc

SEQ ID NO: 59227 - DNA, 22 bp, synthetic construct
  misc_feature 1..22: note = chemically synthesized
  source 1..22: mol_type = other DNA
aaagcattttgaccttatcctg

SEQ ID NO: 59228 - DNA, 22 bp, synthetic construct
  misc_feature 1..22: note = chemically synthesized
  source 1..22: mol_type = other DNA
tgaccttatcctgtctaaaaat

SEQ ID NO: 59229 - DNA, 22 bp, synthetic construct
  misc_feature 1..22: note = chemically synthesized
  source 1..22: mol_type = other DNA
gaccttatcctgtctaaaaata

SEQ ID NO: 59230 - DNA, 22 bp, synthetic construct
  misc_feature 1..22: note = chemically synthesized
  source 1..22: mol_type = other DNA
accttatcctgtctaaaaatag

SEQ ID NO: 59231 - DNA, 22 bp, synthetic construct
  misc_feature 1..22: note = chemically synthesized
  source 1..22: mol_type = other DNA
atcctgtctaaaaatagtattt

SEQ ID NO: 59232 - DNA, 22 bp, synthetic construct
  misc_feature 1..22: note = chemically synthesized
  source 1..22: mol_type = other DNA
tcctgtctaaaaatagtatttg

SEQ ID NO: 59233 - DNA, 22 bp, synthetic construct
  misc_feature 1..22: note = chemically synthesized
  source 1..22: mol_type = other DNA
tctaaaaatagtatttgctctt

SEQ ID NO: 59234 - DNA, 22 bp, synthetic construct
  misc_feature 1..22: note = chemically synthesized
  source 1..22: mol_type = other DNA
aaaatagtatttgctcttgcct

SEQ ID NO: 59235 - DNA, 22 bp, synthetic construct
  misc_feature 1..22: note = chemically synthesized
  source 1..22: mol_type = other DNA
gctcttgcctgcagaaccttga

SEQ ID NO: 59236 - DNA, 22 bp, synthetic construct
  misc_feature 1..22: note = chemically synthesized
  source 1..22: mol_type = other DNA
ctcttgcctgcagaaccttgac

SEQ ID NO: 59237 - DNA, 22 bp, synthetic construct
  misc_feature 1..22: note = chemically synthesized
  source 1..22: mol_type = other DNA
ttgcctgcagaaccttgacctg

SEQ ID NO: 59238 - DNA, 22 bp, synthetic construct
  misc_feature 1..22: note = chemically synthesized
  source 1..22: mol_type = other DNA
gcctgcagaaccttgacctgtg

SEQ ID NO: 59239 - DNA, 22 bp, synthetic construct
  misc_feature 1..22: note = chemically synthesized
  source 1..22: mol_type = other DNA
cctgcagaaccttgacctgtga

SEQ ID NO: 59240 - DNA, 22 bp, synthetic construct
  misc_feature 1..22: note = chemically synthesized
  source 1..22: mol_type = other DNA
cagaaccttgacctgtgaaaac

SEQ ID NO: 59241 - DNA, 22 bp, synthetic construct
  misc_feature 1..22: note = chemically synthesized
  source 1..22: mol_type = other DNA
gacctgtgaaaacccatttgga

SEQ ID NO: 59242 - DNA, 22 bp, synthetic construct
  misc_feature 1..22: note = chemically synthesized
  source 1..22: mol_type = other DNA
acctgtgaaaacccatttggaa

SEQ ID NO: 59243 - DNA, 22 bp, synthetic construct
  misc_feature 1..22: note = chemically synthesized
  source 1..22: mol_type = other DNA
tgaaaacccatttggaacataa

SEQ ID NO: 59244 - DNA, 22 bp, synthetic construct
  misc_feature 1..22: note = chemically synthesized
  source 1..22: mol_type = other DNA
ggaacataactgacatatctag

SEQ ID NO: 59245 - DNA, 22 bp, synthetic construct
  misc_feature 1..22: note = chemically synthesized
  source 1..22: mol_type = other DNA
gaacataactgacatatctagt

SEQ ID NO: 59246 - DNA, 22 bp, synthetic construct
  misc_feature 1..22: note = chemically synthesized
  source 1..22: mol_type = other DNA
acatatctagtcagctgtatat

SEQ ID NO: 59247 - DNA, 22 bp, synthetic construct
  misc_feature 1..22: note = chemically synthesized
  source 1..22: mol_type = other DNA
gtcagctgtatatccaagacat

SEQ ID NO: 59248 - DNA, 22 bp, synthetic construct
  misc_feature 1..22: note = chemically synthesized
  source 1..22: mol_type = other DNA
tatatccaagacatgctctgtg

SEQ ID NO: 59249 - DNA, 22 bp, synthetic construct
  misc_feature 1..22: note = chemically synthesized
  source 1..22: mol_type = other DNA
tgtgaatgaattctgtgcagaa

SEQ ID NO: 59250 - DNA, 22 bp, synthetic construct
  misc_feature 1..22: note = chemically synthesized
  source 1..22: mol_type = other DNA
tgaatgaattctgtgcagaacc

SEQ ID NO: 59251 - DNA, 22 bp, synthetic construct
  misc_feature 1..22: note = chemically synthesized
  source 1..22: mol_type = other DNA
tgtgcagaaccgtccaggagaa

SEQ ID NO: 59252 - DNA, 22 bp, synthetic construct
  misc_feature 1..22: note = chemically synthesized
  source 1..22: mol_type = other DNA
tgcagaaccgtccaggagaaca

SEQ ID NO: 59253 - DNA, 22 bp, synthetic construct
  misc_feature 1..22: note = chemically synthesized
  source 1..22: mol_type = other DNA
tcttccaagacaaatgaattcc

SEQ ID NO: 59254 - DNA, 22 bp, synthetic construct
  misc_feature 1..22: note = chemically synthesized
  source 1..22: mol_type = other DNA
cttccaagacaaatgaattcca

SEQ ID NO: 59255 - DNA, 22 bp, synthetic construct
  misc_feature 1..22: note = chemically synthesized
  source 1..22: mol_type = other DNA
ttccaagacaaatgaattccag

SEQ ID NO: 59256 - DNA, 22 bp, synthetic construct
  misc_feature 1..22: note = chemically synthesized
  source 1..22: mol_type = other DNA
ccaagacaaatgaattccagtt

SEQ ID NO: 59257 - DNA, 22 bp, synthetic construct
  misc_feature 1..22: note = chemically synthesized
  source 1..22: mol_type = other DNA
caagacaaatgaattccagttc

SEQ ID NO: 59258 - DNA, 22 bp, synthetic construct
  misc_feature 1..22: note = chemically synthesized
  source 1..22: mol_type = other DNA
cagttctgaacactgggagtgc

SEQ ID NO: 59259 - DNA, 22 bp, synthetic construct
  misc_feature 1..22: note = chemically synthesized
  source 1..22: mol_type = other DNA
tgaacactgggagtgcacctgc

SEQ ID NO: 59260 - DNA, 22 bp, synthetic construct
  misc_feature 1..22: note = chemically synthesized
  source 1..22: mol_type = other DNA
aacactgggagtgcacctgctt

SEQ ID NO: 59261 - DNA, 22 bp, synthetic construct
  misc_feature 1..22: note = chemically synthesized
  source 1..22: mol_type = other DNA
ggagtgcacctgcttgtcggat

SEQ ID NO: 59262 - DNA, 22 bp, synthetic construct
  misc_feature 1..22: note = chemically synthesized
  source 1..22: mol_type = other DNA
cttgtcggatgtggtgatgggc

SEQ ID NO: 59263 - DNA, 22 bp, synthetic construct
  misc_feature 1..22: note = chemically synthesized
  source 1..22: mol_type = other DNA
gtcggatgtggtgatgggccac

SEQ ID NO: 59264 - DNA, 22 bp, synthetic construct
  misc_feature 1..22: note = chemically synthesized
  source 1..22: mol_type = other DNA
tcggatgtggtgatgggccaca

SEQ ID NO: 59265 - DNA, 22 bp, synthetic construct
  misc_feature 1..22: note = chemically synthesized
  source 1..22: mol_type = other DNA
agggcctgtggggcagtcgatg

SEQ ID NO: 59266 - DNA, 22 bp, synthetic construct
  misc_feature 1..22: note = chemically synthesized
  source 1..22: mol_type = other DNA
tggggcagtcgatgtgggagga

SEQ ID NO: 59267 - DNA, 22 bp, synthetic construct
  misc_feature 1..22: note = chemically synthesized
  source 1..22: mol_type = other DNA
tcacagagactctcagagggtg

SEQ ID NO: 59268 - DNA, 22 bp, synthetic construct
  misc_feature 1..22: note = chemically synthesized
  source 1..22: mol_type = other DNA
tcagagggtgcattcagccctg

SEQ ID NO: 59269 - DNA, 22 bp, synthetic construct
  misc_feature 1..22: note = chemically synthesized
  source 1..22: mol_type = other DNA
agagggtgcattcagccctgaa

SEQ ID NO: 59270 - DNA, 22 bp, synthetic construct
  misc_feature 1..22: note = chemically synthesized
  source 1..22: mol_type = other DNA
agccctgaacagggcaaaggac

SEQ ID NO: 59271 - DNA, 22 bp, synthetic construct
  misc_feature 1..22: note = chemically synthesized
  source 1..22: mol_type = other DNA
aacagggcaaaggactgcaagg

SEQ ID NO: 59272 - DNA, 22 bp, synthetic construct
  misc_feature 1..22: note = chemically synthesized
  source 1..22: mol_type = other DNA
caaggggcaggagcttgggctg

SEQ ID NO: 59273 - DNA, 22 bp, synthetic construct
  misc_feature 1..22: note = chemically synthesized
  source 1..22: mol_type = other DNA
gggctgacatgcaaggtggctt

SEQ ID NO: 59274 - DNA, 22 bp, synthetic construct
  misc_feature 1..22: note = chemically synthesized
  source 1..22: mol_type = other DNA
ggctgacatgcaaggtggcttt

SEQ ID NO: 59275 - DNA, 22 bp, synthetic construct
  misc_feature 1..22: note = chemically synthesized
  source 1..22: mol_type = other DNA
acatgcaaggtggctttacaca

SEQ ID NO: 59276 - DNA, 22 bp, synthetic construct
  misc_feature 1..22: note = chemically synthesized
  source 1..22: mol_type = other DNA
tacacaaggccctttttagaga

SEQ ID NO: 59277 - DNA, 22 bp, synthetic construct
  misc_feature 1..22: note = chemically synthesized
  source 1..22: mol_type = other DNA
acacaaggccctttttagagag

SEQ ID NO: 59278 - DNA, 22 bp, synthetic construct
  misc_feature 1..22: note = chemically synthesized
  source 1..22: mol_type = other DNA
cacaaggccctttttagagagt

SEQ ID NO: 59279 - DNA, 22 bp, synthetic construct
  misc_feature 1..22: note = chemically synthesized
  source 1..22: mol_type = other DNA
tttagagagtgtgattctctga

SEQ ID NO: 59280 - DNA, 22 bp, synthetic construct
  misc_feature 1..22: note = chemically synthesized
  source 1..22: mol_type = other DNA
ttagagagtgtgattctctgaa

SEQ ID NO: 59281 - DNA, 22 bp, synthetic construct
  misc_feature 1..22: note = chemically synthesized
  source 1..22: mol_type = other DNA
tagagagtgtgattctctgaag

SEQ ID NO: 59282 - DNA, 22 bp, synthetic construct
  misc_feature 1..22: note = chemically synthesized
  source 1..22: mol_type = other DNA
agagagtgtgattctctgaagc

SEQ ID NO: 59283 - DNA, 22 bp, synthetic construct
  misc_feature 1..22: note = chemically synthesized
  source 1..22: mol_type = other DNA
gagagtgtgattctctgaagct

SEQ ID NO: 59284 - DNA, 22 bp, synthetic construct
  misc_feature 1..22: note = chemically synthesized
  source 1..22: mol_type = other DNA
tctgaagcttttcttggcagct

SEQ ID NO: 59285 - DNA, 22 bp, synthetic construct
  misc_feature 1..22: note = chemically synthesized
  source 1..22: mol_type = other DNA
tgaagcttttcttggcagcttc

SEQ ID NO: 59286 - DNA, 22 bp, synthetic construct
  misc_feature 1..22: note = chemically synthesized
  source 1..22: mol_type = other DNA
aagcttttcttggcagcttcag

SEQ ID NO: 59287 - DNA, 22 bp, synthetic construct
  misc_feature 1..22: note = chemically synthesized
  source 1..22: mol_type = other DNA
ttcttggcagcttcagtcttga

SEQ ID NO: 59288 - DNA, 22 bp, synthetic construct
  misc_feature 1..22: note = chemically synthesized
  source 1..22: mol_type = other DNA
tcttggcagcttcagtcttgaa

SEQ ID NO: 59289 - DNA, 22 bp, synthetic construct
  misc_feature 1..22: note = chemically synthesized
  source 1..22: mol_type = other DNA
cttggcagcttcagtcttgaac

SEQ ID NO: 59290 - DNA, 22 bp, synthetic construct
  misc_feature 1..22: note = chemically synthesized
  source 1..22: mol_type = other DNA
ttggcagcttcagtcttgaacc

SEQ ID NO: 59291 - DNA, 22 bp, synthetic construct
  misc_feature 1..22: note = chemically synthesized
  source 1..22: mol_type = other DNA
ggcagcttcagtcttgaacctc

SEQ ID NO: 59292 - DNA, 22 bp, synthetic construct
  misc_feature 1..22: note = chemically synthesized
  source 1..22: mol_type = other DNA
gcagcttcagtcttgaacctca

SEQ ID NO: 59293 - DNA, 22 bp, synthetic construct
  misc_feature 1..22: note = chemically synthesized
  source 1..22: mol_type = other DNA
cagtcttgaacctcactggaag

SEQ ID NO: 59294 - DNA, 22 bp, synthetic construct
  misc_feature 1..22: note = chemically synthesized
  source 1..22: mol_type = other DNA
agtcttgaacctcactggaagg

SEQ ID NO: 59295 - DNA, 22 bp, synthetic construct
  misc_feature 1..22: note = chemically synthesized
  source 1..22: mol_type = other DNA
gaacctcactggaagggatcct

SEQ ID NO: 59296 - DNA, 22 bp, synthetic construct
  misc_feature 1..22: note = chemically synthesized
  source 1..22: mol_type = other DNA
aacctcactggaagggatcctc

SEQ ID NO: 59297 - DNA, 22 bp, synthetic construct
  misc_feature 1..22: note = chemically synthesized
  source 1..22: mol_type = other DNA
actggaagggatcctccaaaac

SEQ ID NO: 59298 - DNA, 22 bp, synthetic construct
  misc_feature 1..22: note = chemically synthesized
  source 1..22: mol_type = other DNA
gaagggatcctccaaaacatga

SEQ ID NO: 59299 - DNA, 22 bp, synthetic construct
  misc_feature 1..22: note = chemically synthesized
  source 1..22: mol_type = other DNA
caaaacatgacccagatggaaa

SEQ ID NO: 59300 - DNA, 22 bp, synthetic construct
  misc_feature 1..22: note = chemically synthesized
  source 1..22: mol_type = other DNA
ctgagtttaaaataactcccct

SEQ ID NO: 59301 - DNA, 22 bp, synthetic construct
  misc_feature 1..22: note = chemically synthesized
  source 1..22: mol_type = other DNA
tgagtttaaaataactccccta

SEQ ID NO: 59302 - DNA, 22 bp, synthetic construct
  misc_feature 1..22: note = chemically synthesized
  source 1..22: mol_type = other DNA
agtttaaaataactcccctatt

SEQ ID NO: 59303 - DNA, 22 bp, synthetic construct
  misc_feature 1..22: note = chemically synthesized
  source 1..22: mol_type = other DNA
aaaataactcccctatttggta

SEQ ID NO: 59304 - DNA, 22 bp, synthetic construct
  misc_feature 1..22: note = chemically synthesized
  source 1..22: mol_type = other DNA
aaataactcccctatttggtaa

SEQ ID NO: 59305 - DNA, 22 bp, synthetic construct
  misc_feature 1..22: note = chemically synthesized
  source 1..22: mol_type = other DNA
ccctatttggtaatacgggact

SEQ ID NO: 59306 - DNA, 22 bp, synthetic construct
  misc_feature 1..22: note = chemically synthesized
  source 1..22: mol_type = other DNA
tttggtaatacgggactttatt

SEQ ID NO: 59307 - DNA, 22 bp, synthetic construct
  misc_feature 1..22: note = chemically synthesized
  source 1..22: mol_type = other DNA
ggtaatacgggactttatttgt

SEQ ID NO: 59308 - DNA, 22 bp, synthetic construct
  misc_feature 1..22: note = chemically synthesized
  source 1..22: mol_type = other DNA
gtaatacgggactttatttgtg

SEQ ID NO: 59309 - DNA, 22 bp, synthetic construct
  misc_feature 1..22: note = chemically synthesized
  source 1..22: mol_type = other DNA
tatttgtgactttattattttt

SEQ ID NO: 59310 - DNA, 22 bp, synthetic construct
  misc_feature 1..22: note = chemically synthesized
  source 1..22: mol_type = other DNA
atttgtgactttattattttta

SEQ ID NO: 59311 - DNA, 22 bp, synthetic construct
  misc_feature 1..22: note = chemically synthesized
  source 1..22: mol_type = other DNA
tttgtgactttattatttttag

SEQ ID NO: 59312 - DNA, 22 bp, synthetic construct
  misc_feature 1..22: note = chemically synthesized
  source 1..22: mol_type = other DNA
gtgactttattatttttaggtg

SEQ ID NO: 59313 - DNA, 22 bp, synthetic construct
  misc_feature 1..22: note = chemically synthesized
  source 1..22: mol_type = other DNA
tgactttattatttttaggtgt

SEQ ID NO: 59314 - DNA, 22 bp, synthetic construct
  misc_feature 1..22: note = chemically synthesized
  source 1..22: mol_type = other DNA
tattatttttaggtgtgataat

SEQ ID NO: 59315 - DNA, 22 bp, synthetic construct
  misc_feature 1..22: note = chemically synthesized
  source 1..22: mol_type = other DNA
attatttttaggtgtgataatg

SEQ ID NO: 59316 - DNA, 22 bp, synthetic construct
  misc_feature 1..22: note = chemically synthesized
  source 1..22: mol_type = other DNA
ttatttttaggtgtgataatgg

SEQ ID NO: 59317 - DNA, 22 bp, synthetic construct
  misc_feature 1..22: note = chemically synthesized
  source 1..22: mol_type = other DNA
tttttaggtgtgataatggttt

SEQ ID NO: 59318 - DNA, 22 bp, synthetic construct
  misc_feature 1..22: note = chemically synthesized
  source 1..22: mol_type = other DNA
ttaggtgtgataatggttttgc

SEQ ID NO: 59319 - DNA, 22 bp, synthetic construct
  misc_feature 1..22: note = chemically synthesized
  source 1..22: mol_type = other DNA
taggtgtgataatggttttgca

SEQ ID NO: 59320 - DNA, 22 bp, synthetic construct
  misc_feature 1..22: note = chemically synthesized
  source 1..22: mol_type = other DNA
aggtgtgataatggttttgcag

SEQ ID NO: 59321 - DNA, 22 bp, synthetic construct
  misc_feature 1..22: note = chemically synthesized
  source 1..22: mol_type = other DNA
ggtgtgataatggttttgcagt

SEQ ID NO: 59322 - DNA, 22 bp, synthetic construct
  misc_feature 1..22: note = chemically synthesized
  source 1..22: mol_type = other DNA
tgcagttgtatttaaaagaaaa

SEQ ID NO: 59323 - DNA, 22 bp, synthetic construct
  misc_feature 1..22: note = chemically synthesized
  source 1..22: mol_type = other DNA
gcagttgtatttaaaagaaaaa

SEQ ID NO: 59324 - DNA, 22 bp, synthetic construct
  misc_feature 1..22: note = chemically synthesized
  source 1..22: mol_type = other DNA
cagttgtatttaaaagaaaaaa

SEQ ID NO: 59325 - DNA, 22 bp, synthetic construct
  misc_feature 1..22: note = chemically synthesized
  source 1..22: mol_type = other DNA
tatttaaaagaaaaaaaacgag

SEQ ID NO: 59326 - DNA, 22 bp, synthetic construct
  misc_feature 1..22: note = chemically synthesized
  source 1..22: mol_type = other DNA
aaaagaaaaaaaacgagttcct

SEQ ID NO: 59327 - DNA, 22 bp, synthetic construct
  misc_feature 1..22: note = chemically synthesized
  source 1..22: mol_type = other DNA
aaagaaaaaaaacgagttccta

SEQ ID NO: 59328 - DNA, 22 bp, synthetic construct
  misc_feature 1..22: note = chemically synthesized
  source 1..22: mol_type = other DNA
ctatgtttaaaaaatacataca

SEQ ID NO: 59329 - DNA, 22 bp, synthetic construct
  misc_feature 1..22: note = chemically synthesized
  source 1..22: mol_type = other DNA
tgtttaaaaaatacatacagag

SEQ ID NO: 59330 - DNA, 22 bp, synthetic construct
  misc_feature 1..22: note = chemically synthesized
  source 1..22: mol_type = other DNA
aaaaaatacatacagaggtgtt

SEQ ID NO: 59331 - DNA, 22 bp, synthetic construct
  misc_feature 1..22: note = chemically synthesized
  source 1..22: mol_type = other DNA
aaaaatacatacagaggtgttt

SEQ ID NO: 59332 - DNA, 22 bp, synthetic construct
  misc_feature 1..22: note = chemically synthesized
  source 1..22: mol_type = other DNA
actgatgaaatgatatgacgtc

SEQ ID NO: 59333 - DNA, 22 bp, synthetic construct
  misc_feature 1..22: note = chemically synthesized
  source 1..22: mol_type = other DNA
ctgatgaaatgatatgacgtct

SEQ ID NO: 59334 - DNA, 22 bp, synthetic construct
  misc_feature 1..22: note = chemically synthesized
  source 1..22: mol_type = other DNA
atgaaatgatatgacgtctggg

SEQ ID NO: 59335 - DNA, 22 bp, synthetic construct
  misc_feature 1..22: note = chemically synthesized
  source 1..22: mol_type = other DNA
ggatcaacttaaataataaaat

SEQ ID NO: 59336 - DNA, 22 bp, synthetic construct
  misc_feature 1..22: note = chemically synthesized
  source 1..22: mol_type = other DNA
aaataataaaatgggctaggga

SEQ ID NO: 59337 - DNA, 22 bp, synthetic construct
  misc_feature 1..22: note = chemically synthesized
  source 1..22: mol_type = other DNA
aataataaaatgggctagggag

SEQ ID NO: 59338 - DNA, 22 bp, synthetic construct
  misc_feature 1..22: note = chemically synthesized
  source 1..22: mol_type = other DNA
gggaggcgatagggttacagaa

SEQ ID NO: 59339 - DNA, 22 bp, synthetic construct
  misc_feature 1..22: note = chemically synthesized
  source 1..22: mol_type = other DNA
cagaagacaagaatgactgtga

SEQ ID NO: 59340 - DNA, 22 bp, synthetic construct
  misc_feature 1..22: note = chemically synthesized
  source 1..22: mol_type = other DNA
tgagctgtggtggttggagctg

SEQ ID NO: 59341 - DNA, 22 bp, synthetic construct
  misc_feature 1..22: note = chemically synthesized
  source 1..22: mol_type = other DNA
tggtggttggagctggaagatg

SEQ ID NO: 59342 - DNA, 22 bp, synthetic construct
  misc_feature 1..22: note = chemically synthesized
  source 1..22: mol_type = other DNA
gagctggaagatgtggacttgg

SEQ ID NO: 59343 - DNA, 22 bp, synthetic construct
  misc_feature 1..22: note = chemically synthesized
  source 1..22: mol_type = other DNA
gaagatgtggacttggggactg

SEQ ID NO: 59344 - DNA, 22 bp, synthetic construct
  misc_feature 1..22: note = chemically synthesized
  source 1..22: mol_type = other DNA
ggggactgatttataacattct

SEQ ID NO: 59345 - DNA, 22 bp, synthetic construct
  misc_feature 1..22: note = chemically synthesized
  source 1..22: mol_type = other DNA
gggactgatttataacattctc

SEQ ID NO: 59346 - DNA, 22 bp, synthetic construct
  misc_feature 1..22: note = chemically synthesized
  source 1..22: mol_type = other DNA
atttataacattctctctactt

SEQ ID NO: 59347 - DNA, 22 bp, synthetic construct
  misc_feature 1..22: note = chemically synthesized
  source 1..22: mol_type = other DNA
ataacattctctctacttttgt

SEQ ID NO: 59348 - DNA, 22 bp, synthetic construct
  misc_feature 1..22: note = chemically synthesized
  source 1..22: mol_type = other DNA
taacattctctctacttttgta

SEQ ID NO: 59349 - DNA, 22 bp, synthetic construct
  misc_feature 1..22: note = chemically synthesized
  source 1..22: mol_type = other DNA
tctctacttttgtagtatttga

SEQ ID NO: 59350 - DNA, 22 bp, synthetic construct
  misc_feature 1..22: note = chemically synthesized
  source 1..22: mol_type = other DNA
tctacttttgtagtatttgaga

SEQ ID NO: 59351 - DNA, 22 bp, synthetic construct
  misc_feature 1..22: note = chemically synthesized
  source 1..22: mol_type = other DNA
tacttttgtagtatttgagatt

SEQ ID NO: 59352 - DNA, 22 bp, synthetic construct
  misc_feature 1..22: note = chemically synthesized
  source 1..22: mol_type = other DNA
cttttgtagtatttgagatttt

SEQ ID NO: 59353 - DNA, 22 bp, synthetic construct
  misc_feature 1..22: note = chemically synthesized
  source 1..22: mol_type = other DNA
ttgtagtatttgagatttttcc

SEQ ID NO: 59354 - DNA, 22 bp, synthetic construct
  misc_feature 1..22: note = chemically synthesized
  source 1..22: mol_type = other DNA
tgtagtatttgagatttttcca

SEQ ID NO: 59355 - DNA, 22 bp, synthetic construct
  misc_feature 1..22: note = chemically synthesized
  source 1..22: mol_type = other DNA
gtagtatttgagatttttccag

SEQ ID NO: 59356 - DNA, 22 bp, synthetic construct
  misc_feature 1..22: note = chemically synthesized
  source 1..22: mol_type = other DNA
tagtatttgagatttttccaga

SEQ ID NO: 59357 - DNA, 22 bp, synthetic construct
  misc_feature 1..22: note = chemically synthesized
  source 1..22: mol_type = other DNA
gagatttttccagaaaataaag

SEQ ID NO: 59358 - DNA, 22 bp, synthetic construct
  misc_feature 1..22: note = chemically synthesized
  source 1..22: mol_type = other DNA
agatttttccagaaaataaagg

SEQ ID NO: 59359 - DNA, 22 bp, synthetic construct
  misc_feature 1..22: note = chemically synthesized
  source 1..22: mol_type = other DNA
ttccagaaaataaaggtattgc

SEQ ID NO: 59360 - DNA, 22 bp, synthetic construct
  misc_feature 1..22: note = chemically synthesized
  source 1..22: mol_type = other DNA
tccagaaaataaaggtattgcc

SEQ ID NO: 59361 - DNA, 22 bp, synthetic construct
  misc_feature 1..22: note = chemically synthesized
  source 1..22: mol_type = other DNA
ccagaaaataaaggtattgcct

SEQ ID NO: 59362 - DNA, 22 bp, synthetic construct
  misc_feature 1..22: note = chemically synthesized
  source 1..22: mol_type = other DNA
cagaaaataaaggtattgcctg

SEQ ID NO: 59363 - DNA, 22 bp, synthetic construct
  misc_feature 1..22: note = chemically synthesized
  source 1..22: mol_type = other DNA
cctgactggtggagagcagtat

SEQ ID NO: 59364 - DNA, 22 bp, synthetic construct
  misc_feature 1..22: note = chemically synthesized
  source 1..22: mol_type = other DNA
actggtggagagcagtatggcc

SEQ ID NO: 59365 - DNA, 22 bp, synthetic construct
  misc_feature 1..22: note = chemically synthesized
  source 1..22: mol_type = other DNA
gtggagagcagtatggccttgt

SEQ ID NO: 59366 - DNA, 22 bp, synthetic construct
  misc_feature 1..22: note = chemically synthesized
  source 1..22: mol_type = other DNA
gtttagtcggtgttgtttcttc

SEQ ID NO: 59367 - DNA, 22 bp, synthetic construct
  misc_feature 1..22: note = chemically synthesized
  source 1..22: mol_type = other DNA
tttagtcggtgttgtttcttca

SEQ ID NO: 59368 - DNA, 22 bp, synthetic construct
  misc_feature 1..22: note = chemically synthesized
  source 1..22: mol_type = other DNA
agtcggtgttgtttcttcacca

SEQ ID NO: 59369 - DNA, 22 bp, synthetic construct
  misc_feature 1..22: note = chemically synthesized
  source 1..22: mol_type = other DNA
gtcggtgttgtttcttcaccaa

SEQ ID NO: 59370 - DNA, 22 bp, synthetic construct
  misc_feature 1..22: note = chemically synthesized
  source 1..22: mol_type = other DNA
tttcttcaccaagggtttggct

SEQ ID NO: 59371 - DNA, 22 bp, synthetic construct
  misc_feature 1..22: note = chemically synthesized
  source 1..22: mol_type = other DNA
cttcaccaagggtttggctcag

SEQ ID NO: 59372 - DNA, 22 bp, synthetic construct
  misc_feature 1..22: note = chemically synthesized
  source 1..22: mol_type = other DNA
ttcaccaagggtttggctcaga

SEQ ID NO: 59373 - DNA, 22 bp, synthetic construct
  misc_feature 1..22: note = chemically synthesized
  source 1..22: mol_type = other DNA
caccaagggtttggctcagagg

SEQ ID NO: 59374 - DNA, 22 bp, synthetic construct
  misc_feature 1..22: note = chemically synthesized
  source 1..22: mol_type = other DNA
accaagggtttggctcagaggt

SEQ ID NO: 59375 - DNA, 22 bp, synthetic construct
  misc_feature 1..22: note = chemically synthesized
  source 1..22: mol_type = other DNA
ggctcagaggtagcaaggggac

SEQ ID NO: 59376 - DNA, 22 bp, synthetic construct
  misc_feature 1..22: note = chemically synthesized
  source 1..22: mol_type = other DNA
gctcagaggtagcaaggggaca

SEQ ID NO: 59377 - DNA, 22 bp, synthetic construct
  misc_feature 1..22: note = chemically synthesized
  source 1..22: mol_type = other DNA
agaggtagcaaggggacaagtg

SEQ ID NO: 59378 - DNA, 22 bp, synthetic construct
  misc_feature 1..22: note = chemically synthesized
  source 1..22: mol_type = other DNA
tgggcaagaaagtacctgtgag

SEQ ID NO: 59379 - DNA, 22 bp, synthetic construct
  misc_feature 1..22: note = chemically synthesized
  source 1..22: mol_type = other DNA
tgagctcaagtcttgtatctgg

SEQ ID NO: 59380 - DNA, 22 bp, synthetic construct
  misc_feature 1..22: note = chemically synthesized
  source 1..22: mol_type = other DNA
aagtcttgtatctgggaagttc

SEQ ID NO: 59381 - DNA, 22 bp, synthetic construct
  misc_feature 1..22: note = chemically synthesized
  source 1..22: mol_type = other DNA
gtatctgggaagttcattgtga

SEQ ID NO: 59382 - DNA, 22 bp, synthetic construct
  misc_feature 1..22: note = chemically synthesized
  source 1..22: mol_type = other DNA
tatctgggaagttcattgtgaa

SEQ ID NO: 59383 - DNA, 22 bp, synthetic construct
  misc_feature 1..22: note = chemically synthesized
  source 1..22: mol_type = other DNA
ggaagttcattgtgaaggggtc

SEQ ID NO: 59384 - DNA, 22 bp, synthetic construct
  misc_feature 1..22: note = chemically synthesized
  source 1..22: mol_type = other DNA
attgtgaaggggtcatttaagg

SEQ ID NO: 59385 - DNA, 22 bp, synthetic construct
  misc_feature 1..22: note = chemically synthesized
  source 1..22: mol_type = other DNA
tgaaggggtcatttaagggtct

SEQ ID NO: 59386 - DNA, 22 bp, synthetic construct
  misc_feature 1..22: note = chemically synthesized
  source 1..22: mol_type = other DNA
aagggtctgtactgtgcactgt

SEQ ID NO: 59387 - DNA, 22 bp, synthetic construct
  misc_feature 1..22: note = chemically synthesized
  source 1..22: mol_type = other DNA
agggtctgtactgtgcactgtc

SEQ ID NO: 59388 - DNA, 22 bp, synthetic construct
  misc_feature 1..22: note = chemically synthesized
  source 1..22: mol_type = other DNA
tactgtgcactgtcccccattc

SEQ ID NO: 59389 - DNA, 22 bp, synthetic construct
  misc_feature 1..22: note = chemically synthesized
  source 1..22: mol_type = other DNA
tgcactgtcccccattctcctg

SEQ ID NO: 59390 - DNA, 22 bp, synthetic construct
  misc_feature 1..22: note = chemically synthesized
  source 1..22: mol_type = other DNA
tcccccattctcctggaagaac

SEQ ID NO: 59391 - DNA, 22 bp, synthetic construct
  misc_feature 1..22: note = chemically synthesized
  source 1..22: mol_type = other DNA
tcctggaagaacagagatccct

SEQ ID NO: 59392 - DNA, 22 bp, synthetic construct
  misc_feature 1..22: note = chemically synthesized
  source 1..22: mol_type = other DNA
ctggaagaacagagatcccttg

SEQ ID NO: 59393 - DNA, 22 bp, synthetic construct
  misc_feature 1..22: note = chemically synthesized
  source 1..22: mol_type = other DNA
gaagaacagagatcccttgtct

SEQ ID NO: 59394 - DNA, 22 bp, synthetic construct
  misc_feature 1..22: note = chemically synthesized
  source 1..22: mol_type = other DNA
gtctttttcagtgcatgaggca

SEQ ID NO: 59395 - DNA, 22 bp, synthetic construct
  misc_feature 1..22: note = chemically synthesized
  source 1..22: mol_type = other DNA
tctttttcagtgcatgaggcag

SEQ ID NO: 59396 - DNA, 22 bp, synthetic construct
  misc_feature 1..22: note = chemically synthesized
  source 1..22: mol_type = other DNA
tttcagtgcatgaggcagagtc

SEQ ID NO: 59397 - DNA, 22 bp, synthetic construct
  misc_feature 1..22: note = chemically synthesized
  source 1..22: mol_type = other DNA
ttcagtgcatgaggcagagtca

SEQ ID NO: 59398 - DNA, 22 bp, synthetic construct
  misc_feature 1..22: note = chemically synthesized
  source 1..22: mol_type = other DNA
tcagtgcatgaggcagagtcag

SEQ ID NO: 59399 - DNA, 22 bp, synthetic construct
  misc_feature 1..22: note = chemically synthesized
  source 1..22: mol_type = other DNA
cagtgcatgaggcagagtcaga

SEQ ID NO: 59400 - DNA, 22 bp, synthetic construct
  misc_feature 1..22: note = chemically synthesized
  source 1..22: mol_type = other DNA
agtgcatgaggcagagtcagat

SEQ ID NO: 59401 - DNA, 22 bp, synthetic construct
  misc_feature 1..22: note = chemically synthesized
  source 1..22: mol_type = other DNA
gcttgagtttcagcacaggtgc

SEQ ID NO: 59402 - DNA, 22 bp, synthetic construct
  misc_feature 1..22: note = chemically synthesized
  source 1..22: mol_type = other DNA
cttgagtttcagcacaggtgcc

SEQ ID NO: 59403 - DNA, 22 bp, synthetic construct
  misc_feature 1..22: note = chemically synthesized
  source 1..22: mol_type = other DNA
gagtttcagcacaggtgcctct

SEQ ID NO: 59404 - DNA, 22 bp, synthetic construct
  misc_feature 1..22: note = chemically synthesized
  source 1..22: mol_type = other DNA
agtttcagcacaggtgcctctg

SEQ ID NO: 59405 - DNA, 22 bp, synthetic construct
  misc_feature 1..22: note = chemically synthesized
  source 1..22: mol_type = other DNA
cagcacaggtgcctctgtgcct

SEQ ID NO: 59406 - DNA, 22 bp, synthetic construct
  misc_feature 1..22: note = chemically synthesized
  source 1..22: mol_type = other DNA
agcacaggtgcctctgtgcctc

SEQ ID NO: 59407 - DNA, 22 bp, synthetic construct
  misc_feature 1..22: note = chemically synthesized
  source 1..22: mol_type = other DNA
tgtgcctcgtggtgagggtcag

SEQ ID NO: 59408 - DNA, 22 bp, synthetic construct
  misc_feature 1..22: note = chemically synthesized
  source 1..22: mol_type = other DNA
tgcctcgtggtgagggtcagga

SEQ ID NO: 59409 - DNA, 22 bp, synthetic construct
  misc_feature 1..22: note = chemically synthesized
  source 1..22: mol_type = other DNA
gtggtgagggtcaggaagaagc

SEQ ID NO: 59410 - DNA, 22 bp, synthetic construct
  misc_feature 1..22: note = chemically synthesized
  source 1..22: mol_type = other DNA
ggacgtgctcacgtggctggta

SEQ ID NO: 59411 - DNA, 22 bp, synthetic construct
  misc_feature 1..22: note = chemically synthesized
  source 1..22: mol_type = other DNA
acgtggctggtagtgttatgaa

SEQ ID NO: 59412 - DNA, 22 bp, synthetic construct
  misc_feature 1..22: note = chemically synthesized
  source 1..22: mol_type = other DNA
gtagtgttatgaagacaaggct

SEQ ID NO: 59413 - DNA, 22 bp, synthetic construct
  misc_feature 1..22: note = chemically synthesized
  source 1..22: mol_type = other DNA
tgaagacaaggctttgggacct

SEQ ID NO: 59414 - DNA, 22 bp, synthetic construct
  misc_feature 1..22: note = chemically synthesized
  source 1..22: mol_type = other DNA
tgggacctttctttggccattt

SEQ ID NO: 59415 - DNA, 22 bp, synthetic construct
  misc_feature 1..22: note = chemically synthesized
  source 1..22: mol_type = other DNA
gggacctttctttggccatttg

SEQ ID NO: 59416 - DNA, 22 bp, synthetic construct
  misc_feature 1..22: note = chemically synthesized
  source 1..22: mol_type = other DNA
ggacctttctttggccatttga

SEQ ID NO: 59417 - DNA, 22 bp, synthetic construct
  misc_feature 1..22: note = chemically synthesized
  source 1..22: mol_type = other DNA
tctttggccatttgagccctgg

SEQ ID NO: 59418 - DNA, 22 bp, synthetic construct
  misc_feature 1..22: note = chemically synthesized
  source 1..22: mol_type = other DNA
ctttggccatttgagccctggc

SEQ ID NO: 59419 - DNA, 22 bp, synthetic construct
  misc_feature 1..22: note = chemically synthesized
  source 1..22: mol_type = other DNA
tttggccatttgagccctggct

SEQ ID NO: 59420 - DNA, 22 bp, synthetic construct
  misc_feature 1..22: note = chemically synthesized
  source 1..22: mol_type = other DNA
tggccatttgagccctggctat

SEQ ID NO: 59421 - DNA, 22 bp, synthetic construct
  misc_feature 1..22: note = chemically synthesized
  source 1..22: mol_type = other DNA
ggccatttgagccctggctatt

SEQ ID NO: 59422 - DNA, 22 bp, synthetic construct
  misc_feature 1..22: note = chemically synthesized
  source 1..22: mol_type = other DNA
gccatttgagccctggctatta

SEQ ID NO: 59423 - DNA, 22 bp, synthetic construct
  misc_feature 1..22: note = chemically synthesized
  source 1..22: mol_type = other DNA
gagccctggctattagagaaag

SEQ ID NO: 59424 - DNA, 22 bp, synthetic construct
  misc_feature 1..22: note = chemically synthesized
  source 1..22: mol_type = other DNA
agccctggctattagagaaaga

SEQ ID NO: 59425 - DNA, 22 bp, synthetic construct
  misc_feature 1..22: note = chemically synthesized
  source 1..22: mol_type = other DNA
gctattagagaaagatgatttg

SEQ ID NO: 59426 - DNA, 22 bp, synthetic construct
  misc_feature 1..22: note = chemically synthesized
  source 1..22: mol_type = other DNA
ttagagaaagatgatttgcctg

SEQ ID NO: 59427 - DNA, 22 bp, synthetic construct
  misc_feature 1..22: note = chemically synthesized
  source 1..22: mol_type = other DNA
gagaaagatgatttgcctgaga

SEQ ID NO: 59428 - DNA, 22 bp, synthetic construct
  misc_feature 1..22: note = chemically synthesized
  source 1..22: mol_type = other DNA
gcctgagaggagattgaccaca

SEQ ID NO: 59429 - DNA, 22 bp, synthetic construct
  misc_feature 1..22: note = chemically synthesized
  source 1..22: mol_type = other DNA
cctgagaggagattgaccacac

SEQ ID NO: 59430 - DNA, 22 bp, synthetic construct
  misc_feature 1..22: note = chemically synthesized
  source 1..22: mol_type = other DNA
agaggagattgaccacactctc

SEQ ID NO: 59431 - DNA, 22 bp, synthetic construct
  misc_feature 1..22: note = chemically synthesized
  source 1..22: mol_type = other DNA
accacactctcagaaagaaggg

SEQ ID NO: 59432 - DNA, 22 bp, synthetic construct
  misc_feature 1..22: note = chemically synthesized
  source 1..22: mol_type = other DNA
tcagaaagaaggggacaaagaa

SEQ ID NO: 59433 - DNA, 22 bp, synthetic construct
  misc_feature 1..22: note = chemically synthesized
  source 1..22: mol_type = other DNA
agaaagaaggggacaaagaaca

SEQ ID NO: 59434 - DNA, 22 bp, synthetic construct
  misc_feature 1..22: note = chemically synthesized
  source 1..22: mol_type = other DNA
agcagccttccctttaagggag

SEQ ID NO: 59435 - DNA, 22 bp, synthetic construct
  misc_feature 1..22: note = chemically synthesized
  source 1..22: mol_type = other DNA
ccctttaagggaggactggggc

SEQ ID NO: 59436 - DNA, 22 bp, synthetic construct
  misc_feature 1..22: note = chemically synthesized
  source 1..22: mol_type = other DNA
cctttaagggaggactggggca

SEQ ID NO: 59437 - DNA, 22 bp, synthetic construct
  misc_feature 1..22: note = chemically synthesized
  source 1..22: mol_type = other DNA
taagggaggactggggcacaag

SEQ ID NO: 59438 - DNA, 22 bp, synthetic construct
  misc_feature 1..22: note = chemically synthesized
  source 1..22: mol_type = other DNA
aagggaggactggggcacaaga

SEQ ID NO: 59439 - DNA, 22 bp, synthetic construct
  misc_feature 1..22: note = chemically synthesized
  source 1..22: mol_type = other DNA
agggaggactggggcacaagat

SEQ ID NO: 59440 - DNA, 22 bp, synthetic construct
  misc_feature 1..22: note = chemically synthesized
  source 1..22: mol_type = other DNA
gggcacaagatggaagatgaaa

SEQ ID NO: 59441 - DNA, 22 bp, synthetic construct
  misc_feature 1..22: note = chemically synthesized
  source 1..22: mol_type = other DNA
cagagctggaaaggggaatttt

SEQ ID NO: 59442 - DNA, 22 bp, synthetic construct
  misc_feature 1..22: note = chemically synthesized
  source 1..22: mol_type = other DNA
gaaaggggaattttgttcttct

SEQ ID NO: 59443 - DNA, 22 bp, synthetic construct
  misc_feature 1..22: note = chemically synthesized
  source 1..22: mol_type = other DNA
tgttcttctagatagcaaaagc

SEQ ID NO: 59444 - DNA, 22 bp, synthetic construct
  misc_feature 1..22: note = chemically synthesized
  source 1..22: mol_type = other DNA
gttcttctagatagcaaaagcc

SEQ ID NO: 59445 - DNA, 22 bp, synthetic construct
  misc_feature 1..22: note = chemically synthesized
  source 1..22: mol_type = other DNA
ttcttctagatagcaaaagcca

SEQ ID NO: 59446 - DNA, 22 bp, synthetic construct
  misc_feature 1..22: note = chemically synthesized
  source 1..22: mol_type = other DNA
ttctagatagcaaaagccagga

SEQ ID NO: 59447 - DNA, 22 bp, synthetic construct
  misc_feature 1..22: note = chemically synthesized
  source 1..22: mol_type = other DNA
ctagatagcaaaagccaggact

SEQ ID NO: 59448 - DNA, 22 bp, synthetic construct
  misc_feature 1..22: note = chemically synthesized
  source 1..22: mol_type = other DNA
tagatagcaaaagccaggactg

SEQ ID NO: 59449 - DNA, 22 bp, synthetic construct
  misc_feature 1..22: note = chemically synthesized
  source 1..22: mol_type = other DNA
gatagcaaaagccaggactgtc

SEQ ID NO: 59450 - DNA, 22 bp, synthetic construct
  misc_feature 1..22: note = chemically synthesized
  source 1..22: mol_type = other DNA
tcgctgtgtgacttgaaagcta

SEQ ID NO: 59451 - DNA, 22 bp, synthetic construct
  misc_feature 1..22: note = chemically synthesized
  source 1..22: mol_type = other DNA
tgtgacttgaaagctaggtcac

SEQ ID NO: 59452 - DNA, 22 bp, synthetic construct
  misc_feature 1..22: note = chemically synthesized
  source 1..22: mol_type = other DNA
gaaagctaggtcactggtgggc

SEQ ID NO: 59453 - DNA, 22 bp, synthetic construct
  misc_feature 1..22: note = chemically synthesized
  source 1..22: mol_type = other DNA
aaagctaggtcactggtgggct

SEQ ID NO: 59454 - DNA, 22 bp, synthetic construct
  misc_feature 1..22: note = chemically synthesized
  source 1..22: mol_type = other DNA
ggtcactggtgggcttcgtgca

SEQ ID NO: 59455 - DNA, 22 bp, synthetic construct
  misc_feature 1..22: note = chemically synthesized
  source 1..22: mol_type = other DNA
gtgggcttcgtgcagcccgtca

SEQ ID NO: 59456 - DNA, 22 bp, synthetic construct
  misc_feature 1..22: note = chemically synthesized
  source 1..22: mol_type = other DNA
cgtgcagcccgtcacaggggag

SEQ ID NO: 59457 - DNA, 22 bp, synthetic construct
  misc_feature 1..22: note = chemically synthesized
  source 1..22: mol_type = other DNA
gtgcagcccgtcacaggggagc

SEQ ID NO: 59458 - DNA, 22 bp, synthetic construct
  misc_feature 1..22: note = chemically synthesized
  source 1..22: mol_type = other DNA
gtctctgccgtatctgctgcct

SEQ ID NO: 59459 - DNA, 22 bp, synthetic construct
  misc_feature 1..22: note = chemically synthesized
  source 1..22: mol_type = other DNA
tgccgtatctgctgcctggaag

SEQ ID NO: 59460 - DNA, 22 bp, synthetic construct
  misc_feature 1..22: note = chemically synthesized
  source 1..22: mol_type = other DNA
ccgtatctgctgcctggaagct

SEQ ID NO: 59461 - DNA, 22 bp, synthetic construct
  misc_feature 1..22: note = chemically synthesized
  source 1..22: mol_type = other DNA
ctgcctggaagctgagactggc

SEQ ID NO: 59462 - DNA, 22 bp, synthetic construct
  misc_feature 1..22: note = chemically synthesized
  source 1..22: mol_type = other DNA
cctggaagctgagactggccta

SEQ ID NO: 59463 - DNA, 22 bp, synthetic construct
  misc_feature 1..22: note = chemically synthesized
  source 1..22: mol_type = other DNA
gaagctgagactggcctaacca

SEQ ID NO: 59464 - DNA, 22 bp, synthetic construct
  misc_feature 1..22: note = chemically synthesized
  source 1..22: mol_type = other DNA
agactggcctaaccacatcaca

SEQ ID NO: 59465 - DNA, 22 bp, synthetic construct
  misc_feature 1..22: note = chemically synthesized
  source 1..22: mol_type = other DNA
gcctaaccacatcacaccattc

SEQ ID NO: 59466 - DNA, 22 bp, synthetic construct
  misc_feature 1..22: note = chemically synthesized
  source 1..22: mol_type = other DNA
accacatcacaccattcccaga

SEQ ID NO: 59467 - DNA, 22 bp, synthetic construct
  misc_feature 1..22: note = chemically synthesized
  source 1..22: mol_type = other DNA
ccagacccaggcccaggcccag

SEQ ID NO: 59468 - DNA, 22 bp, synthetic construct
  misc_feature 1..22: note = chemically synthesized
  source 1..22: mol_type = other DNA
tggttttacaaaatgtccgctc

SEQ ID NO: 59469 - DNA, 22 bp, synthetic construct
  misc_feature 1..22: note = chemically synthesized
  source 1..22: mol_type = other DNA
gttttacaaaatgtccgctctc

SEQ ID NO: 59470 - DNA, 22 bp, synthetic construct
  misc_feature 1..22: note = chemically synthesized
  source 1..22: mol_type = other DNA
tacaaaatgtccgctctctctc

SEQ ID NO: 59471 - DNA, 22 bp, synthetic construct
  misc_feature 1..22: note = chemically synthesized
  source 1..22: mol_type = other DNA
acaaaatgtccgctctctctcg

SEQ ID NO: 59472 - DNA, 22 bp, synthetic construct
  misc_feature 1..22: note = chemically synthesized
  source 1..22: mol_type = other DNA
caaaatgtccgctctctctcgc

SEQ ID NO: 59473 - DNA, 22 bp, synthetic construct
  misc_feature 1..22: note = chemically synthesized
  source 1..22: mol_type = other DNA
tctctcgcttcacacagaggct

SEQ ID NO: 59474 - DNA, 22 bp, synthetic construct
  misc_feature 1..22: note = chemically synthesized
  source 1..22: mol_type = other DNA
tctcgcttcacacagaggctat

SEQ ID NO: 59475 - DNA, 22 bp, synthetic construct
  misc_feature 1..22: note = chemically synthesized
  source 1..22: mol_type = other DNA
tcgcttcacacagaggctatta

SEQ ID NO: 59476 - DNA, 22 bp, synthetic construct
  misc_feature 1..22: note = chemically synthesized
  source 1..22: mol_type = other DNA
gcttcacacagaggctattatt

SEQ ID NO: 59477 - DNA, 22 bp, synthetic construct
  misc_feature 1..22: note = chemically synthesized
  source 1..22: mol_type = other DNA
cacacagaggctattattagca

SEQ ID NO: 59478 - DNA, 22 bp, synthetic construct
  misc_feature 1..22: note = chemically synthesized
  source 1..22: mol_type = other DNA
acacagaggctattattagcaa

SEQ ID NO: 59479 - DNA, 22 bp, synthetic construct
  misc_feature 1..22: note = chemically synthesized
  source 1..22: mol_type = other DNA
ttattagcaagtgtcactcagt

SEQ ID NO: 59480 - DNA, 22 bp, synthetic construct
  misc_feature 1..22: note = chemically synthesized
  source 1..22: mol_type = other DNA
ttagcaagtgtcactcagttat

SEQ ID NO: 59481 - DNA, 22 bp, synthetic construct
  misc_feature 1..22: note = chemically synthesized
  source 1..22: mol_type = other DNA
gcaagtgtcactcagttatctg

SEQ ID NO: 59482 - DNA, 22 bp, synthetic construct
  misc_feature 1..22: note = chemically synthesized
  source 1..22: mol_type = other DNA
agttatctgagagtggcgcttt

SEQ ID NO: 59483 - DNA, 22 bp, synthetic construct
  misc_feature 1..22: note = chemically synthesized
  source 1..22: mol_type = other DNA
tctgagagtggcgcttttagct

SEQ ID NO: 59484 - DNA, 22 bp, synthetic construct
  misc_feature 1..22: note = chemically synthesized
  source 1..22: mol_type = other DNA
agagtggcgcttttagctgcca

SEQ ID NO: 59485 - DNA, 22 bp, synthetic construct
  misc_feature 1..22: note = chemically synthesized
  source 1..22: mol_type = other DNA
ttagctgccatctaagtgcctg

SEQ ID NO: 59486 - DNA, 22 bp, synthetic construct
  misc_feature 1..22: note = chemically synthesized
  source 1..22: mol_type = other DNA
tagctgccatctaagtgcctga

SEQ ID NO: 59487 - DNA, 22 bp, synthetic construct
  misc_feature 1..22: note = chemically synthesized
  source 1..22: mol_type = other DNA
agctgccatctaagtgcctgat

SEQ ID NO: 59488 - DNA, 22 bp, synthetic construct
  misc_feature 1..22: note = chemically synthesized
  source 1..22: mol_type = other DNA
gctgccatctaagtgcctgata

SEQ ID NO: 59489 - DNA, 22 bp, synthetic construct
  misc_feature 1..22: note = chemically synthesized
  source 1..22: mol_type = other DNA
ccatctaagtgcctgatacttg

SEQ ID NO: 59490 - DNA, 22 bp, synthetic construct
  misc_feature 1..22: note = chemically synthesized
  source 1..22: mol_type = other DNA
agtgcctgatacttgggtttac

SEQ ID NO: 59491 - DNA, 22 bp, synthetic construct
  misc_feature 1..22: note = chemically synthesized
  source 1..22: mol_type = other DNA
atacttgggtttacagcagatt

SEQ ID NO: 59492 - DNA, 22 bp, synthetic construct
  misc_feature 1..22: note = chemically synthesized
  source 1..22: mol_type = other DNA
gggtttacagcagattaaatta

SEQ ID NO: 59493 - DNA, 22 bp, synthetic construct
  misc_feature 1..22: note = chemically synthesized
  source 1..22: mol_type = other DNA
ggtttacagcagattaaattaa

SEQ ID NO: 59494 - DNA, 22 bp, synthetic construct
  misc_feature 1..22: note = chemically synthesized
  source 1..22: mol_type = other DNA
acagcagattaaattaaatttt

SEQ ID NO: 59495 - DNA, 22 bp, synthetic construct
  misc_feature 1..22: note = chemically synthesized
  source 1..22: mol_type = other DNA
cagcagattaaattaaatttta

SEQ ID NO: 59496 - DNA, 22 bp, synthetic construct
  misc_feature 1..22: note = chemically synthesized
  source 1..22: mol_type = other DNA
aattaaattttaggctggtttg

SEQ ID NO: 59497 - DNA, 22 bp, synthetic construct
  misc_feature 1..22: note = chemically synthesized
  source 1..22: mol_type = other DNA
aattttaggctggtttggcttc

SEQ ID NO: 59498 - DNA, 22 bp, synthetic construct
  misc_feature 1..22: note = chemically synthesized
  source 1..22: mol_type = other DNA
taggctggtttggcttcactgg

SEQ ID NO: 59499 - DNA, 22 bp, synthetic construct
  misc_feature 1..22: note = chemically synthesized
  source 1..22: mol_type = other DNA
aggctggtttggcttcactggc

SEQ ID NO: 59500 - DNA, 22 bp, synthetic construct
  misc_feature 1..22: note = chemically synthesized
  source 1..22: mol_type = other DNA
ggctggtttggcttcactggca

SEQ ID NO: 59501 - DNA, 22 bp, synthetic construct
  misc_feature 1..22: note = chemically synthesized
  source 1..22: mol_type = other DNA
gtttggcttcactggcagtaga

SEQ ID NO: 59502 - DNA, 22 bp, synthetic construct
  misc_feature 1..22: note = chemically synthesized
  source 1..22: mol_type = other DNA
ggcttcactggcagtagacaat

SEQ ID NO: 59503 - DNA, 22 bp, synthetic construct
  misc_feature 1..22: note = chemically synthesized
  source 1..22: mol_type = other DNA
gcttcactggcagtagacaatg

SEQ ID NO: 59504 - DNA, 22 bp, synthetic construct
  misc_feature 1..22: note = chemically synthesized
  source 1..22: mol_type = other DNA
cactggcagtagacaatggaag

SEQ ID NO: 59505 - DNA, 22 bp, synthetic construct
  misc_feature 1..22: note = chemically synthesized
  source 1..22: mol_type = other DNA
actggcagtagacaatggaagg

SEQ ID NO: 59506 - DNA, 22 bp, synthetic construct
  misc_feature 1..22: note = chemically synthesized
  source 1..22: mol_type = other DNA
gcagtagacaatggaaggcagc

SEQ ID NO: 59507 - DNA, 22 bp, synthetic construct
  misc_feature 1..22: note = chemically synthesized
  source 1..22: mol_type = other DNA
ttgtagaaatgtaacctggcac

SEQ ID NO: 59508 - DNA, 22 bp, synthetic construct
  misc_feature 1..22: note = chemically synthesized
  source 1..22: mol_type = other DNA
tagaaatgtaacctggcaccct

SEQ ID NO: 59509 - DNA, 22 bp, synthetic construct
  misc_feature 1..22: note = chemically synthesized
  source 1..22: mol_type = other DNA
gcaccctcaaggatttgtgtga

SEQ ID NO: 59510 - DNA, 22 bp, synthetic construct
  misc_feature 1..22: note = chemically synthesized
  source 1..22: mol_type = other DNA
aaggatttgtgtgagtgtgtgt

SEQ ID NO: 59511 - DNA, 22 bp, synthetic construct
  misc_feature 1..22: note = chemically synthesized
  source 1..22: mol_type = other DNA
gtgtgagtgtgtgtgtgtgtgt

SEQ ID NO: 59512 - DNA, 22 bp, synthetic construct
  misc_feature 1..22: note = chemically synthesized
  source 1..22: mol_type = other DNA
tgtgagtgtgtgtgtgtgtgtg

SEQ ID NO: 59513 - DNA, 22 bp, synthetic construct
  misc_feature 1..22: note = chemically synthesized
  source 1..22: mol_type = other DNA
accactaggctacacttccttt

SEQ ID NO: 59514 - DNA, 22 bp, synthetic construct
  misc_feature 1..22: note = chemically synthesized
  source 1..22: mol_type = other DNA
ggctacacttccttttcctttc

SEQ ID NO: 59515 - DNA, 22 bp, synthetic construct
  misc_feature 1..22: note = chemically synthesized
  source 1..22: mol_type = other DNA
cacttccttttcctttcctctc

SEQ ID NO: 59516 - DNA, 22 bp, synthetic construct
  misc_feature 1..22: note = chemically synthesized
  source 1..22: mol_type = other DNA
ccttttcctttcctctccattt

SEQ ID NO: 59517 - DNA, 22 bp, synthetic construct
  misc_feature 1..22: note = chemically synthesized
  source 1..22: mol_type = other DNA
cttttcctttcctctccatttc

SEQ ID NO: 59518 - DNA, 22 bp, synthetic construct
  misc_feature 1..22: note = chemically synthesized
  source 1..22: mol_type = other DNA
ttcctttcctctccatttcatc

SEQ ID NO: 59519 - DNA, 22 bp, synthetic construct
  misc_feature 1..22: note = chemically synthesized
  source 1..22: mol_type = other DNA
tcctttcctctccatttcatcc

SEQ ID NO: 59520 - DNA, 22 bp, synthetic construct
  misc_feature 1..22: note = chemically synthesized
  source 1..22: mol_type = other DNA
cctttcctctccatttcatccc

SEQ ID NO: 59521 - DNA, 22 bp, synthetic construct
  misc_feature 1..22: note = chemically synthesized
  source 1..22: mol_type = other DNA
ctttcctctccatttcatccct

SEQ ID NO: 59522 - DNA, 22 bp, synthetic construct
  misc_feature 1..22: note = chemically synthesized
  source 1..22: mol_type = other DNA
tcctctccatttcatccctttc

SEQ ID NO: 59523 - DNA, 22 bp, synthetic construct
  misc_feature 1..22: note = chemically synthesized
  source 1..22: mol_type = other DNA
cctctccatttcatccctttcc

SEQ ID NO: 59524 - DNA, 22 bp, synthetic construct
  misc_feature 1..22: note = chemically synthesized
  source 1..22: mol_type = other DNA
ctctccatttcatccctttcca

SEQ ID NO: 59525 - DNA, 22 bp, synthetic construct
  misc_feature 1..22: note = chemically synthesized
  source 1..22: mol_type = other DNA
tccatttcatccctttccaaaa

SEQ ID NO: 59526 - DNA, 22 bp, synthetic construct
  misc_feature 1..22: note = chemically synthesized
  source 1..22: mol_type = other DNA
catttcatccctttccaaaaag

SEQ ID NO: 59527 - DNA, 22 bp, synthetic construct
  misc_feature 1..22: note = chemically synthesized
  source 1..22: mol_type = other DNA
catccctttccaaaaagtgttt

SEQ ID NO: 59528 - DNA, 22 bp, synthetic construct
  misc_feature 1..22: note = chemically synthesized
  source 1..22: mol_type = other DNA
atccctttccaaaaagtgttta

SEQ ID NO: 59529 - DNA, 22 bp, synthetic construct
  misc_feature 1..22: note = chemically synthesized
  source 1..22: mol_type = other DNA
tccaaaaagtgtttagacaaat

SEQ ID NO: 59530 - DNA, 22 bp, synthetic construct
  misc_feature 1..22: note = chemically synthesized
  source 1..22: mol_type = other DNA
ccaaaaagtgtttagacaaata

SEQ ID NO: 59531 - DNA, 22 bp, synthetic construct
  misc_feature 1..22: note = chemically synthesized
  source 1..22: mol_type = other DNA
caaaaagtgtttagacaaatag

SEQ ID NO: 59532 - DNA, 22 bp, synthetic construct
  misc_feature 1..22: note = chemically synthesized
  source 1..22: mol_type = other DNA
agacaaatagtttcccagactt

SEQ ID NO: 59533 - DNA, 22 bp, synthetic construct
  misc_feature 1..22: note = chemically synthesized
  source 1..22: mol_type = other DNA
gacaaatagtttcccagacttg

SEQ ID NO: 59534 - DNA, 22 bp, synthetic construct
  misc_feature 1..22: note = chemically synthesized
  source 1..22: mol_type = other DNA
cccagacttggttttatcatgc

SEQ ID NO: 59535 - DNA, 22 bp, synthetic construct
  misc_feature 1..22: note = chemically synthesized
  source 1..22: mol_type = other DNA
ccagacttggttttatcatgct

SEQ ID NO: 59536 - DNA, 22 bp, synthetic construct
  misc_feature 1..22: note = chemically synthesized
  source 1..22: mol_type = other DNA
ggttttatcatgctgggttgac

SEQ ID NO: 59537 - DNA, 22 bp, synthetic construct
  misc_feature 1..22: note = chemically synthesized
  source 1..22: mol_type = other DNA
gttttatcatgctgggttgaca

SEQ ID NO: 59538 - DNA, 22 bp, synthetic construct
  misc_feature 1..22: note = chemically synthesized
  source 1..22: mol_type = other DNA
tatcatgctgggttgacaaagg

SEQ ID NO: 59539 - DNA, 22 bp, synthetic construct
  misc_feature 1..22: note = chemically synthesized
  source 1..22: mol_type = other DNA
atcatgctgggttgacaaaggt

SEQ ID NO: 59540 - DNA, 22 bp, synthetic construct
  misc_feature 1..22: note = chemically synthesized
  source 1..22: mol_type = other DNA
tcatgctgggttgacaaaggtt

SEQ ID NO: 59541 - DNA, 22 bp, synthetic construct
  misc_feature 1..22: note = chemically synthesized
  source 1..22: mol_type = other DNA
ggttgacaaaggttgtgtacag

SEQ ID NO: 59542 - DNA, 22 bp, synthetic construct
  misc_feature 1..22: note = chemically synthesized
  source 1..22: mol_type = other DNA
acaaaggttgtgtacagagctg

SEQ ID NO: 59543 - DNA, 22 bp, synthetic construct
  misc_feature 1..22: note = chemically synthesized
  source 1..22: mol_type = other DNA
tgtacagagctggaataatttt

SEQ ID NO: 59544 - DNA, 22 bp, synthetic construct
  misc_feature 1..22: note = chemically synthesized
  source 1..22: mol_type = other DNA
gaataattttttcttctttcta

SEQ ID NO: 59545 - DNA, 22 bp, synthetic construct
  misc_feature 1..22: note = chemically synthesized
  source 1..22: mol_type = other DNA
tttcttctttctactgttggca

SEQ ID NO: 59546 - DNA, 22 bp, synthetic construct
  misc_feature 1..22: note = chemically synthesized
  source 1..22: mol_type = other DNA
ttcttctttctactgttggcac

SEQ ID NO: 59547 - DNA, 22 bp, synthetic construct
  misc_feature 1..22: note = chemically synthesized
  source 1..22: mol_type = other DNA
tcttctttctactgttggcaca

SEQ ID NO: 59548 - DNA, 22 bp, synthetic construct
  misc_feature 1..22: note = chemically synthesized
  source 1..22: mol_type = other DNA
cttctttctactgttggcacat

SEQ ID NO: 59549 - DNA, 22 bp, synthetic construct
  misc_feature 1..22: note = chemically synthesized
  source 1..22: mol_type = other DNA
ttctttctactgttggcacatc

SEQ ID NO: 59550 - DNA, 22 bp, synthetic construct
  misc_feature 1..22: note = chemically synthesized
  source 1..22: mol_type = other DNA
ctttctactgttggcacatcaa

SEQ ID NO: 59551 - DNA, 22 bp, synthetic construct
  misc_feature 1..22: note = chemically synthesized
  source 1..22: mol_type = other DNA
tttctactgttggcacatcaat

SEQ ID NO: 59552 - DNA, 22 bp, synthetic construct
  misc_feature 1..22: note = chemically synthesized
  source 1..22: mol_type = other DNA
tctactgttggcacatcaatat

SEQ ID NO: 59553 - DNA, 22 bp, synthetic construct
  misc_feature 1..22: note = chemically synthesized
  source 1..22: mol_type = other DNA
ctactgttggcacatcaatatc

SEQ ID NO: 59554 - DNA, 22 bp, synthetic construct
  misc_feature 1..22: note = chemically synthesized
  source 1..22: mol_type = other DNA
tactgttggcacatcaatatct

SEQ ID NO: 59555 - DNA, 22 bp, synthetic construct
  misc_feature 1..22: note = chemically synthesized
  source 1..22: mol_type = other DNA
ctgttggcacatcaatatcttt

SEQ ID NO: 59556 - DNA, 22 bp, synthetic construct
  misc_feature 1..22: note = chemically synthesized
  source 1..22: mol_type = other DNA
ttggcacatcaatatctttttt

SEQ ID NO: 59557 - DNA, 22 bp, synthetic construct
  misc_feature 1..22: note = chemically synthesized
  source 1..22: mol_type = other DNA
gcacatcaatatctttttttct

SEQ ID NO: 59558 - DNA, 22 bp, synthetic construct
  misc_feature 1..22: note = chemically synthesized
  source 1..22: mol_type = other DNA
tttttctgcaaagaaggggcta

SEQ ID NO: 59559 - DNA, 22 bp, synthetic construct
  misc_feature 1..22: note = chemically synthesized
  source 1..22: mol_type = other DNA
ttttctgcaaagaaggggctaa

SEQ ID NO: 59560 - DNA, 22 bp, synthetic construct
  misc_feature 1..22: note = chemically synthesized
  source 1..22: mol_type = other DNA
tttctgcaaagaaggggctaag

SEQ ID NO: 59561 - DNA, 22 bp, synthetic construct
  misc_feature 1..22: note = chemically synthesized
  source 1..22: mol_type = other DNA
ttctgcaaagaaggggctaagc

SEQ ID NO: 59562 - DNA, 22 bp, synthetic construct
  misc_feature 1..22: note = chemically synthesized
  source 1..22: mol_type = other DNA
tctgcaaagaaggggctaagct

SEQ ID NO: 59563 - DNA, 22 bp, synthetic construct
  misc_feature 1..22: note = chemically synthesized
  source 1..22: mol_type = other DNA
ctgcaaagaaggggctaagctt

SEQ ID NO: 59564 - DNA, 22 bp, synthetic construct
  misc_feature 1..22: note = chemically synthesized
  source 1..22: mol_type = other DNA
tgcaaagaaggggctaagcttg

SEQ ID NO: 59565 - DNA, 22 bp, synthetic construct
  misc_feature 1..22: note = chemically synthesized
  source 1..22: mol_type = other DNA
caaagaaggggctaagcttgca

SEQ ID NO: 59566 - DNA, 22 bp, synthetic construct
  misc_feature 1..22: note = chemically synthesized
  source 1..22: mol_type = other DNA
agcttgcacgaaaacaccggtg

SEQ ID NO: 59567 - DNA, 22 bp, synthetic construct
  misc_feature 1..22: note = chemically synthesized
  source 1..22: mol_type = other DNA
gcacgaaaacaccggtgggaac

SEQ ID NO: 59568 - DNA, 22 bp, synthetic construct
  misc_feature 1..22: note = chemically synthesized
  source 1..22: mol_type = other DNA
cacgaaaacaccggtgggaacc

SEQ ID NO: 59569 - DNA, 22 bp, synthetic construct
  misc_feature 1..22: note = chemically synthesized
  source 1..22: mol_type = other DNA
gagaagggcatgggtggttttt

SEQ ID NO: 59570 - DNA, 22 bp, synthetic construct
  misc_feature 1..22: note = chemically synthesized
  source 1..22: mol_type = other DNA
ttggttcggttggtggctgatc

SEQ ID NO: 59571 - DNA, 22 bp, synthetic construct
  misc_feature 1..22: note = chemically synthesized
  source 1..22: mol_type = other DNA
tggttcggttggtggctgatct

SEQ ID NO: 59572 - DNA, 22 bp, synthetic construct
  misc_feature 1..22: note = chemically synthesized
  source 1..22: mol_type = other DNA
ggttcggttggtggctgatctg

SEQ ID NO: 59573 - DNA, 22 bp, synthetic construct
  misc_feature 1..22: note = chemically synthesized
  source 1..22: mol_type = other DNA
gttcggttggtggctgatctga

SEQ ID NO: 59574 - DNA, 22 bp, synthetic construct
  misc_feature 1..22: note = chemically synthesized
  source 1..22: mol_type = other DNA
ggttggtggctgatctgatggg

SEQ ID NO: 59575 - DNA, 22 bp, synthetic construct
  misc_feature 1..22: note = chemically synthesized
  source 1..22: mol_type = other DNA
gtggctgatctgatgggtggta

SEQ ID NO: 59576 - DNA, 22 bp, synthetic construct
  misc_feature 1..22: note = chemically synthesized
  source 1..22: mol_type = other DNA
atctgatgggtggtataggcag

SEQ ID NO: 59577 - DNA, 22 bp, synthetic construct
  misc_feature 1..22: note = chemically synthesized
  source 1..22: mol_type = other DNA
atgggtggtataggcagaatgt

SEQ ID NO: 59578 - DNA, 22 bp, synthetic construct
  misc_feature 1..22: note = chemically synthesized
  source 1..22: mol_type = other DNA
gctgccccttcagattcctgta

SEQ ID NO: 59579 - DNA, 22 bp, synthetic construct
  misc_feature 1..22: note = chemically synthesized
  source 1..22: mol_type = other DNA
ccccttcagattcctgtagatt

SEQ ID NO: 59580 - DNA, 22 bp, synthetic construct
  misc_feature 1..22: note = chemically synthesized
  source 1..22: mol_type = other DNA
cagattcctgtagattccgtag

SEQ ID NO: 59581 - DNA, 22 bp, synthetic construct
  misc_feature 1..22: note = chemically synthesized
  source 1..22: mol_type = other DNA
agattcctgtagattccgtagg

SEQ ID NO: 59582 - DNA, 22 bp, synthetic construct
  misc_feature 1..22: note = chemically synthesized
  source 1..22: mol_type = other DNA
ctgtagattccgtaggcgacca

SEQ ID NO: 59583 - DNA, 22 bp, synthetic construct
  misc_feature 1..22: note = chemically synthesized
  source 1..22: mol_type = other DNA
tagattccgtaggcgaccaaca

SEQ ID NO: 59584 - DNA, 22 bp, synthetic construct
  misc_feature 1..22: note = chemically synthesized
  source 1..22: mol_type = other DNA
cgtaggcgaccaacatggggtg

SEQ ID NO: 59585 - DNA, 22 bp, synthetic construct
  misc_feature 1..22: note = chemically synthesized
  source 1..22: mol_type = other DNA
tctgctctttttgatgcaaata

SEQ ID NO: 59586 - DNA, 22 bp, synthetic construct
  misc_feature 1..22: note = chemically synthesized
  source 1..22: mol_type = other DNA
ctctttttgatgcaaatatctt

SEQ ID NO: 59587 - DNA, 22 bp, synthetic construct
  misc_feature 1..22: note = chemically synthesized
  source 1..22: mol_type = other DNA
tttttgatgcaaatatcttcac

SEQ ID NO: 59588 - DNA, 22 bp, synthetic construct
  misc_feature 1..22: note = chemically synthesized
  source 1..22: mol_type = other DNA
tttgatgcaaatatcttcactc

SEQ ID NO: 59589 - DNA, 22 bp, synthetic construct
  misc_feature 1..22: note = chemically synthesized
  source 1..22: mol_type = other DNA
ttgatgcaaatatcttcactct

SEQ ID NO: 59590 - DNA, 22 bp, synthetic construct
  misc_feature 1..22: note = chemically synthesized
  source 1..22: mol_type = other DNA
tgatgcaaatatcttcactctc

SEQ ID NO: 59591 - DNA, 22 bp, synthetic construct
  misc_feature 1..22: note = chemically synthesized
  source 1..22: mol_type = other DNA
gatgcaaatatcttcactctcc

SEQ ID NO: 59592 - DNA, 22 bp, synthetic construct
  misc_feature 1..22: note = chemically synthesized
  source 1..22: mol_type = other DNA
atgcaaatatcttcactctcct

SEQ ID NO: 59593 - DNA, 22 bp, synthetic construct
  misc_feature 1..22: note = chemically synthesized
  source 1..22: mol_type = other DNA
cactctccttggtgcttctgtg

SEQ ID NO: 59594 - DNA, 22 bp, synthetic construct
  misc_feature 1..22: note = chemically synthesized
  source 1..22: mol_type = other DNA
actctccttggtgcttctgtgg

SEQ ID NO: 59595 - DNA, 22 bp, synthetic construct
  misc_feature 1..22: note = chemically synthesized
  source 1..22: mol_type = other DNA
tccttggtgcttctgtggttgt

SEQ ID NO: 59596 - DNA, 22 bp, synthetic construct
  misc_feature 1..22: note = chemically synthesized
  source 1..22: mol_type = other DNA
cttggtgcttctgtggttgtgc

SEQ ID NO: 59597 - DNA, 22 bp, synthetic construct
  misc_feature 1..22: note = chemically synthesized
  source 1..22: mol_type = other DNA
ggtgcttctgtggttgtgccta

SEQ ID NO: 59598 - DNA, 22 bp, synthetic construct
  misc_feature 1..22: note = chemically synthesized
  source 1..22: mol_type = other DNA
gtgcttctgtggttgtgcctat

SEQ ID NO: 59599 - DNA, 22 bp, synthetic construct
  misc_feature 1..22: note = chemically synthesized
  source 1..22: mol_type = other DNA
ctgtggttgtgcctatgaattt

SEQ ID NO: 59600 - DNA, 22 bp, synthetic construct
  misc_feature 1..22: note = chemically synthesized
  source 1..22: mol_type = other DNA
tgtggttgtgcctatgaattta

SEQ ID NO: 59601 - DNA, 22 bp, synthetic construct
  misc_feature 1..22: note = chemically synthesized
  source 1..22: mol_type = other DNA
tggttgtgcctatgaatttagg

SEQ ID NO: 59602 - DNA, 22 bp, synthetic construct
  misc_feature 1..22: note = chemically synthesized
  source 1..22: mol_type = other DNA
tgcctatgaatttaggacctta

SEQ ID NO: 59603 - DNA, 22 bp, synthetic construct
  misc_feature 1..22: note = chemically synthesized
  source 1..22: mol_type = other DNA
tgaatttaggaccttatgcctc

SEQ ID NO: 59604 - DNA, 22 bp, synthetic construct
  misc_feature 1..22: note = chemically synthesized
  source 1..22: mol_type = other DNA
aggaccttatgcctcatagtgt

SEQ ID NO: 59605 - DNA, 22 bp, synthetic construct
  misc_feature 1..22: note = chemically synthesized
  source 1..22: mol_type = other DNA
ggaccttatgcctcatagtgtt

SEQ ID NO: 59606 - DNA, 22 bp, synthetic construct
  misc_feature 1..22: note = chemically synthesized
  source 1..22: mol_type = other DNA
atgcctcatagtgttgagtcag

SEQ ID NO: 59607 - DNA, 22 bp, synthetic construct
  misc_feature 1..22: note = chemically synthesized
  source 1..22: mol_type = other DNA
tgcctcatagtgttgagtcaga

SEQ ID NO: 59608 - DNA, 22 bp, synthetic construct
  misc_feature 1..22: note = chemically synthesized
  source 1..22: mol_type = other DNA
atagtgttgagtcagagcaaaa

SEQ ID NO: 59609 - DNA, 22 bp, synthetic construct
  misc_feature 1..22: note = chemically synthesized
  source 1..22: mol_type = other DNA
agtcagagcaaaacagtttaca

SEQ ID NO: 59610 - DNA, 22 bp, synthetic construct
  misc_feature 1..22: note = chemically synthesized
  source 1..22: mol_type = other DNA
acatcaaaggccacttatttaa

SEQ ID NO: 59611 - DNA, 22 bp, synthetic construct
  misc_feature 1..22: note = chemically synthesized
  source 1..22: mol_type = other DNA
catcaaaggccacttatttaat

SEQ ID NO: 59612 - DNA, 22 bp, synthetic construct
  misc_feature 1..22: note = chemically synthesized
  source 1..22: mol_type = other DNA
atttaattttcctcagaaaact

SEQ ID NO: 59613 - DNA, 22 bp, synthetic construct
  misc_feature 1..22: note = chemically synthesized
  source 1..22: mol_type = other DNA
tttaattttcctcagaaaactc

SEQ ID NO: 59614 - DNA, 22 bp, synthetic construct
  misc_feature 1..22: note = chemically synthesized
  source 1..22: mol_type = other DNA
aattttcctcagaaaactctgt

SEQ ID NO: 59615 - DNA, 22 bp, synthetic construct
  misc_feature 1..22: note = chemically synthesized
  source 1..22: mol_type = other DNA
attttcctcagaaaactctgtg

SEQ ID NO: 59616 - DNA, 22 bp, synthetic construct
  misc_feature 1..22: note = chemically synthesized
  source 1..22: mol_type = other DNA
tcctcagaaaactctgtgagga

SEQ ID NO: 59617 - DNA, 22 bp, synthetic construct
  misc_feature 1..22: note = chemically synthesized
  source 1..22: mol_type = other DNA
cctcagaaaactctgtgaggat

SEQ ID NO: 59618 - DNA, 22 bp, synthetic construct
  misc_feature 1..22: note = chemically synthesized
  source 1..22: mol_type = other DNA
ctcagaaaactctgtgaggata

SEQ ID NO: 59619 - DNA, 22 bp, synthetic construct
  misc_feature 1..22: note = chemically synthesized
  source 1..22: mol_type = other DNA
agaaaactctgtgaggataatt

SEQ ID NO: 59620 - DNA, 22 bp, synthetic construct
  misc_feature 1..22: note = chemically synthesized
  source 1..22: mol_type = other DNA
tgtgaggataatttctccttct

SEQ ID NO: 59621 - DNA, 22 bp, synthetic construct
  misc_feature 1..22: note = chemically synthesized
  source 1..22: mol_type = other DNA
tgaggataatttctccttctta

SEQ ID NO: 59622 - DNA, 22 bp, synthetic construct
  misc_feature 1..22: note = chemically synthesized
  source 1..22: mol_type = other DNA
ctccttcttataaacggaatgc

SEQ ID NO: 59623 - DNA, 22 bp, synthetic construct
  misc_feature 1..22: note = chemically synthesized
  source 1..22: mol_type = other DNA
tccttcttataaacggaatgcg

SEQ ID NO: 59624 - DNA, 22 bp, synthetic construct
  misc_feature 1..22: note = chemically synthesized
  source 1..22: mol_type = other DNA
cttcttataaacggaatgcgaa

SEQ ID NO: 59625 - DNA, 22 bp, synthetic construct
  misc_feature 1..22: note = chemically synthesized
  source 1..22: mol_type = other DNA
cttataaacggaatgcgaatgt

SEQ ID NO: 59626 - DNA, 22 bp, synthetic construct
  misc_feature 1..22: note = chemically synthesized
  source 1..22: mol_type = other DNA
ttataaacggaatgcgaatgtg

SEQ ID NO: 59627 - DNA, 22 bp, synthetic construct
  misc_feature 1..22: note = chemically synthesized
  source 1..22: mol_type = other DNA
ataaacggaatgcgaatgtgta

SEQ ID NO: 59628 - DNA, 22 bp, synthetic construct
  misc_feature 1..22: note = chemically synthesized
  source 1..22: mol_type = other DNA
taaacggaatgcgaatgtgtac

SEQ ID NO: 59629 - DNA, 22 bp, synthetic construct
  misc_feature 1..22: note = chemically synthesized
  source 1..22: mol_type = other DNA
tcccaccgaagggtgatgctct

SEQ ID NO: 59630 - DNA, 22 bp, synthetic construct
  misc_feature 1..22: note = chemically synthesized
  source 1..22: mol_type = other DNA
tttacttttataatctagattt

SEQ ID NO: 59631 - DNA, 22 bp, synthetic construct
  misc_feature 1..22: note = chemically synthesized
  source 1..22: mol_type = other DNA
tacttttataatctagatttta

SEQ ID NO: 59632 - DNA, 22 bp, synthetic construct
  misc_feature 1..22: note = chemically synthesized
  source 1..22: mol_type = other DNA
acttttataatctagattttaa

SEQ ID NO: 59633 - DNA, 22 bp, synthetic construct
  misc_feature 1..22: note = chemically synthesized
  source 1..22: mol_type = other DNA
cttttataatctagattttaaa

SEQ ID NO: 59634 - DNA, 22 bp, synthetic construct
  misc_feature 1..22: note = chemically synthesized
  source 1..22: mol_type = other DNA
ttataatctagattttaaaaaa

SEQ ID NO: 59635 - DNA, 22 bp, synthetic construct
  misc_feature 1..22: note = chemically synthesized
  source 1..22: mol_type = other DNA
tataatctagattttaaaaaat

SEQ ID NO: 59636 - DNA, 22 bp, synthetic construct
  misc_feature 1..22: note = chemically synthesized
  source 1..22: mol_type = other DNA
ataatctagattttaaaaaatt

SEQ ID NO: 59637 - DNA, 22 bp, synthetic construct
  misc_feature 1..22: note = chemically synthesized
  source 1..22: mol_type = other DNA
taatctagattttaaaaaattt

SEQ ID NO: 59638 - DNA, 22 bp, synthetic construct
  misc_feature 1..22: note = chemically synthesized
  source 1..22: mol_type = other DNA
gattttaaaaaatttggtggca

SEQ ID NO: 59639 - DNA, 22 bp, synthetic construct
  misc_feature 1..22: note = chemically synthesized
  source 1..22: mol_type = other DNA
taaaaaatttggtggcacttga

SEQ ID NO: 59640 - DNA, 22 bp, synthetic construct
  misc_feature 1..22: note = chemically synthesized
  source 1..22: mol_type = other DNA
aaaaaatttggtggcacttgat

SEQ ID NO: 59641 - DNA, 22 bp, synthetic construct
  misc_feature 1..22: note = chemically synthesized
  source 1..22: mol_type = other DNA
aaaaatttggtggcacttgatt

SEQ ID NO: 59642 - DNA, 22 bp, synthetic construct
  misc_feature 1..22: note = chemically synthesized
  source 1..22: mol_type = other DNA
ggtggcacttgatttcaggtcc

SEQ ID NO: 59643 - DNA, 22 bp, synthetic construct
  misc_feature 1..22: note = chemically synthesized
  source 1..22: mol_type = other DNA
gtggcacttgatttcaggtcct

SEQ ID NO: 59644 - DNA, 22 bp, synthetic construct
  misc_feature 1..22: note = chemically synthesized
  source 1..22: mol_type = other DNA
gatttcaggtcctcagactcca

SEQ ID NO: 59645 - DNA, 22 bp, synthetic construct
  misc_feature 1..22: note = chemically synthesized
  source 1..22: mol_type = other DNA
atttcaggtcctcagactccag

SEQ ID NO: 59646 - DNA, 22 bp, synthetic construct
  misc_feature 1..22: note = chemically synthesized
  source 1..22: mol_type = other DNA
caggtcctcagactccagaatt

SEQ ID NO: 59647 - DNA, 22 bp, synthetic construct
  misc_feature 1..22: note = chemically synthesized
  source 1..22: mol_type = other DNA
aggtcctcagactccagaattt

SEQ ID NO: 59648 - DNA, 22 bp, synthetic construct
  misc_feature 1..22: note = chemically synthesized
  source 1..22: mol_type = other DNA
agactccagaatttatactcac

SEQ ID NO: 59649 - DNA, 22 bp, synthetic construct
  misc_feature 1..22: note = chemically synthesized
  source 1..22: mol_type = other DNA
cagaatttatactcactgatta

SEQ ID NO: 59650 - DNA, 22 bp, synthetic construct
  misc_feature 1..22: note = chemically synthesized
  source 1..22: mol_type = other DNA
atactcactgattagtaatgca

SEQ ID NO: 59651 - DNA, 22 bp, synthetic construct
  misc_feature 1..22: note = chemically synthesized
  source 1..22: mol_type = other DNA
tactcactgattagtaatgcat

SEQ ID NO: 59652 - DNA, 22 bp, synthetic construct
  misc_feature 1..22: note = chemically synthesized
  source 1..22: mol_type = other DNA
actgattagtaatgcattatgc

SEQ ID NO: 59653 - DNA, 22 bp, synthetic construct
  misc_feature 1..22: note = chemically synthesized
  source 1..22: mol_type = other DNA
attagtaatgcattatgcaaat

SEQ ID NO: 59654 - DNA, 22 bp, synthetic construct
  misc_feature 1..22: note = chemically synthesized
  source 1..22: mol_type = other DNA
gtaatgcattatgcaaataatt

SEQ ID NO: 59655 - DNA, 22 bp, synthetic construct
  misc_feature 1..22: note = chemically synthesized
  source 1..22: mol_type = other DNA
tgcaaataattcagtttacata

SEQ ID NO: 59656 - DNA, 22 bp, synthetic construct
  misc_feature 1..22: note = chemically synthesized
  source 1..22: mol_type = other DNA
agtttacatatccaaatactgt

SEQ ID NO: 59657 - DNA, 22 bp, synthetic construct
  misc_feature 1..22: note = chemically synthesized
  source 1..22: mol_type = other DNA
acatatccaaatactgttttgc

SEQ ID NO: 59658 - DNA, 22 bp, synthetic construct
  misc_feature 1..22: note = chemically synthesized
  source 1..22: mol_type = other DNA
catatccaaatactgttttgca

SEQ ID NO: 59659 - DNA, 22 bp, synthetic construct
  misc_feature 1..22: note = chemically synthesized
  source 1..22: mol_type = other DNA
ttttgcatcattcacacctcat

SEQ ID NO: 59660 - DNA, 22 bp, synthetic construct
  misc_feature 1..22: note = chemically synthesized
  source 1..22: mol_type = other DNA
tgcatcattcacacctcatgtc

SEQ ID NO: 59661 - DNA, 22 bp, synthetic construct
  misc_feature 1..22: note = chemically synthesized
  source 1..22: mol_type = other DNA
gcatcattcacacctcatgtct

SEQ ID NO: 59662 - DNA, 22 bp, synthetic construct
  misc_feature 1..22: note = chemically synthesized
  source 1..22: mol_type = other DNA
catcattcacacctcatgtctt

SEQ ID NO: 59663 - DNA, 22 bp, synthetic construct
  misc_feature 1..22: note = chemically synthesized
  source 1..22: mol_type = other DNA
acacctcatgtcttgaaaaaaa

SEQ ID NO: 59664 - DNA, 22 bp, synthetic construct
  misc_feature 1..22: note = chemically synthesized
  source 1..22: mol_type = other DNA
atgtcttgaaaaaaaaagtgaa

SEQ ID NO: 59665 - DNA, 22 bp, synthetic construct
  misc_feature 1..22: note = chemically synthesized
  source 1..22: mol_type = other DNA
gaaaaaaaaagtgaaatgtttc

SEQ ID NO: 59666 - DNA, 22 bp, synthetic construct
  misc_feature 1..22: note = chemically synthesized
  source 1..22: mol_type = other DNA
aaaaaaaaagtgaaatgtttcc

SEQ ID NO: 59667 - DNA, 22 bp, synthetic construct
  misc_feature 1..22: note = chemically synthesized
  source 1..22: mol_type = other DNA
cctcaaaataaacaaaacctgc

SEQ ID NO: 59668 - DNA, 22 bp, synthetic construct
  misc_feature 1..22: note = chemically synthesized
  source 1..22: mol_type = other DNA
ctcaaaataaacaaaacctgca

SEQ ID NO: 59669 - DNA, 22 bp, synthetic construct
  misc_feature 1..22: note = chemically synthesized
  source 1..22: mol_type = other DNA
aaaataaacaaaacctgcagaa

SEQ ID NO: 59670 - DNA, 22 bp, synthetic construct
  misc_feature 1..22: note = chemically synthesized
  source 1..22: mol_type = other DNA
cagaagagtttattgtaagggt

SEQ ID NO: 59671 - DNA, 22 bp, synthetic construct
  misc_feature 1..22: note = chemically synthesized
  source 1..22: mol_type = other DNA
attgtaagggtgaaaattaaag

SEQ ID NO: 59672 - DNA, 22 bp, synthetic construct
  misc_feature 1..22: note = chemically synthesized
  source 1..22: mol_type = other DNA
ttgtaagggtgaaaattaaaga

SEQ ID NO: 59673 - DNA, 22 bp, synthetic construct
  misc_feature 1..22: note = chemically synthesized
  source 1..22: mol_type = other DNA
taagggtgaaaattaaagagga

SEQ ID NO: 59674 - DNA, 22 bp, synthetic construct
  misc_feature 1..22: note = chemically synthesized
  source 1..22: mol_type = other DNA
aagaggaacccatttgcctggg

SEQ ID NO: 59675 - DNA, 22 bp, synthetic construct
  misc_feature 1..22: note = chemically synthesized
  source 1..22: mol_type = other DNA
gcctgggaacttttgaggaaaa

SEQ ID NO: 59676 - DNA, 22 bp, synthetic construct
  misc_feature 1..22: note = chemically synthesized
  source 1..22: mol_type = other DNA
cctgggaacttttgaggaaaat

SEQ ID NO: 59677 - DNA, 22 bp, synthetic construct
  misc_feature 1..22: note = chemically synthesized
  source 1..22: mol_type = other DNA
ggaacttttgaggaaaatttta

SEQ ID NO: 59678 - DNA, 22 bp, synthetic construct
  misc_feature 1..22: note = chemically synthesized
  source 1..22: mol_type = other DNA
ttgaggaaaattttaatactcc

SEQ ID NO: 59679 - DNA, 22 bp, synthetic construct
  misc_feature 1..22: note = chemically synthesized
  source 1..22: mol_type = other DNA
tgaggaaaattttaatactcct

SEQ ID NO: 59680 - DNA, 22 bp, synthetic construct
  misc_feature 1..22: note = chemically synthesized
  source 1..22: mol_type = other DNA
gaggaaaattttaatactcctg

SEQ ID NO: 59681 - DNA, 22 bp, synthetic construct
  misc_feature 1..22: note = chemically synthesized
  source 1..22: mol_type = other DNA
aggaaaattttaatactcctgc

SEQ ID NO: 59682 - DNA, 22 bp, synthetic construct
  misc_feature 1..22: note = chemically synthesized
  source 1..22: mol_type = other DNA
taatactcctgcataaataatt

SEQ ID NO: 59683 - DNA, 22 bp, synthetic construct
  misc_feature 1..22: note = chemically synthesized
  source 1..22: mol_type = other DNA
aatactcctgcataaataattt

SEQ ID NO: 59684 - DNA, 22 bp, synthetic construct
  misc_feature 1..22: note = chemically synthesized
  source 1..22: mol_type = other DNA
atactcctgcataaataatttt

SEQ ID NO: 59685 - DNA, 22 bp, synthetic construct
  misc_feature 1..22: note = chemically synthesized
  source 1..22: mol_type = other DNA
ctgcataaataattttgcaatt

SEQ ID NO: 59686 - DNA, 22 bp, synthetic construct
  misc_feature 1..22: note = chemically synthesized
  source 1..22: mol_type = other DNA
cataaataattttgcaattatt

SEQ ID NO: 59687 - DNA, 22 bp, synthetic construct
  misc_feature 1..22: note = chemically synthesized
  source 1..22: mol_type = other DNA
tgcaattatttttgattcctac

SEQ ID NO: 59688 - DNA, 22 bp, synthetic construct
  misc_feature 1..22: note = chemically synthesized
  source 1..22: mol_type = other DNA
gcaattatttttgattcctacc

SEQ ID NO: 59689 - DNA, 22 bp, synthetic construct
  misc_feature 1..22: note = chemically synthesized
  source 1..22: mol_type = other DNA
caattatttttgattcctacct

SEQ ID NO: 59690 - DNA, 22 bp, synthetic construct
  misc_feature 1..22: note = chemically synthesized
  source 1..22: mol_type = other DNA
tttttgattcctacctaatcaa

SEQ ID NO: 59691 - DNA, 22 bp, synthetic construct
  misc_feature 1..22: note = chemically synthesized
  source 1..22: mol_type = other DNA
ttgattcctacctaatcaatat

SEQ ID NO: 59692 - DNA, 22 bp, synthetic construct
  misc_feature 1..22: note = chemically synthesized
  source 1..22: mol_type = other DNA
tgattcctacctaatcaatata

SEQ ID NO: 59693 - DNA, 22 bp, synthetic construct
  misc_feature 1..22: note = chemically synthesized
  source 1..22: mol_type = other DNA
gattcctacctaatcaatatac

SEQ ID NO: 59694 - DNA, 22 bp, synthetic construct
  misc_feature 1..22: note = chemically synthesized
  source 1..22: mol_type = other DNA
attcctacctaatcaatatacc

SEQ ID NO: 59695 - DNA, 22 bp, synthetic construct
  misc_feature 1..22: note = chemically synthesized
  source 1..22: mol_type = other DNA
ctacctaatcaatataccttgc

SEQ ID NO: 59696 - DNA, 22 bp, synthetic construct
  misc_feature 1..22: note = chemically synthesized
  source 1..22: mol_type = other DNA
cctaatcaatataccttgccac

SEQ ID NO: 59697 - DNA, 22 bp, synthetic construct
  misc_feature 1..22: note = chemically synthesized
  source 1..22: mol_type = other DNA
atcaatataccttgccacgcaa

SEQ ID NO: 59698 - DNA, 22 bp, synthetic construct
  misc_feature 1..22: note = chemically synthesized
  source 1..22: mol_type = other DNA
gccacgcaaggtatattctatt

SEQ ID NO: 59699 - DNA, 22 bp, synthetic construct
  misc_feature 1..22: note = chemically synthesized
  source 1..22: mol_type = other DNA
ccacgcaaggtatattctatta

SEQ ID NO: 59700 - DNA, 22 bp, synthetic construct
  misc_feature 1..22: note = chemically synthesized
  source 1..22: mol_type = other DNA
tattatctttggctttctgaat

SEQ ID NO: 59701 - DNA, 22 bp, synthetic construct
  misc_feature 1..22: note = chemically synthesized
  source 1..22: mol_type = other DNA
ttatctttggctttctgaattt

SEQ ID NO: 59702 - DNA, 22 bp, synthetic construct
  misc_feature 1..22: note = chemically synthesized
  source 1..22: mol_type = other DNA
tctttggctttctgaatttttc

SEQ ID NO: 59703 - DNA, 22 bp, synthetic construct
  misc_feature 1..22: note = chemically synthesized
  source 1..22: mol_type = other DNA
tggctttctgaatttttcaatt

SEQ ID NO: 59704 - DNA, 22 bp, synthetic construct
  misc_feature 1..22: note = chemically synthesized
  source 1..22: mol_type = other DNA
ggctttctgaatttttcaattt

SEQ ID NO: 59705 - DNA, 22 bp, synthetic construct
  misc_feature 1..22: note = chemically synthesized
  source 1..22: mol_type = other DNA
gctttctgaatttttcaatttt

SEQ ID NO: 59706 - DNA, 22 bp, synthetic construct
  misc_feature 1..22: note = chemically synthesized
  source 1..22: mol_type = other DNA
tctgaatttttcaattttcaga

SEQ ID NO: 59707 - DNA, 22 bp, synthetic construct
  misc_feature 1..22: note = chemically synthesized
  source 1..22: mol_type = other DNA
ctgaatttttcaattttcagaa

SEQ ID NO: 59708 - DNA, 22 bp, synthetic construct
  misc_feature 1..22: note = chemically synthesized
  source 1..22: mol_type = other DNA
tgaatttttcaattttcagaaa

SEQ ID NO: 59709 - DNA, 22 bp, synthetic construct
  misc_feature 1..22: note = chemically synthesized
  source 1..22: mol_type = other DNA
aatttttcaattttcagaaaaa

SEQ ID NO: 59710 - DNA, 22 bp, synthetic construct
  misc_feature 1..22: note = chemically synthesized
  source 1..22: mol_type = other DNA
ttcaattttcagaaaaagaagc

SEQ ID NO: 59711 - DNA, 22 bp, synthetic construct
  misc_feature 1..22: note = chemically synthesized
  source 1..22: mol_type = other DNA
tcaattttcagaaaaagaagcc

SEQ ID NO: 59712 - DNA, 22 bp, synthetic construct
  misc_feature 1..22: note = chemically synthesized
  source 1..22: mol_type = other DNA
caattttcagaaaaagaagcca

SEQ ID NO: 59713 - DNA, 22 bp, synthetic construct
  misc_feature 1..22: note = chemically synthesized
  source 1..22: mol_type = other DNA
aattttcagaaaaagaagccat

SEQ ID NO: 59714 - DNA, 22 bp, synthetic construct
  misc_feature 1..22: note = chemically synthesized
  source 1..22: mol_type = other DNA
tcagaaaaagaagccataatac

SEQ ID NO: 59715 - DNA, 22 bp, synthetic construct
  misc_feature 1..22: note = chemically synthesized
  source 1..22: mol_type = other DNA
cagaaaaagaagccataatact

SEQ ID NO: 59716 - DNA, 22 bp, synthetic construct
  misc_feature 1..22: note = chemically synthesized
  source 1..22: mol_type = other DNA
agaaaaagaagccataatacta

SEQ ID NO: 59717 - DNA, 22 bp, synthetic construct
  misc_feature 1..22: note = chemically synthesized
  source 1..22: mol_type = other DNA
tatcatacacacatttgtgcat

SEQ ID NO: 59718 - DNA, 22 bp, synthetic construct
  misc_feature 1..22: note = chemically synthesized
  source 1..22: mol_type = other DNA
gtgcataaatacacaggcataa

SEQ ID NO: 59719 - DNA, 22 bp, synthetic construct
  misc_feature 1..22: note = chemically synthesized
  source 1..22: mol_type = other DNA
tgcataaatacacaggcataaa

SEQ ID NO: 59720 - DNA, 22 bp, synthetic construct
  misc_feature 1..22: note = chemically synthesized
  source 1..22: mol_type = other DNA
aggccgaattatttgaagagga

SEQ ID NO: 59721 - DNA, 22 bp, synthetic construct
  misc_feature 1..22: note = chemically synthesized
  source 1..22: mol_type = other DNA
ggccgaattatttgaagaggat

SEQ ID NO: 59722 - DNA, 22 bp, synthetic construct
  misc_feature 1..22: note = chemically synthesized
  source 1..22: mol_type = other DNA
tttgaagaggatacaataattg

SEQ ID NO: 59723 - DNA, 22 bp, synthetic construct
  misc_feature 1..22: note = chemically synthesized
  source 1..22: mol_type = other DNA
gaagaggatacaataattgctt

SEQ ID NO: 59724 - DNA, 22 bp, synthetic construct
  misc_feature 1..22: note = chemically synthesized
  source 1..22: mol_type = other DNA
aagaggatacaataattgcttg

SEQ ID NO: 59725 - DNA, 22 bp, synthetic construct
  misc_feature 1..22: note = chemically synthesized
  source 1..22: mol_type = other DNA
cttgccagtgacatgattctcc

SEQ ID NO: 59726 - DNA, 22 bp, synthetic construct
  misc_feature 1..22: note = chemically synthesized
  source 1..22: mol_type = other DNA
gccagtgacatgattctcctgc

SEQ ID NO: 59727 - DNA, 22 bp, synthetic construct
  misc_feature 1..22: note = chemically synthesized
  source 1..22: mol_type = other DNA
ccagtgacatgattctcctgcc

SEQ ID NO: 59728 - DNA, 22 bp, synthetic construct
  misc_feature 1..22: note = chemically synthesized
  source 1..22: mol_type = other DNA
tcctgccagagagaggggagaa

SEQ ID NO: 59729 - DNA, 22 bp, synthetic construct
  misc_feature 1..22: note = chemically synthesized
  source 1..22: mol_type = other DNA
ctgccagagagaggggagaata

SEQ ID NO: 59730 - DNA, 22 bp, synthetic construct
  misc_feature 1..22: note = chemically synthesized
  source 1..22: mol_type = other DNA
ccagagagaggggagaataact

SEQ ID NO: 59731 - DNA, 22 bp, synthetic construct
  misc_feature 1..22: note = chemically synthesized
  source 1..22: mol_type = other DNA
ggtgcaaacttttaacactcca

SEQ ID NO: 59732 - DNA, 22 bp, synthetic construct
  misc_feature 1..22: note = chemically synthesized
  source 1..22: mol_type = other DNA
ttaacactccaagtctagagag

SEQ ID NO: 59733 - DNA, 22 bp, synthetic construct
  misc_feature 1..22: note = chemically synthesized
  source 1..22: mol_type = other DNA
taacactccaagtctagagaga

SEQ ID NO: 59734 - DNA, 22 bp, synthetic construct
  misc_feature 1..22: note = chemically synthesized
  source 1..22: mol_type = other DNA
aacactccaagtctagagagaa

SEQ ID NO: 59735 - DNA, 22 bp, synthetic construct
  misc_feature 1..22: note = chemically synthesized
  source 1..22: mol_type = other DNA
acactccaagtctagagagaat

SEQ ID NO: 59736 - DNA, 22 bp, synthetic construct
  misc_feature 1..22: note = chemically synthesized
  source 1..22: mol_type = other DNA
caagtctagagagaattatcca

SEQ ID NO: 59737 - DNA, 22 bp, synthetic construct
  misc_feature 1..22: note = chemically synthesized
  source 1..22: mol_type = other DNA
gagagaattatccaagcatagc

SEQ ID NO: 59738 - DNA, 22 bp, synthetic construct
  misc_feature 1..22: note = chemically synthesized
  source 1..22: mol_type = other DNA
tccaagcatagccatgaattcc

SEQ ID NO: 59739 - DNA, 22 bp, synthetic construct
  misc_feature 1..22: note = chemically synthesized
  source 1..22: mol_type = other DNA
ctgagttatggattggcaaatg

SEQ ID NO: 59740 - DNA, 22 bp, synthetic construct
  misc_feature 1..22: note = chemically synthesized
  source 1..22: mol_type = other DNA
agttatggattggcaaatgaca

SEQ ID NO: 59741 - DNA, 22 bp, synthetic construct
  misc_feature 1..22: note = chemically synthesized
  source 1..22: mol_type = other DNA
tggattggcaaatgacaatgcc

SEQ ID NO: 59742 - DNA, 22 bp, synthetic construct
  misc_feature 1..22: note = chemically synthesized
  source 1..22: mol_type = other DNA
gcaaatgacaatgcctatgaaa

SEQ ID NO: 59743 - DNA, 22 bp, synthetic construct
  misc_feature 1..22: note = chemically synthesized
  source 1..22: mol_type = other DNA
tgaaaacgatctctttgtcttc

SEQ ID NO: 59744 - DNA, 22 bp, synthetic construct
  misc_feature 1..22: note = chemically synthesized
  source 1..22: mol_type = other DNA
tttgtcttcactgagttttctt

SEQ ID NO: 59745 - DNA, 22 bp, synthetic construct
  misc_feature 1..22: note = chemically synthesized
  source 1..22: mol_type = other DNA
tgtcttcactgagttttctttg

SEQ ID NO: 59746 - DNA, 22 bp, synthetic construct
  misc_feature 1..22: note = chemically synthesized
  source 1..22: mol_type = other DNA
gtcttcactgagttttctttgt

SEQ ID NO: 59747 - DNA, 22 bp, synthetic construct
  misc_feature 1..22: note = chemically synthesized
  source 1..22: mol_type = other DNA
tcttcactgagttttctttgtc

SEQ ID NO: 59748 - DNA, 22 bp, synthetic construct
  misc_feature 1..22: note = chemically synthesized
  source 1..22: mol_type = other DNA
cactgagttttctttgtcattg

SEQ ID NO: 59749 - DNA, 22 bp, synthetic construct
  misc_feature 1..22: note = chemically synthesized
  source 1..22: mol_type = other DNA
actgagttttctttgtcattgg

SEQ ID NO: 59750 - DNA, 22 bp, synthetic construct
  misc_feature 1..22: note = chemically synthesized
  source 1..22: mol_type = other DNA
agttttctttgtcattggagta

SEQ ID NO: 59751 - DNA, 22 bp, synthetic construct
  misc_feature 1..22: note = chemically synthesized
  source 1..22: mol_type = other DNA
tctttgtcattggagtaattta

SEQ ID NO: 59752 - DNA, 22 bp, synthetic construct
  misc_feature 1..22: note = chemically synthesized
  source 1..22: mol_type = other DNA
ctttgtcattggagtaatttag

SEQ ID NO: 59753 - DNA, 22 bp, synthetic construct
  misc_feature 1..22: note = chemically synthesized
  source 1..22: mol_type = other DNA
tttgtcattggagtaatttagg

SEQ ID NO: 59754 - DNA, 22 bp, synthetic construct
  misc_feature 1..22: note = chemically synthesized
  source 1..22: mol_type = other DNA
tgtcattggagtaatttaggag

SEQ ID NO: 59755 - DNA, 22 bp, synthetic construct
  misc_feature 1..22: note = chemically synthesized
  source 1..22: mol_type = other DNA
gtcattggagtaatttaggaga

SEQ ID NO: 59756 - DNA, 22 bp, synthetic construct
  misc_feature 1..22: note = chemically synthesized
  source 1..22: mol_type = other DNA
tcattggagtaatttaggagaa

SEQ ID NO: 59757 - DNA, 22 bp, synthetic construct
  misc_feature 1..22: note = chemically synthesized
  source 1..22: mol_type = other DNA
gagtaatttaggagaatacagg

SEQ ID NO: 59758 - DNA, 22 bp, synthetic construct
  misc_feature 1..22: note = chemically synthesized
  source 1..22: mol_type = other DNA
aggagaatacaggatgtgactg

SEQ ID NO: 59759 - DNA, 22 bp, synthetic construct
  misc_feature 1..22: note = chemically synthesized
  source 1..22: mol_type = other DNA
ggagaatacaggatgtgactgg

SEQ ID NO: 59760 - DNA, 22 bp, synthetic construct
  misc_feature 1..22: note = chemically synthesized
  source 1..22: mol_type = other DNA
ggagccctttctgaataagcac

SEQ ID NO: 59761 - DNA, 22 bp, synthetic construct
  misc_feature 1..22: note = chemically synthesized
  source 1..22: mol_type = other DNA
tctgaataagcacagtcccatg

SEQ ID NO: 59762 - DNA, 22 bp, synthetic construct
  misc_feature 1..22: note = chemically synthesized
  source 1..22: mol_type = other DNA
ctgaataagcacagtcccatgc

SEQ ID NO: 59763 - DNA, 22 bp, synthetic construct
  misc_feature 1..22: note = chemically synthesized
  source 1..22: mol_type = other DNA
tgaataagcacagtcccatgcc

SEQ ID NO: 59764 - DNA, 22 bp, synthetic construct
  misc_feature 1..22: note = chemically synthesized
  source 1..22: mol_type = other DNA
aataagcacagtcccatgccca

SEQ ID NO: 59765 - DNA, 22 bp, synthetic construct
  misc_feature 1..22: note = chemically synthesized
  source 1..22: mol_type = other DNA
ctaaaccagtggctcccagctg

SEQ ID NO: 59766 - DNA, 22 bp, synthetic construct
  misc_feature 1..22: note = chemically synthesized
  source 1..22: mol_type = other DNA
aaccagtggctcccagctgcat

SEQ ID NO: 59767 - DNA, 22 bp, synthetic construct
  misc_feature 1..22: note = chemically synthesized
  source 1..22: mol_type = other DNA
ccagctgcatgtgtcagaacag

SEQ ID NO: 59768 - DNA, 22 bp, synthetic construct
  misc_feature 1..22: note = chemically synthesized
  source 1..22: mol_type = other DNA
catgtgtcagaacagaactggc

SEQ ID NO: 59769 - DNA, 22 bp, synthetic construct
  misc_feature 1..22: note = chemically synthesized
  source 1..22: mol_type = other DNA
gcctcagaaatctacaagattc

SEQ ID NO: 59770 - DNA, 22 bp, synthetic construct
  misc_feature 1..22: note = chemically synthesized
  source 1..22: mol_type = other DNA
agaaatctacaagattccagtg

SEQ ID NO: 59771 - DNA, 22 bp, synthetic construct
  misc_feature 1..22: note = chemically synthesized
  source 1..22: mol_type = other DNA
caagattccagtggttccagcc

SEQ ID NO: 59772 - DNA, 22 bp, synthetic construct
  misc_feature 1..22: note = chemically synthesized
  source 1..22: mol_type = other DNA
cagtggttccagcctcactttc

SEQ ID NO: 59773 - DNA, 22 bp, synthetic construct
  misc_feature 1..22: note = chemically synthesized
  source 1..22: mol_type = other DNA
cagcctcactttctccagtggt

SEQ ID NO: 59774 - DNA, 22 bp, synthetic construct
  misc_feature 1..22: note = chemically synthesized
  source 1..22: mol_type = other DNA
actttctccagtggtcaactta

SEQ ID NO: 59775 - DNA, 22 bp, synthetic construct
  misc_feature 1..22: note = chemically synthesized
  source 1..22: mol_type = other DNA
tctccagtggtcaacttactgc

SEQ ID NO: 59776 - DNA, 22 bp, synthetic construct
  misc_feature 1..22: note = chemically synthesized
  source 1..22: mol_type = other DNA
ctccagtggtcaacttactgct

SEQ ID NO: 59777 - DNA, 22 bp, synthetic construct
  misc_feature 1..22: note = chemically synthesized
  source 1..22: mol_type = other DNA
tccagtggtcaacttactgctg

SEQ ID NO: 59778 - DNA, 22 bp, synthetic construct
  misc_feature 1..22: note = chemically synthesized
  source 1..22: mol_type = other DNA
cagtggtcaacttactgctgtt

SEQ ID NO: 59779 - DNA, 22 bp, synthetic construct
  misc_feature 1..22: note = chemically synthesized
  source 1..22: mol_type = other DNA
actgctgttgcaaagcacgtca

SEQ ID NO: 59780 - DNA, 22 bp, synthetic construct
  misc_feature 1..22: note = chemically synthesized
  source 1..22: mol_type = other DNA
ctgctgttgcaaagcacgtcag

SEQ ID NO: 59781 - DNA, 22 bp, synthetic construct
  misc_feature 1..22: note = chemically synthesized
  source 1..22: mol_type = other DNA
ctgttgcaaagcacgtcagatt

SEQ ID NO: 59782 - DNA, 22 bp, synthetic construct
  misc_feature 1..22: note = chemically synthesized
  source 1..22: mol_type = other DNA
ttgcaaagcacgtcagatttca

SEQ ID NO: 59783 - DNA, 22 bp, synthetic construct
  misc_feature 1..22: note = chemically synthesized
  source 1..22: mol_type = other DNA
caaagcacgtcagatttcagga

SEQ ID NO: 59784 - DNA, 22 bp, synthetic construct
  misc_feature 1..22: note = chemically synthesized
  source 1..22: mol_type = other DNA
caggagcgatttctcttgtaag

SEQ ID NO: 59785 - DNA, 22 bp, synthetic construct
  misc_feature 1..22: note = chemically synthesized
  source 1..22: mol_type = other DNA
aggagcgatttctcttgtaagg

SEQ ID NO: 59786 - DNA, 22 bp, synthetic construct
  misc_feature 1..22: note = chemically synthesized
  source 1..22: mol_type = other DNA
ctcttgtaaggaaagaaggcag

SEQ ID NO: 59787 - DNA, 22 bp, synthetic construct
  misc_feature 1..22: note = chemically synthesized
  source 1..22: mol_type = other DNA
tcttgtaaggaaagaaggcagg

SEQ ID NO: 59788 - DNA, 22 bp, synthetic construct
  misc_feature 1..22: note = chemically synthesized
  source 1..22: mol_type = other DNA
ttgtaaggaaagaaggcaggca

SEQ ID NO: 59789 - DNA, 22 bp, synthetic construct
  misc_feature 1..22: note = chemically synthesized
  source 1..22: mol_type = other DNA
gtaaggaaagaaggcaggcagg

SEQ ID NO: 59790 - DNA, 22 bp, synthetic construct
  misc_feature 1..22: note = chemically synthesized
  source 1..22: mol_type = other DNA
taaggaaagaaggcaggcaggc

SEQ ID NO: 59791 - DNA, 22 bp, synthetic construct
  misc_feature 1..22: note = chemically synthesized
  source 1..22: mol_type = other DNA
attttttctctgcagcatgagt

SEQ ID NO: 59792 - DNA, 22 bp, synthetic construct
  misc_feature 1..22: note = chemically synthesized
  source 1..22: mol_type = other DNA
ttttttctctgcagcatgagtg

SEQ ID NO: 59793 - DNA, 22 bp, synthetic construct
  misc_feature 1..22: note = chemically synthesized
  source 1..22: mol_type = other DNA
tttctctgcagcatgagtgcag

SEQ ID NO: 59794 - DNA, 22 bp, synthetic construct
  misc_feature 1..22: note = chemically synthesized
  source 1..22: mol_type = other DNA
ttctctgcagcatgagtgcagt

SEQ ID NO: 59795 - DNA, 22 bp, synthetic construct
  misc_feature 1..22: note = chemically synthesized
  source 1..22: mol_type = other DNA
tctctgcagcatgagtgcagtc

SEQ ID NO: 59796 - DNA, 22 bp, synthetic construct
  misc_feature 1..22: note = chemically synthesized
  source 1..22: mol_type = other DNA
ctctgcagcatgagtgcagtca

SEQ ID NO: 59797 - DNA, 22 bp, synthetic construct
  misc_feature 1..22: note = chemically synthesized
  source 1..22: mol_type = other DNA
tctgcagcatgagtgcagtcac

SEQ ID NO: 59798 - DNA, 22 bp, synthetic construct
  misc_feature 1..22: note = chemically synthesized
  source 1..22: mol_type = other DNA
tgcagcatgagtgcagtcacct

SEQ ID NO: 59799 - DNA, 22 bp, synthetic construct
  misc_feature 1..22: note = chemically synthesized
  source 1..22: mol_type = other DNA
cagcatgagtgcagtcaccttt

SEQ ID NO: 59800 - DNA, 22 bp, synthetic construct
  misc_feature 1..22: note = chemically synthesized
  source 1..22: mol_type = other DNA
tttcctacgatgttccacaccc

SEQ ID NO: 59801 - DNA, 22 bp, synthetic construct
  misc_feature 1..22: note = chemically synthesized
  source 1..22: mol_type = other DNA
ttcctacgatgttccacaccca

SEQ ID NO: 59802 - DNA, 22 bp, synthetic construct
  misc_feature 1..22: note = chemically synthesized
  source 1..22: mol_type = other DNA
tcctacgatgttccacacccat

SEQ ID NO: 59803 - DNA, 22 bp, synthetic construct
  misc_feature 1..22: note = chemically synthesized
  source 1..22: mol_type = other DNA
cctacgatgttccacacccatc

SEQ ID NO: 59804 - DNA, 22 bp, synthetic construct
  misc_feature 1..22: note = chemically synthesized
  source 1..22: mol_type = other DNA
ctacgatgttccacacccatct

SEQ ID NO: 59805 - DNA, 22 bp, synthetic construct
  misc_feature 1..22: note = chemically synthesized
  source 1..22: mol_type = other DNA
cgatgttccacacccatctctc

SEQ ID NO: 59806 - DNA, 22 bp, synthetic construct
  misc_feature 1..22: note = chemically synthesized
  source 1..22: mol_type = other DNA
cacacccatctctccttacagg

SEQ ID NO: 59807 - DNA, 22 bp, synthetic construct
  misc_feature 1..22: note = chemically synthesized
  source 1..22: mol_type = other DNA
tccttacaggttatagacacat

SEQ ID NO: 59808 - DNA, 22 bp, synthetic construct
  misc_feature 1..22: note = chemically synthesized
  source 1..22: mol_type = other DNA
cttacaggttatagacacattt

SEQ ID NO: 59809 - DNA, 22 bp, synthetic construct
  misc_feature 1..22: note = chemically synthesized
  source 1..22: mol_type = other DNA
acaggttatagacacatttttg

SEQ ID NO: 59810 - DNA, 22 bp, synthetic construct
  misc_feature 1..22: note = chemically synthesized
  source 1..22: mol_type = other DNA
caggttatagacacatttttgg

SEQ ID NO: 59811 - DNA, 22 bp, synthetic construct
  misc_feature 1..22: note = chemically synthesized
  source 1..22: mol_type = other DNA
tagacacatttttggcactgca

SEQ ID NO: 59812 - DNA, 22 bp, synthetic construct
  misc_feature 1..22: note = chemically synthesized
  source 1..22: mol_type = other DNA
ttggcactgcataaagtaagcg

SEQ ID NO: 59813 - DNA, 22 bp, synthetic construct
  misc_feature 1..22: note = chemically synthesized
  source 1..22: mol_type = other DNA
tggcactgcataaagtaagcgt

SEQ ID NO: 59814 - DNA, 22 bp, synthetic construct
  misc_feature 1..22: note = chemically synthesized
  source 1..22: mol_type = other DNA
ggcactgcataaagtaagcgtt

SEQ ID NO: 59815 - DNA, 22 bp, synthetic construct
  misc_feature 1..22: note = chemically synthesized
  source 1..22: mol_type = other DNA
gcactgcataaagtaagcgttc

SEQ ID NO: 59816 - DNA, 22 bp, synthetic construct
  misc_feature 1..22: note = chemically synthesized
  source 1..22: mol_type = other DNA
cataaagtaagcgttccaacat

SEQ ID NO: 59817 - DNA, 22 bp, synthetic construct
  misc_feature 1..22: note = chemically synthesized
  source 1..22: mol_type = other DNA
caacatgtttttaatctttaac

SEQ ID NO: 59818 - DNA, 22 bp, synthetic construct
  misc_feature 1..22: note = chemically synthesized
  source 1..22: mol_type = other DNA
ttaatctttaactttcacatca

SEQ ID NO: 59819 - DNA, 22 bp, synthetic construct
  misc_feature 1..22: note = chemically synthesized
  source 1..22: mol_type = other DNA
taatctttaactttcacatcat

SEQ ID NO: 59820 - DNA, 22 bp, synthetic construct
  misc_feature 1..22: note = chemically synthesized
  source 1..22: mol_type = other DNA
aatctttaactttcacatcatt

SEQ ID NO: 59821 - DNA, 22 bp, synthetic construct
  misc_feature 1..22: note = chemically synthesized
  source 1..22: mol_type = other DNA
atctttaactttcacatcatta

SEQ ID NO: 59822 - DNA, 22 bp, synthetic construct
  misc_feature 1..22: note = chemically synthesized
  source 1..22: mol_type = other DNA
taactttcacatcattaaaaag

SEQ ID NO: 59823 - DNA, 22 bp, synthetic construct
  misc_feature 1..22: note = chemically synthesized
  source 1..22: mol_type = other DNA
aactttcacatcattaaaaagc

SEQ ID NO: 59824 - DNA, 22 bp, synthetic construct
  misc_feature 1..22: note = chemically synthesized
  source 1..22: mol_type = other DNA
actttcacatcattaaaaagct

SEQ ID NO: 59825 - DNA, 22 bp, synthetic construct
  misc_feature 1..22: note = chemically synthesized
  source 1..22: mol_type = other DNA
tcacatcattaaaaagctgatg

SEQ ID NO: 59826 - DNA, 22 bp, synthetic construct
  misc_feature 1..22: note = chemically synthesized
  source 1..22: mol_type = other DNA
cacatcattaaaaagctgatgt

SEQ ID NO: 59827 - DNA, 22 bp, synthetic construct
  misc_feature 1..22: note = chemically synthesized
  source 1..22: mol_type = other DNA
acatcattaaaaagctgatgta

SEQ ID NO: 59828 - DNA, 22 bp, synthetic construct
  misc_feature 1..22: note = chemically synthesized
  source 1..22: mol_type = other DNA
aaaagctgatgtactgactttc

SEQ ID NO: 59829 - DNA, 22 bp, synthetic construct
  misc_feature 1..22: note = chemically synthesized
  source 1..22: mol_type = other DNA
atgtactgactttcagctgcct

SEQ ID NO: 59830 - DNA, 22 bp, synthetic construct
  misc_feature 1..22: note = chemically synthesized
  source 1..22: mol_type = other DNA
actttcagctgcctggagatag

SEQ ID NO: 59831 - DNA, 22 bp, synthetic construct
  misc_feature 1..22: note = chemically synthesized
  source 1..22: mol_type = other DNA
tcagctgcctggagatagttca

SEQ ID NO: 59832 - DNA, 22 bp, synthetic construct
  misc_feature 1..22: note = chemically synthesized
  source 1..22: mol_type = other DNA
cagctgcctggagatagttcag

SEQ ID NO: 59833 - DNA, 22 bp, synthetic construct
  misc_feature 1..22: note = chemically synthesized
  source 1..22: mol_type = other DNA
agctgcctggagatagttcagg

SEQ ID NO: 59834 - DNA, 22 bp, synthetic construct
  misc_feature 1..22: note = chemically synthesized
  source 1..22: mol_type = other DNA
cctggagatagttcagggccca

SEQ ID NO: 59835 - DNA, 22 bp, synthetic construct
  misc_feature 1..22: note = chemically synthesized
  source 1..22: mol_type = other DNA
gagatagttcagggcccagcac

SEQ ID NO: 59836 - DNA, 22 bp, synthetic construct
  misc_feature 1..22: note = chemically synthesized
  source 1..22: mol_type = other DNA
agggcccagcacctgacaggtg

SEQ ID NO: 59837 - DNA, 22 bp, synthetic construct
  misc_feature 1..22: note = chemically synthesized
  source 1..22: mol_type = other DNA
acaggtgtaatgttctgtgttt

SEQ ID NO: 59838 - DNA, 22 bp, synthetic construct
  misc_feature 1..22: note = chemically synthesized
  source 1..22: mol_type = other DNA
tgtgttttatgtctctcaatat

SEQ ID NO: 59839 - DNA, 22 bp, synthetic construct
  misc_feature 1..22: note = chemically synthesized
  source 1..22: mol_type = other DNA
tgttttatgtctctcaatatgg

SEQ ID NO: 59840 - DNA, 22 bp, synthetic construct
  misc_feature 1..22: note = chemically synthesized
  source 1..22: mol_type = other DNA
tatgtctctcaatatggaggtt

SEQ ID NO: 59841 - DNA, 22 bp, synthetic construct
  misc_feature 1..22: note = chemically synthesized
  source 1..22: mol_type = other DNA
atgtctctcaatatggaggtta

SEQ ID NO: 59842 - DNA, 22 bp, synthetic construct
  misc_feature 1..22: note = chemically synthesized
  source 1..22: mol_type = other DNA
tgtctctcaatatggaggttat

SEQ ID NO: 59843 - DNA, 22 bp, synthetic construct
  misc_feature 1..22: note = chemically synthesized
  source 1..22: mol_type = other DNA
tcaatatggaggttatagaatc

SEQ ID NO: 59844 - DNA, 22 bp, synthetic construct
  misc_feature 1..22: note = chemically synthesized
  source 1..22: mol_type = other DNA
aatatggaggttatagaatcaa

SEQ ID NO: 59845 - DNA, 22 bp, synthetic construct
  misc_feature 1..22: note = chemically synthesized
  source 1..22: mol_type = other DNA
tagaatcaaaaagaccgcaaaa

SEQ ID NO: 59846 - DNA, 22 bp, synthetic construct
  misc_feature 1..22: note = chemically synthesized
  source 1..22: mol_type = other DNA
aaaggtgttgatacccatagac

SEQ ID NO: 59847 - DNA, 22 bp, synthetic construct
  misc_feature 1..22: note = chemically synthesized
  source 1..22: mol_type = other DNA
aaggtgttgatacccatagaca

SEQ ID NO: 59848 - DNA, 22 bp, synthetic construct
  misc_feature 1..22: note = chemically synthesized
  source 1..22: mol_type = other DNA
atacccatagacagagcatgca

SEQ ID NO: 59849 - DNA, 22 bp, synthetic construct
  misc_feature 1..22: note = chemically synthesized
  source 1..22: mol_type = other DNA
aggttccctttcttgccccgct

SEQ ID NO: 59850 - DNA, 22 bp, synthetic construct
  misc_feature 1..22: note = chemically synthesized
  source 1..22: mol_type = other DNA
cctttcttgccccgctttcaca

SEQ ID NO: 59851 - DNA, 22 bp, synthetic construct
  misc_feature 1..22: note = chemically synthesized
  source 1..22: mol_type = other DNA
tcttgccccgctttcacaccta

SEQ ID NO: 59852 - DNA, 22 bp, synthetic construct
  misc_feature 1..22: note = chemically synthesized
  source 1..22: mol_type = other DNA
cttgccccgctttcacacctat

SEQ ID NO: 59853 - DNA, 22 bp, synthetic construct
  misc_feature 1..22: note = chemically synthesized
  source 1..22: mol_type = other DNA
ttgccccgctttcacacctatt

SEQ ID NO: 59854 - DNA, 22 bp, synthetic construct
  misc_feature 1..22: note = chemically synthesized
  source 1..22: mol_type = other DNA
gccccgctttcacacctatttc

SEQ ID NO: 59855 - DNA, 22 bp, synthetic construct
  misc_feature 1..22: note = chemically synthesized
  source 1..22: mol_type = other DNA
ccccgctttcacacctatttct

SEQ ID NO: 59856 - DNA, 22 bp, synthetic construct
  misc_feature 1..22: note = chemically synthesized
  source 1..22: mol_type = other DNA
tcacacctatttctttttttgt

SEQ ID NO: 59857 - DNA, 22 bp, synthetic construct
  misc_feature 1..22: note = chemically synthesized
  source 1..22: mol_type = other DNA
cacacctatttctttttttgta

SEQ ID NO: 59858 - DNA, 22 bp, synthetic construct
  misc_feature 1..22: note = chemically synthesized
  source 1..22: mol_type = other DNA
acacctatttctttttttgtag

SEQ ID NO: 59859 - DNA, 22 bp, synthetic construct
  misc_feature 1..22: note = chemically synthesized
  source 1..22: mol_type = other DNA
tttctttttttgtagcgcctgt

SEQ ID NO: 59860 - DNA, 22 bp, synthetic construct
  misc_feature 1..22: note = chemically synthesized
  source 1..22: mol_type = other DNA
ctttttttgtagcgcctgtatt

SEQ ID NO: 59861 - DNA, 22 bp, synthetic construct
  misc_feature 1..22: note = chemically synthesized
  source 1..22: mol_type = other DNA
tttttttgtagcgcctgtattt

SEQ ID NO: 59862 - DNA, 22 bp, synthetic construct
  misc_feature 1..22: note = chemically synthesized
  source 1..22: mol_type = other DNA
tttttgtagcgcctgtatttga

SEQ ID NO: 59863 - DNA, 22 bp, synthetic construct
  misc_feature 1..22: note = chemically synthesized
  source 1..22: mol_type = other DNA
ttttgtagcgcctgtatttgaa

SEQ ID NO: 59864 - DNA, 22 bp, synthetic construct
  misc_feature 1..22: note = chemically synthesized
  source 1..22: mol_type = other DNA
tttgtagcgcctgtatttgaaa

SEQ ID NO: 59865 - DNA, 22 bp, synthetic construct
  misc_feature 1..22: note = chemically synthesized
  source 1..22: mol_type = other DNA
ttgtagcgcctgtatttgaaag

SEQ ID NO: 59866 - DNA, 22 bp, synthetic construct
  misc_feature 1..22: note = chemically synthesized
  source 1..22: mol_type = other DNA
tgtagcgcctgtatttgaaagg

SEQ ID NO: 59867 - DNA, 22 bp, synthetic construct
  misc_feature 1..22: note = chemically synthesized
  source 1..22: mol_type = other DNA
gtagcgcctgtatttgaaaggg

SEQ ID NO: 59868 - DNA, 22 bp, synthetic construct
  misc_feature 1..22: note = chemically synthesized
  source 1..22: mol_type = other DNA
tagcgcctgtatttgaaagggg

SEQ ID NO: 59869 - DNA, 22 bp, synthetic construct
  misc_feature 1..22: note = chemically synthesized
  source 1..22: mol_type = other DNA
tatttgaaaggggttcctggtg

SEQ ID NO: 59870 - DNA, 22 bp, synthetic construct
  misc_feature 1..22: note = chemically synthesized
  source 1..22: mol_type = other DNA
gaaaggggttcctggtgtactt

SEQ ID NO: 59871 - DNA, 22 bp, synthetic construct
  misc_feature 1..22: note = chemically synthesized
  source 1..22: mol_type = other DNA
aaaggggttcctggtgtacttg

SEQ ID NO: 59872 - DNA, 22 bp, synthetic construct
  misc_feature 1..22: note = chemically synthesized
  source 1..22: mol_type = other DNA
ctggtgtacttgggagaaaaga

SEQ ID NO: 59873 - DNA, 22 bp, synthetic construct
  misc_feature 1..22: note = chemically synthesized
  source 1..22: mol_type = other DNA
gtgtacttgggagaaaagaagc

SEQ ID NO: 59874 - DNA, 22 bp, synthetic construct
  misc_feature 1..22: note = chemically synthesized
  source 1..22: mol_type = other DNA
gggagaaaagaagcttcttggt

SEQ ID NO: 59875 - DNA, 22 bp, synthetic construct
  misc_feature 1..22: note = chemically synthesized
  source 1..22: mol_type = other DNA
ggagaaaagaagcttcttggtt

SEQ ID NO: 59876 - DNA, 22 bp, synthetic construct
  misc_feature 1..22: note = chemically synthesized
  source 1..22: mol_type = other DNA
cttggtttggtagtacctacca

SEQ ID NO: 59877 - DNA, 22 bp, synthetic construct
  misc_feature 1..22: note = chemically synthesized
  source 1..22: mol_type = other DNA
ttggtttggtagtacctaccag

SEQ ID NO: 59878 - DNA, 22 bp, synthetic construct
  misc_feature 1..22: note = chemically synthesized
  source 1..22: mol_type = other DNA
ggtttggtagtacctaccagag

SEQ ID NO: 59879 - DNA, 22 bp, synthetic construct
  misc_feature 1..22: note = chemically synthesized
  source 1..22: mol_type = other DNA
gtttggtagtacctaccagaga

SEQ ID NO: 59880 - DNA, 22 bp, synthetic construct
  misc_feature 1..22: note = chemically synthesized
  source 1..22: mol_type = other DNA
ggtagtacctaccagagactcc

SEQ ID NO: 59881 - DNA, 22 bp, synthetic construct
  misc_feature 1..22: note = chemically synthesized
  source 1..22: mol_type = other DNA
gtagtacctaccagagactccc

SEQ ID NO: 59882 - DNA, 22 bp, synthetic construct
  misc_feature 1..22: note = chemically synthesized
  source 1..22: mol_type = other DNA
ccagagactccctgtttcctgc

SEQ ID NO: 59883 - DNA, 22 bp, synthetic construct
  misc_feature 1..22: note = chemically synthesized
  source 1..22: mol_type = other DNA
cctgtttcctgctggtatcagg

SEQ ID NO: 59884 - DNA, 22 bp, synthetic construct
  misc_feature 1..22: note = chemically synthesized
  source 1..22: mol_type = other DNA
tttcctgctggtatcaggattg

SEQ ID NO: 59885 - DNA, 22 bp, synthetic construct
  misc_feature 1..22: note = chemically synthesized
  source 1..22: mol_type = other DNA
cctgctggtatcaggattgaaa

SEQ ID NO: 59886 - DNA, 22 bp, synthetic construct
  misc_feature 1..22: note = chemically synthesized
  source 1..22: mol_type = other DNA
ctgctggtatcaggattgaaaa

SEQ ID NO: 59887 - DNA, 22 bp, synthetic construct
  misc_feature 1..22: note = chemically synthesized
  source 1..22: mol_type = other DNA
ctggtatcaggattgaaaaatc

SEQ ID NO: 59888 - DNA, 22 bp, synthetic construct
  misc_feature 1..22: note = chemically synthesized
  source 1..22: mol_type = other DNA
gtatcaggattgaaaaatccca

SEQ ID NO: 59889 - DNA, 22 bp, synthetic construct
  misc_feature 1..22: note = chemically synthesized
  source 1..22: mol_type = other DNA
aaaaatcccacttctgtccatt

SEQ ID NO: 59890 - DNA, 22 bp, synthetic construct
  misc_feature 1..22: note = chemically synthesized
  source 1..22: mol_type = other DNA
ctgtccattttctctcaagagt

SEQ ID NO: 59891 - DNA, 22 bp, synthetic construct
  misc_feature 1..22: note = chemically synthesized
  source 1..22: mol_type = other DNA
tgtccattttctctcaagagtt

SEQ ID NO: 59892 - DNA, 22 bp, synthetic construct
  misc_feature 1..22: note = chemically synthesized
  source 1..22: mol_type = other DNA
tccattttctctcaagagttga

SEQ ID NO: 59893 - DNA, 22 bp, synthetic construct
  misc_feature 1..22: note = chemically synthesized
  source 1..22: mol_type = other DNA
tctctcaagagttgagagatgt

SEQ ID NO: 59894 - DNA, 22 bp, synthetic construct
  misc_feature 1..22: note = chemically synthesized
  source 1..22: mol_type = other DNA
ctctcaagagttgagagatgtg

SEQ ID NO: 59895 - DNA, 22 bp, synthetic construct
  misc_feature 1..22: note = chemically synthesized
  source 1..22: mol_type = other DNA
tctcaagagttgagagatgtgt

SEQ ID NO: 59896 - DNA, 22 bp, synthetic construct
  misc_feature 1..22: note = chemically synthesized
  source 1..22: mol_type = other DNA
tcaagagttgagagatgtgtgc

SEQ ID NO: 59897 - DNA, 22 bp, synthetic construct
  misc_feature 1..22: note = chemically synthesized
  source 1..22: mol_type = other DNA
aagagttgagagatgtgtgcca

SEQ ID NO: 59898 - DNA, 22 bp, synthetic construct
  misc_feature 1..22: note = chemically synthesized
  source 1..22: mol_type = other DNA
agagatgtgtgccatcgctctt

SEQ ID NO: 59899 - DNA, 22 bp, synthetic construct
  misc_feature 1..22: note = chemically synthesized
  source 1..22: mol_type = other DNA
tttaaaagaaggaactctcctt

SEQ ID NO: 59900 - DNA, 22 bp, synthetic construct
  misc_feature 1..22: note = chemically synthesized
  source 1..22: mol_type = other DNA
taaaagaaggaactctcctttt

SEQ ID NO: 59901 - DNA, 22 bp, synthetic construct
  misc_feature 1..22: note = chemically synthesized
  source 1..22: mol_type = other DNA
aaaagaaggaactctccttttg

SEQ ID NO: 59902 - DNA, 22 bp, synthetic construct
  misc_feature 1..22: note = chemically synthesized
  source 1..22: mol_type = other DNA
aaagaaggaactctccttttgc

SEQ ID NO: 59903 - DNA, 22 bp, synthetic construct
  misc_feature 1..22: note = chemically synthesized
  source 1..22: mol_type = other DNA
tccttttgctgtggattgtagg

SEQ ID NO: 59904 - DNA, 22 bp, synthetic construct
  misc_feature 1..22: note = chemically synthesized
  source 1..22: mol_type = other DNA
cttttgctgtggattgtaggga

SEQ ID NO: 59905 - DNA, 22 bp, synthetic construct
  misc_feature 1..22: note = chemically synthesized
  source 1..22: mol_type = other DNA
ttgctgtggattgtagggagca

SEQ ID NO: 59906 - DNA, 22 bp, synthetic construct
  misc_feature 1..22: note = chemically synthesized
  source 1..22: mol_type = other DNA
tgctgtggattgtagggagcag

SEQ ID NO: 59907 - DNA, 22 bp, synthetic construct
  misc_feature 1..22: note = chemically synthesized
  source 1..22: mol_type = other DNA
gctgtggattgtagggagcaga

SEQ ID NO: 59908 - DNA, 22 bp, synthetic construct
  misc_feature 1..22: note = chemically synthesized
  source 1..22: mol_type = other DNA
ctgtggattgtagggagcagat

SEQ ID NO: 59909 - DNA, 22 bp, synthetic construct
  misc_feature 1..22: note = chemically synthesized
  source 1..22: mol_type = other DNA
tggattgtagggagcagatttg

SEQ ID NO: 59910 - DNA, 22 bp, synthetic construct
  misc_feature 1..22: note = chemically synthesized
  source 1..22: mol_type = other DNA
tagggagcagatttggtgctta

SEQ ID NO: 59911 - DNA, 22 bp, synthetic construct
  misc_feature 1..22: note = chemically synthesized
  source 1..22: mol_type = other DNA
ggtgcttactgtggcttcagga

SEQ ID NO: 59912 - DNA, 22 bp, synthetic construct
  misc_feature 1..22: note = chemically synthesized
  source 1..22: mol_type = other DNA
gtgcttactgtggcttcaggac

SEQ ID NO: 59913 - DNA, 22 bp, synthetic construct
  misc_feature 1..22: note = chemically synthesized
  source 1..22: mol_type = other DNA
actgtggcttcaggacccacct

SEQ ID NO: 59914 - DNA, 22 bp, synthetic construct
  misc_feature 1..22: note = chemically synthesized
  source 1..22: mol_type = other DNA
ctgtggcttcaggacccacctt

SEQ ID NO: 59915 - DNA, 22 bp, synthetic construct
  misc_feature 1..22: note = chemically synthesized
  source 1..22: mol_type = other DNA
tggcttcaggacccaccttgaa

SEQ ID NO: 59916 - DNA, 22 bp, synthetic construct
  misc_feature 1..22: note = chemically synthesized
  source 1..22: mol_type = other DNA
caggacccaccttgaatgacag

SEQ ID NO: 59917 - DNA, 22 bp, synthetic construct
  misc_feature 1..22: note = chemically synthesized
  source 1..22: mol_type = other DNA
aggacccaccttgaatgacaga

SEQ ID NO: 59918 - DNA, 22 bp, synthetic construct
  misc_feature 1..22: note = chemically synthesized
  source 1..22: mol_type = other DNA
gaatgacagaatgtcagtaaca

SEQ ID NO: 59919 - DNA, 22 bp, synthetic construct
  misc_feature 1..22: note = chemically synthesized
  source 1..22: mol_type = other DNA
aatgacagaatgtcagtaacaa

SEQ ID NO: 59920 - DNA, 22 bp, synthetic construct
  misc_feature 1..22: note = chemically synthesized
  source 1..22: mol_type = other DNA
gtggtgaacgactgcctcttga

SEQ ID NO: 59921 - DNA, 22 bp, synthetic construct
  misc_feature 1..22: note = chemically synthesized
  source 1..22: mol_type = other DNA
cctcttgatctttgcccatcga

SEQ ID NO: 59922 - DNA, 22 bp, synthetic construct
  misc_feature 1..22: note = chemically synthesized
  source 1..22: mol_type = other DNA
ttgatctttgcccatcgagcaa

SEQ ID NO: 59923 - DNA, 22 bp, synthetic construct
  misc_feature 1..22: note = chemically synthesized
  source 1..22: mol_type = other DNA
gatctttgcccatcgagcaaca

SEQ ID NO: 59924 - DNA, 22 bp, synthetic construct
  misc_feature 1..22: note = chemically synthesized
  source 1..22: mol_type = other DNA
atctttgcccatcgagcaacac

SEQ ID NO: 59925 - DNA, 22 bp, synthetic construct
  misc_feature 1..22: note = chemically synthesized
  source 1..22: mol_type = other DNA
tgcccatcgagcaacaccatgt

SEQ ID NO: 59926 - DNA, 22 bp, synthetic construct
  misc_feature 1..22: note = chemically synthesized
  source 1..22: mol_type = other DNA
gcccatcgagcaacaccatgtg

SEQ ID NO: 59927 - DNA, 22 bp, synthetic construct
  misc_feature 1..22: note = chemically synthesized
  source 1..22: mol_type = other DNA
cccatcgagcaacaccatgtgg

SEQ ID NO: 59928 - DNA, 22 bp, synthetic construct
  misc_feature 1..22: note = chemically synthesized
  source 1..22: mol_type = other DNA
gacctgaacttgaacagtaatt

SEQ ID NO: 59929 - DNA, 22 bp, synthetic construct
  misc_feature 1..22: note = chemically synthesized
  source 1..22: mol_type = other DNA
acctgaacttgaacagtaattg

SEQ ID NO: 59930 - DNA, 22 bp, synthetic construct
  misc_feature 1..22: note = chemically synthesized
  source 1..22: mol_type = other DNA
aacttgaacagtaattgatgag

SEQ ID NO: 59931 - DNA, 22 bp, synthetic construct
  misc_feature 1..22: note = chemically synthesized
  source 1..22: mol_type = other DNA
gaacagtaattgatgagtcctt

SEQ ID NO: 59932 - DNA, 22 bp, synthetic construct
  misc_feature 1..22: note = chemically synthesized
  source 1..22: mol_type = other DNA
aacagtaattgatgagtcctta

SEQ ID NO: 59933 - DNA, 22 bp, synthetic construct
  misc_feature 1..22: note = chemically synthesized
  source 1..22: mol_type = other DNA
atgagtccttaaaatccacgcc

SEQ ID NO: 59934 - DNA, 22 bp, synthetic construct
  misc_feature 1..22: note = chemically synthesized
  source 1..22: mol_type = other DNA
aaaatccacgcccggcccccag

SEQ ID NO: 59935 - DNA, 22 bp, synthetic construct
  misc_feature 1..22: note = chemically synthesized
  source 1..22: mol_type = other DNA
aaatccacgcccggcccccagg

SEQ ID NO: 59936 - DNA, 22 bp, synthetic construct
  misc_feature 1..22: note = chemically synthesized
  source 1..22: mol_type = other DNA
ggggcaccccatcccacgttct

SEQ ID NO: 59937 - DNA, 22 bp, synthetic construct
  misc_feature 1..22: note = chemically synthesized
  source 1..22: mol_type = other DNA
gggcaccccatcccacgttctg

SEQ ID NO: 59938 - DNA, 22 bp, synthetic construct
  misc_feature 1..22: note = chemically synthesized
  source 1..22: mol_type = other DNA
tgattctggatggacttttaag

SEQ ID NO: 59939 - DNA, 22 bp, synthetic construct
  misc_feature 1..22: note = chemically synthesized
  source 1..22: mol_type = other DNA
attctggatggacttttaagtg

SEQ ID NO: 59940 - DNA, 22 bp, synthetic construct
  misc_feature 1..22: note = chemically synthesized
  source 1..22: mol_type = other DNA
tggatggacttttaagtgaact

SEQ ID NO: 59941 - DNA, 22 bp, synthetic construct
  misc_feature 1..22: note = chemically synthesized
  source 1..22: mol_type = other DNA
gatggacttttaagtgaactct

SEQ ID NO: 59942 - DNA, 22 bp, synthetic construct
  misc_feature 1..22: note = chemically synthesized
  source 1..22: mol_type = other DNA
ttaagtgaactctgatgatgag

SEQ ID NO: 59943 - DNA, 22 bp, synthetic construct
  misc_feature 1..22: note = chemically synthesized
  source 1..22: mol_type = other DNA
taagtgaactctgatgatgagt

SEQ ID NO: 59944 - DNA, 22 bp, synthetic construct
  misc_feature 1..22: note = chemically synthesized
  source 1..22: mol_type = other DNA
aagtgaactctgatgatgagta

SEQ ID NO: 59945 - DNA, 22 bp, synthetic construct
  misc_feature 1..22: note = chemically synthesized
  source 1..22: mol_type = other DNA
agtgaactctgatgatgagtag

SEQ ID NO: 59946 - DNA, 22 bp, synthetic construct
  misc_feature 1..22: note = chemically synthesized
  source 1..22: mol_type = other DNA
tgatgatgagtaggctcttaaa

SEQ ID NO: 59947 - DNA, 22 bp, synthetic construct
  misc_feature 1..22: note = chemically synthesized
  source 1..22: mol_type = other DNA
atgatgagtaggctcttaaaac

SEQ ID NO: 59948 - DNA, 22 bp, synthetic construct
  misc_feature 1..22: note = chemically synthesized
  source 1..22: mol_type = other DNA
ttaaaactctttctcaacgttc

SEQ ID NO: 59949 - DNA, 22 bp, synthetic construct
  misc_feature 1..22: note = chemically synthesized
  source 1..22: mol_type = other DNA
aaaactctttctcaacgttctc

SEQ ID NO: 59950 - DNA, 22 bp, synthetic construct
  misc_feature 1..22: note = chemically synthesized
  source 1..22: mol_type = other DNA
aaactctttctcaacgttctct

SEQ ID NO: 59951 - DNA, 22 bp, synthetic construct
  misc_feature 1..22: note = chemically synthesized
  source 1..22: mol_type = other DNA
tttctcaacgttctctgctggg

SEQ ID NO: 59952 - DNA, 22 bp, synthetic construct
  misc_feature 1..22: note = chemically synthesized
  source 1..22: mol_type = other DNA
tctcaacgttctctgctgggtt

SEQ ID NO: 59953 - DNA, 22 bp, synthetic construct
  misc_feature 1..22: note = chemically synthesized
  source 1..22: mol_type = other DNA
ctcaacgttctctgctgggttt

SEQ ID NO: 59954 - DNA, 22 bp, synthetic construct
  misc_feature 1..22: note = chemically synthesized
  source 1..22: mol_type = other DNA
tcaacgttctctgctgggtttg

SEQ ID NO: 59955 - DNA, 22 bp, synthetic construct
  misc_feature 1..22: note = chemically synthesized
  source 1..22: mol_type = other DNA
aacgttctctgctgggtttgtg

SEQ ID NO: 59956 - DNA, 22 bp, synthetic construct
  misc_feature 1..22: note = chemically synthesized
  source 1..22: mol_type = other DNA
tctgctgggtttgtgtgtcacc

SEQ ID NO: 59957 - DNA, 22 bp, synthetic construct
  misc_feature 1..22: note = chemically synthesized
  source 1..22: mol_type = other DNA
tgctgggtttgtgtgtcacctc

SEQ ID NO: 59958 - DNA, 22 bp, synthetic construct
  misc_feature 1..22: note = chemically synthesized
  source 1..22: mol_type = other DNA
ctgggtttgtgtgtcacctccc

SEQ ID NO: 59959 - DNA, 22 bp, synthetic construct
  misc_feature 1..22: note = chemically synthesized
  source 1..22: mol_type = other DNA
ggtttgtgtgtcacctcccatg

SEQ ID NO: 59960 - DNA, 22 bp, synthetic construct
  misc_feature 1..22: note = chemically synthesized
  source 1..22: mol_type = other DNA
gtgtgtcacctcccatgccctc

SEQ ID NO: 59961 - DNA, 22 bp, synthetic construct
  misc_feature 1..22: note = chemically synthesized
  source 1..22: mol_type = other DNA
tgtgtcacctcccatgccctct

SEQ ID NO: 59962 - DNA, 22 bp, synthetic construct
  misc_feature 1..22: note = chemically synthesized
  source 1..22: mol_type = other DNA
ccatgccctctctggtgtgtgg

SEQ ID NO: 59963 - DNA, 22 bp, synthetic construct
  misc_feature 1..22: note = chemically synthesized
  source 1..22: mol_type = other DNA
tctggtgtgtggtgattctcag

SEQ ID NO: 59964 - DNA, 22 bp, synthetic construct
  misc_feature 1..22: note = chemically synthesized
  source 1..22: mol_type = other DNA
tggtgtgtggtgattctcagat

SEQ ID NO: 59965 - DNA, 22 bp, synthetic construct
  misc_feature 1..22: note = chemically synthesized
  source 1..22: mol_type = other DNA
gtgtgtggtgattctcagatct

SEQ ID NO: 59966 - DNA, 22 bp, synthetic construct
  misc_feature 1..22: note = chemically synthesized
  source 1..22: mol_type = other DNA
tcagatctagagcaatgcttcc

SEQ ID NO: 59967 - DNA, 22 bp, synthetic construct
  misc_feature 1..22: note = chemically synthesized
  source 1..22: mol_type = other DNA
agatctagagcaatgcttcctg

SEQ ID NO: 59968 - DNA, 22 bp, synthetic construct
  misc_feature 1..22: note = chemically synthesized
  source 1..22: mol_type = other DNA
gagcaatgcttcctgccttgtc

SEQ ID NO: 59969 - DNA, 22 bp, synthetic construct
  misc_feature 1..22: note = chemically synthesized
  source 1..22: mol_type = other DNA
cctgccttgtccccccatgcct

SEQ ID NO: 59970 - DNA, 22 bp, synthetic construct
  misc_feature 1..22: note = chemically synthesized
  source 1..22: mol_type = other DNA
ctgccttgtccccccatgcctt

SEQ ID NO: 59971 - DNA, 22 bp, synthetic construct
  misc_feature 1..22: note = chemically synthesized
  source 1..22: mol_type = other DNA
ccttgtccccccatgcctttgc

SEQ ID NO: 59972 - DNA, 22 bp, synthetic construct
  misc_feature 1..22: note = chemically synthesized
  source 1..22: mol_type = other DNA
gtccccccatgcctttgcgtgt

SEQ ID NO: 59973 - DNA, 22 bp, synthetic construct
  misc_feature 1..22: note = chemically synthesized
  source 1..22: mol_type = other DNA
tccccccatgcctttgcgtgtg

SEQ ID NO: 59974 - DNA, 22 bp, synthetic construct
  misc_feature 1..22: note = chemically synthesized
  source 1..22: mol_type = other DNA
tgcgtgtgggaagctaaaattc

SEQ ID NO: 59975 - DNA, 22 bp, synthetic construct
  misc_feature 1..22: note = chemically synthesized
  source 1..22: mol_type = other DNA
gcgtgtgggaagctaaaattca

SEQ ID NO: 59976 - DNA, 22 bp, synthetic construct
  misc_feature 1..22: note = chemically synthesized
  source 1..22: mol_type = other DNA
cgtgtgggaagctaaaattcac

SEQ ID NO: 59977 - DNA, 22 bp, synthetic construct
  misc_feature 1..22: note = chemically synthesized
  source 1..22: mol_type = other DNA
aaattcacatgtgcgatgccct

SEQ ID NO: 59978 - DNA, 22 bp, synthetic construct
  misc_feature 1..22: note = chemically synthesized
  source 1..22: mol_type = other DNA
acatgtgcgatgccctcccatg

SEQ ID NO: 59979 - DNA, 22 bp, synthetic construct
  misc_feature 1..22: note = chemically synthesized
  source 1..22: mol_type = other DNA
ccatgtgccatttttacctggt

SEQ ID NO: 59980 - DNA, 22 bp, synthetic construct
  misc_feature 1..22: note = chemically synthesized
  source 1..22: mol_type = other DNA
ttacctggtcccttctgctcac

SEQ ID NO: 59981 - DNA, 22 bp, synthetic construct
  misc_feature 1..22: note = chemically synthesized
  source 1..22: mol_type = other DNA
tacctggtcccttctgctcact

SEQ ID NO: 59982 - DNA, 22 bp, synthetic construct
  misc_feature 1..22: note = chemically synthesized
  source 1..22: mol_type = other DNA
acctggtcccttctgctcactc

SEQ ID NO: 59983 - DNA, 22 bp, synthetic construct
  misc_feature 1..22: note = chemically synthesized
  source 1..22: mol_type = other DNA
cctggtcccttctgctcactct

SEQ ID NO: 59984 - DNA, 22 bp, synthetic construct
  misc_feature 1..22: note = chemically synthesized
  source 1..22: mol_type = other DNA
gtcccttctgctcactctttat

SEQ ID NO: 59985 - DNA, 22 bp, synthetic construct
  misc_feature 1..22: note = chemically synthesized
  source 1..22: mol_type = other DNA
ctgctcactctttattcatatt

SEQ ID NO: 59986 - DNA, 22 bp, synthetic construct
  misc_feature 1..22: note = chemically synthesized
  source 1..22: mol_type = other DNA
tgctcactctttattcatattt

SEQ ID NO: 59987 - DNA, 22 bp, synthetic construct
  misc_feature 1..22: note = chemically synthesized
  source 1..22: mol_type = other DNA
ctcactctttattcatatttaa

SEQ ID NO: 59988 - DNA, 22 bp, synthetic construct
  misc_feature 1..22: note = chemically synthesized
  source 1..22: mol_type = other DNA
actctttattcatatttaaatg

SEQ ID NO: 59989 - DNA, 22 bp, synthetic construct
  misc_feature 1..22: note = chemically synthesized
  source 1..22: mol_type = other DNA
tttattcatatttaaatgcagg

SEQ ID NO: 59990 - DNA, 22 bp, synthetic construct
  misc_feature 1..22: note = chemically synthesized
  source 1..22: mol_type = other DNA
tattcatatttaaatgcaggtg

SEQ ID NO: 59991 - DNA, 22 bp, synthetic construct
  misc_feature 1..22: note = chemically synthesized
  source 1..22: mol_type = other DNA
attcatatttaaatgcaggtga

SEQ ID NO: 59992 - DNA, 22 bp, synthetic construct
  misc_feature 1..22: note = chemically synthesized
  source 1..22: mol_type = other DNA
ttcatatttaaatgcaggtgag

SEQ ID NO: 59993 - DNA, 22 bp, synthetic construct
  misc_feature 1..22: note = chemically synthesized
  source 1..22: mol_type = other DNA
atatttaaatgcaggtgagttg

SEQ ID NO: 59994 - DNA, 22 bp, synthetic construct
  misc_feature 1..22: note = chemically synthesized
  source 1..22: mol_type = other DNA
aaatgcaggtgagttggaatgt

SEQ ID NO: 59995 - DNA, 22 bp, synthetic construct
  misc_feature 1..22: note = chemically synthesized
  source 1..22: mol_type = other DNA
aatgcaggtgagttggaatgtc

SEQ ID NO: 59996 - DNA, 22 bp, synthetic construct
  misc_feature 1..22: note = chemically synthesized
  source 1..22: mol_type = other DNA
gaatgtcatcttacaggcataa

SEQ ID NO: 59997 - DNA, 22 bp, synthetic construct
  misc_feature 1..22: note = chemically synthesized
  source 1..22: mol_type = other DNA
acaggcataatcctgaatctgc

SEQ ID NO: 59998 - DNA, 22 bp, synthetic construct
  misc_feature 1..22: note = chemically synthesized
  source 1..22: mol_type = other DNA
caggcataatcctgaatctgct

SEQ ID NO: 59999 - DNA, 22 bp, synthetic construct
  misc_feature 1..22: note = chemically synthesized
  source 1..22: mol_type = other DNA
aatctgctctatcgcagacatt

SEQ ID NO: 60000 - DNA, 22 bp, synthetic construct
  misc_feature 1..22: note = chemically synthesized
  source 1..22: mol_type = other DNA
ctctatcgcagacattttaaaa

SEQ ID NO: 60001 - DNA, 22 bp, synthetic construct
  misc_feature 1..22: note = chemically synthesized
  source 1..22: mol_type = other DNA
tatcgcagacattttaaaacta

SEQ ID NO: 60002 - DNA, 22 bp, synthetic construct
  misc_feature 1..22: note = chemically synthesized
  source 1..22: mol_type = other DNA
tcgcagacattttaaaactaaa

SEQ ID NO: 60003 - DNA, 22 bp, synthetic construct
  misc_feature 1..22: note = chemically synthesized
  source 1..22: mol_type = other DNA
taaaactaaattaaatgttagt

SEQ ID NO: 60004 - DNA, 22 bp, synthetic construct
  misc_feature 1..22: note = chemically synthesized
  source 1..22: mol_type = other DNA
aaaactaaattaaatgttagta

SEQ ID NO: 60005 - DNA, 22 bp, synthetic construct
  misc_feature 1..22: note = chemically synthesized
  source 1..22: mol_type = other DNA
aaactaaattaaatgttagtac

SEQ ID NO: 60006 - DNA, 22 bp, synthetic construct
  misc_feature 1..22: note = chemically synthesized
  source 1..22: mol_type = other DNA
aattaaatgttagtactaagta

SEQ ID NO: 60007 - DNA, 22 bp, synthetic construct
  misc_feature 1..22: note = chemically synthesized
  source 1..22: mol_type = other DNA
aatgttagtactaagtagtagc

SEQ ID NO: 60008 - DNA, 22 bp, synthetic construct
  misc_feature 1..22: note = chemically synthesized
  source 1..22: mol_type = other DNA
gtactaagtagtagccaaattc

SEQ ID NO: 60009 - DNA, 22 bp, synthetic construct
  misc_feature 1..22: note = chemically synthesized
  source 1..22: mol_type = other DNA
agtagtagccaaattctctgag

SEQ ID NO: 60010 - DNA, 22 bp, synthetic construct
  misc_feature 1..22: note = chemically synthesized
  source 1..22: mol_type = other DNA
tctgagtctgcttcatgacagg

SEQ ID NO: 60011 - DNA, 22 bp, synthetic construct
  misc_feature 1..22: note = chemically synthesized
  source 1..22: mol_type = other DNA
tgagtctgcttcatgacaggct

SEQ ID NO: 60012 - DNA, 22 bp, synthetic construct
  misc_feature 1..22: note = chemically synthesized
  source 1..22: mol_type = other DNA
agtctgcttcatgacaggctgt

SEQ ID NO: 60013 - DNA, 22 bp, synthetic construct
  misc_feature 1..22: note = chemically synthesized
  source 1..22: mol_type = other DNA
cttcatgacaggctgtaacaca

SEQ ID NO: 60014 - DNA, 22 bp, synthetic construct
  misc_feature 1..22: note = chemically synthesized
  source 1..22: mol_type = other DNA
catgacaggctgtaacacactg

SEQ ID NO: 60015 - DNA, 22 bp, synthetic construct
  misc_feature 1..22: note = chemically synthesized
  source 1..22: mol_type = other DNA
atgacaggctgtaacacactgg

SEQ ID NO: 60016 - DNA, 22 bp, synthetic construct
  misc_feature 1..22: note = chemically synthesized
  source 1..22: mol_type = other DNA
taacacactggtatggaacggt

SEQ ID NO: 60017 - DNA, 22 bp, synthetic construct
  misc_feature 1..22: note = chemically synthesized
  source 1..22: mol_type = other DNA
gtatggaacggtaggtctaatc

SEQ ID NO: 60018 - DNA, 22 bp, synthetic construct
  misc_feature 1..22: note = chemically synthesized
  source 1..22: mol_type = other DNA
atcctgtgactcctttatctat

SEQ ID NO: 60019 - DNA, 22 bp, synthetic construct
  misc_feature 1..22: note = chemically synthesized
  source 1..22: mol_type = other DNA
tgactcctttatctatgatgtt

SEQ ID NO: 60020 - DNA, 22 bp, synthetic construct
  misc_feature 1..22: note = chemically synthesized
  source 1..22: mol_type = other DNA
ctttatctatgatgttttatgt

SEQ ID NO: 60021 - DNA, 22 bp, synthetic construct
  misc_feature 1..22: note = chemically synthesized
  source 1..22: mol_type = other DNA
tatctatgatgttttatgtatt

SEQ ID NO: 60022 - DNA, 22 bp, synthetic construct
  misc_feature 1..22: note = chemically synthesized
  source 1..22: mol_type = other DNA
atctatgatgttttatgtatta

SEQ ID NO: 60023 - DNA, 22 bp, synthetic construct
  misc_feature 1..22: note = chemically synthesized
  source 1..22: mol_type = other DNA
tctatgatgttttatgtattat

SEQ ID NO: 60024 - DNA, 22 bp, synthetic construct
  misc_feature 1..22: note = chemically synthesized
  source 1..22: mol_type = other DNA
tgatgttttatgtattatgaga

SEQ ID NO: 60025 - DNA, 22 bp, synthetic construct
  misc_feature 1..22: note = chemically synthesized
  source 1..22: mol_type = other DNA
tatgtattatgagagctcagca

SEQ ID NO: 60026 - DNA, 22 bp, synthetic construct
  misc_feature 1..22: note = chemically synthesized
  source 1..22: mol_type = other DNA
atgtattatgagagctcagcag

SEQ ID NO: 60027 - DNA, 22 bp, synthetic construct
  misc_feature 1..22: note = chemically synthesized
  source 1..22: mol_type = other DNA
tgtattatgagagctcagcaga

SEQ ID NO: 60028 - DNA, 22 bp, synthetic construct
  misc_feature 1..22: note = chemically synthesized
  source 1..22: mol_type = other DNA
tgagagctcagcagatgttgac

SEQ ID NO: 60029 - DNA, 22 bp, synthetic construct
  misc_feature 1..22: note = chemically synthesized
  source 1..22: mol_type = other DNA
agcagatgttgacagagggaat

SEQ ID NO: 60030 - DNA, 22 bp, synthetic construct
  misc_feature 1..22: note = chemically synthesized
  source 1..22: mol_type = other DNA
acagagggaatgagacaagatg

SEQ ID NO: 60031 - DNA, 22 bp, synthetic construct
  misc_feature 1..22: note = chemically synthesized
  source 1..22: mol_type = other DNA
taggtctaggtttgatagataa

SEQ ID NO: 60032 - DNA, 22 bp, synthetic construct
  misc_feature 1..22: note = chemically synthesized
  source 1..22: mol_type = other DNA
aggtctaggtttgatagataaa

SEQ ID NO: 60033 - DNA, 22 bp, synthetic construct
  misc_feature 1..22: note = chemically synthesized
  source 1..22: mol_type = other DNA
ggtctaggtttgatagataaaa

SEQ ID NO: 60034 - DNA, 22 bp, synthetic construct
  misc_feature 1..22: note = chemically synthesized
  source 1..22: mol_type = other DNA
ggtttgatagataaaaaactgg

SEQ ID NO: 60035 - DNA, 22 bp, synthetic construct
  misc_feature 1..22: note = chemically synthesized
  source 1..22: mol_type = other DNA
gatagataaaaaactgggccaa

SEQ ID NO: 60036 - DNA, 22 bp, synthetic construct
  misc_feature 1..22: note = chemically synthesized
  source 1..22: mol_type = other DNA
atagataaaaaactgggccaaa

SEQ ID NO: 60037 - DNA, 22 bp, synthetic construct
  misc_feature 1..22: note = chemically synthesized
  source 1..22: mol_type = other DNA
ggccaaattttatattttcttt

SEQ ID NO: 60038 - DNA, 22 bp, synthetic construct
  misc_feature 1..22: note = chemically synthesized
  source 1..22: mol_type = other DNA
tatattttctttgaaaagatag

SEQ ID NO: 60039 - DNA, 22 bp, synthetic construct
  misc_feature 1..22: note = chemically synthesized
  source 1..22: mol_type = other DNA
atattttctttgaaaagatagc

SEQ ID NO: 60040 - DNA, 22 bp, synthetic construct
  misc_feature 1..22: note = chemically synthesized
  source 1..22: mol_type = other DNA
tattttctttgaaaagatagct

SEQ ID NO: 60041 - DNA, 22 bp, synthetic construct
  misc_feature 1..22: note = chemically synthesized
  source 1..22: mol_type = other DNA
tctttgaaaagatagctaaatc

SEQ ID NO: 60042 - DNA, 22 bp, synthetic construct
  misc_feature 1..22: note = chemically synthesized
  source 1..22: mol_type = other DNA
ctttgaaaagatagctaaatct

SEQ ID NO: 60043 - DNA, 22 bp, synthetic construct
  misc_feature 1..22: note = chemically synthesized
  source 1..22: mol_type = other DNA
tttgaaaagatagctaaatctc

SEQ ID NO: 60044 - DNA, 22 bp, synthetic construct
  misc_feature 1..22: note = chemically synthesized
  source 1..22: mol_type = other DNA
tgaaaagatagctaaatctcag

SEQ ID NO: 60045 - DNA, 22 bp, synthetic construct
  misc_feature 1..22: note = chemically synthesized
  source 1..22: mol_type = other DNA
gaaaagatagctaaatctcagc

SEQ ID NO: 60046 - DNA, 22 bp, synthetic construct
  misc_feature 1..22: note = chemically synthesized
  source 1..22: mol_type = other DNA
aaaagatagctaaatctcagca

SEQ ID NO: 60047 - DNA, 22 bp, synthetic construct
  misc_feature 1..22: note = chemically synthesized
  source 1..22: mol_type = other DNA
aatctcagcaattattttattt

SEQ ID NO: 60048 - DNA, 22 bp, synthetic construct
  misc_feature 1..22: note = chemically synthesized
  source 1..22: mol_type = other DNA
agcaattattttattttattta

SEQ ID NO: 60049 - DNA, 22 bp, synthetic construct
  misc_feature 1..22: note = chemically synthesized
  source 1..22: mol_type = other DNA
ttttattttatttattaagctt

SEQ ID NO: 60050 - DNA, 22 bp, synthetic construct
  misc_feature 1..22: note = chemically synthesized
  source 1..22: mol_type = other DNA
tattttatttattaagcttttt

SEQ ID NO: 60051 - DNA, 22 bp, synthetic construct
  misc_feature 1..22: note = chemically synthesized
  source 1..22: mol_type = other DNA
attttatttattaagctttttg

SEQ ID NO: 60052 - DNA, 22 bp, synthetic construct
  misc_feature 1..22: note = chemically synthesized
  source 1..22: mol_type = other DNA
ttttatttattaagctttttgt

SEQ ID NO: 60053 - DNA, 22 bp, synthetic construct
  misc_feature 1..22: note = chemically synthesized
  source 1..22: mol_type = other DNA
tatttattaagctttttgtaga

SEQ ID NO: 60054 - DNA, 22 bp, synthetic construct
  misc_feature 1..22: note = chemically synthesized
  source 1..22: mol_type = other DNA
atttattaagctttttgtagag

SEQ ID NO: 60055 - DNA, 22 bp, synthetic construct
  misc_feature 1..22: note = chemically synthesized
  source 1..22: mol_type = other DNA
tttattaagctttttgtagaga

SEQ ID NO: 60056 - DNA, 22 bp, synthetic construct
  misc_feature 1..22: note = chemically synthesized
  source 1..22: mol_type = other DNA
attaagctttttgtagagacag

SEQ ID NO: 60057 - DNA, 22 bp, synthetic construct
  misc_feature 1..22: note = chemically synthesized
  source 1..22: mol_type = other DNA
ttaagctttttgtagagacagg

SEQ ID NO: 60058 - DNA, 22 bp, synthetic construct
  misc_feature 1..22: note = chemically synthesized
  source 1..22: mol_type = other DNA
agctttttgtagagacagggtt

SEQ ID NO: 60059 - DNA, 22 bp, synthetic construct
  misc_feature 1..22: note = chemically synthesized
  source 1..22: mol_type = other DNA
tttgtagagacagggttttgct

SEQ ID NO: 60060 - DNA, 22 bp, synthetic construct
  misc_feature 1..22: note = chemically synthesized
  source 1..22: mol_type = other DNA
ttgtagagacagggttttgcta

SEQ ID NO: 60061 - DNA, 22 bp, synthetic construct
  misc_feature 1..22: note = chemically synthesized
  source 1..22: mol_type = other DNA
tgtagagacagggttttgctat

SEQ ID NO: 60062 - DNA, 22 bp, synthetic construct
  misc_feature 1..22: note = chemically synthesized
  source 1..22: mol_type = other DNA
gtagagacagggttttgctatg

SEQ ID NO: 60063 - DNA, 22 bp, synthetic construct
  misc_feature 1..22: note = chemically synthesized
  source 1..22: mol_type = other DNA
tagagacagggttttgctatgt

SEQ ID NO: 60064 - DNA, 22 bp, synthetic construct
  misc_feature 1..22: note = chemically synthesized
  source 1..22: mol_type = other DNA
tgctatgttgcccaggctggtc

SEQ ID NO: 60065 - DNA, 22 bp, synthetic construct
  misc_feature 1..22: note = chemically synthesized
  source 1..22: mol_type = other DNA
gctatgttgcccaggctggtct

SEQ ID NO: 60066 - DNA, 22 bp, synthetic construct
  misc_feature 1..22: note = chemically synthesized
  source 1..22: mol_type = other DNA
ctatgttgcccaggctggtctt

SEQ ID NO: 60067 - DNA, 22 bp, synthetic construct
  misc_feature 1..22: note = chemically synthesized
  source 1..22: mol_type = other DNA
tgttgcccaggctggtcttgaa

SEQ ID NO: 60068 - DNA, 22 bp, synthetic construct
  misc_feature 1..22: note = chemically synthesized
  source 1..22: mol_type = other DNA
cccaggctggtcttgaactcct

SEQ ID NO: 60069 - DNA, 22 bp, synthetic construct
  misc_feature 1..22: note = chemically synthesized
  source 1..22: mol_type = other DNA
gtcttgaactcctagcttcaag

SEQ ID NO: 60070 - DNA, 22 bp, synthetic construct
  misc_feature 1..22: note = chemically synthesized
  source 1..22: mol_type = other DNA
gaactcctagcttcaagcaatc

SEQ ID NO: 60071 - DNA, 22 bp, synthetic construct
  misc_feature 1..22: note = chemically synthesized
  source 1..22: mol_type = other DNA
aactcctagcttcaagcaatct

SEQ ID NO: 60072 - DNA, 22 bp, synthetic construct
  misc_feature 1..22: note = chemically synthesized
  source 1..22: mol_type = other DNA
ctagcttcaagcaatcttccct

SEQ ID NO: 60073 - DNA, 22 bp, synthetic construct
  misc_feature 1..22: note = chemically synthesized
  source 1..22: mol_type = other DNA
gcttcaagcaatcttccctctg

SEQ ID NO: 60074 - DNA, 22 bp, synthetic construct
  misc_feature 1..22: note = chemically synthesized
  source 1..22: mol_type = other DNA
caagcaatcttccctctgtggc

SEQ ID NO: 60075 - DNA, 22 bp, synthetic construct
  misc_feature 1..22: note = chemically synthesized
  source 1..22: mol_type = other DNA
aagcaatcttccctctgtggcc

SEQ ID NO: 60076 - DNA, 22 bp, synthetic construct
  misc_feature 1..22: note = chemically synthesized
  source 1..22: mol_type = other DNA
ccctctgtggccttccaaattt

SEQ ID NO: 60077 - DNA, 22 bp, synthetic construct
  misc_feature 1..22: note = chemically synthesized
  source 1..22: mol_type = other DNA
cctctgtggccttccaaatttc

SEQ ID NO: 60078 - DNA, 22 bp, synthetic construct
  misc_feature 1..22: note = chemically synthesized
  source 1..22: mol_type = other DNA
tgtggccttccaaatttctgag

SEQ ID NO: 60079 - DNA, 22 bp, synthetic construct
  misc_feature 1..22: note = chemically synthesized
  source 1..22: mol_type = other DNA
tggccttccaaatttctgagat

SEQ ID NO: 60080 - DNA, 22 bp, synthetic construct
  misc_feature 1..22: note = chemically synthesized
  source 1..22: mol_type = other DNA
ccaaatttctgagattataggc

SEQ ID NO: 60081 - DNA, 22 bp, synthetic construct
  misc_feature 1..22: note = chemically synthesized
  source 1..22: mol_type = other DNA
caaatttctgagattataggca

SEQ ID NO: 60082 - DNA, 22 bp, synthetic construct
  misc_feature 1..22: note = chemically synthesized
  source 1..22: mol_type = other DNA
ctgagattataggcataagcaa

SEQ ID NO: 60083 - DNA, 22 bp, synthetic construct
  misc_feature 1..22: note = chemically synthesized
  source 1..22: mol_type = other DNA
tgagattataggcataagcaaa

SEQ ID NO: 60084 - DNA, 22 bp, synthetic construct
  misc_feature 1..22: note = chemically synthesized
  source 1..22: mol_type = other DNA
agattataggcataagcaaatg

SEQ ID NO: 60085 - DNA, 22 bp, synthetic construct
  misc_feature 1..22: note = chemically synthesized
  source 1..22: mol_type = other DNA
taggcataagcaaatgcctctg

SEQ ID NO: 60086 - DNA, 22 bp, synthetic construct
  misc_feature 1..22: note = chemically synthesized
  source 1..22: mol_type = other DNA
tggccttcaagtaattaattta

SEQ ID NO: 60087 - DNA, 22 bp, synthetic construct
  misc_feature 1..22: note = chemically synthesized
  source 1..22: mol_type = other DNA
gccttcaagtaattaatttaaa

SEQ ID NO: 60088 - DNA, 22 bp, synthetic construct
  misc_feature 1..22: note = chemically synthesized
  source 1..22: mol_type = other DNA
caagtaattaatttaaagtctt

SEQ ID NO: 60089 - DNA, 22 bp, synthetic construct
  misc_feature 1..22: note = chemically synthesized
  source 1..22: mol_type = other DNA
aagtaattaatttaaagtcttt

SEQ ID NO: 60090 - DNA, 22 bp, synthetic construct
  misc_feature 1..22: note = chemically synthesized
  source 1..22: mol_type = other DNA
atttaaagtcttttaaaaattt

SEQ ID NO: 60091 - DNA, 22 bp, synthetic construct
  misc_feature 1..22: note = chemically synthesized
  source 1..22: mol_type = other DNA
aaagtcttttaaaaattttctc

SEQ ID NO: 60092 - DNA, 22 bp, synthetic construct
  misc_feature 1..22: note = chemically synthesized
  source 1..22: mol_type = other DNA
aagtcttttaaaaattttctct

SEQ ID NO: 60093 - DNA, 22 bp, synthetic construct
  misc_feature 1..22: note = chemically synthesized
  source 1..22: mol_type = other DNA
ttaaaaattttctctcctcccc

SEQ ID NO: 60094 - DNA, 22 bp, synthetic construct
  misc_feature 1..22: note = chemically synthesized
  source 1..22: mol_type = other DNA
taaaaattttctctcctcccct

SEQ ID NO: 60095 - DNA, 22 bp, synthetic construct
  misc_feature 1..22: note = chemically synthesized
  source 1..22: mol_type = other DNA
aaaaattttctctcctccccta

SEQ ID NO: 60096 - DNA, 22 bp, synthetic construct
  misc_feature 1..22: note = chemically synthesized
  source 1..22: mol_type = other DNA
aaaattttctctcctcccctaa

SEQ ID NO: 60097 - DNA, 22 bp, synthetic construct
  misc_feature 1..22: note = chemically synthesized
  source 1..22: mol_type = other DNA
tctctcctcccctaaaattggg

SEQ ID NO: 60098 - DNA, 22 bp, synthetic construct
  misc_feature 1..22: note = chemically synthesized
  source 1..22: mol_type = other DNA
ctctcctcccctaaaattgggt

SEQ ID NO: 60099 - DNA, 22 bp, synthetic construct
  misc_feature 1..22: note = chemically synthesized
  source 1..22: mol_type = other DNA
tctcctcccctaaaattgggtt

SEQ ID NO: 60100 - DNA, 22 bp, synthetic construct
  misc_feature 1..22: note = chemically synthesized
  source 1..22: mol_type = other DNA
tcctcccctaaaattgggtttt

SEQ ID NO: 60101 - DNA, 22 bp, synthetic construct
  misc_feature 1..22: note = chemically synthesized
  source 1..22: mol_type = other DNA
ctcccctaaaattgggttttag

SEQ ID NO: 60102 - DNA, 22 bp, synthetic construct
  misc_feature 1..22: note = chemically synthesized
  source 1..22: mol_type = other DNA
ccctaaaattgggttttagagt

SEQ ID NO: 60103 - DNA, 22 bp, synthetic construct
  misc_feature 1..22: note = chemically synthesized
  source 1..22: mol_type = other DNA
aaattgggttttagagtaaggt

SEQ ID NO: 60104 - DNA, 22 bp, synthetic construct
  misc_feature 1..22: note = chemically synthesized
  source 1..22: mol_type = other DNA
ggttttagagtaaggttcttgt

SEQ ID NO: 60105 - DNA, 22 bp, synthetic construct
  misc_feature 1..22: note = chemically synthesized
  source 1..22: mol_type = other DNA
tagagtaaggttcttgttcctc

SEQ ID NO: 60106 - DNA, 22 bp, synthetic construct
  misc_feature 1..22: note = chemically synthesized
  source 1..22: mol_type = other DNA
agagtaaggttcttgttcctct

SEQ ID NO: 60107 - DNA, 22 bp, synthetic construct
  misc_feature 1..22: note = chemically synthesized
  source 1..22: mol_type = other DNA
gagtaaggttcttgttcctcta

SEQ ID NO: 60108 - DNA, 22 bp, synthetic construct
  misc_feature 1..22: note = chemically synthesized
  source 1..22: mol_type = other DNA
ttgttcctctagtcgacaagag

SEQ ID NO: 60109 - DNA, 22 bp, synthetic construct
  misc_feature 1..22: note = chemically synthesized
  source 1..22: mol_type = other DNA
gttcctctagtcgacaagagtt

SEQ ID NO: 60110 - DNA, 22 bp, synthetic construct
  misc_feature 1..22: note = chemically synthesized
  source 1..22: mol_type = other DNA
ttcctctagtcgacaagagttt

SEQ ID NO: 60111 - DNA, 22 bp, synthetic construct
  misc_feature 1..22: note = chemically synthesized
  source 1..22: mol_type = other DNA
ctctagtcgacaagagtttctg

SEQ ID NO: 60112 - DNA, 22 bp, synthetic construct
  misc_feature 1..22: note = chemically synthesized
  source 1..22: mol_type = other DNA
tagtcgacaagagtttctgagg

SEQ ID NO: 60113 - DNA, 22 bp, synthetic construct
  misc_feature 1..22: note = chemically synthesized
  source 1..22: mol_type = other DNA
gtcgacaagagtttctgaggaa

SEQ ID NO: 60114 - DNA, 22 bp, synthetic construct
  misc_feature 1..22: note = chemically synthesized
  source 1..22: mol_type = other DNA
ctgaggaatcatagaagaaagc

SEQ ID NO: 60115 - DNA, 22 bp, synthetic construct
  misc_feature 1..22: note = chemically synthesized
  source 1..22: mol_type = other DNA
tgaggaatcatagaagaaagca

SEQ ID NO: 60116 - DNA, 22 bp, synthetic construct
  misc_feature 1..22: note = chemically synthesized
  source 1..22: mol_type = other DNA
aggaatcatagaagaaagcaca

SEQ ID NO: 60117 - DNA, 22 bp, synthetic construct
  misc_feature 1..22: note = chemically synthesized
  source 1..22: mol_type = other DNA
tttgagcatagatagtttcctt

SEQ ID NO: 60118 - DNA, 22 bp, synthetic construct
  misc_feature 1..22: note = chemically synthesized
  source 1..22: mol_type = other DNA
tgagcatagatagtttccttcg

SEQ ID NO: 60119 - DNA, 22 bp, synthetic construct
  misc_feature 1..22: note = chemically synthesized
  source 1..22: mol_type = other DNA
gagcatagatagtttccttcgt

SEQ ID NO: 60120 - DNA, 22 bp, synthetic construct
  misc_feature 1..22: note = chemically synthesized
  source 1..22: mol_type = other DNA
agcatagatagtttccttcgtg

SEQ ID NO: 60121 - DNA, 22 bp, synthetic construct
  misc_feature 1..22: note = chemically synthesized
  source 1..22: mol_type = other DNA
ccttcgtggaaagccaaagtga

SEQ ID NO: 60122 - DNA, 22 bp, synthetic construct
  misc_feature 1..22: note = chemically synthesized
  source 1..22: mol_type = other DNA
cttcgtggaaagccaaagtgaa

SEQ ID NO: 60123 - DNA, 22 bp, synthetic construct
  misc_feature 1..22: note = chemically synthesized
  source 1..22: mol_type = other DNA
cgtggaaagccaaagtgaatac

SEQ ID NO: 60124 - DNA, 22 bp, synthetic construct
  misc_feature 1..22: note = chemically synthesized
  source 1..22: mol_type = other DNA
gtggaaagccaaagtgaatact

SEQ ID NO: 60125 - DNA, 22 bp, synthetic construct
  misc_feature 1..22: note = chemically synthesized
  source 1..22: mol_type = other DNA
attgagcatcttctatgtagac

SEQ ID NO: 60126 - DNA, 22 bp, synthetic construct
  misc_feature 1..22: note = chemically synthesized
  source 1..22: mol_type = other DNA
ttgagcatcttctatgtagaca

SEQ ID NO: 60127 - DNA, 22 bp, synthetic construct
  misc_feature 1..22: note = chemically synthesized
  source 1..22: mol_type = other DNA
agcatcttctatgtagacatag

SEQ ID NO: 60128 - DNA, 22 bp, synthetic construct
  misc_feature 1..22: note = chemically synthesized
  source 1..22: mol_type = other DNA
ctatgtagacatagacttgtga

SEQ ID NO: 60129 - DNA, 22 bp, synthetic construct
  misc_feature 1..22: note = chemically synthesized
  source 1..22: mol_type = other DNA
tatgtagacatagacttgtgaa

SEQ ID NO: 60130 - DNA, 22 bp, synthetic construct
  misc_feature 1..22: note = chemically synthesized
  source 1..22: mol_type = other DNA
tgtagacatagacttgtgaagt

SEQ ID NO: 60131 - DNA, 22 bp, synthetic construct
  misc_feature 1..22: note = chemically synthesized
  source 1..22: mol_type = other DNA
gtgaagtcatatcattaaccct

SEQ ID NO: 60132 - DNA, 22 bp, synthetic construct
  misc_feature 1..22: note = chemically synthesized
  source 1..22: mol_type = other DNA
tgaagtcatatcattaaccctg

SEQ ID NO: 60133 - DNA, 22 bp, synthetic construct
  misc_feature 1..22: note = chemically synthesized
  source 1..22: mol_type = other DNA
accctgtcattttacagatgag

SEQ ID NO: 60134 - DNA, 22 bp, synthetic construct
  misc_feature 1..22: note = chemically synthesized
  source 1..22: mol_type = other DNA
tcattttacagatgagaaaggt

SEQ ID NO: 60135 - DNA, 22 bp, synthetic construct
  misc_feature 1..22: note = chemically synthesized
  source 1..22: mol_type = other DNA
tacagatgagaaaggttgaggc

SEQ ID NO: 60136 - DNA, 22 bp, synthetic construct
  misc_feature 1..22: note = chemically synthesized
  source 1..22: mol_type = other DNA
acagatgagaaaggttgaggct

SEQ ID NO: 60137 - DNA, 22 bp, synthetic construct
  misc_feature 1..22: note = chemically synthesized
  source 1..22: mol_type = other DNA
cagatgagaaaggttgaggcta

SEQ ID NO: 60138 - DNA, 22 bp, synthetic construct
  misc_feature 1..22: note = chemically synthesized
  source 1..22: mol_type = other DNA
aggctaagaggggagtgagtgc

SEQ ID NO: 60139 - DNA, 22 bp, synthetic construct
  misc_feature 1..22: note = chemically synthesized
  source 1..22: mol_type = other DNA
agaggggagtgagtgccagagt

SEQ ID NO: 60140 - DNA, 22 bp, synthetic construct
  misc_feature 1..22: note = chemically synthesized
  source 1..22: mol_type = other DNA
cttgctaggcagtggtagactt

SEQ ID NO: 60141 - DNA, 22 bp, synthetic construct
  misc_feature 1..22: note = chemically synthesized
  source 1..22: mol_type = other DNA
gctaggcagtggtagacttggc

SEQ ID NO: 60142 - DNA, 22 bp, synthetic construct
  misc_feature 1..22: note = chemically synthesized
  source 1..22: mol_type = other DNA
ctaggcagtggtagacttggcc

SEQ ID NO: 60143 - DNA, 22 bp, synthetic construct
  misc_feature 1..22: note = chemically synthesized
  source 1..22: mol_type = other DNA
ggcagtggtagacttggcccag

SEQ ID NO: 60144 - DNA, 22 bp, synthetic construct
  misc_feature 1..22: note = chemically synthesized
  source 1..22: mol_type = other DNA
ggcccagagcctggggcttccc

SEQ ID NO: 60145 - DNA, 22 bp, synthetic construct
  misc_feature 1..22: note = chemically synthesized
  source 1..22: mol_type = other DNA
gcccagagcctggggcttccca

SEQ ID NO: 60146 - DNA, 22 bp, synthetic construct
  misc_feature 1..22: note = chemically synthesized
  source 1..22: mol_type = other DNA
gggcttcccactttcattcctg

SEQ ID NO: 60147 - DNA, 22 bp, synthetic construct
  misc_feature 1..22: note = chemically synthesized
  source 1..22: mol_type = other DNA
cccactttcattcctggctgac

SEQ ID NO: 60148 - DNA, 22 bp, synthetic construct
  misc_feature 1..22: note = chemically synthesized
  source 1..22: mol_type = other DNA
ccactttcattcctggctgact

SEQ ID NO: 60149 - DNA, 22 bp, synthetic construct
  misc_feature 1..22: note = chemically synthesized
  source 1..22: mol_type = other DNA
tcattcctggctgactgtacca

SEQ ID NO: 60150 - DNA, 22 bp, synthetic construct
  misc_feature 1..22: note = chemically synthesized
  source 1..22: mol_type = other DNA
cattcctggctgactgtaccaa

SEQ ID NO: 60151 - DNA, 22 bp, synthetic construct
  misc_feature 1..22: note = chemically synthesized
  source 1..22: mol_type = other DNA
attcctggctgactgtaccaat

SEQ ID NO: 60152 - DNA, 22 bp, synthetic construct
  misc_feature 1..22: note = chemically synthesized
  source 1..22: mol_type = other DNA
ctggctgactgtaccaatcgca

SEQ ID NO: 60153 - DNA, 22 bp, synthetic construct
  misc_feature 1..22: note = chemically synthesized
  source 1..22: mol_type = other DNA
gctgactgtaccaatcgcacat

SEQ ID NO: 60154 - DNA, 22 bp, synthetic construct
  misc_feature 1..22: note = chemically synthesized
  source 1..22: mol_type = other DNA
actgtaccaatcgcacatggcc

SEQ ID NO: 60155 - DNA, 22 bp, synthetic construct
  misc_feature 1..22: note = chemically synthesized
  source 1..22: mol_type = other DNA
taccaatcgcacatggcctctc

SEQ ID NO: 60156 - DNA, 22 bp, synthetic construct
  misc_feature 1..22: note = chemically synthesized
  source 1..22: mol_type = other DNA
tccatggccagcaggagccaga

SEQ ID NO: 60157 - DNA, 22 bp, synthetic construct
  misc_feature 1..22: note = chemically synthesized
  source 1..22: mol_type = other DNA
catggccagcaggagccagagg

SEQ ID NO: 60158 - DNA, 22 bp, synthetic construct
  misc_feature 1..22: note = chemically synthesized
  source 1..22: mol_type = other DNA
tgcagaggaacttgcacccacg

SEQ ID NO: 60159 - DNA, 22 bp, synthetic construct
  misc_feature 1..22: note = chemically synthesized
  source 1..22: mol_type = other DNA
gcagaggaacttgcacccacgc

SEQ ID NO: 60160 - DNA, 22 bp, synthetic construct
  misc_feature 1..22: note = chemically synthesized
  source 1..22: mol_type = other DNA
cagaggaacttgcacccacgct

SEQ ID NO: 60161 - DNA, 22 bp, synthetic construct
  misc_feature 1..22: note = chemically synthesized
  source 1..22: mol_type = other DNA
gcacccacgcttttatcggtga

SEQ ID NO: 60162 - DNA, 22 bp, synthetic construct
  misc_feature 1..22: note = chemically synthesized
  source 1..22: mol_type = other DNA
cacccacgcttttatcggtgat

SEQ ID NO: 60163 - DNA, 22 bp, synthetic construct
  misc_feature 1..22: note = chemically synthesized
  source 1..22: mol_type = other DNA
ttatcggtgatggctggaatgc

SEQ ID NO: 60164 - DNA, 22 bp, synthetic construct
  misc_feature 1..22: note = chemically synthesized
  source 1..22: mol_type = other DNA
tatcggtgatggctggaatgct

SEQ ID NO: 60165 - DNA, 22 bp, synthetic construct
  misc_feature 1..22: note = chemically synthesized
  source 1..22: mol_type = other DNA
atcggtgatggctggaatgctt

SEQ ID NO: 60166 - DNA, 22 bp, synthetic construct
  misc_feature 1..22: note = chemically synthesized
  source 1..22: mol_type = other DNA
tcggtgatggctggaatgcttt

SEQ ID NO: 60167 - DNA, 22 bp, synthetic construct
  misc_feature 1..22: note = chemically synthesized
  source 1..22: mol_type = other DNA
gaatgcttttcttaactggagc

SEQ ID NO: 60168 - DNA, 22 bp, synthetic construct
  misc_feature 1..22: note = chemically synthesized
  source 1..22: mol_type = other DNA
ttcttaactggagctttgttga

SEQ ID NO: 60169 - DNA, 22 bp, synthetic construct
  misc_feature 1..22: note = chemically synthesized
  source 1..22: mol_type = other DNA
tcttaactggagctttgttgaa

SEQ ID NO: 60170 - DNA, 22 bp, synthetic construct
  misc_feature 1..22: note = chemically synthesized
  source 1..22: mol_type = other DNA
cttaactggagctttgttgaag

SEQ ID NO: 60171 - DNA, 22 bp, synthetic construct
  misc_feature 1..22: note = chemically synthesized
  source 1..22: mol_type = other DNA
ttaactggagctttgttgaaga

SEQ ID NO: 60172 - DNA, 22 bp, synthetic construct
  misc_feature 1..22: note = chemically synthesized
  source 1..22: mol_type = other DNA
aactggagctttgttgaagagc

SEQ ID NO: 60173 - DNA, 22 bp, synthetic construct
  misc_feature 1..22: note = chemically synthesized
  source 1..22: mol_type = other DNA
actggagctttgttgaagagcc

SEQ ID NO: 60174 - DNA, 22 bp, synthetic construct
  misc_feature 1..22: note = chemically synthesized
  source 1..22: mol_type = other DNA
gagctttgttgaagagcctggt

SEQ ID NO: 60175 - DNA, 22 bp, synthetic construct
  misc_feature 1..22: note = chemically synthesized
  source 1..22: mol_type = other DNA
tgttgaagagcctggtgctttt

SEQ ID NO: 60176 - DNA, 22 bp, synthetic construct
  misc_feature 1..22: note = chemically synthesized
  source 1..22: mol_type = other DNA
gttgaagagcctggtgcttttg

SEQ ID NO: 60177 - DNA, 22 bp, synthetic construct
  misc_feature 1..22: note = chemically synthesized
  source 1..22: mol_type = other DNA
ttgaagagcctggtgcttttgt

SEQ ID NO: 60178 - DNA, 22 bp, synthetic construct
  misc_feature 1..22: note = chemically synthesized
  source 1..22: mol_type = other DNA
aagagcctggtgcttttgtggc

SEQ ID NO: 60179 - DNA, 22 bp, synthetic construct
  misc_feature 1..22: note = chemically synthesized
  source 1..22: mol_type = other DNA
gtgcttttgtggcagtgctaac

SEQ ID NO: 60180 - DNA, 22 bp, synthetic construct
  misc_feature 1..22: note = chemically synthesized
  source 1..22: mol_type = other DNA
ttgtggcagtgctaacctgggg

SEQ ID NO: 60181 - DNA, 22 bp, synthetic construct
  misc_feature 1..22: note = chemically synthesized
  source 1..22: mol_type = other DNA
tgtggcagtgctaacctgggga

SEQ ID NO: 60182 - DNA, 22 bp, synthetic construct
  misc_feature 1..22: note = chemically synthesized
  source 1..22: mol_type = other DNA
gtggcagtgctaacctggggag

SEQ ID NO: 60183 - DNA, 22 bp, synthetic construct
  misc_feature 1..22: note = chemically synthesized
  source 1..22: mol_type = other DNA
tggcagtgctaacctggggagc

SEQ ID NO: 60184 - DNA, 22 bp, synthetic construct
  misc_feature 1..22: note = chemically synthesized
  source 1..22: mol_type = other DNA
acctggggagcccatggtaaaa

SEQ ID NO: 60185 - DNA, 22 bp, synthetic construct
  misc_feature 1..22: note = chemically synthesized
  source 1..22: mol_type = other DNA
gggagcccatggtaaaacccaa

SEQ ID NO: 60186 - DNA, 22 bp, synthetic construct
  misc_feature 1..22: note = chemically synthesized
  source 1..22: mol_type = other DNA
tgctgttgcagagaatggtcct

SEQ ID NO: 60187 - DNA, 22 bp, synthetic construct
  misc_feature 1..22: note = chemically synthesized
  source 1..22: mol_type = other DNA
ttgcagagaatggtcctttgcc

SEQ ID NO: 60188 - DNA, 22 bp, synthetic construct
  misc_feature 1..22: note = chemically synthesized
  source 1..22: mol_type = other DNA
cagagaatggtcctttgccctt

SEQ ID NO: 60189 - DNA, 22 bp, synthetic construct
  misc_feature 1..22: note = chemically synthesized
  source 1..22: mol_type = other DNA
tgccctttcttcttgccttgtt

SEQ ID NO: 60190 - DNA, 22 bp, synthetic construct
  misc_feature 1..22: note = chemically synthesized
  source 1..22: mol_type = other DNA
gccctttcttcttgccttgttc

SEQ ID NO: 60191 - DNA, 22 bp, synthetic construct
  misc_feature 1..22: note = chemically synthesized
  source 1..22: mol_type = other DNA
ccctttcttcttgccttgttcc

SEQ ID NO: 60192 - DNA, 22 bp, synthetic construct
  misc_feature 1..22: note = chemically synthesized
  source 1..22: mol_type = other DNA
tcttcttgccttgttcctttcc

SEQ ID NO: 60193 - DNA, 22 bp, synthetic construct
  misc_feature 1..22: note = chemically synthesized
  source 1..22: mol_type = other DNA
cttcttgccttgttcctttccc

SEQ ID NO: 60194 - DNA, 22 bp, synthetic construct
  misc_feature 1..22: note = chemically synthesized
  source 1..22: mol_type = other DNA
ttcttgccttgttcctttccct

SEQ ID NO: 60195 - DNA, 22 bp, synthetic construct
  misc_feature 1..22: note = chemically synthesized
  source 1..22: mol_type = other DNA
cttgccttgttcctttccctgt

SEQ ID NO: 60196 - DNA, 22 bp, synthetic construct
  misc_feature 1..22: note = chemically synthesized
  source 1..22: mol_type = other DNA
ttgccttgttcctttccctgtt

SEQ ID NO: 60197 - DNA, 22 bp, synthetic construct
  misc_feature 1..22: note = chemically synthesized
  source 1..22: mol_type = other DNA
gccttgttcctttccctgtttt

SEQ ID NO: 60198 - DNA, 22 bp, synthetic construct
  misc_feature 1..22: note = chemically synthesized
  source 1..22: mol_type = other DNA
ccttgttcctttccctgttttc

SEQ ID NO: 60199 - DNA, 22 bp, synthetic construct
  misc_feature 1..22: note = chemically synthesized
  source 1..22: mol_type = other DNA
gttcctttccctgttttctctg

SEQ ID NO: 60200 - DNA, 22 bp, synthetic construct
  misc_feature 1..22: note = chemically synthesized
  source 1..22: mol_type = other DNA
ttcctttccctgttttctctgc

SEQ ID NO: 60201 - DNA, 22 bp, synthetic construct
  misc_feature 1..22: note = chemically synthesized
  source 1..22: mol_type = other DNA
ctttccctgttttctctgccct

SEQ ID NO: 60202 - DNA, 22 bp, synthetic construct
  misc_feature 1..22: note = chemically synthesized
  source 1..22: mol_type = other DNA
tccctgttttctctgccctttt

SEQ ID NO: 60203 - DNA, 22 bp, synthetic construct
  misc_feature 1..22: note = chemically synthesized
  source 1..22: mol_type = other DNA
ccctgttttctctgcccttttt

SEQ ID NO: 60204 - DNA, 22 bp, synthetic construct
  misc_feature 1..22: note = chemically synthesized
  source 1..22: mol_type = other DNA
cctgttttctctgccctttttc

SEQ ID NO: 60205 - DNA, 22 bp, synthetic construct
  misc_feature 1..22: note = chemically synthesized
  source 1..22: mol_type = other DNA
ttttctctgccctttttcgggg

SEQ ID NO: 60206 - DNA, 22 bp, synthetic construct
  misc_feature 1..22: note = chemically synthesized
  source 1..22: mol_type = other DNA
tctctgccctttttcggggctg

SEQ ID NO: 60207 - DNA, 22 bp, synthetic construct
  misc_feature 1..22: note = chemically synthesized
  source 1..22: mol_type = other DNA
ctctgccctttttcggggctgg

SEQ ID NO: 60208 - DNA, 22 bp, synthetic construct
  misc_feature 1..22: note = chemically synthesized
  source 1..22: mol_type = other DNA
tctgccctttttcggggctggt

SEQ ID NO: 60209 - DNA, 22 bp, synthetic construct
  misc_feature 1..22: note = chemically synthesized
  source 1..22: mol_type = other DNA
tgccctttttcggggctggtct

SEQ ID NO: 60210 - DNA, 22 bp, synthetic construct
  misc_feature 1..22: note = chemically synthesized
  source 1..22: mol_type = other DNA
ccctttttcggggctggtcttc

SEQ ID NO: 60211 - DNA, 22 bp, synthetic construct
  misc_feature 1..22: note = chemically synthesized
  source 1..22: mol_type = other DNA
tttcggggctggtcttcctacc

SEQ ID NO: 60212 - DNA, 22 bp, synthetic construct
  misc_feature 1..22: note = chemically synthesized
  source 1..22: mol_type = other DNA
ttcggggctggtcttcctacca

SEQ ID NO: 60213 - DNA, 22 bp, synthetic construct
  misc_feature 1..22: note = chemically synthesized
  source 1..22: mol_type = other DNA
tcggggctggtcttcctaccac

SEQ ID NO: 60214 - DNA, 22 bp, synthetic construct
  misc_feature 1..22: note = chemically synthesized
  source 1..22: mol_type = other DNA
cggggctggtcttcctaccacc

SEQ ID NO: 60215 - DNA, 22 bp, synthetic construct
  misc_feature 1..22: note = chemically synthesized
  source 1..22: mol_type = other DNA
ggggctggtcttcctaccacct

SEQ ID NO: 60216 - DNA, 22 bp, synthetic construct
  misc_feature 1..22: note = chemically synthesized
  source 1..22: mol_type = other DNA
gtcttcctaccacctttcctgc

SEQ ID NO: 60217 - DNA, 22 bp, synthetic construct
  misc_feature 1..22: note = chemically synthesized
  source 1..22: mol_type = other DNA
cctaccacctttcctgctaggg

SEQ ID NO: 60218 - DNA, 22 bp, synthetic construct
  misc_feature 1..22: note = chemically synthesized
  source 1..22: mol_type = other DNA
ctaccacctttcctgctagggc

SEQ ID NO: 60219 - DNA, 22 bp, synthetic construct
  misc_feature 1..22: note = chemically synthesized
  source 1..22: mol_type = other DNA
ccacctttcctgctagggctcc

SEQ ID NO: 60220 - DNA, 22 bp, synthetic construct
  misc_feature 1..22: note = chemically synthesized
  source 1..22: mol_type = other DNA
tcctgctagggctcccaaagtg

SEQ ID NO: 60221 - DNA, 22 bp, synthetic construct
  misc_feature 1..22: note = chemically synthesized
  source 1..22: mol_type = other DNA
cctgctagggctcccaaagtgt

SEQ ID NO: 60222 - DNA, 22 bp, synthetic construct
  misc_feature 1..22: note = chemically synthesized
  source 1..22: mol_type = other DNA
ctgctagggctcccaaagtgtg

SEQ ID NO: 60223 - DNA, 22 bp, synthetic construct
  misc_feature 1..22: note = chemically synthesized
  source 1..22: mol_type = other DNA
ctagggctcccaaagtgtggcc

SEQ ID NO: 60224 - DNA, 22 bp, synthetic construct
  misc_feature 1..22: note = chemically synthesized
  source 1..22: mol_type = other DNA
gggctcccaaagtgtggccctt

SEQ ID NO: 60225 - DNA, 22 bp, synthetic construct
  misc_feature 1..22: note = chemically synthesized
  source 1..22: mol_type = other DNA
ccaaagtgtggcccttctgggg

SEQ ID NO: 60226 - DNA, 22 bp, synthetic construct
  misc_feature 1..22: note = chemically synthesized
  source 1..22: mol_type = other DNA
ctggggtttacatggtgtgccc

SEQ ID NO: 60227 - DNA, 22 bp, synthetic construct
  misc_feature 1..22: note = chemically synthesized
  source 1..22: mol_type = other DNA
tggggtttacatggtgtgccca

SEQ ID NO: 60228 - DNA, 22 bp, synthetic construct
  misc_feature 1..22: note = chemically synthesized
  source 1..22: mol_type = other DNA
gggtttacatggtgtgcccagg

SEQ ID NO: 60229 - DNA, 22 bp, synthetic construct
  misc_feature 1..22: note = chemically synthesized
  source 1..22: mol_type = other DNA
acatggtgtgcccagggaatag

SEQ ID NO: 60230 - DNA, 22 bp, synthetic construct
  misc_feature 1..22: note = chemically synthesized
  source 1..22: mol_type = other DNA
catggtgtgcccagggaatagc

SEQ ID NO: 60231 - DNA, 22 bp, synthetic construct
  misc_feature 1..22: note = chemically synthesized
  source 1..22: mol_type = other DNA
ggcttttttattcagataactg

SEQ ID NO: 60232 - DNA, 22 bp, synthetic construct
  misc_feature 1..22: note = chemically synthesized
  source 1..22: mol_type = other DNA
gcttttttattcagataactgg

SEQ ID NO: 60233 - DNA, 22 bp, synthetic construct
  misc_feature 1..22: note = chemically synthesized
  source 1..22: mol_type = other DNA
ttttattcagataactggagat

SEQ ID NO: 60234 - DNA, 22 bp, synthetic construct
  misc_feature 1..22: note = chemically synthesized
  source 1..22: mol_type = other DNA
tttattcagataactggagata

SEQ ID NO: 60235 - DNA, 22 bp, synthetic construct
  misc_feature 1..22: note = chemically synthesized
  source 1..22: mol_type = other DNA
ttattcagataactggagataa

SEQ ID NO: 60236 - DNA, 22 bp, synthetic construct
  misc_feature 1..22: note = chemically synthesized
  source 1..22: mol_type = other DNA
tattcagataactggagataat

SEQ ID NO: 60237 - DNA, 22 bp, synthetic construct
  misc_feature 1..22: note = chemically synthesized
  source 1..22: mol_type = other DNA
attcagataactggagataatg

SEQ ID NO: 60238 - DNA, 22 bp, synthetic construct
  misc_feature 1..22: note = chemically synthesized
  source 1..22: mol_type = other DNA
ttcagataactggagataatgg

SEQ ID NO: 60239 - DNA, 22 bp, synthetic construct
  misc_feature 1..22: note = chemically synthesized
  source 1..22: mol_type = other DNA
agataactggagataatggagt

SEQ ID NO: 60240 - DNA, 22 bp, synthetic construct
  misc_feature 1..22: note = chemically synthesized
  source 1..22: mol_type = other DNA
gagataatggagtagatggagt

SEQ ID NO: 60241 - DNA, 22 bp, synthetic construct
  misc_feature 1..22: note = chemically synthesized
  source 1..22: mol_type = other DNA
gggtggtgaaggaacgtgtacc

SEQ ID NO: 60242 - DNA, 22 bp, synthetic construct
  misc_feature 1..22: note = chemically synthesized
  source 1..22: mol_type = other DNA
tcaggggcagatggccctccag

SEQ ID NO: 60243 - DNA, 22 bp, synthetic construct
  misc_feature 1..22: note = chemically synthesized
  source 1..22: mol_type = other DNA
aggggcagatggccctccagaa

SEQ ID NO: 60244 - DNA, 22 bp, synthetic construct
  misc_feature 1..22: note = chemically synthesized
  source 1..22: mol_type = other DNA
cagaattggccagcccaacctc

SEQ ID NO: 60245 - DNA, 22 bp, synthetic construct
  misc_feature 1..22: note = chemically synthesized
  source 1..22: mol_type = other DNA
gccagcccaacctcttcctcac

SEQ ID NO: 60246 - DNA, 22 bp, synthetic construct
  misc_feature 1..22: note = chemically synthesized
  source 1..22: mol_type = other DNA
ttcctcaccaccctagttctat

SEQ ID NO: 60247 - DNA, 22 bp, synthetic construct
  misc_feature 1..22: note = chemically synthesized
  source 1..22: mol_type = other DNA
cctcaccaccctagttctattt

SEQ ID NO: 60248 - DNA, 22 bp, synthetic construct
  misc_feature 1..22: note = chemically synthesized
  source 1..22: mol_type = other DNA
ctcaccaccctagttctatttt

SEQ ID NO: 60249 - DNA, 22 bp, synthetic construct
  misc_feature 1..22: note = chemically synthesized
  source 1..22: mol_type = other DNA
accaccctagttctatttttaa

SEQ ID NO: 60250 - DNA, 22 bp, synthetic construct
  misc_feature 1..22: note = chemically synthesized
  source 1..22: mol_type = other DNA
gttctatttttaaagacacctc

SEQ ID NO: 60251 - DNA, 22 bp, synthetic construct
  misc_feature 1..22: note = chemically synthesized
  source 1..22: mol_type = other DNA
tatttttaaagacacctctcaa

SEQ ID NO: 60252 - DNA, 22 bp, synthetic construct
  misc_feature 1..22: note = chemically synthesized
  source 1..22: mol_type = other DNA
tttttaaagacacctctcaatc

SEQ ID NO: 60253 - DNA, 22 bp, synthetic construct
  misc_feature 1..22: note = chemically synthesized
  source 1..22: mol_type = other DNA
ttaaagacacctctcaatcgca

SEQ ID NO: 60254 - DNA, 22 bp, synthetic construct
  misc_feature 1..22: note = chemically synthesized
  source 1..22: mol_type = other DNA
taaagacacctctcaatcgcag

SEQ ID NO: 60255 - DNA, 22 bp, synthetic construct
  misc_feature 1..22: note = chemically synthesized
  source 1..22: mol_type = other DNA
aaagacacctctcaatcgcagg

SEQ ID NO: 60256 - DNA, 22 bp, synthetic construct
  misc_feature 1..22: note = chemically synthesized
  source 1..22: mol_type = other DNA
aagacacctctcaatcgcagga

SEQ ID NO: 60257 - DNA, 22 bp, synthetic construct
  misc_feature 1..22: note = chemically synthesized
  source 1..22: mol_type = other DNA
tcaatcgcaggaaatccttcct

SEQ ID NO: 60258 - DNA, 22 bp, synthetic construct
  misc_feature 1..22: note = chemically synthesized
  source 1..22: mol_type = other DNA
aatcgcaggaaatccttccttt

SEQ ID NO: 60259 - DNA, 22 bp, synthetic construct
  misc_feature 1..22: note = chemically synthesized
  source 1..22: mol_type = other DNA
ccttttgtctaccttcgatccc

SEQ ID NO: 60260 - DNA, 22 bp, synthetic construct
  misc_feature 1..22: note = chemically synthesized
  source 1..22: mol_type = other DNA
cttttgtctaccttcgatccct

SEQ ID NO: 60261 - DNA, 22 bp, synthetic construct
  misc_feature 1..22: note = chemically synthesized
  source 1..22: mol_type = other DNA
ttgtctaccttcgatcccttat

SEQ ID NO: 60262 - DNA, 22 bp, synthetic construct
  misc_feature 1..22: note = chemically synthesized
  source 1..22: mol_type = other DNA
tgtctaccttcgatcccttatg

SEQ ID NO: 60263 - DNA, 22 bp, synthetic construct
  misc_feature 1..22: note = chemically synthesized
  source 1..22: mol_type = other DNA
gtctaccttcgatcccttatgc

SEQ ID NO: 60264 - DNA, 22 bp, synthetic construct
  misc_feature 1..22: note = chemically synthesized
  source 1..22: mol_type = other DNA
tctaccttcgatcccttatgct

SEQ ID NO: 60265 - DNA, 22 bp, synthetic construct
  misc_feature 1..22: note = chemically synthesized
  source 1..22: mol_type = other DNA
ccttcgatcccttatgcttcat

SEQ ID NO: 60266 - DNA, 22 bp, synthetic construct
  misc_feature 1..22: note = chemically synthesized
  source 1..22: mol_type = other DNA
cgatcccttatgcttcatttta

SEQ ID NO: 60267 - DNA, 22 bp, synthetic construct
  misc_feature 1..22: note = chemically synthesized
  source 1..22: mol_type = other DNA
gatcccttatgcttcattttaa

SEQ ID NO: 60268 - DNA, 22 bp, synthetic construct
  misc_feature 1..22: note = chemically synthesized
  source 1..22: mol_type = other DNA
atgcttcattttaaacccattt

SEQ ID NO: 60269 - DNA, 22 bp, synthetic construct
  misc_feature 1..22: note = chemically synthesized
  source 1..22: mol_type = other DNA
tgcttcattttaaacccatttc

SEQ ID NO: 60270 - DNA, 22 bp, synthetic construct
  misc_feature 1..22: note = chemically synthesized
  source 1..22: mol_type = other DNA
cattttaaacccatttcctctt

SEQ ID NO: 60271 - DNA, 22 bp, synthetic construct
  misc_feature 1..22: note = chemically synthesized
  source 1..22: mol_type = other DNA
attttaaacccatttcctcttc

SEQ ID NO: 60272 - DNA, 22 bp, synthetic construct
  misc_feature 1..22: note = chemically synthesized
  source 1..22: mol_type = other DNA
taaacccatttcctcttcattc

SEQ ID NO: 60273 - DNA, 22 bp, synthetic construct
  misc_feature 1..22: note = chemically synthesized
  source 1..22: mol_type = other DNA
aaacccatttcctcttcattcc

SEQ ID NO: 60274 - DNA, 22 bp, synthetic construct
  misc_feature 1..22: note = chemically synthesized
  source 1..22: mol_type = other DNA
aacccatttcctcttcattcca

SEQ ID NO: 60275 - DNA, 22 bp, synthetic construct
  misc_feature 1..22: note = chemically synthesized
  source 1..22: mol_type = other DNA
cctcttcattccagagacgaca

SEQ ID NO: 60276 - DNA, 22 bp, synthetic construct
  misc_feature 1..22: note = chemically synthesized
  source 1..22: mol_type = other DNA
ctcttcattccagagacgacaa

SEQ ID NO: 60277 - DNA, 22 bp, synthetic construct
  misc_feature 1..22: note = chemically synthesized
  source 1..22: mol_type = other DNA
ttcattccagagacgacaaagt

SEQ ID NO: 60278 - DNA, 22 bp, synthetic construct
  misc_feature 1..22: note = chemically synthesized
  source 1..22: mol_type = other DNA
cattccagagacgacaaagtat

SEQ ID NO: 60279 - DNA, 22 bp, synthetic construct
  misc_feature 1..22: note = chemically synthesized
  source 1..22: mol_type = other DNA
attccagagacgacaaagtatc

SEQ ID NO: 60280 - DNA, 22 bp, synthetic construct
  misc_feature 1..22: note = chemically synthesized
  source 1..22: mol_type = other DNA
cagagacgacaaagtatctcat

SEQ ID NO: 60281 - DNA, 22 bp, synthetic construct
  misc_feature 1..22: note = chemically synthesized
  source 1..22: mol_type = other DNA
atcaccagctttgggctgaaat

SEQ ID NO: 60282 - DNA, 22 bp, synthetic construct
  misc_feature 1..22: note = chemically synthesized
  source 1..22: mol_type = other DNA
tgggctgaaatgcttcatattt

SEQ ID NO: 60283 - DNA, 22 bp, synthetic construct
  misc_feature 1..22: note = chemically synthesized
  source 1..22: mol_type = other DNA
gggctgaaatgcttcatatttt

SEQ ID NO: 60284 - DNA, 22 bp, synthetic construct
  misc_feature 1..22: note = chemically synthesized
  source 1..22: mol_type = other DNA
ggctgaaatgcttcatatttta

SEQ ID NO: 60285 - DNA, 22 bp, synthetic construct
  misc_feature 1..22: note = chemically synthesized
  source 1..22: mol_type = other DNA
aaatgcttcatattttacattc

SEQ ID NO: 60286 - DNA, 22 bp, synthetic construct
  misc_feature 1..22: note = chemically synthesized
  source 1..22: mol_type = other DNA
catattttacattcttcattcc

SEQ ID NO: 60287 - DNA, 22 bp, synthetic construct
  misc_feature 1..22: note = chemically synthesized
  source 1..22: mol_type = other DNA
atattttacattcttcattcca

SEQ ID NO: 60288 - DNA, 22 bp, synthetic construct
  misc_feature 1..22: note = chemically synthesized
  source 1..22: mol_type = other DNA
tacattcttcattccattctcc

SEQ ID NO: 60289 - DNA, 22 bp, synthetic construct
  misc_feature 1..22: note = chemically synthesized
  source 1..22: mol_type = other DNA
acattcttcattccattctccg

SEQ ID NO: 60290 - DNA, 22 bp, synthetic construct
  misc_feature 1..22: note = chemically synthesized
  source 1..22: mol_type = other DNA
cattcttcattccattctccgc

SEQ ID NO: 60291 - DNA, 22 bp, synthetic construct
  misc_feature 1..22: note = chemically synthesized
  source 1..22: mol_type = other DNA
ttcattccattctccgccactt

SEQ ID NO: 60292 - DNA, 22 bp, synthetic construct
  misc_feature 1..22: note = chemically synthesized
  source 1..22: mol_type = other DNA
cattccattctccgccacttct

SEQ ID NO: 60293 - DNA, 22 bp, synthetic construct
  misc_feature 1..22: note = chemically synthesized
  source 1..22: mol_type = other DNA
attccattctccgccacttctt

SEQ ID NO: 60294 - DNA, 22 bp, synthetic construct
  misc_feature 1..22: note = chemically synthesized
  source 1..22: mol_type = other DNA
cattctccgccacttcttcttc

SEQ ID NO: 60295 - DNA, 22 bp, synthetic construct
  misc_feature 1..22: note = chemically synthesized
  source 1..22: mol_type = other DNA
tccgccacttcttcttcctaaa

SEQ ID NO: 60296 - DNA, 22 bp, synthetic construct
  misc_feature 1..22: note = chemically synthesized
  source 1..22: mol_type = other DNA
cgccacttcttcttcctaaata

SEQ ID NO: 60297 - DNA, 22 bp, synthetic construct
  misc_feature 1..22: note = chemically synthesized
  source 1..22: mol_type = other DNA
cttcttcctaaataatctcttt

SEQ ID NO: 60298 - DNA, 22 bp, synthetic construct
  misc_feature 1..22: note = chemically synthesized
  source 1..22: mol_type = other DNA
ttcttcctaaataatctctttc

SEQ ID NO: 60299 - DNA, 22 bp, synthetic construct
  misc_feature 1..22: note = chemically synthesized
  source 1..22: mol_type = other DNA
cttcctaaataatctctttcct

SEQ ID NO: 60300 - DNA, 22 bp, synthetic construct
  misc_feature 1..22: note = chemically synthesized
  source 1..22: mol_type = other DNA
ttcctaaataatctctttcctg

SEQ ID NO: 60301 - DNA, 22 bp, synthetic construct
  misc_feature 1..22: note = chemically synthesized
  source 1..22: mol_type = other DNA
cctaaataatctctttcctgaa

SEQ ID NO: 60302 - DNA, 22 bp, synthetic construct
  misc_feature 1..22: note = chemically synthesized
  source 1..22: mol_type = other DNA
ctaaataatctctttcctgaac

SEQ ID NO: 60303 - DNA, 22 bp, synthetic construct
  misc_feature 1..22: note = chemically synthesized
  source 1..22: mol_type = other DNA
aataatctctttcctgaacctg

SEQ ID NO: 60304 - DNA, 22 bp, synthetic construct
  misc_feature 1..22: note = chemically synthesized
  source 1..22: mol_type = other DNA
tttcctgaacctgaactcatgg

SEQ ID NO: 60305 - DNA, 22 bp, synthetic construct
  misc_feature 1..22: note = chemically synthesized
  source 1..22: mol_type = other DNA
tcctgaacctgaactcatggat

SEQ ID NO: 60306 - DNA, 22 bp, synthetic construct
  misc_feature 1..22: note = chemically synthesized
  source 1..22: mol_type = other DNA
cctgaacctgaactcatggatc

SEQ ID NO: 60307 - DNA, 22 bp, synthetic construct
  misc_feature 1..22: note = chemically synthesized
  source 1..22: mol_type = other DNA
ctgaacctgaactcatggatct

SEQ ID NO: 60308 - DNA, 22 bp, synthetic construct
  misc_feature 1..22: note = chemically synthesized
  source 1..22: mol_type = other DNA
aacctgaactcatggatctatt

SEQ ID NO: 60309 - DNA, 22 bp, synthetic construct
  misc_feature 1..22: note = chemically synthesized
  source 1..22: mol_type = other DNA
aactcatggatctattatcttg

SEQ ID NO: 60310 - DNA, 22 bp, synthetic construct
  misc_feature 1..22: note = chemically synthesized
  source 1..22: mol_type = other DNA
atggatctattatcttgtaacc

SEQ ID NO: 60311 - DNA, 22 bp, synthetic construct
  misc_feature 1..22: note = chemically synthesized
  source 1..22: mol_type = other DNA
ttatcttgtaacccatttattg

SEQ ID NO: 60312 - DNA, 22 bp, synthetic construct
  misc_feature 1..22: note = chemically synthesized
  source 1..22: mol_type = other DNA
tcttgtaacccatttattgttt

SEQ ID NO: 60313 - DNA, 22 bp, synthetic construct
  misc_feature 1..22: note = chemically synthesized
  source 1..22: mol_type = other DNA
gtaacccatttattgtttctat

SEQ ID NO: 60314 - DNA, 22 bp, synthetic construct
  misc_feature 1..22: note = chemically synthesized
  source 1..22: mol_type = other DNA
taacccatttattgtttctatg

SEQ ID NO: 60315 - DNA, 22 bp, synthetic construct
  misc_feature 1..22: note = chemically synthesized
  source 1..22: mol_type = other DNA
attgtttctatgcctctcttta

SEQ ID NO: 60316 - DNA, 22 bp, synthetic construct
  misc_feature 1..22: note = chemically synthesized
  source 1..22: mol_type = other DNA
ttgtttctatgcctctctttag

SEQ ID NO: 60317 - DNA, 22 bp, synthetic construct
  misc_feature 1..22: note = chemically synthesized
  source 1..22: mol_type = other DNA
tttctatgcctctctttagaat

SEQ ID NO: 60318 - DNA, 22 bp, synthetic construct
  misc_feature 1..22: note = chemically synthesized
  source 1..22: mol_type = other DNA
ctatgcctctctttagaatctg

SEQ ID NO: 60319 - DNA, 22 bp, synthetic construct
  misc_feature 1..22: note = chemically synthesized
  source 1..22: mol_type = other DNA
tatgcctctctttagaatctgc

SEQ ID NO: 60320 - DNA, 22 bp, synthetic construct
  misc_feature 1..22: note = chemically synthesized
  source 1..22: mol_type = other DNA
tgcctctctttagaatctgctg

SEQ ID NO: 60321 - DNA, 22 bp, synthetic construct
  misc_feature 1..22: note = chemically synthesized
  source 1..22: mol_type = other DNA
tctttagaatctgctggttttc

SEQ ID NO: 60322 - DNA, 22 bp, synthetic construct
  misc_feature 1..22: note = chemically synthesized
  source 1..22: mol_type = other DNA
tttagaatctgctggttttcca

SEQ ID NO: 60323 - DNA, 22 bp, synthetic construct
  misc_feature 1..22: note = chemically synthesized
  source 1..22: mol_type = other DNA
tagaatctgctggttttccagc

SEQ ID NO: 60324 - DNA, 22 bp, synthetic construct
  misc_feature 1..22: note = chemically synthesized
  source 1..22: mol_type = other DNA
agaatctgctggttttccagct

SEQ ID NO: 60325 - DNA, 22 bp, synthetic construct
  misc_feature 1..22: note = chemically synthesized
  source 1..22: mol_type = other DNA
gaatctgctggttttccagctc

SEQ ID NO: 60326 - DNA, 22 bp, synthetic construct
  misc_feature 1..22: note = chemically synthesized
  source 1..22: mol_type = other DNA
ctggttttccagctcttttact

SEQ ID NO: 60327 - DNA, 22 bp, synthetic construct
  misc_feature 1..22: note = chemically synthesized
  source 1..22: mol_type = other DNA
gttttccagctcttttactcaa

SEQ ID NO: 60328 - DNA, 22 bp, synthetic construct
  misc_feature 1..22: note = chemically synthesized
  source 1..22: mol_type = other DNA
tccagctcttttactcaaacat

SEQ ID NO: 60329 - DNA, 22 bp, synthetic construct
  misc_feature 1..22: note = chemically synthesized
  source 1..22: mol_type = other DNA
ccagctcttttactcaaacatt

SEQ ID NO: 60330 - DNA, 22 bp, synthetic construct
  misc_feature 1..22: note = chemically synthesized
  source 1..22: mol_type = other DNA
cagctcttttactcaaacatta

SEQ ID NO: 60331 - DNA, 22 bp, synthetic construct
  misc_feature 1..22: note = chemically synthesized
  source 1..22: mol_type = other DNA
ttttactcaaacattagtctga

SEQ ID NO: 60332 - DNA, 22 bp, synthetic construct
  misc_feature 1..22: note = chemically synthesized
  source 1..22: mol_type = other DNA
ttactcaaacattagtctgata

SEQ ID NO: 60333 - DNA, 22 bp, synthetic construct
  misc_feature 1..22: note = chemically synthesized
  source 1..22: mol_type = other DNA
tactcaaacattagtctgataa

SEQ ID NO: 60334 - DNA, 22 bp, synthetic construct
  misc_feature 1..22: note = chemically synthesized
  source 1..22: mol_type = other DNA
actcaaacattagtctgataac

SEQ ID NO: 60335 - DNA, 22 bp, synthetic construct
  misc_feature 1..22: note = chemically synthesized
  source 1..22: mol_type = other DNA
ctcaaacattagtctgataact

SEQ ID NO: 60336 - DNA, 22 bp, synthetic construct
  misc_feature 1..22: note = chemically synthesized
  source 1..22: mol_type = other DNA
aaacattagtctgataactaca

SEQ ID NO: 60337 - DNA, 22 bp, synthetic construct
  misc_feature 1..22: note = chemically synthesized
  source 1..22: mol_type = other DNA
gtctgataactacagagtccaa

SEQ ID NO: 60338 - DNA, 22 bp, synthetic construct
  misc_feature 1..22: note = chemically synthesized
  source 1..22: mol_type = other DNA
ataactacagagtccaatggca

SEQ ID NO: 60339 - DNA, 22 bp, synthetic construct
  misc_feature 1..22: note = chemically synthesized
  source 1..22: mol_type = other DNA
cagagtccaatggcaagatatc

SEQ ID NO: 60340 - DNA, 22 bp, synthetic construct
  misc_feature 1..22: note = chemically synthesized
  source 1..22: mol_type = other DNA
agtgttttccacattctttagt

SEQ ID NO: 60341 - DNA, 22 bp, synthetic construct
  misc_feature 1..22: note = chemically synthesized
  source 1..22: mol_type = other DNA
gtgttttccacattctttagtc

SEQ ID NO: 60342 - DNA, 22 bp, synthetic construct
  misc_feature 1..22: note = chemically synthesized
  source 1..22: mol_type = other DNA
tccacattctttagtcttatgt

SEQ ID NO: 60343 - DNA, 22 bp, synthetic construct
  misc_feature 1..22: note = chemically synthesized
  source 1..22: mol_type = other DNA
ccacattctttagtcttatgtc

SEQ ID NO: 60344 - DNA, 22 bp, synthetic construct
  misc_feature 1..22: note = chemically synthesized
  source 1..22: mol_type = other DNA
cacattctttagtcttatgtct

SEQ ID NO: 60345 - DNA, 22 bp, synthetic construct
  misc_feature 1..22: note = chemically synthesized
  source 1..22: mol_type = other DNA
tttagtcttatgtctgcactct

SEQ ID NO: 60346 - DNA, 22 bp, synthetic construct
  misc_feature 1..22: note = chemically synthesized
  source 1..22: mol_type = other DNA
tagtcttatgtctgcactctta

SEQ ID NO: 60347 - DNA, 22 bp, synthetic construct
  misc_feature 1..22: note = chemically synthesized
  source 1..22: mol_type = other DNA
agtcttatgtctgcactcttat

SEQ ID NO: 60348 - DNA, 22 bp, synthetic construct
  misc_feature 1..22: note = chemically synthesized
  source 1..22: mol_type = other DNA
gtcttatgtctgcactcttatg

SEQ ID NO: 60349 - DNA, 22 bp, synthetic construct
  misc_feature 1..22: note = chemically synthesized
  source 1..22: mol_type = other DNA
atgtctgcactcttatgtcctg

SEQ ID NO: 60350 - DNA, 22 bp, synthetic construct
  misc_feature 1..22: note = chemically synthesized
  source 1..22: mol_type = other DNA
tgtctgcactcttatgtcctgc

SEQ ID NO: 60351 - DNA, 22 bp, synthetic construct
  misc_feature 1..22: note = chemically synthesized
  source 1..22: mol_type = other DNA
cactcttatgtcctgcttgctt

SEQ ID NO: 60352 - DNA, 22 bp, synthetic construct
  misc_feature 1..22: note = chemically synthesized
  source 1..22: mol_type = other DNA
ttatgtcctgcttgctttttta

SEQ ID NO: 60353 - DNA, 22 bp, synthetic construct
  misc_feature 1..22: note = chemically synthesized
  source 1..22: mol_type = other DNA
atgtcctgcttgcttttttaaa

SEQ ID NO: 60354 - DNA, 22 bp, synthetic construct
  misc_feature 1..22: note = chemically synthesized
  source 1..22: mol_type = other DNA
tgtcctgcttgcttttttaaaa

SEQ ID NO: 60355 - DNA, 22 bp, synthetic construct
  misc_feature 1..22: note = chemically synthesized
  source 1..22: mol_type = other DNA
cttgcttttttaaaaaccagtg

SEQ ID NO: 60356 - DNA, 22 bp, synthetic construct
  misc_feature 1..22: note = chemically synthesized
  source 1..22: mol_type = other DNA
gcttttttaaaaaccagtgctt

SEQ ID NO: 60357 - DNA, 22 bp, synthetic construct
  misc_feature 1..22: note = chemically synthesized
  source 1..22: mol_type = other DNA
cttttttaaaaaccagtgcttc

SEQ ID NO: 60358 - DNA, 22 bp, synthetic construct
  misc_feature 1..22: note = chemically synthesized
  source 1..22: mol_type = other DNA
ttttaaaaaccagtgcttcatt

SEQ ID NO: 60359 - DNA, 22 bp, synthetic construct
  misc_feature 1..22: note = chemically synthesized
  source 1..22: mol_type = other DNA
tttaaaaaccagtgcttcattg

SEQ ID NO: 60360 - DNA, 22 bp, synthetic construct
  misc_feature 1..22: note = chemically synthesized
  source 1..22: mol_type = other DNA
ttaaaaaccagtgcttcattga

SEQ ID NO: 60361 - DNA, 22 bp, synthetic construct
  misc_feature 1..22: note = chemically synthesized
  source 1..22: mol_type = other DNA
taaaaaccagtgcttcattgat

SEQ ID NO: 60362 - DNA, 22 bp, synthetic construct
  misc_feature 1..22: note = chemically synthesized
  source 1..22: mol_type = other DNA
aaaaaccagtgcttcattgatg

SEQ ID NO: 60363 - DNA, 22 bp, synthetic construct
  misc_feature 1..22: note = chemically synthesized
  source 1..22: mol_type = other DNA
aaaaccagtgcttcattgatga

SEQ ID NO: 60364 - DNA, 22 bp, synthetic construct
  misc_feature 1..22: note = chemically synthesized
  source 1..22: mol_type = other DNA
cattgatgactcatgctcagct

SEQ ID NO: 60365 - DNA, 22 bp, synthetic construct
  misc_feature 1..22: note = chemically synthesized
  source 1..22: mol_type = other DNA
attgatgactcatgctcagctt

SEQ ID NO: 60366 - DNA, 22 bp, synthetic construct
  misc_feature 1..22: note = chemically synthesized
  source 1..22: mol_type = other DNA
atgactcatgctcagcttggtg

SEQ ID NO: 60367 - DNA, 22 bp, synthetic construct
  misc_feature 1..22: note = chemically synthesized
  source 1..22: mol_type = other DNA
atgctcagcttggtgtccacta

SEQ ID NO: 60368 - DNA, 22 bp, synthetic construct
  misc_feature 1..22: note = chemically synthesized
  source 1..22: mol_type = other DNA
agcttggtgtccactaggaatg

SEQ ID NO: 60369 - DNA, 22 bp, synthetic construct
  misc_feature 1..22: note = chemically synthesized
  source 1..22: mol_type = other DNA
ggtgtccactaggaatgctaga

SEQ ID NO: 60370 - DNA, 22 bp, synthetic construct
  misc_feature 1..22: note = chemically synthesized
  source 1..22: mol_type = other DNA
gtgtccactaggaatgctagat

SEQ ID NO: 60371 - DNA, 22 bp, synthetic construct
  misc_feature 1..22: note = chemically synthesized
  source 1..22: mol_type = other DNA
ggaatgctagatctttgtcagc

SEQ ID NO: 60372 - DNA, 22 bp, synthetic construct
  misc_feature 1..22: note = chemically synthesized
  source 1..22: mol_type = other DNA
gatctttgtcagccatctttga

SEQ ID NO: 60373 - DNA, 22 bp, synthetic construct
  misc_feature 1..22: note = chemically synthesized
  source 1..22: mol_type = other DNA
tgtcagccatctttgagggcag

SEQ ID NO: 60374 - DNA, 22 bp, synthetic construct
  misc_feature 1..22: note = chemically synthesized
  source 1..22: mol_type = other DNA
gtcagccatctttgagggcagt

SEQ ID NO: 60375 - DNA, 22 bp, synthetic construct
  misc_feature 1..22: note = chemically synthesized
  source 1..22: mol_type = other DNA
tcagccatctttgagggcagtt

SEQ ID NO: 60376 - DNA, 22 bp, synthetic construct
  misc_feature 1..22: note = chemically synthesized
  source 1..22: mol_type = other DNA
tgagggcagttaaactttcact

SEQ ID NO: 60377 - DNA, 22 bp, synthetic construct
  misc_feature 1..22: note = chemically synthesized
  source 1..22: mol_type = other DNA
gagggcagttaaactttcactc

SEQ ID NO: 60378 - DNA, 22 bp, synthetic construct
  misc_feature 1..22: note = chemically synthesized
  source 1..22: mol_type = other DNA
agggcagttaaactttcactcc

SEQ ID NO: 60379 - DNA, 22 bp, synthetic construct
  misc_feature 1..22: note = chemically synthesized
  source 1..22: mol_type = other DNA
aactttcactcccagttgtcct

SEQ ID NO: 60380 - DNA, 22 bp, synthetic construct
  misc_feature 1..22: note = chemically synthesized
  source 1..22: mol_type = other DNA
tcactcccagttgtcctgatgc

SEQ ID NO: 60381 - DNA, 22 bp, synthetic construct
  misc_feature 1..22: note = chemically synthesized
  source 1..22: mol_type = other DNA
cactcccagttgtcctgatgcc

SEQ ID NO: 60382 - DNA, 22 bp, synthetic construct
  misc_feature 1..22: note = chemically synthesized
  source 1..22: mol_type = other DNA
actcccagttgtcctgatgcca

SEQ ID NO: 60383 - DNA, 22 bp, synthetic construct
  misc_feature 1..22: note = chemically synthesized
  source 1..22: mol_type = other DNA
ccagttgtcctgatgccacatt

SEQ ID NO: 60384 - DNA, 22 bp, synthetic construct
  misc_feature 1..22: note = chemically synthesized
  source 1..22: mol_type = other DNA
tcctgatgccacatttctccca

SEQ ID NO: 60385 - DNA, 22 bp, synthetic construct
  misc_feature 1..22: note = chemically synthesized
  source 1..22: mol_type = other DNA
atgccacatttctcccatccca

SEQ ID NO: 60386 - DNA, 22 bp, synthetic construct
  misc_feature 1..22: note = chemically synthesized
  source 1..22: mol_type = other DNA
ctcccatcccaggtgcccctct

SEQ ID NO: 60387 - DNA, 22 bp, synthetic construct
  misc_feature 1..22: note = chemically synthesized
  source 1..22: mol_type = other DNA
tcccatcccaggtgcccctctc

SEQ ID NO: 60388 - DNA, 22 bp, synthetic construct
  misc_feature 1..22: note = chemically synthesized
  source 1..22: mol_type = other DNA
ccatcccaggtgcccctctctg

SEQ ID NO: 60389 - DNA, 22 bp, synthetic construct
  misc_feature 1..22: note = chemically synthesized
  source 1..22: mol_type = other DNA
tctgtccttgtccatattgagc

SEQ ID NO: 60390 - DNA, 22 bp, synthetic construct
  misc_feature 1..22: note = chemically synthesized
  source 1..22: mol_type = other DNA
tgtccttgtccatattgagctt

SEQ ID NO: 60391 - DNA, 22 bp, synthetic construct
  misc_feature 1..22: note = chemically synthesized
  source 1..22: mol_type = other DNA
tccttgtccatattgagcttag

SEQ ID NO: 60392 - DNA, 22 bp, synthetic construct
  misc_feature 1..22: note = chemically synthesized
  source 1..22: mol_type = other DNA
gtccatattgagcttagctctc

SEQ ID NO: 60393 - DNA, 22 bp, synthetic construct
  misc_feature 1..22: note = chemically synthesized
  source 1..22: mol_type = other DNA
tccatattgagcttagctctcc

SEQ ID NO: 60394 - DNA, 22 bp, synthetic construct
  misc_feature 1..22: note = chemically synthesized
  source 1..22: mol_type = other DNA
agcttagctctccactcctgac

SEQ ID NO: 60395 - DNA, 22 bp, synthetic construct
  misc_feature 1..22: note = chemically synthesized
  source 1..22: mol_type = other DNA
agctctccactcctgacacgag

SEQ ID NO: 60396 - DNA, 22 bp, synthetic construct
  misc_feature 1..22: note = chemically synthesized
  source 1..22: mol_type = other DNA
gctctccactcctgacacgagt

SEQ ID NO: 60397 - DNA, 22 bp, synthetic construct
  misc_feature 1..22: note = chemically synthesized
  source 1..22: mol_type = other DNA
tccactcctgacacgagttccc

SEQ ID NO: 60398 - DNA, 22 bp, synthetic construct
  misc_feature 1..22: note = chemically synthesized
  source 1..22: mol_type = other DNA
cactcctgacacgagttccctg

SEQ ID NO: 60399 - DNA, 22 bp, synthetic construct
  misc_feature 1..22: note = chemically synthesized
  source 1..22: mol_type = other DNA
ctgacacgagttccctgacttc

SEQ ID NO: 60400 - DNA, 22 bp, synthetic construct
  misc_feature 1..22: note = chemically synthesized
  source 1..22: mol_type = other DNA
acacgagttccctgacttcctc

SEQ ID NO: 60401 - DNA, 22 bp, synthetic construct
  misc_feature 1..22: note = chemically synthesized
  source 1..22: mol_type = other DNA
cctgacttcctctccacttccc

SEQ ID NO: 60402 - DNA, 22 bp, synthetic construct
  misc_feature 1..22: note = chemically synthesized
  source 1..22: mol_type = other DNA
acttcctctccacttccccgga

SEQ ID NO: 60403 - DNA, 22 bp, synthetic construct
  misc_feature 1..22: note = chemically synthesized
  source 1..22: mol_type = other DNA
cctctccacttccccggatgac

SEQ ID NO: 60404 - DNA, 22 bp, synthetic construct
  misc_feature 1..22: note = chemically synthesized
  source 1..22: mol_type = other DNA
ctctccacttccccggatgacg

SEQ ID NO: 60405 - DNA, 22 bp, synthetic construct
  misc_feature 1..22: note = chemically synthesized
  source 1..22: mol_type = other DNA
tccacttccccggatgacggtg

SEQ ID NO: 60406 - DNA, 22 bp, synthetic construct
  misc_feature 1..22: note = chemically synthesized
  source 1..22: mol_type = other DNA
cacttccccggatgacggtgag

SEQ ID NO: 60407 - DNA, 22 bp, synthetic construct
  misc_feature 1..22: note = chemically synthesized
  source 1..22: mol_type = other DNA
ccccggatgacggtgagttacg

SEQ ID NO: 60408 - DNA, 22 bp, synthetic construct
  misc_feature 1..22: note = chemically synthesized
  source 1..22: mol_type = other DNA
cccggatgacggtgagttacga

SEQ ID NO: 60409 - DNA, 22 bp, synthetic construct
  misc_feature 1..22: note = chemically synthesized
  source 1..22: mol_type = other DNA
cgatcttgtctcctaaggtgcc

SEQ ID NO: 60410 - DNA, 22 bp, synthetic construct
  misc_feature 1..22: note = chemically synthesized
  source 1..22: mol_type = other DNA
gtctcctaaggtgccccctccc

SEQ ID NO: 60411 - DNA, 22 bp, synthetic construct
  misc_feature 1..22: note = chemically synthesized
  source 1..22: mol_type = other DNA
tctcctaaggtgccccctccct

SEQ ID NO: 60412 - DNA, 22 bp, synthetic construct
  misc_feature 1..22: note = chemically synthesized
  source 1..22: mol_type = other DNA
ctaaggtgccccctccctcttg

SEQ ID NO: 60413 - DNA, 22 bp, synthetic construct
  misc_feature 1..22: note = chemically synthesized
  source 1..22: mol_type = other DNA
aggtgccccctccctcttggct

SEQ ID NO: 60414 - DNA, 22 bp, synthetic construct
  misc_feature 1..22: note = chemically synthesized
  source 1..22: mol_type = other DNA
cctcttggctcctctcccagtg

SEQ ID NO: 60415 - DNA, 22 bp, synthetic construct
  misc_feature 1..22: note = chemically synthesized
  source 1..22: mol_type = other DNA
ttggctcctctcccagtgacga

SEQ ID NO: 60416 - DNA, 22 bp, synthetic construct
  misc_feature 1..22: note = chemically synthesized
  source 1..22: mol_type = other DNA
ggctcctctcccagtgacgact

SEQ ID NO: 60417 - DNA, 22 bp, synthetic construct
  misc_feature 1..22: note = chemically synthesized
  source 1..22: mol_type = other DNA
gctcctctcccagtgacgactt

SEQ ID NO: 60418 - DNA, 22 bp, synthetic construct
  misc_feature 1..22: note = chemically synthesized
  source 1..22: mol_type = other DNA
ctctcccagtgacgacttcatg

SEQ ID NO: 60419 - DNA, 22 bp, synthetic construct
  misc_feature 1..22: note = chemically synthesized
  source 1..22: mol_type = other DNA
tcccagtgacgacttcatggag

SEQ ID NO: 60420 - DNA, 22 bp, synthetic construct
  misc_feature 1..22: note = chemically synthesized
  source 1..22: mol_type = other DNA
ccagtgacgacttcatggaggc

SEQ ID NO: 60421 - DNA, 22 bp, synthetic construct
  misc_feature 1..22: note = chemically synthesized
  source 1..22: mol_type = other DNA
catggaggctgagaaatatagt

SEQ ID NO: 60422 - DNA, 22 bp, synthetic construct
  misc_feature 1..22: note = chemically synthesized
  source 1..22: mol_type = other DNA
atggaggctgagaaatatagtg

SEQ ID NO: 60423 - DNA, 22 bp, synthetic construct
  misc_feature 1..22: note = chemically synthesized
  source 1..22: mol_type = other DNA
agaaatatagtgagtggccttt

SEQ ID NO: 60424 - DNA, 22 bp, synthetic construct
  misc_feature 1..22: note = chemically synthesized
  source 1..22: mol_type = other DNA
tcttgcctcacttactgctcgg

SEQ ID NO: 60425 - DNA, 22 bp, synthetic construct
  misc_feature 1..22: note = chemically synthesized
  source 1..22: mol_type = other DNA
cttgcctcacttactgctcggt

SEQ ID NO: 60426 - DNA, 22 bp, synthetic construct
  misc_feature 1..22: note = chemically synthesized
  source 1..22: mol_type = other DNA
ttgcctcacttactgctcggta

SEQ ID NO: 60427 - DNA, 22 bp, synthetic construct
  misc_feature 1..22: note = chemically synthesized
  source 1..22: mol_type = other DNA
gcctcacttactgctcggtaag

SEQ ID NO: 60428 - DNA, 22 bp, synthetic construct
  misc_feature 1..22: note = chemically synthesized
  source 1..22: mol_type = other DNA
cctcacttactgctcggtaagt

SEQ ID NO: 60429 - DNA, 22 bp, synthetic construct
  misc_feature 1..22: note = chemically synthesized
  source 1..22: mol_type = other DNA
acttactgctcggtaagttagc

SEQ ID NO: 60430 - DNA, 22 bp, synthetic construct
  misc_feature 1..22: note = chemically synthesized
  source 1..22: mol_type = other DNA
actgctcggtaagttagctcag

SEQ ID NO: 60431 - DNA, 22 bp, synthetic construct
  misc_feature 1..22: note = chemically synthesized
  source 1..22: mol_type = other DNA
ctgctcggtaagttagctcagg

SEQ ID NO: 60432 - DNA, 22 bp, synthetic construct
  misc_feature 1..22: note = chemically synthesized
  source 1..22: mol_type = other DNA
ctcggtaagttagctcaggggg

SEQ ID NO: 60433 - DNA, 22 bp, synthetic construct
  misc_feature 1..22: note = chemically synthesized
  source 1..22: mol_type = other DNA
ggtaagttagctcagggggaga

SEQ ID NO: 60434 - DNA, 22 bp, synthetic construct
  misc_feature 1..22: note = chemically synthesized
  source 1..22: mol_type = other DNA
gctcagggggagagctgttcat

SEQ ID NO: 60435 - DNA, 22 bp, synthetic construct
  misc_feature 1..22: note = chemically synthesized
  source 1..22: mol_type = other DNA
agggggagagctgttcataact

SEQ ID NO: 60436 - DNA, 22 bp, synthetic construct
  misc_feature 1..22: note = chemically synthesized
  source 1..22: mol_type = other DNA
ttcataactttgcactgacatc

SEQ ID NO: 60437 - DNA, 22 bp, synthetic construct
  misc_feature 1..22: note = chemically synthesized
  source 1..22: mol_type = other DNA
ataactttgcactgacatctgg

SEQ ID NO: 60438 - DNA, 22 bp, synthetic construct
  misc_feature 1..22: note = chemically synthesized
  source 1..22: mol_type = other DNA
tgcactgacatctggagaacaa

SEQ ID NO: 60439 - DNA, 22 bp, synthetic construct
  misc_feature 1..22: note = chemically synthesized
  source 1..22: mol_type = other DNA
gcactgacatctggagaacaaa

SEQ ID NO: 60440 - DNA, 22 bp, synthetic construct
  misc_feature 1..22: note = chemically synthesized
  source 1..22: mol_type = other DNA
cactgacatctggagaacaaag

SEQ ID NO: 60441 - DNA, 22 bp, synthetic construct
  misc_feature 1..22: note = chemically synthesized
  source 1..22: mol_type = other DNA
acatctggagaacaaaggtttt

SEQ ID NO: 60442 - DNA, 22 bp, synthetic construct
  misc_feature 1..22: note = chemically synthesized
  source 1..22: mol_type = other DNA
gagaacaaaggttttggaagag

SEQ ID NO: 60443 - DNA, 22 bp, synthetic construct
  misc_feature 1..22: note = chemically synthesized
  source 1..22: mol_type = other DNA
tggaagagcggagcccagattc

SEQ ID NO: 60444 - DNA, 22 bp, synthetic construct
  misc_feature 1..22: note = chemically synthesized
  source 1..22: mol_type = other DNA
ggaagagcggagcccagattcc

SEQ ID NO: 60445 - DNA, 22 bp, synthetic construct
  misc_feature 1..22: note = chemically synthesized
  source 1..22: mol_type = other DNA
gaagagcggagcccagattccc

SEQ ID NO: 60446 - DNA, 22 bp, synthetic construct
  misc_feature 1..22: note = chemically synthesized
  source 1..22: mol_type = other DNA
cctgtgagccagcagagccaag

SEQ ID NO: 60447 - DNA, 22 bp, synthetic construct
  misc_feature 1..22: note = chemically synthesized
  source 1..22: mol_type = other DNA
tgagccagcagagccaagtctt

SEQ ID NO: 60448 - DNA, 22 bp, synthetic construct
  misc_feature 1..22: note = chemically synthesized
  source 1..22: mol_type = other DNA
ttttgagtttccagcaaaacct

SEQ ID NO: 60449 - DNA, 22 bp, synthetic construct
  misc_feature 1..22: note = chemically synthesized
  source 1..22: mol_type = other DNA
tttgagtttccagcaaaacctg

SEQ ID NO: 60450 - DNA, 22 bp, synthetic construct
  misc_feature 1..22: note = chemically synthesized
  source 1..22: mol_type = other DNA
ttgagtttccagcaaaacctgt

SEQ ID NO: 60451 - DNA, 22 bp, synthetic construct
  misc_feature 1..22: note = chemically synthesized
  source 1..22: mol_type = other DNA
tgagtttccagcaaaacctgtg

SEQ ID NO: 60452 - DNA, 22 bp, synthetic construct
  misc_feature 1..22: note = chemically synthesized
  source 1..22: mol_type = other DNA
gagtttccagcaaaacctgtgt

SEQ ID NO: 60453 - DNA, 22 bp, synthetic construct
  misc_feature 1..22: note = chemically synthesized
  source 1..22: mol_type = other DNA
agtttccagcaaaacctgtgtt

SEQ ID NO: 60454 - DNA, 22 bp, synthetic construct
  misc_feature 1..22: note = chemically synthesized
  source 1..22: mol_type = other DNA
ccagcaaaacctgtgttttaat

SEQ ID NO: 60455 - DNA, 22 bp, synthetic construct
  misc_feature 1..22: note = chemically synthesized
  source 1..22: mol_type = other DNA
cagcaaaacctgtgttttaata

SEQ ID NO: 60456 - DNA, 22 bp, synthetic construct
  misc_feature 1..22: note = chemically synthesized
  source 1..22: mol_type = other DNA
tgttttaataataggagtgggt

SEQ ID NO: 60457 - DNA, 22 bp, synthetic construct
  misc_feature 1..22: note = chemically synthesized
  source 1..22: mol_type = other DNA
taataataggagtgggtcattg

SEQ ID NO: 60458 - DNA, 22 bp, synthetic construct
  misc_feature 1..22: note = chemically synthesized
  source 1..22: mol_type = other DNA
aataataggagtgggtcattgt

SEQ ID NO: 60459 - DNA, 22 bp, synthetic construct
  misc_feature 1..22: note = chemically synthesized
  source 1..22: mol_type = other DNA
ataataggagtgggtcattgtg

SEQ ID NO: 60460 - DNA, 22 bp, synthetic construct
  misc_feature 1..22: note = chemically synthesized
  source 1..22: mol_type = other DNA
tgtttaatagtacaacaaaacc

SEQ ID NO: 60461 - DNA, 22 bp, synthetic construct
  misc_feature 1..22: note = chemically synthesized
  source 1..22: mol_type = other DNA
aatagtacaacaaaacctaagt

SEQ ID NO: 60462 - DNA, 22 bp, synthetic construct
  misc_feature 1..22: note = chemically synthesized
  source 1..22: mol_type = other DNA
atagtacaacaaaacctaagtg

SEQ ID NO: 60463 - DNA, 22 bp, synthetic construct
  misc_feature 1..22: note = chemically synthesized
  source 1..22: mol_type = other DNA
agtgcacataataagcacatct

SEQ ID NO: 60464 - DNA, 22 bp, synthetic construct
  misc_feature 1..22: note = chemically synthesized
  source 1..22: mol_type = other DNA
ttctgtgtgctggggtgaggag

SEQ ID NO: 60465 - DNA, 22 bp, synthetic construct
  misc_feature 1..22: note = chemically synthesized
  source 1..22: mol_type = other DNA
tctgtgtgctggggtgaggaga

SEQ ID NO: 60466 - DNA, 22 bp, synthetic construct
  misc_feature 1..22: note = chemically synthesized
  source 1..22: mol_type = other DNA
ctgtgtgctggggtgaggagag

SEQ ID NO: 60467 - DNA, 22 bp, synthetic construct
  misc_feature 1..22: note = chemically synthesized
  source 1..22: mol_type = other DNA
tgtgtgctggggtgaggagagg

SEQ ID NO: 60468 - DNA, 22 bp, synthetic construct
  misc_feature 1..22: note = chemically synthesized
  source 1..22: mol_type = other DNA
tgtgctggggtgaggagaggtg

SEQ ID NO: 60469 - DNA, 22 bp, synthetic construct
  misc_feature 1..22: note = chemically synthesized
  source 1..22: mol_type = other DNA
gggtgaggagaggtgacagtga

SEQ ID NO: 60470 - DNA, 22 bp, synthetic construct
  misc_feature 1..22: note = chemically synthesized
  source 1..22: mol_type = other DNA
cagacatgggaaagcatcttag

SEQ ID NO: 60471 - DNA, 22 bp, synthetic construct
  misc_feature 1..22: note = chemically synthesized
  source 1..22: mol_type = other DNA
agagcacccaaagctggcatga

SEQ ID NO: 60472 - DNA, 22 bp, synthetic construct
  misc_feature 1..22: note = chemically synthesized
  source 1..22: mol_type = other DNA
gagcacccaaagctggcatgag

SEQ ID NO: 60473 - DNA, 22 bp, synthetic construct
  misc_feature 1..22: note = chemically synthesized
  source 1..22: mol_type = other DNA
gcatgagtcatcacaggcttat

SEQ ID NO: 60474 - DNA, 22 bp, synthetic construct
  misc_feature 1..22: note = chemically synthesized
  source 1..22: mol_type = other DNA
atggccacaaggctagattttc

SEQ ID NO: 60475 - DNA, 22 bp, synthetic construct
  misc_feature 1..22: note = chemically synthesized
  source 1..22: mol_type = other DNA
tggccacaaggctagattttca

SEQ ID NO: 60476 - DNA, 22 bp, synthetic construct
  misc_feature 1..22: note = chemically synthesized
  source 1..22: mol_type = other DNA
gattttcaatccctgcttccct

SEQ ID NO: 60477 - DNA, 22 bp, synthetic construct
  misc_feature 1..22: note = chemically synthesized
  source 1..22: mol_type = other DNA
tcaatccctgcttccctttttc

SEQ ID NO: 60478 - DNA, 22 bp, synthetic construct
  misc_feature 1..22: note = chemically synthesized
  source 1..22: mol_type = other DNA
caatccctgcttccctttttca

SEQ ID NO: 60479 - DNA, 22 bp, synthetic construct
  misc_feature 1..22: note = chemically synthesized
  source 1..22: mol_type = other DNA
aatccctgcttccctttttcat

SEQ ID NO: 60480 - DNA, 22 bp, synthetic construct
  misc_feature 1..22: note = chemically synthesized
  source 1..22: mol_type = other DNA
cttccctttttcataacccagt

SEQ ID NO: 60481 - DNA, 22 bp, synthetic construct
  misc_feature 1..22: note = chemically synthesized
  source 1..22: mol_type = other DNA
ccctttttcataacccagttca

SEQ ID NO: 60482 - DNA, 22 bp, synthetic construct
  misc_feature 1..22: note = chemically synthesized
  source 1..22: mol_type = other DNA
cctttttcataacccagttcaa

SEQ ID NO: 60483 - DNA, 22 bp, synthetic construct
  misc_feature 1..22: note = chemically synthesized
  source 1..22: mol_type = other DNA
tttcataacccagttcaatgaa

SEQ ID NO: 60484 - DNA, 22 bp, synthetic construct
  misc_feature 1..22: note = chemically synthesized
  source 1..22: mol_type = other DNA
ttcataacccagttcaatgaag

SEQ ID NO: 60485 - DNA, 22 bp, synthetic construct
  misc_feature 1..22: note = chemically synthesized
  source 1..22: mol_type = other DNA
tcataacccagttcaatgaaga

SEQ ID NO: 60486 - DNA, 22 bp, synthetic construct
  misc_feature 1..22: note = chemically synthesized
  source 1..22: mol_type = other DNA
cataacccagttcaatgaagac

SEQ ID NO: 60487 - DNA, 22 bp, synthetic construct
  misc_feature 1..22: note = chemically synthesized
  source 1..22: mol_type = other DNA
ataacccagttcaatgaagaca

SEQ ID NO: 60488 - DNA, 22 bp, synthetic construct
  misc_feature 1..22: note = chemically synthesized
  source 1..22: mol_type = other DNA
aatgaagacataattgaagtgg

SEQ ID NO: 60489 - DNA, 22 bp, synthetic construct
  misc_feature 1..22: note = chemically synthesized
  source 1..22: mol_type = other DNA
aagtggtgagaagaggggccac

SEQ ID NO: 60490 - DNA, 22 bp, synthetic construct
  misc_feature 1..22: note = chemically synthesized
  source 1..22: mol_type = other DNA
cagactccagggtatttgtatt

SEQ ID NO: 60491 - DNA, 22 bp, synthetic construct
  misc_feature 1..22: note = chemically synthesized
  source 1..22: mol_type = other DNA
agactccagggtatttgtattc

SEQ ID NO: 60492 - DNA, 22 bp, synthetic construct
  misc_feature 1..22: note = chemically synthesized
  source 1..22: mol_type = other DNA
cagggtatttgtattccaggac

SEQ ID NO: 60493 - DNA, 22 bp, synthetic construct
  misc_feature 1..22: note = chemically synthesized
  source 1..22: mol_type = other DNA
gtattccaggacccctccgtgg

SEQ ID NO: 60494 - DNA, 22 bp, synthetic construct
  misc_feature 1..22: note = chemically synthesized
  source 1..22: mol_type = other DNA
tattccaggacccctccgtggg

SEQ ID NO: 60495 - DNA, 22 bp, synthetic construct
  misc_feature 1..22: note = chemically synthesized
  source 1..22: mol_type = other DNA
caggacccctccgtgggtgttg

SEQ ID NO: 60496 - DNA, 22 bp, synthetic construct
  misc_feature 1..22: note = chemically synthesized
  source 1..22: mol_type = other DNA
cgtgggtgttggcccagcggtg

SEQ ID NO: 60497 - DNA, 22 bp, synthetic construct
  misc_feature 1..22: note = chemically synthesized
  source 1..22: mol_type = other DNA
gcccagcggtgcccagagaata

SEQ ID NO: 60498 - DNA, 22 bp, synthetic construct
  misc_feature 1..22: note = chemically synthesized
  source 1..22: mol_type = other DNA
ccttattggatctttctcgaat

SEQ ID NO: 60499 - DNA, 22 bp, synthetic construct
  misc_feature 1..22: note = chemically synthesized
  source 1..22: mol_type = other DNA
attggatctttctcgaattgac

SEQ ID NO: 60500 - DNA, 22 bp, synthetic construct
  misc_feature 1..22: note = chemically synthesized
  source 1..22: mol_type = other DNA
ttggatctttctcgaattgact

SEQ ID NO: 60501 - DNA, 22 bp, synthetic construct
  misc_feature 1..22: note = chemically synthesized
  source 1..22: mol_type = other DNA
gatctttctcgaattgacttgt

SEQ ID NO: 60502 - DNA, 22 bp, synthetic construct
  misc_feature 1..22: note = chemically synthesized
  source 1..22: mol_type = other DNA
tctcgaattgacttgttcactt

SEQ ID NO: 60503 - DNA, 22 bp, synthetic construct
  misc_feature 1..22: note = chemically synthesized
  source 1..22: mol_type = other DNA
ctcgaattgacttgttcacttc

SEQ ID NO: 60504 - DNA, 22 bp, synthetic construct
  misc_feature 1..22: note = chemically synthesized
  source 1..22: mol_type = other DNA
tcgaattgacttgttcacttcc

SEQ ID NO: 60505 - DNA, 22 bp, synthetic construct
  misc_feature 1..22: note = chemically synthesized
  source 1..22: mol_type = other DNA
gaattgacttgttcacttcctg

SEQ ID NO: 60506 - DNA, 22 bp, synthetic construct
  misc_feature 1..22: note = chemically synthesized
  source 1..22: mol_type = other DNA
acttgttcacttcctgttcagc

SEQ ID NO: 60507 - DNA, 22 bp, synthetic construct
  misc_feature 1..22: note = chemically synthesized
  source 1..22: mol_type = other DNA
gttcacttcctgttcagcgcag

SEQ ID NO: 60508 - DNA, 22 bp, synthetic construct
  misc_feature 1..22: note = chemically synthesized
  source 1..22: mol_type = other DNA
ttcacttcctgttcagcgcagc

SEQ ID NO: 60509 - DNA, 22 bp, synthetic construct
  misc_feature 1..22: note = chemically synthesized
  source 1..22: mol_type = other DNA
acttcctgttcagcgcagcctg

SEQ ID NO: 60510 - DNA, 22 bp, synthetic construct
  misc_feature 1..22: note = chemically synthesized
  source 1..22: mol_type = other DNA
cctgttcagcgcagcctggtgg

SEQ ID NO: 60511 - DNA, 22 bp, synthetic construct
  misc_feature 1..22: note = chemically synthesized
  source 1..22: mol_type = other DNA
ctgttcagcgcagcctggtggt

SEQ ID NO: 60512 - DNA, 22 bp, synthetic construct
  misc_feature 1..22: note = chemically synthesized
  source 1..22: mol_type = other DNA
ttcagcgcagcctggtggtgac

SEQ ID NO: 60513 - DNA, 22 bp, synthetic construct
  misc_feature 1..22: note = chemically synthesized
  source 1..22: mol_type = other DNA
agcgcagcctggtggtgactcg

SEQ ID NO: 60514 - DNA, 22 bp, synthetic construct
  misc_feature 1..22: note = chemically synthesized
  source 1..22: mol_type = other DNA
gtggtgactcggtaatccccac

SEQ ID NO: 60515 - DNA, 22 bp, synthetic construct
  misc_feature 1..22: note = chemically synthesized
  source 1..22: mol_type = other DNA
ggtaatccccacagtaagacct

SEQ ID NO: 60516 - DNA, 22 bp, synthetic construct
  misc_feature 1..22: note = chemically synthesized
  source 1..22: mol_type = other DNA
acagtgggttgagtggcctggg

SEQ ID NO: 60517 - DNA, 22 bp, synthetic construct
  misc_feature 1..22: note = chemically synthesized
  source 1..22: mol_type = other DNA
agtggcctgggagctcaagtca

SEQ ID NO: 60518 - DNA, 22 bp, synthetic construct
  misc_feature 1..22: note = chemically synthesized
  source 1..22: mol_type = other DNA
ggagctcaagtcaggggcagaa

SEQ ID NO: 60519 - DNA, 22 bp, synthetic construct
  misc_feature 1..22: note = chemically synthesized
  source 1..22: mol_type = other DNA
aagtcaggggcagaaatgggga

SEQ ID NO: 60520 - DNA, 22 bp, synthetic construct
  misc_feature 1..22: note = chemically synthesized
  source 1..22: mol_type = other DNA
gaaagttgggtgatcaagagtc

SEQ ID NO: 60521 - DNA, 22 bp, synthetic construct
  misc_feature 1..22: note = chemically synthesized
  source 1..22: mol_type = other DNA
ggtgatcaagagtcatttggaa

SEQ ID NO: 60522 - DNA, 22 bp, synthetic construct
  misc_feature 1..22: note = chemically synthesized
  source 1..22: mol_type = other DNA
ggaagcccccatgtctgtgtca

SEQ ID NO: 60523 - DNA, 22 bp, synthetic construct
  misc_feature 1..22: note = chemically synthesized
  source 1..22: mol_type = other DNA
gaagcccccatgtctgtgtcag

SEQ ID NO: 60524 - DNA, 22 bp, synthetic construct
  misc_feature 1..22: note = chemically synthesized
  source 1..22: mol_type = other DNA
tgtcagtccactcacatctctg

SEQ ID NO: 60525 - DNA, 22 bp, synthetic construct
  misc_feature 1..22: note = chemically synthesized
  source 1..22: mol_type = other DNA
acatctctgtccgccacccacc

SEQ ID NO: 60526 - DNA, 22 bp, synthetic construct
  misc_feature 1..22: note = chemically synthesized
  source 1..22: mol_type = other DNA
tgtccgccacccaccaccactt

SEQ ID NO: 60527 - DNA, 22 bp, synthetic construct
  misc_feature 1..22: note = chemically synthesized
  source 1..22: mol_type = other DNA
tccgccacccaccaccactttc

SEQ ID NO: 60528 - DNA, 22 bp, synthetic construct
  misc_feature 1..22: note = chemically synthesized
  source 1..22: mol_type = other DNA
tctccctgcctgaaagcactgg

SEQ ID NO: 60529 - DNA, 22 bp, synthetic construct
  misc_feature 1..22: note = chemically synthesized
  source 1..22: mol_type = other DNA
ctccctgcctgaaagcactggg

SEQ ID NO: 60530 - DNA, 22 bp, synthetic construct
  misc_feature 1..22: note = chemically synthesized
  source 1..22: mol_type = other DNA
tccctgcctgaaagcactgggc

SEQ ID NO: 60531 - DNA, 22 bp, synthetic construct
  misc_feature 1..22: note = chemically synthesized
  source 1..22: mol_type = other DNA
cctgcctgaaagcactgggctg

SEQ ID NO: 60532 - DNA, 22 bp, synthetic construct
  misc_feature 1..22: note = chemically synthesized
  source 1..22: mol_type = other DNA
cctgaaagcactgggctgtgtt

SEQ ID NO: 60533 - DNA, 22 bp, synthetic construct
  misc_feature 1..22: note = chemically synthesized
  source 1..22: mol_type = other DNA
aaagcactgggctgtgtttcag

SEQ ID NO: 60534 - DNA, 22 bp, synthetic construct
  misc_feature 1..22: note = chemically synthesized
  source 1..22: mol_type = other DNA
ggctgtgtttcagagaggtagc

SEQ ID NO: 60535 - DNA, 22 bp, synthetic construct
  misc_feature 1..22: note = chemically synthesized
  source 1..22: mol_type = other DNA
tgtttcagagaggtagctgggt

SEQ ID NO: 60536 - DNA, 22 bp, synthetic construct
  misc_feature 1..22: note = chemically synthesized
  source 1..22: mol_type = other DNA
cagagaggtagctgggtcccac

SEQ ID NO: 60537 - DNA, 22 bp, synthetic construct
  misc_feature 1..22: note = chemically synthesized
  source 1..22: mol_type = other DNA
agagaggtagctgggtcccaca

SEQ ID NO: 60538 - DNA, 22 bp, synthetic construct
  misc_feature 1..22: note = chemically synthesized
  source 1..22: mol_type = other DNA
ggtcccacagatatttatggag

SEQ ID NO: 60539 - DNA, 22 bp, synthetic construct
  misc_feature 1..22: note = chemically synthesized
  source 1..22: mol_type = other DNA
atggagggcttgtttctgtatc

SEQ ID NO: 60540 - DNA, 22 bp, synthetic construct
  misc_feature 1..22: note = chemically synthesized
  source 1..22: mol_type = other DNA
tggagggcttgtttctgtatct

SEQ ID NO: 60541 - DNA, 22 bp, synthetic construct
  misc_feature 1..22: note = chemically synthesized
  source 1..22: mol_type = other DNA
gtttctgtatctccttctagtg

SEQ ID NO: 60542 - DNA, 22 bp, synthetic construct
  misc_feature 1..22: note = chemically synthesized
  source 1..22: mol_type = other DNA
tttctgtatctccttctagtgg

SEQ ID NO: 60543 - DNA, 22 bp, synthetic construct
  misc_feature 1..22: note = chemically synthesized
  source 1..22: mol_type = other DNA
ctgtatctccttctagtgggct

SEQ ID NO: 60544 - DNA, 22 bp, synthetic construct
  misc_feature 1..22: note = chemically synthesized
  source 1..22: mol_type = other DNA
tgtatctccttctagtgggctg

SEQ ID NO: 60545 - DNA, 22 bp, synthetic construct
  misc_feature 1..22: note = chemically synthesized
  source 1..22: mol_type = other DNA
tatctccttctagtgggctgga

SEQ ID NO: 60546 - DNA, 22 bp, synthetic construct
  misc_feature 1..22: note = chemically synthesized
  source 1..22: mol_type = other DNA
cttctagtgggctggacctccc

SEQ ID NO: 60547 - DNA, 22 bp, synthetic construct
  misc_feature 1..22: note = chemically synthesized
  source 1..22: mol_type = other DNA
ctagtgggctggacctccccag

SEQ ID NO: 60548 - DNA, 22 bp, synthetic construct
  misc_feature 1..22: note = chemically synthesized
  source 1..22: mol_type = other DNA
tagtgggctggacctccccagg

SEQ ID NO: 60549 - DNA, 22 bp, synthetic construct
  misc_feature 1..22: note = chemically synthesized
  source 1..22: mol_type = other DNA
gtgggctggacctccccaggcc

SEQ ID NO: 60550 - DNA, 22 bp, synthetic construct
  misc_feature 1..22: note = chemically synthesized
  source 1..22: mol_type = other DNA
gacctccccaggccatttttct

SEQ ID NO: 60551 - DNA, 22 bp, synthetic construct
  misc_feature 1..22: note = chemically synthesized
  source 1..22: mol_type = other DNA
cccaggccatttttctaggtaa

SEQ ID NO: 60552 - DNA, 22 bp, synthetic construct
  misc_feature 1..22: note = chemically synthesized
  source 1..22: mol_type = other DNA
ttctaggtaactaggaaggcct

SEQ ID NO: 60553 - DNA, 22 bp, synthetic construct
  misc_feature 1..22: note = chemically synthesized
  source 1..22: mol_type = other DNA
tctaggtaactaggaaggcctg

SEQ ID NO: 60554 - DNA, 22 bp, synthetic construct
  misc_feature 1..22: note = chemically synthesized
  source 1..22: mol_type = other DNA
ctaggtaactaggaaggcctga

SEQ ID NO: 60555 - DNA, 22 bp, synthetic construct
  misc_feature 1..22: note = chemically synthesized
  source 1..22: mol_type = other DNA
taggtaactaggaaggcctgac

SEQ ID NO: 60556 - DNA, 22 bp, synthetic construct
  misc_feature 1..22: note = chemically synthesized
  source 1..22: mol_type = other DNA
ggtaactaggaaggcctgactc

SEQ ID NO: 60557 - DNA, 22 bp, synthetic construct
  misc_feature 1..22: note = chemically synthesized
  source 1..22: mol_type = other DNA
ggaaggcctgactctgtcagca

SEQ ID NO: 60558 - DNA, 22 bp, synthetic construct
  misc_feature 1..22: note = chemically synthesized
  source 1..22: mol_type = other DNA
actctgtcagcaacttggcttt

SEQ ID NO: 60559 - DNA, 22 bp, synthetic construct
  misc_feature 1..22: note = chemically synthesized
  source 1..22: mol_type = other DNA
tgtcagcaacttggctttcttt

SEQ ID NO: 60560 - DNA, 22 bp, synthetic construct
  misc_feature 1..22: note = chemically synthesized
  source 1..22: mol_type = other DNA
tcagcaacttggctttctttgg

SEQ ID NO: 60561 - DNA, 22 bp, synthetic construct
  misc_feature 1..22: note = chemically synthesized
  source 1..22: mol_type = other DNA
ggctttctttggaggaggtgtc

SEQ ID NO: 60562 - DNA, 22 bp, synthetic construct
  misc_feature 1..22: note = chemically synthesized
  source 1..22: mol_type = other DNA
gctttctttggaggaggtgtca

SEQ ID NO: 60563 - DNA, 22 bp, synthetic construct
  misc_feature 1..22: note = chemically synthesized
  source 1..22: mol_type = other DNA
tctttggaggaggtgtcactct

SEQ ID NO: 60564 - DNA, 22 bp, synthetic construct
  misc_feature 1..22: note = chemically synthesized
  source 1..22: mol_type = other DNA
ctttggaggaggtgtcactctg

SEQ ID NO: 60565 - DNA, 22 bp, synthetic construct
  misc_feature 1..22: note = chemically synthesized
  source 1..22: mol_type = other DNA
tttggaggaggtgtcactctgg

SEQ ID NO: 60566 - DNA, 22 bp, synthetic construct
  misc_feature 1..22: note = chemically synthesized
  source 1..22: mol_type = other DNA
tggaggaggtgtcactctggga

SEQ ID NO: 60567 - DNA, 22 bp, synthetic construct
  misc_feature 1..22: note = chemically synthesized
  source 1..22: mol_type = other DNA
ggaggaggtgtcactctgggat

SEQ ID NO: 60568 - DNA, 22 bp, synthetic construct
  misc_feature 1..22: note = chemically synthesized
  source 1..22: mol_type = other DNA
gaggaggtgtcactctgggatt

SEQ ID NO: 60569 - DNA, 22 bp, synthetic construct
  misc_feature 1..22: note = chemically synthesized
  source 1..22: mol_type = other DNA
tgggattagttaaaaggggatc

SEQ ID NO: 60570 - DNA, 22 bp, synthetic construct
  misc_feature 1..22: note = chemically synthesized
  source 1..22: mol_type = other DNA
ggattagttaaaaggggatcag

SEQ ID NO: 60571 - DNA, 22 bp, synthetic construct
  misc_feature 1..22: note = chemically synthesized
  source 1..22: mol_type = other DNA
gttaaaaggggatcagtggtat

SEQ ID NO: 60572 - DNA, 22 bp, synthetic construct
  misc_feature 1..22: note = chemically synthesized
  source 1..22: mol_type = other DNA
aaaggggatcagtggtattcac

SEQ ID NO: 60573 - DNA, 22 bp, synthetic construct
  misc_feature 1..22: note = chemically synthesized
  source 1..22: mol_type = other DNA
acattggctcgtgggtgtattt

SEQ ID NO: 60574 - DNA, 22 bp, synthetic construct
  misc_feature 1..22: note = chemically synthesized
  source 1..22: mol_type = other DNA
gctcgtgggtgtattttctcct

SEQ ID NO: 60575 - DNA, 22 bp, synthetic construct
  misc_feature 1..22: note = chemically synthesized
  source 1..22: mol_type = other DNA
gtgggtgtattttctcctcctc

SEQ ID NO: 60576 - DNA, 22 bp, synthetic construct
  misc_feature 1..22: note = chemically synthesized
  source 1..22: mol_type = other DNA
tctcctcctcaaattataacct

SEQ ID NO: 60577 - DNA, 22 bp, synthetic construct
  misc_feature 1..22: note = chemically synthesized
  source 1..22: mol_type = other DNA
ctcctcctcaaattataacctt

SEQ ID NO: 60578 - DNA, 22 bp, synthetic construct
  misc_feature 1..22: note = chemically synthesized
  source 1..22: mol_type = other DNA
tcctcctcaaattataaccttt

SEQ ID NO: 60579 - DNA, 22 bp, synthetic construct
  misc_feature 1..22: note = chemically synthesized
  source 1..22: mol_type = other DNA
ctcctcaaattataaccttttg

SEQ ID NO: 60580 - DNA, 22 bp, synthetic construct
  misc_feature 1..22: note = chemically synthesized
  source 1..22: mol_type = other DNA
ctcaaattataaccttttggag

SEQ ID NO: 60581 - DNA, 22 bp, synthetic construct
  misc_feature 1..22: note = chemically synthesized
  source 1..22: mol_type = other DNA
aaattataaccttttggagggc

SEQ ID NO: 60582 - DNA, 22 bp, synthetic construct
  misc_feature 1..22: note = chemically synthesized
  source 1..22: mol_type = other DNA
taaccttttggagggcaggagt

SEQ ID NO: 60583 - DNA, 22 bp, synthetic construct
  misc_feature 1..22: note = chemically synthesized
  source 1..22: mol_type = other DNA
ttggagggcaggagtcatgttt

SEQ ID NO: 60584 - DNA, 22 bp, synthetic construct
  misc_feature 1..22: note = chemically synthesized
  source 1..22: mol_type = other DNA
tggagggcaggagtcatgtttt

SEQ ID NO: 60585 - DNA, 22 bp, synthetic construct
  misc_feature 1..22: note = chemically synthesized
  source 1..22: mol_type = other DNA
ggagggcaggagtcatgtttta

SEQ ID NO: 60586 - DNA, 22 bp, synthetic construct
  misc_feature 1..22: note = chemically synthesized
  source 1..22: mol_type = other DNA
gagggcaggagtcatgttttat

SEQ ID NO: 60587 - DNA, 22 bp, synthetic construct
  misc_feature 1..22: note = chemically synthesized
  source 1..22: mol_type = other DNA
tattttttgtgccttcttggtg

SEQ ID NO: 60588 - DNA, 22 bp, synthetic construct
  misc_feature 1..22: note = chemically synthesized
  source 1..22: mol_type = other DNA
attttttgtgccttcttggtgc

SEQ ID NO: 60589 - DNA, 22 bp, synthetic construct
  misc_feature 1..22: note = chemically synthesized
  source 1..22: mol_type = other DNA
ttttttgtgccttcttggtgcc

SEQ ID NO: 60590 - DNA, 22 bp, synthetic construct
  misc_feature 1..22: note = chemically synthesized
  source 1..22: mol_type = other DNA
tttgtgccttcttggtgcctaa

SEQ ID NO: 60591 - DNA, 22 bp, synthetic construct
  misc_feature 1..22: note = chemically synthesized
  source 1..22: mol_type = other DNA
ttgtgccttcttggtgcctaac

SEQ ID NO: 60592 - DNA, 22 bp, synthetic construct
  misc_feature 1..22: note = chemically synthesized
  source 1..22: mol_type = other DNA
tgtgccttcttggtgcctaaca

SEQ ID NO: 60593 - DNA, 22 bp, synthetic construct
  misc_feature 1..22: note = chemically synthesized
  source 1..22: mol_type = other DNA
gtgccttcttggtgcctaacat

SEQ ID NO: 60594 - DNA, 22 bp, synthetic construct
  misc_feature 1..22: note = chemically synthesized
  source 1..22: mol_type = other DNA
tgccttcttggtgcctaacata

SEQ ID NO: 60595 - DNA, 22 bp, synthetic construct
  misc_feature 1..22: note = chemically synthesized
  source 1..22: mol_type = other DNA
cttggtgcctaacataatgctg

SEQ ID NO: 60596 - DNA, 22 bp, synthetic construct
  misc_feature 1..22: note = chemically synthesized
  source 1..22: mol_type = other DNA
ttggtgcctaacataatgctgg

SEQ ID NO: 60597 - DNA, 22 bp, synthetic construct
  misc_feature 1..22: note = chemically synthesized
  source 1..22: mol_type = other DNA
ggtgcctaacataatgctggtt

SEQ ID NO: 60598 - DNA, 22 bp, synthetic construct
  misc_feature 1..22: note = chemically synthesized
  source 1..22: mol_type = other DNA
gtgcctaacataatgctggttc

SEQ ID NO: 60599 - DNA, 22 bp, synthetic construct
  misc_feature 1..22: note = chemically synthesized
  source 1..22: mol_type = other DNA
acataatgctggttcatatgta

SEQ ID NO: 60600 - DNA, 22 bp, synthetic construct
  misc_feature 1..22: note = chemically synthesized
  source 1..22: mol_type = other DNA
gttcatatgtagtatttaatct

SEQ ID NO: 60601 - DNA, 22 bp, synthetic construct
  misc_feature 1..22: note = chemically synthesized
  source 1..22: mol_type = other DNA
atatgtagtatttaatctgtac

SEQ ID NO: 60602 - DNA, 22 bp, synthetic construct
  misc_feature 1..22: note = chemically synthesized
  source 1..22: mol_type = other DNA
aatctgtactttgctcacgctg

SEQ ID NO: 60603 - DNA, 22 bp, synthetic construct
  misc_feature 1..22: note = chemically synthesized
  source 1..22: mol_type = other DNA
atctgtactttgctcacgctgc

SEQ ID NO: 60604 - DNA, 22 bp, synthetic construct
  misc_feature 1..22: note = chemically synthesized
  source 1..22: mol_type = other DNA
tactttgctcacgctgcttgat

SEQ ID NO: 60605 - DNA, 22 bp, synthetic construct
  misc_feature 1..22: note = chemically synthesized
  source 1..22: mol_type = other DNA
tgctcacgctgcttgattgaac

SEQ ID NO: 60606 - DNA, 22 bp, synthetic construct
  misc_feature 1..22: note = chemically synthesized
  source 1..22: mol_type = other DNA
gctcacgctgcttgattgaaca

SEQ ID NO: 60607 - DNA, 22 bp, synthetic construct
  misc_feature 1..22: note = chemically synthesized
  source 1..22: mol_type = other DNA
ctcacgctgcttgattgaacag

SEQ ID NO: 60608 - DNA, 22 bp, synthetic construct
  misc_feature 1..22: note = chemically synthesized
  source 1..22: mol_type = other DNA
acgctgcttgattgaacagaga

SEQ ID NO: 60609 - DNA, 22 bp, synthetic construct
  misc_feature 1..22: note = chemically synthesized
  source 1..22: mol_type = other DNA
cttgattgaacagagaaagacc

SEQ ID NO: 60610 - DNA, 22 bp, synthetic construct
  misc_feature 1..22: note = chemically synthesized
  source 1..22: mol_type = other DNA
gattgaacagagaaagaccggg

SEQ ID NO: 60611 - DNA, 22 bp, synthetic construct
  misc_feature 1..22: note = chemically synthesized
  source 1..22: mol_type = other DNA
attgaacagagaaagaccgggc

SEQ ID NO: 60612 - DNA, 22 bp, synthetic construct
  misc_feature 1..22: note = chemically synthesized
  source 1..22: mol_type = other DNA
aacagagaaagaccgggctttg

SEQ ID NO: 60613 - DNA, 22 bp, synthetic construct
  misc_feature 1..22: note = chemically synthesized
  source 1..22: mol_type = other DNA
tgaatggatccccagctccctg

SEQ ID NO: 60614 - DNA, 22 bp, synthetic construct
  misc_feature 1..22: note = chemically synthesized
  source 1..22: mol_type = other DNA
gaatggatccccagctccctgt

SEQ ID NO: 60615 - DNA, 22 bp, synthetic construct
  misc_feature 1..22: note = chemically synthesized
  source 1..22: mol_type = other DNA
aatggatccccagctccctgtc

SEQ ID NO: 60616 - DNA, 22 bp, synthetic construct
  misc_feature 1..22: note = chemically synthesized
  source 1..22: mol_type = other DNA
cctgtccagggaaggtgtgagg

SEQ ID NO: 60617 - DNA, 22 bp, synthetic construct
  misc_feature 1..22: note = chemically synthesized
  source 1..22: mol_type = other DNA
tccagggaaggtgtgaggctgg

SEQ ID NO: 60618 - DNA, 22 bp, synthetic construct
  misc_feature 1..22: note = chemically synthesized
  source 1..22: mol_type = other DNA
ggcaagtttatttcccccttcc

SEQ ID NO: 60619 - DNA, 22 bp, synthetic construct
  misc_feature 1..22: note = chemically synthesized
  source 1..22: mol_type = other DNA
atttcccccttcctccctgggg

SEQ ID NO: 60620 - DNA, 22 bp, synthetic construct
  misc_feature 1..22: note = chemically synthesized
  source 1..22: mol_type = other DNA
tttcccccttcctccctgggga

SEQ ID NO: 60621 - DNA, 22 bp, synthetic construct
  misc_feature 1..22: note = chemically synthesized
  source 1..22: mol_type = other DNA
cccccttcctccctggggagaa

SEQ ID NO: 60622 - DNA, 22 bp, synthetic construct
  misc_feature 1..22: note = chemically synthesized
  source 1..22: mol_type = other DNA
ccccttcctccctggggagaaa

SEQ ID NO: 60623 - DNA, 22 bp, synthetic construct
  misc_feature 1..22: note = chemically synthesized
  source 1..22: mol_type = other DNA
cctccctggggagaaagtgaaa

SEQ ID NO: 60624 - DNA, 22 bp, synthetic construct
  misc_feature 1..22: note = chemically synthesized
  source 1..22: mol_type = other DNA
ctccctggggagaaagtgaaaa

SEQ ID NO: 60625 - DNA, 22 bp, synthetic construct
  misc_feature 1..22: note = chemically synthesized
  source 1..22: mol_type = other DNA
cctggggagaaagtgaaaaagt

SEQ ID NO: 60626 - DNA, 22 bp, synthetic construct
  misc_feature 1..22: note = chemically synthesized
  source 1..22: mol_type = other DNA
gggagaaagtgaaaaagtgaaa

SEQ ID NO: 60627 - DNA, 22 bp, synthetic construct
  misc_feature 1..22: note = chemically synthesized
  source 1..22: mol_type = other DNA
gggttgggatagctggtggtgt

SEQ ID NO: 60628 - DNA, 22 bp, synthetic construct
  misc_feature 1..22: note = chemically synthesized
  source 1..22: mol_type = other DNA
ggatagctggtggtgtctttgt

SEQ ID NO: 60629 - DNA, 22 bp, synthetic construct
  misc_feature 1..22: note = chemically synthesized
  source 1..22: mol_type = other DNA
gtggtgtctttgtggctttcac

SEQ ID NO: 60630 - DNA, 22 bp, synthetic construct
  misc_feature 1..22: note = chemically synthesized
  source 1..22: mol_type = other DNA
tgtggctttcaccccatggtca

SEQ ID NO: 60631 - DNA, 22 bp, synthetic construct
  misc_feature 1..22: note = chemically synthesized
  source 1..22: mol_type = other DNA
gtggctttcaccccatggtcaa

SEQ ID NO: 60632 - DNA, 22 bp, synthetic construct
  misc_feature 1..22: note = chemically synthesized
  source 1..22: mol_type = other DNA
tggctttcaccccatggtcaag

SEQ ID NO: 60633 - DNA, 22 bp, synthetic construct
  misc_feature 1..22: note = chemically synthesized
  source 1..22: mol_type = other DNA
tcaccccatggtcaagcagtga

SEQ ID NO: 60634 - DNA, 22 bp, synthetic construct
  misc_feature 1..22: note = chemically synthesized
  source 1..22: mol_type = other DNA
caccccatggtcaagcagtgaa

SEQ ID NO: 60635 - DNA, 22 bp, synthetic construct
  misc_feature 1..22: note = chemically synthesized
  source 1..22: mol_type = other DNA
accccatggtcaagcagtgaac

SEQ ID NO: 60636 - DNA, 22 bp, synthetic construct
  misc_feature 1..22: note = chemically synthesized
  source 1..22: mol_type = other DNA
tgcttgcagattctgtctcgct

SEQ ID NO: 60637 - DNA, 22 bp, synthetic construct
  misc_feature 1..22: note = chemically synthesized
  source 1..22: mol_type = other DNA
cttgcagattctgtctcgctca

SEQ ID NO: 60638 - DNA, 22 bp, synthetic construct
  misc_feature 1..22: note = chemically synthesized
  source 1..22: mol_type = other DNA
gcagattctgtctcgctcacct

SEQ ID NO: 60639 - DNA, 22 bp, synthetic construct
  misc_feature 1..22: note = chemically synthesized
  source 1..22: mol_type = other DNA
cagattctgtctcgctcacctg

SEQ ID NO: 60640 - DNA, 22 bp, synthetic construct
  misc_feature 1..22: note = chemically synthesized
  source 1..22: mol_type = other DNA
tgtctcgctcacctggaagcca

SEQ ID NO: 60641 - DNA, 22 bp, synthetic construct
  misc_feature 1..22: note = chemically synthesized
  source 1..22: mol_type = other DNA
tctcgctcacctggaagccagt

SEQ ID NO: 60642 - DNA, 22 bp, synthetic construct
  misc_feature 1..22: note = chemically synthesized
  source 1..22: mol_type = other DNA
gctcacctggaagccagtgttg

SEQ ID NO: 60643 - DNA, 22 bp, synthetic construct
  misc_feature 1..22: note = chemically synthesized
  source 1..22: mol_type = other DNA
acctggaagccagtgttgggga

SEQ ID NO: 60644 - DNA, 22 bp, synthetic construct
  misc_feature 1..22: note = chemically synthesized
  source 1..22: mol_type = other DNA
gaagccagtgttggggaaggag

SEQ ID NO: 60645 - DNA, 22 bp, synthetic construct
  misc_feature 1..22: note = chemically synthesized
  source 1..22: mol_type = other DNA
gggaaggagcacgtgggggagg

SEQ ID NO: 60646 - DNA, 22 bp, synthetic construct
  misc_feature 1..22: note = chemically synthesized
  source 1..22: mol_type = other DNA
aggtctgggcaacactttggag

SEQ ID NO: 60647 - DNA, 22 bp, synthetic construct
  misc_feature 1..22: note = chemically synthesized
  source 1..22: mol_type = other DNA
ggtctgggcaacactttggagt

SEQ ID NO: 60648 - DNA, 22 bp, synthetic construct
  misc_feature 1..22: note = chemically synthesized
  source 1..22: mol_type = other DNA
ggcaacactttggagttagggg

SEQ ID NO: 60649 - DNA, 22 bp, synthetic construct
  misc_feature 1..22: note = chemically synthesized
  source 1..22: mol_type = other DNA
tggagttagggggtcccctgga

SEQ ID NO: 60650 - DNA, 22 bp, synthetic construct
  misc_feature 1..22: note = chemically synthesized
  source 1..22: mol_type = other DNA
ggagttagggggtcccctggag

SEQ ID NO: 60651 - DNA, 22 bp, synthetic construct
  misc_feature 1..22: note = chemically synthesized
  source 1..22: mol_type = other DNA
gagttagggggtcccctggagg

SEQ ID NO: 60652 - DNA, 22 bp, synthetic construct
  misc_feature 1..22: note = chemically synthesized
  source 1..22: mol_type = other DNA
gggggtcccctggaggtgtggg

SEQ ID NO: 60653 - DNA, 22 bp, synthetic construct
  misc_feature 1..22: note = chemically synthesized
  source 1..22: mol_type = other DNA
gaggtgtgggaagctggtagtg

SEQ ID NO: 60654 - DNA, 22 bp, synthetic construct
  misc_feature 1..22: note = chemically synthesized
  source 1..22: mol_type = other DNA
gtagtggcattctggaaacaag

SEQ ID NO: 60655 - DNA, 22 bp, synthetic construct
  misc_feature 1..22: note = chemically synthesized
  source 1..22: mol_type = other DNA
tggaaacaagctagagcctgtc

SEQ ID NO: 60656 - DNA, 22 bp, synthetic construct
  misc_feature 1..22: note = chemically synthesized
  source 1..22: mol_type = other DNA
gaaacaagctagagcctgtctc

SEQ ID NO: 60657 - DNA, 22 bp, synthetic construct
  misc_feature 1..22: note = chemically synthesized
  source 1..22: mol_type = other DNA
gagcctgtctcaccagagggag

SEQ ID NO: 60658 - DNA, 22 bp, synthetic construct
  misc_feature 1..22: note = chemically synthesized
  source 1..22: mol_type = other DNA
tctcaccagagggagaacggct

SEQ ID NO: 60659 - DNA, 22 bp, synthetic construct
  misc_feature 1..22: note = chemically synthesized
  source 1..22: mol_type = other DNA
accagagggagaacggctgagt

SEQ ID NO: 60660 - DNA, 22 bp, synthetic construct
  misc_feature 1..22: note = chemically synthesized
  source 1..22: mol_type = other DNA
agttcggaagggactggggcct

SEQ ID NO: 60661 - DNA, 22 bp, synthetic construct
  misc_feature 1..22: note = chemically synthesized
  source 1..22: mol_type = other DNA
ggaagggactggggcctgcttt

SEQ ID NO: 60662 - DNA, 22 bp, synthetic construct
  misc_feature 1..22: note = chemically synthesized
  source 1..22: mol_type = other DNA
gggcctgctttcctttgggtgg

SEQ ID NO: 60663 - DNA, 22 bp, synthetic construct
  misc_feature 1..22: note = chemically synthesized
  source 1..22: mol_type = other DNA
ctttcctttgggtggctttgac

SEQ ID NO: 60664 - DNA, 22 bp, synthetic construct
  misc_feature 1..22: note = chemically synthesized
  source 1..22: mol_type = other DNA
tcctttgggtggctttgactgg

SEQ ID NO: 60665 - DNA, 22 bp, synthetic construct
  misc_feature 1..22: note = chemically synthesized
  source 1..22: mol_type = other DNA
cctttgggtggctttgactggc

SEQ ID NO: 60666 - DNA, 22 bp, synthetic construct
  misc_feature 1..22: note = chemically synthesized
  source 1..22: mol_type = other DNA
ctttgggtggctttgactggct

SEQ ID NO: 60667 - DNA, 22 bp, synthetic construct
  misc_feature 1..22: note = chemically synthesized
  source 1..22: mol_type = other DNA
tgggtggctttgactggctctt

SEQ ID NO: 60668 - DNA, 22 bp, synthetic construct
  misc_feature 1..22: note = chemically synthesized
  source 1..22: mol_type = other DNA
gggtggctttgactggctcttg

SEQ ID NO: 60669 - DNA, 22 bp, synthetic construct
  misc_feature 1..22: note = chemically synthesized
  source 1..22: mol_type = other DNA
ggtggctttgactggctcttgg

SEQ ID NO: 60670 - DNA, 22 bp, synthetic construct
  misc_feature 1..22: note = chemically synthesized
  source 1..22: mol_type = other DNA
tgactggctcttggatgagttt

SEQ ID NO: 60671 - DNA, 22 bp, synthetic construct
  misc_feature 1..22: note = chemically synthesized
  source 1..22: mol_type = other DNA
gactggctcttggatgagttta

SEQ ID NO: 60672 - DNA, 22 bp, synthetic construct
  misc_feature 1..22: note = chemically synthesized
  source 1..22: mol_type = other DNA
actggctcttggatgagtttaa

SEQ ID NO: 60673 - DNA, 22 bp, synthetic construct
  misc_feature 1..22: note = chemically synthesized
  source 1..22: mol_type = other DNA
gctcttggatgagtttaaaagg

SEQ ID NO: 60674 - DNA, 22 bp, synthetic construct
  misc_feature 1..22: note = chemically synthesized
  source 1..22: mol_type = other DNA
ttggatgagtttaaaaggtgat

SEQ ID NO: 60675 - DNA, 22 bp, synthetic construct
  misc_feature 1..22: note = chemically synthesized
  source 1..22: mol_type = other DNA
ggatgagtttaaaaggtgattc

SEQ ID NO: 60676 - DNA, 22 bp, synthetic construct
  misc_feature 1..22: note = chemically synthesized
  source 1..22: mol_type = other DNA
gatgagtttaaaaggtgattct

SEQ ID NO: 60677 - DNA, 22 bp, synthetic construct
  misc_feature 1..22: note = chemically synthesized
  source 1..22: mol_type = other DNA
aaaaggtgattctctctctctc

SEQ ID NO: 60678 - DNA, 22 bp, synthetic construct
  misc_feature 1..22: note = chemically synthesized
  source 1..22: mol_type = other DNA
aaaggtgattctctctctctct

SEQ ID NO: 60679 - DNA, 22 bp, synthetic construct
  misc_feature 1..22: note = chemically synthesized
  source 1..22: mol_type = other DNA
tctctctctctctgtctctctt

SEQ ID NO: 60680 - DNA, 22 bp, synthetic construct
  misc_feature 1..22: note = chemically synthesized
  source 1..22: mol_type = other DNA
tctctctctctgtctctctttt

SEQ ID NO: 60681 - DNA, 22 bp, synthetic construct
  misc_feature 1..22: note = chemically synthesized
  source 1..22: mol_type = other DNA
tctctctctgtctctcttttct

SEQ ID NO: 60682 - DNA, 22 bp, synthetic construct
  misc_feature 1..22: note = chemically synthesized
  source 1..22: mol_type = other DNA
tctctctgtctctcttttcttt

SEQ ID NO: 60683 - DNA, 22 bp, synthetic construct
  misc_feature 1..22: note = chemically synthesized
  source 1..22: mol_type = other DNA
tctctgtctctcttttcttttt

SEQ ID NO: 60684 - DNA, 22 bp, synthetic construct
  misc_feature 1..22: note = chemically synthesized
  source 1..22: mol_type = other DNA
tctgtctctcttttcttttttt

SEQ ID NO: 60685 - DNA, 22 bp, synthetic construct
  misc_feature 1..22: note = chemically synthesized
  source 1..22: mol_type = other DNA
tgtctctcttttcttttttttt

SEQ ID NO: 60686 - DNA, 22 bp, synthetic construct
  misc_feature 1..22: note = chemically synthesized
  source 1..22: mol_type = other DNA
tctctcttttcttttttttttt

SEQ ID NO: 60687 - DNA, 22 bp, synthetic construct
  misc_feature 1..22: note = chemically synthesized
  source 1..22: mol_type = other DNA
tcttttctttttttttttttct

SEQ ID NO: 60688 - DNA, 22 bp, synthetic construct
  misc_feature 1..22: note = chemically synthesized
  source 1..22: mol_type = other DNA
ttttctttttttttttttcttt

SEQ ID NO: 60689 - DNA, 22 bp, synthetic construct
  misc_feature 1..22: note = chemically synthesized
  source 1..22: mol_type = other DNA
ttctttttttttttttcttttt

SEQ ID NO: 60690 - DNA, 22 bp, synthetic construct
  misc_feature 1..22: note = chemically synthesized
  source 1..22: mol_type = other DNA
tctttttttttttttctttttt

SEQ ID NO: 60691 - DNA, 22 bp, synthetic construct
  misc_feature 1..22: note = chemically synthesized
  source 1..22: mol_type = other DNA
ctttttttttttttcttttttc

SEQ ID NO: 60692 - DNA, 22 bp, synthetic construct
  misc_feature 1..22: note = chemically synthesized
  source 1..22: mol_type = other DNA
tttttttttttttcttttttct

SEQ ID NO: 60693 - DNA, 22 bp, synthetic construct
  misc_feature 1..22: note = chemically synthesized
  source 1..22: mol_type = other DNA
tttttttttttcttttttctgt

SEQ ID NO: 60694 - DNA, 22 bp, synthetic construct
  misc_feature 1..22: note = chemically synthesized
  source 1..22: mol_type = other DNA
ttttttttttcttttttctgtt

SEQ ID NO: 60695 - DNA, 22 bp, synthetic construct
  misc_feature 1..22: note = chemically synthesized
  source 1..22: mol_type = other DNA
tttttttttcttttttctgttt

SEQ ID NO: 60696 - DNA, 22 bp, synthetic construct
  misc_feature 1..22: note = chemically synthesized
  source 1..22: mol_type = other DNA
ttttttttcttttttctgtttt

SEQ ID NO: 60697 - DNA, 22 bp, synthetic construct
  misc_feature 1..22: note = chemically synthesized
  source 1..22: mol_type = other DNA
tttttttcttttttctgtttta

SEQ ID NO: 60698 - DNA, 22 bp, synthetic construct
  misc_feature 1..22: note = chemically synthesized
  source 1..22: mol_type = other DNA
ttttttcttttttctgttttag

SEQ ID NO: 60699 - DNA, 22 bp, synthetic construct
  misc_feature 1..22: note = chemically synthesized
  source 1..22: mol_type = other DNA
tttttcttttttctgttttagt

SEQ ID NO: 60700 - DNA, 22 bp, synthetic construct
  misc_feature 1..22: note = chemically synthesized
  source 1..22: mol_type = other DNA
ttttcttttttctgttttagtg

SEQ ID NO: 60701 - DNA, 22 bp, synthetic construct
  misc_feature 1..22: note = chemically synthesized
  source 1..22: mol_type = other DNA
tttcttttttctgttttagtgt

SEQ ID NO: 60702 - DNA, 22 bp, synthetic construct
  misc_feature 1..22: note = chemically synthesized
  source 1..22: mol_type = other DNA
ttcttttttctgttttagtgta

SEQ ID NO: 60703 - DNA, 22 bp, synthetic construct
  misc_feature 1..22: note = chemically synthesized
  source 1..22: mol_type = other DNA
tcttttttctgttttagtgtat

SEQ ID NO: 60704 - DNA, 22 bp, synthetic construct
  misc_feature 1..22: note = chemically synthesized
  source 1..22: mol_type = other DNA
cttttttctgttttagtgtatg

SEQ ID NO: 60705 - DNA, 22 bp, synthetic construct
  misc_feature 1..22: note = chemically synthesized
  source 1..22: mol_type = other DNA
ttttttctgttttagtgtatgt

SEQ ID NO: 60706 - DNA, 22 bp, synthetic construct
  misc_feature 1..22: note = chemically synthesized
  source 1..22: mol_type = other DNA
ttttctgttttagtgtatgtgt

SEQ ID NO: 60707 - DNA, 22 bp, synthetic construct
  misc_feature 1..22: note = chemically synthesized
  source 1..22: mol_type = other DNA
tttctgttttagtgtatgtgta

SEQ ID NO: 60708 - DNA, 22 bp, synthetic construct
  misc_feature 1..22: note = chemically synthesized
  source 1..22: mol_type = other DNA
ttctgttttagtgtatgtgtat

SEQ ID NO: 60709 - DNA, 22 bp, synthetic construct
  misc_feature 1..22: note = chemically synthesized
  source 1..22: mol_type = other DNA
tctgttttagtgtatgtgtatg

SEQ ID NO: 60710 - DNA, 22 bp, synthetic construct
  misc_feature 1..22: note = chemically synthesized
  source 1..22: mol_type = other DNA
ctgttttagtgtatgtgtatgc

SEQ ID NO: 60711 - DNA, 22 bp, synthetic construct
  misc_feature 1..22: note = chemically synthesized
  source 1..22: mol_type = other DNA
tgttttagtgtatgtgtatgca

SEQ ID NO: 60712 - DNA, 22 bp, synthetic construct
  misc_feature 1..22: note = chemically synthesized
  source 1..22: mol_type = other DNA
ttttagtgtatgtgtatgcaag

SEQ ID NO: 60713 - DNA, 22 bp, synthetic construct
  misc_feature 1..22: note = chemically synthesized
  source 1..22: mol_type = other DNA
tagtgtatgtgtatgcaagacc

SEQ ID NO: 60714 - DNA, 22 bp, synthetic construct
  misc_feature 1..22: note = chemically synthesized
  source 1..22: mol_type = other DNA
agtgtatgtgtatgcaagacct

SEQ ID NO: 60715 - DNA, 22 bp, synthetic construct
  misc_feature 1..22: note = chemically synthesized
  source 1..22: mol_type = other DNA
gtgtatgtgtatgcaagacctt

SEQ ID NO: 60716 - DNA, 22 bp, synthetic construct
  misc_feature 1..22: note = chemically synthesized
  source 1..22: mol_type = other DNA
tgatatttgagtagggaaatcc

SEQ ID NO: 60717 - DNA, 22 bp, synthetic construct
  misc_feature 1..22: note = chemically synthesized
  source 1..22: mol_type = other DNA
gatatttgagtagggaaatcct

SEQ ID NO: 60718 - DNA, 22 bp, synthetic construct
  misc_feature 1..22: note = chemically synthesized
  source 1..22: mol_type = other DNA
atatttgagtagggaaatcctc

SEQ ID NO: 60719 - DNA, 22 bp, synthetic construct
  misc_feature 1..22: note = chemically synthesized
  source 1..22: mol_type = other DNA
gagtagggaaatcctctcttat

SEQ ID NO: 60720 - DNA, 22 bp, synthetic construct
  misc_feature 1..22: note = chemically synthesized
  source 1..22: mol_type = other DNA
agtagggaaatcctctcttatc

SEQ ID NO: 60721 - DNA, 22 bp, synthetic construct
  misc_feature 1..22: note = chemically synthesized
  source 1..22: mol_type = other DNA
tcttatcaatggaattcacagc

SEQ ID NO: 60722 - DNA, 22 bp, synthetic construct
  misc_feature 1..22: note = chemically synthesized
  source 1..22: mol_type = other DNA
ttatcaatggaattcacagcct

SEQ ID NO: 60723 - DNA, 22 bp, synthetic construct
  misc_feature 1..22: note = chemically synthesized
  source 1..22: mol_type = other DNA
atcaatggaattcacagcctct

SEQ ID NO: 60724 - DNA, 22 bp, synthetic construct
  misc_feature 1..22: note = chemically synthesized
  source 1..22: mol_type = other DNA
tcaatggaattcacagcctctt

SEQ ID NO: 60725 - DNA, 22 bp, synthetic construct
  misc_feature 1..22: note = chemically synthesized
  source 1..22: mol_type = other DNA
acagcctcttatggtgccttac

SEQ ID NO: 60726 - DNA, 22 bp, synthetic construct
  misc_feature 1..22: note = chemically synthesized
  source 1..22: mol_type = other DNA
ttatggtgccttaccctttcat

SEQ ID NO: 60727 - DNA, 22 bp, synthetic construct
  misc_feature 1..22: note = chemically synthesized
  source 1..22: mol_type = other DNA
atggtgccttaccctttcattg

SEQ ID NO: 60728 - DNA, 22 bp, synthetic construct
  misc_feature 1..22: note = chemically synthesized
  source 1..22: mol_type = other DNA
tggtgccttaccctttcattgt

SEQ ID NO: 60729 - DNA, 22 bp, synthetic construct
  misc_feature 1..22: note = chemically synthesized
  source 1..22: mol_type = other DNA
accctttcattgtgttgtaaag

SEQ ID NO: 60730 - DNA, 22 bp, synthetic construct
  misc_feature 1..22: note = chemically synthesized
  source 1..22: mol_type = other DNA
ccctttcattgtgttgtaaaga

SEQ ID NO: 60731 - DNA, 22 bp, synthetic construct
  misc_feature 1..22: note = chemically synthesized
  source 1..22: mol_type = other DNA
tcattgtgttgtaaagacagtc

SEQ ID NO: 60732 - DNA, 22 bp, synthetic construct
  misc_feature 1..22: note = chemically synthesized
  source 1..22: mol_type = other DNA
cattgtgttgtaaagacagtca

SEQ ID NO: 60733 - DNA, 22 bp, synthetic construct
  misc_feature 1..22: note = chemically synthesized
  source 1..22: mol_type = other DNA
attgtgttgtaaagacagtcag

SEQ ID NO: 60734 - DNA, 22 bp, synthetic construct
  misc_feature 1..22: note = chemically synthesized
  source 1..22: mol_type = other DNA
tgttgtaaagacagtcagacca

SEQ ID NO: 60735 - DNA, 22 bp, synthetic construct
  misc_feature 1..22: note = chemically synthesized
  source 1..22: mol_type = other DNA
taaagacagtcagaccaactag

SEQ ID NO: 60736 - DNA, 22 bp, synthetic construct
  misc_feature 1..22: note = chemically synthesized
  source 1..22: mol_type = other DNA
gatttatttgcacaactctgat

SEQ ID NO: 60737 - DNA, 22 bp, synthetic construct
  misc_feature 1..22: note = chemically synthesized
  source 1..22: mol_type = other DNA
atttgcacaactctgatttttt

SEQ ID NO: 60738 - DNA, 22 bp, synthetic construct
  misc_feature 1..22: note = chemically synthesized
  source 1..22: mol_type = other DNA
tttgcacaactctgattttttt

SEQ ID NO: 60739 - DNA, 22 bp, synthetic construct
  misc_feature 1..22: note = chemically synthesized
  source 1..22: mol_type = other DNA
gcacaactctgatttttttcct

SEQ ID NO: 60740 - DNA, 22 bp, synthetic construct
  misc_feature 1..22: note = chemically synthesized
  source 1..22: mol_type = other DNA
cacaactctgatttttttccta

SEQ ID NO: 60741 - DNA, 22 bp, synthetic construct
  misc_feature 1..22: note = chemically synthesized
  source 1..22: mol_type = other DNA
tgatttttttcctaagaaactc

SEQ ID NO: 60742 - DNA, 22 bp, synthetic construct
  misc_feature 1..22: note = chemically synthesized
  source 1..22: mol_type = other DNA
atttttttcctaagaaactccc

SEQ ID NO: 60743 - DNA, 22 bp, synthetic construct
  misc_feature 1..22: note = chemically synthesized
  source 1..22: mol_type = other DNA
ttttcctaagaaactcccccac

SEQ ID NO: 60744 - DNA, 22 bp, synthetic construct
  misc_feature 1..22: note = chemically synthesized
  source 1..22: mol_type = other DNA
tttcctaagaaactcccccacc

SEQ ID NO: 60745 - DNA, 22 bp, synthetic construct
  misc_feature 1..22: note = chemically synthesized
  source 1..22: mol_type = other DNA
ttcctaagaaactcccccaccc

SEQ ID NO: 60746 - DNA, 22 bp, synthetic construct
  misc_feature 1..22: note = chemically synthesized
  source 1..22: mol_type = other DNA
tcctaagaaactcccccaccca

SEQ ID NO: 60747 - DNA, 22 bp, synthetic construct
  misc_feature 1..22: note = chemically synthesized
  source 1..22: mol_type = other DNA
cctaagaaactcccccacccaa

SEQ ID NO: 60748 - DNA, 22 bp, synthetic construct
  misc_feature 1..22: note = chemically synthesized
  source 1..22: mol_type = other DNA
ctaagaaactcccccacccaat

SEQ ID NO: 60749 - DNA, 22 bp, synthetic construct
  misc_feature 1..22: note = chemically synthesized
  source 1..22: mol_type = other DNA
agaaactcccccacccaattta

SEQ ID NO: 60750 - DNA, 22 bp, synthetic construct
  misc_feature 1..22: note = chemically synthesized
  source 1..22: mol_type = other DNA
ccccacccaatttaattttttt

SEQ ID NO: 60751 - DNA, 22 bp, synthetic construct
  misc_feature 1..22: note = chemically synthesized
  source 1..22: mol_type = other DNA
aatttttttttttttttgagat

SEQ ID NO: 60752 - DNA, 22 bp, synthetic construct
  misc_feature 1..22: note = chemically synthesized
  source 1..22: mol_type = other DNA
atttttttttttttttgagatg

SEQ ID NO: 60753 - DNA, 22 bp, synthetic construct
  misc_feature 1..22: note = chemically synthesized
  source 1..22: mol_type = other DNA
ttttttttttttgagatggagt

SEQ ID NO: 60754 - DNA, 22 bp, synthetic construct
  misc_feature 1..22: note = chemically synthesized
  source 1..22: mol_type = other DNA
tttttttttttgagatggagtc

SEQ ID NO: 60755 - DNA, 22 bp, synthetic construct
  misc_feature 1..22: note = chemically synthesized
  source 1..22: mol_type = other DNA
ttttttttttgagatggagtct

SEQ ID NO: 60756 - DNA, 22 bp, synthetic construct
  misc_feature 1..22: note = chemically synthesized
  source 1..22: mol_type = other DNA
tttttttttgagatggagtctc

SEQ ID NO: 60757 - DNA, 22 bp, synthetic construct
  misc_feature 1..22: note = chemically synthesized
  source 1..22: mol_type = other DNA
ttttttttgagatggagtctcg

SEQ ID NO: 60758 - DNA, 22 bp, synthetic construct
  misc_feature 1..22: note = chemically synthesized
  source 1..22: mol_type = other DNA
tttttttgagatggagtctcgc

SEQ ID NO: 60759 - DNA, 22 bp, synthetic construct
  misc_feature 1..22: note = chemically synthesized
  source 1..22: mol_type = other DNA
ttttttgagatggagtctcgct

SEQ ID NO: 60760 - DNA, 22 bp, synthetic construct
  misc_feature 1..22: note = chemically synthesized
  source 1..22: mol_type = other DNA
tttttgagatggagtctcgctc

SEQ ID NO: 60761 - DNA, 22 bp, synthetic construct
  misc_feature 1..22: note = chemically synthesized
  source 1..22: mol_type = other DNA
ttttgagatggagtctcgctct

SEQ ID NO: 60762 - DNA, 22 bp, synthetic construct
  misc_feature 1..22: note = chemically synthesized
  source 1..22: mol_type = other DNA
tttgagatggagtctcgctctg

SEQ ID NO: 60763 - DNA, 22 bp, synthetic construct
  misc_feature 1..22: note = chemically synthesized
  source 1..22: mol_type = other DNA
ttgagatggagtctcgctctgt

SEQ ID NO: 60764 - DNA, 22 bp, synthetic construct
  misc_feature 1..22: note = chemically synthesized
  source 1..22: mol_type = other DNA
tgagatggagtctcgctctgtc

SEQ ID NO: 60765 - DNA, 22 bp, synthetic construct
  misc_feature 1..22: note = chemically synthesized
  source 1..22: mol_type = other DNA
gagatggagtctcgctctgtcg

SEQ ID NO: 60766 - DNA, 22 bp, synthetic construct
  misc_feature 1..22: note = chemically synthesized
  source 1..22: mol_type = other DNA
agatggagtctcgctctgtcgc

SEQ ID NO: 60767 - DNA, 22 bp, synthetic construct
  misc_feature 1..22: note = chemically synthesized
  source 1..22: mol_type = other DNA
gctctgtcgcccaggctggagt

SEQ ID NO: 60768 - DNA, 22 bp, synthetic construct
  misc_feature 1..22: note = chemically synthesized
  source 1..22: mol_type = other DNA
tgtcgcccaggctggagtgcag

SEQ ID NO: 60769 - DNA, 22 bp, synthetic construct
  misc_feature 1..22: note = chemically synthesized
  source 1..22: mol_type = other DNA
tcgcccaggctggagtgcagtg

SEQ ID NO: 60770 - DNA, 22 bp, synthetic construct
  misc_feature 1..22: note = chemically synthesized
  source 1..22: mol_type = other DNA
gagtgcagtgctacgatctcgg

SEQ ID NO: 60771 - DNA, 22 bp, synthetic construct
  misc_feature 1..22: note = chemically synthesized
  source 1..22: mol_type = other DNA
cgatctcggctcattgcagcct

SEQ ID NO: 60772 - DNA, 22 bp, synthetic construct
  misc_feature 1..22: note = chemically synthesized
  source 1..22: mol_type = other DNA
ggctcattgcagcctccgcctc

SEQ ID NO: 60773 - DNA, 22 bp, synthetic construct
  misc_feature 1..22: note = chemically synthesized
  source 1..22: mol_type = other DNA
attgcagcctccgcctcccagg

SEQ ID NO: 60774 - DNA, 22 bp, synthetic construct
  misc_feature 1..22: note = chemically synthesized
  source 1..22: mol_type = other DNA
cagcctccgcctcccaggttca

SEQ ID NO: 60775 - DNA, 22 bp, synthetic construct
  misc_feature 1..22: note = chemically synthesized
  source 1..22: mol_type = other DNA
cgcctcccaggttcaagtgatt

SEQ ID NO: 60776 - DNA, 22 bp, synthetic construct
  misc_feature 1..22: note = chemically synthesized
  source 1..22: mol_type = other DNA
ccaggttcaagtgattctcctg

SEQ ID NO: 60777 - DNA, 22 bp, synthetic construct
  misc_feature 1..22: note = chemically synthesized
  source 1..22: mol_type = other DNA
aagtgattctcctgcctcagcc

SEQ ID NO: 60778 - DNA, 22 bp, synthetic construct
  misc_feature 1..22: note = chemically synthesized
  source 1..22: mol_type = other DNA
tcctgcctcagcctcccaagta

SEQ ID NO: 60779 - DNA, 22 bp, synthetic construct
  misc_feature 1..22: note = chemically synthesized
  source 1..22: mol_type = other DNA
ctgcctcagcctcccaagtagc

SEQ ID NO: 60780 - DNA, 22 bp, synthetic construct
  misc_feature 1..22: note = chemically synthesized
  source 1..22: mol_type = other DNA
cctcagcctcccaagtagctgg

SEQ ID NO: 60781 - DNA, 22 bp, synthetic construct
  misc_feature 1..22: note = chemically synthesized
  source 1..22: mol_type = other DNA
agcctcccaagtagctgggatt

SEQ ID NO: 60782 - DNA, 22 bp, synthetic construct
  misc_feature 1..22: note = chemically synthesized
  source 1..22: mol_type = other DNA
ccaagtagctgggattataggt

SEQ ID NO: 60783 - DNA, 22 bp, synthetic construct
  misc_feature 1..22: note = chemically synthesized
  source 1..22: mol_type = other DNA
ggattataggtgcatgccatca

SEQ ID NO: 60784 - DNA, 22 bp, synthetic construct
  misc_feature 1..22: note = chemically synthesized
  source 1..22: mol_type = other DNA
taggtgcatgccatcacacctg

SEQ ID NO: 60785 - DNA, 22 bp, synthetic construct
  misc_feature 1..22: note = chemically synthesized
  source 1..22: mol_type = other DNA
gctgattttttttttttttttt

SEQ ID NO: 60786 - DNA, 22 bp, synthetic construct
  misc_feature 1..22: note = chemically synthesized
  source 1..22: mol_type = other DNA
attttttttttttttttttttt

SEQ ID NO: 60787 - DNA, 22 bp, synthetic construct
  misc_feature 1..22: note = chemically synthesized
  source 1..22: mol_type = other DNA
ttttttttttttttttttttaa

SEQ ID NO: 60788 - DNA, 22 bp, synthetic construct
  misc_feature 1..22: note = chemically synthesized
  source 1..22: mol_type = other DNA
tttttttttttttttttttaag

SEQ ID NO: 60789 - DNA, 22 bp, synthetic construct
  misc_feature 1..22: note = chemically synthesized
  source 1..22: mol_type = other DNA
ttttttttttttttttttaagt

SEQ ID NO: 60790 - DNA, 22 bp, synthetic construct
  misc_feature 1..22: note = chemically synthesized
  source 1..22: mol_type = other DNA
tttttttttttttttttaagta

SEQ ID NO: 60791 - DNA, 22 bp, synthetic construct
  misc_feature 1..22: note = chemically synthesized
  source 1..22: mol_type = other DNA
ttttttttttttttttaagtag

SEQ ID NO: 60792 - DNA, 22 bp, synthetic construct
  misc_feature 1..22: note = chemically synthesized
  source 1..22: mol_type = other DNA
tttttttttttttttaagtaga

SEQ ID NO: 60793 - DNA, 22 bp, synthetic construct
  misc_feature 1..22: note = chemically synthesized
  source 1..22: mol_type = other DNA
ttttttttttttttaagtagag

SEQ ID NO: 60794 - DNA, 22 bp, synthetic construct
  misc_feature 1..22: note = chemically synthesized
  source 1..22: mol_type = other DNA
tttttttttttttaagtagaga

SEQ ID NO: 60795 - DNA, 22 bp, synthetic construct
  misc_feature 1..22: note = chemically synthesized
  source 1..22: mol_type = other DNA
ttttttttttttaagtagagat

SEQ ID NO: 60796 - DNA, 22 bp, synthetic construct
  misc_feature 1..22: note = chemically synthesized
  source 1..22: mol_type = other DNA
tttttttttttaagtagagatg

SEQ ID NO: 60797 - DNA, 22 bp, synthetic construct
  misc_feature 1..22: note = chemically synthesized
  source 1..22: mol_type = other DNA
ttttttttttaagtagagatgg

SEQ ID NO: 60798 - DNA, 22 bp, synthetic construct
  misc_feature 1..22: note = chemically synthesized
  source 1..22: mol_type = other DNA
tttttttttaagtagagatggg

SEQ ID NO: 60799 - DNA, 22 bp, synthetic construct
  misc_feature 1..22: note = chemically synthesized
  source 1..22: mol_type = other DNA
ttttttttaagtagagatgggg

SEQ ID NO: 60800 - DNA, 22 bp, synthetic construct
  misc_feature 1..22: note = chemically synthesized
  source 1..22: mol_type = other DNA
tttttttaagtagagatggggt

SEQ ID NO: 60801 - DNA, 22 bp, synthetic construct
  misc_feature 1..22: note = chemically synthesized
  source 1..22: mol_type = other DNA
ttttttaagtagagatggggtt

SEQ ID NO: 60802 - DNA, 22 bp, synthetic construct
  misc_feature 1..22: note = chemically synthesized
  source 1..22: mol_type = other DNA
tttttaagtagagatggggttt

SEQ ID NO: 60803 - DNA, 22 bp, synthetic construct
  misc_feature 1..22: note = chemically synthesized
  source 1..22: mol_type = other DNA
ttttaagtagagatggggtttc

SEQ ID NO: 60804 - DNA, 22 bp, synthetic construct
  misc_feature 1..22: note = chemically synthesized
  source 1..22: mol_type = other DNA
tttaagtagagatggggtttca

SEQ ID NO: 60805 - DNA, 22 bp, synthetic construct
  misc_feature 1..22: note = chemically synthesized
  source 1..22: mol_type = other DNA
ttaagtagagatggggtttcac

SEQ ID NO: 60806 - DNA, 22 bp, synthetic construct
  misc_feature 1..22: note = chemically synthesized
  source 1..22: mol_type = other DNA
taagtagagatggggtttcacc

SEQ ID NO: 60807 - DNA, 22 bp, synthetic construct
  misc_feature 1..22: note = chemically synthesized
  source 1..22: mol_type = other DNA
aagtagagatggggtttcacca

SEQ ID NO: 60808 - DNA, 22 bp, synthetic construct
  misc_feature 1..22: note = chemically synthesized
  source 1..22: mol_type = other DNA
agtagagatggggtttcaccat

SEQ ID NO: 60809 - DNA, 22 bp, synthetic construct
  misc_feature 1..22: note = chemically synthesized
  source 1..22: mol_type = other DNA
caccatgttggctaggctggtc

SEQ ID NO: 60810 - DNA, 22 bp, synthetic construct
  misc_feature 1..22: note = chemically synthesized
  source 1..22: mol_type = other DNA
accatgttggctaggctggtct

SEQ ID NO: 60811 - DNA, 22 bp, synthetic construct
  misc_feature 1..22: note = chemically synthesized
  source 1..22: mol_type = other DNA
gctaggctggtcttgaactcct

SEQ ID NO: 60812 - DNA, 22 bp, synthetic construct
  misc_feature 1..22: note = chemically synthesized
  source 1..22: mol_type = other DNA
ggctggtcttgaactcctgacc

SEQ ID NO: 60813 - DNA, 22 bp, synthetic construct
  misc_feature 1..22: note = chemically synthesized
  source 1..22: mol_type = other DNA
gtcttgaactcctgacctcagg

SEQ ID NO: 60814 - DNA, 22 bp, synthetic construct
  misc_feature 1..22: note = chemically synthesized
  source 1..22: mol_type = other DNA
gaactcctgacctcaggtgacc

SEQ ID NO: 60815 - DNA, 22 bp, synthetic construct
  misc_feature 1..22: note = chemically synthesized
  source 1..22: mol_type = other DNA
aactcctgacctcaggtgaccc

SEQ ID NO: 60816 - DNA, 22 bp, synthetic construct
  misc_feature 1..22: note = chemically synthesized
  source 1..22: mol_type = other DNA
ctgacctcaggtgacccacacg

SEQ ID NO: 60817 - DNA, 22 bp, synthetic construct
  misc_feature 1..22: note = chemically synthesized
  source 1..22: mol_type = other DNA
acctcaggtgacccacacgcct

SEQ ID NO: 60818 - DNA, 22 bp, synthetic construct
  misc_feature 1..22: note = chemically synthesized
  source 1..22: mol_type = other DNA
aggtgacccacacgcctcggcc

SEQ ID NO: 60819 - DNA, 22 bp, synthetic construct
  misc_feature 1..22: note = chemically synthesized
  source 1..22: mol_type = other DNA
ggcctcccaaaatgctgagatt

SEQ ID NO: 60820 - DNA, 22 bp, synthetic construct
  misc_feature 1..22: note = chemically synthesized
  source 1..22: mol_type = other DNA
ccaaaatgctgagattacaggt

SEQ ID NO: 60821 - DNA, 22 bp, synthetic construct
  misc_feature 1..22: note = chemically synthesized
  source 1..22: mol_type = other DNA
agattacaggtgtgagccaccg

SEQ ID NO: 60822 - DNA, 22 bp, synthetic construct
  misc_feature 1..22: note = chemically synthesized
  source 1..22: mol_type = other DNA
caggtgtgagccaccgcacctg

SEQ ID NO: 60823 - DNA, 22 bp, synthetic construct
  misc_feature 1..22: note = chemically synthesized
  source 1..22: mol_type = other DNA
gctatttaattctattttcaga

SEQ ID NO: 60824 - DNA, 22 bp, synthetic construct
  misc_feature 1..22: note = chemically synthesized
  source 1..22: mol_type = other DNA
tttaattctattttcagatggc

SEQ ID NO: 60825 - DNA, 22 bp, synthetic construct
  misc_feature 1..22: note = chemically synthesized
  source 1..22: mol_type = other DNA
aattctattttcagatggcttg

SEQ ID NO: 60826 - DNA, 22 bp, synthetic construct
  misc_feature 1..22: note = chemically synthesized
  source 1..22: mol_type = other DNA
attctattttcagatggcttgt

SEQ ID NO: 60827 - DNA, 22 bp, synthetic construct
  misc_feature 1..22: note = chemically synthesized
  source 1..22: mol_type = other DNA
tattttcagatggcttgttctc

SEQ ID NO: 60828 - DNA, 22 bp, synthetic construct
  misc_feature 1..22: note = chemically synthesized
  source 1..22: mol_type = other DNA
ttttcagatggcttgttctcca

SEQ ID NO: 60829 - DNA, 22 bp, synthetic construct
  misc_feature 1..22: note = chemically synthesized
  source 1..22: mol_type = other DNA
tcagatggcttgttctccaagt

SEQ ID NO: 60830 - DNA, 22 bp, synthetic construct
  misc_feature 1..22: note = chemically synthesized
  source 1..22: mol_type = other DNA
cagatggcttgttctccaagtc

SEQ ID NO: 60831 - DNA, 22 bp, synthetic construct
  misc_feature 1..22: note = chemically synthesized
  source 1..22: mol_type = other DNA
agatggcttgttctccaagtct

SEQ ID NO: 60832 - DNA, 22 bp, synthetic construct
  misc_feature 1..22: note = chemically synthesized
  source 1..22: mol_type = other DNA
gttctccaagtcttgggactgc

SEQ ID NO: 60833 - DNA, 22 bp, synthetic construct
  misc_feature 1..22: note = chemically synthesized
  source 1..22: mol_type = other DNA
ttctccaagtcttgggactgcc

SEQ ID NO: 60834 - DNA, 22 bp, synthetic construct
  misc_feature 1..22: note = chemically synthesized
  source 1..22: mol_type = other DNA
tccaagtcttgggactgcccag

SEQ ID NO: 60835 - DNA, 22 bp, synthetic construct
  misc_feature 1..22: note = chemically synthesized
  source 1..22: mol_type = other DNA
caagtcttgggactgcccagaa

SEQ ID NO: 60836 - DNA, 22 bp, synthetic construct
  misc_feature 1..22: note = chemically synthesized
  source 1..22: mol_type = other DNA
gggactgcccagaaatgggttg

SEQ ID NO: 60837 - DNA, 22 bp, synthetic construct
  misc_feature 1..22: note = chemically synthesized
  source 1..22: mol_type = other DNA
ggactgcccagaaatgggttgc

SEQ ID NO: 60838 - DNA, 22 bp, synthetic construct
  misc_feature 1..22: note = chemically synthesized
  source 1..22: mol_type = other DNA
cccagaaatgggttgcctggta

SEQ ID NO: 60839 - DNA, 22 bp, synthetic construct
  misc_feature 1..22: note = chemically synthesized
  source 1..22: mol_type = other DNA
cctggtagggctcatggctcag

SEQ ID NO: 60840 - DNA, 22 bp, synthetic construct
  misc_feature 1..22: note = chemically synthesized
  source 1..22: mol_type = other DNA
gtagggctcatggctcagcact

SEQ ID NO: 60841 - DNA, 22 bp, synthetic construct
  misc_feature 1..22: note = chemically synthesized
  source 1..22: mol_type = other DNA
atggctcagcactgcgatccca

SEQ ID NO: 60842 - DNA, 22 bp, synthetic construct
  misc_feature 1..22: note = chemically synthesized
  source 1..22: mol_type = other DNA
agcactgcgatcccaccagtgg

SEQ ID NO: 60843 - DNA, 22 bp, synthetic construct
  misc_feature 1..22: note = chemically synthesized
  source 1..22: mol_type = other DNA
cgatcccaccagtggccggggt

SEQ ID NO: 60844 - DNA, 22 bp, synthetic construct
  misc_feature 1..22: note = chemically synthesized
  source 1..22: mol_type = other DNA
cttagccttctagttcagttgt

SEQ ID NO: 60845 - DNA, 22 bp, synthetic construct
  misc_feature 1..22: note = chemically synthesized
  source 1..22: mol_type = other DNA
agccttctagttcagttgtggc

SEQ ID NO: 60846 - DNA, 22 bp, synthetic construct
  misc_feature 1..22: note = chemically synthesized
  source 1..22: mol_type = other DNA
gccttctagttcagttgtggcc

SEQ ID NO: 60847 - DNA, 22 bp, synthetic construct
  misc_feature 1..22: note = chemically synthesized
  source 1..22: mol_type = other DNA
ctagttcagttgtggcccttct

SEQ ID NO: 60848 - DNA, 22 bp, synthetic construct
  misc_feature 1..22: note = chemically synthesized
  source 1..22: mol_type = other DNA
tagttcagttgtggcccttctg

SEQ ID NO: 60849 - DNA, 22 bp, synthetic construct
  misc_feature 1..22: note = chemically synthesized
  source 1..22: mol_type = other DNA
gttcagttgtggcccttctggg

SEQ ID NO: 60850 - DNA, 22 bp, synthetic construct
  misc_feature 1..22: note = chemically synthesized
  source 1..22: mol_type = other DNA
agttgtggcccttctgggcttc

SEQ ID NO: 60851 - DNA, 22 bp, synthetic construct
  misc_feature 1..22: note = chemically synthesized
  source 1..22: mol_type = other DNA
tggcccttctgggcttcctttg

SEQ ID NO: 60852 - DNA, 22 bp, synthetic construct
  misc_feature 1..22: note = chemically synthesized
  source 1..22: mol_type = other DNA
ctgggcttcctttgctaccagt

SEQ ID NO: 60853 - DNA, 22 bp, synthetic construct
  misc_feature 1..22: note = chemically synthesized
  source 1..22: mol_type = other DNA
tgggcttcctttgctaccagtt

SEQ ID NO: 60854 - DNA, 22 bp, synthetic construct
  misc_feature 1..22: note = chemically synthesized
  source 1..22: mol_type = other DNA
ggcttcctttgctaccagtttc

SEQ ID NO: 60855 - DNA, 22 bp, synthetic construct
  misc_feature 1..22: note = chemically synthesized
  source 1..22: mol_type = other DNA
cctttgctaccagtttccacca

SEQ ID NO: 60856 - DNA, 22 bp, synthetic construct
  misc_feature 1..22: note = chemically synthesized
  source 1..22: mol_type = other DNA
ctttgctaccagtttccaccac

SEQ ID NO: 60857 - DNA, 22 bp, synthetic construct
  misc_feature 1..22: note = chemically synthesized
  source 1..22: mol_type = other DNA
tgctaccagtttccaccacatg

SEQ ID NO: 60858 - DNA, 22 bp, synthetic construct
  misc_feature 1..22: note = chemically synthesized
  source 1..22: mol_type = other DNA
gctaccagtttccaccacatgg

SEQ ID NO: 60859 - DNA, 22 bp, synthetic construct
  misc_feature 1..22: note = chemically synthesized
  source 1..22: mol_type = other DNA
ctaccagtttccaccacatggc

SEQ ID NO: 60860 - DNA, 22 bp, synthetic construct
  misc_feature 1..22: note = chemically synthesized
  source 1..22: mol_type = other DNA
ccagtttccaccacatggctgg

SEQ ID NO: 60861 - DNA, 22 bp, synthetic construct
  misc_feature 1..22: note = chemically synthesized
  source 1..22: mol_type = other DNA
ccaccacatggctggaggtagc

SEQ ID NO: 60862 - DNA, 22 bp, synthetic construct
  misc_feature 1..22: note = chemically synthesized
  source 1..22: mol_type = other DNA
caccacatggctggaggtagcc

SEQ ID NO: 60863 - DNA, 22 bp, synthetic construct
  misc_feature 1..22: note = chemically synthesized
  source 1..22: mol_type = other DNA
gaggtagcccagcctggaagcc

SEQ ID NO: 60864 - DNA, 22 bp, synthetic construct
  misc_feature 1..22: note = chemically synthesized
  source 1..22: mol_type = other DNA
gaagcctctcagagctccagcc

SEQ ID NO: 60865 - DNA, 22 bp, synthetic construct
  misc_feature 1..22: note = chemically synthesized
  source 1..22: mol_type = other DNA
tcagagctccagcctggaagcc

SEQ ID NO: 60866 - DNA, 22 bp, synthetic construct
  misc_feature 1..22: note = chemically synthesized
  source 1..22: mol_type = other DNA
agagctccagcctggaagcctc

SEQ ID NO: 60867 - DNA, 22 bp, synthetic construct
  misc_feature 1..22: note = chemically synthesized
  source 1..22: mol_type = other DNA
cagcctggaagcctctcagaga

SEQ ID NO: 60868 - DNA, 22 bp, synthetic construct
  misc_feature 1..22: note = chemically synthesized
  source 1..22: mol_type = other DNA
gaagcctctcagagagtgcttg

SEQ ID NO: 60869 - DNA, 22 bp, synthetic construct
  misc_feature 1..22: note = chemically synthesized
  source 1..22: mol_type = other DNA
tcagagagtgcttggagcactg

SEQ ID NO: 60870 - DNA, 22 bp, synthetic construct
  misc_feature 1..22: note = chemically synthesized
  source 1..22: mol_type = other DNA
agagagtgcttggagcactgct

SEQ ID NO: 60871 - DNA, 22 bp, synthetic construct
  misc_feature 1..22: note = chemically synthesized
  source 1..22: mol_type = other DNA
ggagcactgctagctgcacgtg

SEQ ID NO: 60872 - DNA, 22 bp, synthetic construct
  misc_feature 1..22: note = chemically synthesized
  source 1..22: mol_type = other DNA
gagcactgctagctgcacgtgc

SEQ ID NO: 60873 - DNA, 22 bp, synthetic construct
  misc_feature 1..22: note = chemically synthesized
  source 1..22: mol_type = other DNA
ctagctgcacgtgctctcagga

SEQ ID NO: 60874 - DNA, 22 bp, synthetic construct
  misc_feature 1..22: note = chemically synthesized
  source 1..22: mol_type = other DNA
gctgcacgtgctctcaggaaag

SEQ ID NO: 60875 - DNA, 22 bp, synthetic construct
  misc_feature 1..22: note = chemically synthesized
  source 1..22: mol_type = other DNA
cacgtgctctcaggaaagtcca

SEQ ID NO: 60876 - DNA, 22 bp, synthetic construct
  misc_feature 1..22: note = chemically synthesized
  source 1..22: mol_type = other DNA
tcaggaaagtccacaaggagat

SEQ ID NO: 60877 - DNA, 22 bp, synthetic construct
  misc_feature 1..22: note = chemically synthesized
  source 1..22: mol_type = other DNA
aggaaagtccacaaggagatgg

SEQ ID NO: 60878 - DNA, 22 bp, synthetic construct
  misc_feature 1..22: note = chemically synthesized
  source 1..22: mol_type = other DNA
gtgtggctcagagtccttgtgt

SEQ ID NO: 60879 - DNA, 22 bp, synthetic construct
  misc_feature 1..22: note = chemically synthesized
  source 1..22: mol_type = other DNA
agagtccttgtgtgctgcctca

SEQ ID NO: 60880 - DNA, 22 bp, synthetic construct
  misc_feature 1..22: note = chemically synthesized
  source 1..22: mol_type = other DNA
gtgtgctgcctcagcccatgcc

SEQ ID NO: 60881 - DNA, 22 bp, synthetic construct
  misc_feature 1..22: note = chemically synthesized
  source 1..22: mol_type = other DNA
tgtgctgcctcagcccatgcca

SEQ ID NO: 60882 - DNA, 22 bp, synthetic construct
  misc_feature 1..22: note = chemically synthesized
  source 1..22: mol_type = other DNA
cctcagcccatgccaggccacc

SEQ ID NO: 60883 - DNA, 22 bp, synthetic construct
  misc_feature 1..22: note = chemically synthesized
  source 1..22: mol_type = other DNA
agcccatgccaggccacctgtg

SEQ ID NO: 60884 - DNA, 22 bp, synthetic construct
  misc_feature 1..22: note = chemically synthesized
  source 1..22: mol_type = other DNA
tggctgtctgccctcaagtctg

SEQ ID NO: 60885 - DNA, 22 bp, synthetic construct
  misc_feature 1..22: note = chemically synthesized
  source 1..22: mol_type = other DNA
tctgccctcaagtctgtccttc

SEQ ID NO: 60886 - DNA, 22 bp, synthetic construct
  misc_feature 1..22: note = chemically synthesized
  source 1..22: mol_type = other DNA
ccctcaagtctgtccttctctg

SEQ ID NO: 60887 - DNA, 22 bp, synthetic construct
  misc_feature 1..22: note = chemically synthesized
  source 1..22: mol_type = other DNA
aagtctgtccttctctgaggat

SEQ ID NO: 60888 - DNA, 22 bp, synthetic construct
  misc_feature 1..22: note = chemically synthesized
  source 1..22: mol_type = other DNA
tccttctctgaggatttaggac

SEQ ID NO: 60889 - DNA, 22 bp, synthetic construct
  misc_feature 1..22: note = chemically synthesized
  source 1..22: mol_type = other DNA
ctctgaggatttaggactgtga

SEQ ID NO: 60890 - DNA, 22 bp, synthetic construct
  misc_feature 1..22: note = chemically synthesized
  source 1..22: mol_type = other DNA
tctgaggatttaggactgtgaa

SEQ ID NO: 60891 - DNA, 22 bp, synthetic construct
  misc_feature 1..22: note = chemically synthesized
  source 1..22: mol_type = other DNA
tgaggatttaggactgtgaacc

SEQ ID NO: 60892 - DNA, 22 bp, synthetic construct
  misc_feature 1..22: note = chemically synthesized
  source 1..22: mol_type = other DNA
aggatttaggactgtgaaccta

SEQ ID NO: 60893 - DNA, 22 bp, synthetic construct
  misc_feature 1..22: note = chemically synthesized
  source 1..22: mol_type = other DNA
aggactgtgaacctagagaatt

SEQ ID NO: 60894 - DNA, 22 bp, synthetic construct
  misc_feature 1..22: note = chemically synthesized
  source 1..22: mol_type = other DNA
ggactgtgaacctagagaattc

SEQ ID NO: 60895 - DNA, 22 bp, synthetic construct
  misc_feature 1..22: note = chemically synthesized
  source 1..22: mol_type = other DNA
tgaacctagagaattcaaagta

SEQ ID NO: 60896 - DNA, 22 bp, synthetic construct
  misc_feature 1..22: note = chemically synthesized
  source 1..22: mol_type = other DNA
gagaattcaaagtagtggaact

SEQ ID NO: 60897 - DNA, 22 bp, synthetic construct
  misc_feature 1..22: note = chemically synthesized
  source 1..22: mol_type = other DNA
aaagtagtggaactagaatcca

SEQ ID NO: 60898 - DNA, 22 bp, synthetic construct
  misc_feature 1..22: note = chemically synthesized
  source 1..22: mol_type = other DNA
gaatccaggtctcgactcaatc

SEQ ID NO: 60899 - DNA, 22 bp, synthetic construct
  misc_feature 1..22: note = chemically synthesized
  source 1..22: mol_type = other DNA
gactcaatccagggagttttgc

SEQ ID NO: 60900 - DNA, 22 bp, synthetic construct
  misc_feature 1..22: note = chemically synthesized
  source 1..22: mol_type = other DNA
aatccagggagttttgctcacc

SEQ ID NO: 60901 - DNA, 22 bp, synthetic construct
  misc_feature 1..22: note = chemically synthesized
  source 1..22: mol_type = other DNA
tgctcaccacaagccaggaaca

SEQ ID NO: 60902 - DNA, 22 bp, synthetic construct
  misc_feature 1..22: note = chemically synthesized
  source 1..22: mol_type = other DNA
gctcaccacaagccaggaacag

SEQ ID NO: 60903 - DNA, 22 bp, synthetic construct
  misc_feature 1..22: note = chemically synthesized
  source 1..22: mol_type = other DNA
ctcaccacaagccaggaacagc

SEQ ID NO: 60904 - DNA, 22 bp, synthetic construct
  misc_feature 1..22: note = chemically synthesized
  source 1..22: mol_type = other DNA
accacaagccaggaacagcttc

SEQ ID NO: 60905 - DNA, 22 bp, synthetic construct
  misc_feature 1..22: note = chemically synthesized
  source 1..22: mol_type = other DNA
ctcttcatggaggtgcctgtct

SEQ ID NO: 60906 - DNA, 22 bp, synthetic construct
  misc_feature 1..22: note = chemically synthesized
  source 1..22: mol_type = other DNA
tcttcatggaggtgcctgtctg

SEQ ID NO: 60907 - DNA, 22 bp, synthetic construct
  misc_feature 1..22: note = chemically synthesized
  source 1..22: mol_type = other DNA
ttcatggaggtgcctgtctgga

SEQ ID NO: 60908 - DNA, 22 bp, synthetic construct
  misc_feature 1..22: note = chemically synthesized
  source 1..22: mol_type = other DNA
catggaggtgcctgtctggaag

SEQ ID NO: 60909 - DNA, 22 bp, synthetic construct
  misc_feature 1..22: note = chemically synthesized
  source 1..22: mol_type = other DNA
atggaggtgcctgtctggaagg

SEQ ID NO: 60910 - DNA, 22 bp, synthetic construct
  misc_feature 1..22: note = chemically synthesized
  source 1..22: mol_type = other DNA
tctggaaggcagagaatctctg

SEQ ID NO: 60911 - DNA, 22 bp, synthetic construct
  misc_feature 1..22: note = chemically synthesized
  source 1..22: mol_type = other DNA
gaaggcagagaatctctggctt

SEQ ID NO: 60912 - DNA, 22 bp, synthetic construct
  misc_feature 1..22: note = chemically synthesized
  source 1..22: mol_type = other DNA
tggcttgttgagaagagagagt

SEQ ID NO: 60913 - DNA, 22 bp, synthetic construct
  misc_feature 1..22: note = chemically synthesized
  source 1..22: mol_type = other DNA
gcttgttgagaagagagagtct

SEQ ID NO: 60914 - DNA, 22 bp, synthetic construct
  misc_feature 1..22: note = chemically synthesized
  source 1..22: mol_type = other DNA
gttgagaagagagagtctgccc

SEQ ID NO: 60915 - DNA, 22 bp, synthetic construct
  misc_feature 1..22: note = chemically synthesized
  source 1..22: mol_type = other DNA
ttgagaagagagagtctgccct

SEQ ID NO: 60916 - DNA, 22 bp, synthetic construct
  misc_feature 1..22: note = chemically synthesized
  source 1..22: mol_type = other DNA
agaagagagagtctgcccttca

SEQ ID NO: 60917 - DNA, 22 bp, synthetic construct
  misc_feature 1..22: note = chemically synthesized
  source 1..22: mol_type = other DNA
cccttcagactgcaaggtgttc

SEQ ID NO: 60918 - DNA, 22 bp, synthetic construct
  misc_feature 1..22: note = chemically synthesized
  source 1..22: mol_type = other DNA
cagactgcaaggtgttcactgc

SEQ ID NO: 60919 - DNA, 22 bp, synthetic construct
  misc_feature 1..22: note = chemically synthesized
  source 1..22: mol_type = other DNA
agactgcaaggtgttcactgca

SEQ ID NO: 60920 - DNA, 22 bp, synthetic construct
  misc_feature 1..22: note = chemically synthesized
  source 1..22: mol_type = other DNA
caaggtgttcactgcataggac

SEQ ID NO: 60921 - DNA, 22 bp, synthetic construct
  misc_feature 1..22: note = chemically synthesized
  source 1..22: mol_type = other DNA
actgcataggacccttcgtagg

SEQ ID NO: 60922 - DNA, 22 bp, synthetic construct
  misc_feature 1..22: note = chemically synthesized
  source 1..22: mol_type = other DNA
cataggacccttcgtaggtgct

SEQ ID NO: 60923 - DNA, 22 bp, synthetic construct
  misc_feature 1..22: note = chemically synthesized
  source 1..22: mol_type = other DNA
cgtaggtgctgacccagctgtg

SEQ ID NO: 60924 - DNA, 22 bp, synthetic construct
  misc_feature 1..22: note = chemically synthesized
  source 1..22: mol_type = other DNA
gtaggtgctgacccagctgtgc

SEQ ID NO: 60925 - DNA, 22 bp, synthetic construct
  misc_feature 1..22: note = chemically synthesized
  source 1..22: mol_type = other DNA
acccagctgtgcccagtgctag

SEQ ID NO: 60926 - DNA, 22 bp, synthetic construct
  misc_feature 1..22: note = chemically synthesized
  source 1..22: mol_type = other DNA
tgcccagtgctagagctaggac

SEQ ID NO: 60927 - DNA, 22 bp, synthetic construct
  misc_feature 1..22: note = chemically synthesized
  source 1..22: mol_type = other DNA
gagctaggactcagttctattt

SEQ ID NO: 60928 - DNA, 22 bp, synthetic construct
  misc_feature 1..22: note = chemically synthesized
  source 1..22: mol_type = other DNA
ggactcagttctattttcccag

SEQ ID NO: 60929 - DNA, 22 bp, synthetic construct
  misc_feature 1..22: note = chemically synthesized
  source 1..22: mol_type = other DNA
agttctattttcccagagagtg

SEQ ID NO: 60930 - DNA, 22 bp, synthetic construct
  misc_feature 1..22: note = chemically synthesized
  source 1..22: mol_type = other DNA
tattttcccagagagtggtgtg

SEQ ID NO: 60931 - DNA, 22 bp, synthetic construct
  misc_feature 1..22: note = chemically synthesized
  source 1..22: mol_type = other DNA
ttttcccagagagtggtgtgat

SEQ ID NO: 60932 - DNA, 22 bp, synthetic construct
  misc_feature 1..22: note = chemically synthesized
  source 1..22: mol_type = other DNA
tcccagagagtggtgtgatggg

SEQ ID NO: 60933 - DNA, 22 bp, synthetic construct
  misc_feature 1..22: note = chemically synthesized
  source 1..22: mol_type = other DNA
cccagagagtggtgtgatggga

SEQ ID NO: 60934 - DNA, 22 bp, synthetic construct
  misc_feature 1..22: note = chemically synthesized
  source 1..22: mol_type = other DNA
ccagagagtggtgtgatgggag

SEQ ID NO: 60935 - DNA, 22 bp, synthetic construct
  misc_feature 1..22: note = chemically synthesized
  source 1..22: mol_type = other DNA
tttctttttcttttttcagtcc

SEQ ID NO: 60936 - DNA, 22 bp, synthetic construct
  misc_feature 1..22: note = chemically synthesized
  source 1..22: mol_type = other DNA
ctttttcttttttcagtcctga

SEQ ID NO: 60937 - DNA, 22 bp, synthetic construct
  misc_feature 1..22: note = chemically synthesized
  source 1..22: mol_type = other DNA
tttttcttttttcagtcctgat

SEQ ID NO: 60938 - DNA, 22 bp, synthetic construct
  misc_feature 1..22: note = chemically synthesized
  source 1..22: mol_type = other DNA
tttcttttttcagtcctgatca

SEQ ID NO: 60939 - DNA, 22 bp, synthetic construct
  misc_feature 1..22: note = chemically synthesized
  source 1..22: mol_type = other DNA
ttcttttttcagtcctgatcag

SEQ ID NO: 60940 - DNA, 22 bp, synthetic construct
  misc_feature 1..22: note = chemically synthesized
  source 1..22: mol_type = other DNA
tcttttttcagtcctgatcagg

SEQ ID NO: 60941 - DNA, 22 bp, synthetic construct
  misc_feature 1..22: note = chemically synthesized
  source 1..22: mol_type = other DNA
cttttttcagtcctgatcaggg

SEQ ID NO: 60942 - DNA, 22 bp, synthetic construct
  misc_feature 1..22: note = chemically synthesized
  source 1..22: mol_type = other DNA
ttttttcagtcctgatcaggga

SEQ ID NO: 60943 - DNA, 22 bp, synthetic construct
  misc_feature 1..22: note = chemically synthesized
  source 1..22: mol_type = other DNA
ttttcagtcctgatcagggatg

SEQ ID NO: 60944 - DNA, 22 bp, synthetic construct
  misc_feature 1..22: note = chemically synthesized
  source 1..22: mol_type = other DNA
tttcagtcctgatcagggatga

SEQ ID NO: 60945 - DNA, 22 bp, synthetic construct
  misc_feature 1..22: note = chemically synthesized
  source 1..22: mol_type = other DNA
ttcagtcctgatcagggatgag

SEQ ID NO: 60946 - DNA, 22 bp, synthetic construct
  misc_feature 1..22: note = chemically synthesized
  source 1..22: mol_type = other DNA
tcagtcctgatcagggatgagt

SEQ ID NO: 60947 - DNA, 22 bp, synthetic construct
  misc_feature 1..22: note = chemically synthesized
  source 1..22: mol_type = other DNA
cagtcctgatcagggatgagtc

SEQ ID NO: 60948 - DNA, 22 bp, synthetic construct
  misc_feature 1..22: note = chemically synthesized
  source 1..22: mol_type = other DNA
agtcctgatcagggatgagtcc

SEQ ID NO: 60949 - DNA, 22 bp, synthetic construct
  misc_feature 1..22: note = chemically synthesized
  source 1..22: mol_type = other DNA
atcagggatgagtccgtgctgt

SEQ ID NO: 60950 - DNA, 22 bp, synthetic construct
  misc_feature 1..22: note = chemically synthesized
  source 1..22: mol_type = other DNA
ttgggtttattcatttacttta

SEQ ID NO: 60951 - DNA, 22 bp, synthetic construct
  misc_feature 1..22: note = chemically synthesized
  source 1..22: mol_type = other DNA
ggtttattcatttactttagcg

SEQ ID NO: 60952 - DNA, 22 bp, synthetic construct
  misc_feature 1..22: note = chemically synthesized
  source 1..22: mol_type = other DNA
attcatttactttagcgtgtga

SEQ ID NO: 60953 - DNA, 22 bp, synthetic construct
  misc_feature 1..22: note = chemically synthesized
  source 1..22: mol_type = other DNA
ttcatttactttagcgtgtgag

SEQ ID NO: 60954 - DNA, 22 bp, synthetic construct
  misc_feature 1..22: note = chemically synthesized
  source 1..22: mol_type = other DNA
atttactttagcgtgtgagtgg

SEQ ID NO: 60955 - DNA, 22 bp, synthetic construct
  misc_feature 1..22: note = chemically synthesized
  source 1..22: mol_type = other DNA
actttagcgtgtgagtggggag

SEQ ID NO: 60956 - DNA, 22 bp, synthetic construct
  misc_feature 1..22: note = chemically synthesized
  source 1..22: mol_type = other DNA
ctttagcgtgtgagtggggaga

SEQ ID NO: 60957 - DNA, 22 bp, synthetic construct
  misc_feature 1..22: note = chemically synthesized
  source 1..22: mol_type = other DNA
tagcgtgtgagtggggagatgg

SEQ ID NO: 60958 - DNA, 22 bp, synthetic construct
  misc_feature 1..22: note = chemically synthesized
  source 1..22: mol_type = other DNA
agcgtgtgagtggggagatgga

SEQ ID NO: 60959 - DNA, 22 bp, synthetic construct
  misc_feature 1..22: note = chemically synthesized
  source 1..22: mol_type = other DNA
gcgtgtgagtggggagatggat

SEQ ID NO: 60960 - DNA, 22 bp, synthetic construct
  misc_feature 1..22: note = chemically synthesized
  source 1..22: mol_type = other DNA
ggcagcaggcccttggaagggt

SEQ ID NO: 60961 - DNA, 22 bp, synthetic construct
  misc_feature 1..22: note = chemically synthesized
  source 1..22: mol_type = other DNA
ggaagggtgggaagattcagaa

SEQ ID NO: 60962 - DNA, 22 bp, synthetic construct
  misc_feature 1..22: note = chemically synthesized
  source 1..22: mol_type = other DNA
gaagggtgggaagattcagaag

SEQ ID NO: 60963 - DNA, 22 bp, synthetic construct
  misc_feature 1..22: note = chemically synthesized
  source 1..22: mol_type = other DNA
agaagagagagggcaggactgg

SEQ ID NO: 60964 - DNA, 22 bp, synthetic construct
  misc_feature 1..22: note = chemically synthesized
  source 1..22: mol_type = other DNA
ggaagatccagacaggacatga

SEQ ID NO: 60965 - DNA, 22 bp, synthetic construct
  misc_feature 1..22: note = chemically synthesized
  source 1..22: mol_type = other DNA
gctccacaaagagagaagcagc

SEQ ID NO: 60966 - DNA, 22 bp, synthetic construct
  misc_feature 1..22: note = chemically synthesized
  source 1..22: mol_type = other DNA
ctccacaaagagagaagcagca

SEQ ID NO: 60967 - DNA, 22 bp, synthetic construct
  misc_feature 1..22: note = chemically synthesized
  source 1..22: mol_type = other DNA
cacaaagagagaagcagcagga

SEQ ID NO: 60968 - DNA, 22 bp, synthetic construct
  misc_feature 1..22: note = chemically synthesized
  source 1..22: mol_type = other DNA
tggctagaggctaacccaacac

SEQ ID NO: 60969 - DNA, 22 bp, synthetic construct
  misc_feature 1..22: note = chemically synthesized
  source 1..22: mol_type = other DNA
gctagaggctaacccaacaccc

SEQ ID NO: 60970 - DNA, 22 bp, synthetic construct
  misc_feature 1..22: note = chemically synthesized
  source 1..22: mol_type = other DNA
gaggctaacccaacacccacac

SEQ ID NO: 60971 - DNA, 22 bp, synthetic construct
  misc_feature 1..22: note = chemically synthesized
  source 1..22: mol_type = other DNA
acccaacacccacacctgccaa

SEQ ID NO: 60972 - DNA, 22 bp, synthetic construct
  misc_feature 1..22: note = chemically synthesized
  source 1..22: mol_type = other DNA
ccaaaggggttcccatggggtg

SEQ ID NO: 60973 - DNA, 22 bp, synthetic construct
  misc_feature 1..22: note = chemically synthesized
  source 1..22: mol_type = other DNA
ccatggggtggctggcttgagg

SEQ ID NO: 60974 - DNA, 22 bp, synthetic construct
  misc_feature 1..22: note = chemically synthesized
  source 1..22: mol_type = other DNA
gcttgaggggatctgggcgctg

SEQ ID NO: 60975 - DNA, 22 bp, synthetic construct
  misc_feature 1..22: note = chemically synthesized
  source 1..22: mol_type = other DNA
gaggggatctgggcgctggttt

SEQ ID NO: 60976 - DNA, 22 bp, synthetic construct
  misc_feature 1..22: note = chemically synthesized
  source 1..22: mol_type = other DNA
aggggatctgggcgctggtttc

SEQ ID NO: 60977 - DNA, 22 bp, synthetic construct
  misc_feature 1..22: note = chemically synthesized
  source 1..22: mol_type = other DNA
ggcgctggtttctgctgtggac

SEQ ID NO: 60978 - DNA, 22 bp, synthetic construct
  misc_feature 1..22: note = chemically synthesized
  source 1..22: mol_type = other DNA
gtttctgctgtggacagcctca

SEQ ID NO: 60979 - DNA, 22 bp, synthetic construct
  misc_feature 1..22: note = chemically synthesized
  source 1..22: mol_type = other DNA
ctgctgtggacagcctcaagtg

SEQ ID NO: 60980 - DNA, 22 bp, synthetic construct
  misc_feature 1..22: note = chemically synthesized
  source 1..22: mol_type = other DNA
tgctgtggacagcctcaagtgg

SEQ ID NO: 60981 - DNA, 22 bp, synthetic construct
  misc_feature 1..22: note = chemically synthesized
  source 1..22: mol_type = other DNA
ctgtggacagcctcaagtgggg

SEQ ID NO: 60982 - DNA, 22 bp, synthetic construct
  misc_feature 1..22: note = chemically synthesized
  source 1..22: mol_type = other DNA
tggacagcctcaagtggggcgt

SEQ ID NO: 60983 - DNA, 22 bp, synthetic construct
  misc_feature 1..22: note = chemically synthesized
  source 1..22: mol_type = other DNA
aagtggggcgtggaggcagcat

SEQ ID NO: 60984 - DNA, 22 bp, synthetic construct
  misc_feature 1..22: note = chemically synthesized
  source 1..22: mol_type = other DNA
cagaagcacccggcagatggct

SEQ ID NO: 60985 - DNA, 22 bp, synthetic construct
  misc_feature 1..22: note = chemically synthesized
  source 1..22: mol_type = other DNA
ctgagggagcagggactccttc

SEQ ID NO: 60986 - DNA, 22 bp, synthetic construct
  misc_feature 1..22: note = chemically synthesized
  source 1..22: mol_type = other DNA
agggagcagggactccttctag

SEQ ID NO: 60987 - DNA, 22 bp, synthetic construct
  misc_feature 1..22: note = chemically synthesized
  source 1..22: mol_type = other DNA
cttctagtgccactcctgggac

SEQ ID NO: 60988 - DNA, 22 bp, synthetic construct
  misc_feature 1..22: note = chemically synthesized
  source 1..22: mol_type = other DNA
ctagtgccactcctgggactaa

SEQ ID NO: 60989 - DNA, 22 bp, synthetic construct
  misc_feature 1..22: note = chemically synthesized
  source 1..22: mol_type = other DNA
tagtgccactcctgggactaaa

SEQ ID NO: 60990 - DNA, 22 bp, synthetic construct
  misc_feature 1..22: note = chemically synthesized
  source 1..22: mol_type = other DNA
gtgccactcctgggactaaatt

SEQ ID NO: 60991 - DNA, 22 bp, synthetic construct
  misc_feature 1..22: note = chemically synthesized
  source 1..22: mol_type = other DNA
ctgggactaaattccttgtccc

SEQ ID NO: 60992 - DNA, 22 bp, synthetic construct
  misc_feature 1..22: note = chemically synthesized
  source 1..22: mol_type = other DNA
ggactaaattccttgtcccctc

SEQ ID NO: 60993 - DNA, 22 bp, synthetic construct
  misc_feature 1..22: note = chemically synthesized
  source 1..22: mol_type = other DNA
aattccttgtcccctccttgtc

SEQ ID NO: 60994 - DNA, 22 bp, synthetic construct
  misc_feature 1..22: note = chemically synthesized
  source 1..22: mol_type = other DNA
cttgtcccctccttgtctcata

SEQ ID NO: 60995 - DNA, 22 bp, synthetic construct
  misc_feature 1..22: note = chemically synthesized
  source 1..22: mol_type = other DNA
gtcccctccttgtctcatattt

SEQ ID NO: 60996 - DNA, 22 bp, synthetic construct
  misc_feature 1..22: note = chemically synthesized
  source 1..22: mol_type = other DNA
tcccctccttgtctcatattta

SEQ ID NO: 60997 - DNA, 22 bp, synthetic construct
  misc_feature 1..22: note = chemically synthesized
  source 1..22: mol_type = other DNA
cttgtctcatatttagcatctt

SEQ ID NO: 60998 - DNA, 22 bp, synthetic construct
  misc_feature 1..22: note = chemically synthesized
  source 1..22: mol_type = other DNA
gtctcatatttagcatcttgga

SEQ ID NO: 60999 - DNA, 22 bp, synthetic construct
  misc_feature 1..22: note = chemically synthesized
  source 1..22: mol_type = other DNA
tctcatatttagcatcttggag

SEQ ID NO: 61000 - DNA, 22 bp, synthetic construct
  misc_feature 1..22: note = chemically synthesized
  source 1..22: mol_type = other DNA
atatttagcatcttggagccgt

SEQ ID NO: 61001 - DNA, 22 bp, synthetic construct
  misc_feature 1..22: note = chemically synthesized
  source 1..22: mol_type = other DNA
agcatcttggagccgtgtcagc

SEQ ID NO: 61002 - DNA, 22 bp, synthetic construct
  misc_feature 1..22: note = chemically synthesized
  source 1..22: mol_type = other DNA
gcatcttggagccgtgtcagct

SEQ ID NO: 61003 - DNA, 22 bp, synthetic construct
  misc_feature 1..22: note = chemically synthesized
  source 1..22: mol_type = other DNA
ggagccgtgtcagctgcagaga

SEQ ID NO: 61004 - DNA, 22 bp, synthetic construct
  misc_feature 1..22: note = chemically synthesized
  source 1..22: mol_type = other DNA
gagccgtgtcagctgcagagac

SEQ ID NO: 61005 - DNA, 22 bp, synthetic construct
  misc_feature 1..22: note = chemically synthesized
  source 1..22: mol_type = other DNA
cagagactggagtccggggcat

SEQ ID NO: 61006 - DNA, 22 bp, synthetic construct
  misc_feature 1..22: note = chemically synthesized
  source 1..22: mol_type = other DNA
gagtccggggcatgatggggat

SEQ ID NO: 61007 - DNA, 22 bp, synthetic construct
  misc_feature 1..22: note = chemically synthesized
  source 1..22: mol_type = other DNA
aaacctagtgagagtcatcctg

SEQ ID NO: 61008 - DNA, 22 bp, synthetic construct
  misc_feature 1..22: note = chemically synthesized
  source 1..22: mol_type = other DNA
gtgagagtcatcctgactctgg

SEQ ID NO: 61009 - DNA, 22 bp, synthetic construct
  misc_feature 1..22: note = chemically synthesized
  source 1..22: mol_type = other DNA
actctggggaagagccgctcaa

SEQ ID NO: 61010 - DNA, 22 bp, synthetic construct
  misc_feature 1..22: note = chemically synthesized
  source 1..22: mol_type = other DNA
tggggaagagccgctcaaagat

SEQ ID NO: 61011 - DNA, 22 bp, synthetic construct
  misc_feature 1..22: note = chemically synthesized
  source 1..22: mol_type = other DNA
gggaagagccgctcaaagatga

SEQ ID NO: 61012 - DNA, 22 bp, synthetic construct
  misc_feature 1..22: note = chemically synthesized
  source 1..22: mol_type = other DNA
aaagatgagaaagataaagtaa

SEQ ID NO: 61013 - DNA, 22 bp, synthetic construct
  misc_feature 1..22: note = chemically synthesized
  source 1..22: mol_type = other DNA
gccacccccaacccctcacagg

SEQ ID NO: 61014 - DNA, 22 bp, synthetic construct
  misc_feature 1..22: note = chemically synthesized
  source 1..22: mol_type = other DNA
ccacccccaacccctcacaggc

SEQ ID NO: 61015 - DNA, 22 bp, synthetic construct
  misc_feature 1..22: note = chemically synthesized
  source 1..22: mol_type = other DNA
acaggctagactatccatggat

SEQ ID NO: 61016 - DNA, 22 bp, synthetic construct
  misc_feature 1..22: note = chemically synthesized
  source 1..22: mol_type = other DNA
gactatccatggatttcagtgg

SEQ ID NO: 61017 - DNA, 22 bp, synthetic construct
  misc_feature 1..22: note = chemically synthesized
  source 1..22: mol_type = other DNA
tccatggatttcagtggggtgg

SEQ ID NO: 61018 - DNA, 22 bp, synthetic construct
  misc_feature 1..22: note = chemically synthesized
  source 1..22: mol_type = other DNA
cagtggggtggtgagtcctcat

SEQ ID NO: 61019 - DNA, 22 bp, synthetic construct
  misc_feature 1..22: note = chemically synthesized
  source 1..22: mol_type = other DNA
agtggggtggtgagtcctcatg

SEQ ID NO: 61020 - DNA, 22 bp, synthetic construct
  misc_feature 1..22: note = chemically synthesized
  source 1..22: mol_type = other DNA
atgatccctgaacctctcctca

SEQ ID NO: 61021 - DNA, 22 bp, synthetic construct
  misc_feature 1..22: note = chemically synthesized
  source 1..22: mol_type = other DNA
aacctctcctcaaatggtgact

SEQ ID NO: 61022 - DNA, 22 bp, synthetic construct
  misc_feature 1..22: note = chemically synthesized
  source 1..22: mol_type = other DNA
tcctcaaatggtgactgttctg

SEQ ID NO: 61023 - DNA, 22 bp, synthetic construct
  misc_feature 1..22: note = chemically synthesized
  source 1..22: mol_type = other DNA
ctcaaatggtgactgttctggg

SEQ ID NO: 61024 - DNA, 22 bp, synthetic construct
  misc_feature 1..22: note = chemically synthesized
  source 1..22: mol_type = other DNA
aaatggtgactgttctgggggt

SEQ ID NO: 61025 - DNA, 22 bp, synthetic construct
  misc_feature 1..22: note = chemically synthesized
  source 1..22: mol_type = other DNA
ttctgggggtcctttctctgcc

SEQ ID NO: 61026 - DNA, 22 bp, synthetic construct
  misc_feature 1..22: note = chemically synthesized
  source 1..22: mol_type = other DNA
tgggggtcctttctctgccttt

SEQ ID NO: 61027 - DNA, 22 bp, synthetic construct
  misc_feature 1..22: note = chemically synthesized
  source 1..22: mol_type = other DNA
ggggtcctttctctgcctttct

SEQ ID NO: 61028 - DNA, 22 bp, synthetic construct
  misc_feature 1..22: note = chemically synthesized
  source 1..22: mol_type = other DNA
tctctgcctttctcagggggta

SEQ ID NO: 61029 - DNA, 22 bp, synthetic construct
  misc_feature 1..22: note = chemically synthesized
  source 1..22: mol_type = other DNA
ctctgcctttctcagggggtaa

SEQ ID NO: 61030 - DNA, 22 bp, synthetic construct
  misc_feature 1..22: note = chemically synthesized
  source 1..22: mol_type = other DNA
tctgcctttctcagggggtaac

SEQ ID NO: 61031 - DNA, 22 bp, synthetic construct
  misc_feature 1..22: note = chemically synthesized
  source 1..22: mol_type = other DNA
tgcctttctcagggggtaacca

SEQ ID NO: 61032 - DNA, 22 bp, synthetic construct
  misc_feature 1..22: note = chemically synthesized
  source 1..22: mol_type = other DNA
cctttctcagggggtaaccaga

SEQ ID NO: 61033 - DNA, 22 bp, synthetic construct
  misc_feature 1..22: note = chemically synthesized
  source 1..22: mol_type = other DNA
tctcagggggtaaccagaggtg

SEQ ID NO: 61034 - DNA, 22 bp, synthetic construct
  misc_feature 1..22: note = chemically synthesized
  source 1..22: mol_type = other DNA
ctcagggggtaaccagaggtgg

SEQ ID NO: 61035 - DNA, 22 bp, synthetic construct
  misc_feature 1..22: note = chemically synthesized
  source 1..22: mol_type = other DNA
tcagggggtaaccagaggtggt

SEQ ID NO: 61036 - DNA, 22 bp, synthetic construct
  misc_feature 1..22: note = chemically synthesized
  source 1..22: mol_type = other DNA
agggggtaaccagaggtggtgg

SEQ ID NO: 61037 - DNA, 22 bp, synthetic construct
  misc_feature 1..22: note = chemically synthesized
  source 1..22: mol_type = other DNA
tgactcgtcagctgttgctctg

SEQ ID NO: 61038 - DNA, 22 bp, synthetic construct
  misc_feature 1..22: note = chemically synthesized
  source 1..22: mol_type = other DNA
gtcagctgttgctctgtgtgtt

SEQ ID NO: 61039 - DNA, 22 bp, synthetic construct
  misc_feature 1..22: note = chemically synthesized
  source 1..22: mol_type = other DNA
ttgctctgtgtgttcatttttg

SEQ ID NO: 61040 - DNA, 22 bp, synthetic construct
  misc_feature 1..22: note = chemically synthesized
  source 1..22: mol_type = other DNA
ctctgtgtgttcatttttgaga

SEQ ID NO: 61041 - DNA, 22 bp, synthetic construct
  misc_feature 1..22: note = chemically synthesized
  source 1..22: mol_type = other DNA
tgtgtgttcatttttgagaaaa

SEQ ID NO: 61042 - DNA, 22 bp, synthetic construct
  misc_feature 1..22: note = chemically synthesized
  source 1..22: mol_type = other DNA
tgtgttcatttttgagaaaatg

SEQ ID NO: 61043 - DNA, 22 bp, synthetic construct
  misc_feature 1..22: note = chemically synthesized
  source 1..22: mol_type = other DNA
atttttgagaaaatgttaatct

SEQ ID NO: 61044 - DNA, 22 bp, synthetic construct
  misc_feature 1..22: note = chemically synthesized
  source 1..22: mol_type = other DNA
ttgagaaaatgttaatctctga

SEQ ID NO: 61045 - DNA, 22 bp, synthetic construct
  misc_feature 1..22: note = chemically synthesized
  source 1..22: mol_type = other DNA
tgagaaaatgttaatctctgag

SEQ ID NO: 61046 - DNA, 22 bp, synthetic construct
  misc_feature 1..22: note = chemically synthesized
  source 1..22: mol_type = other DNA
gagaaaatgttaatctctgaga

SEQ ID NO: 61047 - DNA, 22 bp, synthetic construct
  misc_feature 1..22: note = chemically synthesized
  source 1..22: mol_type = other DNA
agaaaatgttaatctctgagac

SEQ ID NO: 61048 - DNA, 22 bp, synthetic construct
  misc_feature 1..22: note = chemically synthesized
  source 1..22: mol_type = other DNA
atctctgagacgtctaagaggt

SEQ ID NO: 61049 - DNA, 22 bp, synthetic construct
  misc_feature 1..22: note = chemically synthesized
  source 1..22: mol_type = other DNA
tgagacgtctaagaggtgaaac

SEQ ID NO: 61050 - DNA, 22 bp, synthetic construct
  misc_feature 1..22: note = chemically synthesized
  source 1..22: mol_type = other DNA
agacgtctaagaggtgaaactc

SEQ ID NO: 61051 - DNA, 22 bp, synthetic construct
  misc_feature 1..22: note = chemically synthesized
  source 1..22: mol_type = other DNA
agaggtgaaactcctttctctg

SEQ ID NO: 61052 - DNA, 22 bp, synthetic construct
  misc_feature 1..22: note = chemically synthesized
  source 1..22: mol_type = other DNA
ctttctctgtgtctcctccaaa

SEQ ID NO: 61053 - DNA, 22 bp, synthetic construct
  misc_feature 1..22: note = chemically synthesized
  source 1..22: mol_type = other DNA
tctctgtgtctcctccaaatgg

SEQ ID NO: 61054 - DNA, 22 bp, synthetic construct
  misc_feature 1..22: note = chemically synthesized
  source 1..22: mol_type = other DNA
ctctgtgtctcctccaaatgga

SEQ ID NO: 61055 - DNA, 22 bp, synthetic construct
  misc_feature 1..22: note = chemically synthesized
  source 1..22: mol_type = other DNA
tctgtgtctcctccaaatggat

SEQ ID NO: 61056 - DNA, 22 bp, synthetic construct
  misc_feature 1..22: note = chemically synthesized
  source 1..22: mol_type = other DNA
tgtgtctcctccaaatggatgc

SEQ ID NO: 61057 - DNA, 22 bp, synthetic construct
  misc_feature 1..22: note = chemically synthesized
  source 1..22: mol_type = other DNA
tgtctcctccaaatggatgcca

SEQ ID NO: 61058 - DNA, 22 bp, synthetic construct
  misc_feature 1..22: note = chemically synthesized
  source 1..22: mol_type = other DNA
ctccaaatggatgccatgtggg

SEQ ID NO: 61059 - DNA, 22 bp, synthetic construct
  misc_feature 1..22: note = chemically synthesized
  source 1..22: mol_type = other DNA
caaatggatgccatgtgggtgg

SEQ ID NO: 61060 - DNA, 22 bp, synthetic construct
  misc_feature 1..22: note = chemically synthesized
  source 1..22: mol_type = other DNA
ggtttattcatttactttaggt

SEQ ID NO: 61061 - DNA, 22 bp, synthetic construct
  misc_feature 1..22: note = chemically synthesized
  source 1..22: mol_type = other DNA
attcatttactttaggtgtgta

SEQ ID NO: 61062 - DNA, 22 bp, synthetic construct
  misc_feature 1..22: note = chemically synthesized
  source 1..22: mol_type = other DNA
ttcatttactttaggtgtgtat

SEQ ID NO: 61063 - DNA, 22 bp, synthetic construct
  misc_feature 1..22: note = chemically synthesized
  source 1..22: mol_type = other DNA
atttactttaggtgtgtattgt

SEQ ID NO: 61064 - DNA, 22 bp, synthetic construct
  misc_feature 1..22: note = chemically synthesized
  source 1..22: mol_type = other DNA
actttaggtgtgtattgtagta

SEQ ID NO: 61065 - DNA, 22 bp, synthetic construct
  misc_feature 1..22: note = chemically synthesized
  source 1..22: mol_type = other DNA
ctttaggtgtgtattgtagtaa

SEQ ID NO: 61066 - DNA, 22 bp, synthetic construct
  misc_feature 1..22: note = chemically synthesized
  source 1..22: mol_type = other DNA
taggtgtgtattgtagtaaaac

SEQ ID NO: 61067 - DNA, 22 bp, synthetic construct
  misc_feature 1..22: note = chemically synthesized
  source 1..22: mol_type = other DNA
aggtgtgtattgtagtaaaacc

SEQ ID NO: 61068 - DNA, 22 bp, synthetic construct
  misc_feature 1..22: note = chemically synthesized
  source 1..22: mol_type = other DNA
ggtgtgtattgtagtaaaacct

SEQ ID NO: 61069 - DNA, 22 bp, synthetic construct
  misc_feature 1..22: note = chemically synthesized
  source 1..22: mol_type = other DNA
tagtaaaacctgcttgttctcc

SEQ ID NO: 61070 - DNA, 22 bp, synthetic construct
  misc_feature 1..22: note = chemically synthesized
  source 1..22: mol_type = other DNA
cttgttctcctatccgtcatca

SEQ ID NO: 61071 - DNA, 22 bp, synthetic construct
  misc_feature 1..22: note = chemically synthesized
  source 1..22: mol_type = other DNA
gttctcctatccgtcatcagag

SEQ ID NO: 61072 - DNA, 22 bp, synthetic construct
  misc_feature 1..22: note = chemically synthesized
  source 1..22: mol_type = other DNA
ttctcctatccgtcatcagagg

SEQ ID NO: 61073 - DNA, 22 bp, synthetic construct
  misc_feature 1..22: note = chemically synthesized
  source 1..22: mol_type = other DNA
tcctatccgtcatcagaggtga

SEQ ID NO: 61074 - DNA, 22 bp, synthetic construct
  misc_feature 1..22: note = chemically synthesized
  source 1..22: mol_type = other DNA
ctatccgtcatcagaggtgact

SEQ ID NO: 61075 - DNA, 22 bp, synthetic construct
  misc_feature 1..22: note = chemically synthesized
  source 1..22: mol_type = other DNA
tccgtcatcagaggtgactcat

SEQ ID NO: 61076 - DNA, 22 bp, synthetic construct
  misc_feature 1..22: note = chemically synthesized
  source 1..22: mol_type = other DNA
atacttgagacactaaaagaga

SEQ ID NO: 61077 - DNA, 22 bp, synthetic construct
  misc_feature 1..22: note = chemically synthesized
  source 1..22: mol_type = other DNA
gagacactaaaagagaataaac

SEQ ID NO: 61078 - DNA, 22 bp, synthetic construct
  misc_feature 1..22: note = chemically synthesized
  source 1..22: mol_type = other DNA
agacactaaaagagaataaact

SEQ ID NO: 61079 - DNA, 22 bp, synthetic construct
  misc_feature 1..22: note = chemically synthesized
  source 1..22: mol_type = other DNA
aaagagaataaactgtcttcat

SEQ ID NO: 61080 - DNA, 22 bp, synthetic construct
  misc_feature 1..22: note = chemically synthesized
  source 1..22: mol_type = other DNA
tcttcataaggctgtgaacgtc

SEQ ID NO: 61081 - DNA, 22 bp, synthetic construct
  misc_feature 1..22: note = chemically synthesized
  source 1..22: mol_type = other DNA
cataaggctgtgaacgtcgcca

SEQ ID NO: 61082 - DNA, 22 bp, synthetic construct
  misc_feature 1..22: note = chemically synthesized
  source 1..22: mol_type = other DNA
ataaggctgtgaacgtcgccag

SEQ ID NO: 61083 - DNA, 22 bp, synthetic construct
  misc_feature 1..22: note = chemically synthesized
  source 1..22: mol_type = other DNA
tgaacgtcgccagattatgaac

SEQ ID NO: 61084 - DNA, 22 bp, synthetic construct
  misc_feature 1..22: note = chemically synthesized
  source 1..22: mol_type = other DNA
tgaaccaacttcaagtaacgta

SEQ ID NO: 61085 - DNA, 22 bp, synthetic construct
  misc_feature 1..22: note = chemically synthesized
  source 1..22: mol_type = other DNA
caagtaacgtagggatgccttg

SEQ ID NO: 61086 - DNA, 22 bp, synthetic construct
  misc_feature 1..22: note = chemically synthesized
  source 1..22: mol_type = other DNA
aagtaacgtagggatgccttga

SEQ ID NO: 61087 - DNA, 22 bp, synthetic construct
  misc_feature 1..22: note = chemically synthesized
  source 1..22: mol_type = other DNA
gataattatattattgaaacca

SEQ ID NO: 61088 - DNA, 22 bp, synthetic construct
  misc_feature 1..22: note = chemically synthesized
  source 1..22: mol_type = other DNA
ataattatattattgaaaccat

SEQ ID NO: 61089 - DNA, 22 bp, synthetic construct
  misc_feature 1..22: note = chemically synthesized
  source 1..22: mol_type = other DNA
tattattgaaaccatctccaat

SEQ ID NO: 61090 - DNA, 22 bp, synthetic construct
  misc_feature 1..22: note = chemically synthesized
  source 1..22: mol_type = other DNA
ttgaaaccatctccaattagat

SEQ ID NO: 61091 - DNA, 22 bp, synthetic construct
  misc_feature 1..22: note = chemically synthesized
  source 1..22: mol_type = other DNA
aaaccatctccaattagatatg

SEQ ID NO: 61092 - DNA, 22 bp, synthetic construct
  misc_feature 1..22: note = chemically synthesized
  source 1..22: mol_type = other DNA
caattagatatgcaaaatggag

SEQ ID NO: 61093 - DNA, 22 bp, synthetic construct
  misc_feature 1..22: note = chemically synthesized
  source 1..22: mol_type = other DNA
gatatgcaaaatggagttgctg

SEQ ID NO: 61094 - DNA, 22 bp, synthetic construct
  misc_feature 1..22: note = chemically synthesized
  source 1..22: mol_type = other DNA
ctgggggcttcagttttcttta

SEQ ID NO: 61095 - DNA, 22 bp, synthetic construct
  misc_feature 1..22: note = chemically synthesized
  source 1..22: mol_type = other DNA
ggggcttcagttttctttagac

SEQ ID NO: 61096 - DNA, 22 bp, synthetic construct
  misc_feature 1..22: note = chemically synthesized
  source 1..22: mol_type = other DNA
cagttttctttagaccaaataa

SEQ ID NO: 61097 - DNA, 22 bp, synthetic construct
  misc_feature 1..22: note = chemically synthesized
  source 1..22: mol_type = other DNA
agttttctttagaccaaataat

SEQ ID NO: 61098 - DNA, 22 bp, synthetic construct
  misc_feature 1..22: note = chemically synthesized
  source 1..22: mol_type = other DNA
tctttagaccaaataatttaga

SEQ ID NO: 61099 - DNA, 22 bp, synthetic construct
  misc_feature 1..22: note = chemically synthesized
  source 1..22: mol_type = other DNA
ctttagaccaaataatttagag

SEQ ID NO: 61100 - DNA, 22 bp, synthetic construct
  misc_feature 1..22: note = chemically synthesized
  source 1..22: mol_type = other DNA
tttagaccaaataatttagagc

SEQ ID NO: 61101 - DNA, 22 bp, synthetic construct
  misc_feature 1..22: note = chemically synthesized
  source 1..22: mol_type = other DNA
tagaccaaataatttagagctg

SEQ ID NO: 61102 - DNA, 22 bp, synthetic construct
  misc_feature 1..22: note = chemically synthesized
  source 1..22: mol_type = other DNA
agaccaaataatttagagctga

SEQ ID NO: 61103 - DNA, 22 bp, synthetic construct
  misc_feature 1..22: note = chemically synthesized
  source 1..22: mol_type = other DNA
gaccaaataatttagagctgag

SEQ ID NO: 61104 - DNA, 22 bp, synthetic construct
  misc_feature 1..22: note = chemically synthesized
  source 1..22: mol_type = other DNA
agagctgagaggagaggcagat

SEQ ID NO: 61105 - DNA, 22 bp, synthetic construct
  misc_feature 1..22: note = chemically synthesized
  source 1..22: mol_type = other DNA
gagctgagaggagaggcagata

SEQ ID NO: 61106 - DNA, 22 bp, synthetic construct
  misc_feature 1..22: note = chemically synthesized
  source 1..22: mol_type = other DNA
agaggagaggcagataccatct

SEQ ID NO: 61107 - DNA, 22 bp, synthetic construct
  misc_feature 1..22: note = chemically synthesized
  source 1..22: mol_type = other DNA
gtctcactttttacaatttagc

SEQ ID NO: 61108 - DNA, 22 bp, synthetic construct
  misc_feature 1..22: note = chemically synthesized
  source 1..22: mol_type = other DNA
actttttacaatttagcattgg

SEQ ID NO: 61109 - DNA, 22 bp, synthetic construct
  misc_feature 1..22: note = chemically synthesized
  source 1..22: mol_type = other DNA
tttacaatttagcattggattt

SEQ ID NO: 61110 - DNA, 22 bp, synthetic construct
  misc_feature 1..22: note = chemically synthesized
  source 1..22: mol_type = other DNA
ttacaatttagcattggatttg

SEQ ID NO: 61111 - DNA, 22 bp, synthetic construct
  misc_feature 1..22: note = chemically synthesized
  source 1..22: mol_type = other DNA
tacaatttagcattggatttgt

SEQ ID NO: 61112 - DNA, 22 bp, synthetic construct
  misc_feature 1..22: note = chemically synthesized
  source 1..22: mol_type = other DNA
acaatttagcattggatttgtt

SEQ ID NO: 61113 - DNA, 22 bp, synthetic construct
  misc_feature 1..22: note = chemically synthesized
  source 1..22: mol_type = other DNA
caatttagcattggatttgttg

SEQ ID NO: 61114 - DNA, 22 bp, synthetic construct
  misc_feature 1..22: note = chemically synthesized
  source 1..22: mol_type = other DNA
agcattggatttgttgagcatg

SEQ ID NO: 61115 - DNA, 22 bp, synthetic construct
  misc_feature 1..22: note = chemically synthesized
  source 1..22: mol_type = other DNA
gcattggatttgttgagcatgt

SEQ ID NO: 61116 - DNA, 22 bp, synthetic construct
  misc_feature 1..22: note = chemically synthesized
  source 1..22: mol_type = other DNA
gatttgttgagcatgtactctc

SEQ ID NO: 61117 - DNA, 22 bp, synthetic construct
  misc_feature 1..22: note = chemically synthesized
  source 1..22: mol_type = other DNA
gttgagcatgtactctctgcag

SEQ ID NO: 61118 - DNA, 22 bp, synthetic construct
  misc_feature 1..22: note = chemically synthesized
  source 1..22: mol_type = other DNA
ttgagcatgtactctctgcaga

SEQ ID NO: 61119 - DNA, 22 bp, synthetic construct
  misc_feature 1..22: note = chemically synthesized
  source 1..22: mol_type = other DNA
agcatgtactctctgcagagca

SEQ ID NO: 61120 - DNA, 22 bp, synthetic construct
  misc_feature 1..22: note = chemically synthesized
  source 1..22: mol_type = other DNA
tctgcagagcattgtgataggt

SEQ ID NO: 61121 - DNA, 22 bp, synthetic construct
  misc_feature 1..22: note = chemically synthesized
  source 1..22: mol_type = other DNA
tgcagagcattgtgataggttc

SEQ ID NO: 61122 - DNA, 22 bp, synthetic construct
  misc_feature 1..22: note = chemically synthesized
  source 1..22: mol_type = other DNA
cagagcattgtgataggttctg

SEQ ID NO: 61123 - DNA, 22 bp, synthetic construct
  misc_feature 1..22: note = chemically synthesized
  source 1..22: mol_type = other DNA
tgataggttctgggttgggagg

SEQ ID NO: 61124 - DNA, 22 bp, synthetic construct
  misc_feature 1..22: note = chemically synthesized
  source 1..22: mol_type = other DNA
tgggttgggaggggagccggga

SEQ ID NO: 61125 - DNA, 22 bp, synthetic construct
  misc_feature 1..22: note = chemically synthesized
  source 1..22: mol_type = other DNA
ggttgggaggggagccgggaag

SEQ ID NO: 61126 - DNA, 22 bp, synthetic construct
  misc_feature 1..22: note = chemically synthesized
  source 1..22: mol_type = other DNA
ggaggggagccgggaaggcaag

SEQ ID NO: 61127 - DNA, 22 bp, synthetic construct
  misc_feature 1..22: note = chemically synthesized
  source 1..22: mol_type = other DNA
tctcaaagctgcctttctcatt

SEQ ID NO: 61128 - DNA, 22 bp, synthetic construct
  misc_feature 1..22: note = chemically synthesized
  source 1..22: mol_type = other DNA
tcaaagctgcctttctcatttg

SEQ ID NO: 61129 - DNA, 22 bp, synthetic construct
  misc_feature 1..22: note = chemically synthesized
  source 1..22: mol_type = other DNA
aaagctgcctttctcatttgag

SEQ ID NO: 61130 - DNA, 22 bp, synthetic construct
  misc_feature 1..22: note = chemically synthesized
  source 1..22: mol_type = other DNA
cctttctcatttgagaggcgag

SEQ ID NO: 61131 - DNA, 22 bp, synthetic construct
  misc_feature 1..22: note = chemically synthesized
  source 1..22: mol_type = other DNA
tctcatttgagaggcgagtgtg

SEQ ID NO: 61132 - DNA, 22 bp, synthetic construct
  misc_feature 1..22: note = chemically synthesized
  source 1..22: mol_type = other DNA
ctcatttgagaggcgagtgtgt

SEQ ID NO: 61133 - DNA, 22 bp, synthetic construct
  misc_feature 1..22: note = chemically synthesized
  source 1..22: mol_type = other DNA
tcatttgagaggcgagtgtgtg

SEQ ID NO: 61134 - DNA, 22 bp, synthetic construct
  misc_feature 1..22: note = chemically synthesized
  source 1..22: mol_type = other DNA
atttgagaggcgagtgtgtgtg

SEQ ID NO: 61135 - DNA, 22 bp, synthetic construct
  misc_feature 1..22: note = chemically synthesized
  source 1..22: mol_type = other DNA
gagaggcgagtgtgtgtggcac

SEQ ID NO: 61136 - DNA, 22 bp, synthetic construct
  misc_feature 1..22: note = chemically synthesized
  source 1..22: mol_type = other DNA
agaggcgagtgtgtgtggcaca

SEQ ID NO: 61137 - DNA, 22 bp, synthetic construct
  misc_feature 1..22: note = chemically synthesized
  source 1..22: mol_type = other DNA
tatacctgagagcaagatgtgc

SEQ ID NO: 61138 - DNA, 22 bp, synthetic construct
  misc_feature 1..22: note = chemically synthesized
  source 1..22: mol_type = other DNA
atacctgagagcaagatgtgca

SEQ ID NO: 61139 - DNA, 22 bp, synthetic construct
  misc_feature 1..22: note = chemically synthesized
  source 1..22: mol_type = other DNA
tacctgagagcaagatgtgcag

SEQ ID NO: 61140 - DNA, 22 bp, synthetic construct
  misc_feature 1..22: note = chemically synthesized
  source 1..22: mol_type = other DNA
agagcaagatgtgcagccagga

SEQ ID NO: 61141 - DNA, 22 bp, synthetic construct
  misc_feature 1..22: note = chemically synthesized
  source 1..22: mol_type = other DNA
aaggacacaggccaagggaggt

SEQ ID NO: 61142 - DNA, 22 bp, synthetic construct
  misc_feature 1..22: note = chemically synthesized
  source 1..22: mol_type = other DNA
gcccaggccacccagttaccta

SEQ ID NO: 61143 - DNA, 22 bp, synthetic construct
  misc_feature 1..22: note = chemically synthesized
  source 1..22: mol_type = other DNA
cccaggccacccagttacctag

SEQ ID NO: 61144 - DNA, 22 bp, synthetic construct
  misc_feature 1..22: note = chemically synthesized
  source 1..22: mol_type = other DNA
cctagcacagctcagccacaag

SEQ ID NO: 61145 - DNA, 22 bp, synthetic construct
  misc_feature 1..22: note = chemically synthesized
  source 1..22: mol_type = other DNA
gcacagctcagccacaagccca

SEQ ID NO: 61146 - DNA, 22 bp, synthetic construct
  misc_feature 1..22: note = chemically synthesized
  source 1..22: mol_type = other DNA
agccacaagcccaaatgaatga

SEQ ID NO: 61147 - DNA, 22 bp, synthetic construct
  misc_feature 1..22: note = chemically synthesized
  source 1..22: mol_type = other DNA
tgagttccacatcagcgcatcg

SEQ ID NO: 61148 - DNA, 22 bp, synthetic construct
  misc_feature 1..22: note = chemically synthesized
  source 1..22: mol_type = other DNA
agttccacatcagcgcatcggg

SEQ ID NO: 61149 - DNA, 22 bp, synthetic construct
  misc_feature 1..22: note = chemically synthesized
  source 1..22: mol_type = other DNA
cacatcagcgcatcgggcagcc

SEQ ID NO: 61150 - DNA, 22 bp, synthetic construct
  misc_feature 1..22: note = chemically synthesized
  source 1..22: mol_type = other DNA
cacagtgacaggtggggctcta

SEQ ID NO: 61151 - DNA, 22 bp, synthetic construct
  misc_feature 1..22: note = chemically synthesized
  source 1..22: mol_type = other DNA
taggtggcttcctttaaaacat

SEQ ID NO: 61152 - DNA, 22 bp, synthetic construct
  misc_feature 1..22: note = chemically synthesized
  source 1..22: mol_type = other DNA
ggtggcttcctttaaaacatct

SEQ ID NO: 61153 - DNA, 22 bp, synthetic construct
  misc_feature 1..22: note = chemically synthesized
  source 1..22: mol_type = other DNA
cctttaaaacatctgaggaaag

SEQ ID NO: 61154 - DNA, 22 bp, synthetic construct
  misc_feature 1..22: note = chemically synthesized
  source 1..22: mol_type = other DNA
ctttaaaacatctgaggaaagc

SEQ ID NO: 61155 - DNA, 22 bp, synthetic construct
  misc_feature 1..22: note = chemically synthesized
  source 1..22: mol_type = other DNA
taaaacatctgaggaaagcagg

SEQ ID NO: 61156 - DNA, 22 bp, synthetic construct
  misc_feature 1..22: note = chemically synthesized
  source 1..22: mol_type = other DNA
aaaacatctgaggaaagcaggc

SEQ ID NO: 61157 - DNA, 22 bp, synthetic construct
  misc_feature 1..22: note = chemically synthesized
  source 1..22: mol_type = other DNA
aaacatctgaggaaagcaggct

SEQ ID NO: 61158 - DNA, 22 bp, synthetic construct
  misc_feature 1..22: note = chemically synthesized
  source 1..22: mol_type = other DNA
aggaaagcaggcttcctctctg

SEQ ID NO: 61159 - DNA, 22 bp, synthetic construct
  misc_feature 1..22: note = chemically synthesized
  source 1..22: mol_type = other DNA
cctctctgactgctctccaggg

SEQ ID NO: 61160 - DNA, 22 bp, synthetic construct
  misc_feature 1..22: note = chemically synthesized
  source 1..22: mol_type = other DNA
ctctctgactgctctccagggg

SEQ ID NO: 61161 - DNA, 22 bp, synthetic construct
  misc_feature 1..22: note = chemically synthesized
  source 1..22: mol_type = other DNA
tctgactgctctccaggggtgg

SEQ ID NO: 61162 - DNA, 22 bp, synthetic construct
  misc_feature 1..22: note = chemically synthesized
  source 1..22: mol_type = other DNA
tgactgctctccaggggtggtg

SEQ ID NO: 61163 - DNA, 22 bp, synthetic construct
  misc_feature 1..22: note = chemically synthesized
  source 1..22: mol_type = other DNA
actgctctccaggggtggtgag

SEQ ID NO: 61164 - DNA, 22 bp, synthetic construct
  misc_feature 1..22: note = chemically synthesized
  source 1..22: mol_type = other DNA
ctctccaggggtggtgagcaca

SEQ ID NO: 61165 - DNA, 22 bp, synthetic construct
  misc_feature 1..22: note = chemically synthesized
  source 1..22: mol_type = other DNA
tccaggggtggtgagcacaggg

SEQ ID NO: 61166 - DNA, 22 bp, synthetic construct
  misc_feature 1..22: note = chemically synthesized
  source 1..22: mol_type = other DNA
caggggtggtgagcacaggggt

SEQ ID NO: 61167 - DNA, 22 bp, synthetic construct
  misc_feature 1..22: note = chemically synthesized
  source 1..22: mol_type = other DNA
atctgcagctccccagctccag

SEQ ID NO: 61168 - DNA, 22 bp, synthetic construct
  misc_feature 1..22: note = chemically synthesized
  source 1..22: mol_type = other DNA
cagctccccagctccagtgctc

SEQ ID NO: 61169 - DNA, 22 bp, synthetic construct
  misc_feature 1..22: note = chemically synthesized
  source 1..22: mol_type = other DNA
cccagctccagtgctccttagc

SEQ ID NO: 61170 - DNA, 22 bp, synthetic construct
  misc_feature 1..22: note = chemically synthesized
  source 1..22: mol_type = other DNA
cagtgctccttagccttccaag

SEQ ID NO: 61171 - DNA, 22 bp, synthetic construct
  misc_feature 1..22: note = chemically synthesized
  source 1..22: mol_type = other DNA
cttagccttccaagttgtttga

SEQ ID NO: 61172 - DNA, 22 bp, synthetic construct
  misc_feature 1..22: note = chemically synthesized
  source 1..22: mol_type = other DNA
agccttccaagttgtttgaatt

SEQ ID NO: 61173 - DNA, 22 bp, synthetic construct
  misc_feature 1..22: note = chemically synthesized
  source 1..22: mol_type = other DNA
gccttccaagttgtttgaatta

SEQ ID NO: 61174 - DNA, 22 bp, synthetic construct
  misc_feature 1..22: note = chemically synthesized
  source 1..22: mol_type = other DNA
ccaagttgtttgaattaagttg

SEQ ID NO: 61175 - DNA, 22 bp, synthetic construct
  misc_feature 1..22: note = chemically synthesized
  source 1..22: mol_type = other DNA
caagttgtttgaattaagttgc

SEQ ID NO: 61176 - DNA, 22 bp, synthetic construct
  misc_feature 1..22: note = chemically synthesized
  source 1..22: mol_type = other DNA
tttgaattaagttgcaagccca

SEQ ID NO: 61177 - DNA, 22 bp, synthetic construct
  misc_feature 1..22: note = chemically synthesized
  source 1..22: mol_type = other DNA
gaattaagttgcaagcccaggt

SEQ ID NO: 61178 - DNA, 22 bp, synthetic construct
  misc_feature 1..22: note = chemically synthesized
  source 1..22: mol_type = other DNA
aattaagttgcaagcccaggtg

SEQ ID NO: 61179 - DNA, 22 bp, synthetic construct
  misc_feature 1..22: note = chemically synthesized
  source 1..22: mol_type = other DNA
agttgcaagcccaggtggctgc

SEQ ID NO: 61180 - DNA, 22 bp, synthetic construct
  misc_feature 1..22: note = chemically synthesized
  source 1..22: mol_type = other DNA
caagcccaggtggctgcacaca

SEQ ID NO: 61181 - DNA, 22 bp, synthetic construct
  misc_feature 1..22: note = chemically synthesized
  source 1..22: mol_type = other DNA
cacacatattcattttggagtg

SEQ ID NO: 61182 - DNA, 22 bp, synthetic construct
  misc_feature 1..22: note = chemically synthesized
  source 1..22: mol_type = other DNA
attttggagtgactgtgacact

SEQ ID NO: 61183 - DNA, 22 bp, synthetic construct
  misc_feature 1..22: note = chemically synthesized
  source 1..22: mol_type = other DNA
tggagtgactgtgacacttgta

SEQ ID NO: 61184 - DNA, 22 bp, synthetic construct
  misc_feature 1..22: note = chemically synthesized
  source 1..22: mol_type = other DNA
ggagtgactgtgacacttgtat

SEQ ID NO: 61185 - DNA, 22 bp, synthetic construct
  misc_feature 1..22: note = chemically synthesized
  source 1..22: mol_type = other DNA
gagtgactgtgacacttgtatt

SEQ ID NO: 61186 - DNA, 22 bp, synthetic construct
  misc_feature 1..22: note = chemically synthesized
  source 1..22: mol_type = other DNA
tgacacttgtatttcctgggaa

SEQ ID NO: 61187 - DNA, 22 bp, synthetic construct
  misc_feature 1..22: note = chemically synthesized
  source 1..22: mol_type = other DNA
gtatttcctgggaagcgttact

SEQ ID NO: 61188 - DNA, 22 bp, synthetic construct
  misc_feature 1..22: note = chemically synthesized
  source 1..22: mol_type = other DNA
tatttcctgggaagcgttacta

SEQ ID NO: 61189 - DNA, 22 bp, synthetic construct
  misc_feature 1..22: note = chemically synthesized
  source 1..22: mol_type = other DNA
cctgggaagcgttactatgtct

SEQ ID NO: 61190 - DNA, 22 bp, synthetic construct
  misc_feature 1..22: note = chemically synthesized
  source 1..22: mol_type = other DNA
ctgggaagcgttactatgtctt

SEQ ID NO: 61191 - DNA, 22 bp, synthetic construct
  misc_feature 1..22: note = chemically synthesized
  source 1..22: mol_type = other DNA
ggaagcgttactatgtctttgg

SEQ ID NO: 61192 - DNA, 22 bp, synthetic construct
  misc_feature 1..22: note = chemically synthesized
  source 1..22: mol_type = other DNA
ctatgtctttggccgagcaagt

SEQ ID NO: 61193 - DNA, 22 bp, synthetic construct
  misc_feature 1..22: note = chemically synthesized
  source 1..22: mol_type = other DNA
tgtctttggccgagcaagtatt

SEQ ID NO: 61194 - DNA, 22 bp, synthetic construct
  misc_feature 1..22: note = chemically synthesized
  source 1..22: mol_type = other DNA
tggccgagcaagtattacgcca

SEQ ID NO: 61195 - DNA, 22 bp, synthetic construct
  misc_feature 1..22: note = chemically synthesized
  source 1..22: mol_type = other DNA
ggccgagcaagtattacgccat

SEQ ID NO: 61196 - DNA, 22 bp, synthetic construct
  misc_feature 1..22: note = chemically synthesized
  source 1..22: mol_type = other DNA
gccgagcaagtattacgccatg

SEQ ID NO: 61197 - DNA, 22 bp, synthetic construct
  misc_feature 1..22: note = chemically synthesized
  source 1..22: mol_type = other DNA
cgccatgagctggttccctttc

SEQ ID NO: 61198 - DNA, 22 bp, synthetic construct
  misc_feature 1..22: note = chemically synthesized
  source 1..22: mol_type = other DNA
gttccctttcttttgcctttga

SEQ ID NO: 61199 - DNA, 22 bp, synthetic construct
  misc_feature 1..22: note = chemically synthesized
  source 1..22: mol_type = other DNA
cctttcttttgcctttgaacac

SEQ ID NO: 61200 - DNA, 22 bp, synthetic construct
  misc_feature 1..22: note = chemically synthesized
  source 1..22: mol_type = other DNA
tcttttgcctttgaacacctac

SEQ ID NO: 61201 - DNA, 22 bp, synthetic construct
  misc_feature 1..22: note = chemically synthesized
  source 1..22: mol_type = other DNA
cttttgcctttgaacacctaca

SEQ ID NO: 61202 - DNA, 22 bp, synthetic construct
  misc_feature 1..22: note = chemically synthesized
  source 1..22: mol_type = other DNA
ttttgcctttgaacacctacat

SEQ ID NO: 61203 - DNA, 22 bp, synthetic construct
  misc_feature 1..22: note = chemically synthesized
  source 1..22: mol_type = other DNA
ttgcctttgaacacctacattg

SEQ ID NO: 61204 - DNA, 22 bp, synthetic construct
  misc_feature 1..22: note = chemically synthesized
  source 1..22: mol_type = other DNA
tgcctttgaacacctacattgc

SEQ ID NO: 61205 - DNA, 22 bp, synthetic construct
  misc_feature 1..22: note = chemically synthesized
  source 1..22: mol_type = other DNA
gcctttgaacacctacattgct

SEQ ID NO: 61206 - DNA, 22 bp, synthetic construct
  misc_feature 1..22: note = chemically synthesized
  source 1..22: mol_type = other DNA
cctttgaacacctacattgctg

SEQ ID NO: 61207 - DNA, 22 bp, synthetic construct
  misc_feature 1..22: note = chemically synthesized
  source 1..22: mol_type = other DNA
tgaacacctacattgctgggag

SEQ ID NO: 61208 - DNA, 22 bp, synthetic construct
  misc_feature 1..22: note = chemically synthesized
  source 1..22: mol_type = other DNA
gaacacctacattgctgggagg

SEQ ID NO: 61209 - DNA, 22 bp, synthetic construct
  misc_feature 1..22: note = chemically synthesized
  source 1..22: mol_type = other DNA
aacacctacattgctgggagga

SEQ ID NO: 61210 - DNA, 22 bp, synthetic construct
  misc_feature 1..22: note = chemically synthesized
  source 1..22: mol_type = other DNA
cattgctgggaggataccttag

SEQ ID NO: 61211 - DNA, 22 bp, synthetic construct
  misc_feature 1..22: note = chemically synthesized
  source 1..22: mol_type = other DNA
ctgggaggataccttagtgaga

SEQ ID NO: 61212 - DNA, 22 bp, synthetic construct
  misc_feature 1..22: note = chemically synthesized
  source 1..22: mol_type = other DNA
ggaggataccttagtgagagtg

SEQ ID NO: 61213 - DNA, 22 bp, synthetic construct
  misc_feature 1..22: note = chemically synthesized
  source 1..22: mol_type = other DNA
agtgagagtgcctgggccactg

SEQ ID NO: 61214 - DNA, 22 bp, synthetic construct
  misc_feature 1..22: note = chemically synthesized
  source 1..22: mol_type = other DNA
gtgagagtgcctgggccactgg

SEQ ID NO: 61215 - DNA, 22 bp, synthetic construct
  misc_feature 1..22: note = chemically synthesized
  source 1..22: mol_type = other DNA
ggccactgggcgtagcagagga

SEQ ID NO: 61216 - DNA, 22 bp, synthetic construct
  misc_feature 1..22: note = chemically synthesized
  source 1..22: mol_type = other DNA
ggcgtagcagaggaagcacctc

SEQ ID NO: 61217 - DNA, 22 bp, synthetic construct
  misc_feature 1..22: note = chemically synthesized
  source 1..22: mol_type = other DNA
atcattttactgatttatttga

SEQ ID NO: 61218 - DNA, 22 bp, synthetic construct
  misc_feature 1..22: note = chemically synthesized
  source 1..22: mol_type = other DNA
tactgatttatttgaaagaaaa

SEQ ID NO: 61219 - DNA, 22 bp, synthetic construct
  misc_feature 1..22: note = chemically synthesized
  source 1..22: mol_type = other DNA
actgatttatttgaaagaaaaa

SEQ ID NO: 61220 - DNA, 22 bp, synthetic construct
  misc_feature 1..22: note = chemically synthesized
  source 1..22: mol_type = other DNA
ctgatttatttgaaagaaaaaa

SEQ ID NO: 61221 - DNA, 22 bp, synthetic construct
  misc_feature 1..22: note = chemically synthesized
  source 1..22: mol_type = other DNA
atttatttgaaagaaaaaagct

SEQ ID NO: 61222 - DNA, 22 bp, synthetic construct
  misc_feature 1..22: note = chemically synthesized
  source 1..22: mol_type = other DNA
atttgaaagaaaaaagctccct

SEQ ID NO: 61223 - DNA, 22 bp, synthetic construct
  misc_feature 1..22: note = chemically synthesized
  source 1..22: mol_type = other DNA
tttgaaagaaaaaagctccctc

SEQ ID NO: 61224 - DNA, 22 bp, synthetic construct
  misc_feature 1..22: note = chemically synthesized
  source 1..22: mol_type = other DNA
gaaagaaaaaagctccctccaa

SEQ ID NO: 61225 - DNA, 22 bp, synthetic construct
  misc_feature 1..22: note = chemically synthesized
  source 1..22: mol_type = other DNA
aaagaaaaaagctccctccaac

SEQ ID NO: 61226 - DNA, 22 bp, synthetic construct
  misc_feature 1..22: note = chemically synthesized
  source 1..22: mol_type = other DNA
cctccaacccttgccttcatag

SEQ ID NO: 61227 - DNA, 22 bp, synthetic construct
  misc_feature 1..22: note = chemically synthesized
  source 1..22: mol_type = other DNA
caacccttgccttcatagaaac

SEQ ID NO: 61228 - DNA, 22 bp, synthetic construct
  misc_feature 1..22: note = chemically synthesized
  source 1..22: mol_type = other DNA
gccttcatagaaacagagtgtt

SEQ ID NO: 61229 - DNA, 22 bp, synthetic construct
  misc_feature 1..22: note = chemically synthesized
  source 1..22: mol_type = other DNA
ccttcatagaaacagagtgttg

SEQ ID NO: 61230 - DNA, 22 bp, synthetic construct
  misc_feature 1..22: note = chemically synthesized
  source 1..22: mol_type = other DNA
catagaaacagagtgttgaaag

SEQ ID NO: 61231 - DNA, 22 bp, synthetic construct
  misc_feature 1..22: note = chemically synthesized
  source 1..22: mol_type = other DNA
atagaaacagagtgttgaaagc

SEQ ID NO: 61232 - DNA, 22 bp, synthetic construct
  misc_feature 1..22: note = chemically synthesized
  source 1..22: mol_type = other DNA
aaagcttggagaagaattaatg

SEQ ID NO: 61233 - DNA, 22 bp, synthetic construct
  misc_feature 1..22: note = chemically synthesized
  source 1..22: mol_type = other DNA
ggagaagaattaatgactcccc

SEQ ID NO: 61234 - DNA, 22 bp, synthetic construct
  misc_feature 1..22: note = chemically synthesized
  source 1..22: mol_type = other DNA
gagaagaattaatgactcccct

SEQ ID NO: 61235 - DNA, 22 bp, synthetic construct
  misc_feature 1..22: note = chemically synthesized
  source 1..22: mol_type = other DNA
atgactcccctgccccttagtg

SEQ ID NO: 61236 - DNA, 22 bp, synthetic construct
  misc_feature 1..22: note = chemically synthesized
  source 1..22: mol_type = other DNA
ccctgccccttagtgtcttaca

SEQ ID NO: 61237 - DNA, 22 bp, synthetic construct
  misc_feature 1..22: note = chemically synthesized
  source 1..22: mol_type = other DNA
ccccttagtgtcttacatgact

SEQ ID NO: 61238 - DNA, 22 bp, synthetic construct
  misc_feature 1..22: note = chemically synthesized
  source 1..22: mol_type = other DNA
agtgtcttacatgactagctgc

SEQ ID NO: 61239 - DNA, 22 bp, synthetic construct
  misc_feature 1..22: note = chemically synthesized
  source 1..22: mol_type = other DNA
gtgtcttacatgactagctgct

SEQ ID NO: 61240 - DNA, 22 bp, synthetic construct
  misc_feature 1..22: note = chemically synthesized
  source 1..22: mol_type = other DNA
acatgactagctgcttctttgc

SEQ ID NO: 61241 - DNA, 22 bp, synthetic construct
  misc_feature 1..22: note = chemically synthesized
  source 1..22: mol_type = other DNA
catgactagctgcttctttgcc

SEQ ID NO: 61242 - DNA, 22 bp, synthetic construct
  misc_feature 1..22: note = chemically synthesized
  source 1..22: mol_type = other DNA
gctgcttctttgcctactgcat

SEQ ID NO: 61243 - DNA, 22 bp, synthetic construct
  misc_feature 1..22: note = chemically synthesized
  source 1..22: mol_type = other DNA
cttctttgcctactgcattttc

SEQ ID NO: 61244 - DNA, 22 bp, synthetic construct
  misc_feature 1..22: note = chemically synthesized
  source 1..22: mol_type = other DNA
ctttgcctactgcattttcaac

SEQ ID NO: 61245 - DNA, 22 bp, synthetic construct
  misc_feature 1..22: note = chemically synthesized
  source 1..22: mol_type = other DNA
tttgcctactgcattttcaact

SEQ ID NO: 61246 - DNA, 22 bp, synthetic construct
  misc_feature 1..22: note = chemically synthesized
  source 1..22: mol_type = other DNA
tgcctactgcattttcaactta

SEQ ID NO: 61247 - DNA, 22 bp, synthetic construct
  misc_feature 1..22: note = chemically synthesized
  source 1..22: mol_type = other DNA
gcctactgcattttcaacttat

SEQ ID NO: 61248 - DNA, 22 bp, synthetic construct
  misc_feature 1..22: note = chemically synthesized
  source 1..22: mol_type = other DNA
cctactgcattttcaacttatt

SEQ ID NO: 61249 - DNA, 22 bp, synthetic construct
  misc_feature 1..22: note = chemically synthesized
  source 1..22: mol_type = other DNA
ctgcattttcaacttatttcaa

SEQ ID NO: 61250 - DNA, 22 bp, synthetic construct
  misc_feature 1..22: note = chemically synthesized
  source 1..22: mol_type = other DNA
cattttcaacttatttcaactt

SEQ ID NO: 61251 - DNA, 22 bp, synthetic construct
  misc_feature 1..22: note = chemically synthesized
  source 1..22: mol_type = other DNA
tcaacttatttcaacttatttt

SEQ ID NO: 61252 - DNA, 22 bp, synthetic construct
  misc_feature 1..22: note = chemically synthesized
  source 1..22: mol_type = other DNA
caacttatttcaacttattttc

SEQ ID NO: 61253 - DNA, 22 bp, synthetic construct
  misc_feature 1..22: note = chemically synthesized
  source 1..22: mol_type = other DNA
aacttatttcaacttattttct

SEQ ID NO: 61254 - DNA, 22 bp, synthetic construct
  misc_feature 1..22: note = chemically synthesized
  source 1..22: mol_type = other DNA
atttcaacttattttctgtggc

SEQ ID NO: 61255 - DNA, 22 bp, synthetic construct
  misc_feature 1..22: note = chemically synthesized
  source 1..22: mol_type = other DNA
tttcaacttattttctgtggct

SEQ ID NO: 61256 - DNA, 22 bp, synthetic construct
  misc_feature 1..22: note = chemically synthesized
  source 1..22: mol_type = other DNA
caacttattttctgtggcttgg

SEQ ID NO: 61257 - DNA, 22 bp, synthetic construct
  misc_feature 1..22: note = chemically synthesized
  source 1..22: mol_type = other DNA
aacttattttctgtggcttgga

SEQ ID NO: 61258 - DNA, 22 bp, synthetic construct
  misc_feature 1..22: note = chemically synthesized
  source 1..22: mol_type = other DNA
attttctgtggcttggaaaata

SEQ ID NO: 61259 - DNA, 22 bp, synthetic construct
  misc_feature 1..22: note = chemically synthesized
  source 1..22: mol_type = other DNA
ttttctgtggcttggaaaatac

SEQ ID NO: 61260 - DNA, 22 bp, synthetic construct
  misc_feature 1..22: note = chemically synthesized
  source 1..22: mol_type = other DNA
tctgtggcttggaaaatacgtt

SEQ ID NO: 61261 - DNA, 22 bp, synthetic construct
  misc_feature 1..22: note = chemically synthesized
  source 1..22: mol_type = other DNA
ctgtggcttggaaaatacgttg

SEQ ID NO: 61262 - DNA, 22 bp, synthetic construct
  misc_feature 1..22: note = chemically synthesized
  source 1..22: mol_type = other DNA
tgtggcttggaaaatacgttga

SEQ ID NO: 61263 - DNA, 22 bp, synthetic construct
  misc_feature 1..22: note = chemically synthesized
  source 1..22: mol_type = other DNA
tggcttggaaaatacgttgact

SEQ ID NO: 61264 - DNA, 22 bp, synthetic construct
  misc_feature 1..22: note = chemically synthesized
  source 1..22: mol_type = other DNA
ggaaaatacgttgactgagtga

SEQ ID NO: 61265 - DNA, 22 bp, synthetic construct
  misc_feature 1..22: note = chemically synthesized
  source 1..22: mol_type = other DNA
gaaaatacgttgactgagtgat

SEQ ID NO: 61266 - DNA, 22 bp, synthetic construct
  misc_feature 1..22: note = chemically synthesized
  source 1..22: mol_type = other DNA
actgagtgatgattgttttcat

SEQ ID NO: 61267 - DNA, 22 bp, synthetic construct
  misc_feature 1..22: note = chemically synthesized
  source 1..22: mol_type = other DNA
agtgatgattgttttcatgaaa

SEQ ID NO: 61268 - DNA, 22 bp, synthetic construct
  misc_feature 1..22: note = chemically synthesized
  source 1..22: mol_type = other DNA
ttttcatgaaatggtgcaacat

SEQ ID NO: 61269 - DNA, 22 bp, synthetic construct
  misc_feature 1..22: note = chemically synthesized
  source 1..22: mol_type = other DNA
tcatgaaatggtgcaacatgta

SEQ ID NO: 61270 - DNA, 22 bp, synthetic construct
  misc_feature 1..22: note = chemically synthesized
  source 1..22: mol_type = other DNA
catgaaatggtgcaacatgtaa

SEQ ID NO: 61271 - DNA, 22 bp, synthetic construct
  misc_feature 1..22: note = chemically synthesized
  source 1..22: mol_type = other DNA
atgaaatggtgcaacatgtaaa

SEQ ID NO: 61272 - DNA, 22 bp, synthetic construct
  misc_feature 1..22: note = chemically synthesized
  source 1..22: mol_type = other DNA
tcattaatagtgcagttatgta

SEQ ID NO: 61273 - DNA, 22 bp, synthetic construct
  misc_feature 1..22: note = chemically synthesized
  source 1..22: mol_type = other DNA
atagtgcagttatgtagagtgt

SEQ ID NO: 61274 - DNA, 22 bp, synthetic construct
  misc_feature 1..22: note = chemically synthesized
  source 1..22: mol_type = other DNA
tgtagagtgtagctctttgagt

SEQ ID NO: 61275 - DNA, 22 bp, synthetic construct
  misc_feature 1..22: note = chemically synthesized
  source 1..22: mol_type = other DNA
tttgagtcttcagttttgaatc

SEQ ID NO: 61276 - DNA, 22 bp, synthetic construct
  misc_feature 1..22: note = chemically synthesized
  source 1..22: mol_type = other DNA
tgagtcttcagttttgaatcag

SEQ ID NO: 61277 - DNA, 22 bp, synthetic construct
  misc_feature 1..22: note = chemically synthesized
  source 1..22: mol_type = other DNA
gagtcttcagttttgaatcaga

SEQ ID NO: 61278 - DNA, 22 bp, synthetic construct
  misc_feature 1..22: note = chemically synthesized
  source 1..22: mol_type = other DNA
agtcttcagttttgaatcagat

SEQ ID NO: 61279 - DNA, 22 bp, synthetic construct
  misc_feature 1..22: note = chemically synthesized
  source 1..22: mol_type = other DNA
cagttttgaatcagattagcgc

SEQ ID NO: 61280 - DNA, 22 bp, synthetic construct
  misc_feature 1..22: note = chemically synthesized
  source 1..22: mol_type = other DNA
agttttgaatcagattagcgct

SEQ ID NO: 61281 - DNA, 22 bp, synthetic construct
  misc_feature 1..22: note = chemically synthesized
  source 1..22: mol_type = other DNA
tgaatcagattagcgctctgtt

SEQ ID NO: 61282 - DNA, 22 bp, synthetic construct
  misc_feature 1..22: note = chemically synthesized
  source 1..22: mol_type = other DNA
gaatcagattagcgctctgtta

SEQ ID NO: 61283 - DNA, 22 bp, synthetic construct
  misc_feature 1..22: note = chemically synthesized
  source 1..22: mol_type = other DNA
aatcagattagcgctctgttaa

SEQ ID NO: 61284 - DNA, 22 bp, synthetic construct
  misc_feature 1..22: note = chemically synthesized
  source 1..22: mol_type = other DNA
gcgctctgttaacttaaaatag

SEQ ID NO: 61285 - DNA, 22 bp, synthetic construct
  misc_feature 1..22: note = chemically synthesized
  source 1..22: mol_type = other DNA
tgttaacttaaaatagccccaa

SEQ ID NO: 61286 - DNA, 22 bp, synthetic construct
  misc_feature 1..22: note = chemically synthesized
  source 1..22: mol_type = other DNA
ttaacttaaaatagccccaaaa

SEQ ID NO: 61287 - DNA, 22 bp, synthetic construct
  misc_feature 1..22: note = chemically synthesized
  source 1..22: mol_type = other DNA
acttaaaatagccccaaaaaag

SEQ ID NO: 61288 - DNA, 22 bp, synthetic construct
  misc_feature 1..22: note = chemically synthesized
  source 1..22: mol_type = other DNA
aaaatagccccaaaaaagaaga

SEQ ID NO: 61289 - DNA, 22 bp, synthetic construct
  misc_feature 1..22: note = chemically synthesized
  source 1..22: mol_type = other DNA
aaatagccccaaaaaagaagaa

SEQ ID NO: 61290 - DNA, 22 bp, synthetic construct
  misc_feature 1..22: note = chemically synthesized
  source 1..22: mol_type = other DNA
tcagaaatcagagggaaatatt

SEQ ID NO: 61291 - DNA, 22 bp, synthetic construct
  misc_feature 1..22: note = chemically synthesized
  source 1..22: mol_type = other DNA
gcattatgaaacatggtaacaa

SEQ ID NO: 61292 - DNA, 22 bp, synthetic construct
  misc_feature 1..22: note = chemically synthesized
  source 1..22: mol_type = other DNA
tgaaacatggtaacaagtggcc

SEQ ID NO: 61293 - DNA, 22 bp, synthetic construct
  misc_feature 1..22: note = chemically synthesized
  source 1..22: mol_type = other DNA
gcactttatgtctgcatgaata

SEQ ID NO: 61294 - DNA, 22 bp, synthetic construct
  misc_feature 1..22: note = chemically synthesized
  source 1..22: mol_type = other DNA
tatgtctgcatgaatagcatct

SEQ ID NO: 61295 - DNA, 22 bp, synthetic construct
  misc_feature 1..22: note = chemically synthesized
  source 1..22: mol_type = other DNA
atgtctgcatgaatagcatctt

SEQ ID NO: 61296 - DNA, 22 bp, synthetic construct
  misc_feature 1..22: note = chemically synthesized
  source 1..22: mol_type = other DNA
tgtctgcatgaatagcatcttt

SEQ ID NO: 61297 - DNA, 22 bp, synthetic construct
  misc_feature 1..22: note = chemically synthesized
  source 1..22: mol_type = other DNA
catgaatagcatctttaagtgt

SEQ ID NO: 61298 - DNA, 22 bp, synthetic construct
  misc_feature 1..22: note = chemically synthesized
  source 1..22: mol_type = other DNA
taagtgttttattggtaacgga

SEQ ID NO: 61299 - DNA, 22 bp, synthetic construct
  misc_feature 1..22: note = chemically synthesized
  source 1..22: mol_type = other DNA
aagtgttttattggtaacggaa

SEQ ID NO: 61300 - DNA, 22 bp, synthetic construct
  misc_feature 1..22: note = chemically synthesized
  source 1..22: mol_type = other DNA
agtgttttattggtaacggaaa

SEQ ID NO: 61301 - DNA, 22 bp, synthetic construct
  misc_feature 1..22: note = chemically synthesized
  source 1..22: mol_type = other DNA
tattggtaacggaaaagagtgg

SEQ ID NO: 61302 - DNA, 22 bp, synthetic construct
  misc_feature 1..22: note = chemically synthesized
  source 1..22: mol_type = other DNA
attggtaacggaaaagagtgga

SEQ ID NO: 61303 - DNA, 22 bp, synthetic construct
  misc_feature 1..22: note = chemically synthesized
  source 1..22: mol_type = other DNA
ttggtaacggaaaagagtggag

SEQ ID NO: 61304 - DNA, 22 bp, synthetic construct
  misc_feature 1..22: note = chemically synthesized
  source 1..22: mol_type = other DNA
gtaacggaaaagagtggagtca

SEQ ID NO: 61305 - DNA, 22 bp, synthetic construct
  misc_feature 1..22: note = chemically synthesized
  source 1..22: mol_type = other DNA
cttcccaaattggcgagttctt

SEQ ID NO: 61306 - DNA, 22 bp, synthetic construct
  misc_feature 1..22: note = chemically synthesized
  source 1..22: mol_type = other DNA
cccaaattggcgagttctttta

SEQ ID NO: 61307 - DNA, 22 bp, synthetic construct
  misc_feature 1..22: note = chemically synthesized
  source 1..22: mol_type = other DNA
ccaaattggcgagttcttttaa

SEQ ID NO: 61308 - DNA, 22 bp, synthetic construct
  misc_feature 1..22: note = chemically synthesized
  source 1..22: mol_type = other DNA
gcgagttcttttaattcagact

SEQ ID NO: 61309 - DNA, 22 bp, synthetic construct
  misc_feature 1..22: note = chemically synthesized
  source 1..22: mol_type = other DNA
ttttaattcagacttctccttg

SEQ ID NO: 61310 - DNA, 22 bp, synthetic construct
  misc_feature 1..22: note = chemically synthesized
  source 1..22: mol_type = other DNA
ttaattcagacttctccttgtt

SEQ ID NO: 61311 - DNA, 22 bp, synthetic construct
  misc_feature 1..22: note = chemically synthesized
  source 1..22: mol_type = other DNA
taattcagacttctccttgtta

SEQ ID NO: 61312 - DNA, 22 bp, synthetic construct
  misc_feature 1..22: note = chemically synthesized
  source 1..22: mol_type = other DNA
aattcagacttctccttgttat

SEQ ID NO: 61313 - DNA, 22 bp, synthetic construct
  misc_feature 1..22: note = chemically synthesized
  source 1..22: mol_type = other DNA
attcagacttctccttgttatt

SEQ ID NO: 61314 - DNA, 22 bp, synthetic construct
  misc_feature 1..22: note = chemically synthesized
  source 1..22: mol_type = other DNA
agacttctccttgttattgcct

SEQ ID NO: 61315 - DNA, 22 bp, synthetic construct
  misc_feature 1..22: note = chemically synthesized
  source 1..22: mol_type = other DNA
ctccttgttattgcctactggg

SEQ ID NO: 61316 - DNA, 22 bp, synthetic construct
  misc_feature 1..22: note = chemically synthesized
  source 1..22: mol_type = other DNA
tccttgttattgcctactgggg

SEQ ID NO: 61317 - DNA, 22 bp, synthetic construct
  misc_feature 1..22: note = chemically synthesized
  source 1..22: mol_type = other DNA
cttgttattgcctactggggag

SEQ ID NO: 61318 - DNA, 22 bp, synthetic construct
  misc_feature 1..22: note = chemically synthesized
  source 1..22: mol_type = other DNA
gttattgcctactggggagcac

SEQ ID NO: 61319 - DNA, 22 bp, synthetic construct
  misc_feature 1..22: note = chemically synthesized
  source 1..22: mol_type = other DNA
ttattgcctactggggagcact

SEQ ID NO: 61320 - DNA, 22 bp, synthetic construct
  misc_feature 1..22: note = chemically synthesized
  source 1..22: mol_type = other DNA
ttgcctactggggagcacttat

SEQ ID NO: 61321 - DNA, 22 bp, synthetic construct
  misc_feature 1..22: note = chemically synthesized
  source 1..22: mol_type = other DNA
cctactggggagcacttattca

SEQ ID NO: 61322 - DNA, 22 bp, synthetic construct
  misc_feature 1..22: note = chemically synthesized
  source 1..22: mol_type = other DNA
ctggggagcacttattcacctg

SEQ ID NO: 61323 - DNA, 22 bp, synthetic construct
  misc_feature 1..22: note = chemically synthesized
  source 1..22: mol_type = other DNA
gggagcacttattcacctgtca

SEQ ID NO: 61324 - DNA, 22 bp, synthetic construct
  misc_feature 1..22: note = chemically synthesized
  source 1..22: mol_type = other DNA
attcacctgtcaaattgtatgc

SEQ ID NO: 61325 - DNA, 22 bp, synthetic construct
  misc_feature 1..22: note = chemically synthesized
  source 1..22: mol_type = other DNA
ttcacctgtcaaattgtatgct

SEQ ID NO: 61326 - DNA, 22 bp, synthetic construct
  misc_feature 1..22: note = chemically synthesized
  source 1..22: mol_type = other DNA
acctgtcaaattgtatgctagg

SEQ ID NO: 61327 - DNA, 22 bp, synthetic construct
  misc_feature 1..22: note = chemically synthesized
  source 1..22: mol_type = other DNA
tcaaattgtatgctagggtggg

SEQ ID NO: 61328 - DNA, 22 bp, synthetic construct
  misc_feature 1..22: note = chemically synthesized
  source 1..22: mol_type = other DNA
tatgctagggtgggaaagggta

SEQ ID NO: 61329 - DNA, 22 bp, synthetic construct
  misc_feature 1..22: note = chemically synthesized
  source 1..22: mol_type = other DNA
gggtgggaaagggtattttagc

SEQ ID NO: 61330 - DNA, 22 bp, synthetic construct
  misc_feature 1..22: note = chemically synthesized
  source 1..22: mol_type = other DNA
tagcttttctggctgcatcccg

SEQ ID NO: 61331 - DNA, 22 bp, synthetic construct
  misc_feature 1..22: note = chemically synthesized
  source 1..22: mol_type = other DNA
agcttttctggctgcatcccgg

SEQ ID NO: 61332 - DNA, 22 bp, synthetic construct
  misc_feature 1..22: note = chemically synthesized
  source 1..22: mol_type = other DNA
gcttttctggctgcatcccggg

SEQ ID NO: 61333 - DNA, 22 bp, synthetic construct
  misc_feature 1..22: note = chemically synthesized
  source 1..22: mol_type = other DNA
ttctggctgcatcccgggctct

SEQ ID NO: 61334 - DNA, 22 bp, synthetic construct
  misc_feature 1..22: note = chemically synthesized
  source 1..22: mol_type = other DNA
tctggctgcatcccgggctctc

SEQ ID NO: 61335 - DNA, 22 bp, synthetic construct
  misc_feature 1..22: note = chemically synthesized
  source 1..22: mol_type = other DNA
ctggctgcatcccgggctctca

SEQ ID NO: 61336 - DNA, 22 bp, synthetic construct
  misc_feature 1..22: note = chemically synthesized
  source 1..22: mol_type = other DNA
tggctgcatcccgggctctcag

SEQ ID NO: 61337 - DNA, 22 bp, synthetic construct
  misc_feature 1..22: note = chemically synthesized
  source 1..22: mol_type = other DNA
gctgcatcccgggctctcaggt

SEQ ID NO: 61338 - DNA, 22 bp, synthetic construct
  misc_feature 1..22: note = chemically synthesized
  source 1..22: mol_type = other DNA
catcccgggctctcaggtagaa

SEQ ID NO: 61339 - DNA, 22 bp, synthetic construct
  misc_feature 1..22: note = chemically synthesized
  source 1..22: mol_type = other DNA
tcaggtagaagggatttgtccc

SEQ ID NO: 61340 - DNA, 22 bp, synthetic construct
  misc_feature 1..22: note = chemically synthesized
  source 1..22: mol_type = other DNA
aggtagaagggatttgtccctt

SEQ ID NO: 61341 - DNA, 22 bp, synthetic construct
  misc_feature 1..22: note = chemically synthesized
  source 1..22: mol_type = other DNA
gtccctttgccatggcctcctt

SEQ ID NO: 61342 - DNA, 22 bp, synthetic construct
  misc_feature 1..22: note = chemically synthesized
  source 1..22: mol_type = other DNA
tccctttgccatggcctccttc

SEQ ID NO: 61343 - DNA, 22 bp, synthetic construct
  misc_feature 1..22: note = chemically synthesized
  source 1..22: mol_type = other DNA
tgccatggcctccttctctcct

SEQ ID NO: 61344 - DNA, 22 bp, synthetic construct
  misc_feature 1..22: note = chemically synthesized
  source 1..22: mol_type = other DNA
gccatggcctccttctctcctg

SEQ ID NO: 61345 - DNA, 22 bp, synthetic construct
  misc_feature 1..22: note = chemically synthesized
  source 1..22: mol_type = other DNA
ccatggcctccttctctcctgc

SEQ ID NO: 61346 - DNA, 22 bp, synthetic construct
  misc_feature 1..22: note = chemically synthesized
  source 1..22: mol_type = other DNA
cttctctcctgccctccccagt

SEQ ID NO: 61347 - DNA, 22 bp, synthetic construct
  misc_feature 1..22: note = chemically synthesized
  source 1..22: mol_type = other DNA
ctctcctgccctccccagtgcc

SEQ ID NO: 61348 - DNA, 22 bp, synthetic construct
  misc_feature 1..22: note = chemically synthesized
  source 1..22: mol_type = other DNA
tctcctgccctccccagtgccc

SEQ ID NO: 61349 - DNA, 22 bp, synthetic construct
  misc_feature 1..22: note = chemically synthesized
  source 1..22: mol_type = other DNA
tcctgccctccccagtgcccct

SEQ ID NO: 61350 - DNA, 22 bp, synthetic construct
  misc_feature 1..22: note = chemically synthesized
  source 1..22: mol_type = other DNA
ctgccctccccagtgcccctgc

SEQ ID NO: 61351 - DNA, 22 bp, synthetic construct
  misc_feature 1..22: note = chemically synthesized
  source 1..22: mol_type = other DNA
ccctccccagtgcccctgccag

SEQ ID NO: 61352 - DNA, 22 bp, synthetic construct
  misc_feature 1..22: note = chemically synthesized
  source 1..22: mol_type = other DNA
cccagtgcccctgccaggagga

SEQ ID NO: 61353 - DNA, 22 bp, synthetic construct
  misc_feature 1..22: note = chemically synthesized
  source 1..22: mol_type = other DNA
ccaggaggagggagaatctgaa

SEQ ID NO: 61354 - DNA, 22 bp, synthetic construct
  misc_feature 1..22: note = chemically synthesized
  source 1..22: mol_type = other DNA
aaagcaagaatggagggagagt

SEQ ID NO: 61355 - DNA, 22 bp, synthetic construct
  misc_feature 1..22: note = chemically synthesized
  source 1..22: mol_type = other DNA
ggatttgtgcctggccagtgcc

SEQ ID NO: 61356 - DNA, 22 bp, synthetic construct
  misc_feature 1..22: note = chemically synthesized
  source 1..22: mol_type = other DNA
gtgcctggccagtgcccctgca

SEQ ID NO: 61357 - DNA, 22 bp, synthetic construct
  misc_feature 1..22: note = chemically synthesized
  source 1..22: mol_type = other DNA
tgcctggccagtgcccctgcac

SEQ ID NO: 61358 - DNA, 22 bp, synthetic construct
  misc_feature 1..22: note = chemically synthesized
  source 1..22: mol_type = other DNA
gccagtgcccctgcacagtatt

SEQ ID NO: 61359 - DNA, 22 bp, synthetic construct
  misc_feature 1..22: note = chemically synthesized
  source 1..22: mol_type = other DNA
cacagtattggatatgagtatg

SEQ ID NO: 61360 - DNA, 22 bp, synthetic construct
  misc_feature 1..22: note = chemically synthesized
  source 1..22: mol_type = other DNA
gatatgagtatgggcatctcag

SEQ ID NO: 61361 - DNA, 22 bp, synthetic construct
  misc_feature 1..22: note = chemically synthesized
  source 1..22: mol_type = other DNA
agtgtgcctggaaacgcagttg

SEQ ID NO: 61362 - DNA, 22 bp, synthetic construct
  misc_feature 1..22: note = chemically synthesized
  source 1..22: mol_type = other DNA
gaaacgcagttggctgcacagc

SEQ ID NO: 61363 - DNA, 22 bp, synthetic construct
  misc_feature 1..22: note = chemically synthesized
  source 1..22: mol_type = other DNA
gctgcacagccccagtgggaag

SEQ ID NO: 61364 - DNA, 22 bp, synthetic construct
  misc_feature 1..22: note = chemically synthesized
  source 1..22: mol_type = other DNA
cacagccccagtgggaagaact

SEQ ID NO: 61365 - DNA, 22 bp, synthetic construct
  misc_feature 1..22: note = chemically synthesized
  source 1..22: mol_type = other DNA
tgaggaactgctggtggttggc

SEQ ID NO: 61366 - DNA, 22 bp, synthetic construct
  misc_feature 1..22: note = chemically synthesized
  source 1..22: mol_type = other DNA
aggaactgctggtggttggctc

SEQ ID NO: 61367 - DNA, 22 bp, synthetic construct
  misc_feature 1..22: note = chemically synthesized
  source 1..22: mol_type = other DNA
ctggtggttggctcttccccag

SEQ ID NO: 61368 - DNA, 22 bp, synthetic construct
  misc_feature 1..22: note = chemically synthesized
  source 1..22: mol_type = other DNA
gtggttggctcttccccaggct

SEQ ID NO: 61369 - DNA, 22 bp, synthetic construct
  misc_feature 1..22: note = chemically synthesized
  source 1..22: mol_type = other DNA
gctcttccccaggctctcagcc

SEQ ID NO: 61370 - DNA, 22 bp, synthetic construct
  misc_feature 1..22: note = chemically synthesized
  source 1..22: mol_type = other DNA
ttccccaggctctcagcccctc

SEQ ID NO: 61371 - DNA, 22 bp, synthetic construct
  misc_feature 1..22: note = chemically synthesized
  source 1..22: mol_type = other DNA
ccccaggctctcagcccctctt

SEQ ID NO: 61372 - DNA, 22 bp, synthetic construct
  misc_feature 1..22: note = chemically synthesized
  source 1..22: mol_type = other DNA
cccaggctctcagcccctcttt

SEQ ID NO: 61373 - DNA, 22 bp, synthetic construct
  misc_feature 1..22: note = chemically synthesized
  source 1..22: mol_type = other DNA
tcagcccctctttctagaggct

SEQ ID NO: 61374 - DNA, 22 bp, synthetic construct
  misc_feature 1..22: note = chemically synthesized
  source 1..22: mol_type = other DNA
agcccctctttctagaggctcc

SEQ ID NO: 61375 - DNA, 22 bp, synthetic construct
  misc_feature 1..22: note = chemically synthesized
  source 1..22: mol_type = other DNA
tttctagaggctccacctaagc

SEQ ID NO: 61376 - DNA, 22 bp, synthetic construct
  misc_feature 1..22: note = chemically synthesized
  source 1..22: mol_type = other DNA
tctagaggctccacctaagcct

SEQ ID NO: 61377 - DNA, 22 bp, synthetic construct
  misc_feature 1..22: note = chemically synthesized
  source 1..22: mol_type = other DNA
ctagaggctccacctaagcctt

SEQ ID NO: 61378 - DNA, 22 bp, synthetic construct
  misc_feature 1..22: note = chemically synthesized
  source 1..22: mol_type = other DNA
tagaggctccacctaagcctta

SEQ ID NO: 61379 - DNA, 22 bp, synthetic construct
  misc_feature 1..22: note = chemically synthesized
  source 1..22: mol_type = other DNA
gaggctccacctaagccttagg

SEQ ID NO: 61380 - DNA, 22 bp, synthetic construct
  misc_feature 1..22: note = chemically synthesized
  source 1..22: mol_type = other DNA
cacctaagccttaggaaagact

SEQ ID NO: 61381 - DNA, 22 bp, synthetic construct
  misc_feature 1..22: note = chemically synthesized
  source 1..22: mol_type = other DNA
agccttaggaaagactttcgtt

SEQ ID NO: 61382 - DNA, 22 bp, synthetic construct
  misc_feature 1..22: note = chemically synthesized
  source 1..22: mol_type = other DNA
aggaaagactttcgtttggttt

SEQ ID NO: 61383 - DNA, 22 bp, synthetic construct
  misc_feature 1..22: note = chemically synthesized
  source 1..22: mol_type = other DNA
ggaaagactttcgtttggtttt

SEQ ID NO: 61384 - DNA, 22 bp, synthetic construct
  misc_feature 1..22: note = chemically synthesized
  source 1..22: mol_type = other DNA
tcgtttggttttaactggctcc

SEQ ID NO: 61385 - DNA, 22 bp, synthetic construct
  misc_feature 1..22: note = chemically synthesized
  source 1..22: mol_type = other DNA
cgtttggttttaactggctcct

SEQ ID NO: 61386 - DNA, 22 bp, synthetic construct
  misc_feature 1..22: note = chemically synthesized
  source 1..22: mol_type = other DNA
gtttggttttaactggctcctg

SEQ ID NO: 61387 - DNA, 22 bp, synthetic construct
  misc_feature 1..22: note = chemically synthesized
  source 1..22: mol_type = other DNA
ggttttaactggctcctgtcaa

SEQ ID NO: 61388 - DNA, 22 bp, synthetic construct
  misc_feature 1..22: note = chemically synthesized
  source 1..22: mol_type = other DNA
gttttaactggctcctgtcaag

SEQ ID NO: 61389 - DNA, 22 bp, synthetic construct
  misc_feature 1..22: note = chemically synthesized
  source 1..22: mol_type = other DNA
taactggctcctgtcaagggtt

SEQ ID NO: 61390 - DNA, 22 bp, synthetic construct
  misc_feature 1..22: note = chemically synthesized
  source 1..22: mol_type = other DNA
aactggctcctgtcaagggttc

SEQ ID NO: 61391 - DNA, 22 bp, synthetic construct
  misc_feature 1..22: note = chemically synthesized
  source 1..22: mol_type = other DNA
actggctcctgtcaagggttcc

SEQ ID NO: 61392 - DNA, 22 bp, synthetic construct
  misc_feature 1..22: note = chemically synthesized
  source 1..22: mol_type = other DNA
gctcctgtcaagggttccccca

SEQ ID NO: 61393 - DNA, 22 bp, synthetic construct
  misc_feature 1..22: note = chemically synthesized
  source 1..22: mol_type = other DNA
ctgtcaagggttcccccaaacc

SEQ ID NO: 61394 - DNA, 22 bp, synthetic construct
  misc_feature 1..22: note = chemically synthesized
  source 1..22: mol_type = other DNA
tcaagggttcccccaaaccagc

SEQ ID NO: 61395 - DNA, 22 bp, synthetic construct
  misc_feature 1..22: note = chemically synthesized
  source 1..22: mol_type = other DNA
ccccaaaccagctcaacccctc

SEQ ID NO: 61396 - DNA, 22 bp, synthetic construct
  misc_feature 1..22: note = chemically synthesized
  source 1..22: mol_type = other DNA
aacccctccatttacattataa

SEQ ID NO: 61397 - DNA, 22 bp, synthetic construct
  misc_feature 1..22: note = chemically synthesized
  source 1..22: mol_type = other DNA
catttacattataatgcaaaag

SEQ ID NO: 61398 - DNA, 22 bp, synthetic construct
  misc_feature 1..22: note = chemically synthesized
  source 1..22: mol_type = other DNA
acattataatgcaaaagctctt

SEQ ID NO: 61399 - DNA, 22 bp, synthetic construct
  misc_feature 1..22: note = chemically synthesized
  source 1..22: mol_type = other DNA
cattataatgcaaaagctcttc

SEQ ID NO: 61400 - DNA, 22 bp, synthetic construct
  misc_feature 1..22: note = chemically synthesized
  source 1..22: mol_type = other DNA
taatgcaaaagctcttccctgt

SEQ ID NO: 61401 - DNA, 22 bp, synthetic construct
  misc_feature 1..22: note = chemically synthesized
  source 1..22: mol_type = other DNA
ttccctgtgggtctcagggcct

SEQ ID NO: 61402 - DNA, 22 bp, synthetic construct
  misc_feature 1..22: note = chemically synthesized
  source 1..22: mol_type = other DNA
ccctgtgggtctcagggcctgt

SEQ ID NO: 61403 - DNA, 22 bp, synthetic construct
  misc_feature 1..22: note = chemically synthesized
  source 1..22: mol_type = other DNA
cctgtgggtctcagggcctgtg

SEQ ID NO: 61404 - DNA, 22 bp, synthetic construct
  misc_feature 1..22: note = chemically synthesized
  source 1..22: mol_type = other DNA
tgggtctcagggcctgtgggga

SEQ ID NO: 61405 - DNA, 22 bp, synthetic construct
  misc_feature 1..22: note = chemically synthesized
  source 1..22: mol_type = other DNA
agggcctgtggggaaaatggaa

SEQ ID NO: 61406 - DNA, 22 bp, synthetic construct
  misc_feature 1..22: note = chemically synthesized
  source 1..22: mol_type = other DNA
tggggaaaatggaatctggctc

SEQ ID NO: 61407 - DNA, 22 bp, synthetic construct
  misc_feature 1..22: note = chemically synthesized
  source 1..22: mol_type = other DNA
gctcaaacccaagatccaaagc

SEQ ID NO: 61408 - DNA, 22 bp, synthetic construct
  misc_feature 1..22: note = chemically synthesized
  source 1..22: mol_type = other DNA
aaacccaagatccaaagctaaa

SEQ ID NO: 61409 - DNA, 22 bp, synthetic construct
  misc_feature 1..22: note = chemically synthesized
  source 1..22: mol_type = other DNA
aagtgcccccaggttgggctgc

SEQ ID NO: 61410 - DNA, 22 bp, synthetic construct
  misc_feature 1..22: note = chemically synthesized
  source 1..22: mol_type = other DNA
ggctgcctgacagttttataga

SEQ ID NO: 61411 - DNA, 22 bp, synthetic construct
  misc_feature 1..22: note = chemically synthesized
  source 1..22: mol_type = other DNA
cctgacagttttatagatatgg

SEQ ID NO: 61412 - DNA, 22 bp, synthetic construct
  misc_feature 1..22: note = chemically synthesized
  source 1..22: mol_type = other DNA
acagttttatagatatggcatt

SEQ ID NO: 61413 - DNA, 22 bp, synthetic construct
  misc_feature 1..22: note = chemically synthesized
  source 1..22: mol_type = other DNA
tatagatatggcattgagtggc

SEQ ID NO: 61414 - DNA, 22 bp, synthetic construct
  misc_feature 1..22: note = chemically synthesized
  source 1..22: mol_type = other DNA
atagatatggcattgagtggcc

SEQ ID NO: 61415 - DNA, 22 bp, synthetic construct
  misc_feature 1..22: note = chemically synthesized
  source 1..22: mol_type = other DNA
tagatatggcattgagtggcct

SEQ ID NO: 61416 - DNA, 22 bp, synthetic construct
  misc_feature 1..22: note = chemically synthesized
  source 1..22: mol_type = other DNA
agtggcctcctggcagtttgga

SEQ ID NO: 61417 - DNA, 22 bp, synthetic construct
  misc_feature 1..22: note = chemically synthesized
  source 1..22: mol_type = other DNA
ctggcagtttggaattgtgaag

SEQ ID NO: 61418 - DNA, 22 bp, synthetic construct
  misc_feature 1..22: note = chemically synthesized
  source 1..22: mol_type = other DNA
gcagtttggaattgtgaaggtt

SEQ ID NO: 61419 - DNA, 22 bp, synthetic construct
  misc_feature 1..22: note = chemically synthesized
  source 1..22: mol_type = other DNA
ggaattgtgaaggttcactcat

SEQ ID NO: 61420 - DNA, 22 bp, synthetic construct
  misc_feature 1..22: note = chemically synthesized
  source 1..22: mol_type = other DNA
gaattgtgaaggttcactcatt

SEQ ID NO: 61421 - DNA, 22 bp, synthetic construct
  misc_feature 1..22: note = chemically synthesized
  source 1..22: mol_type = other DNA
tgaaggttcactcattcatttt

SEQ ID NO: 61422 - DNA, 22 bp, synthetic construct
  misc_feature 1..22: note = chemically synthesized
  source 1..22: mol_type = other DNA
actcattcatttttcaacaaat

SEQ ID NO: 61423 - DNA, 22 bp, synthetic construct
  misc_feature 1..22: note = chemically synthesized
  source 1..22: mol_type = other DNA
attcatttttcaacaaatattt

SEQ ID NO: 61424 - DNA, 22 bp, synthetic construct
  misc_feature 1..22: note = chemically synthesized
  source 1..22: mol_type = other DNA
atttttcaacaaatattttgaa

SEQ ID NO: 61425 - DNA, 22 bp, synthetic construct
  misc_feature 1..22: note = chemically synthesized
  source 1..22: mol_type = other DNA
ttcaacaaatattttgaacacc

SEQ ID NO: 61426 - DNA, 22 bp, synthetic construct
  misc_feature 1..22: note = chemically synthesized
  source 1..22: mol_type = other DNA
tcaacaaatattttgaacacct

SEQ ID NO: 61427 - DNA, 22 bp, synthetic construct
  misc_feature 1..22: note = chemically synthesized
  source 1..22: mol_type = other DNA
caacaaatattttgaacacctg

SEQ ID NO: 61428 - DNA, 22 bp, synthetic construct
  misc_feature 1..22: note = chemically synthesized
  source 1..22: mol_type = other DNA
aacaaatattttgaacacctgc

SEQ ID NO: 61429 - DNA, 22 bp, synthetic construct
  misc_feature 1..22: note = chemically synthesized
  source 1..22: mol_type = other DNA
tgaacacctgccacatgctggg

SEQ ID NO: 61430 - DNA, 22 bp, synthetic construct
  misc_feature 1..22: note = chemically synthesized
  source 1..22: mol_type = other DNA
gaacacctgccacatgctggga

SEQ ID NO: 61431 - DNA, 22 bp, synthetic construct
  misc_feature 1..22: note = chemically synthesized
  source 1..22: mol_type = other DNA
aacacctgccacatgctgggaa

SEQ ID NO: 61432 - DNA, 22 bp, synthetic construct
  misc_feature 1..22: note = chemically synthesized
  source 1..22: mol_type = other DNA
ccacatgctgggaacggttctt

SEQ ID NO: 61433 - DNA, 22 bp, synthetic construct
  misc_feature 1..22: note = chemically synthesized
  source 1..22: mol_type = other DNA
ggaacggttcttggtgttgggc

SEQ ID NO: 61434 - DNA, 22 bp, synthetic construct
  misc_feature 1..22: note = chemically synthesized
  source 1..22: mol_type = other DNA
ttggtgttgggcatagaaagcc

SEQ ID NO: 61435 - DNA, 22 bp, synthetic construct
  misc_feature 1..22: note = chemically synthesized
  source 1..22: mol_type = other DNA
ggtgttgggcatagaaagcctt

SEQ ID NO: 61436 - DNA, 22 bp, synthetic construct
  misc_feature 1..22: note = chemically synthesized
  source 1..22: mol_type = other DNA
gtgttgggcatagaaagcctta

SEQ ID NO: 61437 - DNA, 22 bp, synthetic construct
  misc_feature 1..22: note = chemically synthesized
  source 1..22: mol_type = other DNA
ggcatagaaagccttaaaaact

SEQ ID NO: 61438 - DNA, 22 bp, synthetic construct
  misc_feature 1..22: note = chemically synthesized
  source 1..22: mol_type = other DNA
aaaaactccctgctcttgtggc

SEQ ID NO: 61439 - DNA, 22 bp, synthetic construct
  misc_feature 1..22: note = chemically synthesized
  source 1..22: mol_type = other DNA
aaaactccctgctcttgtggca

SEQ ID NO: 61440 - DNA, 22 bp, synthetic construct
  misc_feature 1..22: note = chemically synthesized
  source 1..22: mol_type = other DNA
cctgctcttgtggcaccccctt

SEQ ID NO: 61441 - DNA, 22 bp, synthetic construct
  misc_feature 1..22: note = chemically synthesized
  source 1..22: mol_type = other DNA
ctcttgtggcaccccctttcta

SEQ ID NO: 61442 - DNA, 22 bp, synthetic construct
  misc_feature 1..22: note = chemically synthesized
  source 1..22: mol_type = other DNA
ttgtggcaccccctttctagct

SEQ ID NO: 61443 - DNA, 22 bp, synthetic construct
  misc_feature 1..22: note = chemically synthesized
  source 1..22: mol_type = other DNA
gtggcaccccctttctagctgg

SEQ ID NO: 61444 - DNA, 22 bp, synthetic construct
  misc_feature 1..22: note = chemically synthesized
  source 1..22: mol_type = other DNA
tggcaccccctttctagctggg

SEQ ID NO: 61445 - DNA, 22 bp, synthetic construct
  misc_feature 1..22: note = chemically synthesized
  source 1..22: mol_type = other DNA
tctagctggggagagacagaag

SEQ ID NO: 61446 - DNA, 22 bp, synthetic construct
  misc_feature 1..22: note = chemically synthesized
  source 1..22: mol_type = other DNA
ctagctggggagagacagaaga

SEQ ID NO: 61447 - DNA, 22 bp, synthetic construct
  misc_feature 1..22: note = chemically synthesized
  source 1..22: mol_type = other DNA
tagctggggagagacagaagat

SEQ ID NO: 61448 - DNA, 22 bp, synthetic construct
  misc_feature 1..22: note = chemically synthesized
  source 1..22: mol_type = other DNA
gctggggagagacagaagatgc

SEQ ID NO: 61449 - DNA, 22 bp, synthetic construct
  misc_feature 1..22: note = chemically synthesized
  source 1..22: mol_type = other DNA
gggagagacagaagatgcacca

SEQ ID NO: 61450 - DNA, 22 bp, synthetic construct
  misc_feature 1..22: note = chemically synthesized
  source 1..22: mol_type = other DNA
tatagtatggcaagagaagatc

SEQ ID NO: 61451 - DNA, 22 bp, synthetic construct
  misc_feature 1..22: note = chemically synthesized
  source 1..22: mol_type = other DNA
cctgcacgaaaataaggtgggg

SEQ ID NO: 61452 - DNA, 22 bp, synthetic construct
  misc_feature 1..22: note = chemically synthesized
  source 1..22: mol_type = other DNA
cacgaaaataaggtggggaaga

SEQ ID NO: 61453 - DNA, 22 bp, synthetic construct
  misc_feature 1..22: note = chemically synthesized
  source 1..22: mol_type = other DNA
ttaaataggataattagggaag

SEQ ID NO: 61454 - DNA, 22 bp, synthetic construct
  misc_feature 1..22: note = chemically synthesized
  source 1..22: mol_type = other DNA
taaataggataattagggaagg

SEQ ID NO: 61455 - DNA, 22 bp, synthetic construct
  misc_feature 1..22: note = chemically synthesized
  source 1..22: mol_type = other DNA
aaataggataattagggaaggc

SEQ ID NO: 61456 - DNA, 22 bp, synthetic construct
  misc_feature 1..22: note = chemically synthesized
  source 1..22: mol_type = other DNA
aataggataattagggaaggcc

SEQ ID NO: 61457 - DNA, 22 bp, synthetic construct
  misc_feature 1..22: note = chemically synthesized
  source 1..22: mol_type = other DNA
gggaaggcccaatgagaagcaa

SEQ ID NO: 61458 - DNA, 22 bp, synthetic construct
  misc_feature 1..22: note = chemically synthesized
  source 1..22: mol_type = other DNA
caaagaggtgaggaagttggcc

SEQ ID NO: 61459 - DNA, 22 bp, synthetic construct
  misc_feature 1..22: note = chemically synthesized
  source 1..22: mol_type = other DNA
gccatgagaattttgagaagat

SEQ ID NO: 61460 - DNA, 22 bp, synthetic construct
  misc_feature 1..22: note = chemically synthesized
  source 1..22: mol_type = other DNA
tgagaagatggttccaggaaga

SEQ ID NO: 61461 - DNA, 22 bp, synthetic construct
  misc_feature 1..22: note = chemically synthesized
  source 1..22: mol_type = other DNA
gagaagatggttccaggaagag

SEQ ID NO: 61462 - DNA, 22 bp, synthetic construct
  misc_feature 1..22: note = chemically synthesized
  source 1..22: mol_type = other DNA
agaagatggttccaggaagagt

SEQ ID NO: 61463 - DNA, 22 bp, synthetic construct
  misc_feature 1..22: note = chemically synthesized
  source 1..22: mol_type = other DNA
caggaagagtgtgtagagagca

SEQ ID NO: 61464 - DNA, 22 bp, synthetic construct
  misc_feature 1..22: note = chemically synthesized
  source 1..22: mol_type = other DNA
gtgtgtaatacgcctggctact

SEQ ID NO: 61465 - DNA, 22 bp, synthetic construct
  misc_feature 1..22: note = chemically synthesized
  source 1..22: mol_type = other DNA
tgtgtaatacgcctggctactg

SEQ ID NO: 61466 - DNA, 22 bp, synthetic construct
  misc_feature 1..22: note = chemically synthesized
  source 1..22: mol_type = other DNA
gctactggaggaggagcaaggg

SEQ ID NO: 61467 - DNA, 22 bp, synthetic construct
  misc_feature 1..22: note = chemically synthesized
  source 1..22: mol_type = other DNA
ctggaggaggagcaaggggccc

SEQ ID NO: 61468 - DNA, 22 bp, synthetic construct
  misc_feature 1..22: note = chemically synthesized
  source 1..22: mol_type = other DNA
gaggaggagcaaggggccctga

SEQ ID NO: 61469 - DNA, 22 bp, synthetic construct
  misc_feature 1..22: note = chemically synthesized
  source 1..22: mol_type = other DNA
aggtcagagtggaaagagtgca

SEQ ID NO: 61470 - DNA, 22 bp, synthetic construct
  misc_feature 1..22: note = chemically synthesized
  source 1..22: mol_type = other DNA
gctccttgaaggacgtagagca

SEQ ID NO: 61471 - DNA, 22 bp, synthetic construct
  misc_feature 1..22: note = chemically synthesized
  source 1..22: mol_type = other DNA
cttgaaggacgtagagcaggga

SEQ ID NO: 61472 - DNA, 22 bp, synthetic construct
  misc_feature 1..22: note = chemically synthesized
  source 1..22: mol_type = other DNA
gaaggacgtagagcagggattt

SEQ ID NO: 61473 - DNA, 22 bp, synthetic construct
  misc_feature 1..22: note = chemically synthesized
  source 1..22: mol_type = other DNA
aaggacgtagagcagggatttt

SEQ ID NO: 61474 - DNA, 22 bp, synthetic construct
  misc_feature 1..22: note = chemically synthesized
  source 1..22: mol_type = other DNA
ttggctctgactccaagggaga

SEQ ID NO: 61475 - DNA, 22 bp, synthetic construct
  misc_feature 1..22: note = chemically synthesized
  source 1..22: mol_type = other DNA
tggctctgactccaagggagat

SEQ ID NO: 61476 - DNA, 22 bp, synthetic construct
  misc_feature 1..22: note = chemically synthesized
  source 1..22: mol_type = other DNA
ggctctgactccaagggagatg

SEQ ID NO: 61477 - DNA, 22 bp, synthetic construct
  misc_feature 1..22: note = chemically synthesized
  source 1..22: mol_type = other DNA
gctctgactccaagggagatgg

SEQ ID NO: 61478 - DNA, 22 bp, synthetic construct
  misc_feature 1..22: note = chemically synthesized
  source 1..22: mol_type = other DNA
tgactccaagggagatggaagc

SEQ ID NO: 61479 - DNA, 22 bp, synthetic construct
  misc_feature 1..22: note = chemically synthesized
  source 1..22: mol_type = other DNA
actccaagggagatggaagcca

SEQ ID NO: 61480 - DNA, 22 bp, synthetic construct
  misc_feature 1..22: note = chemically synthesized
  source 1..22: mol_type = other DNA
caagggagatggaagccactgg

SEQ ID NO: 61481 - DNA, 22 bp, synthetic construct
  misc_feature 1..22: note = chemically synthesized
  source 1..22: mol_type = other DNA
gaggagtgatgtcatatgactt

SEQ ID NO: 61482 - DNA, 22 bp, synthetic construct
  misc_feature 1..22: note = chemically synthesized
  source 1..22: mol_type = other DNA
gcgcttccagagagtctcttgg

SEQ ID NO: 61483 - DNA, 22 bp, synthetic construct
  misc_feature 1..22: note = chemically synthesized
  source 1..22: mol_type = other DNA
cgcttccagagagtctcttggg

SEQ ID NO: 61484 - DNA, 22 bp, synthetic construct
  misc_feature 1..22: note = chemically synthesized
  source 1..22: mol_type = other DNA
ccagagagtctcttgggccgca

SEQ ID NO: 61485 - DNA, 22 bp, synthetic construct
  misc_feature 1..22: note = chemically synthesized
  source 1..22: mol_type = other DNA
cagagagtctcttgggccgcat

SEQ ID NO: 61486 - DNA, 22 bp, synthetic construct
  misc_feature 1..22: note = chemically synthesized
  source 1..22: mol_type = other DNA
ttgggccgcattttgagactca

SEQ ID NO: 61487 - DNA, 22 bp, synthetic construct
  misc_feature 1..22: note = chemically synthesized
  source 1..22: mol_type = other DNA
gggccgcattttgagactcaag

SEQ ID NO: 61488 - DNA, 22 bp, synthetic construct
  misc_feature 1..22: note = chemically synthesized
  source 1..22: mol_type = other DNA
ggccgcattttgagactcaagc

SEQ ID NO: 61489 - DNA, 22 bp, synthetic construct
  misc_feature 1..22: note = chemically synthesized
  source 1..22: mol_type = other DNA
tgagactcaagcatgggaaagt

SEQ ID NO: 61490 - DNA, 22 bp, synthetic construct
  misc_feature 1..22: note = chemically synthesized
  source 1..22: mol_type = other DNA
gagactcaagcatgggaaagtg

SEQ ID NO: 61491 - DNA, 22 bp, synthetic construct
  misc_feature 1..22: note = chemically synthesized
  source 1..22: mol_type = other DNA
agactcaagcatgggaaagtga

SEQ ID NO: 61492 - DNA, 22 bp, synthetic construct
  misc_feature 1..22: note = chemically synthesized
  source 1..22: mol_type = other DNA
aagcatgggaaagtgaggcaga

SEQ ID NO: 61493 - DNA, 22 bp, synthetic construct
  misc_feature 1..22: note = chemically synthesized
  source 1..22: mol_type = other DNA
taggcaagtgatggtggcgtgg

SEQ ID NO: 61494 - DNA, 22 bp, synthetic construct
  misc_feature 1..22: note = chemically synthesized
  source 1..22: mol_type = other DNA
aggcaagtgatggtggcgtgga

SEQ ID NO: 61495 - DNA, 22 bp, synthetic construct
  misc_feature 1..22: note = chemically synthesized
  source 1..22: mol_type = other DNA
ggcaagtgatggtggcgtggac

SEQ ID NO: 61496 - DNA, 22 bp, synthetic construct
  misc_feature 1..22: note = chemically synthesized
  source 1..22: mol_type = other DNA
gattctggacatacttcgaagg

SEQ ID NO: 61497 - DNA, 22 bp, synthetic construct
  misc_feature 1..22: note = chemically synthesized
  source 1..22: mol_type = other DNA
tggacatacttcgaagggaaaa

SEQ ID NO: 61498 - DNA, 22 bp, synthetic construct
  misc_feature 1..22: note = chemically synthesized
  source 1..22: mol_type = other DNA
gacatacttcgaagggaaaacc

SEQ ID NO: 61499 - DNA, 22 bp, synthetic construct
  misc_feature 1..22: note = chemically synthesized
  source 1..22: mol_type = other DNA
cgaagggaaaaccggcaggatt

SEQ ID NO: 61500 - DNA, 22 bp, synthetic construct
  misc_feature 1..22: note = chemically synthesized
  source 1..22: mol_type = other DNA
gaagggaaaaccggcaggattt

SEQ ID NO: 61501 - DNA, 22 bp, synthetic construct
  misc_feature 1..22: note = chemically synthesized
  source 1..22: mol_type = other DNA
gctgactggtgggatgggttgt

SEQ ID NO: 61502 - DNA, 22 bp, synthetic construct
  misc_feature 1..22: note = chemically synthesized
  source 1..22: mol_type = other DNA
ctgactggtgggatgggttgta

SEQ ID NO: 61503 - DNA, 22 bp, synthetic construct
  misc_feature 1..22: note = chemically synthesized
  source 1..22: mol_type = other DNA
actggtgggatgggttgtatga

SEQ ID NO: 61504 - DNA, 22 bp, synthetic construct
  misc_feature 1..22: note = chemically synthesized
  source 1..22: mol_type = other DNA
gtgggatgggttgtatgaaagg

SEQ ID NO: 61505 - DNA, 22 bp, synthetic construct
  misc_feature 1..22: note = chemically synthesized
  source 1..22: mol_type = other DNA
tatgaaaggaagggaggagtca

SEQ ID NO: 61506 - DNA, 22 bp, synthetic construct
  misc_feature 1..22: note = chemically synthesized
  source 1..22: mol_type = other DNA
ggtgactgggagaatagaattg

SEQ ID NO: 61507 - DNA, 22 bp, synthetic construct
  misc_feature 1..22: note = chemically synthesized
  source 1..22: mol_type = other DNA
ggagaatagaattgctgtttat

SEQ ID NO: 61508 - DNA, 22 bp, synthetic construct
  misc_feature 1..22: note = chemically synthesized
  source 1..22: mol_type = other DNA
ctgtttattgggatgggccaga

SEQ ID NO: 61509 - DNA, 22 bp, synthetic construct
  misc_feature 1..22: note = chemically synthesized
  source 1..22: mol_type = other DNA
tttattgggatgggccagaaag

SEQ ID NO: 61510 - DNA, 22 bp, synthetic construct
  misc_feature 1..22: note = chemically synthesized
  source 1..22: mol_type = other DNA
attgggatgggccagaaaggct

SEQ ID NO: 61511 - DNA, 22 bp, synthetic construct
  misc_feature 1..22: note = chemically synthesized
  source 1..22: mol_type = other DNA
ttgggatgggccagaaaggctg

SEQ ID NO: 61512 - DNA, 22 bp, synthetic construct
  misc_feature 1..22: note = chemically synthesized
  source 1..22: mol_type = other DNA
ggatgggccagaaaggctgtgg

SEQ ID NO: 61513 - DNA, 22 bp, synthetic construct
  misc_feature 1..22: note = chemically synthesized
  source 1..22: mol_type = other DNA
tggaggtgctcagaggatgggt

SEQ ID NO: 61514 - DNA, 22 bp, synthetic construct
  misc_feature 1..22: note = chemically synthesized
  source 1..22: mol_type = other DNA
agaggatgggtgtgtctggggc

SEQ ID NO: 61515 - DNA, 22 bp, synthetic construct
  misc_feature 1..22: note = chemically synthesized
  source 1..22: mol_type = other DNA
gggctccttcaccacttcagga

SEQ ID NO: 61516 - DNA, 22 bp, synthetic construct
  misc_feature 1..22: note = chemically synthesized
  source 1..22: mol_type = other DNA
cttcaccacttcaggacttcag

SEQ ID NO: 61517 - DNA, 22 bp, synthetic construct
  misc_feature 1..22: note = chemically synthesized
  source 1..22: mol_type = other DNA
caccacttcaggacttcagtgg

SEQ ID NO: 61518 - DNA, 22 bp, synthetic construct
  misc_feature 1..22: note = chemically synthesized
  source 1..22: mol_type = other DNA
accacttcaggacttcagtgga

SEQ ID NO: 61519 - DNA, 22 bp, synthetic construct
  misc_feature 1..22: note = chemically synthesized
  source 1..22: mol_type = other DNA
caggacttcagtggatgctaga

SEQ ID NO: 61520 - DNA, 22 bp, synthetic construct
  misc_feature 1..22: note = chemically synthesized
  source 1..22: mol_type = other DNA
aggacttcagtggatgctagac

SEQ ID NO: 61521 - DNA, 22 bp, synthetic construct
  misc_feature 1..22: note = chemically synthesized
  source 1..22: mol_type = other DNA
cagtggatgctagactactgcc

SEQ ID NO: 61522 - DNA, 22 bp, synthetic construct
  misc_feature 1..22: note = chemically synthesized
  source 1..22: mol_type = other DNA
agtggatgctagactactgccc

SEQ ID NO: 61523 - DNA, 22 bp, synthetic construct
  misc_feature 1..22: note = chemically synthesized
  source 1..22: mol_type = other DNA
gactactgccctgttcaggaag

SEQ ID NO: 61524 - DNA, 22 bp, synthetic construct
  misc_feature 1..22: note = chemically synthesized
  source 1..22: mol_type = other DNA
ctgccctgttcaggaagatcgt

SEQ ID NO: 61525 - DNA, 22 bp, synthetic construct
  misc_feature 1..22: note = chemically synthesized
  source 1..22: mol_type = other DNA
ccctgttcaggaagatcgtgag

SEQ ID NO: 61526 - DNA, 22 bp, synthetic construct
  misc_feature 1..22: note = chemically synthesized
  source 1..22: mol_type = other DNA
ttcaggaagatcgtgaggggaa

SEQ ID NO: 61527 - DNA, 22 bp, synthetic construct
  misc_feature 1..22: note = chemically synthesized
  source 1..22: mol_type = other DNA
aggaagatcgtgaggggaaaga

SEQ ID NO: 61528 - DNA, 22 bp, synthetic construct
  misc_feature 1..22: note = chemically synthesized
  source 1..22: mol_type = other DNA
tggctgttcggagagccccagt

SEQ ID NO: 61529 - DNA, 22 bp, synthetic construct
  misc_feature 1..22: note = chemically synthesized
  source 1..22: mol_type = other DNA
ttcggagagccccagttgactg

SEQ ID NO: 61530 - DNA, 22 bp, synthetic construct
  misc_feature 1..22: note = chemically synthesized
  source 1..22: mol_type = other DNA
ggagagccccagttgactgcct

SEQ ID NO: 61531 - DNA, 22 bp, synthetic construct
  misc_feature 1..22: note = chemically synthesized
  source 1..22: mol_type = other DNA
actgcctatagctgagatgatt

SEQ ID NO: 61532 - DNA, 22 bp, synthetic construct
  misc_feature 1..22: note = chemically synthesized
  source 1..22: mol_type = other DNA
cctatagctgagatgatttaag

SEQ ID NO: 61533 - DNA, 22 bp, synthetic construct
  misc_feature 1..22: note = chemically synthesized
  source 1..22: mol_type = other DNA
tagctgagatgatttaagtcga

SEQ ID NO: 61534 - DNA, 22 bp, synthetic construct
  misc_feature 1..22: note = chemically synthesized
  source 1..22: mol_type = other DNA
agatgatttaagtcgagttctt

SEQ ID NO: 61535 - DNA, 22 bp, synthetic construct
  misc_feature 1..22: note = chemically synthesized
  source 1..22: mol_type = other DNA
aagtcgagttctttggggaggg

SEQ ID NO: 61536 - DNA, 22 bp, synthetic construct
  misc_feature 1..22: note = chemically synthesized
  source 1..22: mol_type = other DNA
agtcgagttctttggggagggc

SEQ ID NO: 61537 - DNA, 22 bp, synthetic construct
  misc_feature 1..22: note = chemically synthesized
  source 1..22: mol_type = other DNA
tttggggagggccaggtgtttt

SEQ ID NO: 61538 - DNA, 22 bp, synthetic construct
  misc_feature 1..22: note = chemically synthesized
  source 1..22: mol_type = other DNA
tggggagggccaggtgtttttc

SEQ ID NO: 61539 - DNA, 22 bp, synthetic construct
  misc_feature 1..22: note = chemically synthesized
  source 1..22: mol_type = other DNA
ggggagggccaggtgtttttct

SEQ ID NO: 61540 - DNA, 22 bp, synthetic construct
  misc_feature 1..22: note = chemically synthesized
  source 1..22: mol_type = other DNA
gggagggccaggtgtttttctc

SEQ ID NO: 61541 - DNA, 22 bp, synthetic construct
  misc_feature 1..22: note = chemically synthesized
  source 1..22: mol_type = other DNA
ttctcctcctcctaatcttttt

SEQ ID NO: 61542 - DNA, 22 bp, synthetic construct
  misc_feature 1..22: note = chemically synthesized
  source 1..22: mol_type = other DNA
tctcctcctcctaatctttttg

SEQ ID NO: 61543 - DNA, 22 bp, synthetic construct
  misc_feature 1..22: note = chemically synthesized
  source 1..22: mol_type = other DNA
ctcctcctcctaatctttttgt

SEQ ID NO: 61544 - DNA, 22 bp, synthetic construct
  misc_feature 1..22: note = chemically synthesized
  source 1..22: mol_type = other DNA
tcctcctcctaatctttttgtt

SEQ ID NO: 61545 - DNA, 22 bp, synthetic construct
  misc_feature 1..22: note = chemically synthesized
  source 1..22: mol_type = other DNA
ctcctcctaatctttttgttct

SEQ ID NO: 61546 - DNA, 22 bp, synthetic construct
  misc_feature 1..22: note = chemically synthesized
  source 1..22: mol_type = other DNA
ctcctaatctttttgttctttt

SEQ ID NO: 61547 - DNA, 22 bp, synthetic construct
  misc_feature 1..22: note = chemically synthesized
  source 1..22: mol_type = other DNA
ctaatctttttgttctttttcc

SEQ ID NO: 61548 - DNA, 22 bp, synthetic construct
  misc_feature 1..22: note = chemically synthesized
  source 1..22: mol_type = other DNA
atctttttgttctttttccttc

SEQ ID NO: 61549 - DNA, 22 bp, synthetic construct
  misc_feature 1..22: note = chemically synthesized
  source 1..22: mol_type = other DNA
tttgttctttttccttctctgt

SEQ ID NO: 61550 - DNA, 22 bp, synthetic construct
  misc_feature 1..22: note = chemically synthesized
  source 1..22: mol_type = other DNA
ttgttctttttccttctctgtt

SEQ ID NO: 61551 - DNA, 22 bp, synthetic construct
  misc_feature 1..22: note = chemically synthesized
  source 1..22: mol_type = other DNA
tgttctttttccttctctgttg

SEQ ID NO: 61552 - DNA, 22 bp, synthetic construct
  misc_feature 1..22: note = chemically synthesized
  source 1..22: mol_type = other DNA
gttctttttccttctctgttgt

SEQ ID NO: 61553 - DNA, 22 bp, synthetic construct
  misc_feature 1..22: note = chemically synthesized
  source 1..22: mol_type = other DNA
ttctttttccttctctgttgtt

SEQ ID NO: 61554 - DNA, 22 bp, synthetic construct
  misc_feature 1..22: note = chemically synthesized
  source 1..22: mol_type = other DNA
tttttccttctctgttgttctt

SEQ ID NO: 61555 - DNA, 22 bp, synthetic construct
  misc_feature 1..22: note = chemically synthesized
  source 1..22: mol_type = other DNA
tttccttctctgttgttcttta

SEQ ID NO: 61556 - DNA, 22 bp, synthetic construct
  misc_feature 1..22: note = chemically synthesized
  source 1..22: mol_type = other DNA
ttccttctctgttgttctttag

SEQ ID NO: 61557 - DNA, 22 bp, synthetic construct
  misc_feature 1..22: note = chemically synthesized
  source 1..22: mol_type = other DNA
tccttctctgttgttctttagc

SEQ ID NO: 61558 - DNA, 22 bp, synthetic construct
  misc_feature 1..22: note = chemically synthesized
  source 1..22: mol_type = other DNA
ccttctctgttgttctttagct

SEQ ID NO: 61559 - DNA, 22 bp, synthetic construct
  misc_feature 1..22: note = chemically synthesized
  source 1..22: mol_type = other DNA
cttctctgttgttctttagcta

SEQ ID NO: 61560 - DNA, 22 bp, synthetic construct
  misc_feature 1..22: note = chemically synthesized
  source 1..22: mol_type = other DNA
ctctgttgttctttagctacca

SEQ ID NO: 61561 - DNA, 22 bp, synthetic construct
  misc_feature 1..22: note = chemically synthesized
  source 1..22: mol_type = other DNA
tctgttgttctttagctaccaa

SEQ ID NO: 61562 - DNA, 22 bp, synthetic construct
  misc_feature 1..22: note = chemically synthesized
  source 1..22: mol_type = other DNA
tgttgttctttagctaccaaag

SEQ ID NO: 61563 - DNA, 22 bp, synthetic construct
  misc_feature 1..22: note = chemically synthesized
  source 1..22: mol_type = other DNA
ttgttctttagctaccaaagac

SEQ ID NO: 61564 - DNA, 22 bp, synthetic construct
  misc_feature 1..22: note = chemically synthesized
  source 1..22: mol_type = other DNA
ttctttagctaccaaagacaac

SEQ ID NO: 61565 - DNA, 22 bp, synthetic construct
  misc_feature 1..22: note = chemically synthesized
  source 1..22: mol_type = other DNA
tttagctaccaaagacaacttg

SEQ ID NO: 61566 - DNA, 22 bp, synthetic construct
  misc_feature 1..22: note = chemically synthesized
  source 1..22: mol_type = other DNA
tagctaccaaagacaacttgat

SEQ ID NO: 61567 - DNA, 22 bp, synthetic construct
  misc_feature 1..22: note = chemically synthesized
  source 1..22: mol_type = other DNA
agctaccaaagacaacttgatc

SEQ ID NO: 61568 - DNA, 22 bp, synthetic construct
  misc_feature 1..22: note = chemically synthesized
  source 1..22: mol_type = other DNA
gctaccaaagacaacttgatct

SEQ ID NO: 61569 - DNA, 22 bp, synthetic construct
  misc_feature 1..22: note = chemically synthesized
  source 1..22: mol_type = other DNA
ccaaagacaacttgatcttttg

SEQ ID NO: 61570 - DNA, 22 bp, synthetic construct
  misc_feature 1..22: note = chemically synthesized
  source 1..22: mol_type = other DNA
gatcttttgatccagaaagatg

SEQ ID NO: 61571 - DNA, 22 bp, synthetic construct
  misc_feature 1..22: note = chemically synthesized
  source 1..22: mol_type = other DNA
atcttttgatccagaaagatgc

SEQ ID NO: 61572 - DNA, 22 bp, synthetic construct
  misc_feature 1..22: note = chemically synthesized
  source 1..22: mol_type = other DNA
ttgatccagaaagatgcgcttt

SEQ ID NO: 61573 - DNA, 22 bp, synthetic construct
  misc_feature 1..22: note = chemically synthesized
  source 1..22: mol_type = other DNA
tgatccagaaagatgcgctttg

SEQ ID NO: 61574 - DNA, 22 bp, synthetic construct
  misc_feature 1..22: note = chemically synthesized
  source 1..22: mol_type = other DNA
gatccagaaagatgcgctttgt

SEQ ID NO: 61575 - DNA, 22 bp, synthetic construct
  misc_feature 1..22: note = chemically synthesized
  source 1..22: mol_type = other DNA
atccagaaagatgcgctttgtt

SEQ ID NO: 61576 - DNA, 22 bp, synthetic construct
  misc_feature 1..22: note = chemically synthesized
  source 1..22: mol_type = other DNA
tgtttcttgcatttctttccct

SEQ ID NO: 61577 - DNA, 22 bp, synthetic construct
  misc_feature 1..22: note = chemically synthesized
  source 1..22: mol_type = other DNA
gtttcttgcatttctttccctt

SEQ ID NO: 61578 - DNA, 22 bp, synthetic construct
  misc_feature 1..22: note = chemically synthesized
  source 1..22: mol_type = other DNA
tttcttgcatttctttcccttc

SEQ ID NO: 61579 - DNA, 22 bp, synthetic construct
  misc_feature 1..22: note = chemically synthesized
  source 1..22: mol_type = other DNA
cttgcatttctttcccttcgtt

SEQ ID NO: 61580 - DNA, 22 bp, synthetic construct
  misc_feature 1..22: note = chemically synthesized
  source 1..22: mol_type = other DNA
ttgcatttctttcccttcgttt

SEQ ID NO: 61581 - DNA, 22 bp, synthetic construct
  misc_feature 1..22: note = chemically synthesized
  source 1..22: mol_type = other DNA
gcatttctttcccttcgtttgt

SEQ ID NO: 61582 - DNA, 22 bp, synthetic construct
  misc_feature 1..22: note = chemically synthesized
  source 1..22: mol_type = other DNA
catttctttcccttcgtttgtt

SEQ ID NO: 61583 - DNA, 22 bp, synthetic construct
  misc_feature 1..22: note = chemically synthesized
  source 1..22: mol_type = other DNA
ctttcccttcgtttgttttctc

SEQ ID NO: 61584 - DNA, 22 bp, synthetic construct
  misc_feature 1..22: note = chemically synthesized
  source 1..22: mol_type = other DNA
tttcccttcgtttgttttctca

SEQ ID NO: 61585 - DNA, 22 bp, synthetic construct
  misc_feature 1..22: note = chemically synthesized
  source 1..22: mol_type = other DNA
tcccttcgtttgttttctcagg

SEQ ID NO: 61586 - DNA, 22 bp, synthetic construct
  misc_feature 1..22: note = chemically synthesized
  source 1..22: mol_type = other DNA
cccttcgtttgttttctcaggt

SEQ ID NO: 61587 - DNA, 22 bp, synthetic construct
  misc_feature 1..22: note = chemically synthesized
  source 1..22: mol_type = other DNA
ccttcgtttgttttctcaggtc

SEQ ID NO: 61588 - DNA, 22 bp, synthetic construct
  misc_feature 1..22: note = chemically synthesized
  source 1..22: mol_type = other DNA
cgtttgttttctcaggtctcag

SEQ ID NO: 61589 - DNA, 22 bp, synthetic construct
  misc_feature 1..22: note = chemically synthesized
  source 1..22: mol_type = other DNA
gtttgttttctcaggtctcagg

SEQ ID NO: 61590 - DNA, 22 bp, synthetic construct
  misc_feature 1..22: note = chemically synthesized
  source 1..22: mol_type = other DNA
gttttctcaggtctcaggtaga

SEQ ID NO: 61591 - DNA, 22 bp, synthetic construct
  misc_feature 1..22: note = chemically synthesized
  source 1..22: mol_type = other DNA
ttttctcaggtctcaggtagac

SEQ ID NO: 61592 - DNA, 22 bp, synthetic construct
  misc_feature 1..22: note = chemically synthesized
  source 1..22: mol_type = other DNA
tctcaggtctcaggtagaccat

SEQ ID NO: 61593 - DNA, 22 bp, synthetic construct
  misc_feature 1..22: note = chemically synthesized
  source 1..22: mol_type = other DNA
ctcaggtctcaggtagaccatc

SEQ ID NO: 61594 - DNA, 22 bp, synthetic construct
  misc_feature 1..22: note = chemically synthesized
  source 1..22: mol_type = other DNA
tcaggtctcaggtagaccatcg

SEQ ID NO: 61595 - DNA, 22 bp, synthetic construct
  misc_feature 1..22: note = chemically synthesized
  source 1..22: mol_type = other DNA
aggtctcaggtagaccatcgag

SEQ ID NO: 61596 - DNA, 22 bp, synthetic construct
  misc_feature 1..22: note = chemically synthesized
  source 1..22: mol_type = other DNA
aggtagaccatcgagctgctgt

SEQ ID NO: 61597 - DNA, 22 bp, synthetic construct
  misc_feature 1..22: note = chemically synthesized
  source 1..22: mol_type = other DNA
ctgttaattggtgatatttagg

SEQ ID NO: 61598 - DNA, 22 bp, synthetic construct
  misc_feature 1..22: note = chemically synthesized
  source 1..22: mol_type = other DNA
ttaattggtgatatttaggaat

SEQ ID NO: 61599 - DNA, 22 bp, synthetic construct
  misc_feature 1..22: note = chemically synthesized
  source 1..22: mol_type = other DNA
attggtgatatttaggaatggg

SEQ ID NO: 61600 - DNA, 22 bp, synthetic construct
  misc_feature 1..22: note = chemically synthesized
  source 1..22: mol_type = other DNA
gtgatatttaggaatgggttgg

SEQ ID NO: 61601 - DNA, 22 bp, synthetic construct
  misc_feature 1..22: note = chemically synthesized
  source 1..22: mol_type = other DNA
aggaatgggttggaagctgcat

SEQ ID NO: 61602 - DNA, 22 bp, synthetic construct
  misc_feature 1..22: note = chemically synthesized
  source 1..22: mol_type = other DNA
ggaatgggttggaagctgcatc

SEQ ID NO: 61603 - DNA, 22 bp, synthetic construct
  misc_feature 1..22: note = chemically synthesized
  source 1..22: mol_type = other DNA
gaagctgcatcttttcctggac

SEQ ID NO: 61604 - DNA, 22 bp, synthetic construct
  misc_feature 1..22: note = chemically synthesized
  source 1..22: mol_type = other DNA
catcttttcctggacttctcag

SEQ ID NO: 61605 - DNA, 22 bp, synthetic construct
  misc_feature 1..22: note = chemically synthesized
  source 1..22: mol_type = other DNA
ttcctggacttctcaggactct

SEQ ID NO: 61606 - DNA, 22 bp, synthetic construct
  misc_feature 1..22: note = chemically synthesized
  source 1..22: mol_type = other DNA
tcctggacttctcaggactctc

SEQ ID NO: 61607 - DNA, 22 bp, synthetic construct
  misc_feature 1..22: note = chemically synthesized
  source 1..22: mol_type = other DNA
cctggacttctcaggactctca

SEQ ID NO: 61608 - DNA, 22 bp, synthetic construct
  misc_feature 1..22: note = chemically synthesized
  source 1..22: mol_type = other DNA
ctggacttctcaggactctcac

SEQ ID NO: 61609 - DNA, 22 bp, synthetic construct
  misc_feature 1..22: note = chemically synthesized
  source 1..22: mol_type = other DNA
gacttctcaggactctcactgc

SEQ ID NO: 61610 - DNA, 22 bp, synthetic construct
  misc_feature 1..22: note = chemically synthesized
  source 1..22: mol_type = other DNA
ctcaggactctcactgccacgt

SEQ ID NO: 61611 - DNA, 22 bp, synthetic construct
  misc_feature 1..22: note = chemically synthesized
  source 1..22: mol_type = other DNA
tcaggactctcactgccacgtg

SEQ ID NO: 61612 - DNA, 22 bp, synthetic construct
  misc_feature 1..22: note = chemically synthesized
  source 1..22: mol_type = other DNA
aggactctcactgccacgtgtc

SEQ ID NO: 61613 - DNA, 22 bp, synthetic construct
  misc_feature 1..22: note = chemically synthesized
  source 1..22: mol_type = other DNA
tcactgccacgtgtcttgtgct

SEQ ID NO: 61614 - DNA, 22 bp, synthetic construct
  misc_feature 1..22: note = chemically synthesized
  source 1..22: mol_type = other DNA
actgccacgtgtcttgtgcttc

SEQ ID NO: 61615 - DNA, 22 bp, synthetic construct
  misc_feature 1..22: note = chemically synthesized
  source 1..22: mol_type = other DNA
ccacgtgtcttgtgcttccaca

SEQ ID NO: 61616 - DNA, 22 bp, synthetic construct
  misc_feature 1..22: note = chemically synthesized
  source 1..22: mol_type = other DNA
gtgcttccacagaaccgttttc

SEQ ID NO: 61617 - DNA, 22 bp, synthetic construct
  misc_feature 1..22: note = chemically synthesized
  source 1..22: mol_type = other DNA
tgcttccacagaaccgttttct

SEQ ID NO: 61618 - DNA, 22 bp, synthetic construct
  misc_feature 1..22: note = chemically synthesized
  source 1..22: mol_type = other DNA
ccacagaaccgttttctgagac

SEQ ID NO: 61619 - DNA, 22 bp, synthetic construct
  misc_feature 1..22: note = chemically synthesized
  source 1..22: mol_type = other DNA
cacagaaccgttttctgagacg

SEQ ID NO: 61620 - DNA, 22 bp, synthetic construct
  misc_feature 1..22: note = chemically synthesized
  source 1..22: mol_type = other DNA
tctgagacgtccgtgtggctct

SEQ ID NO: 61621 - DNA, 22 bp, synthetic construct
  misc_feature 1..22: note = chemically synthesized
  source 1..22: mol_type = other DNA
ctgagacgtccgtgtggctctg

SEQ ID NO: 61622 - DNA, 22 bp, synthetic construct
  misc_feature 1..22: note = chemically synthesized
  source 1..22: mol_type = other DNA
tgagacgtccgtgtggctctgc

SEQ ID NO: 61623 - DNA, 22 bp, synthetic construct
  misc_feature 1..22: note = chemically synthesized
  source 1..22: mol_type = other DNA
agacgtccgtgtggctctgctg

SEQ ID NO: 61624 - DNA, 22 bp, synthetic construct
  misc_feature 1..22: note = chemically synthesized
  source 1..22: mol_type = other DNA
tgctgtgctcaggtccacggtt

SEQ ID NO: 61625 - DNA, 22 bp, synthetic construct
  misc_feature 1..22: note = chemically synthesized
  source 1..22: mol_type = other DNA
ctgtgctcaggtccacggttag

SEQ ID NO: 61626 - DNA, 22 bp, synthetic construct
  misc_feature 1..22: note = chemically synthesized
  source 1..22: mol_type = other DNA
tgctcaggtccacggttagccc

SEQ ID NO: 61627 - DNA, 22 bp, synthetic construct
  misc_feature 1..22: note = chemically synthesized
  source 1..22: mol_type = other DNA
aggtccacggttagcccctggc

SEQ ID NO: 61628 - DNA, 22 bp, synthetic construct
  misc_feature 1..22: note = chemically synthesized
  source 1..22: mol_type = other DNA
gcccctggcttggaatttcttc

SEQ ID NO: 61629 - DNA, 22 bp, synthetic construct
  misc_feature 1..22: note = chemically synthesized
  source 1..22: mol_type = other DNA
gcttggaatttcttccggaaat

SEQ ID NO: 61630 - DNA, 22 bp, synthetic construct
  misc_feature 1..22: note = chemically synthesized
  source 1..22: mol_type = other DNA
ggaatttcttccggaaatccgt

SEQ ID NO: 61631 - DNA, 22 bp, synthetic construct
  misc_feature 1..22: note = chemically synthesized
  source 1..22: mol_type = other DNA
gaatttcttccggaaatccgtt

SEQ ID NO: 61632 - DNA, 22 bp, synthetic construct
  misc_feature 1..22: note = chemically synthesized
  source 1..22: mol_type = other DNA
cttccggaaatccgttgtcctc

SEQ ID NO: 61633 - DNA, 22 bp, synthetic construct
  misc_feature 1..22: note = chemically synthesized
  source 1..22: mol_type = other DNA
ttccggaaatccgttgtcctct

SEQ ID NO: 61634 - DNA, 22 bp, synthetic construct
  misc_feature 1..22: note = chemically synthesized
  source 1..22: mol_type = other DNA
ccggaaatccgttgtcctcttt

SEQ ID NO: 61635 - DNA, 22 bp, synthetic construct
  misc_feature 1..22: note = chemically synthesized
  source 1..22: mol_type = other DNA
cggaaatccgttgtcctctttt

SEQ ID NO: 61636 - DNA, 22 bp, synthetic construct
  misc_feature 1..22: note = chemically synthesized
  source 1..22: mol_type = other DNA
tcctcttttccacaggttctcc

SEQ ID NO: 61637 - DNA, 22 bp, synthetic construct
  misc_feature 1..22: note = chemically synthesized
  source 1..22: mol_type = other DNA
ttttccacaggttctcctcctc

SEQ ID NO: 61638 - DNA, 22 bp, synthetic construct
  misc_feature 1..22: note = chemically synthesized
  source 1..22: mol_type = other DNA
ttccacaggttctcctcctccc

SEQ ID NO: 61639 - DNA, 22 bp, synthetic construct
  misc_feature 1..22: note = chemically synthesized
  source 1..22: mol_type = other DNA
tccacaggttctcctcctccct

SEQ ID NO: 61640 - DNA, 22 bp, synthetic construct
  misc_feature 1..22: note = chemically synthesized
  source 1..22: mol_type = other DNA
ccacaggttctcctcctccctt

SEQ ID NO: 61641 - DNA, 22 bp, synthetic construct
  misc_feature 1..22: note = chemically synthesized
  source 1..22: mol_type = other DNA
cacaggttctcctcctcccttt

SEQ ID NO: 61642 - DNA, 22 bp, synthetic construct
  misc_feature 1..22: note = chemically synthesized
  source 1..22: mol_type = other DNA
tcctcctccctttccccatttc

SEQ ID NO: 61643 - DNA, 22 bp, synthetic construct
  misc_feature 1..22: note = chemically synthesized
  source 1..22: mol_type = other DNA
ctcctccctttccccatttctg

SEQ ID NO: 61644 - DNA, 22 bp, synthetic construct
  misc_feature 1..22: note = chemically synthesized
  source 1..22: mol_type = other DNA
ctccctttccccatttctggaa

SEQ ID NO: 61645 - DNA, 22 bp, synthetic construct
  misc_feature 1..22: note = chemically synthesized
  source 1..22: mol_type = other DNA
cctttccccatttctggaaaga

SEQ ID NO: 61646 - DNA, 22 bp, synthetic construct
  misc_feature 1..22: note = chemically synthesized
  source 1..22: mol_type = other DNA
tccccatttctggaaagaagtg

SEQ ID NO: 61647 - DNA, 22 bp, synthetic construct
  misc_feature 1..22: note = chemically synthesized
  source 1..22: mol_type = other DNA
ccccatttctggaaagaagtgg

SEQ ID NO: 61648 - DNA, 22 bp, synthetic construct
  misc_feature 1..22: note = chemically synthesized
  source 1..22: mol_type = other DNA
cccatttctggaaagaagtggg

SEQ ID NO: 61649 - DNA, 22 bp, synthetic construct
  misc_feature 1..22: note = chemically synthesized
  source 1..22: mol_type = other DNA
ctggaaagaagtgggctggcac

SEQ ID NO: 61650 - DNA, 22 bp, synthetic construct
  misc_feature 1..22: note = chemically synthesized
  source 1..22: mol_type = other DNA
tggaaagaagtgggctggcaca

SEQ ID NO: 61651 - DNA, 22 bp, synthetic construct
  misc_feature 1..22: note = chemically synthesized
  source 1..22: mol_type = other DNA
gaaagaagtgggctggcacata

SEQ ID NO: 61652 - DNA, 22 bp, synthetic construct
  misc_feature 1..22: note = chemically synthesized
  source 1..22: mol_type = other DNA
gcacatagagcctttttccttg

SEQ ID NO: 61653 - DNA, 22 bp, synthetic construct
  misc_feature 1..22: note = chemically synthesized
  source 1..22: mol_type = other DNA
tttccttgaaaggagagtgcag

SEQ ID NO: 61654 - DNA, 22 bp, synthetic construct
  misc_feature 1..22: note = chemically synthesized
  source 1..22: mol_type = other DNA
ttccttgaaaggagagtgcaga

SEQ ID NO: 61655 - DNA, 22 bp, synthetic construct
  misc_feature 1..22: note = chemically synthesized
  source 1..22: mol_type = other DNA
tccttgaaaggagagtgcagag

SEQ ID NO: 61656 - DNA, 22 bp, synthetic construct
  misc_feature 1..22: note = chemically synthesized
  source 1..22: mol_type = other DNA
ccttgaaaggagagtgcagagc

SEQ ID NO: 61657 - DNA, 22 bp, synthetic construct
  misc_feature 1..22: note = chemically synthesized
  source 1..22: mol_type = other DNA
cttgaaaggagagtgcagagcc

SEQ ID NO: 61658 - DNA, 22 bp, synthetic construct
  misc_feature 1..22: note = chemically synthesized
  source 1..22: mol_type = other DNA
gaaaggagagtgcagagccctc

SEQ ID NO: 61659 - DNA, 22 bp, synthetic construct
  misc_feature 1..22: note = chemically synthesized
  source 1..22: mol_type = other DNA
aaaggagagtgcagagccctct

SEQ ID NO: 61660 - DNA, 22 bp, synthetic construct
  misc_feature 1..22: note = chemically synthesized
  source 1..22: mol_type = other DNA
taatggaaaagtaaaaaaattc

SEQ ID NO: 61661 - DNA, 22 bp, synthetic construct
  misc_feature 1..22: note = chemically synthesized
  source 1..22: mol_type = other DNA
atggaaaagtaaaaaaattctt

SEQ ID NO: 61662 - DNA, 22 bp, synthetic construct
  misc_feature 1..22: note = chemically synthesized
  source 1..22: mol_type = other DNA
ttggaatcctcataacatccaa

SEQ ID NO: 61663 - DNA, 22 bp, synthetic construct
  misc_feature 1..22: note = chemically synthesized
  source 1..22: mol_type = other DNA
ggaatcctcataacatccaagc

SEQ ID NO: 61664 - DNA, 22 bp, synthetic construct
  misc_feature 1..22: note = chemically synthesized
  source 1..22: mol_type = other DNA
gaatcctcataacatccaagcc

SEQ ID NO: 61665 - DNA, 22 bp, synthetic construct
  misc_feature 1..22: note = chemically synthesized
  source 1..22: mol_type = other DNA
ataacatccaagccagccaaag

SEQ ID NO: 61666 - DNA, 22 bp, synthetic construct
  misc_feature 1..22: note = chemically synthesized
  source 1..22: mol_type = other DNA
agaccaagtaaattattggggg

SEQ ID NO: 61667 - DNA, 22 bp, synthetic construct
  misc_feature 1..22: note = chemically synthesized
  source 1..22: mol_type = other DNA
ttggggggtaatttgcaagggc

SEQ ID NO: 61668 - DNA, 22 bp, synthetic construct
  misc_feature 1..22: note = chemically synthesized
  source 1..22: mol_type = other DNA
gggggtaatttgcaagggcctg

SEQ ID NO: 61669 - DNA, 22 bp, synthetic construct
  misc_feature 1..22: note = chemically synthesized
  source 1..22: mol_type = other DNA
gcaagggcctgaatcaaacaaa

SEQ ID NO: 61670 - DNA, 22 bp, synthetic construct
  misc_feature 1..22: note = chemically synthesized
  source 1..22: mol_type = other DNA
caagggcctgaatcaaacaaat

SEQ ID NO: 61671 - DNA, 22 bp, synthetic construct
  misc_feature 1..22: note = chemically synthesized
  source 1..22: mol_type = other DNA
aatcaaacaaattgctttcttg

SEQ ID NO: 61672 - DNA, 22 bp, synthetic construct
  misc_feature 1..22: note = chemically synthesized
  source 1..22: mol_type = other DNA
ctttcttgtttctcagcttgaa

SEQ ID NO: 61673 - DNA, 22 bp, synthetic construct
  misc_feature 1..22: note = chemically synthesized
  source 1..22: mol_type = other DNA
tcttgtttctcagcttgaatct

SEQ ID NO: 61674 - DNA, 22 bp, synthetic construct
  misc_feature 1..22: note = chemically synthesized
  source 1..22: mol_type = other DNA
cttgtttctcagcttgaatctt

SEQ ID NO: 61675 - DNA, 22 bp, synthetic construct
  misc_feature 1..22: note = chemically synthesized
  source 1..22: mol_type = other DNA
ttgtttctcagcttgaatcttt

SEQ ID NO: 61676 - DNA, 22 bp, synthetic construct
  misc_feature 1..22: note = chemically synthesized
  source 1..22: mol_type = other DNA
gtttctcagcttgaatctttag

SEQ ID NO: 61677 - DNA, 22 bp, synthetic construct
  misc_feature 1..22: note = chemically synthesized
  source 1..22: mol_type = other DNA
tttctcagcttgaatctttaga

SEQ ID NO: 61678 - DNA, 22 bp, synthetic construct
  misc_feature 1..22: note = chemically synthesized
  source 1..22: mol_type = other DNA
ctcagcttgaatctttagacca

SEQ ID NO: 61679 - DNA, 22 bp, synthetic construct
  misc_feature 1..22: note = chemically synthesized
  source 1..22: mol_type = other DNA
tcagcttgaatctttagaccag

SEQ ID NO: 61680 - DNA, 22 bp, synthetic construct
  misc_feature 1..22: note = chemically synthesized
  source 1..22: mol_type = other DNA
agcttgaatctttagaccagaa

SEQ ID NO: 61681 - DNA, 22 bp, synthetic construct
  misc_feature 1..22: note = chemically synthesized
  source 1..22: mol_type = other DNA
gaatctttagaccagaagcctg

SEQ ID NO: 61682 - DNA, 22 bp, synthetic construct
  misc_feature 1..22: note = chemically synthesized
  source 1..22: mol_type = other DNA
aatctttagaccagaagcctgt

SEQ ID NO: 61683 - DNA, 22 bp, synthetic construct
  misc_feature 1..22: note = chemically synthesized
  source 1..22: mol_type = other DNA
tagaccagaagcctgtgatttc

SEQ ID NO: 61684 - DNA, 22 bp, synthetic construct
  misc_feature 1..22: note = chemically synthesized
  source 1..22: mol_type = other DNA
agaccagaagcctgtgatttcg

SEQ ID NO: 61685 - DNA, 22 bp, synthetic construct
  misc_feature 1..22: note = chemically synthesized
  source 1..22: mol_type = other DNA
gaccagaagcctgtgatttcgg

SEQ ID NO: 61686 - DNA, 22 bp, synthetic construct
  misc_feature 1..22: note = chemically synthesized
  source 1..22: mol_type = other DNA
tgatttcggagtctgatgagaa

SEQ ID NO: 61687 - DNA, 22 bp, synthetic construct
  misc_feature 1..22: note = chemically synthesized
  source 1..22: mol_type = other DNA
cggagtctgatgagaaataaga

SEQ ID NO: 61688 - DNA, 22 bp, synthetic construct
  misc_feature 1..22: note = chemically synthesized
  source 1..22: mol_type = other DNA
ggagtctgatgagaaataagag

SEQ ID NO: 61689 - DNA, 22 bp, synthetic construct
  misc_feature 1..22: note = chemically synthesized
  source 1..22: mol_type = other DNA
atgagaaataagagtcagtgtt

SEQ ID NO: 61690 - DNA, 22 bp, synthetic construct
  misc_feature 1..22: note = chemically synthesized
  source 1..22: mol_type = other DNA
ctgtctgagccacttttctttg

SEQ ID NO: 61691 - DNA, 22 bp, synthetic construct
  misc_feature 1..22: note = chemically synthesized
  source 1..22: mol_type = other DNA
tgtctgagccacttttctttgg

SEQ ID NO: 61692 - DNA, 22 bp, synthetic construct
  misc_feature 1..22: note = chemically synthesized
  source 1..22: mol_type = other DNA
tctgagccacttttctttggag

SEQ ID NO: 61693 - DNA, 22 bp, synthetic construct
  misc_feature 1..22: note = chemically synthesized
  source 1..22: mol_type = other DNA
agccacttttctttggaggagg

SEQ ID NO: 61694 - DNA, 22 bp, synthetic construct
  misc_feature 1..22: note = chemically synthesized
  source 1..22: mol_type = other DNA
ttctttggaggaggtcctctag

SEQ ID NO: 61695 - DNA, 22 bp, synthetic construct
  misc_feature 1..22: note = chemically synthesized
  source 1..22: mol_type = other DNA
tctttggaggaggtcctctagg

SEQ ID NO: 61696 - DNA, 22 bp, synthetic construct
  misc_feature 1..22: note = chemically synthesized
  source 1..22: mol_type = other DNA
ctttggaggaggtcctctaggc

SEQ ID NO: 61697 - DNA, 22 bp, synthetic construct
  misc_feature 1..22: note = chemically synthesized
  source 1..22: mol_type = other DNA
tttggaggaggtcctctaggct

SEQ ID NO: 61698 - DNA, 22 bp, synthetic construct
  misc_feature 1..22: note = chemically synthesized
  source 1..22: mol_type = other DNA
tggaggaggtcctctaggcttt

SEQ ID NO: 61699 - DNA, 22 bp, synthetic construct
  misc_feature 1..22: note = chemically synthesized
  source 1..22: mol_type = other DNA
ggaggaggtcctctaggcttta

SEQ ID NO: 61700 - DNA, 22 bp, synthetic construct
  misc_feature 1..22: note = chemically synthesized
  source 1..22: mol_type = other DNA
gaggaggtcctctaggctttag

SEQ ID NO: 61701 - DNA, 22 bp, synthetic construct
  misc_feature 1..22: note = chemically synthesized
  source 1..22: mol_type = other DNA
taggctttagcaatcacagaag

SEQ ID NO: 61702 - DNA, 22 bp, synthetic construct
  misc_feature 1..22: note = chemically synthesized
  source 1..22: mol_type = other DNA
ggctttagcaatcacagaagaa

SEQ ID NO: 61703 - DNA, 22 bp, synthetic construct
  misc_feature 1..22: note = chemically synthesized
  source 1..22: mol_type = other DNA
tagcaatcacagaagaaccagt

SEQ ID NO: 61704 - DNA, 22 bp, synthetic construct
  misc_feature 1..22: note = chemically synthesized
  source 1..22: mol_type = other DNA
agcaatcacagaagaaccagtg

SEQ ID NO: 61705 - DNA, 22 bp, synthetic construct
  misc_feature 1..22: note = chemically synthesized
  source 1..22: mol_type = other DNA
gcaatcacagaagaaccagtga

SEQ ID NO: 61706 - DNA, 22 bp, synthetic construct
  misc_feature 1..22: note = chemically synthesized
  source 1..22: mol_type = other DNA
cttgtcataggagagctccttg

SEQ ID NO: 61707 - DNA, 22 bp, synthetic construct
  misc_feature 1..22: note = chemically synthesized
  source 1..22: mol_type = other DNA
gtcataggagagctccttggtc

SEQ ID NO: 61708 - DNA, 22 bp, synthetic construct
  misc_feature 1..22: note = chemically synthesized
  source 1..22: mol_type = other DNA
tcataggagagctccttggtcc

SEQ ID NO: 61709 - DNA, 22 bp, synthetic construct
  misc_feature 1..22: note = chemically synthesized
  source 1..22: mol_type = other DNA
cttggtcctcaggattcaaaag

SEQ ID NO: 61710 - DNA, 22 bp, synthetic construct
  misc_feature 1..22: note = chemically synthesized
  source 1..22: mol_type = other DNA
ggtcctcaggattcaaaagaca

SEQ ID NO: 61711 - DNA, 22 bp, synthetic construct
  misc_feature 1..22: note = chemically synthesized
  source 1..22: mol_type = other DNA
gtcctcaggattcaaaagacac

SEQ ID NO: 61712 - DNA, 22 bp, synthetic construct
  misc_feature 1..22: note = chemically synthesized
  source 1..22: mol_type = other DNA
aggattcaaaagacaccttaag

SEQ ID NO: 61713 - DNA, 22 bp, synthetic construct
  misc_feature 1..22: note = chemically synthesized
  source 1..22: mol_type = other DNA
aaaagacaccttaagtagcagt

SEQ ID NO: 61714 - DNA, 22 bp, synthetic construct
  misc_feature 1..22: note = chemically synthesized
  source 1..22: mol_type = other DNA
aagtagcagtgggtagggcgta

SEQ ID NO: 61715 - DNA, 22 bp, synthetic construct
  misc_feature 1..22: note = chemically synthesized
  source 1..22: mol_type = other DNA
agtagcagtgggtagggcgtaa

SEQ ID NO: 61716 - DNA, 22 bp, synthetic construct
  misc_feature 1..22: note = chemically synthesized
  source 1..22: mol_type = other DNA
aacatccctcaaggtaggcctt

SEQ ID NO: 61717 - DNA, 22 bp, synthetic construct
  misc_feature 1..22: note = chemically synthesized
  source 1..22: mol_type = other DNA
acatccctcaaggtaggcctta

SEQ ID NO: 61718 - DNA, 22 bp, synthetic construct
  misc_feature 1..22: note = chemically synthesized
  source 1..22: mol_type = other DNA
aaggtaggccttaggtttccct

SEQ ID NO: 61719 - DNA, 22 bp, synthetic construct
  misc_feature 1..22: note = chemically synthesized
  source 1..22: mol_type = other DNA
aggtttccctctgtcccctcta

SEQ ID NO: 61720 - DNA, 22 bp, synthetic construct
  misc_feature 1..22: note = chemically synthesized
  source 1..22: mol_type = other DNA
ggtttccctctgtcccctctat

SEQ ID NO: 61721 - DNA, 22 bp, synthetic construct
  misc_feature 1..22: note = chemically synthesized
  source 1..22: mol_type = other DNA
ccctctgtcccctctatggtgc

SEQ ID NO: 61722 - DNA, 22 bp, synthetic construct
  misc_feature 1..22: note = chemically synthesized
  source 1..22: mol_type = other DNA
cctctgtcccctctatggtgct

SEQ ID NO: 61723 - DNA, 22 bp, synthetic construct
  misc_feature 1..22: note = chemically synthesized
  source 1..22: mol_type = other DNA
tgtcccctctatggtgctggct

SEQ ID NO: 61724 - DNA, 22 bp, synthetic construct
  misc_feature 1..22: note = chemically synthesized
  source 1..22: mol_type = other DNA
tcccctctatggtgctggcttt

SEQ ID NO: 61725 - DNA, 22 bp, synthetic construct
  misc_feature 1..22: note = chemically synthesized
  source 1..22: mol_type = other DNA
tatggtgctggctttgccacat

SEQ ID NO: 61726 - DNA, 22 bp, synthetic construct
  misc_feature 1..22: note = chemically synthesized
  source 1..22: mol_type = other DNA
tggtgctggctttgccacatgt

SEQ ID NO: 61727 - DNA, 22 bp, synthetic construct
  misc_feature 1..22: note = chemically synthesized
  source 1..22: mol_type = other DNA
gctttgccacatgtagaacaaa

SEQ ID NO: 61728 - DNA, 22 bp, synthetic construct
  misc_feature 1..22: note = chemically synthesized
  source 1..22: mol_type = other DNA
tgccacatgtagaacaaactct

SEQ ID NO: 61729 - DNA, 22 bp, synthetic construct
  misc_feature 1..22: note = chemically synthesized
  source 1..22: mol_type = other DNA
gccacatgtagaacaaactctt

SEQ ID NO: 61730 - DNA, 22 bp, synthetic construct
  misc_feature 1..22: note = chemically synthesized
  source 1..22: mol_type = other DNA
ccacatgtagaacaaactcttc

SEQ ID NO: 61731 - DNA, 22 bp, synthetic construct
  misc_feature 1..22: note = chemically synthesized
  source 1..22: mol_type = other DNA
ttctggaatcataggtaaccca

SEQ ID NO: 61732 - DNA, 22 bp, synthetic construct
  misc_feature 1..22: note = chemically synthesized
  source 1..22: mol_type = other DNA
ctggaatcataggtaacccaag

SEQ ID NO: 61733 - DNA, 22 bp, synthetic construct
  misc_feature 1..22: note = chemically synthesized
  source 1..22: mol_type = other DNA
tggaatcataggtaacccaagg

SEQ ID NO: 61734 - DNA, 22 bp, synthetic construct
  misc_feature 1..22: note = chemically synthesized
  source 1..22: mol_type = other DNA
gaatcataggtaacccaagggg

SEQ ID NO: 61735 - DNA, 22 bp, synthetic construct
  misc_feature 1..22: note = chemically synthesized
  source 1..22: mol_type = other DNA
agagaagagtccaggctgccag

SEQ ID NO: 61736 - DNA, 22 bp, synthetic construct
  misc_feature 1..22: note = chemically synthesized
  source 1..22: mol_type = other DNA
ccagtgcaaaggtccagccctg

SEQ ID NO: 61737 - DNA, 22 bp, synthetic construct
  misc_feature 1..22: note = chemically synthesized
  source 1..22: mol_type = other DNA
tcgccaaggagaccctcaggga

SEQ ID NO: 61738 - DNA, 22 bp, synthetic construct
  misc_feature 1..22: note = chemically synthesized
  source 1..22: mol_type = other DNA
agggaaatgcacaggcctccag

SEQ ID NO: 61739 - DNA, 22 bp, synthetic construct
  misc_feature 1..22: note = chemically synthesized
  source 1..22: mol_type = other DNA
cagctattcccacggcccctgt

SEQ ID NO: 61740 - DNA, 22 bp, synthetic construct
  misc_feature 1..22: note = chemically synthesized
  source 1..22: mol_type = other DNA
ttcccacggcccctgtagctga

SEQ ID NO: 61741 - DNA, 22 bp, synthetic construct
  misc_feature 1..22: note = chemically synthesized
  source 1..22: mol_type = other DNA
ccacggcccctgtagctgagcg

SEQ ID NO: 61742 - DNA, 22 bp, synthetic construct
  misc_feature 1..22: note = chemically synthesized
  source 1..22: mol_type = other DNA
tagctgagcgccagcttcttcc

SEQ ID NO: 61743 - DNA, 22 bp, synthetic construct
  misc_feature 1..22: note = chemically synthesized
  source 1..22: mol_type = other DNA
agcgccagcttcttcctgggcc

SEQ ID NO: 61744 - DNA, 22 bp, synthetic construct
  misc_feature 1..22: note = chemically synthesized
  source 1..22: mol_type = other DNA
cttcctgggccaagctgaggct

SEQ ID NO: 61745 - DNA, 22 bp, synthetic construct
  misc_feature 1..22: note = chemically synthesized
  source 1..22: mol_type = other DNA
ttcctgggccaagctgaggctg

SEQ ID NO: 61746 - DNA, 22 bp, synthetic construct
  misc_feature 1..22: note = chemically synthesized
  source 1..22: mol_type = other DNA
cctgggccaagctgaggctgtt

SEQ ID NO: 61747 - DNA, 22 bp, synthetic construct
  misc_feature 1..22: note = chemically synthesized
  source 1..22: mol_type = other DNA
ctgggccaagctgaggctgttt

SEQ ID NO: 61748 - DNA, 22 bp, synthetic construct
  misc_feature 1..22: note = chemically synthesized
  source 1..22: mol_type = other DNA
ggccaagctgaggctgtttcct

SEQ ID NO: 61749 - DNA, 22 bp, synthetic construct
  misc_feature 1..22: note = chemically synthesized
  source 1..22: mol_type = other DNA
aggctgtttcctgccgtgtcca

SEQ ID NO: 61750 - DNA, 22 bp, synthetic construct
  misc_feature 1..22: note = chemically synthesized
  source 1..22: mol_type = other DNA
tttcctgccgtgtccattctcc

SEQ ID NO: 61751 - DNA, 22 bp, synthetic construct
  misc_feature 1..22: note = chemically synthesized
  source 1..22: mol_type = other DNA
cctgccgtgtccattctcctag

SEQ ID NO: 61752 - DNA, 22 bp, synthetic construct
  misc_feature 1..22: note = chemically synthesized
  source 1..22: mol_type = other DNA
ctgccgtgtccattctcctagc

SEQ ID NO: 61753 - DNA, 22 bp, synthetic construct
  misc_feature 1..22: note = chemically synthesized
  source 1..22: mol_type = other DNA
ccgtgtccattctcctagcaac

SEQ ID NO: 61754 - DNA, 22 bp, synthetic construct
  misc_feature 1..22: note = chemically synthesized
  source 1..22: mol_type = other DNA
tcctagcaacgcttctctttgg

SEQ ID NO: 61755 - DNA, 22 bp, synthetic construct
  misc_feature 1..22: note = chemically synthesized
  source 1..22: mol_type = other DNA
ctagcaacgcttctctttggcc

SEQ ID NO: 61756 - DNA, 22 bp, synthetic construct
  misc_feature 1..22: note = chemically synthesized
  source 1..22: mol_type = other DNA
gcaacgcttctctttggccagt

SEQ ID NO: 61757 - DNA, 22 bp, synthetic construct
  misc_feature 1..22: note = chemically synthesized
  source 1..22: mol_type = other DNA
ctctttggccagtttgccatag

SEQ ID NO: 61758 - DNA, 22 bp, synthetic construct
  misc_feature 1..22: note = chemically synthesized
  source 1..22: mol_type = other DNA
tctttggccagtttgccatagt

SEQ ID NO: 61759 - DNA, 22 bp, synthetic construct
  misc_feature 1..22: note = chemically synthesized
  source 1..22: mol_type = other DNA
tttggccagtttgccatagtac

SEQ ID NO: 61760 - DNA, 22 bp, synthetic construct
  misc_feature 1..22: note = chemically synthesized
  source 1..22: mol_type = other DNA
tggccagtttgccatagtacct

SEQ ID NO: 61761 - DNA, 22 bp, synthetic construct
  misc_feature 1..22: note = chemically synthesized
  source 1..22: mol_type = other DNA
ggccagtttgccatagtacctg

SEQ ID NO: 61762 - DNA, 22 bp, synthetic construct
  misc_feature 1..22: note = chemically synthesized
  source 1..22: mol_type = other DNA
gccagtttgccatagtacctga

SEQ ID NO: 61763 - DNA, 22 bp, synthetic construct
  misc_feature 1..22: note = chemically synthesized
  source 1..22: mol_type = other DNA
gccatagtacctgaggtaagtt

SEQ ID NO: 61764 - DNA, 22 bp, synthetic construct
  misc_feature 1..22: note = chemically synthesized
  source 1..22: mol_type = other DNA
ccatagtacctgaggtaagttt

SEQ ID NO: 61765 - DNA, 22 bp, synthetic construct
  misc_feature 1..22: note = chemically synthesized
  source 1..22: mol_type = other DNA
aggtaagttttgtcctttgcct

SEQ ID NO: 61766 - DNA, 22 bp, synthetic construct
  misc_feature 1..22: note = chemically synthesized
  source 1..22: mol_type = other DNA
tgtcctttgcctgccaaatgct

SEQ ID NO: 61767 - DNA, 22 bp, synthetic construct
  misc_feature 1..22: note = chemically synthesized
  source 1..22: mol_type = other DNA
gtcctttgcctgccaaatgctt

SEQ ID NO: 61768 - DNA, 22 bp, synthetic construct
  misc_feature 1..22: note = chemically synthesized
  source 1..22: mol_type = other DNA
tcctttgcctgccaaatgcttt

SEQ ID NO: 61769 - DNA, 22 bp, synthetic construct
  misc_feature 1..22: note = chemically synthesized
  source 1..22: mol_type = other DNA
tgcctgccaaatgctttacatc

SEQ ID NO: 61770 - DNA, 22 bp, synthetic construct
  misc_feature 1..22: note = chemically synthesized
  source 1..22: mol_type = other DNA
gcctgccaaatgctttacatcc

SEQ ID NO: 61771 - DNA, 22 bp, synthetic construct
  misc_feature 1..22: note = chemically synthesized
  source 1..22: mol_type = other DNA
cctgccaaatgctttacatccc

SEQ ID NO: 61772 - DNA, 22 bp, synthetic construct
  misc_feature 1..22: note = chemically synthesized
  source 1..22: mol_type = other DNA
ccaaatgctttacatcccggag

SEQ ID NO: 61773 - DNA, 22 bp, synthetic construct
  misc_feature 1..22: note = chemically synthesized
  source 1..22: mol_type = other DNA
tacatcccggaggaaagcaaag

SEQ ID NO: 61774 - DNA, 22 bp, synthetic construct
  misc_feature 1..22: note = chemically synthesized
  source 1..22: mol_type = other DNA
acatcccggaggaaagcaaagt

SEQ ID NO: 61775 - DNA, 22 bp, synthetic construct
  misc_feature 1..22: note = chemically synthesized
  source 1..22: mol_type = other DNA
catcccggaggaaagcaaagtc

SEQ ID NO: 61776 - DNA, 22 bp, synthetic construct
  misc_feature 1..22: note = chemically synthesized
  source 1..22: mol_type = other DNA
ttcagaacaggaaaagtccagt

SEQ ID NO: 61777 - DNA, 22 bp, synthetic construct
  misc_feature 1..22: note = chemically synthesized
  source 1..22: mol_type = other DNA
cagaacaggaaaagtccagtgc

SEQ ID NO: 61778 - DNA, 22 bp, synthetic construct
  misc_feature 1..22: note = chemically synthesized
  source 1..22: mol_type = other DNA
agaacaggaaaagtccagtgca

SEQ ID NO: 61779 - DNA, 22 bp, synthetic construct
  misc_feature 1..22: note = chemically synthesized
  source 1..22: mol_type = other DNA
cacactgtgctattccagaacc

SEQ ID NO: 61780 - DNA, 22 bp, synthetic construct
  misc_feature 1..22: note = chemically synthesized
  source 1..22: mol_type = other DNA
tgctattccagaacctcccagt

SEQ ID NO: 61781 - DNA, 22 bp, synthetic construct
  misc_feature 1..22: note = chemically synthesized
  source 1..22: mol_type = other DNA
ttccagaacctcccagttgcat

SEQ ID NO: 61782 - DNA, 22 bp, synthetic construct
  misc_feature 1..22: note = chemically synthesized
  source 1..22: mol_type = other DNA
cagaacctcccagttgcattcc

SEQ ID NO: 61783 - DNA, 22 bp, synthetic construct
  misc_feature 1..22: note = chemically synthesized
  source 1..22: mol_type = other DNA
ccagttgcattcctttgccaac

SEQ ID NO: 61784 - DNA, 22 bp, synthetic construct
  misc_feature 1..22: note = chemically synthesized
  source 1..22: mol_type = other DNA
cattcctttgccaactaggtaa

SEQ ID NO: 61785 - DNA, 22 bp, synthetic construct
  misc_feature 1..22: note = chemically synthesized
  source 1..22: mol_type = other DNA
ctttgccaactaggtaatgtgc

SEQ ID NO: 61786 - DNA, 22 bp, synthetic construct
  misc_feature 1..22: note = chemically synthesized
  source 1..22: mol_type = other DNA
tgccaactaggtaatgtgctag

SEQ ID NO: 61787 - DNA, 22 bp, synthetic construct
  misc_feature 1..22: note = chemically synthesized
  source 1..22: mol_type = other DNA
gccaactaggtaatgtgctagg

SEQ ID NO: 61788 - DNA, 22 bp, synthetic construct
  misc_feature 1..22: note = chemically synthesized
  source 1..22: mol_type = other DNA
ccaactaggtaatgtgctaggg

SEQ ID NO: 61789 - DNA, 22 bp, synthetic construct
  misc_feature 1..22: note = chemically synthesized
  source 1..22: mol_type = other DNA
ggtaatgtgctagggatatttg

SEQ ID NO: 61790 - DNA, 22 bp, synthetic construct
  misc_feature 1..22: note = chemically synthesized
  source 1..22: mol_type = other DNA
gggatatttgtctcgcagcaac

SEQ ID NO: 61791 - DNA, 22 bp, synthetic construct
  misc_feature 1..22: note = chemically synthesized
  source 1..22: mol_type = other DNA
gtctcgcagcaactggcaaccc

SEQ ID NO: 61792 - DNA, 22 bp, synthetic construct
  misc_feature 1..22: note = chemically synthesized
  source 1..22: mol_type = other DNA
tctcgcagcaactggcaacccc

SEQ ID NO: 61793 - DNA, 22 bp, synthetic construct
  misc_feature 1..22: note = chemically synthesized
  source 1..22: mol_type = other DNA
gcagcaactggcaaccccctgt

SEQ ID NO: 61794 - DNA, 22 bp, synthetic construct
  misc_feature 1..22: note = chemically synthesized
  source 1..22: mol_type = other DNA
gcaaccccctgtttgggtaaaa

SEQ ID NO: 61795 - DNA, 22 bp, synthetic construct
  misc_feature 1..22: note = chemically synthesized
  source 1..22: mol_type = other DNA
tttgggtaaaagtcagactcag

SEQ ID NO: 61796 - DNA, 22 bp, synthetic construct
  misc_feature 1..22: note = chemically synthesized
  source 1..22: mol_type = other DNA
gggtaaaagtcagactcaggga

SEQ ID NO: 61797 - DNA, 22 bp, synthetic construct
  misc_feature 1..22: note = chemically synthesized
  source 1..22: mol_type = other DNA
ggtaaaagtcagactcagggac

SEQ ID NO: 61798 - DNA, 22 bp, synthetic construct
  misc_feature 1..22: note = chemically synthesized
  source 1..22: mol_type = other DNA
agggacccggctgcagtgcttg

SEQ ID NO: 61799 - DNA, 22 bp, synthetic construct
  misc_feature 1..22: note = chemically synthesized
  source 1..22: mol_type = other DNA
cagtgcttgctcctgtggcccc

SEQ ID NO: 61800 - DNA, 22 bp, synthetic construct
  misc_feature 1..22: note = chemically synthesized
  source 1..22: mol_type = other DNA
gctcctgtggcccctgcaggga

SEQ ID NO: 61801 - DNA, 22 bp, synthetic construct
  misc_feature 1..22: note = chemically synthesized
  source 1..22: mol_type = other DNA
ctcctgtggcccctgcagggag

SEQ ID NO: 61802 - DNA, 22 bp, synthetic construct
  misc_feature 1..22: note = chemically synthesized
  source 1..22: mol_type = other DNA
ctgtggcccctgcagggagtgt

SEQ ID NO: 61803 - DNA, 22 bp, synthetic construct
  misc_feature 1..22: note = chemically synthesized
  source 1..22: mol_type = other DNA
tggcccctgcagggagtgtggc

SEQ ID NO: 61804 - DNA, 22 bp, synthetic construct
  misc_feature 1..22: note = chemically synthesized
  source 1..22: mol_type = other DNA
cagggagtgtggcctggggtgt

SEQ ID NO: 61805 - DNA, 22 bp, synthetic construct
  misc_feature 1..22: note = chemically synthesized
  source 1..22: mol_type = other DNA
gggtgtaattctgcacacccag

SEQ ID NO: 61806 - DNA, 22 bp, synthetic construct
  misc_feature 1..22: note = chemically synthesized
  source 1..22: mol_type = other DNA
tgcacacccaggaagcttctct

SEQ ID NO: 61807 - DNA, 22 bp, synthetic construct
  misc_feature 1..22: note = chemically synthesized
  source 1..22: mol_type = other DNA
cacacccaggaagcttctctgt

SEQ ID NO: 61808 - DNA, 22 bp, synthetic construct
  misc_feature 1..22: note = chemically synthesized
  source 1..22: mol_type = other DNA
ctctgtctcctctttcacatca

SEQ ID NO: 61809 - DNA, 22 bp, synthetic construct
  misc_feature 1..22: note = chemically synthesized
  source 1..22: mol_type = other DNA
tctgtctcctctttcacatcag

SEQ ID NO: 61810 - DNA, 22 bp, synthetic construct
  misc_feature 1..22: note = chemically synthesized
  source 1..22: mol_type = other DNA
tgtctcctctttcacatcaggc

SEQ ID NO: 61811 - DNA, 22 bp, synthetic construct
  misc_feature 1..22: note = chemically synthesized
  source 1..22: mol_type = other DNA
tctcctctttcacatcaggcct

SEQ ID NO: 61812 - DNA, 22 bp, synthetic construct
  misc_feature 1..22: note = chemically synthesized
  source 1..22: mol_type = other DNA
ctctttcacatcaggccttccc

SEQ ID NO: 61813 - DNA, 22 bp, synthetic construct
  misc_feature 1..22: note = chemically synthesized
  source 1..22: mol_type = other DNA
tttcacatcaggccttccctgt

SEQ ID NO: 61814 - DNA, 22 bp, synthetic construct
  misc_feature 1..22: note = chemically synthesized
  source 1..22: mol_type = other DNA
tcacatcaggccttccctgtgt

SEQ ID NO: 61815 - DNA, 22 bp, synthetic construct
  misc_feature 1..22: note = chemically synthesized
  source 1..22: mol_type = other DNA
cacatcaggccttccctgtgtc

SEQ ID NO: 61816 - DNA, 22 bp, synthetic construct
  misc_feature 1..22: note = chemically synthesized
  source 1..22: mol_type = other DNA
acatcaggccttccctgtgtcc

SEQ ID NO: 61817 - DNA, 22 bp, synthetic construct
  misc_feature 1..22: note = chemically synthesized
  source 1..22: mol_type = other DNA
ccctgtgtcctgaaccaagtgt

SEQ ID NO: 61818 - DNA, 22 bp, synthetic construct
  misc_feature 1..22: note = chemically synthesized
  source 1..22: mol_type = other DNA
cctgtgtcctgaaccaagtgtg

SEQ ID NO: 61819 - DNA, 22 bp, synthetic construct
  misc_feature 1..22: note = chemically synthesized
  source 1..22: mol_type = other DNA
tgtcctgaaccaagtgtggatg

SEQ ID NO: 61820 - DNA, 22 bp, synthetic construct
  misc_feature 1..22: note = chemically synthesized
  source 1..22: mol_type = other DNA
aaccaagtgtggatgagtttga

SEQ ID NO: 61821 - DNA, 22 bp, synthetic construct
  misc_feature 1..22: note = chemically synthesized
  source 1..22: mol_type = other DNA
gagcttcctcctagtttttatt

SEQ ID NO: 61822 - DNA, 22 bp, synthetic construct
  misc_feature 1..22: note = chemically synthesized
  source 1..22: mol_type = other DNA
agcttcctcctagtttttattt

SEQ ID NO: 61823 - DNA, 22 bp, synthetic construct
  misc_feature 1..22: note = chemically synthesized
  source 1..22: mol_type = other DNA
cctcctagtttttatttgtgta

SEQ ID NO: 61824 - DNA, 22 bp, synthetic construct
  misc_feature 1..22: note = chemically synthesized
  source 1..22: mol_type = other DNA
ctcctagtttttatttgtgtaa

SEQ ID NO: 61825 - DNA, 22 bp, synthetic construct
  misc_feature 1..22: note = chemically synthesized
  source 1..22: mol_type = other DNA
ctagtttttatttgtgtaattt

SEQ ID NO: 61826 - DNA, 22 bp, synthetic construct
  misc_feature 1..22: note = chemically synthesized
  source 1..22: mol_type = other DNA
gtttttatttgtgtaatttgtt

SEQ ID NO: 61827 - DNA, 22 bp, synthetic construct
  misc_feature 1..22: note = chemically synthesized
  source 1..22: mol_type = other DNA
ttatttgtgtaatttgttgttg

SEQ ID NO: 61828 - DNA, 22 bp, synthetic construct
  misc_feature 1..22: note = chemically synthesized
  source 1..22: mol_type = other DNA
tatttgtgtaatttgttgttgt

SEQ ID NO: 61829 - DNA, 22 bp, synthetic construct
  misc_feature 1..22: note = chemically synthesized
  source 1..22: mol_type = other DNA
atttgtgtaatttgttgttgtt

SEQ ID NO: 61830 - DNA, 22 bp, synthetic construct
  misc_feature 1..22: note = chemically synthesized
  source 1..22: mol_type = other DNA
tttgtgtaatttgttgttgttg

SEQ ID NO: 61831 - DNA, 22 bp, synthetic construct
  misc_feature 1..22: note = chemically synthesized
  source 1..22: mol_type = other DNA
gtgtaatttgttgttgttgttg

SEQ ID NO: 61832 - DNA, 22 bp, synthetic construct
  misc_feature 1..22: note = chemically synthesized
  source 1..22: mol_type = other DNA
tgtaatttgttgttgttgttgt

SEQ ID NO: 61833 - DNA, 22 bp, synthetic construct
  misc_feature 1..22: note = chemically synthesized
  source 1..22: mol_type = other DNA
gttgttgttgttgttgtttggg

SEQ ID NO: 61834 - DNA, 22 bp, synthetic construct
  misc_feature 1..22: note = chemically synthesized
  source 1..22: mol_type = other DNA
ttgttgttgttgttgtttgggg

SEQ ID NO: 61835 - DNA, 22 bp, synthetic construct
  misc_feature 1..22: note = chemically synthesized
  source 1..22: mol_type = other DNA
ttgttgttgttgtttgggggtg

SEQ ID NO: 61836 - DNA, 22 bp, synthetic construct
  misc_feature 1..22: note = chemically synthesized
  source 1..22: mol_type = other DNA
ttgttgttgtttgggggtgggg

SEQ ID NO: 61837 - DNA, 22 bp, synthetic construct
  misc_feature 1..22: note = chemically synthesized
  source 1..22: mol_type = other DNA
ttgttgtttgggggtgggggta

SEQ ID NO: 61838 - DNA, 22 bp, synthetic construct
  misc_feature 1..22: note = chemically synthesized
  source 1..22: mol_type = other DNA
ttgtttgggggtgggggtagac

SEQ ID NO: 61839 - DNA, 22 bp, synthetic construct
  misc_feature 1..22: note = chemically synthesized
  source 1..22: mol_type = other DNA
tttgggggtgggggtagacagt

SEQ ID NO: 61840 - DNA, 22 bp, synthetic construct
  misc_feature 1..22: note = chemically synthesized
  source 1..22: mol_type = other DNA
gggggtgggggtagacagtgct

SEQ ID NO: 61841 - DNA, 22 bp, synthetic construct
  misc_feature 1..22: note = chemically synthesized
  source 1..22: mol_type = other DNA
ggggtgggggtagacagtgctg

SEQ ID NO: 61842 - DNA, 22 bp, synthetic construct
  misc_feature 1..22: note = chemically synthesized
  source 1..22: mol_type = other DNA
ggcctgtcagaattttaggttg

SEQ ID NO: 61843 - DNA, 22 bp, synthetic construct
  misc_feature 1..22: note = chemically synthesized
  source 1..22: mol_type = other DNA
tcagaattttaggttggttctt

SEQ ID NO: 61844 - DNA, 22 bp, synthetic construct
  misc_feature 1..22: note = chemically synthesized
  source 1..22: mol_type = other DNA
taggttggttctttgagatgaa

SEQ ID NO: 61845 - DNA, 22 bp, synthetic construct
  misc_feature 1..22: note = chemically synthesized
  source 1..22: mol_type = other DNA
aggttggttctttgagatgaat

SEQ ID NO: 61846 - DNA, 22 bp, synthetic construct
  misc_feature 1..22: note = chemically synthesized
  source 1..22: mol_type = other DNA
ggttggttctttgagatgaata

SEQ ID NO: 61847 - DNA, 22 bp, synthetic construct
  misc_feature 1..22: note = chemically synthesized
  source 1..22: mol_type = other DNA
gttctttgagatgaataactac

SEQ ID NO: 61848 - DNA, 22 bp, synthetic construct
  misc_feature 1..22: note = chemically synthesized
  source 1..22: mol_type = other DNA
tttgagatgaataactacttag

SEQ ID NO: 61849 - DNA, 22 bp, synthetic construct
  misc_feature 1..22: note = chemically synthesized
  source 1..22: mol_type = other DNA
tgagatgaataactacttagct

SEQ ID NO: 61850 - DNA, 22 bp, synthetic construct
  misc_feature 1..22: note = chemically synthesized
  source 1..22: mol_type = other DNA
gagatgaataactacttagctg

SEQ ID NO: 61851 - DNA, 22 bp, synthetic construct
  misc_feature 1..22: note = chemically synthesized
  source 1..22: mol_type = other DNA
agatgaataactacttagctgt

SEQ ID NO: 61852 - DNA, 22 bp, synthetic construct
  misc_feature 1..22: note = chemically synthesized
  source 1..22: mol_type = other DNA
cttagctgttgctcaactactt

SEQ ID NO: 61853 - DNA, 22 bp, synthetic construct
  misc_feature 1..22: note = chemically synthesized
  source 1..22: mol_type = other DNA
agctgttgctcaactacttttg

SEQ ID NO: 61854 - DNA, 22 bp, synthetic construct
  misc_feature 1..22: note = chemically synthesized
  source 1..22: mol_type = other DNA
gctgttgctcaactacttttgt

SEQ ID NO: 61855 - DNA, 22 bp, synthetic construct
  misc_feature 1..22: note = chemically synthesized
  source 1..22: mol_type = other DNA
ttgctcaactacttttgtttgt

SEQ ID NO: 61856 - DNA, 22 bp, synthetic construct
  misc_feature 1..22: note = chemically synthesized
  source 1..22: mol_type = other DNA
ctcaactacttttgtttgtgaa

SEQ ID NO: 61857 - DNA, 22 bp, synthetic construct
  misc_feature 1..22: note = chemically synthesized
  source 1..22: mol_type = other DNA
aactacttttgtttgtgaaaga

SEQ ID NO: 61858 - DNA, 22 bp, synthetic construct
  misc_feature 1..22: note = chemically synthesized
  source 1..22: mol_type = other DNA
cttttgtttgtgaaagaaaggg

SEQ ID NO: 61859 - DNA, 22 bp, synthetic construct
  misc_feature 1..22: note = chemically synthesized
  source 1..22: mol_type = other DNA
ttgtttgtgaaagaaagggcag

SEQ ID NO: 61860 - DNA, 22 bp, synthetic construct
  misc_feature 1..22: note = chemically synthesized
  source 1..22: mol_type = other DNA
tgtttgtgaaagaaagggcagt

SEQ ID NO: 61861 - DNA, 22 bp, synthetic construct
  misc_feature 1..22: note = chemically synthesized
  source 1..22: mol_type = other DNA
gtttgtgaaagaaagggcagta

SEQ ID NO: 61862 - DNA, 22 bp, synthetic construct
  misc_feature 1..22: note = chemically synthesized
  source 1..22: mol_type = other DNA
tttgtgaaagaaagggcagtaa

SEQ ID NO: 61863 - DNA, 22 bp, synthetic construct
  misc_feature 1..22: note = chemically synthesized
  source 1..22: mol_type = other DNA
gtgaaagaaagggcagtaagca

SEQ ID NO: 61864 - DNA, 22 bp, synthetic construct
  misc_feature 1..22: note = chemically synthesized
  source 1..22: mol_type = other DNA
tgaaagaaagggcagtaagcac

SEQ ID NO: 61865 - DNA, 22 bp, synthetic construct
  misc_feature 1..22: note = chemically synthesized
  source 1..22: mol_type = other DNA
caggtttattgtgatttctttt

SEQ ID NO: 61866 - DNA, 22 bp, synthetic construct
  misc_feature 1..22: note = chemically synthesized
  source 1..22: mol_type = other DNA
aggtttattgtgatttcttttt

SEQ ID NO: 61867 - DNA, 22 bp, synthetic construct
  misc_feature 1..22: note = chemically synthesized
  source 1..22: mol_type = other DNA
attgtgatttcttttttgtgtt

SEQ ID NO: 61868 - DNA, 22 bp, synthetic construct
  misc_feature 1..22: note = chemically synthesized
  source 1..22: mol_type = other DNA
ttgtgatttcttttttgtgttt

SEQ ID NO: 61869 - DNA, 22 bp, synthetic construct
  misc_feature 1..22: note = chemically synthesized
  source 1..22: mol_type = other DNA
tgatttcttttttgtgtttgca

SEQ ID NO: 61870 - DNA, 22 bp, synthetic construct
  misc_feature 1..22: note = chemically synthesized
  source 1..22: mol_type = other DNA
cttttttgtgtttgcatctgtc

SEQ ID NO: 61871 - DNA, 22 bp, synthetic construct
  misc_feature 1..22: note = chemically synthesized
  source 1..22: mol_type = other DNA
ttttttgtgtttgcatctgtcg

SEQ ID NO: 61872 - DNA, 22 bp, synthetic construct
  misc_feature 1..22: note = chemically synthesized
  source 1..22: mol_type = other DNA
ttttgtgtttgcatctgtcgtg

SEQ ID NO: 61873 - DNA, 22 bp, synthetic construct
  misc_feature 1..22: note = chemically synthesized
  source 1..22: mol_type = other DNA
tttgtgtttgcatctgtcgtgc

SEQ ID NO: 61874 - DNA, 22 bp, synthetic construct
  misc_feature 1..22: note = chemically synthesized
  source 1..22: mol_type = other DNA
ttgtgtttgcatctgtcgtgct

SEQ ID NO: 61875 - DNA, 22 bp, synthetic construct
  misc_feature 1..22: note = chemically synthesized
  source 1..22: mol_type = other DNA
tgtgtttgcatctgtcgtgctc

SEQ ID NO: 61876 - DNA, 22 bp, synthetic construct
  misc_feature 1..22: note = chemically synthesized
  source 1..22: mol_type = other DNA
gtgtttgcatctgtcgtgctca

SEQ ID NO: 61877 - DNA, 22 bp, synthetic construct
  misc_feature 1..22: note = chemically synthesized
  source 1..22: mol_type = other DNA
tgtttgcatctgtcgtgctcag

SEQ ID NO: 61878 - DNA, 22 bp, synthetic construct
  misc_feature 1..22: note = chemically synthesized
  source 1..22: mol_type = other DNA
gcatctgtcgtgctcagttagg

SEQ ID NO: 61879 - DNA, 22 bp, synthetic construct
  misc_feature 1..22: note = chemically synthesized
  source 1..22: mol_type = other DNA
catctgtcgtgctcagttaggg

SEQ ID NO: 61880 - DNA, 22 bp, synthetic construct
  misc_feature 1..22: note = chemically synthesized
  source 1..22: mol_type = other DNA
tcgtgctcagttagggcattat

SEQ ID NO: 61881 - DNA, 22 bp, synthetic construct
  misc_feature 1..22: note = chemically synthesized
  source 1..22: mol_type = other DNA
agttagggcattatccgtaacc

SEQ ID NO: 61882 - DNA, 22 bp, synthetic construct
  misc_feature 1..22: note = chemically synthesized
  source 1..22: mol_type = other DNA
gggcattatccgtaaccccata

SEQ ID NO: 61883 - DNA, 22 bp, synthetic construct
  misc_feature 1..22: note = chemically synthesized
  source 1..22: mol_type = other DNA
tccgtaaccccataggaaccaa

SEQ ID NO: 61884 - DNA, 22 bp, synthetic construct
  misc_feature 1..22: note = chemically synthesized
  source 1..22: mol_type = other DNA
taaagctttagaaatctgcgtg

SEQ ID NO: 61885 - DNA, 22 bp, synthetic construct
  misc_feature 1..22: note = chemically synthesized
  source 1..22: mol_type = other DNA
aaagctttagaaatctgcgtgt

SEQ ID NO: 61886 - DNA, 22 bp, synthetic construct
  misc_feature 1..22: note = chemically synthesized
  source 1..22: mol_type = other DNA
aagctttagaaatctgcgtgtg

SEQ ID NO: 61887 - DNA, 22 bp, synthetic construct
  misc_feature 1..22: note = chemically synthesized
  source 1..22: mol_type = other DNA
tagaaatctgcgtgtgtaatat

SEQ ID NO: 61888 - DNA, 22 bp, synthetic construct
  misc_feature 1..22: note = chemically synthesized
  source 1..22: mol_type = other DNA
agaaatctgcgtgtgtaatatg

SEQ ID NO: 61889 - DNA, 22 bp, synthetic construct
  misc_feature 1..22: note = chemically synthesized
  source 1..22: mol_type = other DNA
gaaatctgcgtgtgtaatatgt

SEQ ID NO: 61890 - DNA, 22 bp, synthetic construct
  misc_feature 1..22: note = chemically synthesized
  source 1..22: mol_type = other DNA
cgtgtgtaatatgtcttttgtg

SEQ ID NO: 61891 - DNA, 22 bp, synthetic construct
  misc_feature 1..22: note = chemically synthesized
  source 1..22: mol_type = other DNA
ttgtgaatttttttttgttctt

SEQ ID NO: 61892 - DNA, 22 bp, synthetic construct
  misc_feature 1..22: note = chemically synthesized
  source 1..22: mol_type = other DNA
tgtgaatttttttttgttcttt

SEQ ID NO: 61893 - DNA, 22 bp, synthetic construct
  misc_feature 1..22: note = chemically synthesized
  source 1..22: mol_type = other DNA
gtgaatttttttttgttctttt

SEQ ID NO: 61894 - DNA, 22 bp, synthetic construct
  misc_feature 1..22: note = chemically synthesized
  source 1..22: mol_type = other DNA
tgaatttttttttgttcttttg

SEQ ID NO: 61895 - DNA, 22 bp, synthetic construct
  misc_feature 1..22: note = chemically synthesized
  source 1..22: mol_type = other DNA
ttttttgttcttttgctttaga

SEQ ID NO: 61896 - DNA, 22 bp, synthetic construct
  misc_feature 1..22: note = chemically synthesized
  source 1..22: mol_type = other DNA
tttttgttcttttgctttagaa

SEQ ID NO: 61897 - DNA, 22 bp, synthetic construct
  misc_feature 1..22: note = chemically synthesized
  source 1..22: mol_type = other DNA
ttttgttcttttgctttagaaa

SEQ ID NO: 61898 - DNA, 22 bp, synthetic construct
  misc_feature 1..22: note = chemically synthesized
  source 1..22: mol_type = other DNA
tttgttcttttgctttagaaac

SEQ ID NO: 61899 - DNA, 22 bp, synthetic construct
  misc_feature 1..22: note = chemically synthesized
  source 1..22: mol_type = other DNA
ttgttcttttgctttagaaact

SEQ ID NO: 61900 - DNA, 22 bp, synthetic construct
  misc_feature 1..22: note = chemically synthesized
  source 1..22: mol_type = other DNA
tgttcttttgctttagaaactg

SEQ ID NO: 61901 - DNA, 22 bp, synthetic construct
  misc_feature 1..22: note = chemically synthesized
  source 1..22: mol_type = other DNA
gttcttttgctttagaaactgt

SEQ ID NO: 61902 - DNA, 22 bp, synthetic construct
  misc_feature 1..22: note = chemically synthesized
  source 1..22: mol_type = other DNA
ttcttttgctttagaaactgta

SEQ ID NO: 61903 - DNA, 22 bp, synthetic construct
  misc_feature 1..22: note = chemically synthesized
  source 1..22: mol_type = other DNA
ttttgctttagaaactgtaata

SEQ ID NO: 61904 - DNA, 22 bp, synthetic construct
  misc_feature 1..22: note = chemically synthesized
  source 1..22: mol_type = other DNA
ttgctttagaaactgtaataat

SEQ ID NO: 61905 - DNA, 22 bp, synthetic construct
  misc_feature 1..22: note = chemically synthesized
  source 1..22: mol_type = other DNA
tgctttagaaactgtaataata

SEQ ID NO: 61906 - DNA, 22 bp, synthetic construct
  misc_feature 1..22: note = chemically synthesized
  source 1..22: mol_type = other DNA
gctttagaaactgtaataataa

SEQ ID NO: 61907 - DNA, 22 bp, synthetic construct
  misc_feature 1..22: note = chemically synthesized
  source 1..22: mol_type = other DNA
ctttagaaactgtaataataat

SEQ ID NO: 61908 - DNA, 22 bp, synthetic construct
  misc_feature 1..22: note = chemically synthesized
  source 1..22: mol_type = other DNA
tagaaactgtaataataatcca

SEQ ID NO: 61909 - DNA, 22 bp, synthetic construct
  misc_feature 1..22: note = chemically synthesized
  source 1..22: mol_type = other DNA
agaaactgtaataataatccat

SEQ ID NO: 61910 - DNA, 22 bp, synthetic construct
  misc_feature 1..22: note = chemically synthesized
  source 1..22: mol_type = other DNA
gaaactgtaataataatccata

SEQ ID NO: 61911 - DNA, 22 bp, synthetic construct
  misc_feature 1..22: note = chemically synthesized
  source 1..22: mol_type = other DNA
taataataatccatagtaatta

SEQ ID NO: 61912 - DNA, 22 bp, synthetic construct
  misc_feature 1..22: note = chemically synthesized
  source 1..22: mol_type = other DNA
tcccatagtatgctgtcctttg

SEQ ID NO: 61913 - DNA, 22 bp, synthetic construct
  misc_feature 1..22: note = chemically synthesized
  source 1..22: mol_type = other DNA
tcctttgttacaggagcattgg

SEQ ID NO: 61914 - DNA, 22 bp, synthetic construct
  misc_feature 1..22: note = chemically synthesized
  source 1..22: mol_type = other DNA
tgttacaggagcattggattac

SEQ ID NO: 61915 - DNA, 22 bp, synthetic construct
  misc_feature 1..22: note = chemically synthesized
  source 1..22: mol_type = other DNA
gttacaggagcattggattact

SEQ ID NO: 61916 - DNA, 22 bp, synthetic construct
  misc_feature 1..22: note = chemically synthesized
  source 1..22: mol_type = other DNA
ttacaggagcattggattactg

SEQ ID NO: 61917 - DNA, 22 bp, synthetic construct
  misc_feature 1..22: note = chemically synthesized
  source 1..22: mol_type = other DNA
caggagcattggattactgtga

SEQ ID NO: 61918 - DNA, 22 bp, synthetic construct
  misc_feature 1..22: note = chemically synthesized
  source 1..22: mol_type = other DNA
gattactgtgaagacgtgtcct

SEQ ID NO: 61919 - DNA, 22 bp, synthetic construct
  misc_feature 1..22: note = chemically synthesized
  source 1..22: mol_type = other DNA
ctgtgaagacgtgtcctgtata

SEQ ID NO: 61920 - DNA, 22 bp, synthetic construct
  misc_feature 1..22: note = chemically synthesized
  source 1..22: mol_type = other DNA
tgaagacgtgtcctgtatacag

SEQ ID NO: 61921 - DNA, 22 bp, synthetic construct
  misc_feature 1..22: note = chemically synthesized
  source 1..22: mol_type = other DNA
tatacagtttcaacagcttgtt

SEQ ID NO: 61922 - DNA, 22 bp, synthetic construct
  misc_feature 1..22: note = chemically synthesized
  source 1..22: mol_type = other DNA
caacagcttgtttttacttctt

SEQ ID NO: 61923 - DNA, 22 bp, synthetic construct
  misc_feature 1..22: note = chemically synthesized
  source 1..22: mol_type = other DNA
aacagcttgtttttacttcttc

SEQ ID NO: 61924 - DNA, 22 bp, synthetic construct
  misc_feature 1..22: note = chemically synthesized
  source 1..22: mol_type = other DNA
gtttttacttcttcccttctcc

SEQ ID NO: 61925 - DNA, 22 bp, synthetic construct
  misc_feature 1..22: note = chemically synthesized
  source 1..22: mol_type = other DNA
tttttacttcttcccttctccc

SEQ ID NO: 61926 - DNA, 22 bp, synthetic construct
  misc_feature 1..22: note = chemically synthesized
  source 1..22: mol_type = other DNA
ttacttcttcccttctccccgc

SEQ ID NO: 61927 - DNA, 22 bp, synthetic construct
  misc_feature 1..22: note = chemically synthesized
  source 1..22: mol_type = other DNA
tacttcttcccttctccccgca

SEQ ID NO: 61928 - DNA, 22 bp, synthetic construct
  misc_feature 1..22: note = chemically synthesized
  source 1..22: mol_type = other DNA
acttcttcccttctccccgcac

SEQ ID NO: 61929 - DNA, 22 bp, synthetic construct
  misc_feature 1..22: note = chemically synthesized
  source 1..22: mol_type = other DNA
cttcttcccttctccccgcacc

SEQ ID NO: 61930 - DNA, 22 bp, synthetic construct
  misc_feature 1..22: note = chemically synthesized
  source 1..22: mol_type = other DNA
cttcccttctccccgcacccgt

SEQ ID NO: 61931 - DNA, 22 bp, synthetic construct
  misc_feature 1..22: note = chemically synthesized
  source 1..22: mol_type = other DNA
ttcccttctccccgcacccgtc

SEQ ID NO: 61932 - DNA, 22 bp, synthetic construct
  misc_feature 1..22: note = chemically synthesized
  source 1..22: mol_type = other DNA
cccttctccccgcacccgtcgc

SEQ ID NO: 61933 - DNA, 22 bp, synthetic construct
  misc_feature 1..22: note = chemically synthesized
  source 1..22: mol_type = other DNA
ccttctccccgcacccgtcgcc

SEQ ID NO: 61934 - DNA, 22 bp, synthetic construct
  misc_feature 1..22: note = chemically synthesized
  source 1..22: mol_type = other DNA
ctccccgcacccgtcgcccccc

SEQ ID NO: 61935 - DNA, 22 bp, synthetic construct
  misc_feature 1..22: note = chemically synthesized
  source 1..22: mol_type = other DNA
tccccgcacccgtcgcccccca

SEQ ID NO: 61936 - DNA, 22 bp, synthetic construct
  misc_feature 1..22: note = chemically synthesized
  source 1..22: mol_type = other DNA
cccgcacccgtcgccccccacc

SEQ ID NO: 61937 - DNA, 22 bp, synthetic construct
  misc_feature 1..22: note = chemically synthesized
  source 1..22: mol_type = other DNA
tctgtcttgtgctgtttggaag

SEQ ID NO: 61938 - DNA, 22 bp, synthetic construct
  misc_feature 1..22: note = chemically synthesized
  source 1..22: mol_type = other DNA
ctgtcttgtgctgtttggaaga

SEQ ID NO: 61939 - DNA, 22 bp, synthetic construct
  misc_feature 1..22: note = chemically synthesized
  source 1..22: mol_type = other DNA
tgtcttgtgctgtttggaagac

SEQ ID NO: 61940 - DNA, 22 bp, synthetic construct
  misc_feature 1..22: note = chemically synthesized
  source 1..22: mol_type = other DNA
tcttgtgctgtttggaagacaa

SEQ ID NO: 61941 - DNA, 22 bp, synthetic construct
  misc_feature 1..22: note = chemically synthesized
  source 1..22: mol_type = other DNA
gtgctgtttggaagacaatttc

SEQ ID NO: 61942 - DNA, 22 bp, synthetic construct
  misc_feature 1..22: note = chemically synthesized
  source 1..22: mol_type = other DNA
tgctgtttggaagacaatttcc

SEQ ID NO: 61943 - DNA, 22 bp, synthetic construct
  misc_feature 1..22: note = chemically synthesized
  source 1..22: mol_type = other DNA
tttggaagacaatttccacatt

SEQ ID NO: 61944 - DNA, 22 bp, synthetic construct
  misc_feature 1..22: note = chemically synthesized
  source 1..22: mol_type = other DNA
ggaagacaatttccacatttct

SEQ ID NO: 61945 - DNA, 22 bp, synthetic construct
  misc_feature 1..22: note = chemically synthesized
  source 1..22: mol_type = other DNA
gaagacaatttccacatttctg

SEQ ID NO: 61946 - DNA, 22 bp, synthetic construct
  misc_feature 1..22: note = chemically synthesized
  source 1..22: mol_type = other DNA
ccacatttctgccatatgtctt

SEQ ID NO: 61947 - DNA, 22 bp, synthetic construct
  misc_feature 1..22: note = chemically synthesized
  source 1..22: mol_type = other DNA
cacatttctgccatatgtctta

SEQ ID NO: 61948 - DNA, 22 bp, synthetic construct
  misc_feature 1..22: note = chemically synthesized
  source 1..22: mol_type = other DNA
ctgccatatgtcttagaaaagc

SEQ ID NO: 61949 - DNA, 22 bp, synthetic construct
  misc_feature 1..22: note = chemically synthesized
  source 1..22: mol_type = other DNA
tgccatatgtcttagaaaagct

SEQ ID NO: 61950 - DNA, 22 bp, synthetic construct
  misc_feature 1..22: note = chemically synthesized
  source 1..22: mol_type = other DNA
ccatatgtcttagaaaagctgg

SEQ ID NO: 61951 - DNA, 22 bp, synthetic construct
  misc_feature 1..22: note = chemically synthesized
  source 1..22: mol_type = other DNA
agaaaagctggggacttagaag

SEQ ID NO: 61952 - DNA, 22 bp, synthetic construct
  misc_feature 1..22: note = chemically synthesized
  source 1..22: mol_type = other DNA
gaaaagctggggacttagaagc

SEQ ID NO: 61953 - DNA, 22 bp, synthetic construct
  misc_feature 1..22: note = chemically synthesized
  source 1..22: mol_type = other DNA
gggacttagaagcagtagccga

SEQ ID NO: 61954 - DNA, 22 bp, synthetic construct
  misc_feature 1..22: note = chemically synthesized
  source 1..22: mol_type = other DNA
agaagcagtagccgacttagga

SEQ ID NO: 61955 - DNA, 22 bp, synthetic construct
  misc_feature 1..22: note = chemically synthesized
  source 1..22: mol_type = other DNA
gaagcagtagccgacttaggac

SEQ ID NO: 61956 - DNA, 22 bp, synthetic construct
  misc_feature 1..22: note = chemically synthesized
  source 1..22: mol_type = other DNA
aggacagcaagctcagctcagg

SEQ ID NO: 61957 - DNA, 22 bp, synthetic construct
  misc_feature 1..22: note = chemically synthesized
  source 1..22: mol_type = other DNA
ggacagcaagctcagctcaggt

SEQ ID NO: 61958 - DNA, 22 bp, synthetic construct
  misc_feature 1..22: note = chemically synthesized
  source 1..22: mol_type = other DNA
agctcaggtgcggaggcagccc

SEQ ID NO: 61959 - DNA, 22 bp, synthetic construct
  misc_feature 1..22: note = chemically synthesized
  source 1..22: mol_type = other DNA
aggtgcggaggcagccctgtgt

SEQ ID NO: 61960 - DNA, 22 bp, synthetic construct
  misc_feature 1..22: note = chemically synthesized
  source 1..22: mol_type = other DNA
tgtaagagactctgttatgcag

SEQ ID NO: 61961 - DNA, 22 bp, synthetic construct
  misc_feature 1..22: note = chemically synthesized
  source 1..22: mol_type = other DNA
tgttatgcagtgagctgttgaa

SEQ ID NO: 61962 - DNA, 22 bp, synthetic construct
  misc_feature 1..22: note = chemically synthesized
  source 1..22: mol_type = other DNA
ttatgcagtgagctgttgaaac

SEQ ID NO: 61963 - DNA, 22 bp, synthetic construct
  misc_feature 1..22: note = chemically synthesized
  source 1..22: mol_type = other DNA
tgcagtgagctgttgaaacagc

SEQ ID NO: 61964 - DNA, 22 bp, synthetic construct
  misc_feature 1..22: note = chemically synthesized
  source 1..22: mol_type = other DNA
ttgaaacagctgcatgtggaaa

SEQ ID NO: 61965 - DNA, 22 bp, synthetic construct
  misc_feature 1..22: note = chemically synthesized
  source 1..22: mol_type = other DNA
aaacagctgcatgtggaaacag

SEQ ID NO: 61966 - DNA, 22 bp, synthetic construct
  misc_feature 1..22: note = chemically synthesized
  source 1..22: mol_type = other DNA
catgtggaaacagttcttcccc

SEQ ID NO: 61967 - DNA, 22 bp, synthetic construct
  misc_feature 1..22: note = chemically synthesized
  source 1..22: mol_type = other DNA
ttccccttgcctgtcctcattt

SEQ ID NO: 61968 - DNA, 22 bp, synthetic construct
  misc_feature 1..22: note = chemically synthesized
  source 1..22: mol_type = other DNA
ccccttgcctgtcctcatttct

SEQ ID NO: 61969 - DNA, 22 bp, synthetic construct
  misc_feature 1..22: note = chemically synthesized
  source 1..22: mol_type = other DNA
cccttgcctgtcctcatttctt

SEQ ID NO: 61970 - DNA, 22 bp, synthetic construct
  misc_feature 1..22: note = chemically synthesized
  source 1..22: mol_type = other DNA
gcctgtcctcatttcttgagag

SEQ ID NO: 61971 - DNA, 22 bp, synthetic construct
  misc_feature 1..22: note = chemically synthesized
  source 1..22: mol_type = other DNA
cctgtcctcatttcttgagaga

SEQ ID NO: 61972 - DNA, 22 bp, synthetic construct
  misc_feature 1..22: note = chemically synthesized
  source 1..22: mol_type = other DNA
tcctcatttcttgagagactcc

SEQ ID NO: 61973 - DNA, 22 bp, synthetic construct
  misc_feature 1..22: note = chemically synthesized
  source 1..22: mol_type = other DNA
atttcttgagagactccaaaac

SEQ ID NO: 61974 - DNA, 22 bp, synthetic construct
  misc_feature 1..22: note = chemically synthesized
  source 1..22: mol_type = other DNA
cttgagagactccaaaacatct

SEQ ID NO: 61975 - DNA, 22 bp, synthetic construct
  misc_feature 1..22: note = chemically synthesized
  source 1..22: mol_type = other DNA
ttgagagactccaaaacatctg

SEQ ID NO: 61976 - DNA, 22 bp, synthetic construct
  misc_feature 1..22: note = chemically synthesized
  source 1..22: mol_type = other DNA
gagagactccaaaacatctgaa

SEQ ID NO: 61977 - DNA, 22 bp, synthetic construct
  misc_feature 1..22: note = chemically synthesized
  source 1..22: mol_type = other DNA
agagactccaaaacatctgaaa

SEQ ID NO: 61978 - DNA, 22 bp, synthetic construct
  misc_feature 1..22: note = chemically synthesized
  source 1..22: mol_type = other DNA
caaaacatctgaaaatgtaaaa

SEQ ID NO: 61979 - DNA, 22 bp, synthetic construct
  misc_feature 1..22: note = chemically synthesized
  source 1..22: mol_type = other DNA
aaaatgtaaaagcacttcacaa

SEQ ID NO: 61980 - DNA, 22 bp, synthetic construct
  misc_feature 1..22: note = chemically synthesized
  source 1..22: mol_type = other DNA
cacaaggttttaacttttctgg

SEQ ID NO: 61981 - DNA, 22 bp, synthetic construct
  misc_feature 1..22: note = chemically synthesized
  source 1..22: mol_type = other DNA
acaaggttttaacttttctggc

SEQ ID NO: 61982 - DNA, 22 bp, synthetic construct
  misc_feature 1..22: note = chemically synthesized
  source 1..22: mol_type = other DNA
taacttttctggcttgaacgga

SEQ ID NO: 61983 - DNA, 22 bp, synthetic construct
  misc_feature 1..22: note = chemically synthesized
  source 1..22: mol_type = other DNA
aacttttctggcttgaacggaa

SEQ ID NO: 61984 - DNA, 22 bp, synthetic construct
  misc_feature 1..22: note = chemically synthesized
  source 1..22: mol_type = other DNA
acttttctggcttgaacggaag

SEQ ID NO: 61985 - DNA, 22 bp, synthetic construct
  misc_feature 1..22: note = chemically synthesized
  source 1..22: mol_type = other DNA
ttctggcttgaacggaagcagc

SEQ ID NO: 61986 - DNA, 22 bp, synthetic construct
  misc_feature 1..22: note = chemically synthesized
  source 1..22: mol_type = other DNA
tctggcttgaacggaagcagct

SEQ ID NO: 61987 - DNA, 22 bp, synthetic construct
  misc_feature 1..22: note = chemically synthesized
  source 1..22: mol_type = other DNA
ctggcttgaacggaagcagctt

SEQ ID NO: 61988 - DNA, 22 bp, synthetic construct
  misc_feature 1..22: note = chemically synthesized
  source 1..22: mol_type = other DNA
tggcttgaacggaagcagcttc

SEQ ID NO: 61989 - DNA, 22 bp, synthetic construct
  misc_feature 1..22: note = chemically synthesized
  source 1..22: mol_type = other DNA
gcttgaacggaagcagcttcaa

SEQ ID NO: 61990 - DNA, 22 bp, synthetic construct
  misc_feature 1..22: note = chemically synthesized
  source 1..22: mol_type = other DNA
gaacggaagcagcttcaagtca

SEQ ID NO: 61991 - DNA, 22 bp, synthetic construct
  misc_feature 1..22: note = chemically synthesized
  source 1..22: mol_type = other DNA
aacggaagcagcttcaagtcaa

SEQ ID NO: 61992 - DNA, 22 bp, synthetic construct
  misc_feature 1..22: note = chemically synthesized
  source 1..22: mol_type = other DNA
caagtcaacaagagcacaatag

SEQ ID NO: 61993 - DNA, 22 bp, synthetic construct
  misc_feature 1..22: note = chemically synthesized
  source 1..22: mol_type = other DNA
aagtcaacaagagcacaatagt

SEQ ID NO: 61994 - DNA, 22 bp, synthetic construct
  misc_feature 1..22: note = chemically synthesized
  source 1..22: mol_type = other DNA
tgtaggttttggacacagtttt

SEQ ID NO: 61995 - DNA, 22 bp, synthetic construct
  misc_feature 1..22: note = chemically synthesized
  source 1..22: mol_type = other DNA
gtaggttttggacacagttttc

SEQ ID NO: 61996 - DNA, 22 bp, synthetic construct
  misc_feature 1..22: note = chemically synthesized
  source 1..22: mol_type = other DNA
taggttttggacacagttttct

SEQ ID NO: 61997 - DNA, 22 bp, synthetic construct
  misc_feature 1..22: note = chemically synthesized
  source 1..22: mol_type = other DNA
tggacacagttttctagctttt

SEQ ID NO: 61998 - DNA, 22 bp, synthetic construct
  misc_feature 1..22: note = chemically synthesized
  source 1..22: mol_type = other DNA
ggacacagttttctagcttttc

SEQ ID NO: 61999 - DNA, 22 bp, synthetic construct
  misc_feature 1..22: note = chemically synthesized
  source 1..22: mol_type = other DNA
gacacagttttctagcttttca

SEQ ID NO: 62000 - DNA, 22 bp, synthetic construct
  misc_feature 1..22: note = chemically synthesized
  source 1..22: mol_type = other DNA
tctagcttttcaagaaaggcaa

SEQ ID NO: 62001 - DNA, 22 bp, synthetic construct
  misc_feature 1..22: note = chemically synthesized
  source 1..22: mol_type = other DNA
ctagcttttcaagaaaggcaag

SEQ ID NO: 62002 - DNA, 22 bp, synthetic construct
  misc_feature 1..22: note = chemically synthesized
  source 1..22: mol_type = other DNA
tagcttttcaagaaaggcaagg

SEQ ID NO: 62003 - DNA, 22 bp, synthetic construct
  misc_feature 1..22: note = chemically synthesized
  source 1..22: mol_type = other DNA
gcttttcaagaaaggcaagggc

SEQ ID NO: 62004 - DNA, 22 bp, synthetic construct
  misc_feature 1..22: note = chemically synthesized
  source 1..22: mol_type = other DNA
ttcaagaaaggcaagggccctc

SEQ ID NO: 62005 - DNA, 22 bp, synthetic construct
  misc_feature 1..22: note = chemically synthesized
  source 1..22: mol_type = other DNA
tcaagaaaggcaagggccctcc

SEQ ID NO: 62006 - DNA, 22 bp, synthetic construct
  misc_feature 1..22: note = chemically synthesized
  source 1..22: mol_type = other DNA
caagaaaggcaagggccctcct

SEQ ID NO: 62007 - DNA, 22 bp, synthetic construct
  misc_feature 1..22: note = chemically synthesized
  source 1..22: mol_type = other DNA
aagaaaggcaagggccctcctt

SEQ ID NO: 62008 - DNA, 22 bp, synthetic construct
  misc_feature 1..22: note = chemically synthesized
  source 1..22: mol_type = other DNA
cttccctccctcccttcccttc

SEQ ID NO: 62009 - DNA, 22 bp, synthetic construct
  misc_feature 1..22: note = chemically synthesized
  source 1..22: mol_type = other DNA
ccctccctcccttcccttccct

SEQ ID NO: 62010 - DNA, 22 bp, synthetic construct
  misc_feature 1..22: note = chemically synthesized
  source 1..22: mol_type = other DNA
cctccctcccttcccttccctt

SEQ ID NO: 62011 - DNA, 22 bp, synthetic construct
  misc_feature 1..22: note = chemically synthesized
  source 1..22: mol_type = other DNA
cctcccttcccttcccttccct

SEQ ID NO: 62012 - DNA, 22 bp, synthetic construct
  misc_feature 1..22: note = chemically synthesized
  source 1..22: mol_type = other DNA
ccttcccttcccttcccttccc

SEQ ID NO: 62013 - DNA, 22 bp, synthetic construct
  misc_feature 1..22: note = chemically synthesized
  source 1..22: mol_type = other DNA
cccttcccttcccttcccttcc

SEQ ID NO: 62014 - DNA, 22 bp, synthetic construct
  misc_feature 1..22: note = chemically synthesized
  source 1..22: mol_type = other DNA
ccttcccttcccttcccttccc

SEQ ID NO: 62015 - DNA, 22 bp, synthetic construct
  misc_feature 1..22: note = chemically synthesized
  source 1..22: mol_type = other DNA
cccttcccttcccttcccttcc

SEQ ID NO: 62016 - DNA, 22 bp, synthetic construct
  misc_feature 1..22: note = chemically synthesized
  source 1..22: mol_type = other DNA
ccttcccttcccttcccttccc

SEQ ID NO: 62017 - DNA, 22 bp, synthetic construct
  misc_feature 1..22: note = chemically synthesized
  source 1..22: mol_type = other DNA
cccttcccttcccttcccttcc

SEQ ID NO: 62018 - DNA, 22 bp, synthetic construct
  misc_feature 1..22: note = chemically synthesized
  source 1..22: mol_type = other DNA
ccttcccttcccttcccttccc

SEQ ID NO: 62019 - DNA, 22 bp, synthetic construct
  misc_feature 1..22: note = chemically synthesized
  source 1..22: mol_type = other DNA
cccttcccttcccttcccttcc

SEQ ID NO: 62020 - DNA, 22 bp, synthetic construct
  misc_feature 1..22: note = chemically synthesized
  source 1..22: mol_type = other DNA
ccttcccttcccttcccttccc

SEQ ID NO: 62021 - DNA, 22 bp, synthetic construct
  misc_feature 1..22: note = chemically synthesized
  source 1..22: mol_type = other DNA
cccttcccttcccttcccttcc

SEQ ID NO: 62022 - DNA, 22 bp, synthetic construct
  misc_feature 1..22: note = chemically synthesized
  source 1..22: mol_type = other DNA
ccttcccttcccttcccttccc

SEQ ID NO: 62023 - DNA, 22 bp, synthetic construct
  misc_feature 1..22: note = chemically synthesized
  source 1..22: mol_type = other DNA
cccttcccttcccttcccttcc

SEQ ID NO: 62024 - DNA, 22 bp, synthetic construct
  misc_feature 1..22: note = chemically synthesized
  source 1..22: mol_type = other DNA
ccttcccttcccttcccttccc

SEQ ID NO: 62025 - DNA, 22 bp, synthetic construct
  misc_feature 1..22: note = chemically synthesized
  source 1..22: mol_type = other DNA
cccttcccttcccttcccttcc

SEQ ID NO: 62026 - DNA, 22 bp, synthetic construct
  misc_feature 1..22: note = chemically synthesized
  source 1..22: mol_type = other DNA
ccttcccttcccttcccttccc

SEQ ID NO: 62027 - DNA, 22 bp, synthetic construct
  misc_feature 1..22: note = chemically synthesized
  source 1..22: mol_type = other DNA
cccttcccttcccttcccttcc

SEQ ID NO: 62028 - DNA, 22 bp, synthetic construct
  misc_feature 1..22: note = chemically synthesized
  source 1..22: mol_type = other DNA
ccttcccttcccttcccttccc

SEQ ID NO: 62029 - DNA, 22 bp, synthetic construct
  misc_feature 1..22: note = chemically synthesized
  source 1..22: mol_type = other DNA
cccttcccttcccttcccctcc

SEQ ID NO: 62030 - DNA, 22 bp, synthetic construct
  misc_feature 1..22: note = chemically synthesized
  source 1..22: mol_type = other DNA
ccttcccttcccttcccctccc

SEQ ID NO: 62031 - DNA, 22 bp, synthetic construct
  misc_feature 1..22: note = chemically synthesized
  source 1..22: mol_type = other DNA
cccttcccttcccctcccctcc

SEQ ID NO: 62032 - DNA, 22 bp, synthetic construct
  misc_feature 1..22: note = chemically synthesized
  source 1..22: mol_type = other DNA
ccttcccttcccctcccctccc

SEQ ID NO: 62033 - DNA, 22 bp, synthetic construct
  misc_feature 1..22: note = chemically synthesized
  source 1..22: mol_type = other DNA
cccttcccctcccctcccctcc

SEQ ID NO: 62034 - DNA, 22 bp, synthetic construct
  misc_feature 1..22: note = chemically synthesized
  source 1..22: mol_type = other DNA
ccttcccctcccctcccctccc

SEQ ID NO: 62035 - DNA, 22 bp, synthetic construct
  misc_feature 1..22: note = chemically synthesized
  source 1..22: mol_type = other DNA
cccctcccctcccctcccctcc

SEQ ID NO: 62036 - DNA, 22 bp, synthetic construct
  misc_feature 1..22: note = chemically synthesized
  source 1..22: mol_type = other DNA
ccctcccctcccctcccctccc

SEQ ID NO: 62037 - DNA, 22 bp, synthetic construct
  misc_feature 1..22: note = chemically synthesized
  source 1..22: mol_type = other DNA
ccctcccctcccctcccctccc

SEQ ID NO: 62038 - DNA, 22 bp, synthetic construct
  misc_feature 1..22: note = chemically synthesized
  source 1..22: mol_type = other DNA
ccctcccctcccctcccctccc

SEQ ID NO: 62039 - DNA, 22 bp, synthetic construct
  misc_feature 1..22: note = chemically synthesized
  source 1..22: mol_type = other DNA
ccctcccctcccctcccctccc

SEQ ID NO: 62040 - DNA, 22 bp, synthetic construct
  misc_feature 1..22: note = chemically synthesized
  source 1..22: mol_type = other DNA
ccctcccctcccctcccctccc

SEQ ID NO: 62041 - DNA, 22 bp, synthetic construct
  misc_feature 1..22: note = chemically synthesized
  source 1..22: mol_type = other DNA
ccctcccctcccctcccctccc

SEQ ID NO: 62042 - DNA, 22 bp, synthetic construct
  misc_feature 1..22: note = chemically synthesized
  source 1..22: mol_type = other DNA
ccctcccctcccctcccctccc

SEQ ID NO: 62043 - DNA, 22 bp, synthetic construct
  misc_feature 1..22: note = chemically synthesized
  source 1..22: mol_type = other DNA
ccctcccctcccctcccctccc

SEQ ID NO: 62044 - DNA, 22 bp, synthetic construct
  misc_feature 1..22: note = chemically synthesized
  source 1..22: mol_type = other DNA
ccctcccctcccctcccctccc

SEQ ID NO: 62045 - DNA, 22 bp, synthetic construct
  misc_feature 1..22: note = chemically synthesized
  source 1..22: mol_type = other DNA
ccctcccctcccctcccctccc

SEQ ID NO: 62046 - DNA, 22 bp, synthetic construct
  misc_feature 1..22: note = chemically synthesized
  source 1..22: mol_type = other DNA
ccctcccctcccctcccctccc

SEQ ID NO: 62047 - DNA, 22 bp, synthetic construct
  misc_feature 1..22: note = chemically synthesized
  source 1..22: mol_type = other DNA
ccctcccctcccctcccctccc

SEQ ID NO: 62048 - DNA, 22 bp, synthetic construct
  misc_feature 1..22: note = chemically synthesized
  source 1..22: mol_type = other DNA
ccctcccctcccctccctccct

SEQ ID NO: 62049 - DNA, 22 bp, synthetic construct
  misc_feature 1..22: note = chemically synthesized
  source 1..22: mol_type = other DNA
ccctcccctccctccctccctt

SEQ ID NO: 62050 - DNA, 22 bp, synthetic construct
  misc_feature 1..22: note = chemically synthesized
  source 1..22: mol_type = other DNA
ccctccctccctcccttccttc

SEQ ID NO: 62051 - DNA, 22 bp, synthetic construct
  misc_feature 1..22: note = chemically synthesized
  source 1..22: mol_type = other DNA
cctccctcccttccttccttcc

SEQ ID NO: 62052 - DNA, 22 bp, synthetic construct
  misc_feature 1..22: note = chemically synthesized
  source 1..22: mol_type = other DNA
cctcccttccttccttccttcc

SEQ ID NO: 62053 - DNA, 22 bp, synthetic construct
  misc_feature 1..22: note = chemically synthesized
  source 1..22: mol_type = other DNA
ccttccttccttccttccttcc

SEQ ID NO: 62054 - DNA, 22 bp, synthetic construct
  misc_feature 1..22: note = chemically synthesized
  source 1..22: mol_type = other DNA
ccttccttccttccttccttcc

SEQ ID NO: 62055 - DNA, 22 bp, synthetic construct
  misc_feature 1..22: note = chemically synthesized
  source 1..22: mol_type = other DNA
cttccttccttccttccttcct

SEQ ID NO: 62056 - DNA, 22 bp, synthetic construct
  misc_feature 1..22: note = chemically synthesized
  source 1..22: mol_type = other DNA
ccttccttccttccttcctttc

SEQ ID NO: 62057 - DNA, 22 bp, synthetic construct
  misc_feature 1..22: note = chemically synthesized
  source 1..22: mol_type = other DNA
cttccttccttccttcctttct

SEQ ID NO: 62058 - DNA, 22 bp, synthetic construct
  misc_feature 1..22: note = chemically synthesized
  source 1..22: mol_type = other DNA
ccttccttccttcctttcttcc

SEQ ID NO: 62059 - DNA, 22 bp, synthetic construct
  misc_feature 1..22: note = chemically synthesized
  source 1..22: mol_type = other DNA
cttccttccttcctttcttcct

SEQ ID NO: 62060 - DNA, 22 bp, synthetic construct
  misc_feature 1..22: note = chemically synthesized
  source 1..22: mol_type = other DNA
ccttccttcctttcttccttgt

SEQ ID NO: 62061 - DNA, 22 bp, synthetic construct
  misc_feature 1..22: note = chemically synthesized
  source 1..22: mol_type = other DNA
cttccttcctttcttccttgtc

SEQ ID NO: 62062 - DNA, 22 bp, synthetic construct
  misc_feature 1..22: note = chemically synthesized
  source 1..22: mol_type = other DNA
ccttcctttcttccttgtcttg

SEQ ID NO: 62063 - DNA, 22 bp, synthetic construct
  misc_feature 1..22: note = chemically synthesized
  source 1..22: mol_type = other DNA
cttcctttcttccttgtcttgc

SEQ ID NO: 62064 - DNA, 22 bp, synthetic construct
  misc_feature 1..22: note = chemically synthesized
  source 1..22: mol_type = other DNA
cctttcttccttgtcttgcttt

SEQ ID NO: 62065 - DNA, 22 bp, synthetic construct
  misc_feature 1..22: note = chemically synthesized
  source 1..22: mol_type = other DNA
ctttcttccttgtcttgctttg

SEQ ID NO: 62066 - DNA, 22 bp, synthetic construct
  misc_feature 1..22: note = chemically synthesized
  source 1..22: mol_type = other DNA
tcttccttgtcttgctttgcat

SEQ ID NO: 62067 - DNA, 22 bp, synthetic construct
  misc_feature 1..22: note = chemically synthesized
  source 1..22: mol_type = other DNA
cttccttgtcttgctttgcatt

SEQ ID NO: 62068 - DNA, 22 bp, synthetic construct
  misc_feature 1..22: note = chemically synthesized
  source 1..22: mol_type = other DNA
ttccttgtcttgctttgcattc

SEQ ID NO: 62069 - DNA, 22 bp, synthetic construct
  misc_feature 1..22: note = chemically synthesized
  source 1..22: mol_type = other DNA
ccttgtcttgctttgcattctg

SEQ ID NO: 62070 - DNA, 22 bp, synthetic construct
  misc_feature 1..22: note = chemically synthesized
  source 1..22: mol_type = other DNA
cttgtcttgctttgcattctgc

SEQ ID NO: 62071 - DNA, 22 bp, synthetic construct
  misc_feature 1..22: note = chemically synthesized
  source 1..22: mol_type = other DNA
gtcttgctttgcattctgcaga

SEQ ID NO: 62072 - DNA, 22 bp, synthetic construct
  misc_feature 1..22: note = chemically synthesized
  source 1..22: mol_type = other DNA
tcttgctttgcattctgcagag

SEQ ID NO: 62073 - DNA, 22 bp, synthetic construct
  misc_feature 1..22: note = chemically synthesized
  source 1..22: mol_type = other DNA
gctttgcattctgcagagctag

SEQ ID NO: 62074 - DNA, 22 bp, synthetic construct
  misc_feature 1..22: note = chemically synthesized
  source 1..22: mol_type = other DNA
ctttgcattctgcagagctaga

SEQ ID NO: 62075 - DNA, 22 bp, synthetic construct
  misc_feature 1..22: note = chemically synthesized
  source 1..22: mol_type = other DNA
tgcattctgcagagctagaaga

SEQ ID NO: 62076 - DNA, 22 bp, synthetic construct
  misc_feature 1..22: note = chemically synthesized
  source 1..22: mol_type = other DNA
gcattctgcagagctagaagag

SEQ ID NO: 62077 - DNA, 22 bp, synthetic construct
  misc_feature 1..22: note = chemically synthesized
  source 1..22: mol_type = other DNA
cattctgcagagctagaagagc

SEQ ID NO: 62078 - DNA, 22 bp, synthetic construct
  misc_feature 1..22: note = chemically synthesized
  source 1..22: mol_type = other DNA
tgcagagctagaagagcattta

SEQ ID NO: 62079 - DNA, 22 bp, synthetic construct
  misc_feature 1..22: note = chemically synthesized
  source 1..22: mol_type = other DNA
cagagctagaagagcatttaat

SEQ ID NO: 62080 - DNA, 22 bp, synthetic construct
  misc_feature 1..22: note = chemically synthesized
  source 1..22: mol_type = other DNA
gaagagcatttaatccttggcc

SEQ ID NO: 62081 - DNA, 22 bp, synthetic construct
  misc_feature 1..22: note = chemically synthesized
  source 1..22: mol_type = other DNA
aatccttggccctctgtctgtt

SEQ ID NO: 62082 - DNA, 22 bp, synthetic construct
  misc_feature 1..22: note = chemically synthesized
  source 1..22: mol_type = other DNA
atccttggccctctgtctgttg

SEQ ID NO: 62083 - DNA, 22 bp, synthetic construct
  misc_feature 1..22: note = chemically synthesized
  source 1..22: mol_type = other DNA
ggccctctgtctgttgggatat

SEQ ID NO: 62084 - DNA, 22 bp, synthetic construct
  misc_feature 1..22: note = chemically synthesized
  source 1..22: mol_type = other DNA
gccctctgtctgttgggatatt

SEQ ID NO: 62085 - DNA, 22 bp, synthetic construct
  misc_feature 1..22: note = chemically synthesized
  source 1..22: mol_type = other DNA
tgtctgttgggatattatgttt

SEQ ID NO: 62086 - DNA, 22 bp, synthetic construct
  misc_feature 1..22: note = chemically synthesized
  source 1..22: mol_type = other DNA
tctgttgggatattatgttttt

SEQ ID NO: 62087 - DNA, 22 bp, synthetic construct
  misc_feature 1..22: note = chemically synthesized
  source 1..22: mol_type = other DNA
ttgggatattatgtttttttaa

SEQ ID NO: 62088 - DNA, 22 bp, synthetic construct
  misc_feature 1..22: note = chemically synthesized
  source 1..22: mol_type = other DNA
ggatattatgtttttttaatag

SEQ ID NO: 62089 - DNA, 22 bp, synthetic construct
  misc_feature 1..22: note = chemically synthesized
  source 1..22: mol_type = other DNA
tgtttttttaatagtgcttgtt

SEQ ID NO: 62090 - DNA, 22 bp, synthetic construct
  misc_feature 1..22: note = chemically synthesized
  source 1..22: mol_type = other DNA
ttttaatagtgcttgtttatga

SEQ ID NO: 62091 - DNA, 22 bp, synthetic construct
  misc_feature 1..22: note = chemically synthesized
  source 1..22: mol_type = other DNA
tttaatagtgcttgtttatgac

SEQ ID NO: 62092 - DNA, 22 bp, synthetic construct
  misc_feature 1..22: note = chemically synthesized
  source 1..22: mol_type = other DNA
ttaatagtgcttgtttatgact

SEQ ID NO: 62093 - DNA, 22 bp, synthetic construct
  misc_feature 1..22: note = chemically synthesized
  source 1..22: mol_type = other DNA
taatagtgcttgtttatgacta

SEQ ID NO: 62094 - DNA, 22 bp, synthetic construct
  misc_feature 1..22: note = chemically synthesized
  source 1..22: mol_type = other DNA
aatagtgcttgtttatgactaa

SEQ ID NO: 62095 - DNA, 22 bp, synthetic construct
  misc_feature 1..22: note = chemically synthesized
  source 1..22: mol_type = other DNA
atagtgcttgtttatgactaag

SEQ ID NO: 62096 - DNA, 22 bp, synthetic construct
  misc_feature 1..22: note = chemically synthesized
  source 1..22: mol_type = other DNA
gtttatgactaaggtcaaagac

SEQ ID NO: 62097 - DNA, 22 bp, synthetic construct
  misc_feature 1..22: note = chemically synthesized
  source 1..22: mol_type = other DNA
tttatgactaaggtcaaagaca

SEQ ID NO: 62098 - DNA, 22 bp, synthetic construct
  misc_feature 1..22: note = chemically synthesized
  source 1..22: mol_type = other DNA
atgactaaggtcaaagacagta

SEQ ID NO: 62099 - DNA, 22 bp, synthetic construct
  misc_feature 1..22: note = chemically synthesized
  source 1..22: mol_type = other DNA
tgactaaggtcaaagacagtat

SEQ ID NO: 62100 - DNA, 22 bp, synthetic construct
  misc_feature 1..22: note = chemically synthesized
  source 1..22: mol_type = other DNA
aggtcaaagacagtatttcaga

SEQ ID NO: 62101 - DNA, 22 bp, synthetic construct
  misc_feature 1..22: note = chemically synthesized
  source 1..22: mol_type = other DNA
cagaacaaaaattagagttagt

SEQ ID NO: 62102 - DNA, 22 bp, synthetic construct
  misc_feature 1..22: note = chemically synthesized
  source 1..22: mol_type = other DNA
agaacaaaaattagagttagtt

SEQ ID NO: 62103 - DNA, 22 bp, synthetic construct
  misc_feature 1..22: note = chemically synthesized
  source 1..22: mol_type = other DNA
gagttagttcataattgagtac

SEQ ID NO: 62104 - DNA, 22 bp, synthetic construct
  misc_feature 1..22: note = chemically synthesized
  source 1..22: mol_type = other DNA
gttcataattgagtacatatgt

SEQ ID NO: 62105 - DNA, 22 bp, synthetic construct
  misc_feature 1..22: note = chemically synthesized
  source 1..22: mol_type = other DNA
ataattgagtacatatgtacgt

SEQ ID NO: 62106 - DNA, 22 bp, synthetic construct
  misc_feature 1..22: note = chemically synthesized
  source 1..22: mol_type = other DNA
agtacatatgtacgttactgtt

SEQ ID NO: 62107 - DNA, 22 bp, synthetic construct
  misc_feature 1..22: note = chemically synthesized
  source 1..22: mol_type = other DNA
ctgtttatttttatagtttgct

SEQ ID NO: 62108 - DNA, 22 bp, synthetic construct
  misc_feature 1..22: note = chemically synthesized
  source 1..22: mol_type = other DNA
tttatttttatagtttgctaat

SEQ ID NO: 62109 - DNA, 22 bp, synthetic construct
  misc_feature 1..22: note = chemically synthesized
  source 1..22: mol_type = other DNA
atttttatagtttgctaattta

SEQ ID NO: 62110 - DNA, 22 bp, synthetic construct
  misc_feature 1..22: note = chemically synthesized
  source 1..22: mol_type = other DNA
tttttatagtttgctaatttat

SEQ ID NO: 62111 - DNA, 22 bp, synthetic construct
  misc_feature 1..22: note = chemically synthesized
  source 1..22: mol_type = other DNA
ttatagtttgctaatttatttt

SEQ ID NO: 62112 - DNA, 22 bp, synthetic construct
  misc_feature 1..22: note = chemically synthesized
  source 1..22: mol_type = other DNA
tatagtttgctaatttattttt

SEQ ID NO: 62113 - DNA, 22 bp, synthetic construct
  misc_feature 1..22: note = chemically synthesized
  source 1..22: mol_type = other DNA
atagtttgctaatttattttta

SEQ ID NO: 62114 - DNA, 22 bp, synthetic construct
  misc_feature 1..22: note = chemically synthesized
  source 1..22: mol_type = other DNA
tagtttgctaatttatttttaa

SEQ ID NO: 62115 - DNA, 22 bp, synthetic construct
  misc_feature 1..22: note = chemically synthesized
  source 1..22: mol_type = other DNA
gctaatttatttttaaacagct

SEQ ID NO: 62116 - DNA, 22 bp, synthetic construct
  misc_feature 1..22: note = chemically synthesized
  source 1..22: mol_type = other DNA
ctaatttatttttaaacagctc

SEQ ID NO: 62117 - DNA, 22 bp, synthetic construct
  misc_feature 1..22: note = chemically synthesized
  source 1..22: mol_type = other DNA
atttatttttaaacagctcagt

SEQ ID NO: 62118 - DNA, 22 bp, synthetic construct
  misc_feature 1..22: note = chemically synthesized
  source 1..22: mol_type = other DNA
atttttaaacagctcagttacg

SEQ ID NO: 62119 - DNA, 22 bp, synthetic construct
  misc_feature 1..22: note = chemically synthesized
  source 1..22: mol_type = other DNA
tttttaaacagctcagttacgc

SEQ ID NO: 62120 - DNA, 22 bp, synthetic construct
  misc_feature 1..22: note = chemically synthesized
  source 1..22: mol_type = other DNA
ttaaacagctcagttacgccaa

SEQ ID NO: 62121 - DNA, 22 bp, synthetic construct
  misc_feature 1..22: note = chemically synthesized
  source 1..22: mol_type = other DNA
taaacagctcagttacgccaac

SEQ ID NO: 62122 - DNA, 22 bp, synthetic construct
  misc_feature 1..22: note = chemically synthesized
  source 1..22: mol_type = other DNA
aaacagctcagttacgccaaca

SEQ ID NO: 62123 - DNA, 22 bp, synthetic construct
  misc_feature 1..22: note = chemically synthesized
  source 1..22: mol_type = other DNA
aacagctcagttacgccaacat

SEQ ID NO: 62124 - DNA, 22 bp, synthetic construct
  misc_feature 1..22: note = chemically synthesized
  source 1..22: mol_type = other DNA
agttacgccaacatgtttatag

SEQ ID NO: 62125 - DNA, 22 bp, synthetic construct
  misc_feature 1..22: note = chemically synthesized
  source 1..22: mol_type = other DNA
cgccaacatgtttatagctctg

SEQ ID NO: 62126 - DNA, 22 bp, synthetic construct
  misc_feature 1..22: note = chemically synthesized
  source 1..22: mol_type = other DNA
atagctctgttcatcacatgcc

SEQ ID NO: 62127 - DNA, 22 bp, synthetic construct
  misc_feature 1..22: note = chemically synthesized
  source 1..22: mol_type = other DNA
tagctctgttcatcacatgcct

SEQ ID NO: 62128 - DNA, 22 bp, synthetic construct
  misc_feature 1..22: note = chemically synthesized
  source 1..22: mol_type = other DNA
tgttcatcacatgccttaccag

SEQ ID NO: 62129 - DNA, 22 bp, synthetic construct
  misc_feature 1..22: note = chemically synthesized
  source 1..22: mol_type = other DNA
ttcatcacatgccttaccagtc

SEQ ID NO: 62130 - DNA, 22 bp, synthetic construct
  misc_feature 1..22: note = chemically synthesized
  source 1..22: mol_type = other DNA
atcacatgccttaccagtcagg

SEQ ID NO: 62131 - DNA, 22 bp, synthetic construct
  misc_feature 1..22: note = chemically synthesized
  source 1..22: mol_type = other DNA
accagtcagggtgttaaaaggc

SEQ ID NO: 62132 - DNA, 22 bp, synthetic construct
  misc_feature 1..22: note = chemically synthesized
  source 1..22: mol_type = other DNA
ccagtcagggtgttaaaaggca

SEQ ID NO: 62133 - DNA, 22 bp, synthetic construct
  misc_feature 1..22: note = chemically synthesized
  source 1..22: mol_type = other DNA
aaaggcacatgcttttcaatag

SEQ ID NO: 62134 - DNA, 22 bp, synthetic construct
  misc_feature 1..22: note = chemically synthesized
  source 1..22: mol_type = other DNA
ttcaatagtttggatcccaagt

SEQ ID NO: 62135 - DNA, 22 bp, synthetic construct
  misc_feature 1..22: note = chemically synthesized
  source 1..22: mol_type = other DNA
tcaatagtttggatcccaagtt

SEQ ID NO: 62136 - DNA, 22 bp, synthetic construct
  misc_feature 1..22: note = chemically synthesized
  source 1..22: mol_type = other DNA
caatagtttggatcccaagtta

SEQ ID NO: 62137 - DNA, 22 bp, synthetic construct
  misc_feature 1..22: note = chemically synthesized
  source 1..22: mol_type = other DNA
aatagtttggatcccaagttaa

SEQ ID NO: 62138 - DNA, 22 bp, synthetic construct
  misc_feature 1..22: note = chemically synthesized
  source 1..22: mol_type = other DNA
ggatcccaagttaaattagata

SEQ ID NO: 62139 - DNA, 22 bp, synthetic construct
  misc_feature 1..22: note = chemically synthesized
  source 1..22: mol_type = other DNA
gatcccaagttaaattagataa

SEQ ID NO: 62140 - DNA, 22 bp, synthetic construct
  misc_feature 1..22: note = chemically synthesized
  source 1..22: mol_type = other DNA
aattagataatgccatcaggta

SEQ ID NO: 62141 - DNA, 22 bp, synthetic construct
  misc_feature 1..22: note = chemically synthesized
  source 1..22: mol_type = other DNA
gataatgccatcaggtagcaat

SEQ ID NO: 62142 - DNA, 22 bp, synthetic construct
  misc_feature 1..22: note = chemically synthesized
  source 1..22: mol_type = other DNA
aattacattaattgaatgttta

SEQ ID NO: 62143 - DNA, 22 bp, synthetic construct
  misc_feature 1..22: note = chemically synthesized
  source 1..22: mol_type = other DNA
attacattaattgaatgtttag

SEQ ID NO: 62144 - DNA, 22 bp, synthetic construct
  misc_feature 1..22: note = chemically synthesized
  source 1..22: mol_type = other DNA
cattaattgaatgtttaggcgg

SEQ ID NO: 62145 - DNA, 22 bp, synthetic construct
  misc_feature 1..22: note = chemically synthesized
  source 1..22: mol_type = other DNA
attgaatgtttaggcggaaagg

SEQ ID NO: 62146 - DNA, 22 bp, synthetic construct
  misc_feature 1..22: note = chemically synthesized
  source 1..22: mol_type = other DNA
aatgtttaggcggaaaggtagt

SEQ ID NO: 62147 - DNA, 22 bp, synthetic construct
  misc_feature 1..22: note = chemically synthesized
  source 1..22: mol_type = other DNA
aggcggaaaggtagttttgcag

SEQ ID NO: 62148 - DNA, 22 bp, synthetic construct
  misc_feature 1..22: note = chemically synthesized
  source 1..22: mol_type = other DNA
ggcggaaaggtagttttgcaga

SEQ ID NO: 62149 - DNA, 22 bp, synthetic construct
  misc_feature 1..22: note = chemically synthesized
  source 1..22: mol_type = other DNA
tgcagaggctataatgaaatca

SEQ ID NO: 62150 - DNA, 22 bp, synthetic construct
  misc_feature 1..22: note = chemically synthesized
  source 1..22: mol_type = other DNA
gcagaggctataatgaaatcac

SEQ ID NO: 62151 - DNA, 22 bp, synthetic construct
  misc_feature 1..22: note = chemically synthesized
  source 1..22: mol_type = other DNA
cagaggctataatgaaatcaca

SEQ ID NO: 62152 - DNA, 22 bp, synthetic construct
  misc_feature 1..22: note = chemically synthesized
  source 1..22: mol_type = other DNA
taatgaaatcacatttataagt

SEQ ID NO: 62153 - DNA, 22 bp, synthetic construct
  misc_feature 1..22: note = chemically synthesized
  source 1..22: mol_type = other DNA
ataagtacccatgtataaatct

SEQ ID NO: 62154 - DNA, 22 bp, synthetic construct
  misc_feature 1..22: note = chemically synthesized
  source 1..22: mol_type = other DNA
taagtacccatgtataaatctc

SEQ ID NO: 62155 - DNA, 22 bp, synthetic construct
  misc_feature 1..22: note = chemically synthesized
  source 1..22: mol_type = other DNA
agcattatagacattatttgag

SEQ ID NO: 62156 - DNA, 22 bp, synthetic construct
  misc_feature 1..22: note = chemically synthesized
  source 1..22: mol_type = other DNA
tagacattatttgaggttgctg

SEQ ID NO: 62157 - DNA, 22 bp, synthetic construct
  misc_feature 1..22: note = chemically synthesized
  source 1..22: mol_type = other DNA
tttgaggttgctgacagaaaaa

SEQ ID NO: 62158 - DNA, 22 bp, synthetic construct
  misc_feature 1..22: note = chemically synthesized
  source 1..22: mol_type = other DNA
gaggttgctgacagaaaaatgg

SEQ ID NO: 62159 - DNA, 22 bp, synthetic construct
  misc_feature 1..22: note = chemically synthesized
  source 1..22: mol_type = other DNA
aggttgctgacagaaaaatgga

SEQ ID NO: 62160 - DNA, 22 bp, synthetic construct
  misc_feature 1..22: note = chemically synthesized
  source 1..22: mol_type = other DNA
ctgacagaaaaatggatatata

SEQ ID NO: 62161 - DNA, 22 bp, synthetic construct
  misc_feature 1..22: note = chemically synthesized
  source 1..22: mol_type = other DNA
acagaaaaatggatatatatca

SEQ ID NO: 62162 - DNA, 22 bp, synthetic construct
  misc_feature 1..22: note = chemically synthesized
  source 1..22: mol_type = other DNA
aggaggaaacatgcggggggct

SEQ ID NO: 62163 - DNA, 22 bp, synthetic construct
  misc_feature 1..22: note = chemically synthesized
  source 1..22: mol_type = other DNA
ggaggaaacatgcggggggctg

SEQ ID NO: 62164 - DNA, 22 bp, synthetic construct
  misc_feature 1..22: note = chemically synthesized
  source 1..22: mol_type = other DNA
tcatcagtggtaaatgctgcct

SEQ ID NO: 62165 - DNA, 22 bp, synthetic construct
  misc_feature 1..22: note = chemically synthesized
  source 1..22: mol_type = other DNA
ccttcgccatttaggagactgc

SEQ ID NO: 62166 - DNA, 22 bp, synthetic construct
  misc_feature 1..22: note = chemically synthesized
  source 1..22: mol_type = other DNA
cgccatttaggagactgctggg

SEQ ID NO: 62167 - DNA, 22 bp, synthetic construct
  misc_feature 1..22: note = chemically synthesized
  source 1..22: mol_type = other DNA
gccatttaggagactgctgggc

SEQ ID NO: 62168 - DNA, 22 bp, synthetic construct
  misc_feature 1..22: note = chemically synthesized
  source 1..22: mol_type = other DNA
aggagactgctgggcacggtcg

SEQ ID NO: 62169 - DNA, 22 bp, synthetic construct
  misc_feature 1..22: note = chemically synthesized
  source 1..22: mol_type = other DNA
ggagactgctgggcacggtcgt

SEQ ID NO: 62170 - DNA, 22 bp, synthetic construct
  misc_feature 1..22: note = chemically synthesized
  source 1..22: mol_type = other DNA
ctgggcacggtcgttttcttag

SEQ ID NO: 62171 - DNA, 22 bp, synthetic construct
  misc_feature 1..22: note = chemically synthesized
  source 1..22: mol_type = other DNA
ggcacggtcgttttcttagtga

SEQ ID NO: 62172 - DNA, 22 bp, synthetic construct
  misc_feature 1..22: note = chemically synthesized
  source 1..22: mol_type = other DNA
tcttagtgagctgcctttatca

SEQ ID NO: 62173 - DNA, 22 bp, synthetic construct
  misc_feature 1..22: note = chemically synthesized
  source 1..22: mol_type = other DNA
cttagtgagctgcctttatcat

SEQ ID NO: 62174 - DNA, 22 bp, synthetic construct
  misc_feature 1..22: note = chemically synthesized
  source 1..22: mol_type = other DNA
ttagtgagctgcctttatcatt

SEQ ID NO: 62175 - DNA, 22 bp, synthetic construct
  misc_feature 1..22: note = chemically synthesized
  source 1..22: mol_type = other DNA
agtgagctgcctttatcattag

SEQ ID NO: 62176 - DNA, 22 bp, synthetic construct
  misc_feature 1..22: note = chemically synthesized
  source 1..22: mol_type = other DNA
gtgagctgcctttatcattagc

SEQ ID NO: 62177 - DNA, 22 bp, synthetic construct
  misc_feature 1..22: note = chemically synthesized
  source 1..22: mol_type = other DNA
cctttatcattagccctctaag

SEQ ID NO: 62178 - DNA, 22 bp, synthetic construct
  misc_feature 1..22: note = chemically synthesized
  source 1..22: mol_type = other DNA
tatcattagccctctaagcagc

SEQ ID NO: 62179 - DNA, 22 bp, synthetic construct
  misc_feature 1..22: note = chemically synthesized
  source 1..22: mol_type = other DNA
atcattagccctctaagcagcc

SEQ ID NO: 62180 - DNA, 22 bp, synthetic construct
  misc_feature 1..22: note = chemically synthesized
  source 1..22: mol_type = other DNA
tcattagccctctaagcagcca

SEQ ID NO: 62181 - DNA, 22 bp, synthetic construct
  misc_feature 1..22: note = chemically synthesized
  source 1..22: mol_type = other DNA
gccctctaagcagccatgcaca

SEQ ID NO: 62182 - DNA, 22 bp, synthetic construct
  misc_feature 1..22: note = chemically synthesized
  source 1..22: mol_type = other DNA
taagcagccatgcacaaaggca

SEQ ID NO: 62183 - DNA, 22 bp, synthetic construct
  misc_feature 1..22: note = chemically synthesized
  source 1..22: mol_type = other DNA
agcagccatgcacaaaggcacg

SEQ ID NO: 62184 - DNA, 22 bp, synthetic construct
  misc_feature 1..22: note = chemically synthesized
  source 1..22: mol_type = other DNA
tgttttgtatagccagggcttt

SEQ ID NO: 62185 - DNA, 22 bp, synthetic construct
  misc_feature 1..22: note = chemically synthesized
  source 1..22: mol_type = other DNA
tgtatagccagggctttcctgg

SEQ ID NO: 62186 - DNA, 22 bp, synthetic construct
  misc_feature 1..22: note = chemically synthesized
  source 1..22: mol_type = other DNA
gtatagccagggctttcctgga

SEQ ID NO: 62187 - DNA, 22 bp, synthetic construct
  misc_feature 1..22: note = chemically synthesized
  source 1..22: mol_type = other DNA
tatagccagggctttcctggac

SEQ ID NO: 62188 - DNA, 22 bp, synthetic construct
  misc_feature 1..22: note = chemically synthesized
  source 1..22: mol_type = other DNA
tcctggactcagcatgccagct

SEQ ID NO: 62189 - DNA, 22 bp, synthetic construct
  misc_feature 1..22: note = chemically synthesized
  source 1..22: mol_type = other DNA
cctggactcagcatgccagctg

SEQ ID NO: 62190 - DNA, 22 bp, synthetic construct
  misc_feature 1..22: note = chemically synthesized
  source 1..22: mol_type = other DNA
ctggactcagcatgccagctgg

SEQ ID NO: 62191 - DNA, 22 bp, synthetic construct
  misc_feature 1..22: note = chemically synthesized
  source 1..22: mol_type = other DNA
gactcagcatgccagctggggc

SEQ ID NO: 62192 - DNA, 22 bp, synthetic construct
  misc_feature 1..22: note = chemically synthesized
  source 1..22: mol_type = other DNA
agcatgccagctggggccggct

SEQ ID NO: 62193 - DNA, 22 bp, synthetic construct
  misc_feature 1..22: note = chemically synthesized
  source 1..22: mol_type = other DNA
gggccggctcactgaggctgga

SEQ ID NO: 62194 - DNA, 22 bp, synthetic construct
  misc_feature 1..22: note = chemically synthesized
  source 1..22: mol_type = other DNA
actgaggctggaaaaatgagat

SEQ ID NO: 62195 - DNA, 22 bp, synthetic construct
  misc_feature 1..22: note = chemically synthesized
  source 1..22: mol_type = other DNA
aggctggaaaaatgagatacag

SEQ ID NO: 62196 - DNA, 22 bp, synthetic construct
  misc_feature 1..22: note = chemically synthesized
  source 1..22: mol_type = other DNA
gaaaaatgagatacagtctagt

SEQ ID NO: 62197 - DNA, 22 bp, synthetic construct
  misc_feature 1..22: note = chemically synthesized
  source 1..22: mol_type = other DNA
gtgaggtctttgtcaccttgga

SEQ ID NO: 62198 - DNA, 22 bp, synthetic construct
  misc_feature 1..22: note = chemically synthesized
  source 1..22: mol_type = other DNA
tgtcaccttggagggtctgagg

SEQ ID NO: 62199 - DNA, 22 bp, synthetic construct
  misc_feature 1..22: note = chemically synthesized
  source 1..22: mol_type = other DNA
gtcaccttggagggtctgagga

SEQ ID NO: 62200 - DNA, 22 bp, synthetic construct
  misc_feature 1..22: note = chemically synthesized
  source 1..22: mol_type = other DNA
tcaccttggagggtctgaggac

SEQ ID NO: 62201 - DNA, 22 bp, synthetic construct
  misc_feature 1..22: note = chemically synthesized
  source 1..22: mol_type = other DNA
ggagggtctgaggactggtgcg

SEQ ID NO: 62202 - DNA, 22 bp, synthetic construct
  misc_feature 1..22: note = chemically synthesized
  source 1..22: mol_type = other DNA
gagggtctgaggactggtgcgc

SEQ ID NO: 62203 - DNA, 22 bp, synthetic construct
  misc_feature 1..22: note = chemically synthesized
  source 1..22: mol_type = other DNA
aggactggtgcgctcgggttga

SEQ ID NO: 62204 - DNA, 22 bp, synthetic construct
  misc_feature 1..22: note = chemically synthesized
  source 1..22: mol_type = other DNA
gtgcgctcgggttgacccatgt

SEQ ID NO: 62205 - DNA, 22 bp, synthetic construct
  misc_feature 1..22: note = chemically synthesized
  source 1..22: mol_type = other DNA
gggttgacccatgtggcgtcct

SEQ ID NO: 62206 - DNA, 22 bp, synthetic construct
  misc_feature 1..22: note = chemically synthesized
  source 1..22: mol_type = other DNA
acccatgtggcgtcctgagcca

SEQ ID NO: 62207 - DNA, 22 bp, synthetic construct
  misc_feature 1..22: note = chemically synthesized
  source 1..22: mol_type = other DNA
agccagctctgtcctggatctg

SEQ ID NO: 62208 - DNA, 22 bp, synthetic construct
  misc_feature 1..22: note = chemically synthesized
  source 1..22: mol_type = other DNA
tgtcctggatctgaggaacact

SEQ ID NO: 62209 - DNA, 22 bp, synthetic construct
  misc_feature 1..22: note = chemically synthesized
  source 1..22: mol_type = other DNA
tcctggatctgaggaacactgt

SEQ ID NO: 62210 - DNA, 22 bp, synthetic construct
  misc_feature 1..22: note = chemically synthesized
  source 1..22: mol_type = other DNA
gatctgaggaacactgtctgaa

SEQ ID NO: 62211 - DNA, 22 bp, synthetic construct
  misc_feature 1..22: note = chemically synthesized
  source 1..22: mol_type = other DNA
aggaacactgtctgaagttttc

SEQ ID NO: 62212 - DNA, 22 bp, synthetic construct
  misc_feature 1..22: note = chemically synthesized
  source 1..22: mol_type = other DNA
tctgaagttttccaggggtttg

SEQ ID NO: 62213 - DNA, 22 bp, synthetic construct
  misc_feature 1..22: note = chemically synthesized
  source 1..22: mol_type = other DNA
aagttttccaggggtttgacag

SEQ ID NO: 62214 - DNA, 22 bp, synthetic construct
  misc_feature 1..22: note = chemically synthesized
  source 1..22: mol_type = other DNA
tccaggggtttgacagaccaga

SEQ ID NO: 62215 - DNA, 22 bp, synthetic construct
  misc_feature 1..22: note = chemically synthesized
  source 1..22: mol_type = other DNA
ccaggggtttgacagaccagaa

SEQ ID NO: 62216 - DNA, 22 bp, synthetic construct
  misc_feature 1..22: note = chemically synthesized
  source 1..22: mol_type = other DNA
caggggtttgacagaccagaat

SEQ ID NO: 62217 - DNA, 22 bp, synthetic construct
  misc_feature 1..22: note = chemically synthesized
  source 1..22: mol_type = other DNA
gacagaccagaatgggggccgc

SEQ ID NO: 62218 - DNA, 22 bp, synthetic construct
  misc_feature 1..22: note = chemically synthesized
  source 1..22: mol_type = other DNA
acagaccagaatgggggccgct

SEQ ID NO: 62219 - DNA, 22 bp, synthetic construct
  misc_feature 1..22: note = chemically synthesized
  source 1..22: mol_type = other DNA
gcagggcctggtggcattagat

SEQ ID NO: 62220 - DNA, 22 bp, synthetic construct
  misc_feature 1..22: note = chemically synthesized
  source 1..22: mol_type = other DNA
gtggcattagatgtggcaagtc

SEQ ID NO: 62221 - DNA, 22 bp, synthetic construct
  misc_feature 1..22: note = chemically synthesized
  source 1..22: mol_type = other DNA
gatgtggcaagtcagaccacag

SEQ ID NO: 62222 - DNA, 22 bp, synthetic construct
  misc_feature 1..22: note = chemically synthesized
  source 1..22: mol_type = other DNA
gcctgtgaaggtgactcttcct

SEQ ID NO: 62223 - DNA, 22 bp, synthetic construct
  misc_feature 1..22: note = chemically synthesized
  source 1..22: mol_type = other DNA
tgaaggtgactcttcctctgat

SEQ ID NO: 62224 - DNA, 22 bp, synthetic construct
  misc_feature 1..22: note = chemically synthesized
  source 1..22: mol_type = other DNA
ttcctctgatgcagagagaatt

SEQ ID NO: 62225 - DNA, 22 bp, synthetic construct
  misc_feature 1..22: note = chemically synthesized
  source 1..22: mol_type = other DNA
cctctgatgcagagagaattaa

SEQ ID NO: 62226 - DNA, 22 bp, synthetic construct
  misc_feature 1..22: note = chemically synthesized
  source 1..22: mol_type = other DNA
ctctgatgcagagagaattaaa

SEQ ID NO: 62227 - DNA, 22 bp, synthetic construct
  misc_feature 1..22: note = chemically synthesized
  source 1..22: mol_type = other DNA
tgatgcagagagaattaaatga

SEQ ID NO: 62228 - DNA, 22 bp, synthetic construct
  misc_feature 1..22: note = chemically synthesized
  source 1..22: mol_type = other DNA
atgcagagagaattaaatgagg

SEQ ID NO: 62229 - DNA, 22 bp, synthetic construct
  misc_feature 1..22: note = chemically synthesized
  source 1..22: mol_type = other DNA
aatgaggaggccagagccctag

SEQ ID NO: 62230 - DNA, 22 bp, synthetic construct
  misc_feature 1..22: note = chemically synthesized
  source 1..22: mol_type = other DNA
gctgctgcctcccctccatgcc

SEQ ID NO: 62231 - DNA, 22 bp, synthetic construct
  misc_feature 1..22: note = chemically synthesized
  source 1..22: mol_type = other DNA
ctgcctcccctccatgccctca

SEQ ID NO: 62232 - DNA, 22 bp, synthetic construct
  misc_feature 1..22: note = chemically synthesized
  source 1..22: mol_type = other DNA
cctcccctccatgccctcagag

SEQ ID NO: 62233 - DNA, 22 bp, synthetic construct
  misc_feature 1..22: note = chemically synthesized
  source 1..22: mol_type = other DNA
ccctccatgccctcagagaaag

SEQ ID NO: 62234 - DNA, 22 bp, synthetic construct
  misc_feature 1..22: note = chemically synthesized
  source 1..22: mol_type = other DNA
catgccctcagagaaagtggga

SEQ ID NO: 62235 - DNA, 22 bp, synthetic construct
  misc_feature 1..22: note = chemically synthesized
  source 1..22: mol_type = other DNA
agagaaagtgggagtgctggca

SEQ ID NO: 62236 - DNA, 22 bp, synthetic construct
  misc_feature 1..22: note = chemically synthesized
  source 1..22: mol_type = other DNA
gcatttggctaacaggacaggc

SEQ ID NO: 62237 - DNA, 22 bp, synthetic construct
  misc_feature 1..22: note = chemically synthesized
  source 1..22: mol_type = other DNA
ggctaacaggacaggctatttt

SEQ ID NO: 62238 - DNA, 22 bp, synthetic construct
  misc_feature 1..22: note = chemically synthesized
  source 1..22: mol_type = other DNA
gctaacaggacaggctattttg

SEQ ID NO: 62239 - DNA, 22 bp, synthetic construct
  misc_feature 1..22: note = chemically synthesized
  source 1..22: mol_type = other DNA
acaggacaggctattttgggcc

SEQ ID NO: 62240 - DNA, 22 bp, synthetic construct
  misc_feature 1..22: note = chemically synthesized
  source 1..22: mol_type = other DNA
ttttgggcccaggtgttctttc

SEQ ID NO: 62241 - DNA, 22 bp, synthetic construct
  misc_feature 1..22: note = chemically synthesized
  source 1..22: mol_type = other DNA
tgggcccaggtgttctttctga

SEQ ID NO: 62242 - DNA, 22 bp, synthetic construct
  misc_feature 1..22: note = chemically synthesized
  source 1..22: mol_type = other DNA
gggcccaggtgttctttctgac

SEQ ID NO: 62243 - DNA, 22 bp, synthetic construct
  misc_feature 1..22: note = chemically synthesized
  source 1..22: mol_type = other DNA
ggcccaggtgttctttctgacc

SEQ ID NO: 62244 - DNA, 22 bp, synthetic construct
  misc_feature 1..22: note = chemically synthesized
  source 1..22: mol_type = other DNA
tttctgacctctctgtgatttc

SEQ ID NO: 62245 - DNA, 22 bp, synthetic construct
  misc_feature 1..22: note = chemically synthesized
  source 1..22: mol_type = other DNA
tctgacctctctgtgatttcta

SEQ ID NO: 62246 - DNA, 22 bp, synthetic construct
  misc_feature 1..22: note = chemically synthesized
  source 1..22: mol_type = other DNA
ctgacctctctgtgatttctat

SEQ ID NO: 62247 - DNA, 22 bp, synthetic construct
  misc_feature 1..22: note = chemically synthesized
  source 1..22: mol_type = other DNA
tgacctctctgtgatttctatg

SEQ ID NO: 62248 - DNA, 22 bp, synthetic construct
  misc_feature 1..22: note = chemically synthesized
  source 1..22: mol_type = other DNA
acctctctgtgatttctatggt

SEQ ID NO: 62249 - DNA, 22 bp, synthetic construct
  misc_feature 1..22: note = chemically synthesized
  source 1..22: mol_type = other DNA
tctgtgatttctatggtgggtg

SEQ ID NO: 62250 - DNA, 22 bp, synthetic construct
  misc_feature 1..22: note = chemically synthesized
  source 1..22: mol_type = other DNA
tgtgatttctatggtgggtgtc

SEQ ID NO: 62251 - DNA, 22 bp, synthetic construct
  misc_feature 1..22: note = chemically synthesized
  source 1..22: mol_type = other DNA
tgatttctatggtgggtgtcaa

SEQ ID NO: 62252 - DNA, 22 bp, synthetic construct
  misc_feature 1..22: note = chemically synthesized
  source 1..22: mol_type = other DNA
ctatggtgggtgtcaaaggatg

SEQ ID NO: 62253 - DNA, 22 bp, synthetic construct
  misc_feature 1..22: note = chemically synthesized
  source 1..22: mol_type = other DNA
tatggtgggtgtcaaaggatgg

SEQ ID NO: 62254 - DNA, 22 bp, synthetic construct
  misc_feature 1..22: note = chemically synthesized
  source 1..22: mol_type = other DNA
tggtgggtgtcaaaggatggct

SEQ ID NO: 62255 - DNA, 22 bp, synthetic construct
  misc_feature 1..22: note = chemically synthesized
  source 1..22: mol_type = other DNA
ggaaaggggatttttaggtgtg

SEQ ID NO: 62256 - DNA, 22 bp, synthetic construct
  misc_feature 1..22: note = chemically synthesized
  source 1..22: mol_type = other DNA
ttaggtgtgctaacatcccttg

SEQ ID NO: 62257 - DNA, 22 bp, synthetic construct
  misc_feature 1..22: note = chemically synthesized
  source 1..22: mol_type = other DNA
taggtgtgctaacatcccttgc

SEQ ID NO: 62258 - DNA, 22 bp, synthetic construct
  misc_feature 1..22: note = chemically synthesized
  source 1..22: mol_type = other DNA
aggtgtgctaacatcccttgcc

SEQ ID NO: 62259 - DNA, 22 bp, synthetic construct
  misc_feature 1..22: note = chemically synthesized
  source 1..22: mol_type = other DNA
ggtgtgctaacatcccttgcct

SEQ ID NO: 62260 - DNA, 22 bp, synthetic construct
  misc_feature 1..22: note = chemically synthesized
  source 1..22: mol_type = other DNA
acatcccttgcctatgagtgat

SEQ ID NO: 62261 - DNA, 22 bp, synthetic construct
  misc_feature 1..22: note = chemically synthesized
  source 1..22: mol_type = other DNA
gcctatgagtgattcactatct

SEQ ID NO: 62262 - DNA, 22 bp, synthetic construct
  misc_feature 1..22: note = chemically synthesized
  source 1..22: mol_type = other DNA
cctatgagtgattcactatctt

SEQ ID NO: 62263 - DNA, 22 bp, synthetic construct
  misc_feature 1..22: note = chemically synthesized
  source 1..22: mol_type = other DNA
tgagtgattcactatcttctcg

SEQ ID NO: 62264 - DNA, 22 bp, synthetic construct
  misc_feature 1..22: note = chemically synthesized
  source 1..22: mol_type = other DNA
actatcttctcgcaccatctgg

SEQ ID NO: 62265 - DNA, 22 bp, synthetic construct
  misc_feature 1..22: note = chemically synthesized
  source 1..22: mol_type = other DNA
tcttctcgcaccatctggtttc

SEQ ID NO: 62266 - DNA, 22 bp, synthetic construct
  misc_feature 1..22: note = chemically synthesized
  source 1..22: mol_type = other DNA
ctcgcaccatctggtttcaccc

SEQ ID NO: 62267 - DNA, 22 bp, synthetic construct
  misc_feature 1..22: note = chemically synthesized
  source 1..22: mol_type = other DNA
tcgcaccatctggtttcacccg

SEQ ID NO: 62268 - DNA, 22 bp, synthetic construct
  misc_feature 1..22: note = chemically synthesized
  source 1..22: mol_type = other DNA
gcaccatctggtttcacccggg

SEQ ID NO: 62269 - DNA, 22 bp, synthetic construct
  misc_feature 1..22: note = chemically synthesized
  source 1..22: mol_type = other DNA
gtttcacccgggctgcaaagcc

SEQ ID NO: 62270 - DNA, 22 bp, synthetic construct
  misc_feature 1..22: note = chemically synthesized
  source 1..22: mol_type = other DNA
cacccgggctgcaaagcctagt

SEQ ID NO: 62271 - DNA, 22 bp, synthetic construct
  misc_feature 1..22: note = chemically synthesized
  source 1..22: mol_type = other DNA
acccgggctgcaaagcctagtg

SEQ ID NO: 62272 - DNA, 22 bp, synthetic construct
  misc_feature 1..22: note = chemically synthesized
  source 1..22: mol_type = other DNA
caaagcctagtgtggtgtccca

SEQ ID NO: 62273 - DNA, 22 bp, synthetic construct
  misc_feature 1..22: note = chemically synthesized
  source 1..22: mol_type = other DNA
gtgtggtgtcccataccctgca

SEQ ID NO: 62274 - DNA, 22 bp, synthetic construct
  misc_feature 1..22: note = chemically synthesized
  source 1..22: mol_type = other DNA
caaagccctatttgggttattt

SEQ ID NO: 62275 - DNA, 22 bp, synthetic construct
  misc_feature 1..22: note = chemically synthesized
  source 1..22: mol_type = other DNA
tttgggttatttaccaaatgcc

SEQ ID NO: 62276 - DNA, 22 bp, synthetic construct
  misc_feature 1..22: note = chemically synthesized
  source 1..22: mol_type = other DNA
gggttatttaccaaatgccacc

SEQ ID NO: 62277 - DNA, 22 bp, synthetic construct
  misc_feature 1..22: note = chemically synthesized
  source 1..22: mol_type = other DNA
ggttatttaccaaatgccacca

SEQ ID NO: 62278 - DNA, 22 bp, synthetic construct
  misc_feature 1..22: note = chemically synthesized
  source 1..22: mol_type = other DNA
tttaccaaatgccaccatgcca

SEQ ID NO: 62279 - DNA, 22 bp, synthetic construct
  misc_feature 1..22: note = chemically synthesized
  source 1..22: mol_type = other DNA
accaaatgccaccatgccatct

SEQ ID NO: 62280 - DNA, 22 bp, synthetic construct
  misc_feature 1..22: note = chemically synthesized
  source 1..22: mol_type = other DNA
ccaaatgccaccatgccatctc

SEQ ID NO: 62281 - DNA, 22 bp, synthetic construct
  misc_feature 1..22: note = chemically synthesized
  source 1..22: mol_type = other DNA
cacagcatctggcagacgaacc

SEQ ID NO: 62282 - DNA, 22 bp, synthetic construct
  misc_feature 1..22: note = chemically synthesized
  source 1..22: mol_type = other DNA
gcagacgaaccaggtggggctg

SEQ ID NO: 62283 - DNA, 22 bp, synthetic construct
  misc_feature 1..22: note = chemically synthesized
  source 1..22: mol_type = other DNA
ctattgcttctgggtatttacg

SEQ ID NO: 62284 - DNA, 22 bp, synthetic construct
  misc_feature 1..22: note = chemically synthesized
  source 1..22: mol_type = other DNA
ttgcttctgggtatttacggga

SEQ ID NO: 62285 - DNA, 22 bp, synthetic construct
  misc_feature 1..22: note = chemically synthesized
  source 1..22: mol_type = other DNA
cttctgggtatttacgggatgc

SEQ ID NO: 62286 - DNA, 22 bp, synthetic construct
  misc_feature 1..22: note = chemically synthesized
  source 1..22: mol_type = other DNA
ctgggtatttacgggatgcaga

SEQ ID NO: 62287 - DNA, 22 bp, synthetic construct
  misc_feature 1..22: note = chemically synthesized
  source 1..22: mol_type = other DNA
tgggtatttacgggatgcagat

SEQ ID NO: 62288 - DNA, 22 bp, synthetic construct
  misc_feature 1..22: note = chemically synthesized
  source 1..22: mol_type = other DNA
ggtatttacgggatgcagattt

SEQ ID NO: 62289 - DNA, 22 bp, synthetic construct
  misc_feature 1..22: note = chemically synthesized
  source 1..22: mol_type = other DNA
acgggatgcagatttttctgcc

SEQ ID NO: 62290 - DNA, 22 bp, synthetic construct
  misc_feature 1..22: note = chemically synthesized
  source 1..22: mol_type = other DNA
cgggatgcagatttttctgccc

SEQ ID NO: 62291 - DNA, 22 bp, synthetic construct
  misc_feature 1..22: note = chemically synthesized
  source 1..22: mol_type = other DNA
ttctgcccaccgttgttttggg

SEQ ID NO: 62292 - DNA, 22 bp, synthetic construct
  misc_feature 1..22: note = chemically synthesized
  source 1..22: mol_type = other DNA
tctgcccaccgttgttttggga

SEQ ID NO: 62293 - DNA, 22 bp, synthetic construct
  misc_feature 1..22: note = chemically synthesized
  source 1..22: mol_type = other DNA
ctgcccaccgttgttttgggag

SEQ ID NO: 62294 - DNA, 22 bp, synthetic construct
  misc_feature 1..22: note = chemically synthesized
  source 1..22: mol_type = other DNA
tgcccaccgttgttttgggagg

SEQ ID NO: 62295 - DNA, 22 bp, synthetic construct
  misc_feature 1..22: note = chemically synthesized
  source 1..22: mol_type = other DNA
cccaccgttgttttgggaggga

SEQ ID NO: 62296 - DNA, 22 bp, synthetic construct
  misc_feature 1..22: note = chemically synthesized
  source 1..22: mol_type = other DNA
ttttgggagggatttccccctc

SEQ ID NO: 62297 - DNA, 22 bp, synthetic construct
  misc_feature 1..22: note = chemically synthesized
  source 1..22: mol_type = other DNA
tgggagggatttccccctccct

SEQ ID NO: 62298 - DNA, 22 bp, synthetic construct
  misc_feature 1..22: note = chemically synthesized
  source 1..22: mol_type = other DNA
gggagggatttccccctccctc

SEQ ID NO: 62299 - DNA, 22 bp, synthetic construct
  misc_feature 1..22: note = chemically synthesized
  source 1..22: mol_type = other DNA
ggagggatttccccctccctca

SEQ ID NO: 62300 - DNA, 22 bp, synthetic construct
  misc_feature 1..22: note = chemically synthesized
  source 1..22: mol_type = other DNA
ccccctccctcaggtagagttg

SEQ ID NO: 62301 - DNA, 22 bp, synthetic construct
  misc_feature 1..22: note = chemically synthesized
  source 1..22: mol_type = other DNA
cccctccctcaggtagagttgt

SEQ ID NO: 62302 - DNA, 22 bp, synthetic construct
  misc_feature 1..22: note = chemically synthesized
  source 1..22: mol_type = other DNA
cctcaggtagagttgttctcag

SEQ ID NO: 62303 - DNA, 22 bp, synthetic construct
  misc_feature 1..22: note = chemically synthesized
  source 1..22: mol_type = other DNA
aggtagagttgttctcagagat

SEQ ID NO: 62304 - DNA, 22 bp, synthetic construct
  misc_feature 1..22: note = chemically synthesized
  source 1..22: mol_type = other DNA
ttctcagagatatctgtaattg

SEQ ID NO: 62305 - DNA, 22 bp, synthetic construct
  misc_feature 1..22: note = chemically synthesized
  source 1..22: mol_type = other DNA
tcagagatatctgtaattggcc

SEQ ID NO: 62306 - DNA, 22 bp, synthetic construct
  misc_feature 1..22: note = chemically synthesized
  source 1..22: mol_type = other DNA
agagatatctgtaattggccct

SEQ ID NO: 62307 - DNA, 22 bp, synthetic construct
  misc_feature 1..22: note = chemically synthesized
  source 1..22: mol_type = other DNA
taattggcccttcccatttaag

SEQ ID NO: 62308 - DNA, 22 bp, synthetic construct
  misc_feature 1..22: note = chemically synthesized
  source 1..22: mol_type = other DNA
gcccttcccatttaagagtcag

SEQ ID NO: 62309 - DNA, 22 bp, synthetic construct
  misc_feature 1..22: note = chemically synthesized
  source 1..22: mol_type = other DNA
cccatttaagagtcagccacga

SEQ ID NO: 62310 - DNA, 22 bp, synthetic construct
  misc_feature 1..22: note = chemically synthesized
  source 1..22: mol_type = other DNA
ccatttaagagtcagccacgaa

SEQ ID NO: 62311 - DNA, 22 bp, synthetic construct
  misc_feature 1..22: note = chemically synthesized
  source 1..22: mol_type = other DNA
aagagtcagccacgaatgattt

SEQ ID NO: 62312 - DNA, 22 bp, synthetic construct
  misc_feature 1..22: note = chemically synthesized
  source 1..22: mol_type = other DNA
agagtcagccacgaatgattta

SEQ ID NO: 62313 - DNA, 22 bp, synthetic construct
  misc_feature 1..22: note = chemically synthesized
  source 1..22: mol_type = other DNA
attctaaaatgatagacccagg

SEQ ID NO: 62314 - DNA, 22 bp, synthetic construct
  misc_feature 1..22: note = chemically synthesized
  source 1..22: mol_type = other DNA
ttctaaaatgatagacccaggt

SEQ ID NO: 62315 - DNA, 22 bp, synthetic construct
  misc_feature 1..22: note = chemically synthesized
  source 1..22: mol_type = other DNA
taaaatgatagacccaggtaga

SEQ ID NO: 62316 - DNA, 22 bp, synthetic construct
  misc_feature 1..22: note = chemically synthesized
  source 1..22: mol_type = other DNA
aaatgatagacccaggtagaga

SEQ ID NO: 62317 - DNA, 22 bp, synthetic construct
  misc_feature 1..22: note = chemically synthesized
  source 1..22: mol_type = other DNA
cccaccctccgtcacagagtgg

SEQ ID NO: 62318 - DNA, 22 bp, synthetic construct
  misc_feature 1..22: note = chemically synthesized
  source 1..22: mol_type = other DNA
cgtcacagagtggccagctgtg

SEQ ID NO: 62319 - DNA, 22 bp, synthetic construct
  misc_feature 1..22: note = chemically synthesized
  source 1..22: mol_type = other DNA
tgtcccctgcttccgggaggtg

SEQ ID NO: 62320 - DNA, 22 bp, synthetic construct
  misc_feature 1..22: note = chemically synthesized
  source 1..22: mol_type = other DNA
cttccgggaggtgggaatgcat

SEQ ID NO: 62321 - DNA, 22 bp, synthetic construct
  misc_feature 1..22: note = chemically synthesized
  source 1..22: mol_type = other DNA
ccgggaggtgggaatgcatgtg

SEQ ID NO: 62322 - DNA, 22 bp, synthetic construct
  misc_feature 1..22: note = chemically synthesized
  source 1..22: mol_type = other DNA
cgggaggtgggaatgcatgtgg

SEQ ID NO: 62323 - DNA, 22 bp, synthetic construct
  misc_feature 1..22: note = chemically synthesized
  source 1..22: mol_type = other DNA
tttcctaactctcttgctctgg

SEQ ID NO: 62324 - DNA, 22 bp, synthetic construct
  misc_feature 1..22: note = chemically synthesized
  source 1..22: mol_type = other DNA
cctaactctcttgctctggcag

SEQ ID NO: 62325 - DNA, 22 bp, synthetic construct
  misc_feature 1..22: note = chemically synthesized
  source 1..22: mol_type = other DNA
ctaactctcttgctctggcagc

SEQ ID NO: 62326 - DNA, 22 bp, synthetic construct
  misc_feature 1..22: note = chemically synthesized
  source 1..22: mol_type = other DNA
actctcttgctctggcagcctg

SEQ ID NO: 62327 - DNA, 22 bp, synthetic construct
  misc_feature 1..22: note = chemically synthesized
  source 1..22: mol_type = other DNA
tcttgctctggcagcctgaaga

SEQ ID NO: 62328 - DNA, 22 bp, synthetic construct
  misc_feature 1..22: note = chemically synthesized
  source 1..22: mol_type = other DNA
ttgctctggcagcctgaagagc

SEQ ID NO: 62329 - DNA, 22 bp, synthetic construct
  misc_feature 1..22: note = chemically synthesized
  source 1..22: mol_type = other DNA
gctctggcagcctgaagagctg

SEQ ID NO: 62330 - DNA, 22 bp, synthetic construct
  misc_feature 1..22: note = chemically synthesized
  source 1..22: mol_type = other DNA
ctctggcagcctgaagagctgt

SEQ ID NO: 62331 - DNA, 22 bp, synthetic construct
  misc_feature 1..22: note = chemically synthesized
  source 1..22: mol_type = other DNA
tggcagcctgaagagctgtctg

SEQ ID NO: 62332 - DNA, 22 bp, synthetic construct
  misc_feature 1..22: note = chemically synthesized
  source 1..22: mol_type = other DNA
gcagcctgaagagctgtctgtg

SEQ ID NO: 62333 - DNA, 22 bp, synthetic construct
  misc_feature 1..22: note = chemically synthesized
  source 1..22: mol_type = other DNA
aagagctgtctgtgccctgaac

SEQ ID NO: 62334 - DNA, 22 bp, synthetic construct
  misc_feature 1..22: note = chemically synthesized
  source 1..22: mol_type = other DNA
tctgtgccctgaacaacagctt

SEQ ID NO: 62335 - DNA, 22 bp, synthetic construct
  misc_feature 1..22: note = chemically synthesized
  source 1..22: mol_type = other DNA
tgccctgaacaacagcttaggg

SEQ ID NO: 62336 - DNA, 22 bp, synthetic construct
  misc_feature 1..22: note = chemically synthesized
  source 1..22: mol_type = other DNA
aacaacagcttagggagctgga

SEQ ID NO: 62337 - DNA, 22 bp, synthetic construct
  misc_feature 1..22: note = chemically synthesized
  source 1..22: mol_type = other DNA
agggagctggaggaaagagaag

SEQ ID NO: 62338 - DNA, 22 bp, synthetic construct
  misc_feature 1..22: note = chemically synthesized
  source 1..22: mol_type = other DNA
gggagctggaggaaagagaagg

SEQ ID NO: 62339 - DNA, 22 bp, synthetic construct
  misc_feature 1..22: note = chemically synthesized
  source 1..22: mol_type = other DNA
gaggaaagagaaggaggtatgc

SEQ ID NO: 62340 - DNA, 22 bp, synthetic construct
  misc_feature 1..22: note = chemically synthesized
  source 1..22: mol_type = other DNA
gagggagagaggcccactgggt

SEQ ID NO: 62341 - DNA, 22 bp, synthetic construct
  misc_feature 1..22: note = chemically synthesized
  source 1..22: mol_type = other DNA
agggagagaggcccactgggtt

SEQ ID NO: 62342 - DNA, 22 bp, synthetic construct
  misc_feature 1..22: note = chemically synthesized
  source 1..22: mol_type = other DNA
ggttggacaagaaggtaaaaga

SEQ ID NO: 62343 - DNA, 22 bp, synthetic construct
  misc_feature 1..22: note = chemically synthesized
  source 1..22: mol_type = other DNA
gacaagaaggtaaaagagggct

SEQ ID NO: 62344 - DNA, 22 bp, synthetic construct
  misc_feature 1..22: note = chemically synthesized
  source 1..22: mol_type = other DNA
gtttggcccctaagggaaggac

SEQ ID NO: 62345 - DNA, 22 bp, synthetic construct
  misc_feature 1..22: note = chemically synthesized
  source 1..22: mol_type = other DNA
ggcccctaagggaaggacagga

SEQ ID NO: 62346 - DNA, 22 bp, synthetic construct
  misc_feature 1..22: note = chemically synthesized
  source 1..22: mol_type = other DNA
gcccctaagggaaggacaggaa

SEQ ID NO: 62347 - DNA, 22 bp, synthetic construct
  misc_feature 1..22: note = chemically synthesized
  source 1..22: mol_type = other DNA
agggaaggacaggaaagcaccc

SEQ ID NO: 62348 - DNA, 22 bp, synthetic construct
  misc_feature 1..22: note = chemically synthesized
  source 1..22: mol_type = other DNA
gttccctgtgtggatgcagtgt

SEQ ID NO: 62349 - DNA, 22 bp, synthetic construct
  misc_feature 1..22: note = chemically synthesized
  source 1..22: mol_type = other DNA
ttccctgtgtggatgcagtgtt

SEQ ID NO: 62350 - DNA, 22 bp, synthetic construct
  misc_feature 1..22: note = chemically synthesized
  source 1..22: mol_type = other DNA
cctgtgtggatgcagtgtttgt

SEQ ID NO: 62351 - DNA, 22 bp, synthetic construct
  misc_feature 1..22: note = chemically synthesized
  source 1..22: mol_type = other DNA
tgtggatgcagtgtttgtccag

SEQ ID NO: 62352 - DNA, 22 bp, synthetic construct
  misc_feature 1..22: note = chemically synthesized
  source 1..22: mol_type = other DNA
gtccagctgaaggcagcctcac

SEQ ID NO: 62353 - DNA, 22 bp, synthetic construct
  misc_feature 1..22: note = chemically synthesized
  source 1..22: mol_type = other DNA
tccagctgaaggcagcctcact

SEQ ID NO: 62354 - DNA, 22 bp, synthetic construct
  misc_feature 1..22: note = chemically synthesized
  source 1..22: mol_type = other DNA
aaggcagcctcactcggctgac

SEQ ID NO: 62355 - DNA, 22 bp, synthetic construct
  misc_feature 1..22: note = chemically synthesized
  source 1..22: mol_type = other DNA
actcggctgactacctgatgag

SEQ ID NO: 62356 - DNA, 22 bp, synthetic construct
  misc_feature 1..22: note = chemically synthesized
  source 1..22: mol_type = other DNA
ggctgactacctgatgagtgat

SEQ ID NO: 62357 - DNA, 22 bp, synthetic construct
  misc_feature 1..22: note = chemically synthesized
  source 1..22: mol_type = other DNA
actacctgatgagtgattttcc

SEQ ID NO: 62358 - DNA, 22 bp, synthetic construct
  misc_feature 1..22: note = chemically synthesized
  source 1..22: mol_type = other DNA
cctgatgagtgattttccccaa

SEQ ID NO: 62359 - DNA, 22 bp, synthetic construct
  misc_feature 1..22: note = chemically synthesized
  source 1..22: mol_type = other DNA
atgagtgattttccccaagctg

SEQ ID NO: 62360 - DNA, 22 bp, synthetic construct
  misc_feature 1..22: note = chemically synthesized
  source 1..22: mol_type = other DNA
tccccaagctgacagctgctcc

SEQ ID NO: 62361 - DNA, 22 bp, synthetic construct
  misc_feature 1..22: note = chemically synthesized
  source 1..22: mol_type = other DNA
ccccaagctgacagctgctcca

SEQ ID NO: 62362 - DNA, 22 bp, synthetic construct
  misc_feature 1..22: note = chemically synthesized
  source 1..22: mol_type = other DNA
cccaagctgacagctgctccaa

SEQ ID NO: 62363 - DNA, 22 bp, synthetic construct
  misc_feature 1..22: note = chemically synthesized
  source 1..22: mol_type = other DNA
acagctgctccaacacatttca

SEQ ID NO: 62364 - DNA, 22 bp, synthetic construct
  misc_feature 1..22: note = chemically synthesized
  source 1..22: mol_type = other DNA
ctccaacacatttcacctacaa

SEQ ID NO: 62365 - DNA, 22 bp, synthetic construct
  misc_feature 1..22: note = chemically synthesized
  source 1..22: mol_type = other DNA
caacacatttcacctacaagtc

SEQ ID NO: 62366 - DNA, 22 bp, synthetic construct
  misc_feature 1..22: note = chemically synthesized
  source 1..22: mol_type = other DNA
cacctacaagtcctgacaaagt

SEQ ID NO: 62367 - DNA, 22 bp, synthetic construct
  misc_feature 1..22: note = chemically synthesized
  source 1..22: mol_type = other DNA
acctacaagtcctgacaaagtg

SEQ ID NO: 62368 - DNA, 22 bp, synthetic construct
  misc_feature 1..22: note = chemically synthesized
  source 1..22: mol_type = other DNA
caagtcctgacaaagtggtgtg

SEQ ID NO: 62369 - DNA, 22 bp, synthetic construct
  misc_feature 1..22: note = chemically synthesized
  source 1..22: mol_type = other DNA
acaaagtggtgtgttcttttgg

SEQ ID NO: 62370 - DNA, 22 bp, synthetic construct
  misc_feature 1..22: note = chemically synthesized
  source 1..22: mol_type = other DNA
ttttggggctgttattactgca

SEQ ID NO: 62371 - DNA, 22 bp, synthetic construct
  misc_feature 1..22: note = chemically synthesized
  source 1..22: mol_type = other DNA
ttggggctgttattactgcagc

SEQ ID NO: 62372 - DNA, 22 bp, synthetic construct
  misc_feature 1..22: note = chemically synthesized
  source 1..22: mol_type = other DNA
tggggctgttattactgcagca

SEQ ID NO: 62373 - DNA, 22 bp, synthetic construct
  misc_feature 1..22: note = chemically synthesized
  source 1..22: mol_type = other DNA
ggggctgttattactgcagcag

SEQ ID NO: 62374 - DNA, 22 bp, synthetic construct
  misc_feature 1..22: note = chemically synthesized
  source 1..22: mol_type = other DNA
gggctgttattactgcagcagg

SEQ ID NO: 62375 - DNA, 22 bp, synthetic construct
  misc_feature 1..22: note = chemically synthesized
  source 1..22: mol_type = other DNA
ttattactgcagcaggcatttg

SEQ ID NO: 62376 - DNA, 22 bp, synthetic construct
  misc_feature 1..22: note = chemically synthesized
  source 1..22: mol_type = other DNA
ttactgcagcaggcatttggaa

SEQ ID NO: 62377 - DNA, 22 bp, synthetic construct
  misc_feature 1..22: note = chemically synthesized
  source 1..22: mol_type = other DNA
ctgcagcaggcatttggaacaa

SEQ ID NO: 62378 - DNA, 22 bp, synthetic construct
  misc_feature 1..22: note = chemically synthesized
  source 1..22: mol_type = other DNA
cagcaggcatttggaacaatct

SEQ ID NO: 62379 - DNA, 22 bp, synthetic construct
  misc_feature 1..22: note = chemically synthesized
  source 1..22: mol_type = other DNA
ggaacaatctggaagaatgggg

SEQ ID NO: 62380 - DNA, 22 bp, synthetic construct
  misc_feature 1..22: note = chemically synthesized
  source 1..22: mol_type = other DNA
gaacaatctggaagaatggggt

SEQ ID NO: 62381 - DNA, 22 bp, synthetic construct
  misc_feature 1..22: note = chemically synthesized
  source 1..22: mol_type = other DNA
gaagaatggggtgccaaaggac

SEQ ID NO: 62382 - DNA, 22 bp, synthetic construct
  misc_feature 1..22: note = chemically synthesized
  source 1..22: mol_type = other DNA
gaagccgtttctgagtatccgt

SEQ ID NO: 62383 - DNA, 22 bp, synthetic construct
  misc_feature 1..22: note = chemically synthesized
  source 1..22: mol_type = other DNA
aagccgtttctgagtatccgtc

SEQ ID NO: 62384 - DNA, 22 bp, synthetic construct
  misc_feature 1..22: note = chemically synthesized
  source 1..22: mol_type = other DNA
ctgagtatccgtcccttctttt

SEQ ID NO: 62385 - DNA, 22 bp, synthetic construct
  misc_feature 1..22: note = chemically synthesized
  source 1..22: mol_type = other DNA
tgagtatccgtcccttcttttc

SEQ ID NO: 62386 - DNA, 22 bp, synthetic construct
  misc_feature 1..22: note = chemically synthesized
  source 1..22: mol_type = other DNA
agtatccgtcccttcttttctc

SEQ ID NO: 62387 - DNA, 22 bp, synthetic construct
  misc_feature 1..22: note = chemically synthesized
  source 1..22: mol_type = other DNA
cttttctctccgatcctctagc

SEQ ID NO: 62388 - DNA, 22 bp, synthetic construct
  misc_feature 1..22: note = chemically synthesized
  source 1..22: mol_type = other DNA
ttttctctccgatcctctagct

SEQ ID NO: 62389 - DNA, 22 bp, synthetic construct
  misc_feature 1..22: note = chemically synthesized
  source 1..22: mol_type = other DNA
ttctctccgatcctctagcttt

SEQ ID NO: 62390 - DNA, 22 bp, synthetic construct
  misc_feature 1..22: note = chemically synthesized
  source 1..22: mol_type = other DNA
tctctccgatcctctagctttt

SEQ ID NO: 62391 - DNA, 22 bp, synthetic construct
  misc_feature 1..22: note = chemically synthesized
  source 1..22: mol_type = other DNA
ctctccgatcctctagcttttt

SEQ ID NO: 62392 - DNA, 22 bp, synthetic construct
  misc_feature 1..22: note = chemically synthesized
  source 1..22: mol_type = other DNA
tctccgatcctctagctttttt

SEQ ID NO: 62393 - DNA, 22 bp, synthetic construct
  misc_feature 1..22: note = chemically synthesized
  source 1..22: mol_type = other DNA
tccgatcctctagcttttttgg

SEQ ID NO: 62394 - DNA, 22 bp, synthetic construct
  misc_feature 1..22: note = chemically synthesized
  source 1..22: mol_type = other DNA
cgatcctctagcttttttggct

SEQ ID NO: 62395 - DNA, 22 bp, synthetic construct
  misc_feature 1..22: note = chemically synthesized
  source 1..22: mol_type = other DNA
tagcttttttggcttatgaaaa

SEQ ID NO: 62396 - DNA, 22 bp, synthetic construct
  misc_feature 1..22: note = chemically synthesized
  source 1..22: mol_type = other DNA
gcttttttggcttatgaaaaat

SEQ ID NO: 62397 - DNA, 22 bp, synthetic construct
  misc_feature 1..22: note = chemically synthesized
  source 1..22: mol_type = other DNA
ttttggcttatgaaaaattggg

SEQ ID NO: 62398 - DNA, 22 bp, synthetic construct
  misc_feature 1..22: note = chemically synthesized
  source 1..22: mol_type = other DNA
tttggcttatgaaaaattgggc

SEQ ID NO: 62399 - DNA, 22 bp, synthetic construct
  misc_feature 1..22: note = chemically synthesized
  source 1..22: mol_type = other DNA
ttggcttatgaaaaattgggcc

SEQ ID NO: 62400 - DNA, 22 bp, synthetic construct
  misc_feature 1..22: note = chemically synthesized
  source 1..22: mol_type = other DNA
tggcttatgaaaaattgggccc

SEQ ID NO: 62401 - DNA, 22 bp, synthetic construct
  misc_feature 1..22: note = chemically synthesized
  source 1..22: mol_type = other DNA
ggcttatgaaaaattgggccca

SEQ ID NO: 62402 - DNA, 22 bp, synthetic construct
  misc_feature 1..22: note = chemically synthesized
  source 1..22: mol_type = other DNA
gcttatgaaaaattgggcccat

SEQ ID NO: 62403 - DNA, 22 bp, synthetic construct
  misc_feature 1..22: note = chemically synthesized
  source 1..22: mol_type = other DNA
atgaaaaattgggcccatccct

SEQ ID NO: 62404 - DNA, 22 bp, synthetic construct
  misc_feature 1..22: note = chemically synthesized
  source 1..22: mol_type = other DNA
tgaaaaattgggcccatccctt

SEQ ID NO: 62405 - DNA, 22 bp, synthetic construct
  misc_feature 1..22: note = chemically synthesized
  source 1..22: mol_type = other DNA
ggcccatccctttcgaatgtcc

SEQ ID NO: 62406 - DNA, 22 bp, synthetic construct
  misc_feature 1..22: note = chemically synthesized
  source 1..22: mol_type = other DNA
tcgaatgtccattgtgctgtta

SEQ ID NO: 62407 - DNA, 22 bp, synthetic construct
  misc_feature 1..22: note = chemically synthesized
  source 1..22: mol_type = other DNA
cgaatgtccattgtgctgttag

SEQ ID NO: 62408 - DNA, 22 bp, synthetic construct
  misc_feature 1..22: note = chemically synthesized
  source 1..22: mol_type = other DNA
gaatgtccattgtgctgttagt

SEQ ID NO: 62409 - DNA, 22 bp, synthetic construct
  misc_feature 1..22: note = chemically synthesized
  source 1..22: mol_type = other DNA
tgctgttagtaatgaggatacg

SEQ ID NO: 62410 - DNA, 22 bp, synthetic construct
  misc_feature 1..22: note = chemically synthesized
  source 1..22: mol_type = other DNA
ttagtaatgaggatacggataa

SEQ ID NO: 62411 - DNA, 22 bp, synthetic construct
  misc_feature 1..22: note = chemically synthesized
  source 1..22: mol_type = other DNA
gtaatgaggatacggataaaat

SEQ ID NO: 62412 - DNA, 22 bp, synthetic construct
  misc_feature 1..22: note = chemically synthesized
  source 1..22: mol_type = other DNA
tttttttgagtaagccctttga

SEQ ID NO: 62413 - DNA, 22 bp, synthetic construct
  misc_feature 1..22: note = chemically synthesized
  source 1..22: mol_type = other DNA
ttttttgagtaagccctttgag

SEQ ID NO: 62414 - DNA, 22 bp, synthetic construct
  misc_feature 1..22: note = chemically synthesized
  source 1..22: mol_type = other DNA
tttttgagtaagccctttgagg

SEQ ID NO: 62415 - DNA, 22 bp, synthetic construct
  misc_feature 1..22: note = chemically synthesized
  source 1..22: mol_type = other DNA
ttttgagtaagccctttgagga

SEQ ID NO: 62416 - DNA, 22 bp, synthetic construct
  misc_feature 1..22: note = chemically synthesized
  source 1..22: mol_type = other DNA
tttgagtaagccctttgaggag

SEQ ID NO: 62417 - DNA, 22 bp, synthetic construct
  misc_feature 1..22: note = chemically synthesized
  source 1..22: mol_type = other DNA
ttgagtaagccctttgaggagt

SEQ ID NO: 62418 - DNA, 22 bp, synthetic construct
  misc_feature 1..22: note = chemically synthesized
  source 1..22: mol_type = other DNA
tgagtaagccctttgaggagta

SEQ ID NO: 62419 - DNA, 22 bp, synthetic construct
  misc_feature 1..22: note = chemically synthesized
  source 1..22: mol_type = other DNA
gagtaagccctttgaggagtat

SEQ ID NO: 62420 - DNA, 22 bp, synthetic construct
  misc_feature 1..22: note = chemically synthesized
  source 1..22: mol_type = other DNA
agtaagccctttgaggagtatt

SEQ ID NO: 62421 - DNA, 22 bp, synthetic construct
  misc_feature 1..22: note = chemically synthesized
  source 1..22: mol_type = other DNA
tgaggagtattgtcaaattgag

SEQ ID NO: 62422 - DNA, 22 bp, synthetic construct
  misc_feature 1..22: note = chemically synthesized
  source 1..22: mol_type = other DNA
gaggagtattgtcaaattgaga

SEQ ID NO: 62423 - DNA, 22 bp, synthetic construct
  misc_feature 1..22: note = chemically synthesized
  source 1..22: mol_type = other DNA
aggagtattgtcaaattgagac

SEQ ID NO: 62424 - DNA, 22 bp, synthetic construct
  misc_feature 1..22: note = chemically synthesized
  source 1..22: mol_type = other DNA
tcaaattgagactcacctcatg

SEQ ID NO: 62425 - DNA, 22 bp, synthetic construct
  misc_feature 1..22: note = chemically synthesized
  source 1..22: mol_type = other DNA
agactcacctcatgagtaaccc

SEQ ID NO: 62426 - DNA, 22 bp, synthetic construct
  misc_feature 1..22: note = chemically synthesized
  source 1..22: mol_type = other DNA
acctcatgagtaaccctgtgaa

SEQ ID NO: 62427 - DNA, 22 bp, synthetic construct
  misc_feature 1..22: note = chemically synthesized
  source 1..22: mol_type = other DNA
atgagtaaccctgtgaagaggc

SEQ ID NO: 62428 - DNA, 22 bp, synthetic construct
  misc_feature 1..22: note = chemically synthesized
  source 1..22: mol_type = other DNA
tgaagaggcaggagaaagggta

SEQ ID NO: 62429 - DNA, 22 bp, synthetic construct
  misc_feature 1..22: note = chemically synthesized
  source 1..22: mol_type = other DNA
aagcttagagaggttaaatggc

SEQ ID NO: 62430 - DNA, 22 bp, synthetic construct
  misc_feature 1..22: note = chemically synthesized
  source 1..22: mol_type = other DNA
agagaggttaaatggcaggtct

SEQ ID NO: 62431 - DNA, 22 bp, synthetic construct
  misc_feature 1..22: note = chemically synthesized
  source 1..22: mol_type = other DNA
gagaggttaaatggcaggtctg

SEQ ID NO: 62432 - DNA, 22 bp, synthetic construct
  misc_feature 1..22: note = chemically synthesized
  source 1..22: mol_type = other DNA
aatggcaggtctggtctcatgc

SEQ ID NO: 62433 - DNA, 22 bp, synthetic construct
  misc_feature 1..22: note = chemically synthesized
  source 1..22: mol_type = other DNA
gtctcatgcagccgcaggggta

SEQ ID NO: 62434 - DNA, 22 bp, synthetic construct
  misc_feature 1..22: note = chemically synthesized
  source 1..22: mol_type = other DNA
atgcagccgcaggggtagacta

SEQ ID NO: 62435 - DNA, 22 bp, synthetic construct
  misc_feature 1..22: note = chemically synthesized
  source 1..22: mol_type = other DNA
gggattctgatccagaactcct

SEQ ID NO: 62436 - DNA, 22 bp, synthetic construct
  misc_feature 1..22: note = chemically synthesized
  source 1..22: mol_type = other DNA
tgatccagaactccttatactt

SEQ ID NO: 62437 - DNA, 22 bp, synthetic construct
  misc_feature 1..22: note = chemically synthesized
  source 1..22: mol_type = other DNA
atccagaactccttatacttct

SEQ ID NO: 62438 - DNA, 22 bp, synthetic construct
  misc_feature 1..22: note = chemically synthesized
  source 1..22: mol_type = other DNA
cttatacttctgggtccacccc

SEQ ID NO: 62439 - DNA, 22 bp, synthetic construct
  misc_feature 1..22: note = chemically synthesized
  source 1..22: mol_type = other DNA
atacttctgggtccaccccacg

SEQ ID NO: 62440 - DNA, 22 bp, synthetic construct
  misc_feature 1..22: note = chemically synthesized
  source 1..22: mol_type = other DNA
tacttctgggtccaccccacgc

SEQ ID NO: 62441 - DNA, 22 bp, synthetic construct
  misc_feature 1..22: note = chemically synthesized
  source 1..22: mol_type = other DNA
ctgggtccaccccacgcttcca

SEQ ID NO: 62442 - DNA, 22 bp, synthetic construct
  misc_feature 1..22: note = chemically synthesized
  source 1..22: mol_type = other DNA
tgggtccaccccacgcttccac

SEQ ID NO: 62443 - DNA, 22 bp, synthetic construct
  misc_feature 1..22: note = chemically synthesized
  source 1..22: mol_type = other DNA
ggtccaccccacgcttccacag

SEQ ID NO: 62444 - DNA, 22 bp, synthetic construct
  misc_feature 1..22: note = chemically synthesized
  source 1..22: mol_type = other DNA
ccacagcctgcacacagggtag

SEQ ID NO: 62445 - DNA, 22 bp, synthetic construct
  misc_feature 1..22: note = chemically synthesized
  source 1..22: mol_type = other DNA
cacagcctgcacacagggtagg

SEQ ID NO: 62446 - DNA, 22 bp, synthetic construct
  misc_feature 1..22: note = chemically synthesized
  source 1..22: mol_type = other DNA
cacacagggtagggaagttgtg

SEQ ID NO: 62447 - DNA, 22 bp, synthetic construct
  misc_feature 1..22: note = chemically synthesized
  source 1..22: mol_type = other DNA
tggcttgcagaaggctgttttt

SEQ ID NO: 62448 - DNA, 22 bp, synthetic construct
  misc_feature 1..22: note = chemically synthesized
  source 1..22: mol_type = other DNA
gcagaaggctgtttttttgggg

SEQ ID NO: 62449 - DNA, 22 bp, synthetic construct
  misc_feature 1..22: note = chemically synthesized
  source 1..22: mol_type = other DNA
cagaaggctgtttttttggggg

SEQ ID NO: 62450 - DNA, 22 bp, synthetic construct
  misc_feature 1..22: note = chemically synthesized
  source 1..22: mol_type = other DNA
tttttttggggggacgctctgt

SEQ ID NO: 62451 - DNA, 22 bp, synthetic construct
  misc_feature 1..22: note = chemically synthesized
  source 1..22: mol_type = other DNA
ttttggggggacgctctgtttt

SEQ ID NO: 62452 - DNA, 22 bp, synthetic construct
  misc_feature 1..22: note = chemically synthesized
  source 1..22: mol_type = other DNA
tttggggggacgctctgtttta

SEQ ID NO: 62453 - DNA, 22 bp, synthetic construct
  misc_feature 1..22: note = chemically synthesized
  source 1..22: mol_type = other DNA
ttggggggacgctctgttttaa

SEQ ID NO: 62454 - DNA, 22 bp, synthetic construct
  misc_feature 1..22: note = chemically synthesized
  source 1..22: mol_type = other DNA
tggggggacgctctgttttaat

SEQ ID NO: 62455 - DNA, 22 bp, synthetic construct
  misc_feature 1..22: note = chemically synthesized
  source 1..22: mol_type = other DNA
ggggggacgctctgttttaata

SEQ ID NO: 62456 - DNA, 22 bp, synthetic construct
  misc_feature 1..22: note = chemically synthesized
  source 1..22: mol_type = other DNA
gggggacgctctgttttaatag

SEQ ID NO: 62457 - DNA, 22 bp, synthetic construct
  misc_feature 1..22: note = chemically synthesized
  source 1..22: mol_type = other DNA
tgttttaatagtttggagcaag

SEQ ID NO: 62458 - DNA, 22 bp, synthetic construct
  misc_feature 1..22: note = chemically synthesized
  source 1..22: mol_type = other DNA
ttttaatagtttggagcaagga

SEQ ID NO: 62459 - DNA, 22 bp, synthetic construct
  misc_feature 1..22: note = chemically synthesized
  source 1..22: mol_type = other DNA
taatagtttggagcaaggaagc

SEQ ID NO: 62460 - DNA, 22 bp, synthetic construct
  misc_feature 1..22: note = chemically synthesized
  source 1..22: mol_type = other DNA
aatagtttggagcaaggaagct

SEQ ID NO: 62461 - DNA, 22 bp, synthetic construct
  misc_feature 1..22: note = chemically synthesized
  source 1..22: mol_type = other DNA
atagtttggagcaaggaagcta

SEQ ID NO: 62462 - DNA, 22 bp, synthetic construct
  misc_feature 1..22: note = chemically synthesized
  source 1..22: mol_type = other DNA
ggagcaaggaagctagtggtgg

SEQ ID NO: 62463 - DNA, 22 bp, synthetic construct
  misc_feature 1..22: note = chemically synthesized
  source 1..22: mol_type = other DNA
gagcaaggaagctagtggtggg

SEQ ID NO: 62464 - DNA, 22 bp, synthetic construct
  misc_feature 1..22: note = chemically synthesized
  source 1..22: mol_type = other DNA
gtggtgggcgctcactggtagg

SEQ ID NO: 62465 - DNA, 22 bp, synthetic construct
  misc_feature 1..22: note = chemically synthesized
  source 1..22: mol_type = other DNA
actggtaggggaggcatgtgat

SEQ ID NO: 62466 - DNA, 22 bp, synthetic construct
  misc_feature 1..22: note = chemically synthesized
  source 1..22: mol_type = other DNA
gtaggggaggcatgtgatagga

SEQ ID NO: 62467 - DNA, 22 bp, synthetic construct
  misc_feature 1..22: note = chemically synthesized
  source 1..22: mol_type = other DNA
gatcttttaagcattttcaggg

SEQ ID NO: 62468 - DNA, 22 bp, synthetic construct
  misc_feature 1..22: note = chemically synthesized
  source 1..22: mol_type = other DNA
atcttttaagcattttcaggga

SEQ ID NO: 62469 - DNA, 22 bp, synthetic construct
  misc_feature 1..22: note = chemically synthesized
  source 1..22: mol_type = other DNA
ttaagcattttcagggacagat

SEQ ID NO: 62470 - DNA, 22 bp, synthetic construct
  misc_feature 1..22: note = chemically synthesized
  source 1..22: mol_type = other DNA
taagcattttcagggacagata

SEQ ID NO: 62471 - DNA, 22 bp, synthetic construct
  misc_feature 1..22: note = chemically synthesized
  source 1..22: mol_type = other DNA
aagcattttcagggacagatat

SEQ ID NO: 62472 - DNA, 22 bp, synthetic construct
  misc_feature 1..22: note = chemically synthesized
  source 1..22: mol_type = other DNA
agcattttcagggacagatatg

SEQ ID NO: 62473 - DNA, 22 bp, synthetic construct
  misc_feature 1..22: note = chemically synthesized
  source 1..22: mol_type = other DNA
tcagggacagatatgtacctga

SEQ ID NO: 62474 - DNA, 22 bp, synthetic construct
  misc_feature 1..22: note = chemically synthesized
  source 1..22: mol_type = other DNA
cagggacagatatgtacctgat

SEQ ID NO: 62475 - DNA, 22 bp, synthetic construct
  misc_feature 1..22: note = chemically synthesized
  source 1..22: mol_type = other DNA
agggacagatatgtacctgata

SEQ ID NO: 62476 - DNA, 22 bp, synthetic construct
  misc_feature 1..22: note = chemically synthesized
  source 1..22: mol_type = other DNA
atattccacctctctatataat

SEQ ID NO: 62477 - DNA, 22 bp, synthetic construct
  misc_feature 1..22: note = chemically synthesized
  source 1..22: mol_type = other DNA
cacctctctatataatttcaag

SEQ ID NO: 62478 - DNA, 22 bp, synthetic construct
  misc_feature 1..22: note = chemically synthesized
  source 1..22: mol_type = other DNA
tctatataatttcaagacttga

SEQ ID NO: 62479 - DNA, 22 bp, synthetic construct
  misc_feature 1..22: note = chemically synthesized
  source 1..22: mol_type = other DNA
tatataatttcaagacttgatt

SEQ ID NO: 62480 - DNA, 22 bp, synthetic construct
  misc_feature 1..22: note = chemically synthesized
  source 1..22: mol_type = other DNA
tataatttcaagacttgattgg

SEQ ID NO: 62481 - DNA, 22 bp, synthetic construct
  misc_feature 1..22: note = chemically synthesized
  source 1..22: mol_type = other DNA
caagacttgattggcattgtcc

SEQ ID NO: 62482 - DNA, 22 bp, synthetic construct
  misc_feature 1..22: note = chemically synthesized
  source 1..22: mol_type = other DNA
aagacttgattggcattgtccc

SEQ ID NO: 62483 - DNA, 22 bp, synthetic construct
  misc_feature 1..22: note = chemically synthesized
  source 1..22: mol_type = other DNA
gattggcattgtccctaagcac

SEQ ID NO: 62484 - DNA, 22 bp, synthetic construct
  misc_feature 1..22: note = chemically synthesized
  source 1..22: mol_type = other DNA
attggcattgtccctaagcacc

SEQ ID NO: 62485 - DNA, 22 bp, synthetic construct
  misc_feature 1..22: note = chemically synthesized
  source 1..22: mol_type = other DNA
gcattgtccctaagcaccagta

SEQ ID NO: 62486 - DNA, 22 bp, synthetic construct
  misc_feature 1..22: note = chemically synthesized
  source 1..22: mol_type = other DNA
tccctaagcaccagtagaaagc

SEQ ID NO: 62487 - DNA, 22 bp, synthetic construct
  misc_feature 1..22: note = chemically synthesized
  source 1..22: mol_type = other DNA
agcaccagtagaaagcttgaag

SEQ ID NO: 62488 - DNA, 22 bp, synthetic construct
  misc_feature 1..22: note = chemically synthesized
  source 1..22: mol_type = other DNA
gaagaagcttctcagtaaatac

SEQ ID NO: 62489 - DNA, 22 bp, synthetic construct
  misc_feature 1..22: note = chemically synthesized
  source 1..22: mol_type = other DNA
aagaagcttctcagtaaataca

SEQ ID NO: 62490 - DNA, 22 bp, synthetic construct
  misc_feature 1..22: note = chemically synthesized
  source 1..22: mol_type = other DNA
ctcagtaaatacatcagctgta

SEQ ID NO: 62491 - DNA, 22 bp, synthetic construct
  misc_feature 1..22: note = chemically synthesized
  source 1..22: mol_type = other DNA
tcagtaaatacatcagctgtat

SEQ ID NO: 62492 - DNA, 22 bp, synthetic construct
  misc_feature 1..22: note = chemically synthesized
  source 1..22: mol_type = other DNA
agtaaatacatcagctgtattt

SEQ ID NO: 62493 - DNA, 22 bp, synthetic construct
  misc_feature 1..22: note = chemically synthesized
  source 1..22: mol_type = other DNA
tatttccaggtgagcagtacct

SEQ ID NO: 62494 - DNA, 22 bp, synthetic construct
  misc_feature 1..22: note = chemically synthesized
  source 1..22: mol_type = other DNA
ccaggtgagcagtacctgctga

SEQ ID NO: 62495 - DNA, 22 bp, synthetic construct
  misc_feature 1..22: note = chemically synthesized
  source 1..22: mol_type = other DNA
caggtgagcagtacctgctgaa

SEQ ID NO: 62496 - DNA, 22 bp, synthetic construct
  misc_feature 1..22: note = chemically synthesized
  source 1..22: mol_type = other DNA
ctgaaatgctgagagaacgttc

SEQ ID NO: 62497 - DNA, 22 bp, synthetic construct
  misc_feature 1..22: note = chemically synthesized
  source 1..22: mol_type = other DNA
aaatgctgagagaacgttctga

SEQ ID NO: 62498 - DNA, 22 bp, synthetic construct
  misc_feature 1..22: note = chemically synthesized
  source 1..22: mol_type = other DNA
agagaacgttctgactaggagg

SEQ ID NO: 62499 - DNA, 22 bp, synthetic construct
  misc_feature 1..22: note = chemically synthesized
  source 1..22: mol_type = other DNA
tgactaggagggcttgggggag

SEQ ID NO: 62500 - DNA, 22 bp, synthetic construct
  misc_feature 1..22: note = chemically synthesized
  source 1..22: mol_type = other DNA
actaggagggcttgggggagac

SEQ ID NO: 62501 - DNA, 22 bp, synthetic construct
  misc_feature 1..22: note = chemically synthesized
  source 1..22: mol_type = other DNA
ggagggcttgggggagacagag

SEQ ID NO: 62502 - DNA, 22 bp, synthetic construct
  misc_feature 1..22: note = chemically synthesized
  source 1..22: mol_type = other DNA
gggggagacagagacagagttg

SEQ ID NO: 62503 - DNA, 22 bp, synthetic construct
  misc_feature 1..22: note = chemically synthesized
  source 1..22: mol_type = other DNA
ggggagacagagacagagttgg

SEQ ID NO: 62504 - DNA, 22 bp, synthetic construct
  misc_feature 1..22: note = chemically synthesized
  source 1..22: mol_type = other DNA
gctgtttcagcagactcattct

SEQ ID NO: 62505 - DNA, 22 bp, synthetic construct
  misc_feature 1..22: note = chemically synthesized
  source 1..22: mol_type = other DNA
tttcagcagactcattctgcta

SEQ ID NO: 62506 - DNA, 22 bp, synthetic construct
  misc_feature 1..22: note = chemically synthesized
  source 1..22: mol_type = other DNA
cagcagactcattctgctattt

SEQ ID NO: 62507 - DNA, 22 bp, synthetic construct
  misc_feature 1..22: note = chemically synthesized
  source 1..22: mol_type = other DNA
agcagactcattctgctatttg

SEQ ID NO: 62508 - DNA, 22 bp, synthetic construct
  misc_feature 1..22: note = chemically synthesized
  source 1..22: mol_type = other DNA
attctgctatttgctttttgcc

SEQ ID NO: 62509 - DNA, 22 bp, synthetic construct
  misc_feature 1..22: note = chemically synthesized
  source 1..22: mol_type = other DNA
tgctatttgctttttgccttgg

SEQ ID NO: 62510 - DNA, 22 bp, synthetic construct
  misc_feature 1..22: note = chemically synthesized
  source 1..22: mol_type = other DNA
ctatttgctttttgccttggag

SEQ ID NO: 62511 - DNA, 22 bp, synthetic construct
  misc_feature 1..22: note = chemically synthesized
  source 1..22: mol_type = other DNA
tttgctttttgccttggagatt

SEQ ID NO: 62512 - DNA, 22 bp, synthetic construct
  misc_feature 1..22: note = chemically synthesized
  source 1..22: mol_type = other DNA
gctttttgccttggagattatt

SEQ ID NO: 62513 - DNA, 22 bp, synthetic construct
  misc_feature 1..22: note = chemically synthesized
  source 1..22: mol_type = other DNA
ctttttgccttggagattattt

SEQ ID NO: 62514 - DNA, 22 bp, synthetic construct
  misc_feature 1..22: note = chemically synthesized
  source 1..22: mol_type = other DNA
tttgccttggagattatttttt

SEQ ID NO: 62515 - DNA, 22 bp, synthetic construct
  misc_feature 1..22: note = chemically synthesized
  source 1..22: mol_type = other DNA
ttgccttggagattattttttc

SEQ ID NO: 62516 - DNA, 22 bp, synthetic construct
  misc_feature 1..22: note = chemically synthesized
  source 1..22: mol_type = other DNA
tgccttggagattattttttct

SEQ ID NO: 62517 - DNA, 22 bp, synthetic construct
  misc_feature 1..22: note = chemically synthesized
  source 1..22: mol_type = other DNA
gccttggagattattttttctg

SEQ ID NO: 62518 - DNA, 22 bp, synthetic construct
  misc_feature 1..22: note = chemically synthesized
  source 1..22: mol_type = other DNA
ccttggagattattttttctgg

SEQ ID NO: 62519 - DNA, 22 bp, synthetic construct
  misc_feature 1..22: note = chemically synthesized
  source 1..22: mol_type = other DNA
ggagattattttttctgggtgt

SEQ ID NO: 62520 - DNA, 22 bp, synthetic construct
  misc_feature 1..22: note = chemically synthesized
  source 1..22: mol_type = other DNA
gagattattttttctgggtgtc

SEQ ID NO: 62521 - DNA, 22 bp, synthetic construct
  misc_feature 1..22: note = chemically synthesized
  source 1..22: mol_type = other DNA
ttttttctgggtgtcccgatgc

SEQ ID NO: 62522 - DNA, 22 bp, synthetic construct
  misc_feature 1..22: note = chemically synthesized
  source 1..22: mol_type = other DNA
tttctgggtgtcccgatgctga

SEQ ID NO: 62523 - DNA, 22 bp, synthetic construct
  misc_feature 1..22: note = chemically synthesized
  source 1..22: mol_type = other DNA
ttctgggtgtcccgatgctgag

SEQ ID NO: 62524 - DNA, 22 bp, synthetic construct
  misc_feature 1..22: note = chemically synthesized
  source 1..22: mol_type = other DNA
tctgggtgtcccgatgctgagc

SEQ ID NO: 62525 - DNA, 22 bp, synthetic construct
  misc_feature 1..22: note = chemically synthesized
  source 1..22: mol_type = other DNA
ctgggtgtcccgatgctgagct

SEQ ID NO: 62526 - DNA, 22 bp, synthetic construct
  misc_feature 1..22: note = chemically synthesized
  source 1..22: mol_type = other DNA
tgggtgtcccgatgctgagctc

SEQ ID NO: 62527 - DNA, 22 bp, synthetic construct
  misc_feature 1..22: note = chemically synthesized
  source 1..22: mol_type = other DNA
ggtgtcccgatgctgagctccc

SEQ ID NO: 62528 - DNA, 22 bp, synthetic construct
  misc_feature 1..22: note = chemically synthesized
  source 1..22: mol_type = other DNA
agctcccacttcaagaagaaca

SEQ ID NO: 62529 - DNA, 22 bp, synthetic construct
  misc_feature 1..22: note = chemically synthesized
  source 1..22: mol_type = other DNA
ccacttcaagaagaacattggt

SEQ ID NO: 62530 - DNA, 22 bp, synthetic construct
  misc_feature 1..22: note = chemically synthesized
  source 1..22: mol_type = other DNA
caagaagaacattggtataaat

SEQ ID NO: 62531 - DNA, 22 bp, synthetic construct
  misc_feature 1..22: note = chemically synthesized
  source 1..22: mol_type = other DNA
aagaagaacattggtataaatt

SEQ ID NO: 62532 - DNA, 22 bp, synthetic construct
  misc_feature 1..22: note = chemically synthesized
  source 1..22: mol_type = other DNA
gtataaatttacaaaccagaag

SEQ ID NO: 62533 - DNA, 22 bp, synthetic construct
  misc_feature 1..22: note = chemically synthesized
  source 1..22: mol_type = other DNA
acaaaccagaagtagtcagagg

SEQ ID NO: 62534 - DNA, 22 bp, synthetic construct
  misc_feature 1..22: note = chemically synthesized
  source 1..22: mol_type = other DNA
caaaccagaagtagtcagaggt

SEQ ID NO: 62535 - DNA, 22 bp, synthetic construct
  misc_feature 1..22: note = chemically synthesized
  source 1..22: mol_type = other DNA
acttttttgttctgttattcct

SEQ ID NO: 62536 - DNA, 22 bp, synthetic construct
  misc_feature 1..22: note = chemically synthesized
  source 1..22: mol_type = other DNA
ttttgttctgttattccttctt

SEQ ID NO: 62537 - DNA, 22 bp, synthetic construct
  misc_feature 1..22: note = chemically synthesized
  source 1..22: mol_type = other DNA
tttgttctgttattccttcttt

SEQ ID NO: 62538 - DNA, 22 bp, synthetic construct
  misc_feature 1..22: note = chemically synthesized
  source 1..22: mol_type = other DNA
ttgttctgttattccttctttg

SEQ ID NO: 62539 - DNA, 22 bp, synthetic construct
  misc_feature 1..22: note = chemically synthesized
  source 1..22: mol_type = other DNA
tgttctgttattccttctttgg

SEQ ID NO: 62540 - DNA, 22 bp, synthetic construct
  misc_feature 1..22: note = chemically synthesized
  source 1..22: mol_type = other DNA
gttctgttattccttctttggg

SEQ ID NO: 62541 - DNA, 22 bp, synthetic construct
  misc_feature 1..22: note = chemically synthesized
  source 1..22: mol_type = other DNA
ttctgttattccttctttggga

SEQ ID NO: 62542 - DNA, 22 bp, synthetic construct
  misc_feature 1..22: note = chemically synthesized
  source 1..22: mol_type = other DNA
tgttattccttctttgggagag

SEQ ID NO: 62543 - DNA, 22 bp, synthetic construct
  misc_feature 1..22: note = chemically synthesized
  source 1..22: mol_type = other DNA
ttattccttctttgggagagca

SEQ ID NO: 62544 - DNA, 22 bp, synthetic construct
  misc_feature 1..22: note = chemically synthesized
  source 1..22: mol_type = other DNA
ttccttctttgggagagcaggc

SEQ ID NO: 62545 - DNA, 22 bp, synthetic construct
  misc_feature 1..22: note = chemically synthesized
  source 1..22: mol_type = other DNA
cttctttgggagagcaggctgg

SEQ ID NO: 62546 - DNA, 22 bp, synthetic construct
  misc_feature 1..22: note = chemically synthesized
  source 1..22: mol_type = other DNA
ctttgggagagcaggctggcca

SEQ ID NO: 62547 - DNA, 22 bp, synthetic construct
  misc_feature 1..22: note = chemically synthesized
  source 1..22: mol_type = other DNA
tttgggagagcaggctggccag

SEQ ID NO: 62548 - DNA, 22 bp, synthetic construct
  misc_feature 1..22: note = chemically synthesized
  source 1..22: mol_type = other DNA
tgggagagcaggctggccagga

SEQ ID NO: 62549 - DNA, 22 bp, synthetic construct
  misc_feature 1..22: note = chemically synthesized
  source 1..22: mol_type = other DNA
gggagagcaggctggccaggag

SEQ ID NO: 62550 - DNA, 22 bp, synthetic construct
  misc_feature 1..22: note = chemically synthesized
  source 1..22: mol_type = other DNA
ggagagcaggctggccaggagg

SEQ ID NO: 62551 - DNA, 22 bp, synthetic construct
  misc_feature 1..22: note = chemically synthesized
  source 1..22: mol_type = other DNA
gccaggaggaaggttcaagtgt

SEQ ID NO: 62552 - DNA, 22 bp, synthetic construct
  misc_feature 1..22: note = chemically synthesized
  source 1..22: mol_type = other DNA
aagtgtgtcatatcctagcatt

SEQ ID NO: 62553 - DNA, 22 bp, synthetic construct
  misc_feature 1..22: note = chemically synthesized
  source 1..22: mol_type = other DNA
gcattcagataggtggcctcct

SEQ ID NO: 62554 - DNA, 22 bp, synthetic construct
  misc_feature 1..22: note = chemically synthesized
  source 1..22: mol_type = other DNA
agataggtggcctcctctgcct

SEQ ID NO: 62555 - DNA, 22 bp, synthetic construct
  misc_feature 1..22: note = chemically synthesized
  source 1..22: mol_type = other DNA
ctctgccttttcagtgggtggc

SEQ ID NO: 62556 - DNA, 22 bp, synthetic construct
  misc_feature 1..22: note = chemically synthesized
  source 1..22: mol_type = other DNA
tgccttttcagtgggtggctgg

SEQ ID NO: 62557 - DNA, 22 bp, synthetic construct
  misc_feature 1..22: note = chemically synthesized
  source 1..22: mol_type = other DNA
ccttttcagtgggtggctgggc

SEQ ID NO: 62558 - DNA, 22 bp, synthetic construct
  misc_feature 1..22: note = chemically synthesized
  source 1..22: mol_type = other DNA
ttcagtgggtggctgggctggg

SEQ ID NO: 62559 - DNA, 22 bp, synthetic construct
  misc_feature 1..22: note = chemically synthesized
  source 1..22: mol_type = other DNA
tcagtgggtggctgggctgggt

SEQ ID NO: 62560 - DNA, 22 bp, synthetic construct
  misc_feature 1..22: note = chemically synthesized
  source 1..22: mol_type = other DNA
cagtgggtggctgggctgggtg

SEQ ID NO: 62561 - DNA, 22 bp, synthetic construct
  misc_feature 1..22: note = chemically synthesized
  source 1..22: mol_type = other DNA
agtgggtggctgggctgggtga

SEQ ID NO: 62562 - DNA, 22 bp, synthetic construct
  misc_feature 1..22: note = chemically synthesized
  source 1..22: mol_type = other DNA
ggctgggtgaaatcttgcagtg

SEQ ID NO: 62563 - DNA, 22 bp, synthetic construct
  misc_feature 1..22: note = chemically synthesized
  source 1..22: mol_type = other DNA
ggtgaaatcttgcagtgactaa

SEQ ID NO: 62564 - DNA, 22 bp, synthetic construct
  misc_feature 1..22: note = chemically synthesized
  source 1..22: mol_type = other DNA
gcagtgactaagaaaggaaggg

SEQ ID NO: 62565 - DNA, 22 bp, synthetic construct
  misc_feature 1..22: note = chemically synthesized
  source 1..22: mol_type = other DNA
cagtgactaagaaaggaagggt

SEQ ID NO: 62566 - DNA, 22 bp, synthetic construct
  misc_feature 1..22: note = chemically synthesized
  source 1..22: mol_type = other DNA
agaaaggaagggtggacccagg

SEQ ID NO: 62567 - DNA, 22 bp, synthetic construct
  misc_feature 1..22: note = chemically synthesized
  source 1..22: mol_type = other DNA
catcttcatcattgatcctgca

SEQ ID NO: 62568 - DNA, 22 bp, synthetic construct
  misc_feature 1..22: note = chemically synthesized
  source 1..22: mol_type = other DNA
catcattgatcctgcatgcgtg

SEQ ID NO: 62569 - DNA, 22 bp, synthetic construct
  misc_feature 1..22: note = chemically synthesized
  source 1..22: mol_type = other DNA
atcattgatcctgcatgcgtgc

SEQ ID NO: 62570 - DNA, 22 bp, synthetic construct
  misc_feature 1..22: note = chemically synthesized
  source 1..22: mol_type = other DNA
atcctgcatgcgtgccggtagg

SEQ ID NO: 62571 - DNA, 22 bp, synthetic construct
  misc_feature 1..22: note = chemically synthesized
  source 1..22: mol_type = other DNA
catgcgtgccggtaggcagcag

SEQ ID NO: 62572 - DNA, 22 bp, synthetic construct
  misc_feature 1..22: note = chemically synthesized
  source 1..22: mol_type = other DNA
tggaattgctggggaaaccaca

SEQ ID NO: 62573 - DNA, 22 bp, synthetic construct
  misc_feature 1..22: note = chemically synthesized
  source 1..22: mol_type = other DNA
gaattgctggggaaaccacagt

SEQ ID NO: 62574 - DNA, 22 bp, synthetic construct
  misc_feature 1..22: note = chemically synthesized
  source 1..22: mol_type = other DNA
ctggggaaaccacagtgcagca

SEQ ID NO: 62575 - DNA, 22 bp, synthetic construct
  misc_feature 1..22: note = chemically synthesized
  source 1..22: mol_type = other DNA
gggaaaccacagtgcagcatga

SEQ ID NO: 62576 - DNA, 22 bp, synthetic construct
  misc_feature 1..22: note = chemically synthesized
  source 1..22: mol_type = other DNA
gggcctgctctcttgtgcccgg

SEQ ID NO: 62577 - DNA, 22 bp, synthetic construct
  misc_feature 1..22: note = chemically synthesized
  source 1..22: mol_type = other DNA
ctctcttgtgcccggctgagca

SEQ ID NO: 62578 - DNA, 22 bp, synthetic construct
  misc_feature 1..22: note = chemically synthesized
  source 1..22: mol_type = other DNA
tcttgtgcccggctgagcatct

SEQ ID NO: 62579 - DNA, 22 bp, synthetic construct
  misc_feature 1..22: note = chemically synthesized
  source 1..22: mol_type = other DNA
ttgtgcccggctgagcatctct

SEQ ID NO: 62580 - DNA, 22 bp, synthetic construct
  misc_feature 1..22: note = chemically synthesized
  source 1..22: mol_type = other DNA
gtgcccggctgagcatctctgt

SEQ ID NO: 62581 - DNA, 22 bp, synthetic construct
  misc_feature 1..22: note = chemically synthesized
  source 1..22: mol_type = other DNA
tgcccggctgagcatctctgtt

SEQ ID NO: 62582 - DNA, 22 bp, synthetic construct
  misc_feature 1..22: note = chemically synthesized
  source 1..22: mol_type = other DNA
agcatctctgttctgtttgggg

SEQ ID NO: 62583 - DNA, 22 bp, synthetic construct
  misc_feature 1..22: note = chemically synthesized
  source 1..22: mol_type = other DNA
tgttctgtttggggagtcctgc

SEQ ID NO: 62584 - DNA, 22 bp, synthetic construct
  misc_feature 1..22: note = chemically synthesized
  source 1..22: mol_type = other DNA
ttctgtttggggagtcctgcca

SEQ ID NO: 62585 - DNA, 22 bp, synthetic construct
  misc_feature 1..22: note = chemically synthesized
  source 1..22: mol_type = other DNA
tgtttggggagtcctgccaggc

SEQ ID NO: 62586 - DNA, 22 bp, synthetic construct
  misc_feature 1..22: note = chemically synthesized
  source 1..22: mol_type = other DNA
tttggggagtcctgccaggcaa

SEQ ID NO: 62587 - DNA, 22 bp, synthetic construct
  misc_feature 1..22: note = chemically synthesized
  source 1..22: mol_type = other DNA
ggggagtcctgccaggcaagtg

SEQ ID NO: 62588 - DNA, 22 bp, synthetic construct
  misc_feature 1..22: note = chemically synthesized
  source 1..22: mol_type = other DNA
gggagtcctgccaggcaagtgt

SEQ ID NO: 62589 - DNA, 22 bp, synthetic construct
  misc_feature 1..22: note = chemically synthesized
  source 1..22: mol_type = other DNA
ccaggcaagtgtgagtcaaaga

SEQ ID NO: 62590 - DNA, 22 bp, synthetic construct
  misc_feature 1..22: note = chemically synthesized
  source 1..22: mol_type = other DNA
tgtcatgggggcagtgtcggct

SEQ ID NO: 62591 - DNA, 22 bp, synthetic construct
  misc_feature 1..22: note = chemically synthesized
  source 1..22: mol_type = other DNA
agtggtactcttcagagttctc

SEQ ID NO: 62592 - DNA, 22 bp, synthetic construct
  misc_feature 1..22: note = chemically synthesized
  source 1..22: mol_type = other DNA
ttcagagttctcagaatgtgcc

SEQ ID NO: 62593 - DNA, 22 bp, synthetic construct
  misc_feature 1..22: note = chemically synthesized
  source 1..22: mol_type = other DNA
cagagttctcagaatgtgccgc

SEQ ID NO: 62594 - DNA, 22 bp, synthetic construct
  misc_feature 1..22: note = chemically synthesized
  source 1..22: mol_type = other DNA
agagttctcagaatgtgccgct

SEQ ID NO: 62595 - DNA, 22 bp, synthetic construct
  misc_feature 1..22: note = chemically synthesized
  source 1..22: mol_type = other DNA
tcagaatgtgccgctcgaagcc

SEQ ID NO: 62596 - DNA, 22 bp, synthetic construct
  misc_feature 1..22: note = chemically synthesized
  source 1..22: mol_type = other DNA
agaatgtgccgctcgaagccat

SEQ ID NO: 62597 - DNA, 22 bp, synthetic construct
  misc_feature 1..22: note = chemically synthesized
  source 1..22: mol_type = other DNA
gaagccatgtaggcttccagca

SEQ ID NO: 62598 - DNA, 22 bp, synthetic construct
  misc_feature 1..22: note = chemically synthesized
  source 1..22: mol_type = other DNA
ccagcaggcttctagcagatgg

SEQ ID NO: 62599 - DNA, 22 bp, synthetic construct
  misc_feature 1..22: note = chemically synthesized
  source 1..22: mol_type = other DNA
cagcaggcttctagcagatggg

SEQ ID NO: 62600 - DNA, 22 bp, synthetic construct
  misc_feature 1..22: note = chemically synthesized
  source 1..22: mol_type = other DNA
ctagcagatggggttttggctg

SEQ ID NO: 62601 - DNA, 22 bp, synthetic construct
  misc_feature 1..22: note = chemically synthesized
  source 1..22: mol_type = other DNA
tagcagatggggttttggctgg

SEQ ID NO: 62602 - DNA, 22 bp, synthetic construct
  misc_feature 1..22: note = chemically synthesized
  source 1..22: mol_type = other DNA
gcagatggggttttggctgggt

SEQ ID NO: 62603 - DNA, 22 bp, synthetic construct
  misc_feature 1..22: note = chemically synthesized
  source 1..22: mol_type = other DNA
tggctgggttgggccttaatac

SEQ ID NO: 62604 - DNA, 22 bp, synthetic construct
  misc_feature 1..22: note = chemically synthesized
  source 1..22: mol_type = other DNA
ggctgggttgggccttaatact

SEQ ID NO: 62605 - DNA, 22 bp, synthetic construct
  misc_feature 1..22: note = chemically synthesized
  source 1..22: mol_type = other DNA
gctgggttgggccttaatactc

SEQ ID NO: 62606 - DNA, 22 bp, synthetic construct
  misc_feature 1..22: note = chemically synthesized
  source 1..22: mol_type = other DNA
ggttgggccttaatactcagtg

SEQ ID NO: 62607 - DNA, 22 bp, synthetic construct
  misc_feature 1..22: note = chemically synthesized
  source 1..22: mol_type = other DNA
ggccttaatactcagtgtcttt

SEQ ID NO: 62608 - DNA, 22 bp, synthetic construct
  misc_feature 1..22: note = chemically synthesized
  source 1..22: mol_type = other DNA
aatactcagtgtctttcattcc

SEQ ID NO: 62609 - DNA, 22 bp, synthetic construct
  misc_feature 1..22: note = chemically synthesized
  source 1..22: mol_type = other DNA
atactcagtgtctttcattccc

SEQ ID NO: 62610 - DNA, 22 bp, synthetic construct
  misc_feature 1..22: note = chemically synthesized
  source 1..22: mol_type = other DNA
agtgtctttcattccctctctg

SEQ ID NO: 62611 - DNA, 22 bp, synthetic construct
  misc_feature 1..22: note = chemically synthesized
  source 1..22: mol_type = other DNA
tcattccctctctgccccctcg

SEQ ID NO: 62612 - DNA, 22 bp, synthetic construct
  misc_feature 1..22: note = chemically synthesized
  source 1..22: mol_type = other DNA
cattccctctctgccccctcgt

SEQ ID NO: 62613 - DNA, 22 bp, synthetic construct
  misc_feature 1..22: note = chemically synthesized
  source 1..22: mol_type = other DNA
attccctctctgccccctcgtt

SEQ ID NO: 62614 - DNA, 22 bp, synthetic construct
  misc_feature 1..22: note = chemically synthesized
  source 1..22: mol_type = other DNA
cctctctgccccctcgttcctt

SEQ ID NO: 62615 - DNA, 22 bp, synthetic construct
  misc_feature 1..22: note = chemically synthesized
  source 1..22: mol_type = other DNA
tctgccccctcgttcctttcct

SEQ ID NO: 62616 - DNA, 22 bp, synthetic construct
  misc_feature 1..22: note = chemically synthesized
  source 1..22: mol_type = other DNA
tgccccctcgttcctttcctgc

SEQ ID NO: 62617 - DNA, 22 bp, synthetic construct
  misc_feature 1..22: note = chemically synthesized
  source 1..22: mol_type = other DNA
ccccctcgttcctttcctgcat

SEQ ID NO: 62618 - DNA, 22 bp, synthetic construct
  misc_feature 1..22: note = chemically synthesized
  source 1..22: mol_type = other DNA
gttcctttcctgcatttcttgc

SEQ ID NO: 62619 - DNA, 22 bp, synthetic construct
  misc_feature 1..22: note = chemically synthesized
  source 1..22: mol_type = other DNA
ctttcctgcatttcttgctttc

SEQ ID NO: 62620 - DNA, 22 bp, synthetic construct
  misc_feature 1..22: note = chemically synthesized
  source 1..22: mol_type = other DNA
tcctgcatttcttgctttcttt

SEQ ID NO: 62621 - DNA, 22 bp, synthetic construct
  misc_feature 1..22: note = chemically synthesized
  source 1..22: mol_type = other DNA
cctgcatttcttgctttctttt

SEQ ID NO: 62622 - DNA, 22 bp, synthetic construct
  misc_feature 1..22: note = chemically synthesized
  source 1..22: mol_type = other DNA
ctgcatttcttgctttcttttt

SEQ ID NO: 62623 - DNA, 22 bp, synthetic construct
  misc_feature 1..22: note = chemically synthesized
  source 1..22: mol_type = other DNA
catttcttgctttctttttttt

SEQ ID NO: 62624 - DNA, 22 bp, synthetic construct
  misc_feature 1..22: note = chemically synthesized
  source 1..22: mol_type = other DNA
cttgctttcttttttttctaga

SEQ ID NO: 62625 - DNA, 22 bp, synthetic construct
  misc_feature 1..22: note = chemically synthesized
  source 1..22: mol_type = other DNA
ttgctttcttttttttctagaa

SEQ ID NO: 62626 - DNA, 22 bp, synthetic construct
  misc_feature 1..22: note = chemically synthesized
  source 1..22: mol_type = other DNA
gctttcttttttttctagaatc

SEQ ID NO: 62627 - DNA, 22 bp, synthetic construct
  misc_feature 1..22: note = chemically synthesized
  source 1..22: mol_type = other DNA
ctttcttttttttctagaatca

SEQ ID NO: 62628 - DNA, 22 bp, synthetic construct
  misc_feature 1..22: note = chemically synthesized
  source 1..22: mol_type = other DNA
tcttttttttctagaatcaacg

SEQ ID NO: 62629 - DNA, 22 bp, synthetic construct
  misc_feature 1..22: note = chemically synthesized
  source 1..22: mol_type = other DNA
cttttttttctagaatcaacga

SEQ ID NO: 62630 - DNA, 22 bp, synthetic construct
  misc_feature 1..22: note = chemically synthesized
  source 1..22: mol_type = other DNA
ttttttttctagaatcaacgaa

SEQ ID NO: 62631 - DNA, 22 bp, synthetic construct
  misc_feature 1..22: note = chemically synthesized
  source 1..22: mol_type = other DNA
ttttttctagaatcaacgaagc

SEQ ID NO: 62632 - DNA, 22 bp, synthetic construct
  misc_feature 1..22: note = chemically synthesized
  source 1..22: mol_type = other DNA
tttttctagaatcaacgaagca

SEQ ID NO: 62633 - DNA, 22 bp, synthetic construct
  misc_feature 1..22: note = chemically synthesized
  source 1..22: mol_type = other DNA
ttttctagaatcaacgaagcag

SEQ ID NO: 62634 - DNA, 22 bp, synthetic construct
  misc_feature 1..22: note = chemically synthesized
  source 1..22: mol_type = other DNA
tttctagaatcaacgaagcagc

SEQ ID NO: 62635 - DNA, 22 bp, synthetic construct
  misc_feature 1..22: note = chemically synthesized
  source 1..22: mol_type = other DNA
ttctagaatcaacgaagcagcc

SEQ ID NO: 62636 - DNA, 22 bp, synthetic construct
  misc_feature 1..22: note = chemically synthesized
  source 1..22: mol_type = other DNA
tctagaatcaacgaagcagcca

SEQ ID NO: 62637 - DNA, 22 bp, synthetic construct
  misc_feature 1..22: note = chemically synthesized
  source 1..22: mol_type = other DNA
ctagaatcaacgaagcagccaa

SEQ ID NO: 62638 - DNA, 22 bp, synthetic construct
  misc_feature 1..22: note = chemically synthesized
  source 1..22: mol_type = other DNA
tagaatcaacgaagcagccaat

SEQ ID NO: 62639 - DNA, 22 bp, synthetic construct
  misc_feature 1..22: note = chemically synthesized
  source 1..22: mol_type = other DNA
gaatcaacgaagcagccaataa

SEQ ID NO: 62640 - DNA, 22 bp, synthetic construct
  misc_feature 1..22: note = chemically synthesized
  source 1..22: mol_type = other DNA
tcaggaggtttagatgaatgtg

SEQ ID NO: 62641 - DNA, 22 bp, synthetic construct
  misc_feature 1..22: note = chemically synthesized
  source 1..22: mol_type = other DNA
caggaggtttagatgaatgtga

SEQ ID NO: 62642 - DNA, 22 bp, synthetic construct
  misc_feature 1..22: note = chemically synthesized
  source 1..22: mol_type = other DNA
aggaggtttagatgaatgtgaa

SEQ ID NO: 62643 - DNA, 22 bp, synthetic construct
  misc_feature 1..22: note = chemically synthesized
  source 1..22: mol_type = other DNA
agatgaatgtgaattgctgttt

SEQ ID NO: 62644 - DNA, 22 bp, synthetic construct
  misc_feature 1..22: note = chemically synthesized
  source 1..22: mol_type = other DNA
gatgaatgtgaattgctgttta

SEQ ID NO: 62645 - DNA, 22 bp, synthetic construct
  misc_feature 1..22: note = chemically synthesized
  source 1..22: mol_type = other DNA
ctgtttaatataaaaattttat

SEQ ID NO: 62646 - DNA, 22 bp, synthetic construct
  misc_feature 1..22: note = chemically synthesized
  source 1..22: mol_type = other DNA
tttaatataaaaattttattaa

SEQ ID NO: 62647 - DNA, 22 bp, synthetic construct
  misc_feature 1..22: note = chemically synthesized
  source 1..22: mol_type = other DNA
aatataaaaattttattaaaat

SEQ ID NO: 62648 - DNA, 22 bp, synthetic construct
  misc_feature 1..22: note = chemically synthesized
  source 1..22: mol_type = other DNA
atataaaaattttattaaaata

SEQ ID NO: 62649 - DNA, 22 bp, synthetic construct
  misc_feature 1..22: note = chemically synthesized
  source 1..22: mol_type = other DNA
tattaaaataataaagctctga

SEQ ID NO: 62650 - DNA, 22 bp, synthetic construct
  misc_feature 1..22: note = chemically synthesized
  source 1..22: mol_type = other DNA
attaaaataataaagctctgac

SEQ ID NO: 62651 - DNA, 22 bp, synthetic construct
  misc_feature 1..22: note = chemically synthesized
  source 1..22: mol_type = other DNA
ttaaaataataaagctctgaca

SEQ ID NO: 62652 - DNA, 22 bp, synthetic construct
  misc_feature 1..22: note = chemically synthesized
  source 1..22: mol_type = other DNA
aaataataaagctctgacaaaa

SEQ ID NO: 62653 - DNA, 22 bp, synthetic construct
  misc_feature 1..22: note = chemically synthesized
  source 1..22: mol_type = other DNA
tgacaaaagatccagaatattg

SEQ ID NO: 62654 - DNA, 22 bp, synthetic construct
  misc_feature 1..22: note = chemically synthesized
  source 1..22: mol_type = other DNA
acaaaagatccagaatattgtc

SEQ ID NO: 62655 - DNA, 22 bp, synthetic construct
  misc_feature 1..22: note = chemically synthesized
  source 1..22: mol_type = other DNA
tcccttgcagtgggctttaggg

SEQ ID NO: 62656 - DNA, 22 bp, synthetic construct
  misc_feature 1..22: note = chemically synthesized
  source 1..22: mol_type = other DNA
gcagtgggctttagggttgcat

SEQ ID NO: 62657 - DNA, 22 bp, synthetic construct
  misc_feature 1..22: note = chemically synthesized
  source 1..22: mol_type = other DNA
cagtgggctttagggttgcatc

SEQ ID NO: 62658 - DNA, 22 bp, synthetic construct
  misc_feature 1..22: note = chemically synthesized
  source 1..22: mol_type = other DNA
tagggttgcatcttggctccta

SEQ ID NO: 62659 - DNA, 22 bp, synthetic construct
  misc_feature 1..22: note = chemically synthesized
  source 1..22: mol_type = other DNA
agggttgcatcttggctcctaa

SEQ ID NO: 62660 - DNA, 22 bp, synthetic construct
  misc_feature 1..22: note = chemically synthesized
  source 1..22: mol_type = other DNA
gggttgcatcttggctcctaaa

SEQ ID NO: 62661 - DNA, 22 bp, synthetic construct
  misc_feature 1..22: note = chemically synthesized
  source 1..22: mol_type = other DNA
catcttggctcctaaatcttct

SEQ ID NO: 62662 - DNA, 22 bp, synthetic construct
  misc_feature 1..22: note = chemically synthesized
  source 1..22: mol_type = other DNA
ggctcctaaatcttctaggcgg

SEQ ID NO: 62663 - DNA, 22 bp, synthetic construct
  misc_feature 1..22: note = chemically synthesized
  source 1..22: mol_type = other DNA
gctcctaaatcttctaggcggg

SEQ ID NO: 62664 - DNA, 22 bp, synthetic construct
  misc_feature 1..22: note = chemically synthesized
  source 1..22: mol_type = other DNA
ctaaatcttctaggcgggttaa

SEQ ID NO: 62665 - DNA, 22 bp, synthetic construct
  misc_feature 1..22: note = chemically synthesized
  source 1..22: mol_type = other DNA
aatcttctaggcgggttaaatt

SEQ ID NO: 62666 - DNA, 22 bp, synthetic construct
  misc_feature 1..22: note = chemically synthesized
  source 1..22: mol_type = other DNA
ctaggcgggttaaattagtcct

SEQ ID NO: 62667 - DNA, 22 bp, synthetic construct
  misc_feature 1..22: note = chemically synthesized
  source 1..22: mol_type = other DNA
taggcgggttaaattagtcctc

SEQ ID NO: 62668 - DNA, 22 bp, synthetic construct
  misc_feature 1..22: note = chemically synthesized
  source 1..22: mol_type = other DNA
ggcgggttaaattagtcctcac

SEQ ID NO: 62669 - DNA, 22 bp, synthetic construct
  misc_feature 1..22: note = chemically synthesized
  source 1..22: mol_type = other DNA
aattagtcctcacaaaatgtca

SEQ ID NO: 62670 - DNA, 22 bp, synthetic construct
  misc_feature 1..22: note = chemically synthesized
  source 1..22: mol_type = other DNA
gtcctcacaaaatgtcacattt

SEQ ID NO: 62671 - DNA, 22 bp, synthetic construct
  misc_feature 1..22: note = chemically synthesized
  source 1..22: mol_type = other DNA
acaaaatgtcacatttccctgg

SEQ ID NO: 62672 - DNA, 22 bp, synthetic construct
  misc_feature 1..22: note = chemically synthesized
  source 1..22: mol_type = other DNA
ccctggcagctataggtttcca

SEQ ID NO: 62673 - DNA, 22 bp, synthetic construct
  misc_feature 1..22: note = chemically synthesized
  source 1..22: mol_type = other DNA
cctggcagctataggtttccag

SEQ ID NO: 62674 - DNA, 22 bp, synthetic construct
  misc_feature 1..22: note = chemically synthesized
  source 1..22: mol_type = other DNA
gcagctataggtttccaggagg

SEQ ID NO: 62675 - DNA, 22 bp, synthetic construct
  misc_feature 1..22: note = chemically synthesized
  source 1..22: mol_type = other DNA
taggtttccaggagggtgaaca

SEQ ID NO: 62676 - DNA, 22 bp, synthetic construct
  misc_feature 1..22: note = chemically synthesized
  source 1..22: mol_type = other DNA
ccaggagggtgaacaagggcca

SEQ ID NO: 62677 - DNA, 22 bp, synthetic construct
  misc_feature 1..22: note = chemically synthesized
  source 1..22: mol_type = other DNA
caggagggtgaacaagggccat

SEQ ID NO: 62678 - DNA, 22 bp, synthetic construct
  misc_feature 1..22: note = chemically synthesized
  source 1..22: mol_type = other DNA
ggtgtttgctgagggcttctca

SEQ ID NO: 62679 - DNA, 22 bp, synthetic construct
  misc_feature 1..22: note = chemically synthesized
  source 1..22: mol_type = other DNA
gctgagggcttctcagtcctgg

SEQ ID NO: 62680 - DNA, 22 bp, synthetic construct
  misc_feature 1..22: note = chemically synthesized
  source 1..22: mol_type = other DNA
ctgagggcttctcagtcctggg

SEQ ID NO: 62681 - DNA, 22 bp, synthetic construct
  misc_feature 1..22: note = chemically synthesized
  source 1..22: mol_type = other DNA
agggcttctcagtcctgggtag

SEQ ID NO: 62682 - DNA, 22 bp, synthetic construct
  misc_feature 1..22: note = chemically synthesized
  source 1..22: mol_type = other DNA
ctcagtcctgggtaggaactgc

SEQ ID NO: 62683 - DNA, 22 bp, synthetic construct
  misc_feature 1..22: note = chemically synthesized
  source 1..22: mol_type = other DNA
tcagtcctgggtaggaactgct

SEQ ID NO: 62684 - DNA, 22 bp, synthetic construct
  misc_feature 1..22: note = chemically synthesized
  source 1..22: mol_type = other DNA
agtcctgggtaggaactgctgg

SEQ ID NO: 62685 - DNA, 22 bp, synthetic construct
  misc_feature 1..22: note = chemically synthesized
  source 1..22: mol_type = other DNA
ggtaggaactgctgggtgtgga

SEQ ID NO: 62686 - DNA, 22 bp, synthetic construct
  misc_feature 1..22: note = chemically synthesized
  source 1..22: mol_type = other DNA
ctgggtgtggaaaccaccaagg

SEQ ID NO: 62687 - DNA, 22 bp, synthetic construct
  misc_feature 1..22: note = chemically synthesized
  source 1..22: mol_type = other DNA
ggtgtggaaaccaccaaggctt

SEQ ID NO: 62688 - DNA, 22 bp, synthetic construct
  misc_feature 1..22: note = chemically synthesized
  source 1..22: mol_type = other DNA
tgtaagcctgaaagagccactg

SEQ ID NO: 62689 - DNA, 22 bp, synthetic construct
  misc_feature 1..22: note = chemically synthesized
  source 1..22: mol_type = other DNA
gtaagcctgaaagagccactgg

SEQ ID NO: 62690 - DNA, 22 bp, synthetic construct
  misc_feature 1..22: note = chemically synthesized
  source 1..22: mol_type = other DNA
taagcctgaaagagccactggt

SEQ ID NO: 62691 - DNA, 22 bp, synthetic construct
  misc_feature 1..22: note = chemically synthesized
  source 1..22: mol_type = other DNA
aaagagccactggtattgggag

SEQ ID NO: 62692 - DNA, 22 bp, synthetic construct
  misc_feature 1..22: note = chemically synthesized
  source 1..22: mol_type = other DNA
gtattgggagcttggtctgcac

SEQ ID NO: 62693 - DNA, 22 bp, synthetic construct
  misc_feature 1..22: note = chemically synthesized
  source 1..22: mol_type = other DNA
ggagcttggtctgcactcagac

SEQ ID NO: 62694 - DNA, 22 bp, synthetic construct
  misc_feature 1..22: note = chemically synthesized
  source 1..22: mol_type = other DNA
ggtctgcactcagacctgagcg

SEQ ID NO: 62695 - DNA, 22 bp, synthetic construct
  misc_feature 1..22: note = chemically synthesized
  source 1..22: mol_type = other DNA
gtctgcactcagacctgagcgc

SEQ ID NO: 62696 - DNA, 22 bp, synthetic construct
  misc_feature 1..22: note = chemically synthesized
  source 1..22: mol_type = other DNA
cactcagacctgagcgccacac

SEQ ID NO: 62697 - DNA, 22 bp, synthetic construct
  misc_feature 1..22: note = chemically synthesized
  source 1..22: mol_type = other DNA
agacctgagcgccacacattat

SEQ ID NO: 62698 - DNA, 22 bp, synthetic construct
  misc_feature 1..22: note = chemically synthesized
  source 1..22: mol_type = other DNA
agcgccacacattattttccca

SEQ ID NO: 62699 - DNA, 22 bp, synthetic construct
  misc_feature 1..22: note = chemically synthesized
  source 1..22: mol_type = other DNA
ttttcccagatttgggcaatct

SEQ ID NO: 62700 - DNA, 22 bp, synthetic construct
  misc_feature 1..22: note = chemically synthesized
  source 1..22: mol_type = other DNA
tcccagatttgggcaatctaat

SEQ ID NO: 62701 - DNA, 22 bp, synthetic construct
  misc_feature 1..22: note = chemically synthesized
  source 1..22: mol_type = other DNA
cccagatttgggcaatctaatg

SEQ ID NO: 62702 - DNA, 22 bp, synthetic construct
  misc_feature 1..22: note = chemically synthesized
  source 1..22: mol_type = other DNA
ccagatttgggcaatctaatgg

SEQ ID NO: 62703 - DNA, 22 bp, synthetic construct
  misc_feature 1..22: note = chemically synthesized
  source 1..22: mol_type = other DNA
gggcaatctaatggataggagg

SEQ ID NO: 62704 - DNA, 22 bp, synthetic construct
  misc_feature 1..22: note = chemically synthesized
  source 1..22: mol_type = other DNA
ggcaatctaatggataggaggg

SEQ ID NO: 62705 - DNA, 22 bp, synthetic construct
  misc_feature 1..22: note = chemically synthesized
  source 1..22: mol_type = other DNA
atggataggagggagggttatg

SEQ ID NO: 62706 - DNA, 22 bp, synthetic construct
  misc_feature 1..22: note = chemically synthesized
  source 1..22: mol_type = other DNA
tgccccatctgtgaataggtgg

SEQ ID NO: 62707 - DNA, 22 bp, synthetic construct
  misc_feature 1..22: note = chemically synthesized
  source 1..22: mol_type = other DNA
tgaataggtggaggagagggtc

SEQ ID NO: 62708 - DNA, 22 bp, synthetic construct
  misc_feature 1..22: note = chemically synthesized
  source 1..22: mol_type = other DNA
ttgcagtgctcagaggaagcaa

SEQ ID NO: 62709 - DNA, 22 bp, synthetic construct
  misc_feature 1..22: note = chemically synthesized
  source 1..22: mol_type = other DNA
cagtgctcagaggaagcaatag

SEQ ID NO: 62710 - DNA, 22 bp, synthetic construct
  misc_feature 1..22: note = chemically synthesized
  source 1..22: mol_type = other DNA
agaggaagcaatagcctactgt

SEQ ID NO: 62711 - DNA, 22 bp, synthetic construct
  misc_feature 1..22: note = chemically synthesized
  source 1..22: mol_type = other DNA
ctgtcttccagggacatgtctg

SEQ ID NO: 62712 - DNA, 22 bp, synthetic construct
  misc_feature 1..22: note = chemically synthesized
  source 1..22: mol_type = other DNA
tcttccagggacatgtctggct

SEQ ID NO: 62713 - DNA, 22 bp, synthetic construct
  misc_feature 1..22: note = chemically synthesized
  source 1..22: mol_type = other DNA
ccagggacatgtctggctcctg

SEQ ID NO: 62714 - DNA, 22 bp, synthetic construct
  misc_feature 1..22: note = chemically synthesized
  source 1..22: mol_type = other DNA
cagggacatgtctggctcctgg

SEQ ID NO: 62715 - DNA, 22 bp, synthetic construct
  misc_feature 1..22: note = chemically synthesized
  source 1..22: mol_type = other DNA
gctcctggaatgcctgtccagg

SEQ ID NO: 62716 - DNA, 22 bp, synthetic construct
  misc_feature 1..22: note = chemically synthesized
  source 1..22: mol_type = other DNA
ctggaatgcctgtccaggctgc

SEQ ID NO: 62717 - DNA, 22 bp, synthetic construct
  misc_feature 1..22: note = chemically synthesized
  source 1..22: mol_type = other DNA
gaatgcctgtccaggctgcggt

SEQ ID NO: 62718 - DNA, 22 bp, synthetic construct
  misc_feature 1..22: note = chemically synthesized
  source 1..22: mol_type = other DNA
tccaggctgcggtgggtggcat

SEQ ID NO: 62719 - DNA, 22 bp, synthetic construct
  misc_feature 1..22: note = chemically synthesized
  source 1..22: mol_type = other DNA
cggtgggtggcatgggtaaggg

SEQ ID NO: 62720 - DNA, 22 bp, synthetic construct
  misc_feature 1..22: note = chemically synthesized
  source 1..22: mol_type = other DNA
ttaataaaaagtcacaatgcct

SEQ ID NO: 62721 - DNA, 22 bp, synthetic construct
  misc_feature 1..22: note = chemically synthesized
  source 1..22: mol_type = other DNA
taataaaaagtcacaatgcctg

SEQ ID NO: 62722 - DNA, 22 bp, synthetic construct
  misc_feature 1..22: note = chemically synthesized
  source 1..22: mol_type = other DNA
aataaaaagtcacaatgcctgg

SEQ ID NO: 62723 - DNA, 22 bp, synthetic construct
  misc_feature 1..22: note = chemically synthesized
  source 1..22: mol_type = other DNA
ataaaaagtcacaatgcctgga

SEQ ID NO: 62724 - DNA, 22 bp, synthetic construct
  misc_feature 1..22: note = chemically synthesized
  source 1..22: mol_type = other DNA
gagaagtgaggctccttgcagc

SEQ ID NO: 62725 - DNA, 22 bp, synthetic construct
  misc_feature 1..22: note = chemically synthesized
  source 1..22: mol_type = other DNA
cttgcagccacctgccttttct

SEQ ID NO: 62726 - DNA, 22 bp, synthetic construct
  misc_feature 1..22: note = chemically synthesized
  source 1..22: mol_type = other DNA
gcagccacctgccttttctgtc

SEQ ID NO: 62727 - DNA, 22 bp, synthetic construct
  misc_feature 1..22: note = chemically synthesized
  source 1..22: mol_type = other DNA
cagccacctgccttttctgtct

SEQ ID NO: 62728 - DNA, 22 bp, synthetic construct
  misc_feature 1..22: note = chemically synthesized
  source 1..22: mol_type = other DNA
ccttttctgtcttgggtctcct

SEQ ID NO: 62729 - DNA, 22 bp, synthetic construct
  misc_feature 1..22: note = chemically synthesized
  source 1..22: mol_type = other DNA
ttctgtcttgggtctcctggtt

SEQ ID NO: 62730 - DNA, 22 bp, synthetic construct
  misc_feature 1..22: note = chemically synthesized
  source 1..22: mol_type = other DNA
tctgtcttgggtctcctggttg

SEQ ID NO: 62731 - DNA, 22 bp, synthetic construct
  misc_feature 1..22: note = chemically synthesized
  source 1..22: mol_type = other DNA
ctgtcttgggtctcctggttgg

SEQ ID NO: 62732 - DNA, 22 bp, synthetic construct
  misc_feature 1..22: note = chemically synthesized
  source 1..22: mol_type = other DNA
tgtcttgggtctcctggttgga

SEQ ID NO: 62733 - DNA, 22 bp, synthetic construct
  misc_feature 1..22: note = chemically synthesized
  source 1..22: mol_type = other DNA
tcttgggtctcctggttggacc

SEQ ID NO: 62734 - DNA, 22 bp, synthetic construct
  misc_feature 1..22: note = chemically synthesized
  source 1..22: mol_type = other DNA
gggtctcctggttggaccccat

SEQ ID NO: 62735 - DNA, 22 bp, synthetic construct
  misc_feature 1..22: note = chemically synthesized
  source 1..22: mol_type = other DNA
ggtctcctggttggaccccatt

SEQ ID NO: 62736 - DNA, 22 bp, synthetic construct
  misc_feature 1..22: note = chemically synthesized
  source 1..22: mol_type = other DNA
ctggttggaccccattctggct

SEQ ID NO: 62737 - DNA, 22 bp, synthetic construct
  misc_feature 1..22: note = chemically synthesized
  source 1..22: mol_type = other DNA
gttggaccccattctggctttc

SEQ ID NO: 62738 - DNA, 22 bp, synthetic construct
  misc_feature 1..22: note = chemically synthesized
  source 1..22: mol_type = other DNA
gaccccattctggctttccacc

SEQ ID NO: 62739 - DNA, 22 bp, synthetic construct
  misc_feature 1..22: note = chemically synthesized
  source 1..22: mol_type = other DNA
tggctttccacctggtcagagc

SEQ ID NO: 62740 - DNA, 22 bp, synthetic construct
  misc_feature 1..22: note = chemically synthesized
  source 1..22: mol_type = other DNA
gctttccacctggtcagagcct

SEQ ID NO: 62741 - DNA, 22 bp, synthetic construct
  misc_feature 1..22: note = chemically synthesized
  source 1..22: mol_type = other DNA
tccacctggtcagagcctcctg

SEQ ID NO: 62742 - DNA, 22 bp, synthetic construct
  misc_feature 1..22: note = chemically synthesized
  source 1..22: mol_type = other DNA
ccacctggtcagagcctcctga

SEQ ID NO: 62743 - DNA, 22 bp, synthetic construct
  misc_feature 1..22: note = chemically synthesized
  source 1..22: mol_type = other DNA
cacctggtcagagcctcctgag

SEQ ID NO: 62744 - DNA, 22 bp, synthetic construct
  misc_feature 1..22: note = chemically synthesized
  source 1..22: mol_type = other DNA
gtcagagcctcctgaggctgca

SEQ ID NO: 62745 - DNA, 22 bp, synthetic construct
  misc_feature 1..22: note = chemically synthesized
  source 1..22: mol_type = other DNA
ctgaggctgcagaatggggcta

SEQ ID NO: 62746 - DNA, 22 bp, synthetic construct
  misc_feature 1..22: note = chemically synthesized
  source 1..22: mol_type = other DNA
aggctgcagaatggggctaaca

SEQ ID NO: 62747 - DNA, 22 bp, synthetic construct
  misc_feature 1..22: note = chemically synthesized
  source 1..22: mol_type = other DNA
cagaatggggctaacatgatca

SEQ ID NO: 62748 - DNA, 22 bp, synthetic construct
  misc_feature 1..22: note = chemically synthesized
  source 1..22: mol_type = other DNA
acatgatcaagggtgatgtggc

SEQ ID NO: 62749 - DNA, 22 bp, synthetic construct
  misc_feature 1..22: note = chemically synthesized
  source 1..22: mol_type = other DNA
ctccatcttgggactaggagtg

SEQ ID NO: 62750 - DNA, 22 bp, synthetic construct
  misc_feature 1..22: note = chemically synthesized
  source 1..22: mol_type = other DNA
tccatcttgggactaggagtga

SEQ ID NO: 62751 - DNA, 22 bp, synthetic construct
  misc_feature 1..22: note = chemically synthesized
  source 1..22: mol_type = other DNA
catcttgggactaggagtgacc

SEQ ID NO: 62752 - DNA, 22 bp, synthetic construct
  misc_feature 1..22: note = chemically synthesized
  source 1..22: mol_type = other DNA
gggactaggagtgaccaggttt

SEQ ID NO: 62753 - DNA, 22 bp, synthetic construct
  misc_feature 1..22: note = chemically synthesized
  source 1..22: mol_type = other DNA
ggactaggagtgaccaggttta

SEQ ID NO: 62754 - DNA, 22 bp, synthetic construct
  misc_feature 1..22: note = chemically synthesized
  source 1..22: mol_type = other DNA
ggagtgaccaggtttagagaag

SEQ ID NO: 62755 - DNA, 22 bp, synthetic construct
  misc_feature 1..22: note = chemically synthesized
  source 1..22: mol_type = other DNA
agagaaggtggactcattcctg

SEQ ID NO: 62756 - DNA, 22 bp, synthetic construct
  misc_feature 1..22: note = chemically synthesized
  source 1..22: mol_type = other DNA
gagaaggtggactcattcctgc

SEQ ID NO: 62757 - DNA, 22 bp, synthetic construct
  misc_feature 1..22: note = chemically synthesized
  source 1..22: mol_type = other DNA
attcctgctcccattgccagga

SEQ ID NO: 62758 - DNA, 22 bp, synthetic construct
  misc_feature 1..22: note = chemically synthesized
  source 1..22: mol_type = other DNA
ctgctcccattgccaggacaaa

SEQ ID NO: 62759 - DNA, 22 bp, synthetic construct
  misc_feature 1..22: note = chemically synthesized
  source 1..22: mol_type = other DNA
ctcccattgccaggacaaatgc

SEQ ID NO: 62760 - DNA, 22 bp, synthetic construct
  misc_feature 1..22: note = chemically synthesized
  source 1..22: mol_type = other DNA
ccattgccaggacaaatgcaga

SEQ ID NO: 62761 - DNA, 22 bp, synthetic construct
  misc_feature 1..22: note = chemically synthesized
  source 1..22: mol_type = other DNA
ccaggacaaatgcagagtggat

SEQ ID NO: 62762 - DNA, 22 bp, synthetic construct
  misc_feature 1..22: note = chemically synthesized
  source 1..22: mol_type = other DNA
ggtctgtcccttccacacagac

SEQ ID NO: 62763 - DNA, 22 bp, synthetic construct
  misc_feature 1..22: note = chemically synthesized
  source 1..22: mol_type = other DNA
tcccttccacacagacaccttc

SEQ ID NO: 62764 - DNA, 22 bp, synthetic construct
  misc_feature 1..22: note = chemically synthesized
  source 1..22: mol_type = other DNA
ccacacagacaccttcatttca

SEQ ID NO: 62765 - DNA, 22 bp, synthetic construct
  misc_feature 1..22: note = chemically synthesized
  source 1..22: mol_type = other DNA
cacacagacaccttcatttcaa

SEQ ID NO: 62766 - DNA, 22 bp, synthetic construct
  misc_feature 1..22: note = chemically synthesized
  source 1..22: mol_type = other DNA
catttcaacacattccgtgtgt

SEQ ID NO: 62767 - DNA, 22 bp, synthetic construct
  misc_feature 1..22: note = chemically synthesized
  source 1..22: mol_type = other DNA
atttcaacacattccgtgtgta

SEQ ID NO: 62768 - DNA, 22 bp, synthetic construct
  misc_feature 1..22: note = chemically synthesized
  source 1..22: mol_type = other DNA
caacacattccgtgtgtattaa

SEQ ID NO: 62769 - DNA, 22 bp, synthetic construct
  misc_feature 1..22: note = chemically synthesized
  source 1..22: mol_type = other DNA
aacacattccgtgtgtattaag

SEQ ID NO: 62770 - DNA, 22 bp, synthetic construct
  misc_feature 1..22: note = chemically synthesized
  source 1..22: mol_type = other DNA
cgtgtgtattaagatgacagac

SEQ ID NO: 62771 - DNA, 22 bp, synthetic construct
  misc_feature 1..22: note = chemically synthesized
  source 1..22: mol_type = other DNA
agatgacagacacgttggtttt

SEQ ID NO: 62772 - DNA, 22 bp, synthetic construct
  misc_feature 1..22: note = chemically synthesized
  source 1..22: mol_type = other DNA
gttttgctccaagccagtagcc

SEQ ID NO: 62773 - DNA, 22 bp, synthetic construct
  misc_feature 1..22: note = chemically synthesized
  source 1..22: mol_type = other DNA
tgctccaagccagtagccatcc

SEQ ID NO: 62774 - DNA, 22 bp, synthetic construct
  misc_feature 1..22: note = chemically synthesized
  source 1..22: mol_type = other DNA
gctccaagccagtagccatccc

SEQ ID NO: 62775 - DNA, 22 bp, synthetic construct
  misc_feature 1..22: note = chemically synthesized
  source 1..22: mol_type = other DNA
ctccaagccagtagccatcccc

SEQ ID NO: 62776 - DNA, 22 bp, synthetic construct
  misc_feature 1..22: note = chemically synthesized
  source 1..22: mol_type = other DNA
caagccagtagccatcccccta

SEQ ID NO: 62777 - DNA, 22 bp, synthetic construct
  misc_feature 1..22: note = chemically synthesized
  source 1..22: mol_type = other DNA
gacagcccaggccttaaaagac

SEQ ID NO: 62778 - DNA, 22 bp, synthetic construct
  misc_feature 1..22: note = chemically synthesized
  source 1..22: mol_type = other DNA
aaaagacaaggaggtgtttgga

SEQ ID NO: 62779 - DNA, 22 bp, synthetic construct
  misc_feature 1..22: note = chemically synthesized
  source 1..22: mol_type = other DNA
aaagacaaggaggtgtttggac

SEQ ID NO: 62780 - DNA, 22 bp, synthetic construct
  misc_feature 1..22: note = chemically synthesized
  source 1..22: mol_type = other DNA
ggacaagagcaagaaagaagtc

SEQ ID NO: 62781 - DNA, 22 bp, synthetic construct
  misc_feature 1..22: note = chemically synthesized
  source 1..22: mol_type = other DNA
gacaagagcaagaaagaagtct

SEQ ID NO: 62782 - DNA, 22 bp, synthetic construct
  misc_feature 1..22: note = chemically synthesized
  source 1..22: mol_type = other DNA
gctgtgtcttctgggagcccca

SEQ ID NO: 62783 - DNA, 22 bp, synthetic construct
  misc_feature 1..22: note = chemically synthesized
  source 1..22: mol_type = other DNA
tgtcttctgggagccccagaca

SEQ ID NO: 62784 - DNA, 22 bp, synthetic construct
  misc_feature 1..22: note = chemically synthesized
  source 1..22: mol_type = other DNA
ctgggagccccagacagaccag

SEQ ID NO: 62785 - DNA, 22 bp, synthetic construct
  misc_feature 1..22: note = chemically synthesized
  source 1..22: mol_type = other DNA
tgggagccccagacagaccagt

SEQ ID NO: 62786 - DNA, 22 bp, synthetic construct
  misc_feature 1..22: note = chemically synthesized
  source 1..22: mol_type = other DNA
ggagccccagacagaccagtgt

SEQ ID NO: 62787 - DNA, 22 bp, synthetic construct
  misc_feature 1..22: note = chemically synthesized
  source 1..22: mol_type = other DNA
tttctcactggttcactccttc

SEQ ID NO: 62788 - DNA, 22 bp, synthetic construct
  misc_feature 1..22: note = chemically synthesized
  source 1..22: mol_type = other DNA
tctcactggttcactccttccc

SEQ ID NO: 62789 - DNA, 22 bp, synthetic construct
  misc_feature 1..22: note = chemically synthesized
  source 1..22: mol_type = other DNA
ctcactggttcactccttcccc

SEQ ID NO: 62790 - DNA, 22 bp, synthetic construct
  misc_feature 1..22: note = chemically synthesized
  source 1..22: mol_type = other DNA
tcactggttcactccttcccca

SEQ ID NO: 62791 - DNA, 22 bp, synthetic construct
  misc_feature 1..22: note = chemically synthesized
  source 1..22: mol_type = other DNA
actggttcactccttccccagc

SEQ ID NO: 62792 - DNA, 22 bp, synthetic construct
  misc_feature 1..22: note = chemically synthesized
  source 1..22: mol_type = other DNA
gttcactccttccccagctcat

SEQ ID NO: 62793 - DNA, 22 bp, synthetic construct
  misc_feature 1..22: note = chemically synthesized
  source 1..22: mol_type = other DNA
actccttccccagctcatttta

SEQ ID NO: 62794 - DNA, 22 bp, synthetic construct
  misc_feature 1..22: note = chemically synthesized
  source 1..22: mol_type = other DNA
cttccccagctcattttaccca

SEQ ID NO: 62795 - DNA, 22 bp, synthetic construct
  misc_feature 1..22: note = chemically synthesized
  source 1..22: mol_type = other DNA
ccccagctcattttacccactc

SEQ ID NO: 62796 - DNA, 22 bp, synthetic construct
  misc_feature 1..22: note = chemically synthesized
  source 1..22: mol_type = other DNA
cccagctcattttacccactcg

SEQ ID NO: 62797 - DNA, 22 bp, synthetic construct
  misc_feature 1..22: note = chemically synthesized
  source 1..22: mol_type = other DNA
attttacccactcgagacttga

SEQ ID NO: 62798 - DNA, 22 bp, synthetic construct
  misc_feature 1..22: note = chemically synthesized
  source 1..22: mol_type = other DNA
tacccactcgagacttgattct

SEQ ID NO: 62799 - DNA, 22 bp, synthetic construct
  misc_feature 1..22: note = chemically synthesized
  source 1..22: mol_type = other DNA
acccactcgagacttgattctc

SEQ ID NO: 62800 - DNA, 22 bp, synthetic construct
  misc_feature 1..22: note = chemically synthesized
  source 1..22: mol_type = other DNA
cccactcgagacttgattctct

SEQ ID NO: 62801 - DNA, 22 bp, synthetic construct
  misc_feature 1..22: note = chemically synthesized
  source 1..22: mol_type = other DNA
gagacttgattctcttagagat

SEQ ID NO: 62802 - DNA, 22 bp, synthetic construct
  misc_feature 1..22: note = chemically synthesized
  source 1..22: mol_type = other DNA
gattctcttagagattaagtac

SEQ ID NO: 62803 - DNA, 22 bp, synthetic construct
  misc_feature 1..22: note = chemically synthesized
  source 1..22: mol_type = other DNA
attctcttagagattaagtacc

SEQ ID NO: 62804 - DNA, 22 bp, synthetic construct
  misc_feature 1..22: note = chemically synthesized
  source 1..22: mol_type = other DNA
tcttagagattaagtacctccc

SEQ ID NO: 62805 - DNA, 22 bp, synthetic construct
  misc_feature 1..22: note = chemically synthesized
  source 1..22: mol_type = other DNA
ttagagattaagtacctcccct

SEQ ID NO: 62806 - DNA, 22 bp, synthetic construct
  misc_feature 1..22: note = chemically synthesized
  source 1..22: mol_type = other DNA
agagattaagtacctcccctgg

SEQ ID NO: 62807 - DNA, 22 bp, synthetic construct
  misc_feature 1..22: note = chemically synthesized
  source 1..22: mol_type = other DNA
gagattaagtacctcccctggt

SEQ ID NO: 62808 - DNA, 22 bp, synthetic construct
  misc_feature 1..22: note = chemically synthesized
  source 1..22: mol_type = other DNA
agtacctcccctggtcacatag

SEQ ID NO: 62809 - DNA, 22 bp, synthetic construct
  misc_feature 1..22: note = chemically synthesized
  source 1..22: mol_type = other DNA
ccctggtcacatagtttctggg

SEQ ID NO: 62810 - DNA, 22 bp, synthetic construct
  misc_feature 1..22: note = chemically synthesized
  source 1..22: mol_type = other DNA
gtcacatagtttctgggtgaca

SEQ ID NO: 62811 - DNA, 22 bp, synthetic construct
  misc_feature 1..22: note = chemically synthesized
  source 1..22: mol_type = other DNA
ctgggtgacaggactagaattt

SEQ ID NO: 62812 - DNA, 22 bp, synthetic construct
  misc_feature 1..22: note = chemically synthesized
  source 1..22: mol_type = other DNA
tgggtgacaggactagaattta

SEQ ID NO: 62813 - DNA, 22 bp, synthetic construct
  misc_feature 1..22: note = chemically synthesized
  source 1..22: mol_type = other DNA
ggtgacaggactagaatttatt

SEQ ID NO: 62814 - DNA, 22 bp, synthetic construct
  misc_feature 1..22: note = chemically synthesized
  source 1..22: mol_type = other DNA
gaatttatttcttttgatcacc

SEQ ID NO: 62815 - DNA, 22 bp, synthetic construct
  misc_feature 1..22: note = chemically synthesized
  source 1..22: mol_type = other DNA
atttcttttgatcaccaattga

SEQ ID NO: 62816 - DNA, 22 bp, synthetic construct
  misc_feature 1..22: note = chemically synthesized
  source 1..22: mol_type = other DNA
tttcttttgatcaccaattgag

SEQ ID NO: 62817 - DNA, 22 bp, synthetic construct
  misc_feature 1..22: note = chemically synthesized
  source 1..22: mol_type = other DNA
cttttgatcaccaattgagtgc

SEQ ID NO: 62818 - DNA, 22 bp, synthetic construct
  misc_feature 1..22: note = chemically synthesized
  source 1..22: mol_type = other DNA
ttttgatcaccaattgagtgct

SEQ ID NO: 62819 - DNA, 22 bp, synthetic construct
  misc_feature 1..22: note = chemically synthesized
  source 1..22: mol_type = other DNA
ttgatcaccaattgagtgctct

SEQ ID NO: 62820 - DNA, 22 bp, synthetic construct
  misc_feature 1..22: note = chemically synthesized
  source 1..22: mol_type = other DNA
tgatcaccaattgagtgctctt

SEQ ID NO: 62821 - DNA, 22 bp, synthetic construct
  misc_feature 1..22: note = chemically synthesized
  source 1..22: mol_type = other DNA
gatcaccaattgagtgctcttt

SEQ ID NO: 62822 - DNA, 22 bp, synthetic construct
  misc_feature 1..22: note = chemically synthesized
  source 1..22: mol_type = other DNA
atcaccaattgagtgctctttc

SEQ ID NO: 62823 - DNA, 22 bp, synthetic construct
  misc_feature 1..22: note = chemically synthesized
  source 1..22: mol_type = other DNA
agtgctctttctgctctactgt

SEQ ID NO: 62824 - DNA, 22 bp, synthetic construct
  misc_feature 1..22: note = chemically synthesized
  source 1..22: mol_type = other DNA
tttctgctctactgtgctacca

SEQ ID NO: 62825 - DNA, 22 bp, synthetic construct
  misc_feature 1..22: note = chemically synthesized
  source 1..22: mol_type = other DNA
tctgctctactgtgctaccatg

SEQ ID NO: 62826 - DNA, 22 bp, synthetic construct
  misc_feature 1..22: note = chemically synthesized
  source 1..22: mol_type = other DNA
ctgctctactgtgctaccatga

SEQ ID NO: 62827 - DNA, 22 bp, synthetic construct
  misc_feature 1..22: note = chemically synthesized
  source 1..22: mol_type = other DNA
tgctctactgtgctaccatgat

SEQ ID NO: 62828 - DNA, 22 bp, synthetic construct
  misc_feature 1..22: note = chemically synthesized
  source 1..22: mol_type = other DNA
ctctactgtgctaccatgatca

SEQ ID NO: 62829 - DNA, 22 bp, synthetic construct
  misc_feature 1..22: note = chemically synthesized
  source 1..22: mol_type = other DNA
tactgtgctaccatgatcagag

SEQ ID NO: 62830 - DNA, 22 bp, synthetic construct
  misc_feature 1..22: note = chemically synthesized
  source 1..22: mol_type = other DNA
ctgtgctaccatgatcagaggt

SEQ ID NO: 62831 - DNA, 22 bp, synthetic construct
  misc_feature 1..22: note = chemically synthesized
  source 1..22: mol_type = other DNA
tgctaccatgatcagaggtaaa

SEQ ID NO: 62832 - DNA, 22 bp, synthetic construct
  misc_feature 1..22: note = chemically synthesized
  source 1..22: mol_type = other DNA
ccatgatcagaggtaaatttgt

SEQ ID NO: 62833 - DNA, 22 bp, synthetic construct
  misc_feature 1..22: note = chemically synthesized
  source 1..22: mol_type = other DNA
gtttttctctgatgatgattga

SEQ ID NO: 62834 - DNA, 22 bp, synthetic construct
  misc_feature 1..22: note = chemically synthesized
  source 1..22: mol_type = other DNA
tttttctctgatgatgattgaa

SEQ ID NO: 62835 - DNA, 22 bp, synthetic construct
  misc_feature 1..22: note = chemically synthesized
  source 1..22: mol_type = other DNA
ttctctgatgatgattgaaaac

SEQ ID NO: 62836 - DNA, 22 bp, synthetic construct
  misc_feature 1..22: note = chemically synthesized
  source 1..22: mol_type = other DNA
tctctgatgatgattgaaaaca

SEQ ID NO: 62837 - DNA, 22 bp, synthetic construct
  misc_feature 1..22: note = chemically synthesized
  source 1..22: mol_type = other DNA
ctctgatgatgattgaaaacag

SEQ ID NO: 62838 - DNA, 22 bp, synthetic construct
  misc_feature 1..22: note = chemically synthesized
  source 1..22: mol_type = other DNA
tctgatgatgattgaaaacagt

SEQ ID NO: 62839 - DNA, 22 bp, synthetic construct
  misc_feature 1..22: note = chemically synthesized
  source 1..22: mol_type = other DNA
tgatgatgattgaaaacagttt

SEQ ID NO: 62840 - DNA, 22 bp, synthetic construct
  misc_feature 1..22: note = chemically synthesized
  source 1..22: mol_type = other DNA
atgatgattgaaaacagtttta

SEQ ID NO: 62841 - DNA, 22 bp, synthetic construct
  misc_feature 1..22: note = chemically synthesized
  source 1..22: mol_type = other DNA
aaaacagttttattaacatatc

SEQ ID NO: 62842 - DNA, 22 bp, synthetic construct
  misc_feature 1..22: note = chemically synthesized
  source 1..22: mol_type = other DNA
tattaacatatcaagaacatta

SEQ ID NO: 62843 - DNA, 22 bp, synthetic construct
  misc_feature 1..22: note = chemically synthesized
  source 1..22: mol_type = other DNA
attaacatatcaagaacattac

SEQ ID NO: 62844 - DNA, 22 bp, synthetic construct
  misc_feature 1..22: note = chemically synthesized
  source 1..22: mol_type = other DNA
ttaacatatcaagaacattaca

SEQ ID NO: 62845 - DNA, 22 bp, synthetic construct
  misc_feature 1..22: note = chemically synthesized
  source 1..22: mol_type = other DNA
acatatcaagaacattacaaca

SEQ ID NO: 62846 - DNA, 22 bp, synthetic construct
  misc_feature 1..22: note = chemically synthesized
  source 1..22: mol_type = other DNA
caacacaaagagtttctggttt

SEQ ID NO: 62847 - DNA, 22 bp, synthetic construct
  misc_feature 1..22: note = chemically synthesized
  source 1..22: mol_type = other DNA
ctggtttaaaaaatctcttttc

SEQ ID NO: 62848 - DNA, 22 bp, synthetic construct
  misc_feature 1..22: note = chemically synthesized
  source 1..22: mol_type = other DNA
tggtttaaaaaatctcttttca

SEQ ID NO: 62849 - DNA, 22 bp, synthetic construct
  misc_feature 1..22: note = chemically synthesized
  source 1..22: mol_type = other DNA
gtttaaaaaatctcttttcact

SEQ ID NO: 62850 - DNA, 22 bp, synthetic construct
  misc_feature 1..22: note = chemically synthesized
  source 1..22: mol_type = other DNA
aaaaaatctcttttcactggta

SEQ ID NO: 62851 - DNA, 22 bp, synthetic construct
  misc_feature 1..22: note = chemically synthesized
  source 1..22: mol_type = other DNA
aaaaatctcttttcactggtat

SEQ ID NO: 62852 - DNA, 22 bp, synthetic construct
  misc_feature 1..22: note = chemically synthesized
  source 1..22: mol_type = other DNA
ttttcactggtatttcttaaat

SEQ ID NO: 62853 - DNA, 22 bp, synthetic construct
  misc_feature 1..22: note = chemically synthesized
  source 1..22: mol_type = other DNA
ttcactggtatttcttaaattc

SEQ ID NO: 62854 - DNA, 22 bp, synthetic construct
  misc_feature 1..22: note = chemically synthesized
  source 1..22: mol_type = other DNA
tcactggtatttcttaaattca

SEQ ID NO: 62855 - DNA, 22 bp, synthetic construct
  misc_feature 1..22: note = chemically synthesized
  source 1..22: mol_type = other DNA
cactggtatttcttaaattcat

SEQ ID NO: 62856 - DNA, 22 bp, synthetic construct
  misc_feature 1..22: note = chemically synthesized
  source 1..22: mol_type = other DNA
actggtatttcttaaattcata

SEQ ID NO: 62857 - DNA, 22 bp, synthetic construct
  misc_feature 1..22: note = chemically synthesized
  source 1..22: mol_type = other DNA
gtatttcttaaattcatatttt

SEQ ID NO: 62858 - DNA, 22 bp, synthetic construct
  misc_feature 1..22: note = chemically synthesized
  source 1..22: mol_type = other DNA
cttaaattcatattttaatatt

SEQ ID NO: 62859 - DNA, 22 bp, synthetic construct
  misc_feature 1..22: note = chemically synthesized
  source 1..22: mol_type = other DNA
ttaaattcatattttaatatta

SEQ ID NO: 62860 - DNA, 22 bp, synthetic construct
  misc_feature 1..22: note = chemically synthesized
  source 1..22: mol_type = other DNA
aaattcatattttaatattaga

SEQ ID NO: 62861 - DNA, 22 bp, synthetic construct
  misc_feature 1..22: note = chemically synthesized
  source 1..22: mol_type = other DNA
aattcatattttaatattagaa

SEQ ID NO: 62862 - DNA, 22 bp, synthetic construct
  misc_feature 1..22: note = chemically synthesized
  source 1..22: mol_type = other DNA
atattttaatattagaaagcat

SEQ ID NO: 62863 - DNA, 22 bp, synthetic construct
  misc_feature 1..22: note = chemically synthesized
  source 1..22: mol_type = other DNA
taatattagaaagcatgggatt

SEQ ID NO: 62864 - DNA, 22 bp, synthetic construct
  misc_feature 1..22: note = chemically synthesized
  source 1..22: mol_type = other DNA
aatattagaaagcatgggattg

SEQ ID NO: 62865 - DNA, 22 bp, synthetic construct
  misc_feature 1..22: note = chemically synthesized
  source 1..22: mol_type = other DNA
atattagaaagcatgggattgg

SEQ ID NO: 62866 - DNA, 22 bp, synthetic construct
  misc_feature 1..22: note = chemically synthesized
  source 1..22: mol_type = other DNA
gaaagcatgggattgggtgtga

SEQ ID NO: 62867 - DNA, 22 bp, synthetic construct
  misc_feature 1..22: note = chemically synthesized
  source 1..22: mol_type = other DNA
ggtgtgaacactgcttttggat

SEQ ID NO: 62868 - DNA, 22 bp, synthetic construct
  misc_feature 1..22: note = chemically synthesized
  source 1..22: mol_type = other DNA
cttttggatgttggaggaagat

SEQ ID NO: 62869 - DNA, 22 bp, synthetic construct
  misc_feature 1..22: note = chemically synthesized
  source 1..22: mol_type = other DNA
ttggatgttggaggaagataag

SEQ ID NO: 62870 - DNA, 22 bp, synthetic construct
  misc_feature 1..22: note = chemically synthesized
  source 1..22: mol_type = other DNA
tggatgttggaggaagataaga

SEQ ID NO: 62871 - DNA, 22 bp, synthetic construct
  misc_feature 1..22: note = chemically synthesized
  source 1..22: mol_type = other DNA
ggatgttggaggaagataagag

SEQ ID NO: 62872 - DNA, 22 bp, synthetic construct
  misc_feature 1..22: note = chemically synthesized
  source 1..22: mol_type = other DNA
gatgttggaggaagataagaga

SEQ ID NO: 62873 - DNA, 22 bp, synthetic construct
  misc_feature 1..22: note = chemically synthesized
  source 1..22: mol_type = other DNA
gaggaagataagagaaggaagc

SEQ ID NO: 62874 - DNA, 22 bp, synthetic construct
  misc_feature 1..22: note = chemically synthesized
  source 1..22: mol_type = other DNA
gctctttctttaggagcaatac

SEQ ID NO: 62875 - DNA, 22 bp, synthetic construct
  misc_feature 1..22: note = chemically synthesized
  source 1..22: mol_type = other DNA
tttctttaggagcaatacctga

SEQ ID NO: 62876 - DNA, 22 bp, synthetic construct
  misc_feature 1..22: note = chemically synthesized
  source 1..22: mol_type = other DNA
tctttaggagcaatacctgaga

SEQ ID NO: 62877 - DNA, 22 bp, synthetic construct
  misc_feature 1..22: note = chemically synthesized
  source 1..22: mol_type = other DNA
ctttaggagcaatacctgagat

SEQ ID NO: 62878 - DNA, 22 bp, synthetic construct
  misc_feature 1..22: note = chemically synthesized
  source 1..22: mol_type = other DNA
tttaggagcaatacctgagatc

SEQ ID NO: 62879 - DNA, 22 bp, synthetic construct
  misc_feature 1..22: note = chemically synthesized
  source 1..22: mol_type = other DNA
taggagcaatacctgagatccc

SEQ ID NO: 62880 - DNA, 22 bp, synthetic construct
  misc_feature 1..22: note = chemically synthesized
  source 1..22: mol_type = other DNA
aggagcaatacctgagatccca

SEQ ID NO: 62881 - DNA, 22 bp, synthetic construct
  misc_feature 1..22: note = chemically synthesized
  source 1..22: mol_type = other DNA
ggagcaatacctgagatcccag

SEQ ID NO: 62882 - DNA, 22 bp, synthetic construct
  misc_feature 1..22: note = chemically synthesized
  source 1..22: mol_type = other DNA
agatcccagaattgtatgtaca

SEQ ID NO: 62883 - DNA, 22 bp, synthetic construct
  misc_feature 1..22: note = chemically synthesized
  source 1..22: mol_type = other DNA
tatgtacaaagtgtgtgatggc

SEQ ID NO: 62884 - DNA, 22 bp, synthetic construct
  misc_feature 1..22: note = chemically synthesized
  source 1..22: mol_type = other DNA
aaatctgtgctagcgagaaacc

SEQ ID NO: 62885 - DNA, 22 bp, synthetic construct
  misc_feature 1..22: note = chemically synthesized
  source 1..22: mol_type = other DNA
tgctagcgagaaaccccctgct

SEQ ID NO: 62886 - DNA, 22 bp, synthetic construct
  misc_feature 1..22: note = chemically synthesized
  source 1..22: mol_type = other DNA
gcgagaaaccccctgctactct

SEQ ID NO: 62887 - DNA, 22 bp, synthetic construct
  misc_feature 1..22: note = chemically synthesized
  source 1..22: mol_type = other DNA
ctactcttctgaatctgatgaa

SEQ ID NO: 62888 - DNA, 22 bp, synthetic construct
  misc_feature 1..22: note = chemically synthesized
  source 1..22: mol_type = other DNA
ctcttctgaatctgatgaagaa

SEQ ID NO: 62889 - DNA, 22 bp, synthetic construct
  misc_feature 1..22: note = chemically synthesized
  source 1..22: mol_type = other DNA
ttctgaatctgatgaagaagtt

SEQ ID NO: 62890 - DNA, 22 bp, synthetic construct
  misc_feature 1..22: note = chemically synthesized
  source 1..22: mol_type = other DNA
ctgaatctgatgaagaagttat

SEQ ID NO: 62891 - DNA, 22 bp, synthetic construct
  misc_feature 1..22: note = chemically synthesized
  source 1..22: mol_type = other DNA
tgaatctgatgaagaagttatt

SEQ ID NO: 62892 - DNA, 22 bp, synthetic construct
  misc_feature 1..22: note = chemically synthesized
  source 1..22: mol_type = other DNA
aatctgatgaagaagttattct

SEQ ID NO: 62893 - DNA, 22 bp, synthetic construct
  misc_feature 1..22: note = chemically synthesized
  source 1..22: mol_type = other DNA
atgaagaagttattctgtctgt

SEQ ID NO: 62894 - DNA, 22 bp, synthetic construct
  misc_feature 1..22: note = chemically synthesized
  source 1..22: mol_type = other DNA
ttctgtctgtgcagttttatta

SEQ ID NO: 62895 - DNA, 22 bp, synthetic construct
  misc_feature 1..22: note = chemically synthesized
  source 1..22: mol_type = other DNA
tgtctgtgcagttttattaggc

SEQ ID NO: 62896 - DNA, 22 bp, synthetic construct
  misc_feature 1..22: note = chemically synthesized
  source 1..22: mol_type = other DNA
tctgtgcagttttattaggctg

SEQ ID NO: 62897 - DNA, 22 bp, synthetic construct
  misc_feature 1..22: note = chemically synthesized
  source 1..22: mol_type = other DNA
tgcagttttattaggctgagac

SEQ ID NO: 62898 - DNA, 22 bp, synthetic construct
  misc_feature 1..22: note = chemically synthesized
  source 1..22: mol_type = other DNA
tattaggctgagactttttccg

SEQ ID NO: 62899 - DNA, 22 bp, synthetic construct
  misc_feature 1..22: note = chemically synthesized
  source 1..22: mol_type = other DNA
attaggctgagactttttccga

SEQ ID NO: 62900 - DNA, 22 bp, synthetic construct
  misc_feature 1..22: note = chemically synthesized
  source 1..22: mol_type = other DNA
ttaggctgagactttttccgat

SEQ ID NO: 62901 - DNA, 22 bp, synthetic construct
  misc_feature 1..22: note = chemically synthesized
  source 1..22: mol_type = other DNA
ggctgagactttttccgatggt

SEQ ID NO: 62902 - DNA, 22 bp, synthetic construct
  misc_feature 1..22: note = chemically synthesized
  source 1..22: mol_type = other DNA
agactttttccgatggtttatt

SEQ ID NO: 62903 - DNA, 22 bp, synthetic construct
  misc_feature 1..22: note = chemically synthesized
  source 1..22: mol_type = other DNA
tttccgatggtttatttttccg

SEQ ID NO: 62904 - DNA, 22 bp, synthetic construct
  misc_feature 1..22: note = chemically synthesized
  source 1..22: mol_type = other DNA
ttccgatggtttatttttccgt

SEQ ID NO: 62905 - DNA, 22 bp, synthetic construct
  misc_feature 1..22: note = chemically synthesized
  source 1..22: mol_type = other DNA
tccgatggtttatttttccgtt

SEQ ID NO: 62906 - DNA, 22 bp, synthetic construct
  misc_feature 1..22: note = chemically synthesized
  source 1..22: mol_type = other DNA
ccgatggtttatttttccgttt

SEQ ID NO: 62907 - DNA, 22 bp, synthetic construct
  misc_feature 1..22: note = chemically synthesized
  source 1..22: mol_type = other DNA
cgatggtttatttttccgtttg

SEQ ID NO: 62908 - DNA, 22 bp, synthetic construct
  misc_feature 1..22: note = chemically synthesized
  source 1..22: mol_type = other DNA
atttttccgtttgctcacagaa

SEQ ID NO: 62909 - DNA, 22 bp, synthetic construct
  misc_feature 1..22: note = chemically synthesized
  source 1..22: mol_type = other DNA
tttttccgtttgctcacagaat

SEQ ID NO: 62910 - DNA, 22 bp, synthetic construct
  misc_feature 1..22: note = chemically synthesized
  source 1..22: mol_type = other DNA
ttccgtttgctcacagaatgta

SEQ ID NO: 62911 - DNA, 22 bp, synthetic construct
  misc_feature 1..22: note = chemically synthesized
  source 1..22: mol_type = other DNA
tccgtttgctcacagaatgtag

SEQ ID NO: 62912 - DNA, 22 bp, synthetic construct
  misc_feature 1..22: note = chemically synthesized
  source 1..22: mol_type = other DNA
ccgtttgctcacagaatgtaga

SEQ ID NO: 62913 - DNA, 22 bp, synthetic construct
  misc_feature 1..22: note = chemically synthesized
  source 1..22: mol_type = other DNA
cgtttgctcacagaatgtagag

SEQ ID NO: 62914 - DNA, 22 bp, synthetic construct
  misc_feature 1..22: note = chemically synthesized
  source 1..22: mol_type = other DNA
gctcacagaatgtagaggagag

SEQ ID NO: 62915 - DNA, 22 bp, synthetic construct
  misc_feature 1..22: note = chemically synthesized
  source 1..22: mol_type = other DNA
ctcacagaatgtagaggagagc

SEQ ID NO: 62916 - DNA, 22 bp, synthetic construct
  misc_feature 1..22: note = chemically synthesized
  source 1..22: mol_type = other DNA
acagaatgtagaggagagccag

SEQ ID NO: 62917 - DNA, 22 bp, synthetic construct
  misc_feature 1..22: note = chemically synthesized
  source 1..22: mol_type = other DNA
acacgttcacactgtttaccta

SEQ ID NO: 62918 - DNA, 22 bp, synthetic construct
  misc_feature 1..22: note = chemically synthesized
  source 1..22: mol_type = other DNA
acactgtttacctactccctga

SEQ ID NO: 62919 - DNA, 22 bp, synthetic construct
  misc_feature 1..22: note = chemically synthesized
  source 1..22: mol_type = other DNA
tttacctactccctgactttgg

SEQ ID NO: 62920 - DNA, 22 bp, synthetic construct
  misc_feature 1..22: note = chemically synthesized
  source 1..22: mol_type = other DNA
acctactccctgactttggagc

SEQ ID NO: 62921 - DNA, 22 bp, synthetic construct
  misc_feature 1..22: note = chemically synthesized
  source 1..22: mol_type = other DNA
cctactccctgactttggagct

SEQ ID NO: 62922 - DNA, 22 bp, synthetic construct
  misc_feature 1..22: note = chemically synthesized
  source 1..22: mol_type = other DNA
ctccctgactttggagctcagc

SEQ ID NO: 62923 - DNA, 22 bp, synthetic construct
  misc_feature 1..22: note = chemically synthesized
  source 1..22: mol_type = other DNA
cctgactttggagctcagcaaa

SEQ ID NO: 62924 - DNA, 22 bp, synthetic construct
  misc_feature 1..22: note = chemically synthesized
  source 1..22: mol_type = other DNA
actttggagctcagcaaatctg

SEQ ID NO: 62925 - DNA, 22 bp, synthetic construct
  misc_feature 1..22: note = chemically synthesized
  source 1..22: mol_type = other DNA
tggagctcagcaaatctgctat

SEQ ID NO: 62926 - DNA, 22 bp, synthetic construct
  misc_feature 1..22: note = chemically synthesized
  source 1..22: mol_type = other DNA
ggagctcagcaaatctgctatc

SEQ ID NO: 62927 - DNA, 22 bp, synthetic construct
  misc_feature 1..22: note = chemically synthesized
  source 1..22: mol_type = other DNA
gagctcagcaaatctgctatcc

SEQ ID NO: 62928 - DNA, 22 bp, synthetic construct
  misc_feature 1..22: note = chemically synthesized
  source 1..22: mol_type = other DNA
agcaaatctgctatccatcatt

SEQ ID NO: 62929 - DNA, 22 bp, synthetic construct
  misc_feature 1..22: note = chemically synthesized
  source 1..22: mol_type = other DNA
ctatccatcattttgtttcacc

SEQ ID NO: 62930 - DNA, 22 bp, synthetic construct
  misc_feature 1..22: note = chemically synthesized
  source 1..22: mol_type = other DNA
tccatcattttgtttcaccagc

SEQ ID NO: 62931 - DNA, 22 bp, synthetic construct
  misc_feature 1..22: note = chemically synthesized
  source 1..22: mol_type = other DNA
tgtttcaccagcttttacaaag

SEQ ID NO: 62932 - DNA, 22 bp, synthetic construct
  misc_feature 1..22: note = chemically synthesized
  source 1..22: mol_type = other DNA
gtttcaccagcttttacaaagc

SEQ ID NO: 62933 - DNA, 22 bp, synthetic construct
  misc_feature 1..22: note = chemically synthesized
  source 1..22: mol_type = other DNA
tttcaccagcttttacaaagca

SEQ ID NO: 62934 - DNA, 22 bp, synthetic construct
  misc_feature 1..22: note = chemically synthesized
  source 1..22: mol_type = other DNA
caccagcttttacaaagcagga

SEQ ID NO: 62935 - DNA, 22 bp, synthetic construct
  misc_feature 1..22: note = chemically synthesized
  source 1..22: mol_type = other DNA
accagcttttacaaagcaggat

SEQ ID NO: 62936 - DNA, 22 bp, synthetic construct
  misc_feature 1..22: note = chemically synthesized
  source 1..22: mol_type = other DNA
ttacaaagcaggatcataaact

SEQ ID NO: 62937 - DNA, 22 bp, synthetic construct
  misc_feature 1..22: note = chemically synthesized
  source 1..22: mol_type = other DNA
tacaaagcaggatcataaactg

SEQ ID NO: 62938 - DNA, 22 bp, synthetic construct
  misc_feature 1..22: note = chemically synthesized
  source 1..22: mol_type = other DNA
acaaagcaggatcataaactgt

SEQ ID NO: 62939 - DNA, 22 bp, synthetic construct
  misc_feature 1..22: note = chemically synthesized
  source 1..22: mol_type = other DNA
caaagcaggatcataaactgta

SEQ ID NO: 62940 - DNA, 22 bp, synthetic construct
  misc_feature 1..22: note = chemically synthesized
  source 1..22: mol_type = other DNA
taagctcatttggagggacctg

SEQ ID NO: 62941 - DNA, 22 bp, synthetic construct
  misc_feature 1..22: note = chemically synthesized
  source 1..22: mol_type = other DNA
atttggagggacctgatctctg

SEQ ID NO: 62942 - DNA, 22 bp, synthetic construct
  misc_feature 1..22: note = chemically synthesized
  source 1..22: mol_type = other DNA
ggagggacctgatctctgattg

SEQ ID NO: 62943 - DNA, 22 bp, synthetic construct
  misc_feature 1..22: note = chemically synthesized
  source 1..22: mol_type = other DNA
gagggacctgatctctgattgt

SEQ ID NO: 62944 - DNA, 22 bp, synthetic construct
  misc_feature 1..22: note = chemically synthesized
  source 1..22: mol_type = other DNA
atctctgattgttgctttgata

SEQ ID NO: 62945 - DNA, 22 bp, synthetic construct
  misc_feature 1..22: note = chemically synthesized
  source 1..22: mol_type = other DNA
tgattgttgctttgataagtat

SEQ ID NO: 62946 - DNA, 22 bp, synthetic construct
  misc_feature 1..22: note = chemically synthesized
  source 1..22: mol_type = other DNA
attgttgctttgataagtatct

SEQ ID NO: 62947 - DNA, 22 bp, synthetic construct
  misc_feature 1..22: note = chemically synthesized
  source 1..22: mol_type = other DNA
ttgctttgataagtatctatac

SEQ ID NO: 62948 - DNA, 22 bp, synthetic construct
  misc_feature 1..22: note = chemically synthesized
  source 1..22: mol_type = other DNA
ctttgataagtatctatacaaa

SEQ ID NO: 62949 - DNA, 22 bp, synthetic construct
  misc_feature 1..22: note = chemically synthesized
  source 1..22: mol_type = other DNA
tgataagtatctatacaaatat

SEQ ID NO: 62950 - DNA, 22 bp, synthetic construct
  misc_feature 1..22: note = chemically synthesized
  source 1..22: mol_type = other DNA
gataagtatctatacaaatatt

SEQ ID NO: 62951 - DNA, 22 bp, synthetic construct
  misc_feature 1..22: note = chemically synthesized
  source 1..22: mol_type = other DNA
ataagtatctatacaaatattc

SEQ ID NO: 62952 - DNA, 22 bp, synthetic construct
  misc_feature 1..22: note = chemically synthesized
  source 1..22: mol_type = other DNA
tacaaatattcatatcattctg

SEQ ID NO: 62953 - DNA, 22 bp, synthetic construct
  misc_feature 1..22: note = chemically synthesized
  source 1..22: mol_type = other DNA
atatcattctgatagtcttgag

SEQ ID NO: 62954 - DNA, 22 bp, synthetic construct
  misc_feature 1..22: note = chemically synthesized
  source 1..22: mol_type = other DNA
tgatagtcttgagttgcattgt

SEQ ID NO: 62955 - DNA, 22 bp, synthetic construct
  misc_feature 1..22: note = chemically synthesized
  source 1..22: mol_type = other DNA
atagtcttgagttgcattgtta

SEQ ID NO: 62956 - DNA, 22 bp, synthetic construct
  misc_feature 1..22: note = chemically synthesized
  source 1..22: mol_type = other DNA
gagttgcattgttacaacatgc

SEQ ID NO: 62957 - DNA, 22 bp, synthetic construct
  misc_feature 1..22: note = chemically synthesized
  source 1..22: mol_type = other DNA
agttgcattgttacaacatgca

SEQ ID NO: 62958 - DNA, 22 bp, synthetic construct
  misc_feature 1..22: note = chemically synthesized
  source 1..22: mol_type = other DNA
cattgttacaacatgcaaacct

SEQ ID NO: 62959 - DNA, 22 bp, synthetic construct
  misc_feature 1..22: note = chemically synthesized
  source 1..22: mol_type = other DNA
ttacaacatgcaaacctctcag

SEQ ID NO: 62960 - DNA, 22 bp, synthetic construct
  misc_feature 1..22: note = chemically synthesized
  source 1..22: mol_type = other DNA
caacatgcaaacctctcagttt

SEQ ID NO: 62961 - DNA, 22 bp, synthetic construct
  misc_feature 1..22: note = chemically synthesized
  source 1..22: mol_type = other DNA
tcagttttccaggacttctggt

SEQ ID NO: 62962 - DNA, 22 bp, synthetic construct
  misc_feature 1..22: note = chemically synthesized
  source 1..22: mol_type = other DNA
agttttccaggacttctggtgg

SEQ ID NO: 62963 - DNA, 22 bp, synthetic construct
  misc_feature 1..22: note = chemically synthesized
  source 1..22: mol_type = other DNA
tccaggacttctggtggtacag

SEQ ID NO: 62964 - DNA, 22 bp, synthetic construct
  misc_feature 1..22: note = chemically synthesized
  source 1..22: mol_type = other DNA
ccaggacttctggtggtacagc

SEQ ID NO: 62965 - DNA, 22 bp, synthetic construct
  misc_feature 1..22: note = chemically synthesized
  source 1..22: mol_type = other DNA
caggacttctggtggtacagct

SEQ ID NO: 62966 - DNA, 22 bp, synthetic construct
  misc_feature 1..22: note = chemically synthesized
  source 1..22: mol_type = other DNA
ctggtggtacagcttctctgtg

SEQ ID NO: 62967 - DNA, 22 bp, synthetic construct
  misc_feature 1..22: note = chemically synthesized
  source 1..22: mol_type = other DNA
tggtggtacagcttctctgtgg

SEQ ID NO: 62968 - DNA, 22 bp, synthetic construct
  misc_feature 1..22: note = chemically synthesized
  source 1..22: mol_type = other DNA
gtggtacagcttctctgtggag

SEQ ID NO: 62969 - DNA, 22 bp, synthetic construct
  misc_feature 1..22: note = chemically synthesized
  source 1..22: mol_type = other DNA
ctctgtggagtgaggcatattt

SEQ ID NO: 62970 - DNA, 22 bp, synthetic construct
  misc_feature 1..22: note = chemically synthesized
  source 1..22: mol_type = other DNA
tctgtggagtgaggcatatttt

SEQ ID NO: 62971 - DNA, 22 bp, synthetic construct
  misc_feature 1..22: note = chemically synthesized
  source 1..22: mol_type = other DNA
tgtggagtgaggcatatttttg

SEQ ID NO: 62972 - DNA, 22 bp, synthetic construct
  misc_feature 1..22: note = chemically synthesized
  source 1..22: mol_type = other DNA
tggagtgaggcatatttttggt

SEQ ID NO: 62973 - DNA, 22 bp, synthetic construct
  misc_feature 1..22: note = chemically synthesized
  source 1..22: mol_type = other DNA
ttggtctggcctttcctccctg

SEQ ID NO: 62974 - DNA, 22 bp, synthetic construct
  misc_feature 1..22: note = chemically synthesized
  source 1..22: mol_type = other DNA
tggtctggcctttcctccctga

SEQ ID NO: 62975 - DNA, 22 bp, synthetic construct
  misc_feature 1..22: note = chemically synthesized
  source 1..22: mol_type = other DNA
ggtctggcctttcctccctgaa

SEQ ID NO: 62976 - DNA, 22 bp, synthetic construct
  misc_feature 1..22: note = chemically synthesized
  source 1..22: mol_type = other DNA
gtctggcctttcctccctgaag

SEQ ID NO: 62977 - DNA, 22 bp, synthetic construct
  misc_feature 1..22: note = chemically synthesized
  source 1..22: mol_type = other DNA
gcctttcctccctgaagctctg

SEQ ID NO: 62978 - DNA, 22 bp, synthetic construct
  misc_feature 1..22: note = chemically synthesized
  source 1..22: mol_type = other DNA
tcctccctgaagctctgttagc

SEQ ID NO: 62979 - DNA, 22 bp, synthetic construct
  misc_feature 1..22: note = chemically synthesized
  source 1..22: mol_type = other DNA
cctccctgaagctctgttagcc

SEQ ID NO: 62980 - DNA, 22 bp, synthetic construct
  misc_feature 1..22: note = chemically synthesized
  source 1..22: mol_type = other DNA
ctccctgaagctctgttagcct

SEQ ID NO: 62981 - DNA, 22 bp, synthetic construct
  misc_feature 1..22: note = chemically synthesized
  source 1..22: mol_type = other DNA
cctgaagctctgttagcctgag

SEQ ID NO: 62982 - DNA, 22 bp, synthetic construct
  misc_feature 1..22: note = chemically synthesized
  source 1..22: mol_type = other DNA
aagctctgttagcctgagattt

SEQ ID NO: 62983 - DNA, 22 bp, synthetic construct
  misc_feature 1..22: note = chemically synthesized
  source 1..22: mol_type = other DNA
tgttagcctgagatttcaccta

SEQ ID NO: 62984 - DNA, 22 bp, synthetic construct
  misc_feature 1..22: note = chemically synthesized
  source 1..22: mol_type = other DNA
ttagcctgagatttcacctagt

SEQ ID NO: 62985 - DNA, 22 bp, synthetic construct
  misc_feature 1..22: note = chemically synthesized
  source 1..22: mol_type = other DNA
gcctgagatttcacctagtgca

SEQ ID NO: 62986 - DNA, 22 bp, synthetic construct
  misc_feature 1..22: note = chemically synthesized
  source 1..22: mol_type = other DNA
agatttcacctagtgcaacaca

SEQ ID NO: 62987 - DNA, 22 bp, synthetic construct
  misc_feature 1..22: note = chemically synthesized
  source 1..22: mol_type = other DNA
cacctagtgcaacacaagttgt

SEQ ID NO: 62988 - DNA, 22 bp, synthetic construct
  misc_feature 1..22: note = chemically synthesized
  source 1..22: mol_type = other DNA
acctagtgcaacacaagttgtg

SEQ ID NO: 62989 - DNA, 22 bp, synthetic construct
  misc_feature 1..22: note = chemically synthesized
  source 1..22: mol_type = other DNA
gtgcaacacaagttgtgtagaa

SEQ ID NO: 62990 - DNA, 22 bp, synthetic construct
  misc_feature 1..22: note = chemically synthesized
  source 1..22: mol_type = other DNA
tgtagaaagaaacataatacta

SEQ ID NO: 62991 - DNA, 22 bp, synthetic construct
  misc_feature 1..22: note = chemically synthesized
  source 1..22: mol_type = other DNA
ctttattccataattcactagt

SEQ ID NO: 62992 - DNA, 22 bp, synthetic construct
  misc_feature 1..22: note = chemically synthesized
  source 1..22: mol_type = other DNA
tattccataattcactagtaaa

SEQ ID NO: 62993 - DNA, 22 bp, synthetic construct
  misc_feature 1..22: note = chemically synthesized
  source 1..22: mol_type = other DNA
attccataattcactagtaaaa

SEQ ID NO: 62994 - DNA, 22 bp, synthetic construct
  misc_feature 1..22: note = chemically synthesized
  source 1..22: mol_type = other DNA
ttccataattcactagtaaaat

SEQ ID NO: 62995 - DNA, 22 bp, synthetic construct
  misc_feature 1..22: note = chemically synthesized
  source 1..22: mol_type = other DNA
cataattcactagtaaaataat

SEQ ID NO: 62996 - DNA, 22 bp, synthetic construct
  misc_feature 1..22: note = chemically synthesized
  source 1..22: mol_type = other DNA
actagtaaaataattagaataa

SEQ ID NO: 62997 - DNA, 22 bp, synthetic construct
  misc_feature 1..22: note = chemically synthesized
  source 1..22: mol_type = other DNA
gtaaaataattagaataaaagg

SEQ ID NO: 62998 - DNA, 22 bp, synthetic construct
  misc_feature 1..22: note = chemically synthesized
  source 1..22: mol_type = other DNA
gaataaaaggctgttttggaat

SEQ ID NO: 62999 - DNA, 22 bp, synthetic construct
  misc_feature 1..22: note = chemically synthesized
  source 1..22: mol_type = other DNA
ttttggaatgtagagaggcaga

SEQ ID NO: 63000 - DNA, 22 bp, synthetic construct
  misc_feature 1..22: note = chemically synthesized
  source 1..22: mol_type = other DNA
tggaatgtagagaggcagaggg

SEQ ID NO: 63001 - DNA, 22 bp, synthetic construct
  misc_feature 1..22: note = chemically synthesized
  source 1..22: mol_type = other DNA
ggaatgtagagaggcagagggg

SEQ ID NO: 63002 - DNA, 22 bp, synthetic construct
  misc_feature 1..22: note = chemically synthesized
  source 1..22: mol_type = other DNA
gaatgtagagaggcagaggggc

SEQ ID NO: 63003 - DNA, 22 bp, synthetic construct
  misc_feature 1..22: note = chemically synthesized
  source 1..22: mol_type = other DNA
atataacttctcagaatgcatc

SEQ ID NO: 63004 - DNA, 22 bp, synthetic construct
  misc_feature 1..22: note = chemically synthesized
  source 1..22: mol_type = other DNA
ctcagaatgcatcttcctgttt

SEQ ID NO: 63005 - DNA, 22 bp, synthetic construct
  misc_feature 1..22: note = chemically synthesized
  source 1..22: mol_type = other DNA
tcagaatgcatcttcctgtttt

SEQ ID NO: 63006 - DNA, 22 bp, synthetic construct
  misc_feature 1..22: note = chemically synthesized
  source 1..22: mol_type = other DNA
agaatgcatcttcctgttttcc

SEQ ID NO: 63007 - DNA, 22 bp, synthetic construct
  misc_feature 1..22: note = chemically synthesized
  source 1..22: mol_type = other DNA
cctgttttcccgtcttaaattt

SEQ ID NO: 63008 - DNA, 22 bp, synthetic construct
  misc_feature 1..22: note = chemically synthesized
  source 1..22: mol_type = other DNA
ctgttttcccgtcttaaatttt

SEQ ID NO: 63009 - DNA, 22 bp, synthetic construct
  misc_feature 1..22: note = chemically synthesized
  source 1..22: mol_type = other DNA
ttttcccgtcttaaatttttat

SEQ ID NO: 63010 - DNA, 22 bp, synthetic construct
  misc_feature 1..22: note = chemically synthesized
  source 1..22: mol_type = other DNA
tcccgtcttaaatttttatgtg

SEQ ID NO: 63011 - DNA, 22 bp, synthetic construct
  misc_feature 1..22: note = chemically synthesized
  source 1..22: mol_type = other DNA
cccgtcttaaatttttatgtga

SEQ ID NO: 63012 - DNA, 22 bp, synthetic construct
  misc_feature 1..22: note = chemically synthesized
  source 1..22: mol_type = other DNA
ccgtcttaaatttttatgtgag

SEQ ID NO: 63013 - DNA, 22 bp, synthetic construct
  misc_feature 1..22: note = chemically synthesized
  source 1..22: mol_type = other DNA
aaatttttatgtgagatgagca

SEQ ID NO: 63014 - DNA, 22 bp, synthetic construct
  misc_feature 1..22: note = chemically synthesized
  source 1..22: mol_type = other DNA
aatttttatgtgagatgagcac

SEQ ID NO: 63015 - DNA, 22 bp, synthetic construct
  misc_feature 1..22: note = chemically synthesized
  source 1..22: mol_type = other DNA
ttatgtgagatgagcacactgc

SEQ ID NO: 63016 - DNA, 22 bp, synthetic construct
  misc_feature 1..22: note = chemically synthesized
  source 1..22: mol_type = other DNA
tatgtgagatgagcacactgct

SEQ ID NO: 63017 - DNA, 22 bp, synthetic construct
  misc_feature 1..22: note = chemically synthesized
  source 1..22: mol_type = other DNA
atgtgagatgagcacactgctg

SEQ ID NO: 63018 - DNA, 22 bp, synthetic construct
  misc_feature 1..22: note = chemically synthesized
  source 1..22: mol_type = other DNA
tgtgagatgagcacactgctgt

SEQ ID NO: 63019 - DNA, 22 bp, synthetic construct
  misc_feature 1..22: note = chemically synthesized
  source 1..22: mol_type = other DNA
ctgtaattaagaaagcagtgta

SEQ ID NO: 63020 - DNA, 22 bp, synthetic construct
  misc_feature 1..22: note = chemically synthesized
  source 1..22: mol_type = other DNA
taattaagaaagcagtgtaagg

SEQ ID NO: 63021 - DNA, 22 bp, synthetic construct
  misc_feature 1..22: note = chemically synthesized
  source 1..22: mol_type = other DNA
agaaagcagtgtaaggctgggc

SEQ ID NO: 63022 - DNA, 22 bp, synthetic construct
  misc_feature 1..22: note = chemically synthesized
  source 1..22: mol_type = other DNA
ggcgcagtggctcacgtctgta

SEQ ID NO: 63023 - DNA, 22 bp, synthetic construct
  misc_feature 1..22: note = chemically synthesized
  source 1..22: mol_type = other DNA
acgtctgtaattccagcacttt

SEQ ID NO: 63024 - DNA, 22 bp, synthetic construct
  misc_feature 1..22: note = chemically synthesized
  source 1..22: mol_type = other DNA
taattccagcactttgggaggc

SEQ ID NO: 63025 - DNA, 22 bp, synthetic construct
  misc_feature 1..22: note = chemically synthesized
  source 1..22: mol_type = other DNA
cagcactttgggaggccgaggt

SEQ ID NO: 63026 - DNA, 22 bp, synthetic construct
  misc_feature 1..22: note = chemically synthesized
  source 1..22: mol_type = other DNA
tgggaggccgaggtgggtagat

SEQ ID NO: 63027 - DNA, 22 bp, synthetic construct
  misc_feature 1..22: note = chemically synthesized
  source 1..22: mol_type = other DNA
gggaggccgaggtgggtagatc

SEQ ID NO: 63028 - DNA, 22 bp, synthetic construct
  misc_feature 1..22: note = chemically synthesized
  source 1..22: mol_type = other DNA
ggaggccgaggtgggtagatca

SEQ ID NO: 63029 - DNA, 22 bp, synthetic construct
  misc_feature 1..22: note = chemically synthesized
  source 1..22: mol_type = other DNA
aggtcaagagtttgagaccagc

SEQ ID NO: 63030 - DNA, 22 bp, synthetic construct
  misc_feature 1..22: note = chemically synthesized
  source 1..22: mol_type = other DNA
gagaccagcctgaccaacatgg

SEQ ID NO: 63031 - DNA, 22 bp, synthetic construct
  misc_feature 1..22: note = chemically synthesized
  source 1..22: mol_type = other DNA
agaccagcctgaccaacatgga

SEQ ID NO: 63032 - DNA, 22 bp, synthetic construct
  misc_feature 1..22: note = chemically synthesized
  source 1..22: mol_type = other DNA
accaacatggagaaacctcatc

SEQ ID NO: 63033 - DNA, 22 bp, synthetic construct
  misc_feature 1..22: note = chemically synthesized
  source 1..22: mol_type = other DNA
atctctattaaaaatataaact

SEQ ID NO: 63034 - DNA, 22 bp, synthetic construct
  misc_feature 1..22: note = chemically synthesized
  source 1..22: mol_type = other DNA
tattaaaaatataaacttagcc

SEQ ID NO: 63035 - DNA, 22 bp, synthetic construct
  misc_feature 1..22: note = chemically synthesized
  source 1..22: mol_type = other DNA
ttaaaaatataaacttagccag

SEQ ID NO: 63036 - DNA, 22 bp, synthetic construct
  misc_feature 1..22: note = chemically synthesized
  source 1..22: mol_type = other DNA
aaaatataaacttagccaggca

SEQ ID NO: 63037 - DNA, 22 bp, synthetic construct
  misc_feature 1..22: note = chemically synthesized
  source 1..22: mol_type = other DNA
agccaggcatggtcgcacatgc

SEQ ID NO: 63038 - DNA, 22 bp, synthetic construct
  misc_feature 1..22: note = chemically synthesized
  source 1..22: mol_type = other DNA
gccaggcatggtcgcacatgcc

SEQ ID NO: 63039 - DNA, 22 bp, synthetic construct
  misc_feature 1..22: note = chemically synthesized
  source 1..22: mol_type = other DNA
taatcccagctactcaggaggc

SEQ ID NO: 63040 - DNA, 22 bp, synthetic construct
  misc_feature 1..22: note = chemically synthesized
  source 1..22: mol_type = other DNA
ctcaggaggctgagggaggaga

SEQ ID NO: 63041 - DNA, 22 bp, synthetic construct
  misc_feature 1..22: note = chemically synthesized
  source 1..22: mol_type = other DNA
aggaggctgagggaggagaatt

SEQ ID NO: 63042 - DNA, 22 bp, synthetic construct
  misc_feature 1..22: note = chemically synthesized
  source 1..22: mol_type = other DNA
agggaggagaattgcttgaacc

SEQ ID NO: 63043 - DNA, 22 bp, synthetic construct
  misc_feature 1..22: note = chemically synthesized
  source 1..22: mol_type = other DNA
cttgaacccaggaggcagaggt

SEQ ID NO: 63044 - DNA, 22 bp, synthetic construct
  misc_feature 1..22: note = chemically synthesized
  source 1..22: mol_type = other DNA
gaacccaggaggcagaggtggt

SEQ ID NO: 63045 - DNA, 22 bp, synthetic construct
  misc_feature 1..22: note = chemically synthesized
  source 1..22: mol_type = other DNA
aacccaggaggcagaggtggtg

SEQ ID NO: 63046 - DNA, 22 bp, synthetic construct
  misc_feature 1..22: note = chemically synthesized
  source 1..22: mol_type = other DNA
caccccagcctgggcaacaaga

SEQ ID NO: 63047 - DNA, 22 bp, synthetic construct
  misc_feature 1..22: note = chemically synthesized
  source 1..22: mol_type = other DNA
ggcaacaagagcgaaactctgt

SEQ ID NO: 63048 - DNA, 22 bp, synthetic construct
  misc_feature 1..22: note = chemically synthesized
  source 1..22: mol_type = other DNA
tgtctcaaaaaaaaaaaaaaaa

SEQ ID NO: 63049 - DNA, 22 bp, synthetic construct
  misc_feature 1..22: note = chemically synthesized
  source 1..22: mol_type = other DNA
tctcaaaaaaaaaaaaaaaaaa

SEQ ID NO: 63050 - DNA, 22 bp, synthetic construct
  misc_feature 1..22: note = chemically synthesized
  source 1..22: mol_type = other DNA
aaaaaaaaaaaaaaaaaaaaag

SEQ ID NO: 63051 - DNA, 22 bp, synthetic construct
  misc_feature 1..22: note = chemically synthesized
  source 1..22: mol_type = other DNA
gcaaaaggcctttccctcttgc

SEQ ID NO: 63052 - DNA, 22 bp, synthetic construct
  misc_feature 1..22: note = chemically synthesized
  source 1..22: mol_type = other DNA
caaaaggcctttccctcttgcc

SEQ ID NO: 63053 - DNA, 22 bp, synthetic construct
  misc_feature 1..22: note = chemically synthesized
  source 1..22: mol_type = other DNA
tccctcttgccactcagggaag

SEQ ID NO: 63054 - DNA, 22 bp, synthetic construct
  misc_feature 1..22: note = chemically synthesized
  source 1..22: mol_type = other DNA
ccctcttgccactcagggaagc

SEQ ID NO: 63055 - DNA, 22 bp, synthetic construct
  misc_feature 1..22: note = chemically synthesized
  source 1..22: mol_type = other DNA
cctcttgccactcagggaagca

SEQ ID NO: 63056 - DNA, 22 bp, synthetic construct
  misc_feature 1..22: note = chemically synthesized
  source 1..22: mol_type = other DNA
ttgccactcagggaagcacccg

SEQ ID NO: 63057 - DNA, 22 bp, synthetic construct
  misc_feature 1..22: note = chemically synthesized
  source 1..22: mol_type = other DNA
gccactcagggaagcacccgaa

SEQ ID NO: 63058 - DNA, 22 bp, synthetic construct
  misc_feature 1..22: note = chemically synthesized
  source 1..22: mol_type = other DNA
ccactcagggaagcacccgaaa

SEQ ID NO: 63059 - DNA, 22 bp, synthetic construct
  misc_feature 1..22: note = chemically synthesized
  source 1..22: mol_type = other DNA
agggaagcacccgaaagagaac

SEQ ID NO: 63060 - DNA, 22 bp, synthetic construct
  misc_feature 1..22: note = chemically synthesized
  source 1..22: mol_type = other DNA
acaaaccaggtaaagtatttgg

SEQ ID NO: 63061 - DNA, 22 bp, synthetic construct
  misc_feature 1..22: note = chemically synthesized
  source 1..22: mol_type = other DNA
caaaccaggtaaagtatttgga

SEQ ID NO: 63062 - DNA, 22 bp, synthetic construct
  misc_feature 1..22: note = chemically synthesized
  source 1..22: mol_type = other DNA
ggaagtgattaatcatattaca

SEQ ID NO: 63063 - DNA, 22 bp, synthetic construct
  misc_feature 1..22: note = chemically synthesized
  source 1..22: mol_type = other DNA
gaagtgattaatcatattacaa

SEQ ID NO: 63064 - DNA, 22 bp, synthetic construct
  misc_feature 1..22: note = chemically synthesized
  source 1..22: mol_type = other DNA
atcatattacaagagtgttctt

SEQ ID NO: 63065 - DNA, 22 bp, synthetic construct
  misc_feature 1..22: note = chemically synthesized
  source 1..22: mol_type = other DNA
caagagtgttcttcatttcccc

SEQ ID NO: 63066 - DNA, 22 bp, synthetic construct
  misc_feature 1..22: note = chemically synthesized
  source 1..22: mol_type = other DNA
ttcatttcccccaaaggaccat

SEQ ID NO: 63067 - DNA, 22 bp, synthetic construct
  misc_feature 1..22: note = chemically synthesized
  source 1..22: mol_type = other DNA
catttcccccaaaggaccatgg

SEQ ID NO: 63068 - DNA, 22 bp, synthetic construct
  misc_feature 1..22: note = chemically synthesized
  source 1..22: mol_type = other DNA
atttcccccaaaggaccatggc

SEQ ID NO: 63069 - DNA, 22 bp, synthetic construct
  misc_feature 1..22: note = chemically synthesized
  source 1..22: mol_type = other DNA
cccccaaaggaccatggcttcc

SEQ ID NO: 63070 - DNA, 22 bp, synthetic construct
  misc_feature 1..22: note = chemically synthesized
  source 1..22: mol_type = other DNA
ccccaaaggaccatggcttcct

SEQ ID NO: 63071 - DNA, 22 bp, synthetic construct
  misc_feature 1..22: note = chemically synthesized
  source 1..22: mol_type = other DNA
cctgtgacacttacctgtgctc

SEQ ID NO: 63072 - DNA, 22 bp, synthetic construct
  misc_feature 1..22: note = chemically synthesized
  source 1..22: mol_type = other DNA
ctgtgacacttacctgtgctct

SEQ ID NO: 63073 - DNA, 22 bp, synthetic construct
  misc_feature 1..22: note = chemically synthesized
  source 1..22: mol_type = other DNA
tgacacttacctgtgctcttat

SEQ ID NO: 63074 - DNA, 22 bp, synthetic construct
  misc_feature 1..22: note = chemically synthesized
  source 1..22: mol_type = other DNA
acctgtgctcttatagatatta

SEQ ID NO: 63075 - DNA, 22 bp, synthetic construct
  misc_feature 1..22: note = chemically synthesized
  source 1..22: mol_type = other DNA
cctgtgctcttatagatattaa

SEQ ID NO: 63076 - DNA, 22 bp, synthetic construct
  misc_feature 1..22: note = chemically synthesized
  source 1..22: mol_type = other DNA
tgctcttatagatattaaagac

SEQ ID NO: 63077 - DNA, 22 bp, synthetic construct
  misc_feature 1..22: note = chemically synthesized
  source 1..22: mol_type = other DNA
ttatagatattaaagacagagc

SEQ ID NO: 63078 - DNA, 22 bp, synthetic construct
  misc_feature 1..22: note = chemically synthesized
  source 1..22: mol_type = other DNA
atagatattaaagacagagcca

SEQ ID NO: 63079 - DNA, 22 bp, synthetic construct
  misc_feature 1..22: note = chemically synthesized
  source 1..22: mol_type = other DNA
tagatattaaagacagagccac

SEQ ID NO: 63080 - DNA, 22 bp, synthetic construct
  misc_feature 1..22: note = chemically synthesized
  source 1..22: mol_type = other DNA
aagacagagccactggactgtg

SEQ ID NO: 63081 - DNA, 22 bp, synthetic construct
  misc_feature 1..22: note = chemically synthesized
  source 1..22: mol_type = other DNA
gactgtgagctccttgagggca

SEQ ID NO: 63082 - DNA, 22 bp, synthetic construct
  misc_feature 1..22: note = chemically synthesized
  source 1..22: mol_type = other DNA
tgagctccttgagggcagggaa

SEQ ID NO: 63083 - DNA, 22 bp, synthetic construct
  misc_feature 1..22: note = chemically synthesized
  source 1..22: mol_type = other DNA
cttgagggcagggaatgaggct

SEQ ID NO: 63084 - DNA, 22 bp, synthetic construct
  misc_feature 1..22: note = chemically synthesized
  source 1..22: mol_type = other DNA
gagggcagggaatgaggctcat

SEQ ID NO: 63085 - DNA, 22 bp, synthetic construct
  misc_feature 1..22: note = chemically synthesized
  source 1..22: mol_type = other DNA
agggcagggaatgaggctcatt

SEQ ID NO: 63086 - DNA, 22 bp, synthetic construct
  misc_feature 1..22: note = chemically synthesized
  source 1..22: mol_type = other DNA
attccattttgttctggcaagt

SEQ ID NO: 63087 - DNA, 22 bp, synthetic construct
  misc_feature 1..22: note = chemically synthesized
  source 1..22: mol_type = other DNA
cattttgttctggcaagtagca

SEQ ID NO: 63088 - DNA, 22 bp, synthetic construct
  misc_feature 1..22: note = chemically synthesized
  source 1..22: mol_type = other DNA
tgttctggcaagtagcactaca

SEQ ID NO: 63089 - DNA, 22 bp, synthetic construct
  misc_feature 1..22: note = chemically synthesized
  source 1..22: mol_type = other DNA
gttctggcaagtagcactacag

SEQ ID NO: 63090 - DNA, 22 bp, synthetic construct
  misc_feature 1..22: note = chemically synthesized
  source 1..22: mol_type = other DNA
ttctggcaagtagcactacagg

SEQ ID NO: 63091 - DNA, 22 bp, synthetic construct
  misc_feature 1..22: note = chemically synthesized
  source 1..22: mol_type = other DNA
tggcaagtagcactacaggttt

SEQ ID NO: 63092 - DNA, 22 bp, synthetic construct
  misc_feature 1..22: note = chemically synthesized
  source 1..22: mol_type = other DNA
gcaagtagcactacaggtttgg

SEQ ID NO: 63093 - DNA, 22 bp, synthetic construct
  misc_feature 1..22: note = chemically synthesized
  source 1..22: mol_type = other DNA
caggtttggaccaaatgaatta

SEQ ID NO: 63094 - DNA, 22 bp, synthetic construct
  misc_feature 1..22: note = chemically synthesized
  source 1..22: mol_type = other DNA
ggaccaaatgaattaaattggc

SEQ ID NO: 63095 - DNA, 22 bp, synthetic construct
  misc_feature 1..22: note = chemically synthesized
  source 1..22: mol_type = other DNA
gaccaaatgaattaaattggct

SEQ ID NO: 63096 - DNA, 22 bp, synthetic construct
  misc_feature 1..22: note = chemically synthesized
  source 1..22: mol_type = other DNA
aattggctgccattgaatcaaa

SEQ ID NO: 63097 - DNA, 22 bp, synthetic construct
  misc_feature 1..22: note = chemically synthesized
  source 1..22: mol_type = other DNA
gctgccattgaatcaaagcaga

SEQ ID NO: 63098 - DNA, 22 bp, synthetic construct
  misc_feature 1..22: note = chemically synthesized
  source 1..22: mol_type = other DNA
ccattgaatcaaagcagaatga

SEQ ID NO: 63099 - DNA, 22 bp, synthetic construct
  misc_feature 1..22: note = chemically synthesized
  source 1..22: mol_type = other DNA
aatcaaagcagaatgaaggtag

SEQ ID NO: 63100 - DNA, 22 bp, synthetic construct
  misc_feature 1..22: note = chemically synthesized
  source 1..22: mol_type = other DNA
ctgaaacaataatataaataag

SEQ ID NO: 63101 - DNA, 22 bp, synthetic construct
  misc_feature 1..22: note = chemically synthesized
  source 1..22: mol_type = other DNA
tgaaacaataatataaataagt

SEQ ID NO: 63102 - DNA, 22 bp, synthetic construct
  misc_feature 1..22: note = chemically synthesized
  source 1..22: mol_type = other DNA
aaacaataatataaataagtgc

SEQ ID NO: 63103 - DNA, 22 bp, synthetic construct
  misc_feature 1..22: note = chemically synthesized
  source 1..22: mol_type = other DNA
gatgtttaccaacaactttcca

SEQ ID NO: 63104 - DNA, 22 bp, synthetic construct
  misc_feature 1..22: note = chemically synthesized
  source 1..22: mol_type = other DNA
accaacaactttccagaaacag

SEQ ID NO: 63105 - DNA, 22 bp, synthetic construct
  misc_feature 1..22: note = chemically synthesized
  source 1..22: mol_type = other DNA
ccaacaactttccagaaacagg

SEQ ID NO: 63106 - DNA, 22 bp, synthetic construct
  misc_feature 1..22: note = chemically synthesized
  source 1..22: mol_type = other DNA
tccagaaacaggtcttgtttca

SEQ ID NO: 63107 - DNA, 22 bp, synthetic construct
  misc_feature 1..22: note = chemically synthesized
  source 1..22: mol_type = other DNA
ccagaaacaggtcttgtttcag

SEQ ID NO: 63108 - DNA, 22 bp, synthetic construct
  misc_feature 1..22: note = chemically synthesized
  source 1..22: mol_type = other DNA
cagaaacaggtcttgtttcaga

SEQ ID NO: 63109 - DNA, 22 bp, synthetic construct
  misc_feature 1..22: note = chemically synthesized
  source 1..22: mol_type = other DNA
gtttcagaagatgtgccaaaga

SEQ ID NO: 63110 - DNA, 22 bp, synthetic construct
  misc_feature 1..22: note = chemically synthesized
  source 1..22: mol_type = other DNA
tttcagaagatgtgccaaagat

SEQ ID NO: 63111 - DNA, 22 bp, synthetic construct
  misc_feature 1..22: note = chemically synthesized
  source 1..22: mol_type = other DNA
cagaagatgtgccaaagatgtc

SEQ ID NO: 63112 - DNA, 22 bp, synthetic construct
  misc_feature 1..22: note = chemically synthesized
  source 1..22: mol_type = other DNA
agaagatgtgccaaagatgtct

SEQ ID NO: 63113 - DNA, 22 bp, synthetic construct
  misc_feature 1..22: note = chemically synthesized
  source 1..22: mol_type = other DNA
atgtgggcagggctcctgtgga

SEQ ID NO: 63114 - DNA, 22 bp, synthetic construct
  misc_feature 1..22: note = chemically synthesized
  source 1..22: mol_type = other DNA
ctgtggagacctctgttgctga

SEQ ID NO: 63115 - DNA, 22 bp, synthetic construct
  misc_feature 1..22: note = chemically synthesized
  source 1..22: mol_type = other DNA
tggagacctctgttgctgagtg

SEQ ID NO: 63116 - DNA, 22 bp, synthetic construct
  misc_feature 1..22: note = chemically synthesized
  source 1..22: mol_type = other DNA
tgttgctgagtgagtcaaccat

SEQ ID NO: 63117 - DNA, 22 bp, synthetic construct
  misc_feature 1..22: note = chemically synthesized
  source 1..22: mol_type = other DNA
ttgctgagtgagtcaaccatga

SEQ ID NO: 63118 - DNA, 22 bp, synthetic construct
  misc_feature 1..22: note = chemically synthesized
  source 1..22: mol_type = other DNA
ctgagtgagtcaaccatgaggt

SEQ ID NO: 63119 - DNA, 22 bp, synthetic construct
  misc_feature 1..22: note = chemically synthesized
  source 1..22: mol_type = other DNA
agtgagtcaaccatgaggtcgg

SEQ ID NO: 63120 - DNA, 22 bp, synthetic construct
  misc_feature 1..22: note = chemically synthesized
  source 1..22: mol_type = other DNA
agcagttcagggttctcccatt

SEQ ID NO: 63121 - DNA, 22 bp, synthetic construct
  misc_feature 1..22: note = chemically synthesized
  source 1..22: mol_type = other DNA
agggttctcccattttacagag

SEQ ID NO: 63122 - DNA, 22 bp, synthetic construct
  misc_feature 1..22: note = chemically synthesized
  source 1..22: mol_type = other DNA
tcccattttacagaggaggatg

SEQ ID NO: 63123 - DNA, 22 bp, synthetic construct
  misc_feature 1..22: note = chemically synthesized
  source 1..22: mol_type = other DNA
ccattttacagaggaggatgca

SEQ ID NO: 63124 - DNA, 22 bp, synthetic construct
  misc_feature 1..22: note = chemically synthesized
  source 1..22: mol_type = other DNA
tacagaggaggatgcagcgacc

SEQ ID NO: 63125 - DNA, 22 bp, synthetic construct
  misc_feature 1..22: note = chemically synthesized
  source 1..22: mol_type = other DNA
acagaggaggatgcagcgaccc

SEQ ID NO: 63126 - DNA, 22 bp, synthetic construct
  misc_feature 1..22: note = chemically synthesized
  source 1..22: mol_type = other DNA
cagaggaggatgcagcgaccca

SEQ ID NO: 63127 - DNA, 22 bp, synthetic construct
  misc_feature 1..22: note = chemically synthesized
  source 1..22: mol_type = other DNA
gcaagcccacccagctaggctt

SEQ ID NO: 63128 - DNA, 22 bp, synthetic construct
  misc_feature 1..22: note = chemically synthesized
  source 1..22: mol_type = other DNA
caagcccacccagctaggcttg

SEQ ID NO: 63129 - DNA, 22 bp, synthetic construct
  misc_feature 1..22: note = chemically synthesized
  source 1..22: mol_type = other DNA
ggcttgcttcacagacactctt

SEQ ID NO: 63130 - DNA, 22 bp, synthetic construct
  misc_feature 1..22: note = chemically synthesized
  source 1..22: mol_type = other DNA
gcttcacagacactcttttaac

SEQ ID NO: 63131 - DNA, 22 bp, synthetic construct
  misc_feature 1..22: note = chemically synthesized
  source 1..22: mol_type = other DNA
cttcacagacactcttttaact

SEQ ID NO: 63132 - DNA, 22 bp, synthetic construct
  misc_feature 1..22: note = chemically synthesized
  source 1..22: mol_type = other DNA
cacagacactcttttaactagt

SEQ ID NO: 63133 - DNA, 22 bp, synthetic construct
  misc_feature 1..22: note = chemically synthesized
  source 1..22: mol_type = other DNA
acagacactcttttaactagtt

SEQ ID NO: 63134 - DNA, 22 bp, synthetic construct
  misc_feature 1..22: note = chemically synthesized
  source 1..22: mol_type = other DNA
ttttaactagttccatcagcaa

SEQ ID NO: 63135 - DNA, 22 bp, synthetic construct
  misc_feature 1..22: note = chemically synthesized
  source 1..22: mol_type = other DNA
ttaactagttccatcagcaacc

SEQ ID NO: 63136 - DNA, 22 bp, synthetic construct
  misc_feature 1..22: note = chemically synthesized
  source 1..22: mol_type = other DNA
taactagttccatcagcaaccc

SEQ ID NO: 63137 - DNA, 22 bp, synthetic construct
  misc_feature 1..22: note = chemically synthesized
  source 1..22: mol_type = other DNA
aactagttccatcagcaacccc

SEQ ID NO: 63138 - DNA, 22 bp, synthetic construct
  misc_feature 1..22: note = chemically synthesized
  source 1..22: mol_type = other DNA
actagttccatcagcaacccca

SEQ ID NO: 63139 - DNA, 22 bp, synthetic construct
  misc_feature 1..22: note = chemically synthesized
  source 1..22: mol_type = other DNA
gttccatcagcaaccccaggtt

SEQ ID NO: 63140 - DNA, 22 bp, synthetic construct
  misc_feature 1..22: note = chemically synthesized
  source 1..22: mol_type = other DNA
catcagcaaccccaggttggcc

SEQ ID NO: 63141 - DNA, 22 bp, synthetic construct
  misc_feature 1..22: note = chemically synthesized
  source 1..22: mol_type = other DNA
gccatacaatgtcatcatacac

SEQ ID NO: 63142 - DNA, 22 bp, synthetic construct
  misc_feature 1..22: note = chemically synthesized
  source 1..22: mol_type = other DNA
taccagtgaagaaactgaggct

SEQ ID NO: 63143 - DNA, 22 bp, synthetic construct
  misc_feature 1..22: note = chemically synthesized
  source 1..22: mol_type = other DNA
accagtgaagaaactgaggctt

SEQ ID NO: 63144 - DNA, 22 bp, synthetic construct
  misc_feature 1..22: note = chemically synthesized
  source 1..22: mol_type = other DNA
ccagtgaagaaactgaggcttg

SEQ ID NO: 63145 - DNA, 22 bp, synthetic construct
  misc_feature 1..22: note = chemically synthesized
  source 1..22: mol_type = other DNA
aggcttggagaggttaaagagc

SEQ ID NO: 63146 - DNA, 22 bp, synthetic construct
  misc_feature 1..22: note = chemically synthesized
  source 1..22: mol_type = other DNA
ggagaggttaaagagctgctcc

SEQ ID NO: 63147 - DNA, 22 bp, synthetic construct
  misc_feature 1..22: note = chemically synthesized
  source 1..22: mol_type = other DNA
gagaggttaaagagctgctccc

SEQ ID NO: 63148 - DNA, 22 bp, synthetic construct
  misc_feature 1..22: note = chemically synthesized
  source 1..22: mol_type = other DNA
aagagctgctcccagacacaca

SEQ ID NO: 63149 - DNA, 22 bp, synthetic construct
  misc_feature 1..22: note = chemically synthesized
  source 1..22: mol_type = other DNA
ctcccagacacacagccaggaa

SEQ ID NO: 63150 - DNA, 22 bp, synthetic construct
  misc_feature 1..22: note = chemically synthesized
  source 1..22: mol_type = other DNA
ccagacacacagccaggaaatt

SEQ ID NO: 63151 - DNA, 22 bp, synthetic construct
  misc_feature 1..22: note = chemically synthesized
  source 1..22: mol_type = other DNA
gtggtagatgaaggatccagct

SEQ ID NO: 63152 - DNA, 22 bp, synthetic construct
  misc_feature 1..22: note = chemically synthesized
  source 1..22: mol_type = other DNA
atctgtctaacttgggagcctg

SEQ ID NO: 63153 - DNA, 22 bp, synthetic construct
  misc_feature 1..22: note = chemically synthesized
  source 1..22: mol_type = other DNA
tctaacttgggagcctgagtgt

SEQ ID NO: 63154 - DNA, 22 bp, synthetic construct
  misc_feature 1..22: note = chemically synthesized
  source 1..22: mol_type = other DNA
acttgggagcctgagtgttcat

SEQ ID NO: 63155 - DNA, 22 bp, synthetic construct
  misc_feature 1..22: note = chemically synthesized
  source 1..22: mol_type = other DNA
gggagcctgagtgttcatctta

SEQ ID NO: 63156 - DNA, 22 bp, synthetic construct
  misc_feature 1..22: note = chemically synthesized
  source 1..22: mol_type = other DNA
ggagcctgagtgttcatcttac

SEQ ID NO: 63157 - DNA, 22 bp, synthetic construct
  misc_feature 1..22: note = chemically synthesized
  source 1..22: mol_type = other DNA
agtgttcatcttacctatccac

SEQ ID NO: 63158 - DNA, 22 bp, synthetic construct
  misc_feature 1..22: note = chemically synthesized
  source 1..22: mol_type = other DNA
atcttacctatccaccaaggct

SEQ ID NO: 63159 - DNA, 22 bp, synthetic construct
  misc_feature 1..22: note = chemically synthesized
  source 1..22: mol_type = other DNA
acctatccaccaaggcttgaag

SEQ ID NO: 63160 - DNA, 22 bp, synthetic construct
  misc_feature 1..22: note = chemically synthesized
  source 1..22: mol_type = other DNA
cctatccaccaaggcttgaagt

SEQ ID NO: 63161 - DNA, 22 bp, synthetic construct
  misc_feature 1..22: note = chemically synthesized
  source 1..22: mol_type = other DNA
tccaccaaggcttgaagtgagg

SEQ ID NO: 63162 - DNA, 22 bp, synthetic construct
  misc_feature 1..22: note = chemically synthesized
  source 1..22: mol_type = other DNA
gaagtgaggtgccccgactgtg

SEQ ID NO: 63163 - DNA, 22 bp, synthetic construct
  misc_feature 1..22: note = chemically synthesized
  source 1..22: mol_type = other DNA
aagtgaggtgccccgactgtga

SEQ ID NO: 63164 - DNA, 22 bp, synthetic construct
  misc_feature 1..22: note = chemically synthesized
  source 1..22: mol_type = other DNA
tgagttccaggtttgatgccta

SEQ ID NO: 63165 - DNA, 22 bp, synthetic construct
  misc_feature 1..22: note = chemically synthesized
  source 1..22: mol_type = other DNA
caggtttgatgcctacagccca

SEQ ID NO: 63166 - DNA, 22 bp, synthetic construct
  misc_feature 1..22: note = chemically synthesized
  source 1..22: mol_type = other DNA
gatgcctacagcccatcagcct

SEQ ID NO: 63167 - DNA, 22 bp, synthetic construct
  misc_feature 1..22: note = chemically synthesized
  source 1..22: mol_type = other DNA
atgcctacagcccatcagcctt

SEQ ID NO: 63168 - DNA, 22 bp, synthetic construct
  misc_feature 1..22: note = chemically synthesized
  source 1..22: mol_type = other DNA
cagcccatcagccttatacctt

SEQ ID NO: 63169 - DNA, 22 bp, synthetic construct
  misc_feature 1..22: note = chemically synthesized
  source 1..22: mol_type = other DNA
ataccttgtcttataccttaac

SEQ ID NO: 63170 - DNA, 22 bp, synthetic construct
  misc_feature 1..22: note = chemically synthesized
  source 1..22: mol_type = other DNA
taccttgtcttataccttaact

SEQ ID NO: 63171 - DNA, 22 bp, synthetic construct
  misc_feature 1..22: note = chemically synthesized
  source 1..22: mol_type = other DNA
gtcttataccttaactggtgga

SEQ ID NO: 63172 - DNA, 22 bp, synthetic construct
  misc_feature 1..22: note = chemically synthesized
  source 1..22: mol_type = other DNA
tcttataccttaactggtggag

SEQ ID NO: 63173 - DNA, 22 bp, synthetic construct
  misc_feature 1..22: note = chemically synthesized
  source 1..22: mol_type = other DNA
ataccttaactggtggagggtg

SEQ ID NO: 63174 - DNA, 22 bp, synthetic construct
  misc_feature 1..22: note = chemically synthesized
  source 1..22: mol_type = other DNA
taccttaactggtggagggtgc

SEQ ID NO: 63175 - DNA, 22 bp, synthetic construct
  misc_feature 1..22: note = chemically synthesized
  source 1..22: mol_type = other DNA
aactggtggagggtgctgtctc

SEQ ID NO: 63176 - DNA, 22 bp, synthetic construct
  misc_feature 1..22: note = chemically synthesized
  source 1..22: mol_type = other DNA
actggtggagggtgctgtctct

SEQ ID NO: 63177 - DNA, 22 bp, synthetic construct
  misc_feature 1..22: note = chemically synthesized
  source 1..22: mol_type = other DNA
gtggagggtgctgtctctgtgt

SEQ ID NO: 63178 - DNA, 22 bp, synthetic construct
  misc_feature 1..22: note = chemically synthesized
  source 1..22: mol_type = other DNA
tctctgtgtagcagccaccagc

SEQ ID NO: 63179 - DNA, 22 bp, synthetic construct
  misc_feature 1..22: note = chemically synthesized
  source 1..22: mol_type = other DNA
tgtgtagcagccaccagcctag

SEQ ID NO: 63180 - DNA, 22 bp, synthetic construct
  misc_feature 1..22: note = chemically synthesized
  source 1..22: mol_type = other DNA
tgtagcagccaccagcctagct

SEQ ID NO: 63181 - DNA, 22 bp, synthetic construct
  misc_feature 1..22: note = chemically synthesized
  source 1..22: mol_type = other DNA
gctctgaaccctgtcctgagga

SEQ ID NO: 63182 - DNA, 22 bp, synthetic construct
  misc_feature 1..22: note = chemically synthesized
  source 1..22: mol_type = other DNA
tgaaccctgtcctgaggagttg

SEQ ID NO: 63183 - DNA, 22 bp, synthetic construct
  misc_feature 1..22: note = chemically synthesized
  source 1..22: mol_type = other DNA
aaccctgtcctgaggagttggg

SEQ ID NO: 63184 - DNA, 22 bp, synthetic construct
  misc_feature 1..22: note = chemically synthesized
  source 1..22: mol_type = other DNA
tcctgaggagttgggaagtgtg

SEQ ID NO: 63185 - DNA, 22 bp, synthetic construct
  misc_feature 1..22: note = chemically synthesized
  source 1..22: mol_type = other DNA
aggagttgggaagtgtggggtg

SEQ ID NO: 63186 - DNA, 22 bp, synthetic construct
  misc_feature 1..22: note = chemically synthesized
  source 1..22: mol_type = other DNA
ggaagtgtggggtgtctggttt

SEQ ID NO: 63187 - DNA, 22 bp, synthetic construct
  misc_feature 1..22: note = chemically synthesized
  source 1..22: mol_type = other DNA
gtttattccatcaatacacgta

SEQ ID NO: 63188 - DNA, 22 bp, synthetic construct
  misc_feature 1..22: note = chemically synthesized
  source 1..22: mol_type = other DNA
attccatcaatacacgtagtcc

SEQ ID NO: 63189 - DNA, 22 bp, synthetic construct
  misc_feature 1..22: note = chemically synthesized
  source 1..22: mol_type = other DNA
ttccatcaatacacgtagtccc

SEQ ID NO: 63190 - DNA, 22 bp, synthetic construct
  misc_feature 1..22: note = chemically synthesized
  source 1..22: mol_type = other DNA
catcaatacacgtagtcccttc

SEQ ID NO: 63191 - DNA, 22 bp, synthetic construct
  misc_feature 1..22: note = chemically synthesized
  source 1..22: mol_type = other DNA
ccattcttctgccattttttct

SEQ ID NO: 63192 - DNA, 22 bp, synthetic construct
  misc_feature 1..22: note = chemically synthesized
  source 1..22: mol_type = other DNA
cattcttctgccattttttctc

SEQ ID NO: 63193 - DNA, 22 bp, synthetic construct
  misc_feature 1..22: note = chemically synthesized
  source 1..22: mol_type = other DNA
ttctgccattttttctcagggg

SEQ ID NO: 63194 - DNA, 22 bp, synthetic construct
  misc_feature 1..22: note = chemically synthesized
  source 1..22: mol_type = other DNA
ctgccattttttctcaggggct

SEQ ID NO: 63195 - DNA, 22 bp, synthetic construct
  misc_feature 1..22: note = chemically synthesized
  source 1..22: mol_type = other DNA
tgccattttttctcaggggctc

SEQ ID NO: 63196 - DNA, 22 bp, synthetic construct
  misc_feature 1..22: note = chemically synthesized
  source 1..22: mol_type = other DNA
ccattttttctcaggggctctc

SEQ ID NO: 63197 - DNA, 22 bp, synthetic construct
  misc_feature 1..22: note = chemically synthesized
  source 1..22: mol_type = other DNA
tttctcaggggctctccttcct

SEQ ID NO: 63198 - DNA, 22 bp, synthetic construct
  misc_feature 1..22: note = chemically synthesized
  source 1..22: mol_type = other DNA
ttctcaggggctctccttcctt

SEQ ID NO: 63199 - DNA, 22 bp, synthetic construct
  misc_feature 1..22: note = chemically synthesized
  source 1..22: mol_type = other DNA
tctcaggggctctccttccttc

SEQ ID NO: 63200 - DNA, 22 bp, synthetic construct
  misc_feature 1..22: note = chemically synthesized
  source 1..22: mol_type = other DNA
ctcaggggctctccttccttcc

SEQ ID NO: 63201 - DNA, 22 bp, synthetic construct
  misc_feature 1..22: note = chemically synthesized
  source 1..22: mol_type = other DNA
tcaggggctctccttccttccc

SEQ ID NO: 63202 - DNA, 22 bp, synthetic construct
  misc_feature 1..22: note = chemically synthesized
  source 1..22: mol_type = other DNA
aggggctctccttccttccctg

SEQ ID NO: 63203 - DNA, 22 bp, synthetic construct
  misc_feature 1..22: note = chemically synthesized
  source 1..22: mol_type = other DNA
tccttccttccctggctcttgg

SEQ ID NO: 63204 - DNA, 22 bp, synthetic construct
  misc_feature 1..22: note = chemically synthesized
  source 1..22: mol_type = other DNA
cttccttccctggctcttgggt

SEQ ID NO: 63205 - DNA, 22 bp, synthetic construct
  misc_feature 1..22: note = chemically synthesized
  source 1..22: mol_type = other DNA
ccttccctggctcttgggtagg

SEQ ID NO: 63206 - DNA, 22 bp, synthetic construct
  misc_feature 1..22: note = chemically synthesized
  source 1..22: mol_type = other DNA
cttccctggctcttgggtaggc

SEQ ID NO: 63207 - DNA, 22 bp, synthetic construct
  misc_feature 1..22: note = chemically synthesized
  source 1..22: mol_type = other DNA
ccctggctcttgggtaggctgc

SEQ ID NO: 63208 - DNA, 22 bp, synthetic construct
  misc_feature 1..22: note = chemically synthesized
  source 1..22: mol_type = other DNA
cctggctcttgggtaggctgcc

SEQ ID NO: 63209 - DNA, 22 bp, synthetic construct
  misc_feature 1..22: note = chemically synthesized
  source 1..22: mol_type = other DNA
gctcttgggtaggctgcctgct

SEQ ID NO: 63210 - DNA, 22 bp, synthetic construct
  misc_feature 1..22: note = chemically synthesized
  source 1..22: mol_type = other DNA
ttgggtaggctgcctgctctga

SEQ ID NO: 63211 - DNA, 22 bp, synthetic construct
  misc_feature 1..22: note = chemically synthesized
  source 1..22: mol_type = other DNA
gggtaggctgcctgctctgatg

SEQ ID NO: 63212 - DNA, 22 bp, synthetic construct
  misc_feature 1..22: note = chemically synthesized
  source 1..22: mol_type = other DNA
ggtaggctgcctgctctgatgt

SEQ ID NO: 63213 - DNA, 22 bp, synthetic construct
  misc_feature 1..22: note = chemically synthesized
  source 1..22: mol_type = other DNA
cctgctctgatgtaagttcctg

SEQ ID NO: 63214 - DNA, 22 bp, synthetic construct
  misc_feature 1..22: note = chemically synthesized
  source 1..22: mol_type = other DNA
ctctgatgtaagttcctgctgg

SEQ ID NO: 63215 - DNA, 22 bp, synthetic construct
  misc_feature 1..22: note = chemically synthesized
  source 1..22: mol_type = other DNA
tgatgtaagttcctgctgggat

SEQ ID NO: 63216 - DNA, 22 bp, synthetic construct
  misc_feature 1..22: note = chemically synthesized
  source 1..22: mol_type = other DNA
atgtaagttcctgctgggatga

SEQ ID NO: 63217 - DNA, 22 bp, synthetic construct
  misc_feature 1..22: note = chemically synthesized
  source 1..22: mol_type = other DNA
ctgctgggatgattgctctggc

SEQ ID NO: 63218 - DNA, 22 bp, synthetic construct
  misc_feature 1..22: note = chemically synthesized
  source 1..22: mol_type = other DNA
ctgggatgattgctctggccag

SEQ ID NO: 63219 - DNA, 22 bp, synthetic construct
  misc_feature 1..22: note = chemically synthesized
  source 1..22: mol_type = other DNA
ggatgattgctctggccaggcc

SEQ ID NO: 63220 - DNA, 22 bp, synthetic construct
  misc_feature 1..22: note = chemically synthesized
  source 1..22: mol_type = other DNA
ctctggccaggcccccagctgc

SEQ ID NO: 63221 - DNA, 22 bp, synthetic construct
  misc_feature 1..22: note = chemically synthesized
  source 1..22: mol_type = other DNA
tggccaggcccccagctgctcc

SEQ ID NO: 63222 - DNA, 22 bp, synthetic construct
  misc_feature 1..22: note = chemically synthesized
  source 1..22: mol_type = other DNA
gccaggcccccagctgctccct

SEQ ID NO: 63223 - DNA, 22 bp, synthetic construct
  misc_feature 1..22: note = chemically synthesized
  source 1..22: mol_type = other DNA
ctccctgcccttctctgaaggc

SEQ ID NO: 63224 - DNA, 22 bp, synthetic construct
  misc_feature 1..22: note = chemically synthesized
  source 1..22: mol_type = other DNA
cctgcccttctctgaaggcaca

SEQ ID NO: 63225 - DNA, 22 bp, synthetic construct
  misc_feature 1..22: note = chemically synthesized
  source 1..22: mol_type = other DNA
cccttctctgaaggcacatctg

SEQ ID NO: 63226 - DNA, 22 bp, synthetic construct
  misc_feature 1..22: note = chemically synthesized
  source 1..22: mol_type = other DNA
ctctgaaggcacatctgtcagc

SEQ ID NO: 63227 - DNA, 22 bp, synthetic construct
  misc_feature 1..22: note = chemically synthesized
  source 1..22: mol_type = other DNA
tctgaaggcacatctgtcagcc

SEQ ID NO: 63228 - DNA, 22 bp, synthetic construct
  misc_feature 1..22: note = chemically synthesized
  source 1..22: mol_type = other DNA
tgaaggcacatctgtcagccca

SEQ ID NO: 63229 - DNA, 22 bp, synthetic construct
  misc_feature 1..22: note = chemically synthesized
  source 1..22: mol_type = other DNA
aaggcacatctgtcagcccaca

SEQ ID NO: 63230 - DNA, 22 bp, synthetic construct
  misc_feature 1..22: note = chemically synthesized
  source 1..22: mol_type = other DNA
tcagcccacagaggcacggtta

SEQ ID NO: 63231 - DNA, 22 bp, synthetic construct
  misc_feature 1..22: note = chemically synthesized
  source 1..22: mol_type = other DNA
atggtggcggggaagcagaggc

SEQ ID NO: 63232 - DNA, 22 bp, synthetic construct
  misc_feature 1..22: note = chemically synthesized
  source 1..22: mol_type = other DNA
gccccgggaacctcacctgccc

SEQ ID NO: 63233 - DNA, 22 bp, synthetic construct
  misc_feature 1..22: note = chemically synthesized
  source 1..22: mol_type = other DNA
acctgccctatccctacctgcc

SEQ ID NO: 63234 - DNA, 22 bp, synthetic construct
  misc_feature 1..22: note = chemically synthesized
  source 1..22: mol_type = other DNA
ccctatccctacctgccccctg

SEQ ID NO: 63235 - DNA, 22 bp, synthetic construct
  misc_feature 1..22: note = chemically synthesized
  source 1..22: mol_type = other DNA
tccctacctgccccctgtcccc

SEQ ID NO: 63236 - DNA, 22 bp, synthetic construct
  misc_feature 1..22: note = chemically synthesized
  source 1..22: mol_type = other DNA
cctgccccctgtcccctccccg

SEQ ID NO: 63237 - DNA, 22 bp, synthetic construct
  misc_feature 1..22: note = chemically synthesized
  source 1..22: mol_type = other DNA
ccccctgtcccctccccgcctg

SEQ ID NO: 63238 - DNA, 22 bp, synthetic construct
  misc_feature 1..22: note = chemically synthesized
  source 1..22: mol_type = other DNA
tcccctccccgcctgggcttga

SEQ ID NO: 63239 - DNA, 22 bp, synthetic construct
  misc_feature 1..22: note = chemically synthesized
  source 1..22: mol_type = other DNA
cccgcctgggcttgacttgtcc

SEQ ID NO: 63240 - DNA, 22 bp, synthetic construct
  misc_feature 1..22: note = chemically synthesized
  source 1..22: mol_type = other DNA
ggcttgacttgtccactttcac

SEQ ID NO: 63241 - DNA, 22 bp, synthetic construct
  misc_feature 1..22: note = chemically synthesized
  source 1..22: mol_type = other DNA
gacttgtccactttcactctca

SEQ ID NO: 63242 - DNA, 22 bp, synthetic construct
  misc_feature 1..22: note = chemically synthesized
  source 1..22: mol_type = other DNA
acttgtccactttcactctcaa

SEQ ID NO: 63243 - DNA, 22 bp, synthetic construct
  misc_feature 1..22: note = chemically synthesized
  source 1..22: mol_type = other DNA
gtccactttcactctcaagacc

SEQ ID NO: 63244 - DNA, 22 bp, synthetic construct
  misc_feature 1..22: note = chemically synthesized
  source 1..22: mol_type = other DNA
tccactttcactctcaagacca

SEQ ID NO: 63245 - DNA, 22 bp, synthetic construct
  misc_feature 1..22: note = chemically synthesized
  source 1..22: mol_type = other DNA
tcactctcaagaccaccgctct

SEQ ID NO: 63246 - DNA, 22 bp, synthetic construct
  misc_feature 1..22: note = chemically synthesized
  source 1..22: mol_type = other DNA
cactctcaagaccaccgctctc

SEQ ID NO: 63247 - DNA, 22 bp, synthetic construct
  misc_feature 1..22: note = chemically synthesized
  source 1..22: mol_type = other DNA
actctcaagaccaccgctctca

SEQ ID NO: 63248 - DNA, 22 bp, synthetic construct
  misc_feature 1..22: note = chemically synthesized
  source 1..22: mol_type = other DNA
tcaagaccaccgctctcacaca

SEQ ID NO: 63249 - DNA, 22 bp, synthetic construct
  misc_feature 1..22: note = chemically synthesized
  source 1..22: mol_type = other DNA
aagaccaccgctctcacacaca

SEQ ID NO: 63250 - DNA, 22 bp, synthetic construct
  misc_feature 1..22: note = chemically synthesized
  source 1..22: mol_type = other DNA
tcacacacaggtcctgtgctgc

SEQ ID NO: 63251 - DNA, 22 bp, synthetic construct
  misc_feature 1..22: note = chemically synthesized
  source 1..22: mol_type = other DNA
acacacaggtcctgtgctgccc

SEQ ID NO: 63252 - DNA, 22 bp, synthetic construct
  misc_feature 1..22: note = chemically synthesized
  source 1..22: mol_type = other DNA
tgctgcccccacagctttgcag

SEQ ID NO: 63253 - DNA, 22 bp, synthetic construct
  misc_feature 1..22: note = chemically synthesized
  source 1..22: mol_type = other DNA
cccccacagctttgcaggctgc

SEQ ID NO: 63254 - DNA, 22 bp, synthetic construct
  misc_feature 1..22: note = chemically synthesized
  source 1..22: mol_type = other DNA
tgcaggctgctggttttccatc

SEQ ID NO: 63255 - DNA, 22 bp, synthetic construct
  misc_feature 1..22: note = chemically synthesized
  source 1..22: mol_type = other DNA
gcaggctgctggttttccatcc

SEQ ID NO: 63256 - DNA, 22 bp, synthetic construct
  misc_feature 1..22: note = chemically synthesized
  source 1..22: mol_type = other DNA
caggctgctggttttccatcca

SEQ ID NO: 63257 - DNA, 22 bp, synthetic construct
  misc_feature 1..22: note = chemically synthesized
  source 1..22: mol_type = other DNA
ctggttttccatccagggcaca

SEQ ID NO: 63258 - DNA, 22 bp, synthetic construct
  misc_feature 1..22: note = chemically synthesized
  source 1..22: mol_type = other DNA
gttttccatccagggcacagcc

SEQ ID NO: 63259 - DNA, 22 bp, synthetic construct
  misc_feature 1..22: note = chemically synthesized
  source 1..22: mol_type = other DNA
tccatccagggcacagccgcag

SEQ ID NO: 63260 - DNA, 22 bp, synthetic construct
  misc_feature 1..22: note = chemically synthesized
  source 1..22: mol_type = other DNA
ccatccagggcacagccgcagg

SEQ ID NO: 63261 - DNA, 22 bp, synthetic construct
  misc_feature 1..22: note = chemically synthesized
  source 1..22: mol_type = other DNA
catccagggcacagccgcaggc

SEQ ID NO: 63262 - DNA, 22 bp, synthetic construct
  misc_feature 1..22: note = chemically synthesized
  source 1..22: mol_type = other DNA
tgggcaccctagccctcagtgc

SEQ ID NO: 63263 - DNA, 22 bp, synthetic construct
  misc_feature 1..22: note = chemically synthesized
  source 1..22: mol_type = other DNA
ggcaccctagccctcagtgccc

SEQ ID NO: 63264 - DNA, 22 bp, synthetic construct
  misc_feature 1..22: note = chemically synthesized
  source 1..22: mol_type = other DNA
gccctcagtgcccagggcaaag

SEQ ID NO: 63265 - DNA, 22 bp, synthetic construct
  misc_feature 1..22: note = chemically synthesized
  source 1..22: mol_type = other DNA
agtgcccagggcaaagccctga

SEQ ID NO: 63266 - DNA, 22 bp, synthetic construct
  misc_feature 1..22: note = chemically synthesized
  source 1..22: mol_type = other DNA
acatgcaatctcactggcaggc

SEQ ID NO: 63267 - DNA, 22 bp, synthetic construct
  misc_feature 1..22: note = chemically synthesized
  source 1..22: mol_type = other DNA
actggcaggcagcctcaggcag

SEQ ID NO: 63268 - DNA, 22 bp, synthetic construct
  misc_feature 1..22: note = chemically synthesized
  source 1..22: mol_type = other DNA
gcaggcagcctcaggcaggcct

SEQ ID NO: 63269 - DNA, 22 bp, synthetic construct
  misc_feature 1..22: note = chemically synthesized
  source 1..22: mol_type = other DNA
aggcaggcctgggcagaggacc

SEQ ID NO: 63270 - DNA, 22 bp, synthetic construct
  misc_feature 1..22: note = chemically synthesized
  source 1..22: mol_type = other DNA
ggcagaggaccgaaaggaggag

SEQ ID NO: 63271 - DNA, 22 bp, synthetic construct
  misc_feature 1..22: note = chemically synthesized
  source 1..22: mol_type = other DNA
cagtagagcagacaggagacaa

SEQ ID NO: 63272 - DNA, 22 bp, synthetic construct
  misc_feature 1..22: note = chemically synthesized
  source 1..22: mol_type = other DNA
agagtaaacagcctggcagtgg

SEQ ID NO: 63273 - DNA, 22 bp, synthetic construct
  misc_feature 1..22: note = chemically synthesized
  source 1..22: mol_type = other DNA
gcagtggggtgagtgcctggct

SEQ ID NO: 63274 - DNA, 22 bp, synthetic construct
  misc_feature 1..22: note = chemically synthesized
  source 1..22: mol_type = other DNA
gctggaggggctcacctgggct

SEQ ID NO: 63275 - DNA, 22 bp, synthetic construct
  misc_feature 1..22: note = chemically synthesized
  source 1..22: mol_type = other DNA
gaggggctcacctgggctggcc

SEQ ID NO: 63276 - DNA, 22 bp, synthetic construct
  misc_feature 1..22: note = chemically synthesized
  source 1..22: mol_type = other DNA
acctgggctggcctgcctggga

SEQ ID NO: 63277 - DNA, 22 bp, synthetic construct
  misc_feature 1..22: note = chemically synthesized
  source 1..22: mol_type = other DNA
ggctggcctgcctgggaggagc

SEQ ID NO: 63278 - DNA, 22 bp, synthetic construct
  misc_feature 1..22: note = chemically synthesized
  source 1..22: mol_type = other DNA
gcctgcctgggaggagccaggt

SEQ ID NO: 63279 - DNA, 22 bp, synthetic construct
  misc_feature 1..22: note = chemically synthesized
  source 1..22: mol_type = other DNA
cctgggaggagccaggtcggtg

SEQ ID NO: 63280 - DNA, 22 bp, synthetic construct
  misc_feature 1..22: note = chemically synthesized
  source 1..22: mol_type = other DNA
ggaggagccaggtcggtggctg

SEQ ID NO: 63281 - DNA, 22 bp, synthetic construct
  misc_feature 1..22: note = chemically synthesized
  source 1..22: mol_type = other DNA
ctctctccgaatcttagtcctg

SEQ ID NO: 63282 - DNA, 22 bp, synthetic construct
  misc_feature 1..22: note = chemically synthesized
  source 1..22: mol_type = other DNA
tctccgaatcttagtcctgctt

SEQ ID NO: 63283 - DNA, 22 bp, synthetic construct
  misc_feature 1..22: note = chemically synthesized
  source 1..22: mol_type = other DNA
tccgaatcttagtcctgcttga

SEQ ID NO: 63284 - DNA, 22 bp, synthetic construct
  misc_feature 1..22: note = chemically synthesized
  source 1..22: mol_type = other DNA
cgaatcttagtcctgcttgagg

SEQ ID NO: 63285 - DNA, 22 bp, synthetic construct
  misc_feature 1..22: note = chemically synthesized
  source 1..22: mol_type = other DNA
agtcctgcttgaggtctagcag

SEQ ID NO: 63286 - DNA, 22 bp, synthetic construct
  misc_feature 1..22: note = chemically synthesized
  source 1..22: mol_type = other DNA
gtcctgcttgaggtctagcagc

SEQ ID NO: 63287 - DNA, 22 bp, synthetic construct
  misc_feature 1..22: note = chemically synthesized
  source 1..22: mol_type = other DNA
cttgaggtctagcagcttccgg

SEQ ID NO: 63288 - DNA, 22 bp, synthetic construct
  misc_feature 1..22: note = chemically synthesized
  source 1..22: mol_type = other DNA
gaggtctagcagcttccggagc

SEQ ID NO: 63289 - DNA, 22 bp, synthetic construct
  misc_feature 1..22: note = chemically synthesized
  source 1..22: mol_type = other DNA
aggtctagcagcttccggagct

SEQ ID NO: 63290 - DNA, 22 bp, synthetic construct
  misc_feature 1..22: note = chemically synthesized
  source 1..22: mol_type = other DNA
gcagcttccggagctgcacatg

SEQ ID NO: 63291 - DNA, 22 bp, synthetic construct
  misc_feature 1..22: note = chemically synthesized
  source 1..22: mol_type = other DNA
ccggagctgcacatggggcttg

SEQ ID NO: 63292 - DNA, 22 bp, synthetic construct
  misc_feature 1..22: note = chemically synthesized
  source 1..22: mol_type = other DNA
cggagctgcacatggggcttga

SEQ ID NO: 63293 - DNA, 22 bp, synthetic construct
  misc_feature 1..22: note = chemically synthesized
  source 1..22: mol_type = other DNA
cacatggggcttgaggtctggt

SEQ ID NO: 63294 - DNA, 22 bp, synthetic construct
  misc_feature 1..22: note = chemically synthesized
  source 1..22: mol_type = other DNA
gaggtctggtgcttatggatta

SEQ ID NO: 63295 - DNA, 22 bp, synthetic construct
  misc_feature 1..22: note = chemically synthesized
  source 1..22: mol_type = other DNA
aggtctggtgcttatggattag

SEQ ID NO: 63296 - DNA, 22 bp, synthetic construct
  misc_feature 1..22: note = chemically synthesized
  source 1..22: mol_type = other DNA
gtgcttatggattaggaggaag

SEQ ID NO: 63297 - DNA, 22 bp, synthetic construct
  misc_feature 1..22: note = chemically synthesized
  source 1..22: mol_type = other DNA
atggattaggaggaagagaaga

SEQ ID NO: 63298 - DNA, 22 bp, synthetic construct
  misc_feature 1..22: note = chemically synthesized
  source 1..22: mol_type = other DNA
tggattaggaggaagagaagac

SEQ ID NO: 63299 - DNA, 22 bp, synthetic construct
  misc_feature 1..22: note = chemically synthesized
  source 1..22: mol_type = other DNA
ggaggaagagaagacagatggc

SEQ ID NO: 63300 - DNA, 22 bp, synthetic construct
  misc_feature 1..22: note = chemically synthesized
  source 1..22: mol_type = other DNA
aggaacatgtctccttccacat

SEQ ID NO: 63301 - DNA, 22 bp, synthetic construct
  misc_feature 1..22: note = chemically synthesized
  source 1..22: mol_type = other DNA
ggaacatgtctccttccacatg

SEQ ID NO: 63302 - DNA, 22 bp, synthetic construct
  misc_feature 1..22: note = chemically synthesized
  source 1..22: mol_type = other DNA
cttccacatgctgtggcccagg

SEQ ID NO: 63303 - DNA, 22 bp, synthetic construct
  misc_feature 1..22: note = chemically synthesized
  source 1..22: mol_type = other DNA
ccacatgctgtggcccaggtgc

SEQ ID NO: 63304 - DNA, 22 bp, synthetic construct
  misc_feature 1..22: note = chemically synthesized
  source 1..22: mol_type = other DNA
cacatgctgtggcccaggtgct

SEQ ID NO: 63305 - DNA, 22 bp, synthetic construct
  misc_feature 1..22: note = chemically synthesized
  source 1..22: mol_type = other DNA
tggcccaggtgctgcccagagc

SEQ ID NO: 63306 - DNA, 22 bp, synthetic construct
  misc_feature 1..22: note = chemically synthesized
  source 1..22: mol_type = other DNA
cccagagctgtttcacagcagc

SEQ ID NO: 63307 - DNA, 22 bp, synthetic construct
  misc_feature 1..22: note = chemically synthesized
  source 1..22: mol_type = other DNA
tttcacagcagcctctccactc

SEQ ID NO: 63308 - DNA, 22 bp, synthetic construct
  misc_feature 1..22: note = chemically synthesized
  source 1..22: mol_type = other DNA
cacagcagcctctccactcaag

SEQ ID NO: 63309 - DNA, 22 bp, synthetic construct
  misc_feature 1..22: note = chemically synthesized
  source 1..22: mol_type = other DNA
acagcagcctctccactcaagg

SEQ ID NO: 63310 - DNA, 22 bp, synthetic construct
  misc_feature 1..22: note = chemically synthesized
  source 1..22: mol_type = other DNA
tccactcaaggttgagcggttt

SEQ ID NO: 63311 - DNA, 22 bp, synthetic construct
  misc_feature 1..22: note = chemically synthesized
  source 1..22: mol_type = other DNA
cactcaaggttgagcggtttcc

SEQ ID NO: 63312 - DNA, 22 bp, synthetic construct
  misc_feature 1..22: note = chemically synthesized
  source 1..22: mol_type = other DNA
aaggttgagcggtttccttcag

SEQ ID NO: 63313 - DNA, 22 bp, synthetic construct
  misc_feature 1..22: note = chemically synthesized
  source 1..22: mol_type = other DNA
agcggtttccttcagtgctgtc

SEQ ID NO: 63314 - DNA, 22 bp, synthetic construct
  misc_feature 1..22: note = chemically synthesized
  source 1..22: mol_type = other DNA
ccttcagtgctgtccacccctt

SEQ ID NO: 63315 - DNA, 22 bp, synthetic construct
  misc_feature 1..22: note = chemically synthesized
  source 1..22: mol_type = other DNA
cttcagtgctgtccaccccttt

SEQ ID NO: 63316 - DNA, 22 bp, synthetic construct
  misc_feature 1..22: note = chemically synthesized
  source 1..22: mol_type = other DNA
cagtgctgtccacccctttggt

SEQ ID NO: 63317 - DNA, 22 bp, synthetic construct
  misc_feature 1..22: note = chemically synthesized
  source 1..22: mol_type = other DNA
agtgctgtccacccctttggtc

SEQ ID NO: 63318 - DNA, 22 bp, synthetic construct
  misc_feature 1..22: note = chemically synthesized
  source 1..22: mol_type = other DNA
tccacccctttggtccggggag

SEQ ID NO: 63319 - DNA, 22 bp, synthetic construct
  misc_feature 1..22: note = chemically synthesized
  source 1..22: mol_type = other DNA
tggtccggggagcttcatgttc

SEQ ID NO: 63320 - DNA, 22 bp, synthetic construct
  misc_feature 1..22: note = chemically synthesized
  source 1..22: mol_type = other DNA
ggtccggggagcttcatgttcc

SEQ ID NO: 63321 - DNA, 22 bp, synthetic construct
  misc_feature 1..22: note = chemically synthesized
  source 1..22: mol_type = other DNA
gtccggggagcttcatgttcct

SEQ ID NO: 63322 - DNA, 22 bp, synthetic construct
  misc_feature 1..22: note = chemically synthesized
  source 1..22: mol_type = other DNA
catgttcctgggcctcactgac

SEQ ID NO: 63323 - DNA, 22 bp, synthetic construct
  misc_feature 1..22: note = chemically synthesized
  source 1..22: mol_type = other DNA
atgttcctgggcctcactgaca

SEQ ID NO: 63324 - DNA, 22 bp, synthetic construct
  misc_feature 1..22: note = chemically synthesized
  source 1..22: mol_type = other DNA
ctgggcctcactgacacctgca

SEQ ID NO: 63325 - DNA, 22 bp, synthetic construct
  misc_feature 1..22: note = chemically synthesized
  source 1..22: mol_type = other DNA
ggcctcactgacacctgcatgg

SEQ ID NO: 63326 - DNA, 22 bp, synthetic construct
  misc_feature 1..22: note = chemically synthesized
  source 1..22: mol_type = other DNA
actgacacctgcatggggttgg

SEQ ID NO: 63327 - DNA, 22 bp, synthetic construct
  misc_feature 1..22: note = chemically synthesized
  source 1..22: mol_type = other DNA
acacctgcatggggttggtggg

SEQ ID NO: 63328 - DNA, 22 bp, synthetic construct
  misc_feature 1..22: note = chemically synthesized
  source 1..22: mol_type = other DNA
catggggttggtggggaggtat

SEQ ID NO: 63329 - DNA, 22 bp, synthetic construct
  misc_feature 1..22: note = chemically synthesized
  source 1..22: mol_type = other DNA
gtggggaggtatgaggggttgg

SEQ ID NO: 63330 - DNA, 22 bp, synthetic construct
  misc_feature 1..22: note = chemically synthesized
  source 1..22: mol_type = other DNA
gaggggtctttttgctagccct

SEQ ID NO: 63331 - DNA, 22 bp, synthetic construct
  misc_feature 1..22: note = chemically synthesized
  source 1..22: mol_type = other DNA
tttgctagccctggcccgtggc

SEQ ID NO: 63332 - DNA, 22 bp, synthetic construct
  misc_feature 1..22: note = chemically synthesized
  source 1..22: mol_type = other DNA
ttgctagccctggcccgtggca

SEQ ID NO: 63333 - DNA, 22 bp, synthetic construct
  misc_feature 1..22: note = chemically synthesized
  source 1..22: mol_type = other DNA
tgctagccctggcccgtggcaa

SEQ ID NO: 63334 - DNA, 22 bp, synthetic construct
  misc_feature 1..22: note = chemically synthesized
  source 1..22: mol_type = other DNA
gctagccctggcccgtggcaaa

SEQ ID NO: 63335 - DNA, 22 bp, synthetic construct
  misc_feature 1..22: note = chemically synthesized
  source 1..22: mol_type = other DNA
ctagccctggcccgtggcaaac

SEQ ID NO: 63336 - DNA, 22 bp, synthetic construct
  misc_feature 1..22: note = chemically synthesized
  source 1..22: mol_type = other DNA
gccctggcccgtggcaaacact

SEQ ID NO: 63337 - DNA, 22 bp, synthetic construct
  misc_feature 1..22: note = chemically synthesized
  source 1..22: mol_type = other DNA
gcccgtggcaaacactgtcttg

SEQ ID NO: 63338 - DNA, 22 bp, synthetic construct
  misc_feature 1..22: note = chemically synthesized
  source 1..22: mol_type = other DNA
tcttgagaaagtgggacgttga

SEQ ID NO: 63339 - DNA, 22 bp, synthetic construct
  misc_feature 1..22: note = chemically synthesized
  source 1..22: mol_type = other DNA
gagaaagtgggacgttgaagga

SEQ ID NO: 63340 - DNA, 22 bp, synthetic construct
  misc_feature 1..22: note = chemically synthesized
  source 1..22: mol_type = other DNA
agaaagtgggacgttgaaggag

SEQ ID NO: 63341 - DNA, 22 bp, synthetic construct
  misc_feature 1..22: note = chemically synthesized
  source 1..22: mol_type = other DNA
aaggagcttggactctaaagtc

SEQ ID NO: 63342 - DNA, 22 bp, synthetic construct
  misc_feature 1..22: note = chemically synthesized
  source 1..22: mol_type = other DNA
ggactctaaagtcagctacaca

SEQ ID NO: 63343 - DNA, 22 bp, synthetic construct
  misc_feature 1..22: note = chemically synthesized
  source 1..22: mol_type = other DNA
gactctaaagtcagctacacat

SEQ ID NO: 63344 - DNA, 22 bp, synthetic construct
  misc_feature 1..22: note = chemically synthesized
  source 1..22: mol_type = other DNA
taaagtcagctacacatgagtc

SEQ ID NO: 63345 - DNA, 22 bp, synthetic construct
  misc_feature 1..22: note = chemically synthesized
  source 1..22: mol_type = other DNA
aagtcagctacacatgagtctt

SEQ ID NO: 63346 - DNA, 22 bp, synthetic construct
  misc_feature 1..22: note = chemically synthesized
  source 1..22: mol_type = other DNA
cacatgagtcttttcacctgct

SEQ ID NO: 63347 - DNA, 22 bp, synthetic construct
  misc_feature 1..22: note = chemically synthesized
  source 1..22: mol_type = other DNA
ttcacctgctggctaggtggcc

SEQ ID NO: 63348 - DNA, 22 bp, synthetic construct
  misc_feature 1..22: note = chemically synthesized
  source 1..22: mol_type = other DNA
tcacctgctggctaggtggccc

SEQ ID NO: 63349 - DNA, 22 bp, synthetic construct
  misc_feature 1..22: note = chemically synthesized
  source 1..22: mol_type = other DNA
cacctgctggctaggtggcccc

SEQ ID NO: 63350 - DNA, 22 bp, synthetic construct
  misc_feature 1..22: note = chemically synthesized
  source 1..22: mol_type = other DNA
acctgctggctaggtggccccg

SEQ ID NO: 63351 - DNA, 22 bp, synthetic construct
  misc_feature 1..22: note = chemically synthesized
  source 1..22: mol_type = other DNA
ctggctaggtggccccggacaa

SEQ ID NO: 63352 - DNA, 22 bp, synthetic construct
  misc_feature 1..22: note = chemically synthesized
  source 1..22: mol_type = other DNA
gctaggtggccccggacaagtc

SEQ ID NO: 63353 - DNA, 22 bp, synthetic construct
  misc_feature 1..22: note = chemically synthesized
  source 1..22: mol_type = other DNA
ggtggccccggacaagtcaatc

SEQ ID NO: 63354 - DNA, 22 bp, synthetic construct
  misc_feature 1..22: note = chemically synthesized
  source 1..22: mol_type = other DNA
ttgggcctcaggctctttatct

SEQ ID NO: 63355 - DNA, 22 bp, synthetic construct
  misc_feature 1..22: note = chemically synthesized
  source 1..22: mol_type = other DNA
ggcctcaggctctttatctata

SEQ ID NO: 63356 - DNA, 22 bp, synthetic construct
  misc_feature 1..22: note = chemically synthesized
  source 1..22: mol_type = other DNA
aggctctttatctataaaatgg

SEQ ID NO: 63357 - DNA, 22 bp, synthetic construct
  misc_feature 1..22: note = chemically synthesized
  source 1..22: mol_type = other DNA
tttatctataaaatggggctaa

SEQ ID NO: 63358 - DNA, 22 bp, synthetic construct
  misc_feature 1..22: note = chemically synthesized
  source 1..22: mol_type = other DNA
tatctataaaatggggctaatt

SEQ ID NO: 63359 - DNA, 22 bp, synthetic construct
  misc_feature 1..22: note = chemically synthesized
  source 1..22: mol_type = other DNA
atctataaaatggggctaattt

SEQ ID NO: 63360 - DNA, 22 bp, synthetic construct
  misc_feature 1..22: note = chemically synthesized
  source 1..22: mol_type = other DNA
tctataaaatggggctaatttc

SEQ ID NO: 63361 - DNA, 22 bp, synthetic construct
  misc_feature 1..22: note = chemically synthesized
  source 1..22: mol_type = other DNA
taaaatggggctaatttccttt

SEQ ID NO: 63362 - DNA, 22 bp, synthetic construct
  misc_feature 1..22: note = chemically synthesized
  source 1..22: mol_type = other DNA
atttccttttttgcccctggga

SEQ ID NO: 63363 - DNA, 22 bp, synthetic construct
  misc_feature 1..22: note = chemically synthesized
  source 1..22: mol_type = other DNA
ccttttttgcccctgggaagaa

SEQ ID NO: 63364 - DNA, 22 bp, synthetic construct
  misc_feature 1..22: note = chemically synthesized
  source 1..22: mol_type = other DNA
cttttttgcccctgggaagaaa

SEQ ID NO: 63365 - DNA, 22 bp, synthetic construct
  misc_feature 1..22: note = chemically synthesized
  source 1..22: mol_type = other DNA
ttttgcccctgggaagaaatat

SEQ ID NO: 63366 - DNA, 22 bp, synthetic construct
  misc_feature 1..22: note = chemically synthesized
  source 1..22: mol_type = other DNA
tttgcccctgggaagaaatatc

SEQ ID NO: 63367 - DNA, 22 bp, synthetic construct
  misc_feature 1..22: note = chemically synthesized
  source 1..22: mol_type = other DNA
ttgcccctgggaagaaatatca

SEQ ID NO: 63368 - DNA, 22 bp, synthetic construct
  misc_feature 1..22: note = chemically synthesized
  source 1..22: mol_type = other DNA
tgcccctgggaagaaatatcac

SEQ ID NO: 63369 - DNA, 22 bp, synthetic construct
  misc_feature 1..22: note = chemically synthesized
  source 1..22: mol_type = other DNA
gcccctgggaagaaatatcact

SEQ ID NO: 63370 - DNA, 22 bp, synthetic construct
  misc_feature 1..22: note = chemically synthesized
  source 1..22: mol_type = other DNA
cccctgggaagaaatatcactt

SEQ ID NO: 63371 - DNA, 22 bp, synthetic construct
  misc_feature 1..22: note = chemically synthesized
  source 1..22: mol_type = other DNA
ggaagaaatatcacttagagga

SEQ ID NO: 63372 - DNA, 22 bp, synthetic construct
  misc_feature 1..22: note = chemically synthesized
  source 1..22: mol_type = other DNA
agaggagttacagaatgtgcaa

SEQ ID NO: 63373 - DNA, 22 bp, synthetic construct
  misc_feature 1..22: note = chemically synthesized
  source 1..22: mol_type = other DNA
gaggagttacagaatgtgcaac

SEQ ID NO: 63374 - DNA, 22 bp, synthetic construct
  misc_feature 1..22: note = chemically synthesized
  source 1..22: mol_type = other DNA
cagaatgtgcaacctttcccag

SEQ ID NO: 63375 - DNA, 22 bp, synthetic construct
  misc_feature 1..22: note = chemically synthesized
  source 1..22: mol_type = other DNA
tcccaggagtattgctcctgaa

SEQ ID NO: 63376 - DNA, 22 bp, synthetic construct
  misc_feature 1..22: note = chemically synthesized
  source 1..22: mol_type = other DNA
cccaggagtattgctcctgaag

SEQ ID NO: 63377 - DNA, 22 bp, synthetic construct
  misc_feature 1..22: note = chemically synthesized
  source 1..22: mol_type = other DNA
ccaggagtattgctcctgaagg

SEQ ID NO: 63378 - DNA, 22 bp, synthetic construct
  misc_feature 1..22: note = chemically synthesized
  source 1..22: mol_type = other DNA
ctcctgaaggaataaggcacga

SEQ ID NO: 63379 - DNA, 22 bp, synthetic construct
  misc_feature 1..22: note = chemically synthesized
  source 1..22: mol_type = other DNA
ctgaaggaataaggcacgatgg

SEQ ID NO: 63380 - DNA, 22 bp, synthetic construct
  misc_feature 1..22: note = chemically synthesized
  source 1..22: mol_type = other DNA
aaggaataaggcacgatgggct

SEQ ID NO: 63381 - DNA, 22 bp, synthetic construct
  misc_feature 1..22: note = chemically synthesized
  source 1..22: mol_type = other DNA
tgacttcagcctccagcactgt

SEQ ID NO: 63382 - DNA, 22 bp, synthetic construct
  misc_feature 1..22: note = chemically synthesized
  source 1..22: mol_type = other DNA
gacttcagcctccagcactgtg

SEQ ID NO: 63383 - DNA, 22 bp, synthetic construct
  misc_feature 1..22: note = chemically synthesized
  source 1..22: mol_type = other DNA
acttcagcctccagcactgtgg

SEQ ID NO: 63384 - DNA, 22 bp, synthetic construct
  misc_feature 1..22: note = chemically synthesized
  source 1..22: mol_type = other DNA
cagcctccagcactgtggccca

SEQ ID NO: 63385 - DNA, 22 bp, synthetic construct
  misc_feature 1..22: note = chemically synthesized
  source 1..22: mol_type = other DNA
agcctccagcactgtggcccag

SEQ ID NO: 63386 - DNA, 22 bp, synthetic construct
  misc_feature 1..22: note = chemically synthesized
  source 1..22: mol_type = other DNA
cagcactgtggcccagaagggt

SEQ ID NO: 63387 - DNA, 22 bp, synthetic construct
  misc_feature 1..22: note = chemically synthesized
  source 1..22: mol_type = other DNA
tggcccagaagggtatggctgg

SEQ ID NO: 63388 - DNA, 22 bp, synthetic construct
  misc_feature 1..22: note = chemically synthesized
  source 1..22: mol_type = other DNA
ggcaggggcgtcacacccctgc

SEQ ID NO: 63389 - DNA, 22 bp, synthetic construct
  misc_feature 1..22: note = chemically synthesized
  source 1..22: mol_type = other DNA
cagctctgtgggagtgacggaa

SEQ ID NO: 63390 - DNA, 22 bp, synthetic construct
  misc_feature 1..22: note = chemically synthesized
  source 1..22: mol_type = other DNA
tgtgggagtgacggaagggcgc

SEQ ID NO: 63391 - DNA, 22 bp, synthetic construct
  misc_feature 1..22: note = chemically synthesized
  source 1..22: mol_type = other DNA
tgggagtgacggaagggcgcta

SEQ ID NO: 63392 - DNA, 22 bp, synthetic construct
  misc_feature 1..22: note = chemically synthesized
  source 1..22: mol_type = other DNA
tccactcgccttgcacatggct

SEQ ID NO: 63393 - DNA, 22 bp, synthetic construct
  misc_feature 1..22: note = chemically synthesized
  source 1..22: mol_type = other DNA
gccttgcacatggctgtcttgc

SEQ ID NO: 63394 - DNA, 22 bp, synthetic construct
  misc_feature 1..22: note = chemically synthesized
  source 1..22: mol_type = other DNA
gcacatggctgtcttgctctac

SEQ ID NO: 63395 - DNA, 22 bp, synthetic construct
  misc_feature 1..22: note = chemically synthesized
  source 1..22: mol_type = other DNA
cacatggctgtcttgctctacc

SEQ ID NO: 63396 - DNA, 22 bp, synthetic construct
  misc_feature 1..22: note = chemically synthesized
  source 1..22: mol_type = other DNA
tcttgctctaccaggccttagg

SEQ ID NO: 63397 - DNA, 22 bp, synthetic construct
  misc_feature 1..22: note = chemically synthesized
  source 1..22: mol_type = other DNA
gctctaccaggccttaggttct

SEQ ID NO: 63398 - DNA, 22 bp, synthetic construct
  misc_feature 1..22: note = chemically synthesized
  source 1..22: mol_type = other DNA
ctctaccaggccttaggttctg

SEQ ID NO: 63399 - DNA, 22 bp, synthetic construct
  misc_feature 1..22: note = chemically synthesized
  source 1..22: mol_type = other DNA
taccaggccttaggttctgtgg

SEQ ID NO: 63400 - DNA, 22 bp, synthetic construct
  misc_feature 1..22: note = chemically synthesized
  source 1..22: mol_type = other DNA
ccaggccttaggttctgtggcc

SEQ ID NO: 63401 - DNA, 22 bp, synthetic construct
  misc_feature 1..22: note = chemically synthesized
  source 1..22: mol_type = other DNA
aggttctgtggccagatactgt

SEQ ID NO: 63402 - DNA, 22 bp, synthetic construct
  misc_feature 1..22: note = chemically synthesized
  source 1..22: mol_type = other DNA
ggttctgtggccagatactgtt

SEQ ID NO: 63403 - DNA, 22 bp, synthetic construct
  misc_feature 1..22: note = chemically synthesized
  source 1..22: mol_type = other DNA
tgtggccagatactgttctcca

SEQ ID NO: 63404 - DNA, 22 bp, synthetic construct
  misc_feature 1..22: note = chemically synthesized
  source 1..22: mol_type = other DNA
tggccagatactgttctccagc

SEQ ID NO: 63405 - DNA, 22 bp, synthetic construct
  misc_feature 1..22: note = chemically synthesized
  source 1..22: mol_type = other DNA
ttctccagctctttggcttggg

SEQ ID NO: 63406 - DNA, 22 bp, synthetic construct
  misc_feature 1..22: note = chemically synthesized
  source 1..22: mol_type = other DNA
tccagctctttggcttgggccc

SEQ ID NO: 63407 - DNA, 22 bp, synthetic construct
  misc_feature 1..22: note = chemically synthesized
  source 1..22: mol_type = other DNA
cagctctttggcttgggccccg

SEQ ID NO: 63408 - DNA, 22 bp, synthetic construct
  misc_feature 1..22: note = chemically synthesized
  source 1..22: mol_type = other DNA
tttggcttgggccccgagacca

SEQ ID NO: 63409 - DNA, 22 bp, synthetic construct
  misc_feature 1..22: note = chemically synthesized
  source 1..22: mol_type = other DNA
tggcttgggccccgagaccaga

SEQ ID NO: 63410 - DNA, 22 bp, synthetic construct
  misc_feature 1..22: note = chemically synthesized
  source 1..22: mol_type = other DNA
ggcttgggccccgagaccagag

SEQ ID NO: 63411 - DNA, 22 bp, synthetic construct
  misc_feature 1..22: note = chemically synthesized
  source 1..22: mol_type = other DNA
gcttgggccccgagaccagaga

SEQ ID NO: 63412 - DNA, 22 bp, synthetic construct
  misc_feature 1..22: note = chemically synthesized
  source 1..22: mol_type = other DNA
gggccccgagaccagagaagat

SEQ ID NO: 63413 - DNA, 22 bp, synthetic construct
  misc_feature 1..22: note = chemically synthesized
  source 1..22: mol_type = other DNA
ggccccgagaccagagaagata

SEQ ID NO: 63414 - DNA, 22 bp, synthetic construct
  misc_feature 1..22: note = chemically synthesized
  source 1..22: mol_type = other DNA
aatactggggaacacattgtag

SEQ ID NO: 63415 - DNA, 22 bp, synthetic construct
  misc_feature 1..22: note = chemically synthesized
  source 1..22: mol_type = other DNA
gggaacacattgtagggtgatc

SEQ ID NO: 63416 - DNA, 22 bp, synthetic construct
  misc_feature 1..22: note = chemically synthesized
  source 1..22: mol_type = other DNA
tagggtgatctcccagaaaagc

SEQ ID NO: 63417 - DNA, 22 bp, synthetic construct
  misc_feature 1..22: note = chemically synthesized
  source 1..22: mol_type = other DNA
ccagaaaagccagcgagaaatg

SEQ ID NO: 63418 - DNA, 22 bp, synthetic construct
  misc_feature 1..22: note = chemically synthesized
  source 1..22: mol_type = other DNA
tagctgtagcattcttcccttt

SEQ ID NO: 63419 - DNA, 22 bp, synthetic construct
  misc_feature 1..22: note = chemically synthesized
  source 1..22: mol_type = other DNA
tagcattcttccctttggatgc

SEQ ID NO: 63420 - DNA, 22 bp, synthetic construct
  misc_feature 1..22: note = chemically synthesized
  source 1..22: mol_type = other DNA
ttccctttggatgcctgtgtgg

SEQ ID NO: 63421 - DNA, 22 bp, synthetic construct
  misc_feature 1..22: note = chemically synthesized
  source 1..22: mol_type = other DNA
ccctttggatgcctgtgtgggg

SEQ ID NO: 63422 - DNA, 22 bp, synthetic construct
  misc_feature 1..22: note = chemically synthesized
  source 1..22: mol_type = other DNA
cctttggatgcctgtgtgggga

SEQ ID NO: 63423 - DNA, 22 bp, synthetic construct
  misc_feature 1..22: note = chemically synthesized
  source 1..22: mol_type = other DNA
tggatgcctgtgtggggacaga

SEQ ID NO: 63424 - DNA, 22 bp, synthetic construct
  misc_feature 1..22: note = chemically synthesized
  source 1..22: mol_type = other DNA
ggatgcctgtgtggggacagaa

SEQ ID NO: 63425 - DNA, 22 bp, synthetic construct
  misc_feature 1..22: note = chemically synthesized
  source 1..22: mol_type = other DNA
gatgcctgtgtggggacagaat

SEQ ID NO: 63426 - DNA, 22 bp, synthetic construct
  misc_feature 1..22: note = chemically synthesized
  source 1..22: mol_type = other DNA
tgtggggacagaatcagtggaa

SEQ ID NO: 63427 - DNA, 22 bp, synthetic construct
  misc_feature 1..22: note = chemically synthesized
  source 1..22: mol_type = other DNA
gccctgcctctcatcaatgccc

SEQ ID NO: 63428 - DNA, 22 bp, synthetic construct
  misc_feature 1..22: note = chemically synthesized
  source 1..22: mol_type = other DNA
cctctcatcaatgcccccccac

SEQ ID NO: 63429 - DNA, 22 bp, synthetic construct
  misc_feature 1..22: note = chemically synthesized
  source 1..22: mol_type = other DNA
tcatcaatgcccccccaccacc

SEQ ID NO: 63430 - DNA, 22 bp, synthetic construct
  misc_feature 1..22: note = chemically synthesized
  source 1..22: mol_type = other DNA
atcaatgcccccccaccaccca

SEQ ID NO: 63431 - DNA, 22 bp, synthetic construct
  misc_feature 1..22: note = chemically synthesized
  source 1..22: mol_type = other DNA
cttcctgttctattagacaaac

SEQ ID NO: 63432 - DNA, 22 bp, synthetic construct
  misc_feature 1..22: note = chemically synthesized
  source 1..22: mol_type = other DNA
cctgttctattagacaaacgta

SEQ ID NO: 63433 - DNA, 22 bp, synthetic construct
  misc_feature 1..22: note = chemically synthesized
  source 1..22: mol_type = other DNA
ctgttctattagacaaacgtag

SEQ ID NO: 63434 - DNA, 22 bp, synthetic construct
  misc_feature 1..22: note = chemically synthesized
  source 1..22: mol_type = other DNA
ttctattagacaaacgtagttt

SEQ ID NO: 63435 - DNA, 22 bp, synthetic construct
  misc_feature 1..22: note = chemically synthesized
  source 1..22: mol_type = other DNA
tattagacaaacgtagtttctg

SEQ ID NO: 63436 - DNA, 22 bp, synthetic construct
  misc_feature 1..22: note = chemically synthesized
  source 1..22: mol_type = other DNA
ttagacaaacgtagtttctgga

SEQ ID NO: 63437 - DNA, 22 bp, synthetic construct
  misc_feature 1..22: note = chemically synthesized
  source 1..22: mol_type = other DNA
gacaaacgtagtttctggatga

SEQ ID NO: 63438 - DNA, 22 bp, synthetic construct
  misc_feature 1..22: note = chemically synthesized
  source 1..22: mol_type = other DNA
ctggatgagttggacagtcatc

SEQ ID NO: 63439 - DNA, 22 bp, synthetic construct
  misc_feature 1..22: note = chemically synthesized
  source 1..22: mol_type = other DNA
tggatgagttggacagtcatct

SEQ ID NO: 63440 - DNA, 22 bp, synthetic construct
  misc_feature 1..22: note = chemically synthesized
  source 1..22: mol_type = other DNA
gatgagttggacagtcatctga

SEQ ID NO: 63441 - DNA, 22 bp, synthetic construct
  misc_feature 1..22: note = chemically synthesized
  source 1..22: mol_type = other DNA
gacagtcatctgagtttgatca

SEQ ID NO: 63442 - DNA, 22 bp, synthetic construct
  misc_feature 1..22: note = chemically synthesized
  source 1..22: mol_type = other DNA
agtttgatcaagatttacaggt

SEQ ID NO: 63443 - DNA, 22 bp, synthetic construct
  misc_feature 1..22: note = chemically synthesized
  source 1..22: mol_type = other DNA
gatcaagatttacaggtaattc

SEQ ID NO: 63444 - DNA, 22 bp, synthetic construct
  misc_feature 1..22: note = chemically synthesized
  source 1..22: mol_type = other DNA
atcaagatttacaggtaattca

SEQ ID NO: 63445 - DNA, 22 bp, synthetic construct
  misc_feature 1..22: note = chemically synthesized
  source 1..22: mol_type = other DNA
acaggtaattcaaatgtatgta

SEQ ID NO: 63446 - DNA, 22 bp, synthetic construct
  misc_feature 1..22: note = chemically synthesized
  source 1..22: mol_type = other DNA
caggtaattcaaatgtatgtat

SEQ ID NO: 63447 - DNA, 22 bp, synthetic construct
  misc_feature 1..22: note = chemically synthesized
  source 1..22: mol_type = other DNA
aaatgtatgtataaggtacata

SEQ ID NO: 63448 - DNA, 22 bp, synthetic construct
  misc_feature 1..22: note = chemically synthesized
  source 1..22: mol_type = other DNA
gtacatccatcagagaggcttc

SEQ ID NO: 63449 - DNA, 22 bp, synthetic construct
  misc_feature 1..22: note = chemically synthesized
  source 1..22: mol_type = other DNA
ccttaagccacaagtctctagc

SEQ ID NO: 63450 - DNA, 22 bp, synthetic construct
  misc_feature 1..22: note = chemically synthesized
  source 1..22: mol_type = other DNA
cttaagccacaagtctctagct

SEQ ID NO: 63451 - DNA, 22 bp, synthetic construct
  misc_feature 1..22: note = chemically synthesized
  source 1..22: mol_type = other DNA
aagccacaagtctctagctcct

SEQ ID NO: 63452 - DNA, 22 bp, synthetic construct
  misc_feature 1..22: note = chemically synthesized
  source 1..22: mol_type = other DNA
agccacaagtctctagctcctc

SEQ ID NO: 63453 - DNA, 22 bp, synthetic construct
  misc_feature 1..22: note = chemically synthesized
  source 1..22: mol_type = other DNA
tagctcctcagagaactggcag

SEQ ID NO: 63454 - DNA, 22 bp, synthetic construct
  misc_feature 1..22: note = chemically synthesized
  source 1..22: mol_type = other DNA
gctcctcagagaactggcagtc

SEQ ID NO: 63455 - DNA, 22 bp, synthetic construct
  misc_feature 1..22: note = chemically synthesized
  source 1..22: mol_type = other DNA
ctcagagaactggcagtctggc

SEQ ID NO: 63456 - DNA, 22 bp, synthetic construct
  misc_feature 1..22: note = chemically synthesized
  source 1..22: mol_type = other DNA
agagaactggcagtctggctgg

SEQ ID NO: 63457 - DNA, 22 bp, synthetic construct
  misc_feature 1..22: note = chemically synthesized
  source 1..22: mol_type = other DNA
gcagtctggctgggtctgtacg

SEQ ID NO: 63458 - DNA, 22 bp, synthetic construct
  misc_feature 1..22: note = chemically synthesized
  source 1..22: mol_type = other DNA
gctgggtctgtacgaacttgga

SEQ ID NO: 63459 - DNA, 22 bp, synthetic construct
  misc_feature 1..22: note = chemically synthesized
  source 1..22: mol_type = other DNA
ggtctgtacgaacttggaccta

SEQ ID NO: 63460 - DNA, 22 bp, synthetic construct
  misc_feature 1..22: note = chemically synthesized
  source 1..22: mol_type = other DNA
tacgaacttggacctatagatg

SEQ ID NO: 63461 - DNA, 22 bp, synthetic construct
  misc_feature 1..22: note = chemically synthesized
  source 1..22: mol_type = other DNA
ggacctatagatgacctcactg

SEQ ID NO: 63462 - DNA, 22 bp, synthetic construct
  misc_feature 1..22: note = chemically synthesized
  source 1..22: mol_type = other DNA
gacctatagatgacctcactgg

SEQ ID NO: 63463 - DNA, 22 bp, synthetic construct
  misc_feature 1..22: note = chemically synthesized
  source 1..22: mol_type = other DNA
tagatgacctcactggtttctc

SEQ ID NO: 63464 - DNA, 22 bp, synthetic construct
  misc_feature 1..22: note = chemically synthesized
  source 1..22: mol_type = other DNA
actggtttctccccttgtcacc

SEQ ID NO: 63465 - DNA, 22 bp, synthetic construct
  misc_feature 1..22: note = chemically synthesized
  source 1..22: mol_type = other DNA
gtttctccccttgtcacctcat

SEQ ID NO: 63466 - DNA, 22 bp, synthetic construct
  misc_feature 1..22: note = chemically synthesized
  source 1..22: mol_type = other DNA
ctccccttgtcacctcatctgc

SEQ ID NO: 63467 - DNA, 22 bp, synthetic construct
  misc_feature 1..22: note = chemically synthesized
  source 1..22: mol_type = other DNA
tccccttgtcacctcatctgcc

SEQ ID NO: 63468 - DNA, 22 bp, synthetic construct
  misc_feature 1..22: note = chemically synthesized
  source 1..22: mol_type = other DNA
cccttgtcacctcatctgcctg

SEQ ID NO: 63469 - DNA, 22 bp, synthetic construct
  misc_feature 1..22: note = chemically synthesized
  source 1..22: mol_type = other DNA
gtcacctcatctgcctgcttcc

SEQ ID NO: 63470 - DNA, 22 bp, synthetic construct
  misc_feature 1..22: note = chemically synthesized
  source 1..22: mol_type = other DNA
tcacctcatctgcctgcttcct

SEQ ID NO: 63471 - DNA, 22 bp, synthetic construct
  misc_feature 1..22: note = chemically synthesized
  source 1..22: mol_type = other DNA
atctgcctgcttccttctcttt

SEQ ID NO: 63472 - DNA, 22 bp, synthetic construct
  misc_feature 1..22: note = chemically synthesized
  source 1..22: mol_type = other DNA
cctgcttccttctctttactga

SEQ ID NO: 63473 - DNA, 22 bp, synthetic construct
  misc_feature 1..22: note = chemically synthesized
  source 1..22: mol_type = other DNA
cttccttctctttactgatctt

SEQ ID NO: 63474 - DNA, 22 bp, synthetic construct
  misc_feature 1..22: note = chemically synthesized
  source 1..22: mol_type = other DNA
ccttctctttactgatcttatg

SEQ ID NO: 63475 - DNA, 22 bp, synthetic construct
  misc_feature 1..22: note = chemically synthesized
  source 1..22: mol_type = other DNA
cttctctttactgatcttatgt

SEQ ID NO: 63476 - DNA, 22 bp, synthetic construct
  misc_feature 1..22: note = chemically synthesized
  source 1..22: mol_type = other DNA
ctctttactgatcttatgtgag

SEQ ID NO: 63477 - DNA, 22 bp, synthetic construct
  misc_feature 1..22: note = chemically synthesized
  source 1..22: mol_type = other DNA
tctttactgatcttatgtgagt

SEQ ID NO: 63478 - DNA, 22 bp, synthetic construct
  misc_feature 1..22: note = chemically synthesized
  source 1..22: mol_type = other DNA
tttactgatcttatgtgagtag

SEQ ID NO: 63479 - DNA, 22 bp, synthetic construct
  misc_feature 1..22: note = chemically synthesized
  source 1..22: mol_type = other DNA
tactgatcttatgtgagtaggt

SEQ ID NO: 63480 - DNA, 22 bp, synthetic construct
  misc_feature 1..22: note = chemically synthesized
  source 1..22: mol_type = other DNA
actgatcttatgtgagtaggta

SEQ ID NO: 63481 - DNA, 22 bp, synthetic construct
  misc_feature 1..22: note = chemically synthesized
  source 1..22: mol_type = other DNA
ctgatcttatgtgagtaggtag

SEQ ID NO: 63482 - DNA, 22 bp, synthetic construct
  misc_feature 1..22: note = chemically synthesized
  source 1..22: mol_type = other DNA
atcttatgtgagtaggtagagg

SEQ ID NO: 63483 - DNA, 22 bp, synthetic construct
  misc_feature 1..22: note = chemically synthesized
  source 1..22: mol_type = other DNA
atgtgagtaggtagaggggtca

SEQ ID NO: 63484 - DNA, 22 bp, synthetic construct
  misc_feature 1..22: note = chemically synthesized
  source 1..22: mol_type = other DNA
tgtgagtaggtagaggggtcag

SEQ ID NO: 63485 - DNA, 22 bp, synthetic construct
  misc_feature 1..22: note = chemically synthesized
  source 1..22: mol_type = other DNA
tgctcagctctgcccagcacac

SEQ ID NO: 63486 - DNA, 22 bp, synthetic construct
  misc_feature 1..22: note = chemically synthesized
  source 1..22: mol_type = other DNA
ctcagctctgcccagcacacta

SEQ ID NO: 63487 - DNA, 22 bp, synthetic construct
  misc_feature 1..22: note = chemically synthesized
  source 1..22: mol_type = other DNA
agctctgcccagcacactaagc

SEQ ID NO: 63488 - DNA, 22 bp, synthetic construct
  misc_feature 1..22: note = chemically synthesized
  source 1..22: mol_type = other DNA
tgcccagcacactaagcctatt

SEQ ID NO: 63489 - DNA, 22 bp, synthetic construct
  misc_feature 1..22: note = chemically synthesized
  source 1..22: mol_type = other DNA
cccagcacactaagcctatttg

SEQ ID NO: 63490 - DNA, 22 bp, synthetic construct
  misc_feature 1..22: note = chemically synthesized
  source 1..22: mol_type = other DNA
agcctatttgctattaaaattt

SEQ ID NO: 63491 - DNA, 22 bp, synthetic construct
  misc_feature 1..22: note = chemically synthesized
  source 1..22: mol_type = other DNA
tttgctattaaaatttgaaaaa

SEQ ID NO: 63492 - DNA, 22 bp, synthetic construct
  misc_feature 1..22: note = chemically synthesized
  source 1..22: mol_type = other DNA
gctattaaaatttgaaaaacaa

SEQ ID NO: 63493 - DNA, 22 bp, synthetic construct
  misc_feature 1..22: note = chemically synthesized
  source 1..22: mol_type = other DNA
ctattaaaatttgaaaaacaaa

SEQ ID NO: 63494 - DNA, 22 bp, synthetic construct
  misc_feature 1..22: note = chemically synthesized
  source 1..22: mol_type = other DNA
ttaaaatttgaaaaacaaatgc

SEQ ID NO: 63495 - DNA, 22 bp, synthetic construct
  misc_feature 1..22: note = chemically synthesized
  source 1..22: mol_type = other DNA
aaatttgaaaaacaaatgcagg

SEQ ID NO: 63496 - DNA, 22 bp, synthetic construct
  misc_feature 1..22: note = chemically synthesized
  source 1..22: mol_type = other DNA
gaaaaacaaatgcaggtgccag

SEQ ID NO: 63497 - DNA, 22 bp, synthetic construct
  misc_feature 1..22: note = chemically synthesized
  source 1..22: mol_type = other DNA
aaaaacaaatgcaggtgccaga

SEQ ID NO: 63498 - DNA, 22 bp, synthetic construct
  misc_feature 1..22: note = chemically synthesized
  source 1..22: mol_type = other DNA
aataatgaatgtcccaggccaa

SEQ ID NO: 63499 - DNA, 22 bp, synthetic construct
  misc_feature 1..22: note = chemically synthesized
  source 1..22: mol_type = other DNA
taggaagggaagtgggtatggg

SEQ ID NO: 63500 - DNA, 22 bp, synthetic construct
  misc_feature 1..22: note = chemically synthesized
  source 1..22: mol_type = other DNA
ggaagggaagtgggtatggggc

SEQ ID NO: 63501 - DNA, 22 bp, synthetic construct
  misc_feature 1..22: note = chemically synthesized
  source 1..22: mol_type = other DNA
ccttcctggtaccaggatgatg

SEQ ID NO: 63502 - DNA, 22 bp, synthetic construct
  misc_feature 1..22: note = chemically synthesized
  source 1..22: mol_type = other DNA
cctggtaccaggatgatgcaat

SEQ ID NO: 63503 - DNA, 22 bp, synthetic construct
  misc_feature 1..22: note = chemically synthesized
  source 1..22: mol_type = other DNA
ctggtaccaggatgatgcaatg

SEQ ID NO: 63504 - DNA, 22 bp, synthetic construct
  misc_feature 1..22: note = chemically synthesized
  source 1..22: mol_type = other DNA
gtaccaggatgatgcaatgctt

SEQ ID NO: 63505 - DNA, 22 bp, synthetic construct
  misc_feature 1..22: note = chemically synthesized
  source 1..22: mol_type = other DNA
ggaggctgtgagctccccacct

SEQ ID NO: 63506 - DNA, 22 bp, synthetic construct
  misc_feature 1..22: note = chemically synthesized
  source 1..22: mol_type = other DNA
gaggctgtgagctccccacctt

SEQ ID NO: 63507 - DNA, 22 bp, synthetic construct
  misc_feature 1..22: note = chemically synthesized
  source 1..22: mol_type = other DNA
tgagctccccaccttctcaggg

SEQ ID NO: 63508 - DNA, 22 bp, synthetic construct
  misc_feature 1..22: note = chemically synthesized
  source 1..22: mol_type = other DNA
cccaccttctcagggcacaccc

SEQ ID NO: 63509 - DNA, 22 bp, synthetic construct
  misc_feature 1..22: note = chemically synthesized
  source 1..22: mol_type = other DNA
ctcagggcacaccctgtgatct

SEQ ID NO: 63510 - DNA, 22 bp, synthetic construct
  misc_feature 1..22: note = chemically synthesized
  source 1..22: mol_type = other DNA
tcagggcacaccctgtgatctt

SEQ ID NO: 63511 - DNA, 22 bp, synthetic construct
  misc_feature 1..22: note = chemically synthesized
  source 1..22: mol_type = other DNA
agggcacaccctgtgatcttgt

SEQ ID NO: 63512 - DNA, 22 bp, synthetic construct
  misc_feature 1..22: note = chemically synthesized
  source 1..22: mol_type = other DNA
tgatcttgtgggacccctctgt

SEQ ID NO: 63513 - DNA, 22 bp, synthetic construct
  misc_feature 1..22: note = chemically synthesized
  source 1..22: mol_type = other DNA
gtgggacccctctgtccagccc

SEQ ID NO: 63514 - DNA, 22 bp, synthetic construct
  misc_feature 1..22: note = chemically synthesized
  source 1..22: mol_type = other DNA
tgggacccctctgtccagccca

SEQ ID NO: 63515 - DNA, 22 bp, synthetic construct
  misc_feature 1..22: note = chemically synthesized
  source 1..22: mol_type = other DNA
tgtccagcccagcctgggtgtg

SEQ ID NO: 63516 - DNA, 22 bp, synthetic construct
  misc_feature 1..22: note = chemically synthesized
  source 1..22: mol_type = other DNA
tccagcccagcctgggtgtgca

SEQ ID NO: 63517 - DNA, 22 bp, synthetic construct
  misc_feature 1..22: note = chemically synthesized
  source 1..22: mol_type = other DNA
ggtgtgcatcttgtgtgcttgg

SEQ ID NO: 63518 - DNA, 22 bp, synthetic construct
  misc_feature 1..22: note = chemically synthesized
  source 1..22: mol_type = other DNA
gtgtgcttggtcggcactgata

SEQ ID NO: 63519 - DNA, 22 bp, synthetic construct
  misc_feature 1..22: note = chemically synthesized
  source 1..22: mol_type = other DNA
tgtgcttggtcggcactgatag

SEQ ID NO: 63520 - DNA, 22 bp, synthetic construct
  misc_feature 1..22: note = chemically synthesized
  source 1..22: mol_type = other DNA
ggtcggcactgataggggtcgc

SEQ ID NO: 63521 - DNA, 22 bp, synthetic construct
  misc_feature 1..22: note = chemically synthesized
  source 1..22: mol_type = other DNA
gtcggcactgataggggtcgcg

SEQ ID NO: 63522 - DNA, 22 bp, synthetic construct
  misc_feature 1..22: note = chemically synthesized
  source 1..22: mol_type = other DNA
ataggggtcgcggtagggagtt

SEQ ID NO: 63523 - DNA, 22 bp, synthetic construct
  misc_feature 1..22: note = chemically synthesized
  source 1..22: mol_type = other DNA
tcggcacacactgctgcatgtc

SEQ ID NO: 63524 - DNA, 22 bp, synthetic construct
  misc_feature 1..22: note = chemically synthesized
  source 1..22: mol_type = other DNA
ctgcatgtcctgtgagcggtcc

SEQ ID NO: 63525 - DNA, 22 bp, synthetic construct
  misc_feature 1..22: note = chemically synthesized
  source 1..22: mol_type = other DNA
catgtcctgtgagcggtcccca

SEQ ID NO: 63526 - DNA, 22 bp, synthetic construct
  misc_feature 1..22: note = chemically synthesized
  source 1..22: mol_type = other DNA
tgagcggtccccaaggctgtgc

SEQ ID NO: 63527 - DNA, 22 bp, synthetic construct
  misc_feature 1..22: note = chemically synthesized
  source 1..22: mol_type = other DNA
tgcccagccttcagtgtccagg

SEQ ID NO: 63528 - DNA, 22 bp, synthetic construct
  misc_feature 1..22: note = chemically synthesized
  source 1..22: mol_type = other DNA
cagtgtccagggcctcttctga

SEQ ID NO: 63529 - DNA, 22 bp, synthetic construct
  misc_feature 1..22: note = chemically synthesized
  source 1..22: mol_type = other DNA
agtgtccagggcctcttctgac

SEQ ID NO: 63530 - DNA, 22 bp, synthetic construct
  misc_feature 1..22: note = chemically synthesized
  source 1..22: mol_type = other DNA
ttctgacaggccctgctggtta

SEQ ID NO: 63531 - DNA, 22 bp, synthetic construct
  misc_feature 1..22: note = chemically synthesized
  source 1..22: mol_type = other DNA
ctgacaggccctgctggttatc

SEQ ID NO: 63532 - DNA, 22 bp, synthetic construct
  misc_feature 1..22: note = chemically synthesized
  source 1..22: mol_type = other DNA
tgacaggccctgctggttatca

SEQ ID NO: 63533 - DNA, 22 bp, synthetic construct
  misc_feature 1..22: note = chemically synthesized
  source 1..22: mol_type = other DNA
acaggccctgctggttatcact

SEQ ID NO: 63534 - DNA, 22 bp, synthetic construct
  misc_feature 1..22: note = chemically synthesized
  source 1..22: mol_type = other DNA
ctggttatcactgttggcatta

SEQ ID NO: 63535 - DNA, 22 bp, synthetic construct
  misc_feature 1..22: note = chemically synthesized
  source 1..22: mol_type = other DNA
gttatcactgttggcattatct

SEQ ID NO: 63536 - DNA, 22 bp, synthetic construct
  misc_feature 1..22: note = chemically synthesized
  source 1..22: mol_type = other DNA
tcactgttggcattatctccac

SEQ ID NO: 63537 - DNA, 22 bp, synthetic construct
  misc_feature 1..22: note = chemically synthesized
  source 1..22: mol_type = other DNA
ttggcattatctccacgcacca

SEQ ID NO: 63538 - DNA, 22 bp, synthetic construct
  misc_feature 1..22: note = chemically synthesized
  source 1..22: mol_type = other DNA
gcattatctccacgcaccactt

SEQ ID NO: 63539 - DNA, 22 bp, synthetic construct
  misc_feature 1..22: note = chemically synthesized
  source 1..22: mol_type = other DNA
tctccacgcaccacttctgtgc

SEQ ID NO: 63540 - DNA, 22 bp, synthetic construct
  misc_feature 1..22: note = chemically synthesized
  source 1..22: mol_type = other DNA
cacgcaccacttctgtgcccag

SEQ ID NO: 63541 - DNA, 22 bp, synthetic construct
  misc_feature 1..22: note = chemically synthesized
  source 1..22: mol_type = other DNA
ctgtgcccagggctgctgggtc

SEQ ID NO: 63542 - DNA, 22 bp, synthetic construct
  misc_feature 1..22: note = chemically synthesized
  source 1..22: mol_type = other DNA
tgtgcccagggctgctgggtca

SEQ ID NO: 63543 - DNA, 22 bp, synthetic construct
  misc_feature 1..22: note = chemically synthesized
  source 1..22: mol_type = other DNA
tgcccagggctgctgggtcacc

SEQ ID NO: 63544 - DNA, 22 bp, synthetic construct
  misc_feature 1..22: note = chemically synthesized
  source 1..22: mol_type = other DNA
ctgggtcaccttaaggagccac

SEQ ID NO: 63545 - DNA, 22 bp, synthetic construct
  misc_feature 1..22: note = chemically synthesized
  source 1..22: mol_type = other DNA
ggtcaccttaaggagccacaca

SEQ ID NO: 63546 - DNA, 22 bp, synthetic construct
  misc_feature 1..22: note = chemically synthesized
  source 1..22: mol_type = other DNA
aaggagccacacacccgtctac

SEQ ID NO: 63547 - DNA, 22 bp, synthetic construct
  misc_feature 1..22: note = chemically synthesized
  source 1..22: mol_type = other DNA
aggagccacacacccgtctaca

SEQ ID NO: 63548 - DNA, 22 bp, synthetic construct
  misc_feature 1..22: note = chemically synthesized
  source 1..22: mol_type = other DNA
catagaggcccttcctgcttgg

SEQ ID NO: 63549 - DNA, 22 bp, synthetic construct
  misc_feature 1..22: note = chemically synthesized
  source 1..22: mol_type = other DNA
cctgcttggggtctgacccagt

SEQ ID NO: 63550 - DNA, 22 bp, synthetic construct
  misc_feature 1..22: note = chemically synthesized
  source 1..22: mol_type = other DNA
ctgcttggggtctgacccagtt

SEQ ID NO: 63551 - DNA, 22 bp, synthetic construct
  misc_feature 1..22: note = chemically synthesized
  source 1..22: mol_type = other DNA
cttggggtctgacccagttatc

SEQ ID NO: 63552 - DNA, 22 bp, synthetic construct
  misc_feature 1..22: note = chemically synthesized
  source 1..22: mol_type = other DNA
ggggtctgacccagttatcccc

SEQ ID NO: 63553 - DNA, 22 bp, synthetic construct
  misc_feature 1..22: note = chemically synthesized
  source 1..22: mol_type = other DNA
gggtctgacccagttatcccct

SEQ ID NO: 63554 - DNA, 22 bp, synthetic construct
  misc_feature 1..22: note = chemically synthesized
  source 1..22: mol_type = other DNA
acccagttatcccctccacacc

SEQ ID NO: 63555 - DNA, 22 bp, synthetic construct
  misc_feature 1..22: note = chemically synthesized
  source 1..22: mol_type = other DNA
tcccctccacacctccattctc

SEQ ID NO: 63556 - DNA, 22 bp, synthetic construct
  misc_feature 1..22: note = chemically synthesized
  source 1..22: mol_type = other DNA
cacacctccattctcccagact

SEQ ID NO: 63557 - DNA, 22 bp, synthetic construct
  misc_feature 1..22: note = chemically synthesized
  source 1..22: mol_type = other DNA
cattctcccagacttttgactc

SEQ ID NO: 63558 - DNA, 22 bp, synthetic construct
  misc_feature 1..22: note = chemically synthesized
  source 1..22: mol_type = other DNA
tcccagacttttgactcacccc

SEQ ID NO: 63559 - DNA, 22 bp, synthetic construct
  misc_feature 1..22: note = chemically synthesized
  source 1..22: mol_type = other DNA
ccagacttttgactcaccccag

SEQ ID NO: 63560 - DNA, 22 bp, synthetic construct
  misc_feature 1..22: note = chemically synthesized
  source 1..22: mol_type = other DNA
ttgactcaccccagccctgcta

SEQ ID NO: 63561 - DNA, 22 bp, synthetic construct
  misc_feature 1..22: note = chemically synthesized
  source 1..22: mol_type = other DNA
tgactcaccccagccctgctaa

SEQ ID NO: 63562 - DNA, 22 bp, synthetic construct
  misc_feature 1..22: note = chemically synthesized
  source 1..22: mol_type = other DNA
gactcaccccagccctgctaag

SEQ ID NO: 63563 - DNA, 22 bp, synthetic construct
  misc_feature 1..22: note = chemically synthesized
  source 1..22: mol_type = other DNA
actcaccccagccctgctaaga

SEQ ID NO: 63564 - DNA, 22 bp, synthetic construct
  misc_feature 1..22: note = chemically synthesized
  source 1..22: mol_type = other DNA
accccagccctgctaagagtga

SEQ ID NO: 63565 - DNA, 22 bp, synthetic construct
  misc_feature 1..22: note = chemically synthesized
  source 1..22: mol_type = other DNA
ctaagagtgatgtcctccccca

SEQ ID NO: 63566 - DNA, 22 bp, synthetic construct
  misc_feature 1..22: note = chemically synthesized
  source 1..22: mol_type = other DNA
agagtgatgtcctcccccaaag

SEQ ID NO: 63567 - DNA, 22 bp, synthetic construct
  misc_feature 1..22: note = chemically synthesized
  source 1..22: mol_type = other DNA
ccccaaagagaagacccctgct

SEQ ID NO: 63568 - DNA, 22 bp, synthetic construct
  misc_feature 1..22: note = chemically synthesized
  source 1..22: mol_type = other DNA
ctcttgagggtctgccaggtgg

SEQ ID NO: 63569 - DNA, 22 bp, synthetic construct
  misc_feature 1..22: note = chemically synthesized
  source 1..22: mol_type = other DNA
ttgagggtctgccaggtgggtc

SEQ ID NO: 63570 - DNA, 22 bp, synthetic construct
  misc_feature 1..22: note = chemically synthesized
  source 1..22: mol_type = other DNA
gagggtctgccaggtgggtccc

SEQ ID NO: 63571 - DNA, 22 bp, synthetic construct
  misc_feature 1..22: note = chemically synthesized
  source 1..22: mol_type = other DNA
agggtctgccaggtgggtccct

SEQ ID NO: 63572 - DNA, 22 bp, synthetic construct
  misc_feature 1..22: note = chemically synthesized
  source 1..22: mol_type = other DNA
ccaggtgggtccctcatctccc

SEQ ID NO: 63573 - DNA, 22 bp, synthetic construct
  misc_feature 1..22: note = chemically synthesized
  source 1..22: mol_type = other DNA
atctccccacctccatgggcct

SEQ ID NO: 63574 - DNA, 22 bp, synthetic construct
  misc_feature 1..22: note = chemically synthesized
  source 1..22: mol_type = other DNA
cccacctccatgggcctcttgg

SEQ ID NO: 63575 - DNA, 22 bp, synthetic construct
  misc_feature 1..22: note = chemically synthesized
  source 1..22: mol_type = other DNA
catgggcctcttggattttgtg

SEQ ID NO: 63576 - DNA, 22 bp, synthetic construct
  misc_feature 1..22: note = chemically synthesized
  source 1..22: mol_type = other DNA
ttggattttgtgcatagcaatc

SEQ ID NO: 63577 - DNA, 22 bp, synthetic construct
  misc_feature 1..22: note = chemically synthesized
  source 1..22: mol_type = other DNA
ggattttgtgcatagcaatctc

SEQ ID NO: 63578 - DNA, 22 bp, synthetic construct
  misc_feature 1..22: note = chemically synthesized
  source 1..22: mol_type = other DNA
gattttgtgcatagcaatctct

SEQ ID NO: 63579 - DNA, 22 bp, synthetic construct
  misc_feature 1..22: note = chemically synthesized
  source 1..22: mol_type = other DNA
tgtgcatagcaatctctgcaac

SEQ ID NO: 63580 - DNA, 22 bp, synthetic construct
  misc_feature 1..22: note = chemically synthesized
  source 1..22: mol_type = other DNA
gtgcatagcaatctctgcaaca

SEQ ID NO: 63581 - DNA, 22 bp, synthetic construct
  misc_feature 1..22: note = chemically synthesized
  source 1..22: mol_type = other DNA
tgcatagcaatctctgcaacac

SEQ ID NO: 63582 - DNA, 22 bp, synthetic construct
  misc_feature 1..22: note = chemically synthesized
  source 1..22: mol_type = other DNA
tgcaacaccctgacctttatgg

SEQ ID NO: 63583 - DNA, 22 bp, synthetic construct
  misc_feature 1..22: note = chemically synthesized
  source 1..22: mol_type = other DNA
caacaccctgacctttatgggg

SEQ ID NO: 63584 - DNA, 22 bp, synthetic construct
  misc_feature 1..22: note = chemically synthesized
  source 1..22: mol_type = other DNA
acctttatggggtcatcctcgg

SEQ ID NO: 63585 - DNA, 22 bp, synthetic construct
  misc_feature 1..22: note = chemically synthesized
  source 1..22: mol_type = other DNA
tatggggtcatcctcggccaat

SEQ ID NO: 63586 - DNA, 22 bp, synthetic construct
  misc_feature 1..22: note = chemically synthesized
  source 1..22: mol_type = other DNA
atggggtcatcctcggccaatg

SEQ ID NO: 63587 - DNA, 22 bp, synthetic construct
  misc_feature 1..22: note = chemically synthesized
  source 1..22: mol_type = other DNA
tggggtcatcctcggccaatga

SEQ ID NO: 63588 - DNA, 22 bp, synthetic construct
  misc_feature 1..22: note = chemically synthesized
  source 1..22: mol_type = other DNA
ggccaatgaagcggtgggtcca

SEQ ID NO: 63589 - DNA, 22 bp, synthetic construct
  misc_feature 1..22: note = chemically synthesized
  source 1..22: mol_type = other DNA
ccccttctatcacctggctcac

SEQ ID NO: 63590 - DNA, 22 bp, synthetic construct
  misc_feature 1..22: note = chemically synthesized
  source 1..22: mol_type = other DNA
ctatcacctggctcacttccat

SEQ ID NO: 63591 - DNA, 22 bp, synthetic construct
  misc_feature 1..22: note = chemically synthesized
  source 1..22: mol_type = other DNA
tatcacctggctcacttccatc

SEQ ID NO: 63592 - DNA, 22 bp, synthetic construct
  misc_feature 1..22: note = chemically synthesized
  source 1..22: mol_type = other DNA
tcacctggctcacttccatcct

SEQ ID NO: 63593 - DNA, 22 bp, synthetic construct
  misc_feature 1..22: note = chemically synthesized
  source 1..22: mol_type = other DNA
gctcacttccatcctgcagagg

SEQ ID NO: 63594 - DNA, 22 bp, synthetic construct
  misc_feature 1..22: note = chemically synthesized
  source 1..22: mol_type = other DNA
acttccatcctgcagaggaagc

SEQ ID NO: 63595 - DNA, 22 bp, synthetic construct
  misc_feature 1..22: note = chemically synthesized
  source 1..22: mol_type = other DNA
ccatcctgcagaggaagcttgg

SEQ ID NO: 63596 - DNA, 22 bp, synthetic construct
  misc_feature 1..22: note = chemically synthesized
  source 1..22: mol_type = other DNA
catcctgcagaggaagcttggt

SEQ ID NO: 63597 - DNA, 22 bp, synthetic construct
  misc_feature 1..22: note = chemically synthesized
  source 1..22: mol_type = other DNA
cagaggaagcttggtttcattt

SEQ ID NO: 63598 - DNA, 22 bp, synthetic construct
  misc_feature 1..22: note = chemically synthesized
  source 1..22: mol_type = other DNA
ggtttcatttaggacaatgtgc

SEQ ID NO: 63599 - DNA, 22 bp, synthetic construct
  misc_feature 1..22: note = chemically synthesized
  source 1..22: mol_type = other DNA
gtttcatttaggacaatgtgca

SEQ ID NO: 63600 - DNA, 22 bp, synthetic construct
  misc_feature 1..22: note = chemically synthesized
  source 1..22: mol_type = other DNA
catttaggacaatgtgcaggat

SEQ ID NO: 63601 - DNA, 22 bp, synthetic construct
  misc_feature 1..22: note = chemically synthesized
  source 1..22: mol_type = other DNA
atttaggacaatgtgcaggatc

SEQ ID NO: 63602 - DNA, 22 bp, synthetic construct
  misc_feature 1..22: note = chemically synthesized
  source 1..22: mol_type = other DNA
aggacaatgtgcaggatccttt

SEQ ID NO: 63603 - DNA, 22 bp, synthetic construct
  misc_feature 1..22: note = chemically synthesized
  source 1..22: mol_type = other DNA
ggacaatgtgcaggatcctttt

SEQ ID NO: 63604 - DNA, 22 bp, synthetic construct
  misc_feature 1..22: note = chemically synthesized
  source 1..22: mol_type = other DNA
ttgatcatttctctactggatc

SEQ ID NO: 63605 - DNA, 22 bp, synthetic construct
  misc_feature 1..22: note = chemically synthesized
  source 1..22: mol_type = other DNA
tgatcatttctctactggatca

SEQ ID NO: 63606 - DNA, 22 bp, synthetic construct
  misc_feature 1..22: note = chemically synthesized
  source 1..22: mol_type = other DNA
gatcatttctctactggatcat

SEQ ID NO: 63607 - DNA, 22 bp, synthetic construct
  misc_feature 1..22: note = chemically synthesized
  source 1..22: mol_type = other DNA
atcatttctctactggatcatc

SEQ ID NO: 63608 - DNA, 22 bp, synthetic construct
  misc_feature 1..22: note = chemically synthesized
  source 1..22: mol_type = other DNA
ctctactggatcatcagcaaag

SEQ ID NO: 63609 - DNA, 22 bp, synthetic construct
  misc_feature 1..22: note = chemically synthesized
  source 1..22: mol_type = other DNA
tctactggatcatcagcaaagg

SEQ ID NO: 63610 - DNA, 22 bp, synthetic construct
  misc_feature 1..22: note = chemically synthesized
  source 1..22: mol_type = other DNA
tactggatcatcagcaaaggga

SEQ ID NO: 63611 - DNA, 22 bp, synthetic construct
  misc_feature 1..22: note = chemically synthesized
  source 1..22: mol_type = other DNA
ctggatcatcagcaaagggaga

SEQ ID NO: 63612 - DNA, 22 bp, synthetic construct
  misc_feature 1..22: note = chemically synthesized
  source 1..22: mol_type = other DNA
gatcatcagcaaagggagaaat

SEQ ID NO: 63613 - DNA, 22 bp, synthetic construct
  misc_feature 1..22: note = chemically synthesized
  source 1..22: mol_type = other DNA
agtcctttgggggaaatatgtg

SEQ ID NO: 63614 - DNA, 22 bp, synthetic construct
  misc_feature 1..22: note = chemically synthesized
  source 1..22: mol_type = other DNA
tgggggaaatatgtgcctatag

SEQ ID NO: 63615 - DNA, 22 bp, synthetic construct
  misc_feature 1..22: note = chemically synthesized
  source 1..22: mol_type = other DNA
gggggaaatatgtgcctatagt

SEQ ID NO: 63616 - DNA, 22 bp, synthetic construct
  misc_feature 1..22: note = chemically synthesized
  source 1..22: mol_type = other DNA
ggggaaatatgtgcctatagta

SEQ ID NO: 63617 - DNA, 22 bp, synthetic construct
  misc_feature 1..22: note = chemically synthesized
  source 1..22: mol_type = other DNA
tagtaaggtgatagttcagaga

SEQ ID NO: 63618 - DNA, 22 bp, synthetic construct
  misc_feature 1..22: note = chemically synthesized
  source 1..22: mol_type = other DNA
agagaaagagaagagtaggagg

SEQ ID NO: 63619 - DNA, 22 bp, synthetic construct
  misc_feature 1..22: note = chemically synthesized
  source 1..22: mol_type = other DNA
gacctgaaggccttccaaaaaa

SEQ ID NO: 63620 - DNA, 22 bp, synthetic construct
  misc_feature 1..22: note = chemically synthesized
  source 1..22: mol_type = other DNA
aaggccttccaaaaaaagtaaa

SEQ ID NO: 63621 - DNA, 22 bp, synthetic construct
  misc_feature 1..22: note = chemically synthesized
  source 1..22: mol_type = other DNA
ccaaaaaaagtaaaggatgtta

SEQ ID NO: 63622 - DNA, 22 bp, synthetic construct
  misc_feature 1..22: note = chemically synthesized
  source 1..22: mol_type = other DNA
caaaaaaagtaaaggatgttaa

SEQ ID NO: 63623 - DNA, 22 bp, synthetic construct
  misc_feature 1..22: note = chemically synthesized
  source 1..22: mol_type = other DNA
aattgctctggaaggtgcaaag

SEQ ID NO: 63624 - DNA, 22 bp, synthetic construct
  misc_feature 1..22: note = chemically synthesized
  source 1..22: mol_type = other DNA
ctctggaaggtgcaaagtgcca

SEQ ID NO: 63625 - DNA, 22 bp, synthetic construct
  misc_feature 1..22: note = chemically synthesized
  source 1..22: mol_type = other DNA
tggaaggtgcaaagtgccatcc

SEQ ID NO: 63626 - DNA, 22 bp, synthetic construct
  misc_feature 1..22: note = chemically synthesized
  source 1..22: mol_type = other DNA
gaaggtgcaaagtgccatccag

SEQ ID NO: 63627 - DNA, 22 bp, synthetic construct
  misc_feature 1..22: note = chemically synthesized
  source 1..22: mol_type = other DNA
ttattattattatcatcatcat

SEQ ID NO: 63628 - DNA, 22 bp, synthetic construct
  misc_feature 1..22: note = chemically synthesized
  source 1..22: mol_type = other DNA
ttattattatcatcatcataat

SEQ ID NO: 63629 - DNA, 22 bp, synthetic construct
  misc_feature 1..22: note = chemically synthesized
  source 1..22: mol_type = other DNA
ttattatcatcatcataatggt

SEQ ID NO: 63630 - DNA, 22 bp, synthetic construct
  misc_feature 1..22: note = chemically synthesized
  source 1..22: mol_type = other DNA
ttatcatcatcataatggtcat

SEQ ID NO: 63631 - DNA, 22 bp, synthetic construct
  misc_feature 1..22: note = chemically synthesized
  source 1..22: mol_type = other DNA
tcatcatcataatggtcattat

SEQ ID NO: 63632 - DNA, 22 bp, synthetic construct
  misc_feature 1..22: note = chemically synthesized
  source 1..22: mol_type = other DNA
tcatcaccattataggatatgg

SEQ ID NO: 63633 - DNA, 22 bp, synthetic construct
  misc_feature 1..22: note = chemically synthesized
  source 1..22: mol_type = other DNA
taggatatggcactgacgtagg

SEQ ID NO: 63634 - DNA, 22 bp, synthetic construct
  misc_feature 1..22: note = chemically synthesized
  source 1..22: mol_type = other DNA
acgtaggtagtgactggtaaga

SEQ ID NO: 63635 - DNA, 22 bp, synthetic construct
  misc_feature 1..22: note = chemically synthesized
  source 1..22: mol_type = other DNA
gtaagagccgattgagtttcta

SEQ ID NO: 63636 - DNA, 22 bp, synthetic construct
  misc_feature 1..22: note = chemically synthesized
  source 1..22: mol_type = other DNA
agtttctagctgattcctgatg

SEQ ID NO: 63637 - DNA, 22 bp, synthetic construct
  misc_feature 1..22: note = chemically synthesized
  source 1..22: mol_type = other DNA
ctagctgattcctgatgttagg

SEQ ID NO: 63638 - DNA, 22 bp, synthetic construct
  misc_feature 1..22: note = chemically synthesized
  source 1..22: mol_type = other DNA
tagctgattcctgatgttaggg

SEQ ID NO: 63639 - DNA, 22 bp, synthetic construct
  misc_feature 1..22: note = chemically synthesized
  source 1..22: mol_type = other DNA
gctgattcctgatgttaggggc

SEQ ID NO: 63640 - DNA, 22 bp, synthetic construct
  misc_feature 1..22: note = chemically synthesized
  source 1..22: mol_type = other DNA
attcctgatgttaggggccatg

SEQ ID NO: 63641 - DNA, 22 bp, synthetic construct
  misc_feature 1..22: note = chemically synthesized
  source 1..22: mol_type = other DNA
ctgatgttaggggccatgaatc

SEQ ID NO: 63642 - DNA, 22 bp, synthetic construct
  misc_feature 1..22: note = chemically synthesized
  source 1..22: mol_type = other DNA
atgttaggggccatgaatctgt

SEQ ID NO: 63643 - DNA, 22 bp, synthetic construct
  misc_feature 1..22: note = chemically synthesized
  source 1..22: mol_type = other DNA
ggggccatgaatctgtctacct

SEQ ID NO: 63644 - DNA, 22 bp, synthetic construct
  misc_feature 1..22: note = chemically synthesized
  source 1..22: mol_type = other DNA
tctacctggaatgttctaattc

SEQ ID NO: 63645 - DNA, 22 bp, synthetic construct
  misc_feature 1..22: note = chemically synthesized
  source 1..22: mol_type = other DNA
cctggaatgttctaattcaatt

SEQ ID NO: 63646 - DNA, 22 bp, synthetic construct
  misc_feature 1..22: note = chemically synthesized
  source 1..22: mol_type = other DNA
gaatgttctaattcaattcagg

SEQ ID NO: 63647 - DNA, 22 bp, synthetic construct
  misc_feature 1..22: note = chemically synthesized
  source 1..22: mol_type = other DNA
taattcaattcaggagcggcag

SEQ ID NO: 63648 - DNA, 22 bp, synthetic construct
  misc_feature 1..22: note = chemically synthesized
  source 1..22: mol_type = other DNA
attcaattcaggagcggcagtt

SEQ ID NO: 63649 - DNA, 22 bp, synthetic construct
  misc_feature 1..22: note = chemically synthesized
  source 1..22: mol_type = other DNA
aattcaggagcggcagtttaag

SEQ ID NO: 63650 - DNA, 22 bp, synthetic construct
  misc_feature 1..22: note = chemically synthesized
  source 1..22: mol_type = other DNA
aggagcggcagtttaagtctag

SEQ ID NO: 63651 - DNA, 22 bp, synthetic construct
  misc_feature 1..22: note = chemically synthesized
  source 1..22: mol_type = other DNA
aagtctagacttcaaagcactc

SEQ ID NO: 63652 - DNA, 22 bp, synthetic construct
  misc_feature 1..22: note = chemically synthesized
  source 1..22: mol_type = other DNA
agtctagacttcaaagcactct

SEQ ID NO: 63653 - DNA, 22 bp, synthetic construct
  misc_feature 1..22: note = chemically synthesized
  source 1..22: mol_type = other DNA
gacttcaaagcactctcatata

SEQ ID NO: 63654 - DNA, 22 bp, synthetic construct
  misc_feature 1..22: note = chemically synthesized
  source 1..22: mol_type = other DNA
caaagcactctcatatatcctt

SEQ ID NO: 63655 - DNA, 22 bp, synthetic construct
  misc_feature 1..22: note = chemically synthesized
  source 1..22: mol_type = other DNA
aaagcactctcatatatccttg

SEQ ID NO: 63656 - DNA, 22 bp, synthetic construct
  misc_feature 1..22: note = chemically synthesized
  source 1..22: mol_type = other DNA
tcatatatccttggcctgctaa

SEQ ID NO: 63657 - DNA, 22 bp, synthetic construct
  misc_feature 1..22: note = chemically synthesized
  source 1..22: mol_type = other DNA
atatatccttggcctgctaacc

SEQ ID NO: 63658 - DNA, 22 bp, synthetic construct
  misc_feature 1..22: note = chemically synthesized
  source 1..22: mol_type = other DNA
ggcctgctaacctgagggctag

SEQ ID NO: 63659 - DNA, 22 bp, synthetic construct
  misc_feature 1..22: note = chemically synthesized
  source 1..22: mol_type = other DNA
gcctgctaacctgagggctagt

SEQ ID NO: 63660 - DNA, 22 bp, synthetic construct
  misc_feature 1..22: note = chemically synthesized
  source 1..22: mol_type = other DNA
ctaacctgagggctagtttcta

SEQ ID NO: 63661 - DNA, 22 bp, synthetic construct
  misc_feature 1..22: note = chemically synthesized
  source 1..22: mol_type = other DNA
acctgagggctagtttctaggg

SEQ ID NO: 63662 - DNA, 22 bp, synthetic construct
  misc_feature 1..22: note = chemically synthesized
  source 1..22: mol_type = other DNA
agggctagtttctagggattga

SEQ ID NO: 63663 - DNA, 22 bp, synthetic construct
  misc_feature 1..22: note = chemically synthesized
  source 1..22: mol_type = other DNA
gtttctagggattgattaactt

SEQ ID NO: 63664 - DNA, 22 bp, synthetic construct
  misc_feature 1..22: note = chemically synthesized
  source 1..22: mol_type = other DNA
ctagggattgattaacttaaag

SEQ ID NO: 63665 - DNA, 22 bp, synthetic construct
  misc_feature 1..22: note = chemically synthesized
  source 1..22: mol_type = other DNA
tagggattgattaacttaaaga

SEQ ID NO: 63666 - DNA, 22 bp, synthetic construct
  misc_feature 1..22: note = chemically synthesized
  source 1..22: mol_type = other DNA
gggattgattaacttaaagaca

SEQ ID NO: 63667 - DNA, 22 bp, synthetic construct
  misc_feature 1..22: note = chemically synthesized
  source 1..22: mol_type = other DNA
attaacttaaagacagttcata

SEQ ID NO: 63668 - DNA, 22 bp, synthetic construct
  misc_feature 1..22: note = chemically synthesized
  source 1..22: mol_type = other DNA
acttaaagacagttcatatatg

SEQ ID NO: 63669 - DNA, 22 bp, synthetic construct
  misc_feature 1..22: note = chemically synthesized
  source 1..22: mol_type = other DNA
aaagacagttcatatatgcttg

SEQ ID NO: 63670 - DNA, 22 bp, synthetic construct
  misc_feature 1..22: note = chemically synthesized
  source 1..22: mol_type = other DNA
aagacagttcatatatgcttga

SEQ ID NO: 63671 - DNA, 22 bp, synthetic construct
  misc_feature 1..22: note = chemically synthesized
  source 1..22: mol_type = other DNA
atatatgcttgaatactagcta

SEQ ID NO: 63672 - DNA, 22 bp, synthetic construct
  misc_feature 1..22: note = chemically synthesized
  source 1..22: mol_type = other DNA
gaatactagctattcatattct

SEQ ID NO: 63673 - DNA, 22 bp, synthetic construct
  misc_feature 1..22: note = chemically synthesized
  source 1..22: mol_type = other DNA
aatactagctattcatattctg

SEQ ID NO: 63674 - DNA, 22 bp, synthetic construct
  misc_feature 1..22: note = chemically synthesized
  source 1..22: mol_type = other DNA
gctattcatattctgaaaaatc

SEQ ID NO: 63675 - DNA, 22 bp, synthetic construct
  misc_feature 1..22: note = chemically synthesized
  source 1..22: mol_type = other DNA
ttcatattctgaaaaatctgac

SEQ ID NO: 63676 - DNA, 22 bp, synthetic construct
  misc_feature 1..22: note = chemically synthesized
  source 1..22: mol_type = other DNA
atattctgaaaaatctgacttg

SEQ ID NO: 63677 - DNA, 22 bp, synthetic construct
  misc_feature 1..22: note = chemically synthesized
  source 1..22: mol_type = other DNA
tgaaaaatctgacttgatcaaa

SEQ ID NO: 63678 - DNA, 22 bp, synthetic construct
  misc_feature 1..22: note = chemically synthesized
  source 1..22: mol_type = other DNA
aaaaatctgacttgatcaaaca

SEQ ID NO: 63679 - DNA, 22 bp, synthetic construct
  misc_feature 1..22: note = chemically synthesized
  source 1..22: mol_type = other DNA
acttgatcaaacagagcagtta

SEQ ID NO: 63680 - DNA, 22 bp, synthetic construct
  misc_feature 1..22: note = chemically synthesized
  source 1..22: mol_type = other DNA
gatcaaacagagcagttaaagg

SEQ ID NO: 63681 - DNA, 22 bp, synthetic construct
  misc_feature 1..22: note = chemically synthesized
  source 1..22: mol_type = other DNA
atcaaacagagcagttaaaggc

SEQ ID NO: 63682 - DNA, 22 bp, synthetic construct
  misc_feature 1..22: note = chemically synthesized
  source 1..22: mol_type = other DNA
aaggcgatgcttcgttttacaa

SEQ ID NO: 63683 - DNA, 22 bp, synthetic construct
  misc_feature 1..22: note = chemically synthesized
  source 1..22: mol_type = other DNA
cgttttacaaaagattttcccc

SEQ ID NO: 63684 - DNA, 22 bp, synthetic construct
  misc_feature 1..22: note = chemically synthesized
  source 1..22: mol_type = other DNA
gttttacaaaagattttccccc

SEQ ID NO: 63685 - DNA, 22 bp, synthetic construct
  misc_feature 1..22: note = chemically synthesized
  source 1..22: mol_type = other DNA
tacaaaagattttcccccctct

SEQ ID NO: 63686 - DNA, 22 bp, synthetic construct
  misc_feature 1..22: note = chemically synthesized
  source 1..22: mol_type = other DNA
acaaaagattttcccccctctt

SEQ ID NO: 63687 - DNA, 22 bp, synthetic construct
  misc_feature 1..22: note = chemically synthesized
  source 1..22: mol_type = other DNA
caaaagattttcccccctcttt

SEQ ID NO: 63688 - DNA, 22 bp, synthetic construct
  misc_feature 1..22: note = chemically synthesized
  source 1..22: mol_type = other DNA
tcccccctctttacaaaaggat

SEQ ID NO: 63689 - DNA, 22 bp, synthetic construct
  misc_feature 1..22: note = chemically synthesized
  source 1..22: mol_type = other DNA
cccccctctttacaaaaggatg

SEQ ID NO: 63690 - DNA, 22 bp, synthetic construct
  misc_feature 1..22: note = chemically synthesized
  source 1..22: mol_type = other DNA
ccccctctttacaaaaggatgc

SEQ ID NO: 63691 - DNA, 22 bp, synthetic construct
  misc_feature 1..22: note = chemically synthesized
  source 1..22: mol_type = other DNA
tttacaaaaggatgcacagtgg

SEQ ID NO: 63692 - DNA, 22 bp, synthetic construct
  misc_feature 1..22: note = chemically synthesized
  source 1..22: mol_type = other DNA
tacaaaaggatgcacagtggta

SEQ ID NO: 63693 - DNA, 22 bp, synthetic construct
  misc_feature 1..22: note = chemically synthesized
  source 1..22: mol_type = other DNA
acaaaaggatgcacagtggtat

SEQ ID NO: 63694 - DNA, 22 bp, synthetic construct
  misc_feature 1..22: note = chemically synthesized
  source 1..22: mol_type = other DNA
caaaaggatgcacagtggtatt

SEQ ID NO: 63695 - DNA, 22 bp, synthetic construct
  misc_feature 1..22: note = chemically synthesized
  source 1..22: mol_type = other DNA
ctttcaatggaatgtttctcta

SEQ ID NO: 63696 - DNA, 22 bp, synthetic construct
  misc_feature 1..22: note = chemically synthesized
  source 1..22: mol_type = other DNA
tcaatggaatgtttctctagct

SEQ ID NO: 63697 - DNA, 22 bp, synthetic construct
  misc_feature 1..22: note = chemically synthesized
  source 1..22: mol_type = other DNA
caatggaatgtttctctagctc

SEQ ID NO: 63698 - DNA, 22 bp, synthetic construct
  misc_feature 1..22: note = chemically synthesized
  source 1..22: mol_type = other DNA
aatggaatgtttctctagctca

SEQ ID NO: 63699 - DNA, 22 bp, synthetic construct
  misc_feature 1..22: note = chemically synthesized
  source 1..22: mol_type = other DNA
ctctagctcattaagtgtttac

SEQ ID NO: 63700 - DNA, 22 bp, synthetic construct
  misc_feature 1..22: note = chemically synthesized
  source 1..22: mol_type = other DNA
tctagctcattaagtgtttaca

SEQ ID NO: 63701 - DNA, 22 bp, synthetic construct
  misc_feature 1..22: note = chemically synthesized
  source 1..22: mol_type = other DNA
tagctcattaagtgtttacagg

SEQ ID NO: 63702 - DNA, 22 bp, synthetic construct
  misc_feature 1..22: note = chemically synthesized
  source 1..22: mol_type = other DNA
gctcattaagtgtttacaggtc

SEQ ID NO: 63703 - DNA, 22 bp, synthetic construct
  misc_feature 1..22: note = chemically synthesized
  source 1..22: mol_type = other DNA
attaagtgtttacaggtcatta

SEQ ID NO: 63704 - DNA, 22 bp, synthetic construct
  misc_feature 1..22: note = chemically synthesized
  source 1..22: mol_type = other DNA
agtgtttacaggtcattagcta

SEQ ID NO: 63705 - DNA, 22 bp, synthetic construct
  misc_feature 1..22: note = chemically synthesized
  source 1..22: mol_type = other DNA
acaggtcattagctactgcatg

SEQ ID NO: 63706 - DNA, 22 bp, synthetic construct
  misc_feature 1..22: note = chemically synthesized
  source 1..22: mol_type = other DNA
caggtcattagctactgcatgg

SEQ ID NO: 63707 - DNA, 22 bp, synthetic construct
  misc_feature 1..22: note = chemically synthesized
  source 1..22: mol_type = other DNA
gctactgcatggaaggactttg

SEQ ID NO: 63708 - DNA, 22 bp, synthetic construct
  misc_feature 1..22: note = chemically synthesized
  source 1..22: mol_type = other DNA
ctgcatggaaggactttgctag

SEQ ID NO: 63709 - DNA, 22 bp, synthetic construct
  misc_feature 1..22: note = chemically synthesized
  source 1..22: mol_type = other DNA
catggaaggactttgctagaga

SEQ ID NO: 63710 - DNA, 22 bp, synthetic construct
  misc_feature 1..22: note = chemically synthesized
  source 1..22: mol_type = other DNA
tgctagagaaaaggaaggctgc

SEQ ID NO: 63711 - DNA, 22 bp, synthetic construct
  misc_feature 1..22: note = chemically synthesized
  source 1..22: mol_type = other DNA
gctagagaaaaggaaggctgca

SEQ ID NO: 63712 - DNA, 22 bp, synthetic construct
  misc_feature 1..22: note = chemically synthesized
  source 1..22: mol_type = other DNA
ctagagaaaaggaaggctgcaa

SEQ ID NO: 63713 - DNA, 22 bp, synthetic construct
  misc_feature 1..22: note = chemically synthesized
  source 1..22: mol_type = other DNA
gagaaaaggaaggctgcaagga

SEQ ID NO: 63714 - DNA, 22 bp, synthetic construct
  misc_feature 1..22: note = chemically synthesized
  source 1..22: mol_type = other DNA
caaggaaatagctctagctcta

SEQ ID NO: 63715 - DNA, 22 bp, synthetic construct
  misc_feature 1..22: note = chemically synthesized
  source 1..22: mol_type = other DNA
tagctctagctctagcttaggg

SEQ ID NO: 63716 - DNA, 22 bp, synthetic construct
  misc_feature 1..22: note = chemically synthesized
  source 1..22: mol_type = other DNA
gctctagctctagcttagggga

SEQ ID NO: 63717 - DNA, 22 bp, synthetic construct
  misc_feature 1..22: note = chemically synthesized
  source 1..22: mol_type = other DNA
tagctctagcttaggggatgct

SEQ ID NO: 63718 - DNA, 22 bp, synthetic construct
  misc_feature 1..22: note = chemically synthesized
  source 1..22: mol_type = other DNA
gctctagcttaggggatgctag

SEQ ID NO: 63719 - DNA, 22 bp, synthetic construct
  misc_feature 1..22: note = chemically synthesized
  source 1..22: mol_type = other DNA
tagcttaggggatgctagctaa

SEQ ID NO: 63720 - DNA, 22 bp, synthetic construct
  misc_feature 1..22: note = chemically synthesized
  source 1..22: mol_type = other DNA
gcttaggggatgctagctaaag

SEQ ID NO: 63721 - DNA, 22 bp, synthetic construct
  misc_feature 1..22: note = chemically synthesized
  source 1..22: mol_type = other DNA
aggggatgctagctaaagggaa

SEQ ID NO: 63722 - DNA, 22 bp, synthetic construct
  misc_feature 1..22: note = chemically synthesized
  source 1..22: mol_type = other DNA
ggggatgctagctaaagggaat

SEQ ID NO: 63723 - DNA, 22 bp, synthetic construct
  misc_feature 1..22: note = chemically synthesized
  source 1..22: mol_type = other DNA
gctaaagggaattagaattggt

SEQ ID NO: 63724 - DNA, 22 bp, synthetic construct
  misc_feature 1..22: note = chemically synthesized
  source 1..22: mol_type = other DNA
aagggaattagaattggttggc

SEQ ID NO: 63725 - DNA, 22 bp, synthetic construct
  misc_feature 1..22: note = chemically synthesized
  source 1..22: mol_type = other DNA
gaattggttggccaacaggtgt

SEQ ID NO: 63726 - DNA, 22 bp, synthetic construct
  misc_feature 1..22: note = chemically synthesized
  source 1..22: mol_type = other DNA
gttggccaacaggtgtctgcgg

SEQ ID NO: 63727 - DNA, 22 bp, synthetic construct
  misc_feature 1..22: note = chemically synthesized
  source 1..22: mol_type = other DNA
gccaacaggtgtctgcggtgta

SEQ ID NO: 63728 - DNA, 22 bp, synthetic construct
  misc_feature 1..22: note = chemically synthesized
  source 1..22: mol_type = other DNA
cggtgtactccctgtccactca

SEQ ID NO: 63729 - DNA, 22 bp, synthetic construct
  misc_feature 1..22: note = chemically synthesized
  source 1..22: mol_type = other DNA
cctgtccactcaacactggggg

SEQ ID NO: 63730 - DNA, 22 bp, synthetic construct
  misc_feature 1..22: note = chemically synthesized
  source 1..22: mol_type = other DNA
tccactcaacactgggggagga

SEQ ID NO: 63731 - DNA, 22 bp, synthetic construct
  misc_feature 1..22: note = chemically synthesized
  source 1..22: mol_type = other DNA
aacactgggggaggagtagaga

SEQ ID NO: 63732 - DNA, 22 bp, synthetic construct
  misc_feature 1..22: note = chemically synthesized
  source 1..22: mol_type = other DNA
ggggaggagtagagatcttgct

SEQ ID NO: 63733 - DNA, 22 bp, synthetic construct
  misc_feature 1..22: note = chemically synthesized
  source 1..22: mol_type = other DNA
gcttccttccatgtgagagctt

SEQ ID NO: 63734 - DNA, 22 bp, synthetic construct
  misc_feature 1..22: note = chemically synthesized
  source 1..22: mol_type = other DNA
cttccttccatgtgagagctta

SEQ ID NO: 63735 - DNA, 22 bp, synthetic construct
  misc_feature 1..22: note = chemically synthesized
  source 1..22: mol_type = other DNA
ccttccatgtgagagcttatag

SEQ ID NO: 63736 - DNA, 22 bp, synthetic construct
  misc_feature 1..22: note = chemically synthesized
  source 1..22: mol_type = other DNA
cttccatgtgagagcttatagt

SEQ ID NO: 63737 - DNA, 22 bp, synthetic construct
  misc_feature 1..22: note = chemically synthesized
  source 1..22: mol_type = other DNA
ccatgtgagagcttatagtccc

SEQ ID NO: 63738 - DNA, 22 bp, synthetic construct
  misc_feature 1..22: note = chemically synthesized
  source 1..22: mol_type = other DNA
catgtgagagcttatagtccct

SEQ ID NO: 63739 - DNA, 22 bp, synthetic construct
  misc_feature 1..22: note = chemically synthesized
  source 1..22: mol_type = other DNA
atagtccctttggaatccagat

SEQ ID NO: 63740 - DNA, 22 bp, synthetic construct
  misc_feature 1..22: note = chemically synthesized
  source 1..22: mol_type = other DNA
tagtccctttggaatccagatt

SEQ ID NO: 63741 - DNA, 22 bp, synthetic construct
  misc_feature 1..22: note = chemically synthesized
  source 1..22: mol_type = other DNA
tggaatccagatttatcgtgaa

SEQ ID NO: 63742 - DNA, 22 bp, synthetic construct
  misc_feature 1..22: note = chemically synthesized
  source 1..22: mol_type = other DNA
ggaatccagatttatcgtgaag

SEQ ID NO: 63743 - DNA, 22 bp, synthetic construct
  misc_feature 1..22: note = chemically synthesized
  source 1..22: mol_type = other DNA
gaatccagatttatcgtgaagt

SEQ ID NO: 63744 - DNA, 22 bp, synthetic construct
  misc_feature 1..22: note = chemically synthesized
  source 1..22: mol_type = other DNA
atcgtgaagtaatcgtgaagac

SEQ ID NO: 63745 - DNA, 22 bp, synthetic construct
  misc_feature 1..22: note = chemically synthesized
  source 1..22: mol_type = other DNA
tcgtgaagtaatcgtgaagaca

SEQ ID NO: 63746 - DNA, 22 bp, synthetic construct
  misc_feature 1..22: note = chemically synthesized
  source 1..22: mol_type = other DNA
agtgctacattgtgttcactca

SEQ ID NO: 63747 - DNA, 22 bp, synthetic construct
  misc_feature 1..22: note = chemically synthesized
  source 1..22: mol_type = other DNA
cattgtgttcactcatctctta

SEQ ID NO: 63748 - DNA, 22 bp, synthetic construct
  misc_feature 1..22: note = chemically synthesized
  source 1..22: mol_type = other DNA
tgttcactcatctcttatgact

SEQ ID NO: 63749 - DNA, 22 bp, synthetic construct
  misc_feature 1..22: note = chemically synthesized
  source 1..22: mol_type = other DNA
actcatctcttatgactgtcca

SEQ ID NO: 63750 - DNA, 22 bp, synthetic construct
  misc_feature 1..22: note = chemically synthesized
  source 1..22: mol_type = other DNA
atctcttatgactgtccatggg

SEQ ID NO: 63751 - DNA, 22 bp, synthetic construct
  misc_feature 1..22: note = chemically synthesized
  source 1..22: mol_type = other DNA
ttatgactgtccatggggaaat

SEQ ID NO: 63752 - DNA, 22 bp, synthetic construct
  misc_feature 1..22: note = chemically synthesized
  source 1..22: mol_type = other DNA
atgactgtccatggggaaatgg

SEQ ID NO: 63753 - DNA, 22 bp, synthetic construct
  misc_feature 1..22: note = chemically synthesized
  source 1..22: mol_type = other DNA
tgactgtccatggggaaatggg

SEQ ID NO: 63754 - DNA, 22 bp, synthetic construct
  misc_feature 1..22: note = chemically synthesized
  source 1..22: mol_type = other DNA
tccatggggaaatgggtcctgc

SEQ ID NO: 63755 - DNA, 22 bp, synthetic construct
  misc_feature 1..22: note = chemically synthesized
  source 1..22: mol_type = other DNA
ctttacaaaaattcagtttgca

SEQ ID NO: 63756 - DNA, 22 bp, synthetic construct
  misc_feature 1..22: note = chemically synthesized
  source 1..22: mol_type = other DNA
tacaaaaattcagtttgcatgc

SEQ ID NO: 63757 - DNA, 22 bp, synthetic construct
  misc_feature 1..22: note = chemically synthesized
  source 1..22: mol_type = other DNA
acaaaaattcagtttgcatgct

SEQ ID NO: 63758 - DNA, 22 bp, synthetic construct
  misc_feature 1..22: note = chemically synthesized
  source 1..22: mol_type = other DNA
caaaaattcagtttgcatgctg

SEQ ID NO: 63759 - DNA, 22 bp, synthetic construct
  misc_feature 1..22: note = chemically synthesized
  source 1..22: mol_type = other DNA
agtttgcatgctgcttttcagg

SEQ ID NO: 63760 - DNA, 22 bp, synthetic construct
  misc_feature 1..22: note = chemically synthesized
  source 1..22: mol_type = other DNA
gcatgctgcttttcaggcctat

SEQ ID NO: 63761 - DNA, 22 bp, synthetic construct
  misc_feature 1..22: note = chemically synthesized
  source 1..22: mol_type = other DNA
catgctgcttttcaggcctatg

SEQ ID NO: 63762 - DNA, 22 bp, synthetic construct
  misc_feature 1..22: note = chemically synthesized
  source 1..22: mol_type = other DNA
cttttcaggcctatgactgtga

SEQ ID NO: 63763 - DNA, 22 bp, synthetic construct
  misc_feature 1..22: note = chemically synthesized
  source 1..22: mol_type = other DNA
ttcaggcctatgactgtgacat

SEQ ID NO: 63764 - DNA, 22 bp, synthetic construct
  misc_feature 1..22: note = chemically synthesized
  source 1..22: mol_type = other DNA
tcaggcctatgactgtgacatc

SEQ ID NO: 63765 - DNA, 22 bp, synthetic construct
  misc_feature 1..22: note = chemically synthesized
  source 1..22: mol_type = other DNA
caggcctatgactgtgacatcc

SEQ ID NO: 63766 - DNA, 22 bp, synthetic construct
  misc_feature 1..22: note = chemically synthesized
  source 1..22: mol_type = other DNA
aggcctatgactgtgacatcca

SEQ ID NO: 63767 - DNA, 22 bp, synthetic construct
  misc_feature 1..22: note = chemically synthesized
  source 1..22: mol_type = other DNA
tgactgtgacatccagtgaggg

SEQ ID NO: 63768 - DNA, 22 bp, synthetic construct
  misc_feature 1..22: note = chemically synthesized
  source 1..22: mol_type = other DNA
tgacatccagtgagggagattt

SEQ ID NO: 63769 - DNA, 22 bp, synthetic construct
  misc_feature 1..22: note = chemically synthesized
  source 1..22: mol_type = other DNA
gaggaaggggttgatgtaagac

SEQ ID NO: 63770 - DNA, 22 bp, synthetic construct
  misc_feature 1..22: note = chemically synthesized
  source 1..22: mol_type = other DNA
aggaaggggttgatgtaagact

SEQ ID NO: 63771 - DNA, 22 bp, synthetic construct
  misc_feature 1..22: note = chemically synthesized
  source 1..22: mol_type = other DNA
atgtaagactcctcttgggagc

SEQ ID NO: 63772 - DNA, 22 bp, synthetic construct
  misc_feature 1..22: note = chemically synthesized
  source 1..22: mol_type = other DNA
ctcttgggagcatagtgagaga

SEQ ID NO: 63773 - DNA, 22 bp, synthetic construct
  misc_feature 1..22: note = chemically synthesized
  source 1..22: mol_type = other DNA
ttgggagcatagtgagagagag

SEQ ID NO: 63774 - DNA, 22 bp, synthetic construct
  misc_feature 1..22: note = chemically synthesized
  source 1..22: mol_type = other DNA
gggagcatagtgagagagagag

SEQ ID NO: 63775 - DNA, 22 bp, synthetic construct
  misc_feature 1..22: note = chemically synthesized
  source 1..22: mol_type = other DNA
ggagcatagtgagagagagaga

SEQ ID NO: 63776 - DNA, 22 bp, synthetic construct
  misc_feature 1..22: note = chemically synthesized
  source 1..22: mol_type = other DNA
acagtggaacctagagtgggaa

SEQ ID NO: 63777 - DNA, 22 bp, synthetic construct
  misc_feature 1..22: note = chemically synthesized
  source 1..22: mol_type = other DNA
gagtgggaaaggctacctggtg

SEQ ID NO: 63778 - DNA, 22 bp, synthetic construct
  misc_feature 1..22: note = chemically synthesized
  source 1..22: mol_type = other DNA
cctggtggctgtcctggcatgt

SEQ ID NO: 63779 - DNA, 22 bp, synthetic construct
  misc_feature 1..22: note = chemically synthesized
  source 1..22: mol_type = other DNA
gtggctgtcctggcatgtaagt

SEQ ID NO: 63780 - DNA, 22 bp, synthetic construct
  misc_feature 1..22: note = chemically synthesized
  source 1..22: mol_type = other DNA
tcctggcatgtaagtaagtctg

SEQ ID NO: 63781 - DNA, 22 bp, synthetic construct
  misc_feature 1..22: note = chemically synthesized
  source 1..22: mol_type = other DNA
gcatgtaagtaagtctgtgtgg

SEQ ID NO: 63782 - DNA, 22 bp, synthetic construct
  misc_feature 1..22: note = chemically synthesized
  source 1..22: mol_type = other DNA
tgtggtcagggcttgcattcca

SEQ ID NO: 63783 - DNA, 22 bp, synthetic construct
  misc_feature 1..22: note = chemically synthesized
  source 1..22: mol_type = other DNA
gcattccataaatggcccaggc

SEQ ID NO: 63784 - DNA, 22 bp, synthetic construct
  misc_feature 1..22: note = chemically synthesized
  source 1..22: mol_type = other DNA
cattccataaatggcccaggcc

SEQ ID NO: 63785 - DNA, 22 bp, synthetic construct
  misc_feature 1..22: note = chemically synthesized
  source 1..22: mol_type = other DNA
cataaatggcccaggcccctgc

SEQ ID NO: 63786 - DNA, 22 bp, synthetic construct
  misc_feature 1..22: note = chemically synthesized
  source 1..22: mol_type = other DNA
ctggctgctgggagagaaagtc

SEQ ID NO: 63787 - DNA, 22 bp, synthetic construct
  misc_feature 1..22: note = chemically synthesized
  source 1..22: mol_type = other DNA
gctgctgggagagaaagtcggt

SEQ ID NO: 63788 - DNA, 22 bp, synthetic construct
  misc_feature 1..22: note = chemically synthesized
  source 1..22: mol_type = other DNA
ctgggagagaaagtcggtgagg

SEQ ID NO: 63789 - DNA, 22 bp, synthetic construct
  misc_feature 1..22: note = chemically synthesized
  source 1..22: mol_type = other DNA
ggagagaaagtcggtgaggaga

SEQ ID NO: 63790 - DNA, 22 bp, synthetic construct
  misc_feature 1..22: note = chemically synthesized
  source 1..22: mol_type = other DNA
tacaaggcaggagagatgtact

SEQ ID NO: 63791 - DNA, 22 bp, synthetic construct
  misc_feature 1..22: note = chemically synthesized
  source 1..22: mol_type = other DNA
accaggctcttccagaaggggt

SEQ ID NO: 63792 - DNA, 22 bp, synthetic construct
  misc_feature 1..22: note = chemically synthesized
  source 1..22: mol_type = other DNA
ttccagaaggggtaactgtctc

SEQ ID NO: 63793 - DNA, 22 bp, synthetic construct
  misc_feature 1..22: note = chemically synthesized
  source 1..22: mol_type = other DNA
ccagaaggggtaactgtctcaa

SEQ ID NO: 63794 - DNA, 22 bp, synthetic construct
  misc_feature 1..22: note = chemically synthesized
  source 1..22: mol_type = other DNA
cagaaggggtaactgtctcaaa

SEQ ID NO: 63795 - DNA, 22 bp, synthetic construct
  misc_feature 1..22: note = chemically synthesized
  source 1..22: mol_type = other DNA
tctcaaatccttgccttgaacc

SEQ ID NO: 63796 - DNA, 22 bp, synthetic construct
  misc_feature 1..22: note = chemically synthesized
  source 1..22: mol_type = other DNA
aaatccttgccttgaacctgca

SEQ ID NO: 63797 - DNA, 22 bp, synthetic construct
  misc_feature 1..22: note = chemically synthesized
  source 1..22: mol_type = other DNA
gccttgaacctgcagcaaagtg

SEQ ID NO: 63798 - DNA, 22 bp, synthetic construct
  misc_feature 1..22: note = chemically synthesized
  source 1..22: mol_type = other DNA
ccttgaacctgcagcaaagtgg

SEQ ID NO: 63799 - DNA, 22 bp, synthetic construct
  misc_feature 1..22: note = chemically synthesized
  source 1..22: mol_type = other DNA
gaacctgcagcaaagtggaaga

SEQ ID NO: 63800 - DNA, 22 bp, synthetic construct
  misc_feature 1..22: note = chemically synthesized
  source 1..22: mol_type = other DNA
aacctgcagcaaagtggaagat

SEQ ID NO: 63801 - DNA, 22 bp, synthetic construct
  misc_feature 1..22: note = chemically synthesized
  source 1..22: mol_type = other DNA
cagcaaagtggaagataggtgt

SEQ ID NO: 63802 - DNA, 22 bp, synthetic construct
  misc_feature 1..22: note = chemically synthesized
  source 1..22: mol_type = other DNA
tcctcctctcttccctctttcc

SEQ ID NO: 63803 - DNA, 22 bp, synthetic construct
  misc_feature 1..22: note = chemically synthesized
  source 1..22: mol_type = other DNA
ctctcttccctctttcctgctt

SEQ ID NO: 63804 - DNA, 22 bp, synthetic construct
  misc_feature 1..22: note = chemically synthesized
  source 1..22: mol_type = other DNA
tcttccctctttcctgcttcag

SEQ ID NO: 63805 - DNA, 22 bp, synthetic construct
  misc_feature 1..22: note = chemically synthesized
  source 1..22: mol_type = other DNA
ttccctctttcctgcttcaggc

SEQ ID NO: 63806 - DNA, 22 bp, synthetic construct
  misc_feature 1..22: note = chemically synthesized
  source 1..22: mol_type = other DNA
ccctctttcctgcttcaggcta

SEQ ID NO: 63807 - DNA, 22 bp, synthetic construct
  misc_feature 1..22: note = chemically synthesized
  source 1..22: mol_type = other DNA
cctctttcctgcttcaggctac

SEQ ID NO: 63808 - DNA, 22 bp, synthetic construct
  misc_feature 1..22: note = chemically synthesized
  source 1..22: mol_type = other DNA
tttcctgcttcaggctactctg

SEQ ID NO: 63809 - DNA, 22 bp, synthetic construct
  misc_feature 1..22: note = chemically synthesized
  source 1..22: mol_type = other DNA
tcctgcttcaggctactctgaa

SEQ ID NO: 63810 - DNA, 22 bp, synthetic construct
  misc_feature 1..22: note = chemically synthesized
  source 1..22: mol_type = other DNA
cctgcttcaggctactctgaac

SEQ ID NO: 63811 - DNA, 22 bp, synthetic construct
  misc_feature 1..22: note = chemically synthesized
  source 1..22: mol_type = other DNA
ctgcttcaggctactctgaact

SEQ ID NO: 63812 - DNA, 22 bp, synthetic construct
  misc_feature 1..22: note = chemically synthesized
  source 1..22: mol_type = other DNA
cttcaggctactctgaactcac

SEQ ID NO: 63813 - DNA, 22 bp, synthetic construct
  misc_feature 1..22: note = chemically synthesized
  source 1..22: mol_type = other DNA
caggctactctgaactcacttt

SEQ ID NO: 63814 - DNA, 22 bp, synthetic construct
  misc_feature 1..22: note = chemically synthesized
  source 1..22: mol_type = other DNA
aggctactctgaactcactttt

SEQ ID NO: 63815 - DNA, 22 bp, synthetic construct
  misc_feature 1..22: note = chemically synthesized
  source 1..22: mol_type = other DNA
ctctgaactcacttttgctgtg

SEQ ID NO: 63816 - DNA, 22 bp, synthetic construct
  misc_feature 1..22: note = chemically synthesized
  source 1..22: mol_type = other DNA
tgaactcacttttgctgtgtgt

SEQ ID NO: 63817 - DNA, 22 bp, synthetic construct
  misc_feature 1..22: note = chemically synthesized
  source 1..22: mol_type = other DNA
aactcacttttgctgtgtgtcc

SEQ ID NO: 63818 - DNA, 22 bp, synthetic construct
  misc_feature 1..22: note = chemically synthesized
  source 1..22: mol_type = other DNA
acttttgctgtgtgtccagagc

SEQ ID NO: 63819 - DNA, 22 bp, synthetic construct
  misc_feature 1..22: note = chemically synthesized
  source 1..22: mol_type = other DNA
ttgctgtgtgtccagagctgac

SEQ ID NO: 63820 - DNA, 22 bp, synthetic construct
  misc_feature 1..22: note = chemically synthesized
  source 1..22: mol_type = other DNA
tgctgtgtgtccagagctgacc

SEQ ID NO: 63821 - DNA, 22 bp, synthetic construct
  misc_feature 1..22: note = chemically synthesized
  source 1..22: mol_type = other DNA
gctgtgtgtccagagctgacca

SEQ ID NO: 63822 - DNA, 22 bp, synthetic construct
  misc_feature 1..22: note = chemically synthesized
  source 1..22: mol_type = other DNA
ctgtgtgtccagagctgaccag

SEQ ID NO: 63823 - DNA, 22 bp, synthetic construct
  misc_feature 1..22: note = chemically synthesized
  source 1..22: mol_type = other DNA
tgtgtccagagctgaccagagg

SEQ ID NO: 63824 - DNA, 22 bp, synthetic construct
  misc_feature 1..22: note = chemically synthesized
  source 1..22: mol_type = other DNA
accagaggacaatggcagactt

SEQ ID NO: 63825 - DNA, 22 bp, synthetic construct
  misc_feature 1..22: note = chemically synthesized
  source 1..22: mol_type = other DNA
attgtcagactggcagcaccag

SEQ ID NO: 63826 - DNA, 22 bp, synthetic construct
  misc_feature 1..22: note = chemically synthesized
  source 1..22: mol_type = other DNA
ttgtcagactggcagcaccagc

SEQ ID NO: 63827 - DNA, 22 bp, synthetic construct
  misc_feature 1..22: note = chemically synthesized
  source 1..22: mol_type = other DNA
tcagactggcagcaccagccta

SEQ ID NO: 63828 - DNA, 22 bp, synthetic construct
  misc_feature 1..22: note = chemically synthesized
  source 1..22: mol_type = other DNA
gcagcaccagcctagtgctctg

SEQ ID NO: 63829 - DNA, 22 bp, synthetic construct
  misc_feature 1..22: note = chemically synthesized
  source 1..22: mol_type = other DNA
gtgctctgtctctgcctgggaa

SEQ ID NO: 63830 - DNA, 22 bp, synthetic construct
  misc_feature 1..22: note = chemically synthesized
  source 1..22: mol_type = other DNA
tgtctctgcctgggaaatggtt

SEQ ID NO: 63831 - DNA, 22 bp, synthetic construct
  misc_feature 1..22: note = chemically synthesized
  source 1..22: mol_type = other DNA
tctctgcctgggaaatggtttc

SEQ ID NO: 63832 - DNA, 22 bp, synthetic construct
  misc_feature 1..22: note = chemically synthesized
  source 1..22: mol_type = other DNA
tgcctgggaaatggtttcacaa

SEQ ID NO: 63833 - DNA, 22 bp, synthetic construct
  misc_feature 1..22: note = chemically synthesized
  source 1..22: mol_type = other DNA
cctgggaaatggtttcacaaag

SEQ ID NO: 63834 - DNA, 22 bp, synthetic construct
  misc_feature 1..22: note = chemically synthesized
  source 1..22: mol_type = other DNA
ggaaatggtttcacaaagctcc

SEQ ID NO: 63835 - DNA, 22 bp, synthetic construct
  misc_feature 1..22: note = chemically synthesized
  source 1..22: mol_type = other DNA
cacaaagctccagttctgccct

SEQ ID NO: 63836 - DNA, 22 bp, synthetic construct
  misc_feature 1..22: note = chemically synthesized
  source 1..22: mol_type = other DNA
acaaagctccagttctgccctg

SEQ ID NO: 63837 - DNA, 22 bp, synthetic construct
  misc_feature 1..22: note = chemically synthesized
  source 1..22: mol_type = other DNA
cagttctgccctggacacttgc

SEQ ID NO: 63838 - DNA, 22 bp, synthetic construct
  misc_feature 1..22: note = chemically synthesized
  source 1..22: mol_type = other DNA
tgccctggacacttgcctcata

SEQ ID NO: 63839 - DNA, 22 bp, synthetic construct
  misc_feature 1..22: note = chemically synthesized
  source 1..22: mol_type = other DNA
ccctggacacttgcctcatagg

SEQ ID NO: 63840 - DNA, 22 bp, synthetic construct
  misc_feature 1..22: note = chemically synthesized
  source 1..22: mol_type = other DNA
gacacttgcctcatagggctat

SEQ ID NO: 63841 - DNA, 22 bp, synthetic construct
  misc_feature 1..22: note = chemically synthesized
  source 1..22: mol_type = other DNA
gcctcatagggctatccctttg

SEQ ID NO: 63842 - DNA, 22 bp, synthetic construct
  misc_feature 1..22: note = chemically synthesized
  source 1..22: mol_type = other DNA
cctcatagggctatccctttgc

SEQ ID NO: 63843 - DNA, 22 bp, synthetic construct
  misc_feature 1..22: note = chemically synthesized
  source 1..22: mol_type = other DNA
atagggctatccctttgcccct

SEQ ID NO: 63844 - DNA, 22 bp, synthetic construct
  misc_feature 1..22: note = chemically synthesized
  source 1..22: mol_type = other DNA
tccctttgcccctcagtaacac

SEQ ID NO: 63845 - DNA, 22 bp, synthetic construct
  misc_feature 1..22: note = chemically synthesized
  source 1..22: mol_type = other DNA
tgcccctcagtaacaccactgg

SEQ ID NO: 63846 - DNA, 22 bp, synthetic construct
  misc_feature 1..22: note = chemically synthesized
  source 1..22: mol_type = other DNA
gcccctcagtaacaccactggg

SEQ ID NO: 63847 - DNA, 22 bp, synthetic construct
  misc_feature 1..22: note = chemically synthesized
  source 1..22: mol_type = other DNA
cccctcagtaacaccactggga

SEQ ID NO: 63848 - DNA, 22 bp, synthetic construct
  misc_feature 1..22: note = chemically synthesized
  source 1..22: mol_type = other DNA
agtaacaccactgggatggtcc

SEQ ID NO: 63849 - DNA, 22 bp, synthetic construct
  misc_feature 1..22: note = chemically synthesized
  source 1..22: mol_type = other DNA
ggatggtccactcccaccctgt

SEQ ID NO: 63850 - DNA, 22 bp, synthetic construct
  misc_feature 1..22: note = chemically synthesized
  source 1..22: mol_type = other DNA
ccaccctgtcccccatctgtgg

SEQ ID NO: 63851 - DNA, 22 bp, synthetic construct
  misc_feature 1..22: note = chemically synthesized
  source 1..22: mol_type = other DNA
tcccccatctgtggtagcctgt

SEQ ID NO: 63852 - DNA, 22 bp, synthetic construct
  misc_feature 1..22: note = chemically synthesized
  source 1..22: mol_type = other DNA
tggtagcctgtgttgcctcgtg

SEQ ID NO: 63853 - DNA, 22 bp, synthetic construct
  misc_feature 1..22: note = chemically synthesized
  source 1..22: mol_type = other DNA
tgttgcctcgtgggacaaggca

SEQ ID NO: 63854 - DNA, 22 bp, synthetic construct
  misc_feature 1..22: note = chemically synthesized
  source 1..22: mol_type = other DNA
cctcgtgggacaaggcattctg

SEQ ID NO: 63855 - DNA, 22 bp, synthetic construct
  misc_feature 1..22: note = chemically synthesized
  source 1..22: mol_type = other DNA
gtgggacaaggcattctgtaaa

SEQ ID NO: 63856 - DNA, 22 bp, synthetic construct
  misc_feature 1..22: note = chemically synthesized
  source 1..22: mol_type = other DNA
tgtaaacgtgtattggacttcc

SEQ ID NO: 63857 - DNA, 22 bp, synthetic construct
  misc_feature 1..22: note = chemically synthesized
  source 1..22: mol_type = other DNA
taaacgtgtattggacttccat

SEQ ID NO: 63858 - DNA, 22 bp, synthetic construct
  misc_feature 1..22: note = chemically synthesized
  source 1..22: mol_type = other DNA
gacttccattgcttaagtcatg

SEQ ID NO: 63859 - DNA, 22 bp, synthetic construct
  misc_feature 1..22: note = chemically synthesized
  source 1..22: mol_type = other DNA
ccattgcttaagtcatgatttg

SEQ ID NO: 63860 - DNA, 22 bp, synthetic construct
  misc_feature 1..22: note = chemically synthesized
  source 1..22: mol_type = other DNA
cattgcttaagtcatgatttgt

SEQ ID NO: 63861 - DNA, 22 bp, synthetic construct
  misc_feature 1..22: note = chemically synthesized
  source 1..22: mol_type = other DNA
cttaagtcatgatttgtttttc

SEQ ID NO: 63862 - DNA, 22 bp, synthetic construct
  misc_feature 1..22: note = chemically synthesized
  source 1..22: mol_type = other DNA
aagtcatgatttgtttttccga

SEQ ID NO: 63863 - DNA, 22 bp, synthetic construct
  misc_feature 1..22: note = chemically synthesized
  source 1..22: mol_type = other DNA
agtcatgatttgtttttccgac

SEQ ID NO: 63864 - DNA, 22 bp, synthetic construct
  misc_feature 1..22: note = chemically synthesized
  source 1..22: mol_type = other DNA
gtttttccgacttccagaactt

SEQ ID NO: 63865 - DNA, 22 bp, synthetic construct
  misc_feature 1..22: note = chemically synthesized
  source 1..22: mol_type = other DNA
tttttccgacttccagaacttt

SEQ ID NO: 63866 - DNA, 22 bp, synthetic construct
  misc_feature 1..22: note = chemically synthesized
  source 1..22: mol_type = other DNA
ttccgacttccagaactttccc

SEQ ID NO: 63867 - DNA, 22 bp, synthetic construct
  misc_feature 1..22: note = chemically synthesized
  source 1..22: mol_type = other DNA
tccgacttccagaactttcccg

SEQ ID NO: 63868 - DNA, 22 bp, synthetic construct
  misc_feature 1..22: note = chemically synthesized
  source 1..22: mol_type = other DNA
ccgacttccagaactttcccgg

SEQ ID NO: 63869 - DNA, 22 bp, synthetic construct
  misc_feature 1..22: note = chemically synthesized
  source 1..22: mol_type = other DNA
cgacttccagaactttcccggt

SEQ ID NO: 63870 - DNA, 22 bp, synthetic construct
  misc_feature 1..22: note = chemically synthesized
  source 1..22: mol_type = other DNA
ccagaactttcccggttctggt

SEQ ID NO: 63871 - DNA, 22 bp, synthetic construct
  misc_feature 1..22: note = chemically synthesized
  source 1..22: mol_type = other DNA
cagaactttcccggttctggtt

SEQ ID NO: 63872 - DNA, 22 bp, synthetic construct
  misc_feature 1..22: note = chemically synthesized
  source 1..22: mol_type = other DNA
tcccggttctggttttctggga

SEQ ID NO: 63873 - DNA, 22 bp, synthetic construct
  misc_feature 1..22: note = chemically synthesized
  source 1..22: mol_type = other DNA
cccggttctggttttctgggat

SEQ ID NO: 63874 - DNA, 22 bp, synthetic construct
  misc_feature 1..22: note = chemically synthesized
  source 1..22: mol_type = other DNA
ccggttctggttttctgggatt

SEQ ID NO: 63875 - DNA, 22 bp, synthetic construct
  misc_feature 1..22: note = chemically synthesized
  source 1..22: mol_type = other DNA
tggttttctgggatttcatgaa

SEQ ID NO: 63876 - DNA, 22 bp, synthetic construct
  misc_feature 1..22: note = chemically synthesized
  source 1..22: mol_type = other DNA
gttttctgggatttcatgaaca

SEQ ID NO: 63877 - DNA, 22 bp, synthetic construct
  misc_feature 1..22: note = chemically synthesized
  source 1..22: mol_type = other DNA
tctgggatttcatgaacaattc

SEQ ID NO: 63878 - DNA, 22 bp, synthetic construct
  misc_feature 1..22: note = chemically synthesized
  source 1..22: mol_type = other DNA
ctgggatttcatgaacaattcc

SEQ ID NO: 63879 - DNA, 22 bp, synthetic construct
  misc_feature 1..22: note = chemically synthesized
  source 1..22: mol_type = other DNA
tgggatttcatgaacaattccc

SEQ ID NO: 63880 - DNA, 22 bp, synthetic construct
  misc_feature 1..22: note = chemically synthesized
  source 1..22: mol_type = other DNA
ggatttcatgaacaattccctg

SEQ ID NO: 63881 - DNA, 22 bp, synthetic construct
  misc_feature 1..22: note = chemically synthesized
  source 1..22: mol_type = other DNA
catgaacaattccctgtttccg

SEQ ID NO: 63882 - DNA, 22 bp, synthetic construct
  misc_feature 1..22: note = chemically synthesized
  source 1..22: mol_type = other DNA
atgaacaattccctgtttccgt

SEQ ID NO: 63883 - DNA, 22 bp, synthetic construct
  misc_feature 1..22: note = chemically synthesized
  source 1..22: mol_type = other DNA
cctgtttccgtaatccatttcc

SEQ ID NO: 63884 - DNA, 22 bp, synthetic construct
  misc_feature 1..22: note = chemically synthesized
  source 1..22: mol_type = other DNA
tttccgtaatccatttcctgca

SEQ ID NO: 63885 - DNA, 22 bp, synthetic construct
  misc_feature 1..22: note = chemically synthesized
  source 1..22: mol_type = other DNA
ccgtaatccatttcctgcacag

SEQ ID NO: 63886 - DNA, 22 bp, synthetic construct
  misc_feature 1..22: note = chemically synthesized
  source 1..22: mol_type = other DNA
cgtaatccatttcctgcacagg

SEQ ID NO: 63887 - DNA, 22 bp, synthetic construct
  misc_feature 1..22: note = chemically synthesized
  source 1..22: mol_type = other DNA
cctgcacaggtgcattgctttc

SEQ ID NO: 63888 - DNA, 22 bp, synthetic construct
  misc_feature 1..22: note = chemically synthesized
  source 1..22: mol_type = other DNA
ctgcacaggtgcattgctttca

SEQ ID NO: 63889 - DNA, 22 bp, synthetic construct
  misc_feature 1..22: note = chemically synthesized
  source 1..22: mol_type = other DNA
cacaggtgcattgctttcaatc

SEQ ID NO: 63890 - DNA, 22 bp, synthetic construct
  misc_feature 1..22: note = chemically synthesized
  source 1..22: mol_type = other DNA
ctttcaatcatctcccctccgg

SEQ ID NO: 63891 - DNA, 22 bp, synthetic construct
  misc_feature 1..22: note = chemically synthesized
  source 1..22: mol_type = other DNA
tcaatcatctcccctccggtta

SEQ ID NO: 63892 - DNA, 22 bp, synthetic construct
  misc_feature 1..22: note = chemically synthesized
  source 1..22: mol_type = other DNA
caatcatctcccctccggttat

SEQ ID NO: 63893 - DNA, 22 bp, synthetic construct
  misc_feature 1..22: note = chemically synthesized
  source 1..22: mol_type = other DNA
aatcatctcccctccggttatc

SEQ ID NO: 63894 - DNA, 22 bp, synthetic construct
  misc_feature 1..22: note = chemically synthesized
  source 1..22: mol_type = other DNA
ccctccggttatcctaaagcct

SEQ ID NO: 63895 - DNA, 22 bp, synthetic construct
  misc_feature 1..22: note = chemically synthesized
  source 1..22: mol_type = other DNA
cggttatcctaaagccttcatt

SEQ ID NO: 63896 - DNA, 22 bp, synthetic construct
  misc_feature 1..22: note = chemically synthesized
  source 1..22: mol_type = other DNA
tcctaaagccttcattatcaat

SEQ ID NO: 63897 - DNA, 22 bp, synthetic construct
  misc_feature 1..22: note = chemically synthesized
  source 1..22: mol_type = other DNA
aagccttcattatcaattgact

SEQ ID NO: 63898 - DNA, 22 bp, synthetic construct
  misc_feature 1..22: note = chemically synthesized
  source 1..22: mol_type = other DNA
cattatcaattgacttttcaca

SEQ ID NO: 63899 - DNA, 22 bp, synthetic construct
  misc_feature 1..22: note = chemically synthesized
  source 1..22: mol_type = other DNA
attatcaattgacttttcacat

SEQ ID NO: 63900 - DNA, 22 bp, synthetic construct
  misc_feature 1..22: note = chemically synthesized
  source 1..22: mol_type = other DNA
tcaattgacttttcacatatga

SEQ ID NO: 63901 - DNA, 22 bp, synthetic construct
  misc_feature 1..22: note = chemically synthesized
  source 1..22: mol_type = other DNA
acttttcacatatgagggtgac

SEQ ID NO: 63902 - DNA, 22 bp, synthetic construct
  misc_feature 1..22: note = chemically synthesized
  source 1..22: mol_type = other DNA
ttcacatatgagggtgacctct

SEQ ID NO: 63903 - DNA, 22 bp, synthetic construct
  misc_feature 1..22: note = chemically synthesized
  source 1..22: mol_type = other DNA
tcacatatgagggtgacctctg

SEQ ID NO: 63904 - DNA, 22 bp, synthetic construct
  misc_feature 1..22: note = chemically synthesized
  source 1..22: mol_type = other DNA
cacatatgagggtgacctctgg

SEQ ID NO: 63905 - DNA, 22 bp, synthetic construct
  misc_feature 1..22: note = chemically synthesized
  source 1..22: mol_type = other DNA
acatatgagggtgacctctgga

SEQ ID NO: 63906 - DNA, 22 bp, synthetic construct
  misc_feature 1..22: note = chemically synthesized
  source 1..22: mol_type = other DNA
tggatcccttctctttggtttg

SEQ ID NO: 63907 - DNA, 22 bp, synthetic construct
  misc_feature 1..22: note = chemically synthesized
  source 1..22: mol_type = other DNA
gatcccttctctttggtttgtt

SEQ ID NO: 63908 - DNA, 22 bp, synthetic construct
  misc_feature 1..22: note = chemically synthesized
  source 1..22: mol_type = other DNA
ctctttggtttgtttgttctct

SEQ ID NO: 63909 - DNA, 22 bp, synthetic construct
  misc_feature 1..22: note = chemically synthesized
  source 1..22: mol_type = other DNA
tctttggtttgtttgttctctt

SEQ ID NO: 63910 - DNA, 22 bp, synthetic construct
  misc_feature 1..22: note = chemically synthesized
  source 1..22: mol_type = other DNA
tttggtttgtttgttctctttt

SEQ ID NO: 63911 - DNA, 22 bp, synthetic construct
  misc_feature 1..22: note = chemically synthesized
  source 1..22: mol_type = other DNA
tggtttgtttgttctcttttcc

SEQ ID NO: 63912 - DNA, 22 bp, synthetic construct
  misc_feature 1..22: note = chemically synthesized
  source 1..22: mol_type = other DNA
ggtttgtttgttctcttttcca

SEQ ID NO: 63913 - DNA, 22 bp, synthetic construct
  misc_feature 1..22: note = chemically synthesized
  source 1..22: mol_type = other DNA
gtttgtttgttctcttttccag

SEQ ID NO: 63914 - DNA, 22 bp, synthetic construct
  misc_feature 1..22: note = chemically synthesized
  source 1..22: mol_type = other DNA
gtttgttctcttttccagagct

SEQ ID NO: 63915 - DNA, 22 bp, synthetic construct
  misc_feature 1..22: note = chemically synthesized
  source 1..22: mol_type = other DNA
tttgttctcttttccagagctg

SEQ ID NO: 63916 - DNA, 22 bp, synthetic construct
  misc_feature 1..22: note = chemically synthesized
  source 1..22: mol_type = other DNA
gttctcttttccagagctgcag

SEQ ID NO: 63917 - DNA, 22 bp, synthetic construct
  misc_feature 1..22: note = chemically synthesized
  source 1..22: mol_type = other DNA
ttctcttttccagagctgcagt

SEQ ID NO: 63918 - DNA, 22 bp, synthetic construct
  misc_feature 1..22: note = chemically synthesized
  source 1..22: mol_type = other DNA
tcttttccagagctgcagtatg

SEQ ID NO: 63919 - DNA, 22 bp, synthetic construct
  misc_feature 1..22: note = chemically synthesized
  source 1..22: mol_type = other DNA
ttttccagagctgcagtatgtt

SEQ ID NO: 63920 - DNA, 22 bp, synthetic construct
  misc_feature 1..22: note = chemically synthesized
  source 1..22: mol_type = other DNA
ttccagagctgcagtatgtttc

SEQ ID NO: 63921 - DNA, 22 bp, synthetic construct
  misc_feature 1..22: note = chemically synthesized
  source 1..22: mol_type = other DNA
tccagagctgcagtatgtttct

SEQ ID NO: 63922 - DNA, 22 bp, synthetic construct
  misc_feature 1..22: note = chemically synthesized
  source 1..22: mol_type = other DNA
ccagagctgcagtatgtttctt

SEQ ID NO: 63923 - DNA, 22 bp, synthetic construct
  misc_feature 1..22: note = chemically synthesized
  source 1..22: mol_type = other DNA
cagagctgcagtatgtttctta

SEQ ID NO: 63924 - DNA, 22 bp, synthetic construct
  misc_feature 1..22: note = chemically synthesized
  source 1..22: mol_type = other DNA
cagtatgtttcttaggtgtttt

SEQ ID NO: 63925 - DNA, 22 bp, synthetic construct
  misc_feature 1..22: note = chemically synthesized
  source 1..22: mol_type = other DNA
cttaggtgttttaaaaaatagc

SEQ ID NO: 63926 - DNA, 22 bp, synthetic construct
  misc_feature 1..22: note = chemically synthesized
  source 1..22: mol_type = other DNA
ttaggtgttttaaaaaatagct

SEQ ID NO: 63927 - DNA, 22 bp, synthetic construct
  misc_feature 1..22: note = chemically synthesized
  source 1..22: mol_type = other DNA
aggtgttttaaaaaatagctaa

SEQ ID NO: 63928 - DNA, 22 bp, synthetic construct
  misc_feature 1..22: note = chemically synthesized
  source 1..22: mol_type = other DNA
ggtgttttaaaaaatagctaag

SEQ ID NO: 63929 - DNA, 22 bp, synthetic construct
  misc_feature 1..22: note = chemically synthesized
  source 1..22: mol_type = other DNA
taaaaaatagctaagaatagtg

SEQ ID NO: 63930 - DNA, 22 bp, synthetic construct
  misc_feature 1..22: note = chemically synthesized
  source 1..22: mol_type = other DNA
aaaaaatagctaagaatagtga

SEQ ID NO: 63931 - DNA, 22 bp, synthetic construct
  misc_feature 1..22: note = chemically synthesized
  source 1..22: mol_type = other DNA
aaaaatagctaagaatagtgaa

SEQ ID NO: 63932 - DNA, 22 bp, synthetic construct
  misc_feature 1..22: note = chemically synthesized
  source 1..22: mol_type = other DNA
agaatagtgaaaacacccttgt

SEQ ID NO: 63933 - DNA, 22 bp, synthetic construct
  misc_feature 1..22: note = chemically synthesized
  source 1..22: mol_type = other DNA
gtaatttagagactctcagaaa

SEQ ID NO: 63934 - DNA, 22 bp, synthetic construct
  misc_feature 1..22: note = chemically synthesized
  source 1..22: mol_type = other DNA
taatttagagactctcagaaaa

SEQ ID NO: 63935 - DNA, 22 bp, synthetic construct
  misc_feature 1..22: note = chemically synthesized
  source 1..22: mol_type = other DNA
agagactctcagaaaaatgaca

SEQ ID NO: 63936 - DNA, 22 bp, synthetic construct
  misc_feature 1..22: note = chemically synthesized
  source 1..22: mol_type = other DNA
gagactctcagaaaaatgacag

SEQ ID NO: 63937 - DNA, 22 bp, synthetic construct
  misc_feature 1..22: note = chemically synthesized
  source 1..22: mol_type = other DNA
tcagaaaaatgacagcaccatt

SEQ ID NO: 63938 - DNA, 22 bp, synthetic construct
  misc_feature 1..22: note = chemically synthesized
  source 1..22: mol_type = other DNA
agaaaaatgacagcaccattta

SEQ ID NO: 63939 - DNA, 22 bp, synthetic construct
  misc_feature 1..22: note = chemically synthesized
  source 1..22: mol_type = other DNA
agagcctggaattacagtttga

SEQ ID NO: 63940 - DNA, 22 bp, synthetic construct
  misc_feature 1..22: note = chemically synthesized
  source 1..22: mol_type = other DNA
gagcctggaattacagtttgac

SEQ ID NO: 63941 - DNA, 22 bp, synthetic construct
  misc_feature 1..22: note = chemically synthesized
  source 1..22: mol_type = other DNA
gaattacagtttgacttcactg

SEQ ID NO: 63942 - DNA, 22 bp, synthetic construct
  misc_feature 1..22: note = chemically synthesized
  source 1..22: mol_type = other DNA
cagtttgacttcactgtgcctt

SEQ ID NO: 63943 - DNA, 22 bp, synthetic construct
  misc_feature 1..22: note = chemically synthesized
  source 1..22: mol_type = other DNA
gacttcactgtgccttctctgc

SEQ ID NO: 63944 - DNA, 22 bp, synthetic construct
  misc_feature 1..22: note = chemically synthesized
  source 1..22: mol_type = other DNA
acttcactgtgccttctctgcc

SEQ ID NO: 63945 - DNA, 22 bp, synthetic construct
  misc_feature 1..22: note = chemically synthesized
  source 1..22: mol_type = other DNA
cactgtgccttctctgccccag

SEQ ID NO: 63946 - DNA, 22 bp, synthetic construct
  misc_feature 1..22: note = chemically synthesized
  source 1..22: mol_type = other DNA
actgtgccttctctgccccagg

SEQ ID NO: 63947 - DNA, 22 bp, synthetic construct
  misc_feature 1..22: note = chemically synthesized
  source 1..22: mol_type = other DNA
tgccttctctgccccaggctcc

SEQ ID NO: 63948 - DNA, 22 bp, synthetic construct
  misc_feature 1..22: note = chemically synthesized
  source 1..22: mol_type = other DNA
ctctgccccaggctcccatggt

SEQ ID NO: 63949 - DNA, 22 bp, synthetic construct
  misc_feature 1..22: note = chemically synthesized
  source 1..22: mol_type = other DNA
tctgccccaggctcccatggtg

SEQ ID NO: 63950 - DNA, 22 bp, synthetic construct
  misc_feature 1..22: note = chemically synthesized
  source 1..22: mol_type = other DNA
tgccccaggctcccatggtggc

SEQ ID NO: 63951 - DNA, 22 bp, synthetic construct
  misc_feature 1..22: note = chemically synthesized
  source 1..22: mol_type = other DNA
ccccaggctcccatggtggcaa

SEQ ID NO: 63952 - DNA, 22 bp, synthetic construct
  misc_feature 1..22: note = chemically synthesized
  source 1..22: mol_type = other DNA
ccatggtggcaagggtttttgg

SEQ ID NO: 63953 - DNA, 22 bp, synthetic construct
  misc_feature 1..22: note = chemically synthesized
  source 1..22: mol_type = other DNA
ttggttgggggaaggggtattg

SEQ ID NO: 63954 - DNA, 22 bp, synthetic construct
  misc_feature 1..22: note = chemically synthesized
  source 1..22: mol_type = other DNA
tggttgggggaaggggtattga

SEQ ID NO: 63955 - DNA, 22 bp, synthetic construct
  misc_feature 1..22: note = chemically synthesized
  source 1..22: mol_type = other DNA
ggttgggggaaggggtattgaa

SEQ ID NO: 63956 - DNA, 22 bp, synthetic construct
  misc_feature 1..22: note = chemically synthesized
  source 1..22: mol_type = other DNA
gttgggggaaggggtattgaat

SEQ ID NO: 63957 - DNA, 22 bp, synthetic construct
  misc_feature 1..22: note = chemically synthesized
  source 1..22: mol_type = other DNA
ggggaaggggtattgaattgcc

SEQ ID NO: 63958 - DNA, 22 bp, synthetic construct
  misc_feature 1..22: note = chemically synthesized
  source 1..22: mol_type = other DNA
aattgcctgtctttgagcagga

SEQ ID NO: 63959 - DNA, 22 bp, synthetic construct
  misc_feature 1..22: note = chemically synthesized
  source 1..22: mol_type = other DNA
cctgtctttgagcaggaaaaga

SEQ ID NO: 63960 - DNA, 22 bp, synthetic construct
  misc_feature 1..22: note = chemically synthesized
  source 1..22: mol_type = other DNA
tctttgagcaggaaaagaatta

SEQ ID NO: 63961 - DNA, 22 bp, synthetic construct
  misc_feature 1..22: note = chemically synthesized
  source 1..22: mol_type = other DNA
tgagcaggaaaagaattacagt

SEQ ID NO: 63962 - DNA, 22 bp, synthetic construct
  misc_feature 1..22: note = chemically synthesized
  source 1..22: mol_type = other DNA
gagcaggaaaagaattacagtt

SEQ ID NO: 63963 - DNA, 22 bp, synthetic construct
  misc_feature 1..22: note = chemically synthesized
  source 1..22: mol_type = other DNA
agcaggaaaagaattacagttt

SEQ ID NO: 63964 - DNA, 22 bp, synthetic construct
  misc_feature 1..22: note = chemically synthesized
  source 1..22: mol_type = other DNA
cagttttccaggtaccttttgt

SEQ ID NO: 63965 - DNA, 22 bp, synthetic construct
  misc_feature 1..22: note = chemically synthesized
  source 1..22: mol_type = other DNA
tccaggtaccttttgtgtgtat

SEQ ID NO: 63966 - DNA, 22 bp, synthetic construct
  misc_feature 1..22: note = chemically synthesized
  source 1..22: mol_type = other DNA
ccaggtaccttttgtgtgtatg

SEQ ID NO: 63967 - DNA, 22 bp, synthetic construct
  misc_feature 1..22: note = chemically synthesized
  source 1..22: mol_type = other DNA
caggtaccttttgtgtgtatgt

SEQ ID NO: 63968 - DNA, 22 bp, synthetic construct
  misc_feature 1..22: note = chemically synthesized
  source 1..22: mol_type = other DNA
ttgtgtgtatgtgctgattgag

SEQ ID NO: 63969 - DNA, 22 bp, synthetic construct
  misc_feature 1..22: note = chemically synthesized
  source 1..22: mol_type = other DNA
tgtgtgtatgtgctgattgagg

SEQ ID NO: 63970 - DNA, 22 bp, synthetic construct
  misc_feature 1..22: note = chemically synthesized
  source 1..22: mol_type = other DNA
gtgtgtatgtgctgattgaggg

SEQ ID NO: 63971 - DNA, 22 bp, synthetic construct
  misc_feature 1..22: note = chemically synthesized
  source 1..22: mol_type = other DNA
tgtgtatgtgctgattgagggc

SEQ ID NO: 63972 - DNA, 22 bp, synthetic construct
  misc_feature 1..22: note = chemically synthesized
  source 1..22: mol_type = other DNA
attgagggcccattgagaatat

SEQ ID NO: 63973 - DNA, 22 bp, synthetic construct
  misc_feature 1..22: note = chemically synthesized
  source 1..22: mol_type = other DNA
agggcccattgagaatattttg

SEQ ID NO: 63974 - DNA, 22 bp, synthetic construct
  misc_feature 1..22: note = chemically synthesized
  source 1..22: mol_type = other DNA
agaatattttgacttttaggga

SEQ ID NO: 63975 - DNA, 22 bp, synthetic construct
  misc_feature 1..22: note = chemically synthesized
  source 1..22: mol_type = other DNA
tgacttttagggaagctccaaa

SEQ ID NO: 63976 - DNA, 22 bp, synthetic construct
  misc_feature 1..22: note = chemically synthesized
  source 1..22: mol_type = other DNA
gacttttagggaagctccaaac

SEQ ID NO: 63977 - DNA, 22 bp, synthetic construct
  misc_feature 1..22: note = chemically synthesized
  source 1..22: mol_type = other DNA
acttttagggaagctccaaact

SEQ ID NO: 63978 - DNA, 22 bp, synthetic construct
  misc_feature 1..22: note = chemically synthesized
  source 1..22: mol_type = other DNA
ttagggaagctccaaactctca

SEQ ID NO: 63979 - DNA, 22 bp, synthetic construct
  misc_feature 1..22: note = chemically synthesized
  source 1..22: mol_type = other DNA
tagggaagctccaaactctcaa

SEQ ID NO: 63980 - DNA, 22 bp, synthetic construct
  misc_feature 1..22: note = chemically synthesized
  source 1..22: mol_type = other DNA
agggaagctccaaactctcaaa

SEQ ID NO: 63981 - DNA, 22 bp, synthetic construct
  misc_feature 1..22: note = chemically synthesized
  source 1..22: mol_type = other DNA
gggaagctccaaactctcaaac

SEQ ID NO: 63982 - DNA, 22 bp, synthetic construct
  misc_feature 1..22: note = chemically synthesized
  source 1..22: mol_type = other DNA
caaactctcaaaccacagggat

SEQ ID NO: 63983 - DNA, 22 bp, synthetic construct
  misc_feature 1..22: note = chemically synthesized
  source 1..22: mol_type = other DNA
tcaaaccacagggatcacaaca

SEQ ID NO: 63984 - DNA, 22 bp, synthetic construct
  misc_feature 1..22: note = chemically synthesized
  source 1..22: mol_type = other DNA
aaaccacagggatcacaacaca

SEQ ID NO: 63985 - DNA, 22 bp, synthetic construct
  misc_feature 1..22: note = chemically synthesized
  source 1..22: mol_type = other DNA
ttatgacgttatatgtaagcat

SEQ ID NO: 63986 - DNA, 22 bp, synthetic construct
  misc_feature 1..22: note = chemically synthesized
  source 1..22: mol_type = other DNA
tgacgttatatgtaagcatcac

SEQ ID NO: 63987 - DNA, 22 bp, synthetic construct
  misc_feature 1..22: note = chemically synthesized
  source 1..22: mol_type = other DNA
tatgtaagcatcacaacaggca

SEQ ID NO: 63988 - DNA, 22 bp, synthetic construct
  misc_feature 1..22: note = chemically synthesized
  source 1..22: mol_type = other DNA
caccccaccctggaaaacagcc

SEQ ID NO: 63989 - DNA, 22 bp, synthetic construct
  misc_feature 1..22: note = chemically synthesized
  source 1..22: mol_type = other DNA
gaaaacagcctgactgtgcccc

SEQ ID NO: 63990 - DNA, 22 bp, synthetic construct
  misc_feature 1..22: note = chemically synthesized
  source 1..22: mol_type = other DNA
actgtgccccatgggcaaacca

SEQ ID NO: 63991 - DNA, 22 bp, synthetic construct
  misc_feature 1..22: note = chemically synthesized
  source 1..22: mol_type = other DNA
tgccccatgggcaaaccagact

SEQ ID NO: 63992 - DNA, 22 bp, synthetic construct
  misc_feature 1..22: note = chemically synthesized
  source 1..22: mol_type = other DNA
gtttatagggggttctactctg

SEQ ID NO: 63993 - DNA, 22 bp, synthetic construct
  misc_feature 1..22: note = chemically synthesized
  source 1..22: mol_type = other DNA
atagggggttctactctgaggt

SEQ ID NO: 63994 - DNA, 22 bp, synthetic construct
  misc_feature 1..22: note = chemically synthesized
  source 1..22: mol_type = other DNA
tagggggttctactctgaggta

SEQ ID NO: 63995 - DNA, 22 bp, synthetic construct
  misc_feature 1..22: note = chemically synthesized
  source 1..22: mol_type = other DNA
tactctgaggtactgatggacc

SEQ ID NO: 63996 - DNA, 22 bp, synthetic construct
  misc_feature 1..22: note = chemically synthesized
  source 1..22: mol_type = other DNA
ctctgaggtactgatggacctt

SEQ ID NO: 63997 - DNA, 22 bp, synthetic construct
  misc_feature 1..22: note = chemically synthesized
  source 1..22: mol_type = other DNA
tgaggtactgatggaccttggg

SEQ ID NO: 63998 - DNA, 22 bp, synthetic construct
  misc_feature 1..22: note = chemically synthesized
  source 1..22: mol_type = other DNA
aggtactgatggaccttgggtg

SEQ ID NO: 63999 - DNA, 22 bp, synthetic construct
  misc_feature 1..22: note = chemically synthesized
  source 1..22: mol_type = other DNA
atggaccttgggtgctattcct

SEQ ID NO: 64000 - DNA, 22 bp, synthetic construct
  misc_feature 1..22: note = chemically synthesized
  source 1..22: mol_type = other DNA
gggtgctattcctgtgataagg

SEQ ID NO: 64001 - DNA, 22 bp, synthetic construct
  misc_feature 1..22: note = chemically synthesized
  source 1..22: mol_type = other DNA
ggtgctattcctgtgataagga

SEQ ID NO: 64002 - DNA, 22 bp, synthetic construct
  misc_feature 1..22: note = chemically synthesized
  source 1..22: mol_type = other DNA
ttcctgtgataaggaaggcagc

SEQ ID NO: 64003 - DNA, 22 bp, synthetic construct
  misc_feature 1..22: note = chemically synthesized
  source 1..22: mol_type = other DNA
ctgtgataaggaaggcagctag

SEQ ID NO: 64004 - DNA, 22 bp, synthetic construct
  misc_feature 1..22: note = chemically synthesized
  source 1..22: mol_type = other DNA
tgataaggaaggcagctagaca

SEQ ID NO: 64005 - DNA, 22 bp, synthetic construct
  misc_feature 1..22: note = chemically synthesized
  source 1..22: mol_type = other DNA
gacaggacttgggagttatctg

SEQ ID NO: 64006 - DNA, 22 bp, synthetic construct
  misc_feature 1..22: note = chemically synthesized
  source 1..22: mol_type = other DNA
gggagttatctgtagtgagatg

SEQ ID NO: 64007 - DNA, 22 bp, synthetic construct
  misc_feature 1..22: note = chemically synthesized
  source 1..22: mol_type = other DNA
ggagttatctgtagtgagatgg

SEQ ID NO: 64008 - DNA, 22 bp, synthetic construct
  misc_feature 1..22: note = chemically synthesized
  source 1..22: mol_type = other DNA
tctgtagtgagatggctgaaaa

SEQ ID NO: 64009 - DNA, 22 bp, synthetic construct
  misc_feature 1..22: note = chemically synthesized
  source 1..22: mol_type = other DNA
tagtgagatggctgaaaagcga

SEQ ID NO: 64010 - DNA, 22 bp, synthetic construct
  misc_feature 1..22: note = chemically synthesized
  source 1..22: mol_type = other DNA
aaaagcgatacagggctggctc

SEQ ID NO: 64011 - DNA, 22 bp, synthetic construct
  misc_feature 1..22: note = chemically synthesized
  source 1..22: mol_type = other DNA
gctctatgccccaggtgtgcat

SEQ ID NO: 64012 - DNA, 22 bp, synthetic construct
  misc_feature 1..22: note = chemically synthesized
  source 1..22: mol_type = other DNA
tatgccccaggtgtgcataagt

SEQ ID NO: 64013 - DNA, 22 bp, synthetic construct
  misc_feature 1..22: note = chemically synthesized
  source 1..22: mol_type = other DNA
tgccccaggtgtgcataagtaa

SEQ ID NO: 64014 - DNA, 22 bp, synthetic construct
  misc_feature 1..22: note = chemically synthesized
  source 1..22: mol_type = other DNA
attccagtgcaaagtccataca

SEQ ID NO: 64015 - DNA, 22 bp, synthetic construct
  misc_feature 1..22: note = chemically synthesized
  source 1..22: mol_type = other DNA
cagtgcaaagtccatacaggta

SEQ ID NO: 64016 - DNA, 22 bp, synthetic construct
  misc_feature 1..22: note = chemically synthesized
  source 1..22: mol_type = other DNA
ctcttagacataacacaccagg

SEQ ID NO: 64017 - DNA, 22 bp, synthetic construct
  misc_feature 1..22: note = chemically synthesized
  source 1..22: mol_type = other DNA
ttagacataacacaccagggtc

SEQ ID NO: 64018 - DNA, 22 bp, synthetic construct
  misc_feature 1..22: note = chemically synthesized
  source 1..22: mol_type = other DNA
agacataacacaccagggtcaa

SEQ ID NO: 64019 - DNA, 22 bp, synthetic construct
  misc_feature 1..22: note = chemically synthesized
  source 1..22: mol_type = other DNA
gacataacacaccagggtcaat

SEQ ID NO: 64020 - DNA, 22 bp, synthetic construct
  misc_feature 1..22: note = chemically synthesized
  source 1..22: mol_type = other DNA
tgaagctagtctagtgcaagct

SEQ ID NO: 64021 - DNA, 22 bp, synthetic construct
  misc_feature 1..22: note = chemically synthesized
  source 1..22: mol_type = other DNA
gaagctagtctagtgcaagcta

SEQ ID NO: 64022 - DNA, 22 bp, synthetic construct
  misc_feature 1..22: note = chemically synthesized
  source 1..22: mol_type = other DNA
aagctagtctagtgcaagctaa

SEQ ID NO: 64023 - DNA, 22 bp, synthetic construct
  misc_feature 1..22: note = chemically synthesized
  source 1..22: mol_type = other DNA
gtctagtgcaagctaacagttg

SEQ ID NO: 64024 - DNA, 22 bp, synthetic construct
  misc_feature 1..22: note = chemically synthesized
  source 1..22: mol_type = other DNA
gtgcaagctaacagttgctttt

SEQ ID NO: 64025 - DNA, 22 bp, synthetic construct
  misc_feature 1..22: note = chemically synthesized
  source 1..22: mol_type = other DNA
acagttgcttttatcacaggct

SEQ ID NO: 64026 - DNA, 22 bp, synthetic construct
  misc_feature 1..22: note = chemically synthesized
  source 1..22: mol_type = other DNA
cttttatcacaggctccaggaa

SEQ ID NO: 64027 - DNA, 22 bp, synthetic construct
  misc_feature 1..22: note = chemically synthesized
  source 1..22: mol_type = other DNA
ttatcacaggctccaggaaggg

SEQ ID NO: 64028 - DNA, 22 bp, synthetic construct
  misc_feature 1..22: note = chemically synthesized
  source 1..22: mol_type = other DNA
tatcacaggctccaggaagggt

SEQ ID NO: 64029 - DNA, 22 bp, synthetic construct
  misc_feature 1..22: note = chemically synthesized
  source 1..22: mol_type = other DNA
atcacaggctccaggaagggtt

SEQ ID NO: 64030 - DNA, 22 bp, synthetic construct
  misc_feature 1..22: note = chemically synthesized
  source 1..22: mol_type = other DNA
tcacaggctccaggaagggttt

SEQ ID NO: 64031 - DNA, 22 bp, synthetic construct
  misc_feature 1..22: note = chemically synthesized
  source 1..22: mol_type = other DNA
caggaagggtttggcctctgat

SEQ ID NO: 64032 - DNA, 22 bp, synthetic construct
  misc_feature 1..22: note = chemically synthesized
  source 1..22: mol_type = other DNA
ggcctctgattagggtgggggc

SEQ ID NO: 64033 - DNA, 22 bp, synthetic construct
  misc_feature 1..22: note = chemically synthesized
  source 1..22: mol_type = other DNA
gcctctgattagggtgggggcg

SEQ ID NO: 64034 - DNA, 22 bp, synthetic construct
  misc_feature 1..22: note = chemically synthesized
  source 1..22: mol_type = other DNA
tgattagggtgggggcgtgggt

SEQ ID NO: 64035 - DNA, 22 bp, synthetic construct
  misc_feature 1..22: note = chemically synthesized
  source 1..22: mol_type = other DNA
attagggtgggggcgtgggtgg

SEQ ID NO: 64036 - DNA, 22 bp, synthetic construct
  misc_feature 1..22: note = chemically synthesized
  source 1..22: mol_type = other DNA
gggtgggggcgtgggtggggta

SEQ ID NO: 64037 - DNA, 22 bp, synthetic construct
  misc_feature 1..22: note = chemically synthesized
  source 1..22: mol_type = other DNA
gcagacctctccatcggtggcc

SEQ ID NO: 64038 - DNA, 22 bp, synthetic construct
  misc_feature 1..22: note = chemically synthesized
  source 1..22: mol_type = other DNA
tccatcggtggccgtttgccca

SEQ ID NO: 64039 - DNA, 22 bp, synthetic construct
  misc_feature 1..22: note = chemically synthesized
  source 1..22: mol_type = other DNA
catcggtggccgtttgcccagg

SEQ ID NO: 64040 - DNA, 22 bp, synthetic construct
  misc_feature 1..22: note = chemically synthesized
  source 1..22: mol_type = other DNA
gcccaggggggcctctttcgga

SEQ ID NO: 64041 - DNA, 22 bp, synthetic construct
  misc_feature 1..22: note = chemically synthesized
  source 1..22: mol_type = other DNA
cccaggggggcctctttcggaa

SEQ ID NO: 64042 - DNA, 22 bp, synthetic construct
  misc_feature 1..22: note = chemically synthesized
  source 1..22: mol_type = other DNA
tttcggaaggctctcttggtga

SEQ ID NO: 64043 - DNA, 22 bp, synthetic construct
  misc_feature 1..22: note = chemically synthesized
  source 1..22: mol_type = other DNA
tcggaaggctctcttggtgatg

SEQ ID NO: 64044 - DNA, 22 bp, synthetic construct
  misc_feature 1..22: note = chemically synthesized
  source 1..22: mol_type = other DNA
cggaaggctctcttggtgatgg

SEQ ID NO: 64045 - DNA, 22 bp, synthetic construct
  misc_feature 1..22: note = chemically synthesized
  source 1..22: mol_type = other DNA
ggaaggctctcttggtgatgga

SEQ ID NO: 64046 - DNA, 22 bp, synthetic construct
  misc_feature 1..22: note = chemically synthesized
  source 1..22: mol_type = other DNA
tcttggtgatggagaattggat

SEQ ID NO: 64047 - DNA, 22 bp, synthetic construct
  misc_feature 1..22: note = chemically synthesized
  source 1..22: mol_type = other DNA
ttggtgatggagaattggattt

SEQ ID NO: 64048 - DNA, 22 bp, synthetic construct
  misc_feature 1..22: note = chemically synthesized
  source 1..22: mol_type = other DNA
ggtgatggagaattggatttta

SEQ ID NO: 64049 - DNA, 22 bp, synthetic construct
  misc_feature 1..22: note = chemically synthesized
  source 1..22: mol_type = other DNA
gtgatggagaattggattttat

SEQ ID NO: 64050 - DNA, 22 bp, synthetic construct
  misc_feature 1..22: note = chemically synthesized
  source 1..22: mol_type = other DNA
gattttatttctcaatgggaat

SEQ ID NO: 64051 - DNA, 22 bp, synthetic construct
  misc_feature 1..22: note = chemically synthesized
  source 1..22: mol_type = other DNA
tatttctcaatgggaatgaaat

SEQ ID NO: 64052 - DNA, 22 bp, synthetic construct
  misc_feature 1..22: note = chemically synthesized
  source 1..22: mol_type = other DNA
atttctcaatgggaatgaaata

SEQ ID NO: 64053 - DNA, 22 bp, synthetic construct
  misc_feature 1..22: note = chemically synthesized
  source 1..22: mol_type = other DNA
tttctcaatgggaatgaaataa

SEQ ID NO: 64054 - DNA, 22 bp, synthetic construct
  misc_feature 1..22: note = chemically synthesized
  source 1..22: mol_type = other DNA
ctcaatgggaatgaaataattt

SEQ ID NO: 64055 - DNA, 22 bp, synthetic construct
  misc_feature 1..22: note = chemically synthesized
  source 1..22: mol_type = other DNA
tcaatgggaatgaaataatttg

SEQ ID NO: 64056 - DNA, 22 bp, synthetic construct
  misc_feature 1..22: note = chemically synthesized
  source 1..22: mol_type = other DNA
aatgggaatgaaataatttgta

SEQ ID NO: 64057 - DNA, 22 bp, synthetic construct
  misc_feature 1..22: note = chemically synthesized
  source 1..22: mol_type = other DNA
gtatgccatgccgtgtggactc

SEQ ID NO: 64058 - DNA, 22 bp, synthetic construct
  misc_feature 1..22: note = chemically synthesized
  source 1..22: mol_type = other DNA
tatgccatgccgtgtggactcc

SEQ ID NO: 64059 - DNA, 22 bp, synthetic construct
  misc_feature 1..22: note = chemically synthesized
  source 1..22: mol_type = other DNA
ccaaaattgtaaaggaggtgaa

SEQ ID NO: 64060 - DNA, 22 bp, synthetic construct
  misc_feature 1..22: note = chemically synthesized
  source 1..22: mol_type = other DNA
taaaggaggtgaagcttcccct

SEQ ID NO: 64061 - DNA, 22 bp, synthetic construct
  misc_feature 1..22: note = chemically synthesized
  source 1..22: mol_type = other DNA
cccctgtctgcactctcccctc

SEQ ID NO: 64062 - DNA, 22 bp, synthetic construct
  misc_feature 1..22: note = chemically synthesized
  source 1..22: mol_type = other DNA
ccctgtctgcactctcccctcc

SEQ ID NO: 64063 - DNA, 22 bp, synthetic construct
  misc_feature 1..22: note = chemically synthesized
  source 1..22: mol_type = other DNA
tctgcactctcccctcctcata

SEQ ID NO: 64064 - DNA, 22 bp, synthetic construct
  misc_feature 1..22: note = chemically synthesized
  source 1..22: mol_type = other DNA
cactctcccctcctcataattg

SEQ ID NO: 64065 - DNA, 22 bp, synthetic construct
  misc_feature 1..22: note = chemically synthesized
  source 1..22: mol_type = other DNA
tcccctcctcataattgtccat

SEQ ID NO: 64066 - DNA, 22 bp, synthetic construct
  misc_feature 1..22: note = chemically synthesized
  source 1..22: mol_type = other DNA
ccctcctcataattgtccattt

SEQ ID NO: 64067 - DNA, 22 bp, synthetic construct
  misc_feature 1..22: note = chemically synthesized
  source 1..22: mol_type = other DNA
ctcataattgtccatttttcat

SEQ ID NO: 64068 - DNA, 22 bp, synthetic construct
  misc_feature 1..22: note = chemically synthesized
  source 1..22: mol_type = other DNA
ataattgtccatttttcatctg

SEQ ID NO: 64069 - DNA, 22 bp, synthetic construct
  misc_feature 1..22: note = chemically synthesized
  source 1..22: mol_type = other DNA
tccatttttcatctgtcgggct

SEQ ID NO: 64070 - DNA, 22 bp, synthetic construct
  misc_feature 1..22: note = chemically synthesized
  source 1..22: mol_type = other DNA
ttcatctgtcgggctgtccacc

SEQ ID NO: 64071 - DNA, 22 bp, synthetic construct
  misc_feature 1..22: note = chemically synthesized
  source 1..22: mol_type = other DNA
tcatctgtcgggctgtccaccc

SEQ ID NO: 64072 - DNA, 22 bp, synthetic construct
  misc_feature 1..22: note = chemically synthesized
  source 1..22: mol_type = other DNA
catctgtcgggctgtccaccca

SEQ ID NO: 64073 - DNA, 22 bp, synthetic construct
  misc_feature 1..22: note = chemically synthesized
  source 1..22: mol_type = other DNA
atctgtcgggctgtccacccat

SEQ ID NO: 64074 - DNA, 22 bp, synthetic construct
  misc_feature 1..22: note = chemically synthesized
  source 1..22: mol_type = other DNA
tcgggctgtccacccatccatc

SEQ ID NO: 64075 - DNA, 22 bp, synthetic construct
  misc_feature 1..22: note = chemically synthesized
  source 1..22: mol_type = other DNA
tccacccatccatcacatatag

SEQ ID NO: 64076 - DNA, 22 bp, synthetic construct
  misc_feature 1..22: note = chemically synthesized
  source 1..22: mol_type = other DNA
tcaggtaccagctactgtgtta

SEQ ID NO: 64077 - DNA, 22 bp, synthetic construct
  misc_feature 1..22: note = chemically synthesized
  source 1..22: mol_type = other DNA
ctgtgttaggatctgtgttccc

SEQ ID NO: 64078 - DNA, 22 bp, synthetic construct
  misc_feature 1..22: note = chemically synthesized
  source 1..22: mol_type = other DNA
tgttaggatctgtgttcccaac

SEQ ID NO: 64079 - DNA, 22 bp, synthetic construct
  misc_feature 1..22: note = chemically synthesized
  source 1..22: mol_type = other DNA
ggatctgtgttcccaactgact

SEQ ID NO: 64080 - DNA, 22 bp, synthetic construct
  misc_feature 1..22: note = chemically synthesized
  source 1..22: mol_type = other DNA
tgttcccaactgacttgcctcc

SEQ ID NO: 64081 - DNA, 22 bp, synthetic construct
  misc_feature 1..22: note = chemically synthesized
  source 1..22: mol_type = other DNA
ccaactgacttgcctccccctg

SEQ ID NO: 64082 - DNA, 22 bp, synthetic construct
  misc_feature 1..22: note = chemically synthesized
  source 1..22: mol_type = other DNA
acttgcctccccctgacgtcat

SEQ ID NO: 64083 - DNA, 22 bp, synthetic construct
  misc_feature 1..22: note = chemically synthesized
  source 1..22: mol_type = other DNA
gcctccccctgacgtcatattc

SEQ ID NO: 64084 - DNA, 22 bp, synthetic construct
  misc_feature 1..22: note = chemically synthesized
  source 1..22: mol_type = other DNA
cctccccctgacgtcatattct

SEQ ID NO: 64085 - DNA, 22 bp, synthetic construct
  misc_feature 1..22: note = chemically synthesized
  source 1..22: mol_type = other DNA
cccctgacgtcatattcttttc

SEQ ID NO: 64086 - DNA, 22 bp, synthetic construct
  misc_feature 1..22: note = chemically synthesized
  source 1..22: mol_type = other DNA
acgtcatattcttttccttttt

SEQ ID NO: 64087 - DNA, 22 bp, synthetic construct
  misc_feature 1..22: note = chemically synthesized
  source 1..22: mol_type = other DNA
ttttcctttttcctctcccttt

SEQ ID NO: 64088 - DNA, 22 bp, synthetic construct
  misc_feature 1..22: note = chemically synthesized
  source 1..22: mol_type = other DNA
ttcctttttcctctcccttttc

SEQ ID NO: 64089 - DNA, 22 bp, synthetic construct
  misc_feature 1..22: note = chemically synthesized
  source 1..22: mol_type = other DNA
tcctttttcctctcccttttcc

SEQ ID NO: 64090 - DNA, 22 bp, synthetic construct
  misc_feature 1..22: note = chemically synthesized
  source 1..22: mol_type = other DNA
cctttttcctctcccttttccc

SEQ ID NO: 64091 - DNA, 22 bp, synthetic construct
  misc_feature 1..22: note = chemically synthesized
  source 1..22: mol_type = other DNA
ctttttcctctcccttttccct

SEQ ID NO: 64092 - DNA, 22 bp, synthetic construct
  misc_feature 1..22: note = chemically synthesized
  source 1..22: mol_type = other DNA
tttcctctcccttttccctttt

SEQ ID NO: 64093 - DNA, 22 bp, synthetic construct
  misc_feature 1..22: note = chemically synthesized
  source 1..22: mol_type = other DNA
ttcctctcccttttcccttttc

SEQ ID NO: 64094 - DNA, 22 bp, synthetic construct
  misc_feature 1..22: note = chemically synthesized
  source 1..22: mol_type = other DNA
tcctctcccttttcccttttct

SEQ ID NO: 64095 - DNA, 22 bp, synthetic construct
  misc_feature 1..22: note = chemically synthesized
  source 1..22: mol_type = other DNA
cctctcccttttcccttttctt

SEQ ID NO: 64096 - DNA, 22 bp, synthetic construct
  misc_feature 1..22: note = chemically synthesized
  source 1..22: mol_type = other DNA
ctctcccttttcccttttcttc

SEQ ID NO: 64097 - DNA, 22 bp, synthetic construct
  misc_feature 1..22: note = chemically synthesized
  source 1..22: mol_type = other DNA
tcccttttcccttttcttctga

SEQ ID NO: 64098 - DNA, 22 bp, synthetic construct
  misc_feature 1..22: note = chemically synthesized
  source 1..22: mol_type = other DNA
ccttttcccttttcttctgacc

SEQ ID NO: 64099 - DNA, 22 bp, synthetic construct
  misc_feature 1..22: note = chemically synthesized
  source 1..22: mol_type = other DNA
ttcccttttcttctgacccaaa

SEQ ID NO: 64100 - DNA, 22 bp, synthetic construct
  misc_feature 1..22: note = chemically synthesized
  source 1..22: mol_type = other DNA
tcccttttcttctgacccaaac

SEQ ID NO: 64101 - DNA, 22 bp, synthetic construct
  misc_feature 1..22: note = chemically synthesized
  source 1..22: mol_type = other DNA
cccttttcttctgacccaaact

SEQ ID NO: 64102 - DNA, 22 bp, synthetic construct
  misc_feature 1..22: note = chemically synthesized
  source 1..22: mol_type = other DNA
ccttttcttctgacccaaacta

SEQ ID NO: 64103 - DNA, 22 bp, synthetic construct
  misc_feature 1..22: note = chemically synthesized
  source 1..22: mol_type = other DNA
ttcttctgacccaaactaggaa

SEQ ID NO: 64104 - DNA, 22 bp, synthetic construct
  misc_feature 1..22: note = chemically synthesized
  source 1..22: mol_type = other DNA
tcttctgacccaaactaggaat

SEQ ID NO: 64105 - DNA, 22 bp, synthetic construct
  misc_feature 1..22: note = chemically synthesized
  source 1..22: mol_type = other DNA
cttctgacccaaactaggaatt

SEQ ID NO: 64106 - DNA, 22 bp, synthetic construct
  misc_feature 1..22: note = chemically synthesized
  source 1..22: mol_type = other DNA
ttctgacccaaactaggaattg

SEQ ID NO: 64107 - DNA, 22 bp, synthetic construct
  misc_feature 1..22: note = chemically synthesized
  source 1..22: mol_type = other DNA
ctgacccaaactaggaattggg

SEQ ID NO: 64108 - DNA, 22 bp, synthetic construct
  misc_feature 1..22: note = chemically synthesized
  source 1..22: mol_type = other DNA
tgacccaaactaggaattgggg

SEQ ID NO: 64109 - DNA, 22 bp, synthetic construct
  misc_feature 1..22: note = chemically synthesized
  source 1..22: mol_type = other DNA
acccaaactaggaattggggaa

SEQ ID NO: 64110 - DNA, 22 bp, synthetic construct
  misc_feature 1..22: note = chemically synthesized
  source 1..22: mol_type = other DNA
ggaattggggaaagggcctgat

SEQ ID NO: 64111 - DNA, 22 bp, synthetic construct
  misc_feature 1..22: note = chemically synthesized
  source 1..22: mol_type = other DNA
gggaaagggcctgataactttg

SEQ ID NO: 64112 - DNA, 22 bp, synthetic construct
  misc_feature 1..22: note = chemically synthesized
  source 1..22: mol_type = other DNA
ataactttgtttctgctgaggt

SEQ ID NO: 64113 - DNA, 22 bp, synthetic construct
  misc_feature 1..22: note = chemically synthesized
  source 1..22: mol_type = other DNA
tgtttctgctgaggtgtaacta

SEQ ID NO: 64114 - DNA, 22 bp, synthetic construct
  misc_feature 1..22: note = chemically synthesized
  source 1..22: mol_type = other DNA
gtttctgctgaggtgtaactaa

SEQ ID NO: 64115 - DNA, 22 bp, synthetic construct
  misc_feature 1..22: note = chemically synthesized
  source 1..22: mol_type = other DNA
tttctgctgaggtgtaactaat

SEQ ID NO: 64116 - DNA, 22 bp, synthetic construct
  misc_feature 1..22: note = chemically synthesized
  source 1..22: mol_type = other DNA
ctgctgaggtgtaactaataaa

SEQ ID NO: 64117 - DNA, 22 bp, synthetic construct
  misc_feature 1..22: note = chemically synthesized
  source 1..22: mol_type = other DNA
tgctgaggtgtaactaataaat

SEQ ID NO: 64118 - DNA, 22 bp, synthetic construct
  misc_feature 1..22: note = chemically synthesized
  source 1..22: mol_type = other DNA
ctgaggtgtaactaataaatac

SEQ ID NO: 64119 - DNA, 22 bp, synthetic construct
  misc_feature 1..22: note = chemically synthesized
  source 1..22: mol_type = other DNA
aggtgtaactaataaataccag

SEQ ID NO: 64120 - DNA, 22 bp, synthetic construct
  misc_feature 1..22: note = chemically synthesized
  source 1..22: mol_type = other DNA
ataaataccaggaggcagcatt

SEQ ID NO: 64121 - DNA, 22 bp, synthetic construct
  misc_feature 1..22: note = chemically synthesized
  source 1..22: mol_type = other DNA
tagttcacaagctcggagcact

SEQ ID NO: 64122 - DNA, 22 bp, synthetic construct
  misc_feature 1..22: note = chemically synthesized
  source 1..22: mol_type = other DNA
agttcacaagctcggagcactt

SEQ ID NO: 64123 - DNA, 22 bp, synthetic construct
  misc_feature 1..22: note = chemically synthesized
  source 1..22: mol_type = other DNA
gttcacaagctcggagcactta

SEQ ID NO: 64124 - DNA, 22 bp, synthetic construct
  misc_feature 1..22: note = chemically synthesized
  source 1..22: mol_type = other DNA
acaagctcggagcacttactct

SEQ ID NO: 64125 - DNA, 22 bp, synthetic construct
  misc_feature 1..22: note = chemically synthesized
  source 1..22: mol_type = other DNA
ggagcacttactctgctctagg

SEQ ID NO: 64126 - DNA, 22 bp, synthetic construct
  misc_feature 1..22: note = chemically synthesized
  source 1..22: mol_type = other DNA
actctgctctaggaactttaca

SEQ ID NO: 64127 - DNA, 22 bp, synthetic construct
  misc_feature 1..22: note = chemically synthesized
  source 1..22: mol_type = other DNA
ctctgctctaggaactttacaa

SEQ ID NO: 64128 - DNA, 22 bp, synthetic construct
  misc_feature 1..22: note = chemically synthesized
  source 1..22: mol_type = other DNA
tgctctaggaactttacaaata

SEQ ID NO: 64129 - DNA, 22 bp, synthetic construct
  misc_feature 1..22: note = chemically synthesized
  source 1..22: mol_type = other DNA
ctctaggaactttacaaatacg

SEQ ID NO: 64130 - DNA, 22 bp, synthetic construct
  misc_feature 1..22: note = chemically synthesized
  source 1..22: mol_type = other DNA
taggaactttacaaatacgcac

SEQ ID NO: 64131 - DNA, 22 bp, synthetic construct
  misc_feature 1..22: note = chemically synthesized
  source 1..22: mol_type = other DNA
ggaactttacaaatacgcactc

SEQ ID NO: 64132 - DNA, 22 bp, synthetic construct
  misc_feature 1..22: note = chemically synthesized
  source 1..22: mol_type = other DNA
tacaaatacgcactcattttat

SEQ ID NO: 64133 - DNA, 22 bp, synthetic construct
  misc_feature 1..22: note = chemically synthesized
  source 1..22: mol_type = other DNA
acaaatacgcactcattttatt

SEQ ID NO: 64134 - DNA, 22 bp, synthetic construct
  misc_feature 1..22: note = chemically synthesized
  source 1..22: mol_type = other DNA
caaatacgcactcattttattt

SEQ ID NO: 64135 - DNA, 22 bp, synthetic construct
  misc_feature 1..22: note = chemically synthesized
  source 1..22: mol_type = other DNA
attttattttcatacaaaccct

SEQ ID NO: 64136 - DNA, 22 bp, synthetic construct
  misc_feature 1..22: note = chemically synthesized
  source 1..22: mol_type = other DNA
tattttcatacaaaccctatga

SEQ ID NO: 64137 - DNA, 22 bp, synthetic construct
  misc_feature 1..22: note = chemically synthesized
  source 1..22: mol_type = other DNA
attttcatacaaaccctatgaa

SEQ ID NO: 64138 - DNA, 22 bp, synthetic construct
  misc_feature 1..22: note = chemically synthesized
  source 1..22: mol_type = other DNA
ttttcatacaaaccctatgaag

SEQ ID NO: 64139 - DNA, 22 bp, synthetic construct
  misc_feature 1..22: note = chemically synthesized
  source 1..22: mol_type = other DNA
tcatacaaaccctatgaagcat

SEQ ID NO: 64140 - DNA, 22 bp, synthetic construct
  misc_feature 1..22: note = chemically synthesized
  source 1..22: mol_type = other DNA
catacaaaccctatgaagcata

SEQ ID NO: 64141 - DNA, 22 bp, synthetic construct
  misc_feature 1..22: note = chemically synthesized
  source 1..22: mol_type = other DNA
atacaaaccctatgaagcatat

SEQ ID NO: 64142 - DNA, 22 bp, synthetic construct
  misc_feature 1..22: note = chemically synthesized
  source 1..22: mol_type = other DNA
tgaagcatatactattattatt

SEQ ID NO: 64143 - DNA, 22 bp, synthetic construct
  misc_feature 1..22: note = chemically synthesized
  source 1..22: mol_type = other DNA
ttattattcctattttacggat

SEQ ID NO: 64144 - DNA, 22 bp, synthetic construct
  misc_feature 1..22: note = chemically synthesized
  source 1..22: mol_type = other DNA
ttattcctattttacggatgag

SEQ ID NO: 64145 - DNA, 22 bp, synthetic construct
  misc_feature 1..22: note = chemically synthesized
  source 1..22: mol_type = other DNA
ttcctattttacggatgagtcc

SEQ ID NO: 64146 - DNA, 22 bp, synthetic construct
  misc_feature 1..22: note = chemically synthesized
  source 1..22: mol_type = other DNA
ctattttacggatgagtccata

SEQ ID NO: 64147 - DNA, 22 bp, synthetic construct
  misc_feature 1..22: note = chemically synthesized
  source 1..22: mol_type = other DNA
ttttacggatgagtccatattt

SEQ ID NO: 64148 - DNA, 22 bp, synthetic construct
  misc_feature 1..22: note = chemically synthesized
  source 1..22: mol_type = other DNA
tacggatgagtccatattttaa

SEQ ID NO: 64149 - DNA, 22 bp, synthetic construct
  misc_feature 1..22: note = chemically synthesized
  source 1..22: mol_type = other DNA
acggatgagtccatattttaaa

SEQ ID NO: 64150 - DNA, 22 bp, synthetic construct
  misc_feature 1..22: note = chemically synthesized
  source 1..22: mol_type = other DNA
cggatgagtccatattttaaat

SEQ ID NO: 64151 - DNA, 22 bp, synthetic construct
  misc_feature 1..22: note = chemically synthesized
  source 1..22: mol_type = other DNA
taaattccagctgaagaaagaa

SEQ ID NO: 64152 - DNA, 22 bp, synthetic construct
  misc_feature 1..22: note = chemically synthesized
  source 1..22: mol_type = other DNA
aaattccagctgaagaaagaac

SEQ ID NO: 64153 - DNA, 22 bp, synthetic construct
  misc_feature 1..22: note = chemically synthesized
  source 1..22: mol_type = other DNA
aattccagctgaagaaagaaca

SEQ ID NO: 64154 - DNA, 22 bp, synthetic construct
  misc_feature 1..22: note = chemically synthesized
  source 1..22: mol_type = other DNA
cagctgaagaaagaacatttgg

SEQ ID NO: 64155 - DNA, 22 bp, synthetic construct
  misc_feature 1..22: note = chemically synthesized
  source 1..22: mol_type = other DNA
aagaaagaacatttggtgataa

SEQ ID NO: 64156 - DNA, 22 bp, synthetic construct
  misc_feature 1..22: note = chemically synthesized
  source 1..22: mol_type = other DNA
ggtgataaatcattaggaatga

SEQ ID NO: 64157 - DNA, 22 bp, synthetic construct
  misc_feature 1..22: note = chemically synthesized
  source 1..22: mol_type = other DNA
gtgataaatcattaggaatgag

SEQ ID NO: 64158 - DNA, 22 bp, synthetic construct
  misc_feature 1..22: note = chemically synthesized
  source 1..22: mol_type = other DNA
ggaatgagctaggagttatttg

SEQ ID NO: 64159 - DNA, 22 bp, synthetic construct
  misc_feature 1..22: note = chemically synthesized
  source 1..22: mol_type = other DNA
ggagttatttgtcatcacagaa

SEQ ID NO: 64160 - DNA, 22 bp, synthetic construct
  misc_feature 1..22: note = chemically synthesized
  source 1..22: mol_type = other DNA
tttgtcatcacagaaccagtct

SEQ ID NO: 64161 - DNA, 22 bp, synthetic construct
  misc_feature 1..22: note = chemically synthesized
  source 1..22: mol_type = other DNA
gtcatcacagaaccagtctgta

SEQ ID NO: 64162 - DNA, 22 bp, synthetic construct
  misc_feature 1..22: note = chemically synthesized
  source 1..22: mol_type = other DNA
tcatcacagaaccagtctgtat

SEQ ID NO: 64163 - DNA, 22 bp, synthetic construct
  misc_feature 1..22: note = chemically synthesized
  source 1..22: mol_type = other DNA
tattgccccaagtctggctttg

SEQ ID NO: 64164 - DNA, 22 bp, synthetic construct
  misc_feature 1..22: note = chemically synthesized
  source 1..22: mol_type = other DNA
ccccaagtctggctttgccaat

SEQ ID NO: 64165 - DNA, 22 bp, synthetic construct
  misc_feature 1..22: note = chemically synthesized
  source 1..22: mol_type = other DNA
gctttgccaattggagattagg

SEQ ID NO: 64166 - DNA, 22 bp, synthetic construct
  misc_feature 1..22: note = chemically synthesized
  source 1..22: mol_type = other DNA
tgccaattggagattagggaga

SEQ ID NO: 64167 - DNA, 22 bp, synthetic construct
  misc_feature 1..22: note = chemically synthesized
  source 1..22: mol_type = other DNA
gccaattggagattagggagat

SEQ ID NO: 64168 - DNA, 22 bp, synthetic construct
  misc_feature 1..22: note = chemically synthesized
  source 1..22: mol_type = other DNA
ccaattggagattagggagatg

SEQ ID NO: 64169 - DNA, 22 bp, synthetic construct
  misc_feature 1..22: note = chemically synthesized
  source 1..22: mol_type = other DNA
gagattagggagatggaatgaa

SEQ ID NO: 64170 - DNA, 22 bp, synthetic construct
  misc_feature 1..22: note = chemically synthesized
  source 1..22: mol_type = other DNA
gggagatggaatgaacactttt

SEQ ID NO: 64171 - DNA, 22 bp, synthetic construct
  misc_feature 1..22: note = chemically synthesized
  source 1..22: mol_type = other DNA
ttcgtcccctttgatatctcat

SEQ ID NO: 64172 - DNA, 22 bp, synthetic construct
  misc_feature 1..22: note = chemically synthesized
  source 1..22: mol_type = other DNA
tcgtcccctttgatatctcatc

SEQ ID NO: 64173 - DNA, 22 bp, synthetic construct
  misc_feature 1..22: note = chemically synthesized
  source 1..22: mol_type = other DNA
cgtcccctttgatatctcatct

SEQ ID NO: 64174 - DNA, 22 bp, synthetic construct
  misc_feature 1..22: note = chemically synthesized
  source 1..22: mol_type = other DNA
gtcccctttgatatctcatctc

SEQ ID NO: 64175 - DNA, 22 bp, synthetic construct
  misc_feature 1..22: note = chemically synthesized
  source 1..22: mol_type = other DNA
tgatatctcatctcactgagct

SEQ ID NO: 64176 - DNA, 22 bp, synthetic construct
  misc_feature 1..22: note = chemically synthesized
  source 1..22: mol_type = other DNA
gatatctcatctcactgagctc

SEQ ID NO: 64177 - DNA, 22 bp, synthetic construct
  misc_feature 1..22: note = chemically synthesized
  source 1..22: mol_type = other DNA
atatctcatctcactgagctct

SEQ ID NO: 64178 - DNA, 22 bp, synthetic construct
  misc_feature 1..22: note = chemically synthesized
  source 1..22: mol_type = other DNA
atctcactgagctctgggccgt

SEQ ID NO: 64179 - DNA, 22 bp, synthetic construct
  misc_feature 1..22: note = chemically synthesized
  source 1..22: mol_type = other DNA
actgagctctgggccgtttcca

SEQ ID NO: 64180 - DNA, 22 bp, synthetic construct
  misc_feature 1..22: note = chemically synthesized
  source 1..22: mol_type = other DNA
agctctgggccgtttccactct

SEQ ID NO: 64181 - DNA, 22 bp, synthetic construct
  misc_feature 1..22: note = chemically synthesized
  source 1..22: mol_type = other DNA
tgggccgtttccactcttctct

SEQ ID NO: 64182 - DNA, 22 bp, synthetic construct
  misc_feature 1..22: note = chemically synthesized
  source 1..22: mol_type = other DNA
ggccgtttccactcttctctcc

SEQ ID NO: 64183 - DNA, 22 bp, synthetic construct
  misc_feature 1..22: note = chemically synthesized
  source 1..22: mol_type = other DNA
ccactcttctctccccatactc

SEQ ID NO: 64184 - DNA, 22 bp, synthetic construct
  misc_feature 1..22: note = chemically synthesized
  source 1..22: mol_type = other DNA
cactcttctctccccatactcc

SEQ ID NO: 64185 - DNA, 22 bp, synthetic construct
  misc_feature 1..22: note = chemically synthesized
  source 1..22: mol_type = other DNA
ttctctccccatactcccatct

SEQ ID NO: 64186 - DNA, 22 bp, synthetic construct
  misc_feature 1..22: note = chemically synthesized
  source 1..22: mol_type = other DNA
ctctccccatactcccatcttg

SEQ ID NO: 64187 - DNA, 22 bp, synthetic construct
  misc_feature 1..22: note = chemically synthesized
  source 1..22: mol_type = other DNA
tctccccatactcccatcttgg

SEQ ID NO: 64188 - DNA, 22 bp, synthetic construct
  misc_feature 1..22: note = chemically synthesized
  source 1..22: mol_type = other DNA
tccccatactcccatcttggca

SEQ ID NO: 64189 - DNA, 22 bp, synthetic construct
  misc_feature 1..22: note = chemically synthesized
  source 1..22: mol_type = other DNA
cccatactcccatcttggcaaa

SEQ ID NO: 64190 - DNA, 22 bp, synthetic construct
  misc_feature 1..22: note = chemically synthesized
  source 1..22: mol_type = other DNA
ccatcttggcaaaaattgcata

SEQ ID NO: 64191 - DNA, 22 bp, synthetic construct
  misc_feature 1..22: note = chemically synthesized
  source 1..22: mol_type = other DNA
ggcaaaaattgcataagattta

SEQ ID NO: 64192 - DNA, 22 bp, synthetic construct
  misc_feature 1..22: note = chemically synthesized
  source 1..22: mol_type = other DNA
gcaaaaattgcataagatttat

SEQ ID NO: 64193 - DNA, 22 bp, synthetic construct
  misc_feature 1..22: note = chemically synthesized
  source 1..22: mol_type = other DNA
cataagatttataagacattag

SEQ ID NO: 64194 - DNA, 22 bp, synthetic construct
  misc_feature 1..22: note = chemically synthesized
  source 1..22: mol_type = other DNA
ataagacattagggtattggag

SEQ ID NO: 64195 - DNA, 22 bp, synthetic construct
  misc_feature 1..22: note = chemically synthesized
  source 1..22: mol_type = other DNA
taagacattagggtattggaga

SEQ ID NO: 64196 - DNA, 22 bp, synthetic construct
  misc_feature 1..22: note = chemically synthesized
  source 1..22: mol_type = other DNA
gggtattggagataatttatta

SEQ ID NO: 64197 - DNA, 22 bp, synthetic construct
  misc_feature 1..22: note = chemically synthesized
  source 1..22: mol_type = other DNA
gagataatttattacaacctcc

SEQ ID NO: 64198 - DNA, 22 bp, synthetic construct
  misc_feature 1..22: note = chemically synthesized
  source 1..22: mol_type = other DNA
attacaacctccttgtttacag

SEQ ID NO: 64199 - DNA, 22 bp, synthetic construct
  misc_feature 1..22: note = chemically synthesized
  source 1..22: mol_type = other DNA
ttacaacctccttgtttacaga

SEQ ID NO: 64200 - DNA, 22 bp, synthetic construct
  misc_feature 1..22: note = chemically synthesized
  source 1..22: mol_type = other DNA
caacctccttgtttacagaggg

SEQ ID NO: 64201 - DNA, 22 bp, synthetic construct
  misc_feature 1..22: note = chemically synthesized
  source 1..22: mol_type = other DNA
cttgtttacagaggggcaaccc

SEQ ID NO: 64202 - DNA, 22 bp, synthetic construct
  misc_feature 1..22: note = chemically synthesized
  source 1..22: mol_type = other DNA
gtttacagaggggcaacccagg

SEQ ID NO: 64203 - DNA, 22 bp, synthetic construct
  misc_feature 1..22: note = chemically synthesized
  source 1..22: mol_type = other DNA
tttacagaggggcaacccaggt

SEQ ID NO: 64204 - DNA, 22 bp, synthetic construct
  misc_feature 1..22: note = chemically synthesized
  source 1..22: mol_type = other DNA
acagaggggcaacccaggtcca

SEQ ID NO: 64205 - DNA, 22 bp, synthetic construct
  misc_feature 1..22: note = chemically synthesized
  source 1..22: mol_type = other DNA
cagaggggcaacccaggtccag

SEQ ID NO: 64206 - DNA, 22 bp, synthetic construct
  misc_feature 1..22: note = chemically synthesized
  source 1..22: mol_type = other DNA
cccagtttagaggccatgcaca

SEQ ID NO: 64207 - DNA, 22 bp, synthetic construct
  misc_feature 1..22: note = chemically synthesized
  source 1..22: mol_type = other DNA
agaggccatgcacagatgagaa

SEQ ID NO: 64208 - DNA, 22 bp, synthetic construct
  misc_feature 1..22: note = chemically synthesized
  source 1..22: mol_type = other DNA
gaggccatgcacagatgagaag

SEQ ID NO: 64209 - DNA, 22 bp, synthetic construct
  misc_feature 1..22: note = chemically synthesized
  source 1..22: mol_type = other DNA
ccagctcccagcccacgtcttc

SEQ ID NO: 64210 - DNA, 22 bp, synthetic construct
  misc_feature 1..22: note = chemically synthesized
  source 1..22: mol_type = other DNA
ccagcccacgtcttcccactct

SEQ ID NO: 64211 - DNA, 22 bp, synthetic construct
  misc_feature 1..22: note = chemically synthesized
  source 1..22: mol_type = other DNA
cccactctcccatgtggcctgt

SEQ ID NO: 64212 - DNA, 22 bp, synthetic construct
  misc_feature 1..22: note = chemically synthesized
  source 1..22: mol_type = other DNA
ccactctcccatgtggcctgtc

SEQ ID NO: 64213 - DNA, 22 bp, synthetic construct
  misc_feature 1..22: note = chemically synthesized
  source 1..22: mol_type = other DNA
tcccatgtggcctgtcagcatc

SEQ ID NO: 64214 - DNA, 22 bp, synthetic construct
  misc_feature 1..22: note = chemically synthesized
  source 1..22: mol_type = other DNA
ccatgtggcctgtcagcatcac

SEQ ID NO: 64215 - DNA, 22 bp, synthetic construct
  misc_feature 1..22: note = chemically synthesized
  source 1..22: mol_type = other DNA
tcagcatcaccctctctcactc

SEQ ID NO: 64216 - DNA, 22 bp, synthetic construct
  misc_feature 1..22: note = chemically synthesized
  source 1..22: mol_type = other DNA
tctcactcttgcttagcctgtg

SEQ ID NO: 64217 - DNA, 22 bp, synthetic construct
  misc_feature 1..22: note = chemically synthesized
  source 1..22: mol_type = other DNA
tcactcttgcttagcctgtgta

SEQ ID NO: 64218 - DNA, 22 bp, synthetic construct
  misc_feature 1..22: note = chemically synthesized
  source 1..22: mol_type = other DNA
actcttgcttagcctgtgtagc

SEQ ID NO: 64219 - DNA, 22 bp, synthetic construct
  misc_feature 1..22: note = chemically synthesized
  source 1..22: mol_type = other DNA
ttgcttagcctgtgtagctcaa

SEQ ID NO: 64220 - DNA, 22 bp, synthetic construct
  misc_feature 1..22: note = chemically synthesized
  source 1..22: mol_type = other DNA
gcttagcctgtgtagctcaagg

SEQ ID NO: 64221 - DNA, 22 bp, synthetic construct
  misc_feature 1..22: note = chemically synthesized
  source 1..22: mol_type = other DNA
cttagcctgtgtagctcaagga

SEQ ID NO: 64222 - DNA, 22 bp, synthetic construct
  misc_feature 1..22: note = chemically synthesized
  source 1..22: mol_type = other DNA
agcctgtgtagctcaaggatgt

SEQ ID NO: 64223 - DNA, 22 bp, synthetic construct
  misc_feature 1..22: note = chemically synthesized
  source 1..22: mol_type = other DNA
gcctgtgtagctcaaggatgta

SEQ ID NO: 64224 - DNA, 22 bp, synthetic construct
  misc_feature 1..22: note = chemically synthesized
  source 1..22: mol_type = other DNA
tgtagctcaaggatgtatttat

SEQ ID NO: 64225 - DNA, 22 bp, synthetic construct
  misc_feature 1..22: note = chemically synthesized
  source 1..22: mol_type = other DNA
aaggatgtatttattgccctag

SEQ ID NO: 64226 - DNA, 22 bp, synthetic construct
  misc_feature 1..22: note = chemically synthesized
  source 1..22: mol_type = other DNA
attgccctaggcgtaagaatgt

SEQ ID NO: 64227 - DNA, 22 bp, synthetic construct
  misc_feature 1..22: note = chemically synthesized
  source 1..22: mol_type = other DNA
ttgccctaggcgtaagaatgtg

SEQ ID NO: 64228 - DNA, 22 bp, synthetic construct
  misc_feature 1..22: note = chemically synthesized
  source 1..22: mol_type = other DNA
ccctaggcgtaagaatgtgctc

SEQ ID NO: 64229 - DNA, 22 bp, synthetic construct
  misc_feature 1..22: note = chemically synthesized
  source 1..22: mol_type = other DNA
ggcgtaagaatgtgctcaggtt

SEQ ID NO: 64230 - DNA, 22 bp, synthetic construct
  misc_feature 1..22: note = chemically synthesized
  source 1..22: mol_type = other DNA
aggtttcttaagtaatgtaggt

SEQ ID NO: 64231 - DNA, 22 bp, synthetic construct
  misc_feature 1..22: note = chemically synthesized
  source 1..22: mol_type = other DNA
cttaagtaatgtaggtgtgcct

SEQ ID NO: 64232 - DNA, 22 bp, synthetic construct
  misc_feature 1..22: note = chemically synthesized
  source 1..22: mol_type = other DNA
ttaagtaatgtaggtgtgcctc

SEQ ID NO: 64233 - DNA, 22 bp, synthetic construct
  misc_feature 1..22: note = chemically synthesized
  source 1..22: mol_type = other DNA
aagtaatgtaggtgtgcctcac

SEQ ID NO: 64234 - DNA, 22 bp, synthetic construct
  misc_feature 1..22: note = chemically synthesized
  source 1..22: mol_type = other DNA
agtaatgtaggtgtgcctcacc

SEQ ID NO: 64235 - DNA, 22 bp, synthetic construct
  misc_feature 1..22: note = chemically synthesized
  source 1..22: mol_type = other DNA
acccatggggcttcactttctc

SEQ ID NO: 64236 - DNA, 22 bp, synthetic construct
  misc_feature 1..22: note = chemically synthesized
  source 1..22: mol_type = other DNA
cactttctctctgtttattgcc

SEQ ID NO: 64237 - DNA, 22 bp, synthetic construct
  misc_feature 1..22: note = chemically synthesized
  source 1..22: mol_type = other DNA
actttctctctgtttattgcca

SEQ ID NO: 64238 - DNA, 22 bp, synthetic construct
  misc_feature 1..22: note = chemically synthesized
  source 1..22: mol_type = other DNA
tctctctgtttattgccagtag

SEQ ID NO: 64239 - DNA, 22 bp, synthetic construct
  misc_feature 1..22: note = chemically synthesized
  source 1..22: mol_type = other DNA
ctctctgtttattgccagtagt

SEQ ID NO: 64240 - DNA, 22 bp, synthetic construct
  misc_feature 1..22: note = chemically synthesized
  source 1..22: mol_type = other DNA
tctctgtttattgccagtagtg

SEQ ID NO: 64241 - DNA, 22 bp, synthetic construct
  misc_feature 1..22: note = chemically synthesized
  source 1..22: mol_type = other DNA
tctgtttattgccagtagtggt

SEQ ID NO: 64242 - DNA, 22 bp, synthetic construct
  misc_feature 1..22: note = chemically synthesized
  source 1..22: mol_type = other DNA
tgtttattgccagtagtggtct

SEQ ID NO: 64243 - DNA, 22 bp, synthetic construct
  misc_feature 1..22: note = chemically synthesized
  source 1..22: mol_type = other DNA
tttattgccagtagtggtctct

SEQ ID NO: 64244 - DNA, 22 bp, synthetic construct
  misc_feature 1..22: note = chemically synthesized
  source 1..22: mol_type = other DNA
attgccagtagtggtctctgtt

SEQ ID NO: 64245 - DNA, 22 bp, synthetic construct
  misc_feature 1..22: note = chemically synthesized
  source 1..22: mol_type = other DNA
ttgccagtagtggtctctgttc

SEQ ID NO: 64246 - DNA, 22 bp, synthetic construct
  misc_feature 1..22: note = chemically synthesized
  source 1..22: mol_type = other DNA
ccagtagtggtctctgttctgt

SEQ ID NO: 64247 - DNA, 22 bp, synthetic construct
  misc_feature 1..22: note = chemically synthesized
  source 1..22: mol_type = other DNA
tgttctgttttcttcagtttct

SEQ ID NO: 64248 - DNA, 22 bp, synthetic construct
  misc_feature 1..22: note = chemically synthesized
  source 1..22: mol_type = other DNA
ttctgttttcttcagtttctcc

SEQ ID NO: 64249 - DNA, 22 bp, synthetic construct
  misc_feature 1..22: note = chemically synthesized
  source 1..22: mol_type = other DNA
tgttttcttcagtttctccccc

SEQ ID NO: 64250 - DNA, 22 bp, synthetic construct
  misc_feature 1..22: note = chemically synthesized
  source 1..22: mol_type = other DNA
ttttcttcagtttctccccctt

SEQ ID NO: 64251 - DNA, 22 bp, synthetic construct
  misc_feature 1..22: note = chemically synthesized
  source 1..22: mol_type = other DNA
tcttcagtttctcccccttgca

SEQ ID NO: 64252 - DNA, 22 bp, synthetic construct
  misc_feature 1..22: note = chemically synthesized
  source 1..22: mol_type = other DNA
cttcagtttctcccccttgcat

SEQ ID NO: 64253 - DNA, 22 bp, synthetic construct
  misc_feature 1..22: note = chemically synthesized
  source 1..22: mol_type = other DNA
ttcagtttctcccccttgcatt

SEQ ID NO: 64254 - DNA, 22 bp, synthetic construct
  misc_feature 1..22: note = chemically synthesized
  source 1..22: mol_type = other DNA
cagtttctcccccttgcattgt

SEQ ID NO: 64255 - DNA, 22 bp, synthetic construct
  misc_feature 1..22: note = chemically synthesized
  source 1..22: mol_type = other DNA
agtttctcccccttgcattgtt

SEQ ID NO: 64256 - DNA, 22 bp, synthetic construct
  misc_feature 1..22: note = chemically synthesized
  source 1..22: mol_type = other DNA
ctcccccttgcattgttgtcta

SEQ ID NO: 64257 - DNA, 22 bp, synthetic construct
  misc_feature 1..22: note = chemically synthesized
  source 1..22: mol_type = other DNA
tcccccttgcattgttgtctaa

SEQ ID NO: 64258 - DNA, 22 bp, synthetic construct
  misc_feature 1..22: note = chemically synthesized
  source 1..22: mol_type = other DNA
ccccttgcattgttgtctaaga

SEQ ID NO: 64259 - DNA, 22 bp, synthetic construct
  misc_feature 1..22: note = chemically synthesized
  source 1..22: mol_type = other DNA
gcattgttgtctaagatggctg

SEQ ID NO: 64260 - DNA, 22 bp, synthetic construct
  misc_feature 1..22: note = chemically synthesized
  source 1..22: mol_type = other DNA
cattgttgtctaagatggctgt

SEQ ID NO: 64261 - DNA, 22 bp, synthetic construct
  misc_feature 1..22: note = chemically synthesized
  source 1..22: mol_type = other DNA
ttgtctaagatggctgtcctgt

SEQ ID NO: 64262 - DNA, 22 bp, synthetic construct
  misc_feature 1..22: note = chemically synthesized
  source 1..22: mol_type = other DNA
tctaagatggctgtcctgtctt

SEQ ID NO: 64263 - DNA, 22 bp, synthetic construct
  misc_feature 1..22: note = chemically synthesized
  source 1..22: mol_type = other DNA
agatggctgtcctgtcttttgt

SEQ ID NO: 64264 - DNA, 22 bp, synthetic construct
  misc_feature 1..22: note = chemically synthesized
  source 1..22: mol_type = other DNA
tcctgtcttttgtccacttccc

SEQ ID NO: 64265 - DNA, 22 bp, synthetic construct
  misc_feature 1..22: note = chemically synthesized
  source 1..22: mol_type = other DNA
tcttttgtccacttcccctcca

SEQ ID NO: 64266 - DNA, 22 bp, synthetic construct
  misc_feature 1..22: note = chemically synthesized
  source 1..22: mol_type = other DNA
ttgtccacttcccctccactcc

SEQ ID NO: 64267 - DNA, 22 bp, synthetic construct
  misc_feature 1..22: note = chemically synthesized
  source 1..22: mol_type = other DNA
tgtccacttcccctccactccc

SEQ ID NO: 64268 - DNA, 22 bp, synthetic construct
  misc_feature 1..22: note = chemically synthesized
  source 1..22: mol_type = other DNA
gtccacttcccctccactcccc

SEQ ID NO: 64269 - DNA, 22 bp, synthetic construct
  misc_feature 1..22: note = chemically synthesized
  source 1..22: mol_type = other DNA
tccacttcccctccactccccg

SEQ ID NO: 64270 - DNA, 22 bp, synthetic construct
  misc_feature 1..22: note = chemically synthesized
  source 1..22: mol_type = other DNA
cccctccactccccgtaccttc

SEQ ID NO: 64271 - DNA, 22 bp, synthetic construct
  misc_feature 1..22: note = chemically synthesized
  source 1..22: mol_type = other DNA
ccctccactccccgtaccttcc

SEQ ID NO: 64272 - DNA, 22 bp, synthetic construct
  misc_feature 1..22: note = chemically synthesized
  source 1..22: mol_type = other DNA
cactccccgtaccttcctttaa

SEQ ID NO: 64273 - DNA, 22 bp, synthetic construct
  misc_feature 1..22: note = chemically synthesized
  source 1..22: mol_type = other DNA
cccgtaccttcctttaatcagc

SEQ ID NO: 64274 - DNA, 22 bp, synthetic construct
  misc_feature 1..22: note = chemically synthesized
  source 1..22: mol_type = other DNA
cctttaatcagcttccgccact

SEQ ID NO: 64275 - DNA, 22 bp, synthetic construct
  misc_feature 1..22: note = chemically synthesized
  source 1..22: mol_type = other DNA
ctttaatcagcttccgccactg

SEQ ID NO: 64276 - DNA, 22 bp, synthetic construct
  misc_feature 1..22: note = chemically synthesized
  source 1..22: mol_type = other DNA
taatcagcttccgccactgcct

SEQ ID NO: 64277 - DNA, 22 bp, synthetic construct
  misc_feature 1..22: note = chemically synthesized
  source 1..22: mol_type = other DNA
aatcagcttccgccactgcctg

SEQ ID NO: 64278 - DNA, 22 bp, synthetic construct
  misc_feature 1..22: note = chemically synthesized
  source 1..22: mol_type = other DNA
atcagcttccgccactgcctga

SEQ ID NO: 64279 - DNA, 22 bp, synthetic construct
  misc_feature 1..22: note = chemically synthesized
  source 1..22: mol_type = other DNA
ccgccactgcctgaggccactc

SEQ ID NO: 64280 - DNA, 22 bp, synthetic construct
  misc_feature 1..22: note = chemically synthesized
  source 1..22: mol_type = other DNA
cgccactgcctgaggccactca

SEQ ID NO: 64281 - DNA, 22 bp, synthetic construct
  misc_feature 1..22: note = chemically synthesized
  source 1..22: mol_type = other DNA
cctgaggccactcagctctggt

SEQ ID NO: 64282 - DNA, 22 bp, synthetic construct
  misc_feature 1..22: note = chemically synthesized
  source 1..22: mol_type = other DNA
aggccactcagctctggtccca

SEQ ID NO: 64283 - DNA, 22 bp, synthetic construct
  misc_feature 1..22: note = chemically synthesized
  source 1..22: mol_type = other DNA
agctctggtcccactggaggcc

SEQ ID NO: 64284 - DNA, 22 bp, synthetic construct
  misc_feature 1..22: note = chemically synthesized
  source 1..22: mol_type = other DNA
tggtcccactggaggccctgtc

SEQ ID NO: 64285 - DNA, 22 bp, synthetic construct
  misc_feature 1..22: note = chemically synthesized
  source 1..22: mol_type = other DNA
gtcccactggaggccctgtctc

SEQ ID NO: 64286 - DNA, 22 bp, synthetic construct
  misc_feature 1..22: note = chemically synthesized
  source 1..22: mol_type = other DNA
gaggccctgtctcccccagggg

SEQ ID NO: 64287 - DNA, 22 bp, synthetic construct
  misc_feature 1..22: note = chemically synthesized
  source 1..22: mol_type = other DNA
tctcccccaggggtccttctgc

SEQ ID NO: 64288 - DNA, 22 bp, synthetic construct
  misc_feature 1..22: note = chemically synthesized
  source 1..22: mol_type = other DNA
ccccaggggtccttctgcttcc

SEQ ID NO: 64289 - DNA, 22 bp, synthetic construct
  misc_feature 1..22: note = chemically synthesized
  source 1..22: mol_type = other DNA
ctgcttcctgttcacctctgat

SEQ ID NO: 64290 - DNA, 22 bp, synthetic construct
  misc_feature 1..22: note = chemically synthesized
  source 1..22: mol_type = other DNA
tgcttcctgttcacctctgatc

SEQ ID NO: 64291 - DNA, 22 bp, synthetic construct
  misc_feature 1..22: note = chemically synthesized
  source 1..22: mol_type = other DNA
cttcctgttcacctctgatccc

SEQ ID NO: 64292 - DNA, 22 bp, synthetic construct
  misc_feature 1..22: note = chemically synthesized
  source 1..22: mol_type = other DNA
cctgttcacctctgatccccca

SEQ ID NO: 64293 - DNA, 22 bp, synthetic construct
  misc_feature 1..22: note = chemically synthesized
  source 1..22: mol_type = other DNA
ctgttcacctctgatcccccag

SEQ ID NO: 64294 - DNA, 22 bp, synthetic construct
  misc_feature 1..22: note = chemically synthesized
  source 1..22: mol_type = other DNA
ttcacctctgatcccccagccc

SEQ ID NO: 64295 - DNA, 22 bp, synthetic construct
  misc_feature 1..22: note = chemically synthesized
  source 1..22: mol_type = other DNA
acctctgatcccccagccctgc

SEQ ID NO: 64296 - DNA, 22 bp, synthetic construct
  misc_feature 1..22: note = chemically synthesized
  source 1..22: mol_type = other DNA
tgatcccccagccctgccatgg

SEQ ID NO: 64297 - DNA, 22 bp, synthetic construct
  misc_feature 1..22: note = chemically synthesized
  source 1..22: mol_type = other DNA
atcccccagccctgccatggcc

SEQ ID NO: 64298 - DNA, 22 bp, synthetic construct
  misc_feature 1..22: note = chemically synthesized
  source 1..22: mol_type = other DNA
ccatggccaagctgatgaggat

SEQ ID NO: 64299 - DNA, 22 bp, synthetic construct
  misc_feature 1..22: note = chemically synthesized
  source 1..22: mol_type = other DNA
atgaggatgggggagggggagg

SEQ ID NO: 64300 - DNA, 22 bp, synthetic construct
  misc_feature 1..22: note = chemically synthesized
  source 1..22: mol_type = other DNA
aatttcctgcactgaagctttg

SEQ ID NO: 64301 - DNA, 22 bp, synthetic construct
  misc_feature 1..22: note = chemically synthesized
  source 1..22: mol_type = other DNA
atttcctgcactgaagctttgc

SEQ ID NO: 64302 - DNA, 22 bp, synthetic construct
  misc_feature 1..22: note = chemically synthesized
  source 1..22: mol_type = other DNA
cctgcactgaagctttgctgtc

SEQ ID NO: 64303 - DNA, 22 bp, synthetic construct
  misc_feature 1..22: note = chemically synthesized
  source 1..22: mol_type = other DNA
ctgcactgaagctttgctgtcc

SEQ ID NO: 64304 - DNA, 22 bp, synthetic construct
  misc_feature 1..22: note = chemically synthesized
  source 1..22: mol_type = other DNA
cactgaagctttgctgtccaca

SEQ ID NO: 64305 - DNA, 22 bp, synthetic construct
  misc_feature 1..22: note = chemically synthesized
  source 1..22: mol_type = other DNA
aagctttgctgtccacagcact

SEQ ID NO: 64306 - DNA, 22 bp, synthetic construct
  misc_feature 1..22: note = chemically synthesized
  source 1..22: mol_type = other DNA
tgctgtccacagcactgggcag

SEQ ID NO: 64307 - DNA, 22 bp, synthetic construct
  misc_feature 1..22: note = chemically synthesized
  source 1..22: mol_type = other DNA
gctgtccacagcactgggcagc

SEQ ID NO: 64308 - DNA, 22 bp, synthetic construct
  misc_feature 1..22: note = chemically synthesized
  source 1..22: mol_type = other DNA
ctgtccacagcactgggcagca

SEQ ID NO: 64309 - DNA, 22 bp, synthetic construct
  misc_feature 1..22: note = chemically synthesized
  source 1..22: mol_type = other DNA
tccacagcactgggcagcagct

SEQ ID NO: 64310 - DNA, 22 bp, synthetic construct
  misc_feature 1..22: note = chemically synthesized
  source 1..22: mol_type = other DNA
ggcagcagctgcctccctggag

SEQ ID NO: 64311 - DNA, 22 bp, synthetic construct
  misc_feature 1..22: note = chemically synthesized
  source 1..22: mol_type = other DNA
cctccctggagtgttgtgtgag

SEQ ID NO: 64312 - DNA, 22 bp, synthetic construct
  misc_feature 1..22: note = chemically synthesized
  source 1..22: mol_type = other DNA
cctggagtgttgtgtgagacct

SEQ ID NO: 64313 - DNA, 22 bp, synthetic construct
  misc_feature 1..22: note = chemically synthesized
  source 1..22: mol_type = other DNA
gagtgttgtgtgagaccttgat

SEQ ID NO: 64314 - DNA, 22 bp, synthetic construct
  misc_feature 1..22: note = chemically synthesized
  source 1..22: mol_type = other DNA
tgtgagaccttgatgctgtctt

SEQ ID NO: 64315 - DNA, 22 bp, synthetic construct
  misc_feature 1..22: note = chemically synthesized
  source 1..22: mol_type = other DNA
gatgctgtctttcttcccaagg

SEQ ID NO: 64316 - DNA, 22 bp, synthetic construct
  misc_feature 1..22: note = chemically synthesized
  source 1..22: mol_type = other DNA
atgctgtctttcttcccaaggc

SEQ ID NO: 64317 - DNA, 22 bp, synthetic construct
  misc_feature 1..22: note = chemically synthesized
  source 1..22: mol_type = other DNA
tctttcttcccaaggcctttgg

SEQ ID NO: 64318 - DNA, 22 bp, synthetic construct
  misc_feature 1..22: note = chemically synthesized
  source 1..22: mol_type = other DNA
tcttcccaaggcctttggcaag

SEQ ID NO: 64319 - DNA, 22 bp, synthetic construct
  misc_feature 1..22: note = chemically synthesized
  source 1..22: mol_type = other DNA
cttcccaaggcctttggcaagg

SEQ ID NO: 64320 - DNA, 22 bp, synthetic construct
  misc_feature 1..22: note = chemically synthesized
  source 1..22: mol_type = other DNA
ttcccaaggcctttggcaaggt

SEQ ID NO: 64321 - DNA, 22 bp, synthetic construct
  misc_feature 1..22: note = chemically synthesized
  source 1..22: mol_type = other DNA
cccaaggcctttggcaaggtag

SEQ ID NO: 64322 - DNA, 22 bp, synthetic construct
  misc_feature 1..22: note = chemically synthesized
  source 1..22: mol_type = other DNA
ccaaggcctttggcaaggtaga

SEQ ID NO: 64323 - DNA, 22 bp, synthetic construct
  misc_feature 1..22: note = chemically synthesized
  source 1..22: mol_type = other DNA
tggcaaggtagaagtcatctcc

SEQ ID NO: 64324 - DNA, 22 bp, synthetic construct
  misc_feature 1..22: note = chemically synthesized
  source 1..22: mol_type = other DNA
ggcaaggtagaagtcatctcct

SEQ ID NO: 64325 - DNA, 22 bp, synthetic construct
  misc_feature 1..22: note = chemically synthesized
  source 1..22: mol_type = other DNA
gcaaggtagaagtcatctcctt

SEQ ID NO: 64326 - DNA, 22 bp, synthetic construct
  misc_feature 1..22: note = chemically synthesized
  source 1..22: mol_type = other DNA
cttgactctccatgctgctaat

SEQ ID NO: 64327 - DNA, 22 bp, synthetic construct
  misc_feature 1..22: note = chemically synthesized
  source 1..22: mol_type = other DNA
gactctccatgctgctaatggg

SEQ ID NO: 64328 - DNA, 22 bp, synthetic construct
  misc_feature 1..22: note = chemically synthesized
  source 1..22: mol_type = other DNA
actctccatgctgctaatgggg

SEQ ID NO: 64329 - DNA, 22 bp, synthetic construct
  misc_feature 1..22: note = chemically synthesized
  source 1..22: mol_type = other DNA
tccatgctgctaatgggggagg

SEQ ID NO: 64330 - DNA, 22 bp, synthetic construct
  misc_feature 1..22: note = chemically synthesized
  source 1..22: mol_type = other DNA
catgctgctaatgggggaggtc

SEQ ID NO: 64331 - DNA, 22 bp, synthetic construct
  misc_feature 1..22: note = chemically synthesized
  source 1..22: mol_type = other DNA
ctaatgggggaggtcaactaag

SEQ ID NO: 64332 - DNA, 22 bp, synthetic construct
  misc_feature 1..22: note = chemically synthesized
  source 1..22: mol_type = other DNA
atgggggaggtcaactaagtcc

SEQ ID NO: 64333 - DNA, 22 bp, synthetic construct
  misc_feature 1..22: note = chemically synthesized
  source 1..22: mol_type = other DNA
agtccatttctgagctagtggg

SEQ ID NO: 64334 - DNA, 22 bp, synthetic construct
  misc_feature 1..22: note = chemically synthesized
  source 1..22: mol_type = other DNA
ctgagctagtgggggctcttag

SEQ ID NO: 64335 - DNA, 22 bp, synthetic construct
  misc_feature 1..22: note = chemically synthesized
  source 1..22: mol_type = other DNA
tgagctagtgggggctcttagg

SEQ ID NO: 64336 - DNA, 22 bp, synthetic construct
  misc_feature 1..22: note = chemically synthesized
  source 1..22: mol_type = other DNA
agctagtgggggctcttaggac

SEQ ID NO: 64337 - DNA, 22 bp, synthetic construct
  misc_feature 1..22: note = chemically synthesized
  source 1..22: mol_type = other DNA
gtgggggctcttaggactccga

SEQ ID NO: 64338 - DNA, 22 bp, synthetic construct
  misc_feature 1..22: note = chemically synthesized
  source 1..22: mol_type = other DNA
ttaggactccgaacaccacact

SEQ ID NO: 64339 - DNA, 22 bp, synthetic construct
  misc_feature 1..22: note = chemically synthesized
  source 1..22: mol_type = other DNA
aggactccgaacaccacactta

SEQ ID NO: 64340 - DNA, 22 bp, synthetic construct
  misc_feature 1..22: note = chemically synthesized
  source 1..22: mol_type = other DNA
ggactccgaacaccacacttaa

SEQ ID NO: 64341 - DNA, 22 bp, synthetic construct
  misc_feature 1..22: note = chemically synthesized
  source 1..22: mol_type = other DNA
cgaacaccacacttaagttatc

SEQ ID NO: 64342 - DNA, 22 bp, synthetic construct
  misc_feature 1..22: note = chemically synthesized
  source 1..22: mol_type = other DNA
aagttatctctgacccagagtc

SEQ ID NO: 64343 - DNA, 22 bp, synthetic construct
  misc_feature 1..22: note = chemically synthesized
  source 1..22: mol_type = other DNA
agttatctctgacccagagtcc

SEQ ID NO: 64344 - DNA, 22 bp, synthetic construct
  misc_feature 1..22: note = chemically synthesized
  source 1..22: mol_type = other DNA
tctctgacccagagtccaattt

SEQ ID NO: 64345 - DNA, 22 bp, synthetic construct
  misc_feature 1..22: note = chemically synthesized
  source 1..22: mol_type = other DNA
tgacccagagtccaatttattt

SEQ ID NO: 64346 - DNA, 22 bp, synthetic construct
  misc_feature 1..22: note = chemically synthesized
  source 1..22: mol_type = other DNA
acccagagtccaatttatttgg

SEQ ID NO: 64347 - DNA, 22 bp, synthetic construct
  misc_feature 1..22: note = chemically synthesized
  source 1..22: mol_type = other DNA
atttggcctgattcaaatgaat

SEQ ID NO: 64348 - DNA, 22 bp, synthetic construct
  misc_feature 1..22: note = chemically synthesized
  source 1..22: mol_type = other DNA
tttggcctgattcaaatgaatg

SEQ ID NO: 64349 - DNA, 22 bp, synthetic construct
  misc_feature 1..22: note = chemically synthesized
  source 1..22: mol_type = other DNA
ggcctgattcaaatgaatgccc

SEQ ID NO: 64350 - DNA, 22 bp, synthetic construct
  misc_feature 1..22: note = chemically synthesized
  source 1..22: mol_type = other DNA
gcctgattcaaatgaatgccca

SEQ ID NO: 64351 - DNA, 22 bp, synthetic construct
  misc_feature 1..22: note = chemically synthesized
  source 1..22: mol_type = other DNA
attcaaatgaatgcccatttta

SEQ ID NO: 64352 - DNA, 22 bp, synthetic construct
  misc_feature 1..22: note = chemically synthesized
  source 1..22: mol_type = other DNA
aaatgaatgcccattttaagaa

SEQ ID NO: 64353 - DNA, 22 bp, synthetic construct
  misc_feature 1..22: note = chemically synthesized
  source 1..22: mol_type = other DNA
taagaatgttttggggtctctt

SEQ ID NO: 64354 - DNA, 22 bp, synthetic construct
  misc_feature 1..22: note = chemically synthesized
  source 1..22: mol_type = other DNA
aagaatgttttggggtctcttc

SEQ ID NO: 64355 - DNA, 22 bp, synthetic construct
  misc_feature 1..22: note = chemically synthesized
  source 1..22: mol_type = other DNA
agaatgttttggggtctcttcc

SEQ ID NO: 64356 - DNA, 22 bp, synthetic construct
  misc_feature 1..22: note = chemically synthesized
  source 1..22: mol_type = other DNA
tggggtctcttcccatcatttc

SEQ ID NO: 64357 - DNA, 22 bp, synthetic construct
  misc_feature 1..22: note = chemically synthesized
  source 1..22: mol_type = other DNA
ggggtctcttcccatcatttcc

SEQ ID NO: 64358 - DNA, 22 bp, synthetic construct
  misc_feature 1..22: note = chemically synthesized
  source 1..22: mol_type = other DNA
gggtctcttcccatcatttcct

SEQ ID NO: 64359 - DNA, 22 bp, synthetic construct
  misc_feature 1..22: note = chemically synthesized
  source 1..22: mol_type = other DNA
ttcccatcatttccttagtgta

SEQ ID NO: 64360 - DNA, 22 bp, synthetic construct
  misc_feature 1..22: note = chemically synthesized
  source 1..22: mol_type = other DNA
cccatcatttccttagtgtagt

SEQ ID NO: 64361 - DNA, 22 bp, synthetic construct
  misc_feature 1..22: note = chemically synthesized
  source 1..22: mol_type = other DNA
ccatcatttccttagtgtagtg

SEQ ID NO: 64362 - DNA, 22 bp, synthetic construct
  misc_feature 1..22: note = chemically synthesized
  source 1..22: mol_type = other DNA
ccttagtgtagtggagaggttt

SEQ ID NO: 64363 - DNA, 22 bp, synthetic construct
  misc_feature 1..22: note = chemically synthesized
  source 1..22: mol_type = other DNA
cttagtgtagtggagaggtttc

SEQ ID NO: 64364 - DNA, 22 bp, synthetic construct
  misc_feature 1..22: note = chemically synthesized
  source 1..22: mol_type = other DNA
agtgtagtggagaggtttctat

SEQ ID NO: 64365 - DNA, 22 bp, synthetic construct
  misc_feature 1..22: note = chemically synthesized
  source 1..22: mol_type = other DNA
gtgtagtggagaggtttctatt

SEQ ID NO: 64366 - DNA, 22 bp, synthetic construct
  misc_feature 1..22: note = chemically synthesized
  source 1..22: mol_type = other DNA
ctattcggaataggatgacatt

SEQ ID NO: 64367 - DNA, 22 bp, synthetic construct
  misc_feature 1..22: note = chemically synthesized
  source 1..22: mol_type = other DNA
tattcggaataggatgacattt

SEQ ID NO: 64368 - DNA, 22 bp, synthetic construct
  misc_feature 1..22: note = chemically synthesized
  source 1..22: mol_type = other DNA
ttcggaataggatgacatttgg

SEQ ID NO: 64369 - DNA, 22 bp, synthetic construct
  misc_feature 1..22: note = chemically synthesized
  source 1..22: mol_type = other DNA
ggaataggatgacatttggtag

SEQ ID NO: 64370 - DNA, 22 bp, synthetic construct
  misc_feature 1..22: note = chemically synthesized
  source 1..22: mol_type = other DNA
ggtagctgagccaaacagatag

SEQ ID NO: 64371 - DNA, 22 bp, synthetic construct
  misc_feature 1..22: note = chemically synthesized
  source 1..22: mol_type = other DNA
gtagctgagccaaacagatagc

SEQ ID NO: 64372 - DNA, 22 bp, synthetic construct
  misc_feature 1..22: note = chemically synthesized
  source 1..22: mol_type = other DNA
agccaaacagatagctgggata

SEQ ID NO: 64373 - DNA, 22 bp, synthetic construct
  misc_feature 1..22: note = chemically synthesized
  source 1..22: mol_type = other DNA
ggatatagggtttggagttgaa

SEQ ID NO: 64374 - DNA, 22 bp, synthetic construct
  misc_feature 1..22: note = chemically synthesized
  source 1..22: mol_type = other DNA
ggagttgaactctccagggaat

SEQ ID NO: 64375 - DNA, 22 bp, synthetic construct
  misc_feature 1..22: note = chemically synthesized
  source 1..22: mol_type = other DNA
gagttgaactctccagggaatg

SEQ ID NO: 64376 - DNA, 22 bp, synthetic construct
  misc_feature 1..22: note = chemically synthesized
  source 1..22: mol_type = other DNA
aactctccagggaatggggtgg

SEQ ID NO: 64377 - DNA, 22 bp, synthetic construct
  misc_feature 1..22: note = chemically synthesized
  source 1..22: mol_type = other DNA
tccagggaatggggtgggaggg

SEQ ID NO: 64378 - DNA, 22 bp, synthetic construct
  misc_feature 1..22: note = chemically synthesized
  source 1..22: mol_type = other DNA
cagggaatggggtgggaggggg

SEQ ID NO: 64379 - DNA, 22 bp, synthetic construct
  misc_feature 1..22: note = chemically synthesized
  source 1..22: mol_type = other DNA
gaggatgacaaaatgagggctc

SEQ ID NO: 64380 - DNA, 22 bp, synthetic construct
  misc_feature 1..22: note = chemically synthesized
  source 1..22: mol_type = other DNA
cctggactcaaactcaaaacct

SEQ ID NO: 64381 - DNA, 22 bp, synthetic construct
  misc_feature 1..22: note = chemically synthesized
  source 1..22: mol_type = other DNA
gactcaaactcaaaaccttttc

SEQ ID NO: 64382 - DNA, 22 bp, synthetic construct
  misc_feature 1..22: note = chemically synthesized
  source 1..22: mol_type = other DNA
aaactcaaaaccttttctgtgt

SEQ ID NO: 64383 - DNA, 22 bp, synthetic construct
  misc_feature 1..22: note = chemically synthesized
  source 1..22: mol_type = other DNA
aaaaccttttctgtgttctcga

SEQ ID NO: 64384 - DNA, 22 bp, synthetic construct
  misc_feature 1..22: note = chemically synthesized
  source 1..22: mol_type = other DNA
ttctgtgttctcgaaatgcctt

SEQ ID NO: 64385 - DNA, 22 bp, synthetic construct
  misc_feature 1..22: note = chemically synthesized
  source 1..22: mol_type = other DNA
tctgtgttctcgaaatgcctta

SEQ ID NO: 64386 - DNA, 22 bp, synthetic construct
  misc_feature 1..22: note = chemically synthesized
  source 1..22: mol_type = other DNA
ctgtgttctcgaaatgccttag

SEQ ID NO: 64387 - DNA, 22 bp, synthetic construct
  misc_feature 1..22: note = chemically synthesized
  source 1..22: mol_type = other DNA
tgtgttctcgaaatgccttaga

SEQ ID NO: 64388 - DNA, 22 bp, synthetic construct
  misc_feature 1..22: note = chemically synthesized
  source 1..22: mol_type = other DNA
tgttctcgaaatgccttagatg

SEQ ID NO: 64389 - DNA, 22 bp, synthetic construct
  misc_feature 1..22: note = chemically synthesized
  source 1..22: mol_type = other DNA
tcgaaatgccttagatgtttac

SEQ ID NO: 64390 - DNA, 22 bp, synthetic construct
  misc_feature 1..22: note = chemically synthesized
  source 1..22: mol_type = other DNA
gaaatgccttagatgtttacct

SEQ ID NO: 64391 - DNA, 22 bp, synthetic construct
  misc_feature 1..22: note = chemically synthesized
  source 1..22: mol_type = other DNA
agatgtttacctaagagaaatg

SEQ ID NO: 64392 - DNA, 22 bp, synthetic construct
  misc_feature 1..22: note = chemically synthesized
  source 1..22: mol_type = other DNA
gatgtttacctaagagaaatgt

SEQ ID NO: 64393 - DNA, 22 bp, synthetic construct
  misc_feature 1..22: note = chemically synthesized
  source 1..22: mol_type = other DNA
acctaagagaaatgtagacata

SEQ ID NO: 64394 - DNA, 22 bp, synthetic construct
  misc_feature 1..22: note = chemically synthesized
  source 1..22: mol_type = other DNA
cctaagagaaatgtagacatac

SEQ ID NO: 64395 - DNA, 22 bp, synthetic construct
  misc_feature 1..22: note = chemically synthesized
  source 1..22: mol_type = other DNA
agagaaatgtagacatacattc

SEQ ID NO: 64396 - DNA, 22 bp, synthetic construct
  misc_feature 1..22: note = chemically synthesized
  source 1..22: mol_type = other DNA
ctataaacacatctacacagtg

SEQ ID NO: 64397 - DNA, 22 bp, synthetic construct
  misc_feature 1..22: note = chemically synthesized
  source 1..22: mol_type = other DNA
taaacacatctacacagtgtcc

SEQ ID NO: 64398 - DNA, 22 bp, synthetic construct
  misc_feature 1..22: note = chemically synthesized
  source 1..22: mol_type = other DNA
cacagtgtccattgtagcactg

SEQ ID NO: 64399 - DNA, 22 bp, synthetic construct
  misc_feature 1..22: note = chemically synthesized
  source 1..22: mol_type = other DNA
tagcactgttcatagtggtcaa

SEQ ID NO: 64400 - DNA, 22 bp, synthetic construct
  misc_feature 1..22: note = chemically synthesized
  source 1..22: mol_type = other DNA
ttcatagtggtcaaaaagtggt

SEQ ID NO: 64401 - DNA, 22 bp, synthetic construct
  misc_feature 1..22: note = chemically synthesized
  source 1..22: mol_type = other DNA
atagtggtcaaaaagtggtcac

SEQ ID NO: 64402 - DNA, 22 bp, synthetic construct
  misc_feature 1..22: note = chemically synthesized
  source 1..22: mol_type = other DNA
aatggataaacgccctatggtg

SEQ ID NO: 64403 - DNA, 22 bp, synthetic construct
  misc_feature 1..22: note = chemically synthesized
  source 1..22: mol_type = other DNA
tggtggaatacaactcaacagt

SEQ ID NO: 64404 - DNA, 22 bp, synthetic construct
  misc_feature 1..22: note = chemically synthesized
  source 1..22: mol_type = other DNA
aacagtagaagaatgaaagagt

SEQ ID NO: 64405 - DNA, 22 bp, synthetic construct
  misc_feature 1..22: note = chemically synthesized
  source 1..22: mol_type = other DNA
cacaccatggatgaatcccaga

SEQ ID NO: 64406 - DNA, 22 bp, synthetic construct
  misc_feature 1..22: note = chemically synthesized
  source 1..22: mol_type = other DNA
tgctctgtggaagaaattaaac

SEQ ID NO: 64407 - DNA, 22 bp, synthetic construct
  misc_feature 1..22: note = chemically synthesized
  source 1..22: mol_type = other DNA
ctctgtggaagaaattaaacac

SEQ ID NO: 64408 - DNA, 22 bp, synthetic construct
  misc_feature 1..22: note = chemically synthesized
  source 1..22: mol_type = other DNA
tgtggaagaaattaaacacaaa

SEQ ID NO: 64409 - DNA, 22 bp, synthetic construct
  misc_feature 1..22: note = chemically synthesized
  source 1..22: mol_type = other DNA
tggaagaaattaaacacaaaag

SEQ ID NO: 64410 - DNA, 22 bp, synthetic construct
  misc_feature 1..22: note = chemically synthesized
  source 1..22: mol_type = other DNA
aacacaaaagacgatatcctgt

SEQ ID NO: 64411 - DNA, 22 bp, synthetic construct
  misc_feature 1..22: note = chemically synthesized
  source 1..22: mol_type = other DNA
tatgagtccatttgtaacaaat

SEQ ID NO: 64412 - DNA, 22 bp, synthetic construct
  misc_feature 1..22: note = chemically synthesized
  source 1..22: mol_type = other DNA
gtaacaaattctagaattctca

SEQ ID NO: 64413 - DNA, 22 bp, synthetic construct
  misc_feature 1..22: note = chemically synthesized
  source 1..22: mol_type = other DNA
taacaaattctagaattctcaa

SEQ ID NO: 64414 - DNA, 22 bp, synthetic construct
  misc_feature 1..22: note = chemically synthesized
  source 1..22: mol_type = other DNA
tagaattctcaacactgtggtg

SEQ ID NO: 64415 - DNA, 22 bp, synthetic construct
  misc_feature 1..22: note = chemically synthesized
  source 1..22: mol_type = other DNA
gaattctcaacactgtggtggt

SEQ ID NO: 64416 - DNA, 22 bp, synthetic construct
  misc_feature 1..22: note = chemically synthesized
  source 1..22: mol_type = other DNA
tcaacactgtggtggtaggtgg

SEQ ID NO: 64417 - DNA, 22 bp, synthetic construct
  misc_feature 1..22: note = chemically synthesized
  source 1..22: mol_type = other DNA
aacactgtggtggtaggtgggg

SEQ ID NO: 64418 - DNA, 22 bp, synthetic construct
  misc_feature 1..22: note = chemically synthesized
  source 1..22: mol_type = other DNA
tggtggtaggtgggggttcagt

SEQ ID NO: 64419 - DNA, 22 bp, synthetic construct
  misc_feature 1..22: note = chemically synthesized
  source 1..22: mol_type = other DNA
agtggttagaaggaaggggtca

SEQ ID NO: 64420 - DNA, 22 bp, synthetic construct
  misc_feature 1..22: note = chemically synthesized
  source 1..22: mol_type = other DNA
gaaggaaggggtcagagggtta

SEQ ID NO: 64421 - DNA, 22 bp, synthetic construct
  misc_feature 1..22: note = chemically synthesized
  source 1..22: mol_type = other DNA
gggaaggggattgacagcaaag

SEQ ID NO: 64422 - DNA, 22 bp, synthetic construct
  misc_feature 1..22: note = chemically synthesized
  source 1..22: mol_type = other DNA
acagcaaaggggcatgaggggg

SEQ ID NO: 64423 - DNA, 22 bp, synthetic construct
  misc_feature 1..22: note = chemically synthesized
  source 1..22: mol_type = other DNA
tctagactggtggacgtgttct

SEQ ID NO: 64424 - DNA, 22 bp, synthetic construct
  misc_feature 1..22: note = chemically synthesized
  source 1..22: mol_type = other DNA
ctagactggtggacgtgttctg

SEQ ID NO: 64425 - DNA, 22 bp, synthetic construct
  misc_feature 1..22: note = chemically synthesized
  source 1..22: mol_type = other DNA
tagactggtggacgtgttctgt

SEQ ID NO: 64426 - DNA, 22 bp, synthetic construct
  misc_feature 1..22: note = chemically synthesized
  source 1..22: mol_type = other DNA
gactggtggacgtgttctgtat

SEQ ID NO: 64427 - DNA, 22 bp, synthetic construct
  misc_feature 1..22: note = chemically synthesized
  source 1..22: mol_type = other DNA
gtggacgtgttctgtatcttga

SEQ ID NO: 64428 - DNA, 22 bp, synthetic construct
  misc_feature 1..22: note = chemically synthesized
  source 1..22: mol_type = other DNA
tgtatcttgattttggtggagg

SEQ ID NO: 64429 - DNA, 22 bp, synthetic construct
  misc_feature 1..22: note = chemically synthesized
  source 1..22: mol_type = other DNA
tatcttgattttggtggaggcc

SEQ ID NO: 64430 - DNA, 22 bp, synthetic construct
  misc_feature 1..22: note = chemically synthesized
  source 1..22: mol_type = other DNA
gattttggtggaggccacacag

SEQ ID NO: 64431 - DNA, 22 bp, synthetic construct
  misc_feature 1..22: note = chemically synthesized
  source 1..22: mol_type = other DNA
attttggtggaggccacacagc

SEQ ID NO: 64432 - DNA, 22 bp, synthetic construct
  misc_feature 1..22: note = chemically synthesized
  source 1..22: mol_type = other DNA
tggtggaggccacacagctgta

SEQ ID NO: 64433 - DNA, 22 bp, synthetic construct
  misc_feature 1..22: note = chemically synthesized
  source 1..22: mol_type = other DNA
ggtggaggccacacagctgtat

SEQ ID NO: 64434 - DNA, 22 bp, synthetic construct
  misc_feature 1..22: note = chemically synthesized
  source 1..22: mol_type = other DNA
gtggaggccacacagctgtata

SEQ ID NO: 64435 - DNA, 22 bp, synthetic construct
  misc_feature 1..22: note = chemically synthesized
  source 1..22: mol_type = other DNA
tatacaactggcaaattgaatc

SEQ ID NO: 64436 - DNA, 22 bp, synthetic construct
  misc_feature 1..22: note = chemically synthesized
  source 1..22: mol_type = other DNA
gcaaattgaatccaactgtaca

SEQ ID NO: 64437 - DNA, 22 bp, synthetic construct
  misc_feature 1..22: note = chemically synthesized
  source 1..22: mol_type = other DNA
aatccaactgtacacttaaaat

SEQ ID NO: 64438 - DNA, 22 bp, synthetic construct
  misc_feature 1..22: note = chemically synthesized
  source 1..22: mol_type = other DNA
tacacttaaaatgaatgacttt

SEQ ID NO: 64439 - DNA, 22 bp, synthetic construct
  misc_feature 1..22: note = chemically synthesized
  source 1..22: mol_type = other DNA
aaaatgaatgacttttgttgta

SEQ ID NO: 64440 - DNA, 22 bp, synthetic construct
  misc_feature 1..22: note = chemically synthesized
  source 1..22: mol_type = other DNA
aaatgaatgacttttgttgtat

SEQ ID NO: 64441 - DNA, 22 bp, synthetic construct
  misc_feature 1..22: note = chemically synthesized
  source 1..22: mol_type = other DNA
ttgttgtatgtaaagtatacct

SEQ ID NO: 64442 - DNA, 22 bp, synthetic construct
  misc_feature 1..22: note = chemically synthesized
  source 1..22: mol_type = other DNA
tgttgtatgtaaagtatacctt

SEQ ID NO: 64443 - DNA, 22 bp, synthetic construct
  misc_feature 1..22: note = chemically synthesized
  source 1..22: mol_type = other DNA
gttgtatgtaaagtatacctta

SEQ ID NO: 64444 - DNA, 22 bp, synthetic construct
  misc_feature 1..22: note = chemically synthesized
  source 1..22: mol_type = other DNA
ttgtatgtaaagtataccttaa

SEQ ID NO: 64445 - DNA, 22 bp, synthetic construct
  misc_feature 1..22: note = chemically synthesized
  source 1..22: mol_type = other DNA
tatgtaaagtataccttaataa

SEQ ID NO: 64446 - DNA, 22 bp, synthetic construct
  misc_feature 1..22: note = chemically synthesized
  source 1..22: mol_type = other DNA
aataaagctaaagcgaaacaaa

SEQ ID NO: 64447 - DNA, 22 bp, synthetic construct
  misc_feature 1..22: note = chemically synthesized
  source 1..22: mol_type = other DNA
ataaagctaaagcgaaacaaaa

SEQ ID NO: 64448 - DNA, 22 bp, synthetic construct
  misc_feature 1..22: note = chemically synthesized
  source 1..22: mol_type = other DNA
aagcgaaacaaaacaaaacacc

SEQ ID NO: 64449 - DNA, 22 bp, synthetic construct
  misc_feature 1..22: note = chemically synthesized
  source 1..22: mol_type = other DNA
gagtggaaccaagtctgtctgt

SEQ ID NO: 64450 - DNA, 22 bp, synthetic construct
  misc_feature 1..22: note = chemically synthesized
  source 1..22: mol_type = other DNA
tctgtaacctttaactgtttgg

SEQ ID NO: 64451 - DNA, 22 bp, synthetic construct
  misc_feature 1..22: note = chemically synthesized
  source 1..22: mol_type = other DNA
taacctttaactgtttgggtct

SEQ ID NO: 64452 - DNA, 22 bp, synthetic construct
  misc_feature 1..22: note = chemically synthesized
  source 1..22: mol_type = other DNA
taactgtttgggtctcctcaag

SEQ ID NO: 64453 - DNA, 22 bp, synthetic construct
  misc_feature 1..22: note = chemically synthesized
  source 1..22: mol_type = other DNA
aactgtttgggtctcctcaaga

SEQ ID NO: 64454 - DNA, 22 bp, synthetic construct
  misc_feature 1..22: note = chemically synthesized
  source 1..22: mol_type = other DNA
actgtttgggtctcctcaagac

SEQ ID NO: 64455 - DNA, 22 bp, synthetic construct
  misc_feature 1..22: note = chemically synthesized
  source 1..22: mol_type = other DNA
tttgggtctcctcaagactcta

SEQ ID NO: 64456 - DNA, 22 bp, synthetic construct
  misc_feature 1..22: note = chemically synthesized
  source 1..22: mol_type = other DNA
gggtctcctcaagactctagcc

SEQ ID NO: 64457 - DNA, 22 bp, synthetic construct
  misc_feature 1..22: note = chemically synthesized
  source 1..22: mol_type = other DNA
ggtctcctcaagactctagccg

SEQ ID NO: 64458 - DNA, 22 bp, synthetic construct
  misc_feature 1..22: note = chemically synthesized
  source 1..22: mol_type = other DNA
ctcaagactctagccgtctttc

SEQ ID NO: 64459 - DNA, 22 bp, synthetic construct
  misc_feature 1..22: note = chemically synthesized
  source 1..22: mol_type = other DNA
aagactctagccgtctttcagg

SEQ ID NO: 64460 - DNA, 22 bp, synthetic construct
  misc_feature 1..22: note = chemically synthesized
  source 1..22: mol_type = other DNA
tagccgtctttcagggtagcac

SEQ ID NO: 64461 - DNA, 22 bp, synthetic construct
  misc_feature 1..22: note = chemically synthesized
  source 1..22: mol_type = other DNA
gccgtctttcagggtagcacca

SEQ ID NO: 64462 - DNA, 22 bp, synthetic construct
  misc_feature 1..22: note = chemically synthesized
  source 1..22: mol_type = other DNA
tcagggtagcaccaaagtacat

SEQ ID NO: 64463 - DNA, 22 bp, synthetic construct
  misc_feature 1..22: note = chemically synthesized
  source 1..22: mol_type = other DNA
cagggtagcaccaaagtacatt

SEQ ID NO: 64464 - DNA, 22 bp, synthetic construct
  misc_feature 1..22: note = chemically synthesized
  source 1..22: mol_type = other DNA
agggtagcaccaaagtacattt

SEQ ID NO: 64465 - DNA, 22 bp, synthetic construct
  misc_feature 1..22: note = chemically synthesized
  source 1..22: mol_type = other DNA
cagggaaatgagaatgcccttt

SEQ ID NO: 64466 - DNA, 22 bp, synthetic construct
  misc_feature 1..22: note = chemically synthesized
  source 1..22: mol_type = other DNA
agggaaatgagaatgccctttg

SEQ ID NO: 64467 - DNA, 22 bp, synthetic construct
  misc_feature 1..22: note = chemically synthesized
  source 1..22: mol_type = other DNA
tgtattctgagattttatagaa

SEQ ID NO: 64468 - DNA, 22 bp, synthetic construct
  misc_feature 1..22: note = chemically synthesized
  source 1..22: mol_type = other DNA
gtattctgagattttatagaag

SEQ ID NO: 64469 - DNA, 22 bp, synthetic construct
  misc_feature 1..22: note = chemically synthesized
  source 1..22: mol_type = other DNA
tattctgagattttatagaagt

SEQ ID NO: 64470 - DNA, 22 bp, synthetic construct
  misc_feature 1..22: note = chemically synthesized
  source 1..22: mol_type = other DNA
tgagattttatagaagttggta

SEQ ID NO: 64471 - DNA, 22 bp, synthetic construct
  misc_feature 1..22: note = chemically synthesized
  source 1..22: mol_type = other DNA
agattttatagaagttggtaat

SEQ ID NO: 64472 - DNA, 22 bp, synthetic construct
  misc_feature 1..22: note = chemically synthesized
  source 1..22: mol_type = other DNA
tatagaagttggtaatgacaga

SEQ ID NO: 64473 - DNA, 22 bp, synthetic construct
  misc_feature 1..22: note = chemically synthesized
  source 1..22: mol_type = other DNA
atagaagttggtaatgacagag

SEQ ID NO: 64474 - DNA, 22 bp, synthetic construct
  misc_feature 1..22: note = chemically synthesized
  source 1..22: mol_type = other DNA
tagaagttggtaatgacagaga

SEQ ID NO: 64475 - DNA, 22 bp, synthetic construct
  misc_feature 1..22: note = chemically synthesized
  source 1..22: mol_type = other DNA
gtaatgacagagagagagagag

SEQ ID NO: 64476 - DNA, 22 bp, synthetic construct
  misc_feature 1..22: note = chemically synthesized
  source 1..22: mol_type = other DNA
agatggggttatccaccataag

SEQ ID NO: 64477 - DNA, 22 bp, synthetic construct
  misc_feature 1..22: note = chemically synthesized
  source 1..22: mol_type = other DNA
tccaccataagcagagcatttg

SEQ ID NO: 64478 - DNA, 22 bp, synthetic construct
  misc_feature 1..22: note = chemically synthesized
  source 1..22: mol_type = other DNA
gggtctgagaagcgcatgagta

SEQ ID NO: 64479 - DNA, 22 bp, synthetic construct
  misc_feature 1..22: note = chemically synthesized
  source 1..22: mol_type = other DNA
ggtctgagaagcgcatgagtac

SEQ ID NO: 64480 - DNA, 22 bp, synthetic construct
  misc_feature 1..22: note = chemically synthesized
  source 1..22: mol_type = other DNA
agaagcgcatgagtactggtga

SEQ ID NO: 64481 - DNA, 22 bp, synthetic construct
  misc_feature 1..22: note = chemically synthesized
  source 1..22: mol_type = other DNA
gtgagtatgtgaggaaggagag

SEQ ID NO: 64482 - DNA, 22 bp, synthetic construct
  misc_feature 1..22: note = chemically synthesized
  source 1..22: mol_type = other DNA
ttttcctagaattccagcaggc

SEQ ID NO: 64483 - DNA, 22 bp, synthetic construct
  misc_feature 1..22: note = chemically synthesized
  source 1..22: mol_type = other DNA
tcctagaattccagcaggcttc

SEQ ID NO: 64484 - DNA, 22 bp, synthetic construct
  misc_feature 1..22: note = chemically synthesized
  source 1..22: mol_type = other DNA
cctagaattccagcaggcttca

SEQ ID NO: 64485 - DNA, 22 bp, synthetic construct
  misc_feature 1..22: note = chemically synthesized
  source 1..22: mol_type = other DNA
ctagaattccagcaggcttcaa

SEQ ID NO: 64486 - DNA, 22 bp, synthetic construct
  misc_feature 1..22: note = chemically synthesized
  source 1..22: mol_type = other DNA
gaattccagcaggcttcaaaaa

SEQ ID NO: 64487 - DNA, 22 bp, synthetic construct
  misc_feature 1..22: note = chemically synthesized
  source 1..22: mol_type = other DNA
cagcaggcttcaaaaagtaaaa

SEQ ID NO: 64488 - DNA, 22 bp, synthetic construct
  misc_feature 1..22: note = chemically synthesized
  source 1..22: mol_type = other DNA
caaaaagtaaaaaggggaggga

SEQ ID NO: 64489 - DNA, 22 bp, synthetic construct
  misc_feature 1..22: note = chemically synthesized
  source 1..22: mol_type = other DNA
aaaaagtaaaaaggggagggag

SEQ ID NO: 64490 - DNA, 22 bp, synthetic construct
  misc_feature 1..22: note = chemically synthesized
  source 1..22: mol_type = other DNA
agtttttttcttccctagaaat

SEQ ID NO: 64491 - DNA, 22 bp, synthetic construct
  misc_feature 1..22: note = chemically synthesized
  source 1..22: mol_type = other DNA
ttttcttccctagaaatacatt

SEQ ID NO: 64492 - DNA, 22 bp, synthetic construct
  misc_feature 1..22: note = chemically synthesized
  source 1..22: mol_type = other DNA
tttcttccctagaaatacattt

SEQ ID NO: 64493 - DNA, 22 bp, synthetic construct
  misc_feature 1..22: note = chemically synthesized
  source 1..22: mol_type = other DNA
ttcttccctagaaatacattta

SEQ ID NO: 64494 - DNA, 22 bp, synthetic construct
  misc_feature 1..22: note = chemically synthesized
  source 1..22: mol_type = other DNA
tcttccctagaaatacatttat

SEQ ID NO: 64495 - DNA, 22 bp, synthetic construct
  misc_feature 1..22: note = chemically synthesized
  source 1..22: mol_type = other DNA
cttccctagaaatacatttatt

SEQ ID NO: 64496 - DNA, 22 bp, synthetic construct
  misc_feature 1..22: note = chemically synthesized
  source 1..22: mol_type = other DNA
ttccctagaaatacatttattc

SEQ ID NO: 64497 - DNA, 22 bp, synthetic construct
  misc_feature 1..22: note = chemically synthesized
  source 1..22: mol_type = other DNA
ccctagaaatacatttattcta

SEQ ID NO: 64498 - DNA, 22 bp, synthetic construct
  misc_feature 1..22: note = chemically synthesized
  source 1..22: mol_type = other DNA
cctagaaatacatttattctaa

SEQ ID NO: 64499 - DNA, 22 bp, synthetic construct
  misc_feature 1..22: note = chemically synthesized
  source 1..22: mol_type = other DNA
gaaatacatttattctaaacat

SEQ ID NO: 64500 - DNA, 22 bp, synthetic construct
  misc_feature 1..22: note = chemically synthesized
  source 1..22: mol_type = other DNA
attctaaacattagcccaatta

SEQ ID NO: 64501 - DNA, 22 bp, synthetic construct
  misc_feature 1..22: note = chemically synthesized
  source 1..22: mol_type = other DNA
ttctaaacattagcccaattag

SEQ ID NO: 64502 - DNA, 22 bp, synthetic construct
  misc_feature 1..22: note = chemically synthesized
  source 1..22: mol_type = other DNA
taaacattagcccaattagttg

SEQ ID NO: 64503 - DNA, 22 bp, synthetic construct
  misc_feature 1..22: note = chemically synthesized
  source 1..22: mol_type = other DNA
aacattagcccaattagttgtc

SEQ ID NO: 64504 - DNA, 22 bp, synthetic construct
  misc_feature 1..22: note = chemically synthesized
  source 1..22: mol_type = other DNA
gcccaattagttgtcttttgtt

SEQ ID NO: 64505 - DNA, 22 bp, synthetic construct
  misc_feature 1..22: note = chemically synthesized
  source 1..22: mol_type = other DNA
gttgtcttttgtttgtttgttt

SEQ ID NO: 64506 - DNA, 22 bp, synthetic construct
  misc_feature 1..22: note = chemically synthesized
  source 1..22: mol_type = other DNA
tcttttgtttgtttgtttgttt

SEQ ID NO: 64507 - DNA, 22 bp, synthetic construct
  misc_feature 1..22: note = chemically synthesized
  source 1..22: mol_type = other DNA
ttgtttgtttgtttgtttgttt

SEQ ID NO: 64508 - DNA, 22 bp, synthetic construct
  misc_feature 1..22: note = chemically synthesized
  source 1..22: mol_type = other DNA
tgtttgtttgtttgtttgtttt

SEQ ID NO: 64509 - DNA, 22 bp, synthetic construct
  misc_feature 1..22: note = chemically synthesized
  source 1..22: mol_type = other DNA
gtttgtttgtttgtttgttttt

SEQ ID NO: 64510 - DNA, 22 bp, synthetic construct
  misc_feature 1..22: note = chemically synthesized
  source 1..22: mol_type = other DNA
tttgtttgtttgtttgtttttg

SEQ ID NO: 64511 - DNA, 22 bp, synthetic construct
  misc_feature 1..22: note = chemically synthesized
  source 1..22: mol_type = other DNA
gtttgtttgtttgtttttgaga

SEQ ID NO: 64512 - DNA, 22 bp, synthetic construct
  misc_feature 1..22: note = chemically synthesized
  source 1..22: mol_type = other DNA
tttgtttgtttgtttttgagac

SEQ ID NO: 64513 - DNA, 22 bp, synthetic construct
  misc_feature 1..22: note = chemically synthesized
  source 1..22: mol_type = other DNA
gtttgtttgtttttgagacagg

SEQ ID NO: 64514 - DNA, 22 bp, synthetic construct
  misc_feature 1..22: note = chemically synthesized
  source 1..22: mol_type = other DNA
tttgtttgtttttgagacaggg

SEQ ID NO: 64515 - DNA, 22 bp, synthetic construct
  misc_feature 1..22: note = chemically synthesized
  source 1..22: mol_type = other DNA
gtttgtttttgagacagggtct

SEQ ID NO: 64516 - DNA, 22 bp, synthetic construct
  misc_feature 1..22: note = chemically synthesized
  source 1..22: mol_type = other DNA
tttgtttttgagacagggtctc

SEQ ID NO: 64517 - DNA, 22 bp, synthetic construct
  misc_feature 1..22: note = chemically synthesized
  source 1..22: mol_type = other DNA
gtttttgagacagggtctcgct

SEQ ID NO: 64518 - DNA, 22 bp, synthetic construct
  misc_feature 1..22: note = chemically synthesized
  source 1..22: mol_type = other DNA
tttttgagacagggtctcgctg

SEQ ID NO: 64519 - DNA, 22 bp, synthetic construct
  misc_feature 1..22: note = chemically synthesized
  source 1..22: mol_type = other DNA
ttgagacagggtctcgctgtgt

SEQ ID NO: 64520 - DNA, 22 bp, synthetic construct
  misc_feature 1..22: note = chemically synthesized
  source 1..22: mol_type = other DNA
tgagacagggtctcgctgtgtt

SEQ ID NO: 64521 - DNA, 22 bp, synthetic construct
  misc_feature 1..22: note = chemically synthesized
  source 1..22: mol_type = other DNA
gagacagggtctcgctgtgttg

SEQ ID NO: 64522 - DNA, 22 bp, synthetic construct
  misc_feature 1..22: note = chemically synthesized
  source 1..22: mol_type = other DNA
agacagggtctcgctgtgttgc

SEQ ID NO: 64523 - DNA, 22 bp, synthetic construct
  misc_feature 1..22: note = chemically synthesized
  source 1..22: mol_type = other DNA
gctgtgttgcctaggctagagt

SEQ ID NO: 64524 - DNA, 22 bp, synthetic construct
  misc_feature 1..22: note = chemically synthesized
  source 1..22: mol_type = other DNA
tgttgcctaggctagagtgtag

SEQ ID NO: 64525 - DNA, 22 bp, synthetic construct
  misc_feature 1..22: note = chemically synthesized
  source 1..22: mol_type = other DNA
cctaggctagagtgtagtggca

SEQ ID NO: 64526 - DNA, 22 bp, synthetic construct
  misc_feature 1..22: note = chemically synthesized
  source 1..22: mol_type = other DNA
ggctagagtgtagtggcatgtt

SEQ ID NO: 64527 - DNA, 22 bp, synthetic construct
  misc_feature 1..22: note = chemically synthesized
  source 1..22: mol_type = other DNA
gagtgtagtggcatgttcatag

SEQ ID NO: 64528 - DNA, 22 bp, synthetic construct
  misc_feature 1..22: note = chemically synthesized
  source 1..22: mol_type = other DNA
atagctcactgcagccttgatc

SEQ ID NO: 64529 - DNA, 22 bp, synthetic construct
  misc_feature 1..22: note = chemically synthesized
  source 1..22: mol_type = other DNA
actgcagccttgatctcctagg

SEQ ID NO: 64530 - DNA, 22 bp, synthetic construct
  misc_feature 1..22: note = chemically synthesized
  source 1..22: mol_type = other DNA
cagccttgatctcctaggctca

SEQ ID NO: 64531 - DNA, 22 bp, synthetic construct
  misc_feature 1..22: note = chemically synthesized
  source 1..22: mol_type = other DNA
gatctcctaggctcaagccatc

SEQ ID NO: 64532 - DNA, 22 bp, synthetic construct
  misc_feature 1..22: note = chemically synthesized
  source 1..22: mol_type = other DNA
atctcctaggctcaagccatcc

SEQ ID NO: 64533 - DNA, 22 bp, synthetic construct
  misc_feature 1..22: note = chemically synthesized
  source 1..22: mol_type = other DNA
ctaggctcaagccatcctgtca

SEQ ID NO: 64534 - DNA, 22 bp, synthetic construct
  misc_feature 1..22: note = chemically synthesized
  source 1..22: mol_type = other DNA
ggctcaagccatcctgtcacct

SEQ ID NO: 64535 - DNA, 22 bp, synthetic construct
  misc_feature 1..22: note = chemically synthesized
  source 1..22: mol_type = other DNA
aagccatcctgtcacctcagcc

SEQ ID NO: 64536 - DNA, 22 bp, synthetic construct
  misc_feature 1..22: note = chemically synthesized
  source 1..22: mol_type = other DNA
tcacctcagcctcctgagtagc

SEQ ID NO: 64537 - DNA, 22 bp, synthetic construct
  misc_feature 1..22: note = chemically synthesized
  source 1..22: mol_type = other DNA
agcctcctgagtagctgggacg

SEQ ID NO: 64538 - DNA, 22 bp, synthetic construct
  misc_feature 1..22: note = chemically synthesized
  source 1..22: mol_type = other DNA
ctgagtagctgggacgacaggt

SEQ ID NO: 64539 - DNA, 22 bp, synthetic construct
  misc_feature 1..22: note = chemically synthesized
  source 1..22: mol_type = other DNA
agtagctgggacgacaggtgca

SEQ ID NO: 64540 - DNA, 22 bp, synthetic construct
  misc_feature 1..22: note = chemically synthesized
  source 1..22: mol_type = other DNA
ggacgacaggtgcatgccacca

SEQ ID NO: 64541 - DNA, 22 bp, synthetic construct
  misc_feature 1..22: note = chemically synthesized
  source 1..22: mol_type = other DNA
gctaattttgtagagatggagt

SEQ ID NO: 64542 - DNA, 22 bp, synthetic construct
  misc_feature 1..22: note = chemically synthesized
  source 1..22: mol_type = other DNA
attttgtagagatggagtttct

SEQ ID NO: 64543 - DNA, 22 bp, synthetic construct
  misc_feature 1..22: note = chemically synthesized
  source 1..22: mol_type = other DNA
tgtagagatggagtttctccct

SEQ ID NO: 64544 - DNA, 22 bp, synthetic construct
  misc_feature 1..22: note = chemically synthesized
  source 1..22: mol_type = other DNA
gtagagatggagtttctccctg

SEQ ID NO: 64545 - DNA, 22 bp, synthetic construct
  misc_feature 1..22: note = chemically synthesized
  source 1..22: mol_type = other DNA
tagagatggagtttctccctgt

SEQ ID NO: 64546 - DNA, 22 bp, synthetic construct
  misc_feature 1..22: note = chemically synthesized
  source 1..22: mol_type = other DNA
ctccctgttgcccaggctggtc

SEQ ID NO: 64547 - DNA, 22 bp, synthetic construct
  misc_feature 1..22: note = chemically synthesized
  source 1..22: mol_type = other DNA
tccctgttgcccaggctggtct

SEQ ID NO: 64548 - DNA, 22 bp, synthetic construct
  misc_feature 1..22: note = chemically synthesized
  source 1..22: mol_type = other DNA
cctgttgcccaggctggtcttg

SEQ ID NO: 64549 - DNA, 22 bp, synthetic construct
  misc_feature 1..22: note = chemically synthesized
  source 1..22: mol_type = other DNA
ttgcccaggctggtcttgaact

SEQ ID NO: 64550 - DNA, 22 bp, synthetic construct
  misc_feature 1..22: note = chemically synthesized
  source 1..22: mol_type = other DNA
cccaggctggtcttgaactcct

SEQ ID NO: 64551 - DNA, 22 bp, synthetic construct
  misc_feature 1..22: note = chemically synthesized
  source 1..22: mol_type = other DNA
gtcttgaactcctgggctccag

SEQ ID NO: 64552 - DNA, 22 bp, synthetic construct
  misc_feature 1..22: note = chemically synthesized
  source 1..22: mol_type = other DNA
gaactcctgggctccagtgatc

SEQ ID NO: 64553 - DNA, 22 bp, synthetic construct
  misc_feature 1..22: note = chemically synthesized
  source 1..22: mol_type = other DNA
aactcctgggctccagtgatcc

SEQ ID NO: 64554 - DNA, 22 bp, synthetic construct
  misc_feature 1..22: note = chemically synthesized
  source 1..22: mol_type = other DNA
ctgggctccagtgatcctcctg

SEQ ID NO: 64555 - DNA, 22 bp, synthetic construct
  misc_feature 1..22: note = chemically synthesized
  source 1..22: mol_type = other DNA
ggctccagtgatcctcctgcct

SEQ ID NO: 64556 - DNA, 22 bp, synthetic construct
  misc_feature 1..22: note = chemically synthesized
  source 1..22: mol_type = other DNA
cagtgatcctcctgccttgacc

SEQ ID NO: 64557 - DNA, 22 bp, synthetic construct
  misc_feature 1..22: note = chemically synthesized
  source 1..22: mol_type = other DNA
ctgccttgacctcccaaagtgc

SEQ ID NO: 64558 - DNA, 22 bp, synthetic construct
  misc_feature 1..22: note = chemically synthesized
  source 1..22: mol_type = other DNA
ccttgacctcccaaagtgctgg

SEQ ID NO: 64559 - DNA, 22 bp, synthetic construct
  misc_feature 1..22: note = chemically synthesized
  source 1..22: mol_type = other DNA
gacctcccaaagtgctgggatt

SEQ ID NO: 64560 - DNA, 22 bp, synthetic construct
  misc_feature 1..22: note = chemically synthesized
  source 1..22: mol_type = other DNA
acctcccaaagtgctgggatta

SEQ ID NO: 64561 - DNA, 22 bp, synthetic construct
  misc_feature 1..22: note = chemically synthesized
  source 1..22: mol_type = other DNA
ccaaagtgctgggattacaggc

SEQ ID NO: 64562 - DNA, 22 bp, synthetic construct
  misc_feature 1..22: note = chemically synthesized
  source 1..22: mol_type = other DNA
ggattacaggcgagagccactg

SEQ ID NO: 64563 - DNA, 22 bp, synthetic construct
  misc_feature 1..22: note = chemically synthesized
  source 1..22: mol_type = other DNA
caggcgagagccactgtgcctg

SEQ ID NO: 64564 - DNA, 22 bp, synthetic construct
  misc_feature 1..22: note = chemically synthesized
  source 1..22: mol_type = other DNA
tgcctgtcaccaactcagtctt

SEQ ID NO: 64565 - DNA, 22 bp, synthetic construct
  misc_feature 1..22: note = chemically synthesized
  source 1..22: mol_type = other DNA
tcaccaactcagtcttattcat

SEQ ID NO: 64566 - DNA, 22 bp, synthetic construct
  misc_feature 1..22: note = chemically synthesized
  source 1..22: mol_type = other DNA
agtcttattcatcagtatgtct

SEQ ID NO: 64567 - DNA, 22 bp, synthetic construct
  misc_feature 1..22: note = chemically synthesized
  source 1..22: mol_type = other DNA
attcatcagtatgtcttctcct

SEQ ID NO: 64568 - DNA, 22 bp, synthetic construct
  misc_feature 1..22: note = chemically synthesized
  source 1..22: mol_type = other DNA
ttcatcagtatgtcttctcctt

SEQ ID NO: 64569 - DNA, 22 bp, synthetic construct
  misc_feature 1..22: note = chemically synthesized
  source 1..22: mol_type = other DNA
atcagtatgtcttctccttaag

SEQ ID NO: 64570 - DNA, 22 bp, synthetic construct
  misc_feature 1..22: note = chemically synthesized
  source 1..22: mol_type = other DNA
ctccttaagcggagatgctaac

SEQ ID NO: 64571 - DNA, 22 bp, synthetic construct
  misc_feature 1..22: note = chemically synthesized
  source 1..22: mol_type = other DNA
tccttaagcggagatgctaaca

SEQ ID NO: 64572 - DNA, 22 bp, synthetic construct
  misc_feature 1..22: note = chemically synthesized
  source 1..22: mol_type = other DNA
cttaagcggagatgctaacaat

SEQ ID NO: 64573 - DNA, 22 bp, synthetic construct
  misc_feature 1..22: note = chemically synthesized
  source 1..22: mol_type = other DNA
aagcggagatgctaacaatgta

SEQ ID NO: 64574 - DNA, 22 bp, synthetic construct
  misc_feature 1..22: note = chemically synthesized
  source 1..22: mol_type = other DNA
agcggagatgctaacaatgtag

SEQ ID NO: 64575 - DNA, 22 bp, synthetic construct
  misc_feature 1..22: note = chemically synthesized
  source 1..22: mol_type = other DNA
acaatgtagcatctcctgtgct

SEQ ID NO: 64576 - DNA, 22 bp, synthetic construct
  misc_feature 1..22: note = chemically synthesized
  source 1..22: mol_type = other DNA
ctgtgctgaattcctgtaaagt

SEQ ID NO: 64577 - DNA, 22 bp, synthetic construct
  misc_feature 1..22: note = chemically synthesized
  source 1..22: mol_type = other DNA
tgctgaattcctgtaaagtgag

SEQ ID NO: 64578 - DNA, 22 bp, synthetic construct
  misc_feature 1..22: note = chemically synthesized
  source 1..22: mol_type = other DNA
aattcctgtaaagtgagggttt

SEQ ID NO: 64579 - DNA, 22 bp, synthetic construct
  misc_feature 1..22: note = chemically synthesized
  source 1..22: mol_type = other DNA
ctgtaaagtgagggtttttgtt

SEQ ID NO: 64580 - DNA, 22 bp, synthetic construct
  misc_feature 1..22: note = chemically synthesized
  source 1..22: mol_type = other DNA
taaagtgagggtttttgttttt

SEQ ID NO: 64581 - DNA, 22 bp, synthetic construct
  misc_feature 1..22: note = chemically synthesized
  source 1..22: mol_type = other DNA
ttgtttttcctacatccatctt

SEQ ID NO: 64582 - DNA, 22 bp, synthetic construct
  misc_feature 1..22: note = chemically synthesized
  source 1..22: mol_type = other DNA
tgtttttcctacatccatcttc

SEQ ID NO: 64583 - DNA, 22 bp, synthetic construct
  misc_feature 1..22: note = chemically synthesized
  source 1..22: mol_type = other DNA
gtttttcctacatccatcttcc

SEQ ID NO: 64584 - DNA, 22 bp, synthetic construct
  misc_feature 1..22: note = chemically synthesized
  source 1..22: mol_type = other DNA
tttttcctacatccatcttcct

SEQ ID NO: 64585 - DNA, 22 bp, synthetic construct
  misc_feature 1..22: note = chemically synthesized
  source 1..22: mol_type = other DNA
ttcctacatccatcttcctctc

SEQ ID NO: 64586 - DNA, 22 bp, synthetic construct
  misc_feature 1..22: note = chemically synthesized
  source 1..22: mol_type = other DNA
tcctacatccatcttcctctcc

SEQ ID NO: 64587 - DNA, 22 bp, synthetic construct
  misc_feature 1..22: note = chemically synthesized
  source 1..22: mol_type = other DNA
cctacatccatcttcctctcca

SEQ ID NO: 64588 - DNA, 22 bp, synthetic construct
  misc_feature 1..22: note = chemically synthesized
  source 1..22: mol_type = other DNA
ctacatccatcttcctctccag

SEQ ID NO: 64589 - DNA, 22 bp, synthetic construct
  misc_feature 1..22: note = chemically synthesized
  source 1..22: mol_type = other DNA
catccatcttcctctccagatt

SEQ ID NO: 64590 - DNA, 22 bp, synthetic construct
  misc_feature 1..22: note = chemically synthesized
  source 1..22: mol_type = other DNA
cctctccagattccctctcaat

SEQ ID NO: 64591 - DNA, 22 bp, synthetic construct
  misc_feature 1..22: note = chemically synthesized
  source 1..22: mol_type = other DNA
ctctccagattccctctcaatt

SEQ ID NO: 64592 - DNA, 22 bp, synthetic construct
  misc_feature 1..22: note = chemically synthesized
  source 1..22: mol_type = other DNA
tccagattccctctcaatttcc

SEQ ID NO: 64593 - DNA, 22 bp, synthetic construct
  misc_feature 1..22: note = chemically synthesized
  source 1..22: mol_type = other DNA
cagattccctctcaatttccaa

SEQ ID NO: 64594 - DNA, 22 bp, synthetic construct
  misc_feature 1..22: note = chemically synthesized
  source 1..22: mol_type = other DNA
cctctcaatttccaaggtattt

SEQ ID NO: 64595 - DNA, 22 bp, synthetic construct
  misc_feature 1..22: note = chemically synthesized
  source 1..22: mol_type = other DNA
tcaatttccaaggtatttagcg

SEQ ID NO: 64596 - DNA, 22 bp, synthetic construct
  misc_feature 1..22: note = chemically synthesized
  source 1..22: mol_type = other DNA
aatttccaaggtatttagcgta

SEQ ID NO: 64597 - DNA, 22 bp, synthetic construct
  misc_feature 1..22: note = chemically synthesized
  source 1..22: mol_type = other DNA
ccaaggtatttagcgtaaatgc

SEQ ID NO: 64598 - DNA, 22 bp, synthetic construct
  misc_feature 1..22: note = chemically synthesized
  source 1..22: mol_type = other DNA
caaggtatttagcgtaaatgca

SEQ ID NO: 64599 - DNA, 22 bp, synthetic construct
  misc_feature 1..22: note = chemically synthesized
  source 1..22: mol_type = other DNA
agcgtaaatgcaatatctgaac

SEQ ID NO: 64600 - DNA, 22 bp, synthetic construct
  misc_feature 1..22: note = chemically synthesized
  source 1..22: mol_type = other DNA
gcgtaaatgcaatatctgaact

SEQ ID NO: 64601 - DNA, 22 bp, synthetic construct
  misc_feature 1..22: note = chemically synthesized
  source 1..22: mol_type = other DNA
aacttcatttatttggcagatt

SEQ ID NO: 64602 - DNA, 22 bp, synthetic construct
  misc_feature 1..22: note = chemically synthesized
  source 1..22: mol_type = other DNA
catttatttggcagatttgtgt

SEQ ID NO: 64603 - DNA, 22 bp, synthetic construct
  misc_feature 1..22: note = chemically synthesized
  source 1..22: mol_type = other DNA
atttatttggcagatttgtgtg

SEQ ID NO: 64604 - DNA, 22 bp, synthetic construct
  misc_feature 1..22: note = chemically synthesized
  source 1..22: mol_type = other DNA
atttggcagatttgtgtggact

SEQ ID NO: 64605 - DNA, 22 bp, synthetic construct
  misc_feature 1..22: note = chemically synthesized
  source 1..22: mol_type = other DNA
tttggcagatttgtgtggactg

SEQ ID NO: 64606 - DNA, 22 bp, synthetic construct
  misc_feature 1..22: note = chemically synthesized
  source 1..22: mol_type = other DNA
ggcagatttgtgtggactgcct

SEQ ID NO: 64607 - DNA, 22 bp, synthetic construct
  misc_feature 1..22: note = chemically synthesized
  source 1..22: mol_type = other DNA
gcagatttgtgtggactgcctt

SEQ ID NO: 64608 - DNA, 22 bp, synthetic construct
  misc_feature 1..22: note = chemically synthesized
  source 1..22: mol_type = other DNA
gtgtggactgccttttctgaac

SEQ ID NO: 64609 - DNA, 22 bp, synthetic construct
  misc_feature 1..22: note = chemically synthesized
  source 1..22: mol_type = other DNA
tgtggactgccttttctgaacc

SEQ ID NO: 64610 - DNA, 22 bp, synthetic construct
  misc_feature 1..22: note = chemically synthesized
  source 1..22: mol_type = other DNA
ccttttctgaacctatttgggt

SEQ ID NO: 64611 - DNA, 22 bp, synthetic construct
  misc_feature 1..22: note = chemically synthesized
  source 1..22: mol_type = other DNA
ttctgaacctatttgggtgcta

SEQ ID NO: 64612 - DNA, 22 bp, synthetic construct
  misc_feature 1..22: note = chemically synthesized
  source 1..22: mol_type = other DNA
tctgaacctatttgggtgctaa

SEQ ID NO: 64613 - DNA, 22 bp, synthetic construct
  misc_feature 1..22: note = chemically synthesized
  source 1..22: mol_type = other DNA
ctgaacctatttgggtgctaag

SEQ ID NO: 64614 - DNA, 22 bp, synthetic construct
  misc_feature 1..22: note = chemically synthesized
  source 1..22: mol_type = other DNA
tgaacctatttgggtgctaagg

SEQ ID NO: 64615 - DNA, 22 bp, synthetic construct
  misc_feature 1..22: note = chemically synthesized
  source 1..22: mol_type = other DNA
aacctatttgggtgctaaggac

SEQ ID NO: 64616 - DNA, 22 bp, synthetic construct
  misc_feature 1..22: note = chemically synthesized
  source 1..22: mol_type = other DNA
tttgggtgctaaggactgtatg

SEQ ID NO: 64617 - DNA, 22 bp, synthetic construct
  misc_feature 1..22: note = chemically synthesized
  source 1..22: mol_type = other DNA
gggtgctaaggactgtatggat

SEQ ID NO: 64618 - DNA, 22 bp, synthetic construct
  misc_feature 1..22: note = chemically synthesized
  source 1..22: mol_type = other DNA
ggtgctaaggactgtatggatt

SEQ ID NO: 64619 - DNA, 22 bp, synthetic construct
  misc_feature 1..22: note = chemically synthesized
  source 1..22: mol_type = other DNA
aggactgtatggatttgggttc

SEQ ID NO: 64620 - DNA, 22 bp, synthetic construct
  misc_feature 1..22: note = chemically synthesized
  source 1..22: mol_type = other DNA
tatggatttgggttcttaacat

SEQ ID NO: 64621 - DNA, 22 bp, synthetic construct
  misc_feature 1..22: note = chemically synthesized
  source 1..22: mol_type = other DNA
gggttcttaacatggaaaacgt

SEQ ID NO: 64622 - DNA, 22 bp, synthetic construct
  misc_feature 1..22: note = chemically synthesized
  source 1..22: mol_type = other DNA
ggttcttaacatggaaaacgtc

SEQ ID NO: 64623 - DNA, 22 bp, synthetic construct
  misc_feature 1..22: note = chemically synthesized
  source 1..22: mol_type = other DNA
ttaacatggaaaacgtctgtgc

SEQ ID NO: 64624 - DNA, 22 bp, synthetic construct
  misc_feature 1..22: note = chemically synthesized
  source 1..22: mol_type = other DNA
aacatggaaaacgtctgtgcct

SEQ ID NO: 64625 - DNA, 22 bp, synthetic construct
  misc_feature 1..22: note = chemically synthesized
  source 1..22: mol_type = other DNA
acatggaaaacgtctgtgcctg

SEQ ID NO: 64626 - DNA, 22 bp, synthetic construct
  misc_feature 1..22: note = chemically synthesized
  source 1..22: mol_type = other DNA
tgcctgcgtagtgttgggtcct

SEQ ID NO: 64627 - DNA, 22 bp, synthetic construct
  misc_feature 1..22: note = chemically synthesized
  source 1..22: mol_type = other DNA
cgtagtgttgggtcctacctgg

SEQ ID NO: 64628 - DNA, 22 bp, synthetic construct
  misc_feature 1..22: note = chemically synthesized
  source 1..22: mol_type = other DNA
ggtcctacctggccacttggct

SEQ ID NO: 64629 - DNA, 22 bp, synthetic construct
  misc_feature 1..22: note = chemically synthesized
  source 1..22: mol_type = other DNA
cctggccacttggctctcaaca

SEQ ID NO: 64630 - DNA, 22 bp, synthetic construct
  misc_feature 1..22: note = chemically synthesized
  source 1..22: mol_type = other DNA
gccacttggctctcaacacgga

SEQ ID NO: 64631 - DNA, 22 bp, synthetic construct
  misc_feature 1..22: note = chemically synthesized
  source 1..22: mol_type = other DNA
ggctctcaacacggagtgatga

SEQ ID NO: 64632 - DNA, 22 bp, synthetic construct
  misc_feature 1..22: note = chemically synthesized
  source 1..22: mol_type = other DNA
gctctcaacacggagtgatgat

SEQ ID NO: 64633 - DNA, 22 bp, synthetic construct
  misc_feature 1..22: note = chemically synthesized
  source 1..22: mol_type = other DNA
tcaacacggagtgatgatgcct

SEQ ID NO: 64634 - DNA, 22 bp, synthetic construct
  misc_feature 1..22: note = chemically synthesized
  source 1..22: mol_type = other DNA
aacacggagtgatgatgcctag

SEQ ID NO: 64635 - DNA, 22 bp, synthetic construct
  misc_feature 1..22: note = chemically synthesized
  source 1..22: mol_type = other DNA
gggtgttttgacgtgggcagtc

SEQ ID NO: 64636 - DNA, 22 bp, synthetic construct
  misc_feature 1..22: note = chemically synthesized
  source 1..22: mol_type = other DNA
tgacgtgggcagtcagcccagc

SEQ ID NO: 64637 - DNA, 22 bp, synthetic construct
  misc_feature 1..22: note = chemically synthesized
  source 1..22: mol_type = other DNA
gacgtgggcagtcagcccagcc

SEQ ID NO: 64638 - DNA, 22 bp, synthetic construct
  misc_feature 1..22: note = chemically synthesized
  source 1..22: mol_type = other DNA
acgtgggcagtcagcccagcct

SEQ ID NO: 64639 - DNA, 22 bp, synthetic construct
  misc_feature 1..22: note = chemically synthesized
  source 1..22: mol_type = other DNA
gagaactgaggggagcatttct

SEQ ID NO: 64640 - DNA, 22 bp, synthetic construct
  misc_feature 1..22: note = chemically synthesized
  source 1..22: mol_type = other DNA
aggggagcatttctttcttttt

SEQ ID NO: 64641 - DNA, 22 bp, synthetic construct
  misc_feature 1..22: note = chemically synthesized
  source 1..22: mol_type = other DNA
ctttcttttttttttttttctt

SEQ ID NO: 64642 - DNA, 22 bp, synthetic construct
  misc_feature 1..22: note = chemically synthesized
  source 1..22: mol_type = other DNA
tttcttttttttttttttcttt

SEQ ID NO: 64643 - DNA, 22 bp, synthetic construct
  misc_feature 1..22: note = chemically synthesized
  source 1..22: mol_type = other DNA
tcttttttttttttttcttttt

SEQ ID NO: 64644 - DNA, 22 bp, synthetic construct
  misc_feature 1..22: note = chemically synthesized
  source 1..22: mol_type = other DNA
cttttttttttttttctttttt

SEQ ID NO: 64645 - DNA, 22 bp, synthetic construct
  misc_feature 1..22: note = chemically synthesized
  source 1..22: mol_type = other DNA
ttttttttttttttcttttttc

SEQ ID NO: 64646 - DNA, 22 bp, synthetic construct
  misc_feature 1..22: note = chemically synthesized
  source 1..22: mol_type = other DNA
ttttttttttttcttttttctt

SEQ ID NO: 64647 - DNA, 22 bp, synthetic construct
  misc_feature 1..22: note = chemically synthesized
  source 1..22: mol_type = other DNA
tttttttttttcttttttcttt

SEQ ID NO: 64648 - DNA, 22 bp, synthetic construct
  misc_feature 1..22: note = chemically synthesized
  source 1..22: mol_type = other DNA
ttttttttttcttttttctttt

SEQ ID NO: 64649 - DNA, 22 bp, synthetic construct
  misc_feature 1..22: note = chemically synthesized
  source 1..22: mol_type = other DNA
tttttttttcttttttcttttt

SEQ ID NO: 64650 - DNA, 22 bp, synthetic construct
  misc_feature 1..22: note = chemically synthesized
  source 1..22: mol_type = other DNA
ttttttttcttttttctttttt

SEQ ID NO: 64651 - DNA, 22 bp, synthetic construct
  misc_feature 1..22: note = chemically synthesized
  source 1..22: mol_type = other DNA
tttttttcttttttcttttttt

SEQ ID NO: 64652 - DNA, 22 bp, synthetic construct
  misc_feature 1..22: note = chemically synthesized
  source 1..22: mol_type = other DNA
ttttttcttttttctttttttg

SEQ ID NO: 64653 - DNA, 22 bp, synthetic construct
  misc_feature 1..22: note = chemically synthesized
  source 1..22: mol_type = other DNA
tttttcttttttctttttttgg

SEQ ID NO: 64654 - DNA, 22 bp, synthetic construct
  misc_feature 1..22: note = chemically synthesized
  source 1..22: mol_type = other DNA
ttttcttttttctttttttggt

SEQ ID NO: 64655 - DNA, 22 bp, synthetic construct
  misc_feature 1..22: note = chemically synthesized
  source 1..22: mol_type = other DNA
tttcttttttctttttttggtg

SEQ ID NO: 64656 - DNA, 22 bp, synthetic construct
  misc_feature 1..22: note = chemically synthesized
  source 1..22: mol_type = other DNA
ttcttttttctttttttggtga

SEQ ID NO: 64657 - DNA, 22 bp, synthetic construct
  misc_feature 1..22: note = chemically synthesized
  source 1..22: mol_type = other DNA
tcttttttctttttttggtgag

SEQ ID NO: 64658 - DNA, 22 bp, synthetic construct
  misc_feature 1..22: note = chemically synthesized
  source 1..22: mol_type = other DNA
cttttttctttttttggtgaga

SEQ ID NO: 64659 - DNA, 22 bp, synthetic construct
  misc_feature 1..22: note = chemically synthesized
  source 1..22: mol_type = other DNA
ttttttctttttttggtgagac

SEQ ID NO: 64660 - DNA, 22 bp, synthetic construct
  misc_feature 1..22: note = chemically synthesized
  source 1..22: mol_type = other DNA
ttttctttttttggtgagacgg

SEQ ID NO: 64661 - DNA, 22 bp, synthetic construct
  misc_feature 1..22: note = chemically synthesized
  source 1..22: mol_type = other DNA
tttctttttttggtgagacgga

SEQ ID NO: 64662 - DNA, 22 bp, synthetic construct
  misc_feature 1..22: note = chemically synthesized
  source 1..22: mol_type = other DNA
ttctttttttggtgagacggag

SEQ ID NO: 64663 - DNA, 22 bp, synthetic construct
  misc_feature 1..22: note = chemically synthesized
  source 1..22: mol_type = other DNA
tctttttttggtgagacggaga

SEQ ID NO: 64664 - DNA, 22 bp, synthetic construct
  misc_feature 1..22: note = chemically synthesized
  source 1..22: mol_type = other DNA
ctttttttggtgagacggagat

SEQ ID NO: 64665 - DNA, 22 bp, synthetic construct
  misc_feature 1..22: note = chemically synthesized
  source 1..22: mol_type = other DNA
tttttttggtgagacggagatt

SEQ ID NO: 64666 - DNA, 22 bp, synthetic construct
  misc_feature 1..22: note = chemically synthesized
  source 1..22: mol_type = other DNA
tttttggtgagacggagattta

SEQ ID NO: 64667 - DNA, 22 bp, synthetic construct
  misc_feature 1..22: note = chemically synthesized
  source 1..22: mol_type = other DNA
ttttggtgagacggagatttac

SEQ ID NO: 64668 - DNA, 22 bp, synthetic construct
  misc_feature 1..22: note = chemically synthesized
  source 1..22: mol_type = other DNA
tttggtgagacggagatttact

SEQ ID NO: 64669 - DNA, 22 bp, synthetic construct
  misc_feature 1..22: note = chemically synthesized
  source 1..22: mol_type = other DNA
ttggtgagacggagatttactc

SEQ ID NO: 64670 - DNA, 22 bp, synthetic construct
  misc_feature 1..22: note = chemically synthesized
  source 1..22: mol_type = other DNA
tggtgagacggagatttactct

SEQ ID NO: 64671 - DNA, 22 bp, synthetic construct
  misc_feature 1..22: note = chemically synthesized
  source 1..22: mol_type = other DNA
ggtgagacggagatttactctt

SEQ ID NO: 64672 - DNA, 22 bp, synthetic construct
  misc_feature 1..22: note = chemically synthesized
  source 1..22: mol_type = other DNA
gtgagacggagatttactcttg

SEQ ID NO: 64673 - DNA, 22 bp, synthetic construct
  misc_feature 1..22: note = chemically synthesized
  source 1..22: mol_type = other DNA
actcttgttgcccgggctggaa

SEQ ID NO: 64674 - DNA, 22 bp, synthetic construct
  misc_feature 1..22: note = chemically synthesized
  source 1..22: mol_type = other DNA
ctcttgttgcccgggctggaat

SEQ ID NO: 64675 - DNA, 22 bp, synthetic construct
  misc_feature 1..22: note = chemically synthesized
  source 1..22: mol_type = other DNA
ttgttgcccgggctggaatgca

SEQ ID NO: 64676 - DNA, 22 bp, synthetic construct
  misc_feature 1..22: note = chemically synthesized
  source 1..22: mol_type = other DNA
gttgcccgggctggaatgcaat

SEQ ID NO: 64677 - DNA, 22 bp, synthetic construct
  misc_feature 1..22: note = chemically synthesized
  source 1..22: mol_type = other DNA
ttgcccgggctggaatgcaatg

SEQ ID NO: 64678 - DNA, 22 bp, synthetic construct
  misc_feature 1..22: note = chemically synthesized
  source 1..22: mol_type = other DNA
cccgggctggaatgcaatggcg

SEQ ID NO: 64679 - DNA, 22 bp, synthetic construct
  misc_feature 1..22: note = chemically synthesized
  source 1..22: mol_type = other DNA
gaatgcaatggcgcgatctcgg

SEQ ID NO: 64680 - DNA, 22 bp, synthetic construct
  misc_feature 1..22: note = chemically synthesized
  source 1..22: mol_type = other DNA
ggctcactgcatcttctgcctc

SEQ ID NO: 64681 - DNA, 22 bp, synthetic construct
  misc_feature 1..22: note = chemically synthesized
  source 1..22: mol_type = other DNA
actgcatcttctgcctcccagg

SEQ ID NO: 64682 - DNA, 22 bp, synthetic construct
  misc_feature 1..22: note = chemically synthesized
  source 1..22: mol_type = other DNA
catcttctgcctcccaggttca

SEQ ID NO: 64683 - DNA, 22 bp, synthetic construct
  misc_feature 1..22: note = chemically synthesized
  source 1..22: mol_type = other DNA
ctgcctcccaggttcaagcgat

SEQ ID NO: 64684 - DNA, 22 bp, synthetic construct
  misc_feature 1..22: note = chemically synthesized
  source 1..22: mol_type = other DNA
tgcctcccaggttcaagcgatc

SEQ ID NO: 64685 - DNA, 22 bp, synthetic construct
  misc_feature 1..22: note = chemically synthesized
  source 1..22: mol_type = other DNA
cctcccaggttcaagcgatctc

SEQ ID NO: 64686 - DNA, 22 bp, synthetic construct
  misc_feature 1..22: note = chemically synthesized
  source 1..22: mol_type = other DNA
ccaggttcaagcgatctcctgc

SEQ ID NO: 64687 - DNA, 22 bp, synthetic construct
  misc_feature 1..22: note = chemically synthesized
  source 1..22: mol_type = other DNA
aagcgatctcctgcctcagcct

SEQ ID NO: 64688 - DNA, 22 bp, synthetic construct
  misc_feature 1..22: note = chemically synthesized
  source 1..22: mol_type = other DNA
ctgcctcagcctcccgagtagc

SEQ ID NO: 64689 - DNA, 22 bp, synthetic construct
  misc_feature 1..22: note = chemically synthesized
  source 1..22: mol_type = other DNA
cctcagcctcccgagtagctga

SEQ ID NO: 64690 - DNA, 22 bp, synthetic construct
  misc_feature 1..22: note = chemically synthesized
  source 1..22: mol_type = other DNA
agcctcccgagtagctgagatt

SEQ ID NO: 64691 - DNA, 22 bp, synthetic construct
  misc_feature 1..22: note = chemically synthesized
  source 1..22: mol_type = other DNA
ccgagtagctgagattacaggc

SEQ ID NO: 64692 - DNA, 22 bp, synthetic construct
  misc_feature 1..22: note = chemically synthesized
  source 1..22: mol_type = other DNA
agattacaggcatgtattacca

SEQ ID NO: 64693 - DNA, 22 bp, synthetic construct
  misc_feature 1..22: note = chemically synthesized
  source 1..22: mol_type = other DNA
caggcatgtattaccatgcccg

SEQ ID NO: 64694 - DNA, 22 bp, synthetic construct
  misc_feature 1..22: note = chemically synthesized
  source 1..22: mol_type = other DNA
ccatgcccggctaattttgtat

SEQ ID NO: 64695 - DNA, 22 bp, synthetic construct
  misc_feature 1..22: note = chemically synthesized
  source 1..22: mol_type = other DNA
attttgtatttttagtagagac

SEQ ID NO: 64696 - DNA, 22 bp, synthetic construct
  misc_feature 1..22: note = chemically synthesized
  source 1..22: mol_type = other DNA
tgtatttttagtagagacgggg

SEQ ID NO: 64697 - DNA, 22 bp, synthetic construct
  misc_feature 1..22: note = chemically synthesized
  source 1..22: mol_type = other DNA
gtatttttagtagagacggggt

SEQ ID NO: 64698 - DNA, 22 bp, synthetic construct
  misc_feature 1..22: note = chemically synthesized
  source 1..22: mol_type = other DNA
tatttttagtagagacggggtt

SEQ ID NO: 64699 - DNA, 22 bp, synthetic construct
  misc_feature 1..22: note = chemically synthesized
  source 1..22: mol_type = other DNA
ttagtagagacggggtttcact

SEQ ID NO: 64700 - DNA, 22 bp, synthetic construct
  misc_feature 1..22: note = chemically synthesized
  source 1..22: mol_type = other DNA
tagtagagacggggtttcactg

SEQ ID NO: 64701 - DNA, 22 bp, synthetic construct
  misc_feature 1..22: note = chemically synthesized
  source 1..22: mol_type = other DNA
agtagagacggggtttcactgt

SEQ ID NO: 64702 - DNA, 22 bp, synthetic construct
  misc_feature 1..22: note = chemically synthesized
  source 1..22: mol_type = other DNA
gtagagacggggtttcactgtg

SEQ ID NO: 64703 - DNA, 22 bp, synthetic construct
  misc_feature 1..22: note = chemically synthesized
  source 1..22: mol_type = other DNA
cactgtgttgtccaaactgatc

SEQ ID NO: 64704 - DNA, 22 bp, synthetic construct
  misc_feature 1..22: note = chemically synthesized
  source 1..22: mol_type = other DNA
actgtgttgtccaaactgatct

SEQ ID NO: 64705 - DNA, 22 bp, synthetic construct
  misc_feature 1..22: note = chemically synthesized
  source 1..22: mol_type = other DNA
tgttgtccaaactgatcttgaa

SEQ ID NO: 64706 - DNA, 22 bp, synthetic construct
  misc_feature 1..22: note = chemically synthesized
  source 1..22: mol_type = other DNA
tccaaactgatcttgaactcct

SEQ ID NO: 64707 - DNA, 22 bp, synthetic construct
  misc_feature 1..22: note = chemically synthesized
  source 1..22: mol_type = other DNA
atcttgaactcctgacctcagg

SEQ ID NO: 64708 - DNA, 22 bp, synthetic construct
  misc_feature 1..22: note = chemically synthesized
  source 1..22: mol_type = other DNA
gaactcctgacctcaggtgatc

SEQ ID NO: 64709 - DNA, 22 bp, synthetic construct
  misc_feature 1..22: note = chemically synthesized
  source 1..22: mol_type = other DNA
aactcctgacctcaggtgatcc

SEQ ID NO: 64710 - DNA, 22 bp, synthetic construct
  misc_feature 1..22: note = chemically synthesized
  source 1..22: mol_type = other DNA
ctgacctcaggtgatcctcctg

SEQ ID NO: 64711 - DNA, 22 bp, synthetic construct
  misc_feature 1..22: note = chemically synthesized
  source 1..22: mol_type = other DNA
acctcaggtgatcctcctgccc

SEQ ID NO: 64712 - DNA, 22 bp, synthetic construct
  misc_feature 1..22: note = chemically synthesized
  source 1..22: mol_type = other DNA
aggtgatcctcctgccccggcc

SEQ ID NO: 64713 - DNA, 22 bp, synthetic construct
  misc_feature 1..22: note = chemically synthesized
  source 1..22: mol_type = other DNA
ctgccccggcctcccaaagtgc

SEQ ID NO: 64714 - DNA, 22 bp, synthetic construct
  misc_feature 1..22: note = chemically synthesized
  source 1..22: mol_type = other DNA
ccccggcctcccaaagtgctgg

SEQ ID NO: 64715 - DNA, 22 bp, synthetic construct
  misc_feature 1..22: note = chemically synthesized
  source 1..22: mol_type = other DNA
ccaaagtgctgggattacaggt

SEQ ID NO: 64716 - DNA, 22 bp, synthetic construct
  misc_feature 1..22: note = chemically synthesized
  source 1..22: mol_type = other DNA
ggattacaggtgtgagccacag

SEQ ID NO: 64717 - DNA, 22 bp, synthetic construct
  misc_feature 1..22: note = chemically synthesized
  source 1..22: mol_type = other DNA
caggtgtgagccacagcgcctg

SEQ ID NO: 64718 - DNA, 22 bp, synthetic construct
  misc_feature 1..22: note = chemically synthesized
  source 1..22: mol_type = other DNA
gccgggagcatttcaaatgata

SEQ ID NO: 64719 - DNA, 22 bp, synthetic construct
  misc_feature 1..22: note = chemically synthesized
  source 1..22: mol_type = other DNA
caaatgatagttaggacttcct

SEQ ID NO: 64720 - DNA, 22 bp, synthetic construct
  misc_feature 1..22: note = chemically synthesized
  source 1..22: mol_type = other DNA
aaatgatagttaggacttcctt

SEQ ID NO: 64721 - DNA, 22 bp, synthetic construct
  misc_feature 1..22: note = chemically synthesized
  source 1..22: mol_type = other DNA
ggacttccttttactgtactta

SEQ ID NO: 64722 - DNA, 22 bp, synthetic construct
  misc_feature 1..22: note = chemically synthesized
  source 1..22: mol_type = other DNA
ccttttactgtacttaatagct

SEQ ID NO: 64723 - DNA, 22 bp, synthetic construct
  misc_feature 1..22: note = chemically synthesized
  source 1..22: mol_type = other DNA
cttttactgtacttaatagctg

SEQ ID NO: 64724 - DNA, 22 bp, synthetic construct
  misc_feature 1..22: note = chemically synthesized
  source 1..22: mol_type = other DNA
ttactgtacttaatagctgaag

SEQ ID NO: 64725 - DNA, 22 bp, synthetic construct
  misc_feature 1..22: note = chemically synthesized
  source 1..22: mol_type = other DNA
tactgtacttaatagctgaagg

SEQ ID NO: 64726 - DNA, 22 bp, synthetic construct
  misc_feature 1..22: note = chemically synthesized
  source 1..22: mol_type = other DNA
actgtacttaatagctgaaggg

SEQ ID NO: 64727 - DNA, 22 bp, synthetic construct
  misc_feature 1..22: note = chemically synthesized
  source 1..22: mol_type = other DNA
ctgtacttaatagctgaagggg

SEQ ID NO: 64728 - DNA, 22 bp, synthetic construct
  misc_feature 1..22: note = chemically synthesized
  source 1..22: mol_type = other DNA
tacttaatagctgaagggggcc

SEQ ID NO: 64729 - DNA, 22 bp, synthetic construct
  misc_feature 1..22: note = chemically synthesized
  source 1..22: mol_type = other DNA
aatagctgaagggggccaaaag

SEQ ID NO: 64730 - DNA, 22 bp, synthetic construct
  misc_feature 1..22: note = chemically synthesized
  source 1..22: mol_type = other DNA
atagctgaagggggccaaaagt

SEQ ID NO: 64731 - DNA, 22 bp, synthetic construct
  misc_feature 1..22: note = chemically synthesized
  source 1..22: mol_type = other DNA
aagggggccaaaagtgtccatg

SEQ ID NO: 64732 - DNA, 22 bp, synthetic construct
  misc_feature 1..22: note = chemically synthesized
  source 1..22: mol_type = other DNA
gctgccctctggcatcaaaatg

SEQ ID NO: 64733 - DNA, 22 bp, synthetic construct
  misc_feature 1..22: note = chemically synthesized
  source 1..22: mol_type = other DNA
ctgccctctggcatcaaaatga

SEQ ID NO: 64734 - DNA, 22 bp, synthetic construct
  misc_feature 1..22: note = chemically synthesized
  source 1..22: mol_type = other DNA
ccctctggcatcaaaatgaggt

SEQ ID NO: 64735 - DNA, 22 bp, synthetic construct
  misc_feature 1..22: note = chemically synthesized
  source 1..22: mol_type = other DNA
tggcatcaaaatgaggtccttt

SEQ ID NO: 64736 - DNA, 22 bp, synthetic construct
  misc_feature 1..22: note = chemically synthesized
  source 1..22: mol_type = other DNA
gcatcaaaatgaggtccttttt

SEQ ID NO: 64737 - DNA, 22 bp, synthetic construct
  misc_feature 1..22: note = chemically synthesized
  source 1..22: mol_type = other DNA
tttagtagtgctgcatttaaaa

SEQ ID NO: 64738 - DNA, 22 bp, synthetic construct
  misc_feature 1..22: note = chemically synthesized
  source 1..22: mol_type = other DNA
ttagtagtgctgcatttaaaac

SEQ ID NO: 64739 - DNA, 22 bp, synthetic construct
  misc_feature 1..22: note = chemically synthesized
  source 1..22: mol_type = other DNA
tagtagtgctgcatttaaaaca

SEQ ID NO: 64740 - DNA, 22 bp, synthetic construct
  misc_feature 1..22: note = chemically synthesized
  source 1..22: mol_type = other DNA
agtagtgctgcatttaaaacag

SEQ ID NO: 64741 - DNA, 22 bp, synthetic construct
  misc_feature 1..22: note = chemically synthesized
  source 1..22: mol_type = other DNA
gtagtgctgcatttaaaacagc

SEQ ID NO: 64742 - DNA, 22 bp, synthetic construct
  misc_feature 1..22: note = chemically synthesized
  source 1..22: mol_type = other DNA
catttaaaacagcattaagaat

SEQ ID NO: 64743 - DNA, 22 bp, synthetic construct
  misc_feature 1..22: note = chemically synthesized
  source 1..22: mol_type = other DNA
aaaacagcattaagaatacgtt

SEQ ID NO: 64744 - DNA, 22 bp, synthetic construct
  misc_feature 1..22: note = chemically synthesized
  source 1..22: mol_type = other DNA
aaacagcattaagaatacgttt

SEQ ID NO: 64745 - DNA, 22 bp, synthetic construct
  misc_feature 1..22: note = chemically synthesized
  source 1..22: mol_type = other DNA
agaatacgtttttagaacttag

SEQ ID NO: 64746 - DNA, 22 bp, synthetic construct
  misc_feature 1..22: note = chemically synthesized
  source 1..22: mol_type = other DNA
ttagaacttagctttttgcatt

SEQ ID NO: 64747 - DNA, 22 bp, synthetic construct
  misc_feature 1..22: note = chemically synthesized
  source 1..22: mol_type = other DNA
tagaacttagctttttgcattg

SEQ ID NO: 64748 - DNA, 22 bp, synthetic construct
  misc_feature 1..22: note = chemically synthesized
  source 1..22: mol_type = other DNA
agaacttagctttttgcattga

SEQ ID NO: 64749 - DNA, 22 bp, synthetic construct
  misc_feature 1..22: note = chemically synthesized
  source 1..22: mol_type = other DNA
gaacttagctttttgcattgag

SEQ ID NO: 64750 - DNA, 22 bp, synthetic construct
  misc_feature 1..22: note = chemically synthesized
  source 1..22: mol_type = other DNA
agctttttgcattgaggatgcg

SEQ ID NO: 64751 - DNA, 22 bp, synthetic construct
  misc_feature 1..22: note = chemically synthesized
  source 1..22: mol_type = other DNA
gctttttgcattgaggatgcgc

SEQ ID NO: 64752 - DNA, 22 bp, synthetic construct
  misc_feature 1..22: note = chemically synthesized
  source 1..22: mol_type = other DNA
tttgcattgaggatgcgcaggt

SEQ ID NO: 64753 - DNA, 22 bp, synthetic construct
  misc_feature 1..22: note = chemically synthesized
  source 1..22: mol_type = other DNA
ttgcattgaggatgcgcaggtg

SEQ ID NO: 64754 - DNA, 22 bp, synthetic construct
  misc_feature 1..22: note = chemically synthesized
  source 1..22: mol_type = other DNA
tgcattgaggatgcgcaggtgg

SEQ ID NO: 64755 - DNA, 22 bp, synthetic construct
  misc_feature 1..22: note = chemically synthesized
  source 1..22: mol_type = other DNA
gcattgaggatgcgcaggtggc

SEQ ID NO: 64756 - DNA, 22 bp, synthetic construct
  misc_feature 1..22: note = chemically synthesized
  source 1..22: mol_type = other DNA
cattgaggatgcgcaggtggct

SEQ ID NO: 64757 - DNA, 22 bp, synthetic construct
  misc_feature 1..22: note = chemically synthesized
  source 1..22: mol_type = other DNA
aggatgcgcaggtggctgagac

SEQ ID NO: 64758 - DNA, 22 bp, synthetic construct
  misc_feature 1..22: note = chemically synthesized
  source 1..22: mol_type = other DNA
agactaacttctttgcagatga

SEQ ID NO: 64759 - DNA, 22 bp, synthetic construct
  misc_feature 1..22: note = chemically synthesized
  source 1..22: mol_type = other DNA
acttctttgcagatgaccatgg

SEQ ID NO: 64760 - DNA, 22 bp, synthetic construct
  misc_feature 1..22: note = chemically synthesized
  source 1..22: mol_type = other DNA
ctttgcagatgaccatggttga

SEQ ID NO: 64761 - DNA, 22 bp, synthetic construct
  misc_feature 1..22: note = chemically synthesized
  source 1..22: mol_type = other DNA
tttgcagatgaccatggttgaa

SEQ ID NO: 64762 - DNA, 22 bp, synthetic construct
  misc_feature 1..22: note = chemically synthesized
  source 1..22: mol_type = other DNA
tgcagatgaccatggttgaaag

SEQ ID NO: 64763 - DNA, 22 bp, synthetic construct
  misc_feature 1..22: note = chemically synthesized
  source 1..22: mol_type = other DNA
gcagatgaccatggttgaaagt

SEQ ID NO: 64764 - DNA, 22 bp, synthetic construct
  misc_feature 1..22: note = chemically synthesized
  source 1..22: mol_type = other DNA
cagatgaccatggttgaaagtc

SEQ ID NO: 64765 - DNA, 22 bp, synthetic construct
  misc_feature 1..22: note = chemically synthesized
  source 1..22: mol_type = other DNA
aaagtcagctatagagttgcac

SEQ ID NO: 64766 - DNA, 22 bp, synthetic construct
  misc_feature 1..22: note = chemically synthesized
  source 1..22: mol_type = other DNA
tagagttgcacaaccacgtagt

SEQ ID NO: 64767 - DNA, 22 bp, synthetic construct
  misc_feature 1..22: note = chemically synthesized
  source 1..22: mol_type = other DNA
cacaaccacgtagttgggcttc

SEQ ID NO: 64768 - DNA, 22 bp, synthetic construct
  misc_feature 1..22: note = chemically synthesized
  source 1..22: mol_type = other DNA
ggcttcacatatagaagatgtt

SEQ ID NO: 64769 - DNA, 22 bp, synthetic construct
  misc_feature 1..22: note = chemically synthesized
  source 1..22: mol_type = other DNA
cacatatagaagatgttgtcat

SEQ ID NO: 64770 - DNA, 22 bp, synthetic construct
  misc_feature 1..22: note = chemically synthesized
  source 1..22: mol_type = other DNA
acatatagaagatgttgtcatt

SEQ ID NO: 64771 - DNA, 22 bp, synthetic construct
  misc_feature 1..22: note = chemically synthesized
  source 1..22: mol_type = other DNA
tcattttttggtaactctgtca

SEQ ID NO: 64772 - DNA, 22 bp, synthetic construct
  misc_feature 1..22: note = chemically synthesized
  source 1..22: mol_type = other DNA
tttggtaactctgtcagacttt

SEQ ID NO: 64773 - DNA, 22 bp, synthetic construct
  misc_feature 1..22: note = chemically synthesized
  source 1..22: mol_type = other DNA
ttggtaactctgtcagacttta

SEQ ID NO: 64774 - DNA, 22 bp, synthetic construct
  misc_feature 1..22: note = chemically synthesized
  source 1..22: mol_type = other DNA
tggtaactctgtcagactttac

SEQ ID NO: 64775 - DNA, 22 bp, synthetic construct
  misc_feature 1..22: note = chemically synthesized
  source 1..22: mol_type = other DNA
ggtaactctgtcagactttacc

SEQ ID NO: 64776 - DNA, 22 bp, synthetic construct
  misc_feature 1..22: note = chemically synthesized
  source 1..22: mol_type = other DNA
gtaactctgtcagactttacca

SEQ ID NO: 64777 - DNA, 22 bp, synthetic construct
  misc_feature 1..22: note = chemically synthesized
  source 1..22: mol_type = other DNA
tgtcagactttaccaacctggc

SEQ ID NO: 64778 - DNA, 22 bp, synthetic construct
  misc_feature 1..22: note = chemically synthesized
  source 1..22: mol_type = other DNA
tcagactttaccaacctggcgc

SEQ ID NO: 64779 - DNA, 22 bp, synthetic construct
  misc_feature 1..22: note = chemically synthesized
  source 1..22: mol_type = other DNA
taccaacctggcgcacagtctg

SEQ ID NO: 64780 - DNA, 22 bp, synthetic construct
  misc_feature 1..22: note = chemically synthesized
  source 1..22: mol_type = other DNA
accaacctggcgcacagtctgg

SEQ ID NO: 64781 - DNA, 22 bp, synthetic construct
  misc_feature 1..22: note = chemically synthesized
  source 1..22: mol_type = other DNA
ccaacctggcgcacagtctggt

SEQ ID NO: 64782 - DNA, 22 bp, synthetic construct
  misc_feature 1..22: note = chemically synthesized
  source 1..22: mol_type = other DNA
gcgcacagtctggttggcacat

SEQ ID NO: 64783 - DNA, 22 bp, synthetic construct
  misc_feature 1..22: note = chemically synthesized
  source 1..22: mol_type = other DNA
gttggcacataaacttcacatt

SEQ ID NO: 64784 - DNA, 22 bp, synthetic construct
  misc_feature 1..22: note = chemically synthesized
  source 1..22: mol_type = other DNA
gcacataaacttcacatttgct

SEQ ID NO: 64785 - DNA, 22 bp, synthetic construct
  misc_feature 1..22: note = chemically synthesized
  source 1..22: mol_type = other DNA
cacatttgctcttctccagggt

SEQ ID NO: 64786 - DNA, 22 bp, synthetic construct
  misc_feature 1..22: note = chemically synthesized
  source 1..22: mol_type = other DNA
acatttgctcttctccagggtg

SEQ ID NO: 64787 - DNA, 22 bp, synthetic construct
  misc_feature 1..22: note = chemically synthesized
  source 1..22: mol_type = other DNA
gctcttctccagggtgtggggt

SEQ ID NO: 64788 - DNA, 22 bp, synthetic construct
  misc_feature 1..22: note = chemically synthesized
  source 1..22: mol_type = other DNA
ctcttctccagggtgtggggtg

SEQ ID NO: 64789 - DNA, 22 bp, synthetic construct
  misc_feature 1..22: note = chemically synthesized
  source 1..22: mol_type = other DNA
ttctccagggtgtggggtggct

SEQ ID NO: 64790 - DNA, 22 bp, synthetic construct
  misc_feature 1..22: note = chemically synthesized
  source 1..22: mol_type = other DNA
ctccagggtgtggggtggctgt

SEQ ID NO: 64791 - DNA, 22 bp, synthetic construct
  misc_feature 1..22: note = chemically synthesized
  source 1..22: mol_type = other DNA
tccagggtgtggggtggctgtt

SEQ ID NO: 64792 - DNA, 22 bp, synthetic construct
  misc_feature 1..22: note = chemically synthesized
  source 1..22: mol_type = other DNA
cagggtgtggggtggctgttta

SEQ ID NO: 64793 - DNA, 22 bp, synthetic construct
  misc_feature 1..22: note = chemically synthesized
  source 1..22: mol_type = other DNA
tttaaagagggtggatattcat

SEQ ID NO: 64794 - DNA, 22 bp, synthetic construct
  misc_feature 1..22: note = chemically synthesized
  source 1..22: mol_type = other DNA
aaagagggtggatattcatgct

SEQ ID NO: 64795 - DNA, 22 bp, synthetic construct
  misc_feature 1..22: note = chemically synthesized
  source 1..22: mol_type = other DNA
aagagggtggatattcatgcta

SEQ ID NO: 64796 - DNA, 22 bp, synthetic construct
  misc_feature 1..22: note = chemically synthesized
  source 1..22: mol_type = other DNA
atgctaatctttgtgtagcata

SEQ ID NO: 64797 - DNA, 22 bp, synthetic construct
  misc_feature 1..22: note = chemically synthesized
  source 1..22: mol_type = other DNA
atctttgtgtagcataacatgt

SEQ ID NO: 64798 - DNA, 22 bp, synthetic construct
  misc_feature 1..22: note = chemically synthesized
  source 1..22: mol_type = other DNA
tgtgtagcataacatgttactg

SEQ ID NO: 64799 - DNA, 22 bp, synthetic construct
  misc_feature 1..22: note = chemically synthesized
  source 1..22: mol_type = other DNA
gtgtagcataacatgttactgc

SEQ ID NO: 64800 - DNA, 22 bp, synthetic construct
  misc_feature 1..22: note = chemically synthesized
  source 1..22: mol_type = other DNA
tgtagcataacatgttactgca

SEQ ID NO: 64801 - DNA, 22 bp, synthetic construct
  misc_feature 1..22: note = chemically synthesized
  source 1..22: mol_type = other DNA
ctgcaacttgcttttttttttt

SEQ ID NO: 64802 - DNA, 22 bp, synthetic construct
  misc_feature 1..22: note = chemically synthesized
  source 1..22: mol_type = other DNA
caacttgcttttttttttttat

SEQ ID NO: 64803 - DNA, 22 bp, synthetic construct
  misc_feature 1..22: note = chemically synthesized
  source 1..22: mol_type = other DNA
gcttttttttttttatctgaaa

SEQ ID NO: 64804 - DNA, 22 bp, synthetic construct
  misc_feature 1..22: note = chemically synthesized
  source 1..22: mol_type = other DNA
cttttttttttttatctgaaag

SEQ ID NO: 64805 - DNA, 22 bp, synthetic construct
  misc_feature 1..22: note = chemically synthesized
  source 1..22: mol_type = other DNA
ttttttttttatctgaaagttc

SEQ ID NO: 64806 - DNA, 22 bp, synthetic construct
  misc_feature 1..22: note = chemically synthesized
  source 1..22: mol_type = other DNA
tttttttttatctgaaagttca

SEQ ID NO: 64807 - DNA, 22 bp, synthetic construct
  misc_feature 1..22: note = chemically synthesized
  source 1..22: mol_type = other DNA
ttttttttatctgaaagttcaa

SEQ ID NO: 64808 - DNA, 22 bp, synthetic construct
  misc_feature 1..22: note = chemically synthesized
  source 1..22: mol_type = other DNA
tttttttatctgaaagttcaag

SEQ ID NO: 64809 - DNA, 22 bp, synthetic construct
  misc_feature 1..22: note = chemically synthesized
  source 1..22: mol_type = other DNA
ttttttatctgaaagttcaagt

SEQ ID NO: 64810 - DNA, 22 bp, synthetic construct
  misc_feature 1..22: note = chemically synthesized
  source 1..22: mol_type = other DNA
tttttatctgaaagttcaagta

SEQ ID NO: 64811 - DNA, 22 bp, synthetic construct
  misc_feature 1..22: note = chemically synthesized
  source 1..22: mol_type = other DNA
ttttatctgaaagttcaagtag

SEQ ID NO: 64812 - DNA, 22 bp, synthetic construct
  misc_feature 1..22: note = chemically synthesized
  source 1..22: mol_type = other DNA
tttatctgaaagttcaagtaga

SEQ ID NO: 64813 - DNA, 22 bp, synthetic construct
  misc_feature 1..22: note = chemically synthesized
  source 1..22: mol_type = other DNA
ttatctgaaagttcaagtagat

SEQ ID NO: 64814 - DNA, 22 bp, synthetic construct
  misc_feature 1..22: note = chemically synthesized
  source 1..22: mol_type = other DNA
tatctgaaagttcaagtagata

SEQ ID NO: 64815 - DNA, 22 bp, synthetic construct
  misc_feature 1..22: note = chemically synthesized
  source 1..22: mol_type = other DNA
atctgaaagttcaagtagatat

SEQ ID NO: 64816 - DNA, 22 bp, synthetic construct
  misc_feature 1..22: note = chemically synthesized
  source 1..22: mol_type = other DNA
tctgaaagttcaagtagatatc

SEQ ID NO: 64817 - DNA, 22 bp, synthetic construct
  misc_feature 1..22: note = chemically synthesized
  source 1..22: mol_type = other DNA
aaagttcaagtagatatcagaa

SEQ ID NO: 64818 - DNA, 22 bp, synthetic construct
  misc_feature 1..22: note = chemically synthesized
  source 1..22: mol_type = other DNA
aagtagatatcagaagggaaat

SEQ ID NO: 64819 - DNA, 22 bp, synthetic construct
  misc_feature 1..22: note = chemically synthesized
  source 1..22: mol_type = other DNA
gtgggtgctaagaaggttaaaa

SEQ ID NO: 64820 - DNA, 22 bp, synthetic construct
  misc_feature 1..22: note = chemically synthesized
  source 1..22: mol_type = other DNA
tgggtgctaagaaggttaaaat

SEQ ID NO: 64821 - DNA, 22 bp, synthetic construct
  misc_feature 1..22: note = chemically synthesized
  source 1..22: mol_type = other DNA
agaaggttaaaattaccatttt

SEQ ID NO: 64822 - DNA, 22 bp, synthetic construct
  misc_feature 1..22: note = chemically synthesized
  source 1..22: mol_type = other DNA
aaattaccattttgaacagaaa

SEQ ID NO: 64823 - DNA, 22 bp, synthetic construct
  misc_feature 1..22: note = chemically synthesized
  source 1..22: mol_type = other DNA
ccattttgaacagaaatgatat

SEQ ID NO: 64824 - DNA, 22 bp, synthetic construct
  misc_feature 1..22: note = chemically synthesized
  source 1..22: mol_type = other DNA
tgaacagaaatgatatttggaa

SEQ ID NO: 64825 - DNA, 22 bp, synthetic construct
  misc_feature 1..22: note = chemically synthesized
  source 1..22: mol_type = other DNA
gaacagaaatgatatttggaaa

SEQ ID NO: 64826 - DNA, 22 bp, synthetic construct
  misc_feature 1..22: note = chemically synthesized
  source 1..22: mol_type = other DNA
aacagaaatgatatttggaaaa

SEQ ID NO: 64827 - DNA, 22 bp, synthetic construct
  misc_feature 1..22: note = chemically synthesized
  source 1..22: mol_type = other DNA
ggaaaaataacttcccttttag

SEQ ID NO: 64828 - DNA, 22 bp, synthetic construct
  misc_feature 1..22: note = chemically synthesized
  source 1..22: mol_type = other DNA
gaaaaataacttcccttttagg

SEQ ID NO: 64829 - DNA, 22 bp, synthetic construct
  misc_feature 1..22: note = chemically synthesized
  source 1..22: mol_type = other DNA
cccttttaggaaggtaaatcag

SEQ ID NO: 64830 - DNA, 22 bp, synthetic construct
  misc_feature 1..22: note = chemically synthesized
  source 1..22: mol_type = other DNA
ccttttaggaaggtaaatcagt

SEQ ID NO: 64831 - DNA, 22 bp, synthetic construct
  misc_feature 1..22: note = chemically synthesized
  source 1..22: mol_type = other DNA
ttaggaaggtaaatcagtcatt

SEQ ID NO: 64832 - DNA, 22 bp, synthetic construct
  misc_feature 1..22: note = chemically synthesized
  source 1..22: mol_type = other DNA
taggaaggtaaatcagtcattt

SEQ ID NO: 64833 - DNA, 22 bp, synthetic construct
  misc_feature 1..22: note = chemically synthesized
  source 1..22: mol_type = other DNA
aggaaggtaaatcagtcattta

SEQ ID NO: 64834 - DNA, 22 bp, synthetic construct
  misc_feature 1..22: note = chemically synthesized
  source 1..22: mol_type = other DNA
ggaaggtaaatcagtcatttat

SEQ ID NO: 64835 - DNA, 22 bp, synthetic construct
  misc_feature 1..22: note = chemically synthesized
  source 1..22: mol_type = other DNA
atatgctatttgttgaattcct

SEQ ID NO: 64836 - DNA, 22 bp, synthetic construct
  misc_feature 1..22: note = chemically synthesized
  source 1..22: mol_type = other DNA
tatgctatttgttgaattccta

SEQ ID NO: 64837 - DNA, 22 bp, synthetic construct
  misc_feature 1..22: note = chemically synthesized
  source 1..22: mol_type = other DNA
tttgttgaattcctagaatata

SEQ ID NO: 64838 - DNA, 22 bp, synthetic construct
  misc_feature 1..22: note = chemically synthesized
  source 1..22: mol_type = other DNA
gttgaattcctagaatatatga

SEQ ID NO: 64839 - DNA, 22 bp, synthetic construct
  misc_feature 1..22: note = chemically synthesized
  source 1..22: mol_type = other DNA
ttgaattcctagaatatatgaa

SEQ ID NO: 64840 - DNA, 22 bp, synthetic construct
  misc_feature 1..22: note = chemically synthesized
  source 1..22: mol_type = other DNA
aattcctagaatatatgaatat

SEQ ID NO: 64841 - DNA, 22 bp, synthetic construct
  misc_feature 1..22: note = chemically synthesized
  source 1..22: mol_type = other DNA
ctagaatatatgaatatcatgt

SEQ ID NO: 64842 - DNA, 22 bp, synthetic construct
  misc_feature 1..22: note = chemically synthesized
  source 1..22: mol_type = other DNA
gaatatatgaatatcatgtcac

SEQ ID NO: 64843 - DNA, 22 bp, synthetic construct
  misc_feature 1..22: note = chemically synthesized
  source 1..22: mol_type = other DNA
tgctggtactttcaaatataat

SEQ ID NO: 64844 - DNA, 22 bp, synthetic construct
  misc_feature 1..22: note = chemically synthesized
  source 1..22: mol_type = other DNA
gtactttcaaatataatagaag

SEQ ID NO: 64845 - DNA, 22 bp, synthetic construct
  misc_feature 1..22: note = chemically synthesized
  source 1..22: mol_type = other DNA
tcaaatataatagaagcaagta

SEQ ID NO: 64846 - DNA, 22 bp, synthetic construct
  misc_feature 1..22: note = chemically synthesized
  source 1..22: mol_type = other DNA
caaatataatagaagcaagtag

SEQ ID NO: 64847 - DNA, 22 bp, synthetic construct
  misc_feature 1..22: note = chemically synthesized
  source 1..22: mol_type = other DNA
aaatataatagaagcaagtagg

SEQ ID NO: 64848 - DNA, 22 bp, synthetic construct
  misc_feature 1..22: note = chemically synthesized
  source 1..22: mol_type = other DNA
tattgaagaaactcattgggaa

SEQ ID NO: 64849 - DNA, 22 bp, synthetic construct
  misc_feature 1..22: note = chemically synthesized
  source 1..22: mol_type = other DNA
aagaaactcattgggaacacat

SEQ ID NO: 64850 - DNA, 22 bp, synthetic construct
  misc_feature 1..22: note = chemically synthesized
  source 1..22: mol_type = other DNA
attgggaacacatgaaattaat

SEQ ID NO: 64851 - DNA, 22 bp, synthetic construct
  misc_feature 1..22: note = chemically synthesized
  source 1..22: mol_type = other DNA
ggaacacatgaaattaattaga

SEQ ID NO: 64852 - DNA, 22 bp, synthetic construct
  misc_feature 1..22: note = chemically synthesized
  source 1..22: mol_type = other DNA
attagaggcatagagggttaac

SEQ ID NO: 64853 - DNA, 22 bp, synthetic construct
  misc_feature 1..22: note = chemically synthesized
  source 1..22: mol_type = other DNA
gaggcatagagggttaaccagc

SEQ ID NO: 64854 - DNA, 22 bp, synthetic construct
  misc_feature 1..22: note = chemically synthesized
  source 1..22: mol_type = other DNA
accagcaatgtaaggcctagat

SEQ ID NO: 64855 - DNA, 22 bp, synthetic construct
  misc_feature 1..22: note = chemically synthesized
  source 1..22: mol_type = other DNA
gatatgagtcagggagtggtgc

SEQ ID NO: 64856 - DNA, 22 bp, synthetic construct
  misc_feature 1..22: note = chemically synthesized
  source 1..22: mol_type = other DNA
tatgaggttggagaaggatgag

SEQ ID NO: 64857 - DNA, 22 bp, synthetic construct
  misc_feature 1..22: note = chemically synthesized
  source 1..22: mol_type = other DNA
tgaggttggagaaggatgagat

SEQ ID NO: 64858 - DNA, 22 bp, synthetic construct
  misc_feature 1..22: note = chemically synthesized
  source 1..22: mol_type = other DNA
gagaaggatgagattgattctt

SEQ ID NO: 64859 - DNA, 22 bp, synthetic construct
  misc_feature 1..22: note = chemically synthesized
  source 1..22: mol_type = other DNA
attcttcttgctaaggtgacta

SEQ ID NO: 64860 - DNA, 22 bp, synthetic construct
  misc_feature 1..22: note = chemically synthesized
  source 1..22: mol_type = other DNA
ttcttgctaaggtgactaggta

SEQ ID NO: 64861 - DNA, 22 bp, synthetic construct
  misc_feature 1..22: note = chemically synthesized
  source 1..22: mol_type = other DNA
cttgctaaggtgactaggtaga

SEQ ID NO: 64862 - DNA, 22 bp, synthetic construct
  misc_feature 1..22: note = chemically synthesized
  source 1..22: mol_type = other DNA
ttgctaaggtgactaggtagac

SEQ ID NO: 64863 - DNA, 22 bp, synthetic construct
  misc_feature 1..22: note = chemically synthesized
  source 1..22: mol_type = other DNA
gctaaggtgactaggtagacct

SEQ ID NO: 64864 - DNA, 22 bp, synthetic construct
  misc_feature 1..22: note = chemically synthesized
  source 1..22: mol_type = other DNA
ctaaggtgactaggtagacctt

SEQ ID NO: 64865 - DNA, 22 bp, synthetic construct
  misc_feature 1..22: note = chemically synthesized
  source 1..22: mol_type = other DNA
aggtgactaggtagaccttcat

SEQ ID NO: 64866 - DNA, 22 bp, synthetic construct
  misc_feature 1..22: note = chemically synthesized
  source 1..22: mol_type = other DNA
ggtagaccttcattgaggcctt

SEQ ID NO: 64867 - DNA, 22 bp, synthetic construct
  misc_feature 1..22: note = chemically synthesized
  source 1..22: mol_type = other DNA
cattgaggccttgaagtatgag

SEQ ID NO: 64868 - DNA, 22 bp, synthetic construct
  misc_feature 1..22: note = chemically synthesized
  source 1..22: mol_type = other DNA
attgaggccttgaagtatgagc

SEQ ID NO: 64869 - DNA, 22 bp, synthetic construct
  misc_feature 1..22: note = chemically synthesized
  source 1..22: mol_type = other DNA
aggccttgaagtatgagcagga

SEQ ID NO: 64870 - DNA, 22 bp, synthetic construct
  misc_feature 1..22: note = chemically synthesized
  source 1..22: mol_type = other DNA
gaagtatgagcaggattccagg

SEQ ID NO: 64871 - DNA, 22 bp, synthetic construct
  misc_feature 1..22: note = chemically synthesized
  source 1..22: mol_type = other DNA
aagtatgagcaggattccagga

SEQ ID NO: 64872 - DNA, 22 bp, synthetic construct
  misc_feature 1..22: note = chemically synthesized
  source 1..22: mol_type = other DNA
caggaggtaagagaagaagaag

SEQ ID NO: 64873 - DNA, 22 bp, synthetic construct
  misc_feature 1..22: note = chemically synthesized
  source 1..22: mol_type = other DNA
ttacttgggcagaatattttcc

SEQ ID NO: 64874 - DNA, 22 bp, synthetic construct
  misc_feature 1..22: note = chemically synthesized
  source 1..22: mol_type = other DNA
tacttgggcagaatattttcct

SEQ ID NO: 64875 - DNA, 22 bp, synthetic construct
  misc_feature 1..22: note = chemically synthesized
  source 1..22: mol_type = other DNA
acttgggcagaatattttcctt

SEQ ID NO: 64876 - DNA, 22 bp, synthetic construct
  misc_feature 1..22: note = chemically synthesized
  source 1..22: mol_type = other DNA
cttgggcagaatattttccttg

SEQ ID NO: 64877 - DNA, 22 bp, synthetic construct
  misc_feature 1..22: note = chemically synthesized
  source 1..22: mol_type = other DNA
gggcagaatattttccttgatg

SEQ ID NO: 64878 - DNA, 22 bp, synthetic construct
  misc_feature 1..22: note = chemically synthesized
  source 1..22: mol_type = other DNA
ggcagaatattttccttgatgg

SEQ ID NO: 64879 - DNA, 22 bp, synthetic construct
  misc_feature 1..22: note = chemically synthesized
  source 1..22: mol_type = other DNA
tccttgatgggtacggggaact

SEQ ID NO: 64880 - DNA, 22 bp, synthetic construct
  misc_feature 1..22: note = chemically synthesized
  source 1..22: mol_type = other DNA
ccttgatgggtacggggaacta

SEQ ID NO: 64881 - DNA, 22 bp, synthetic construct
  misc_feature 1..22: note = chemically synthesized
  source 1..22: mol_type = other DNA
cttgatgggtacggggaactaa

SEQ ID NO: 64882 - DNA, 22 bp, synthetic construct
  misc_feature 1..22: note = chemically synthesized
  source 1..22: mol_type = other DNA
gatgggtacggggaactaagac

SEQ ID NO: 64883 - DNA, 22 bp, synthetic construct
  misc_feature 1..22: note = chemically synthesized
  source 1..22: mol_type = other DNA
atgggtacggggaactaagact

SEQ ID NO: 64884 - DNA, 22 bp, synthetic construct
  misc_feature 1..22: note = chemically synthesized
  source 1..22: mol_type = other DNA
agactggaatagaaaattggag

SEQ ID NO: 64885 - DNA, 22 bp, synthetic construct
  misc_feature 1..22: note = chemically synthesized
  source 1..22: mol_type = other DNA
gaatagaaaattggagttggat

SEQ ID NO: 64886 - DNA, 22 bp, synthetic construct
  misc_feature 1..22: note = chemically synthesized
  source 1..22: mol_type = other DNA
gagttggattgtggagctctgg

SEQ ID NO: 64887 - DNA, 22 bp, synthetic construct
  misc_feature 1..22: note = chemically synthesized
  source 1..22: mol_type = other DNA
gattgtggagctctggaatgat

SEQ ID NO: 64888 - DNA, 22 bp, synthetic construct
  misc_feature 1..22: note = chemically synthesized
  source 1..22: mol_type = other DNA
tggagctctggaatgatggctt

SEQ ID NO: 64889 - DNA, 22 bp, synthetic construct
  misc_feature 1..22: note = chemically synthesized
  source 1..22: mol_type = other DNA
tggaatgatggcttaaggagtt

SEQ ID NO: 64890 - DNA, 22 bp, synthetic construct
  misc_feature 1..22: note = chemically synthesized
  source 1..22: mol_type = other DNA
gaatgatggcttaaggagttgg

SEQ ID NO: 64891 - DNA, 22 bp, synthetic construct
  misc_feature 1..22: note = chemically synthesized
  source 1..22: mol_type = other DNA
aaggagttggaccatatcctat

SEQ ID NO: 64892 - DNA, 22 bp, synthetic construct
  misc_feature 1..22: note = chemically synthesized
  source 1..22: mol_type = other DNA
aggagttggaccatatcctata

SEQ ID NO: 64893 - DNA, 22 bp, synthetic construct
  misc_feature 1..22: note = chemically synthesized
  source 1..22: mol_type = other DNA
gaccatatcctatagatcacag

SEQ ID NO: 64894 - DNA, 22 bp, synthetic construct
  misc_feature 1..22: note = chemically synthesized
  source 1..22: mol_type = other DNA
tagatcacagagggctgctgaa

SEQ ID NO: 64895 - DNA, 22 bp, synthetic construct
  misc_feature 1..22: note = chemically synthesized
  source 1..22: mol_type = other DNA
ctgaaatactctgatcagaaga

SEQ ID NO: 64896 - DNA, 22 bp, synthetic construct
  misc_feature 1..22: note = chemically synthesized
  source 1..22: mol_type = other DNA
aaatactctgatcagaagacaa

SEQ ID NO: 64897 - DNA, 22 bp, synthetic construct
  misc_feature 1..22: note = chemically synthesized
  source 1..22: mol_type = other DNA
tgatcagaagacaaaggcagca

SEQ ID NO: 64898 - DNA, 22 bp, synthetic construct
  misc_feature 1..22: note = chemically synthesized
  source 1..22: mol_type = other DNA
atcagaagacaaaggcagcatg

SEQ ID NO: 64899 - DNA, 22 bp, synthetic construct
  misc_feature 1..22: note = chemically synthesized
  source 1..22: mol_type = other DNA
ggggatgttaagtgaggactct

SEQ ID NO: 64900 - DNA, 22 bp, synthetic construct
  misc_feature 1..22: note = chemically synthesized
  source 1..22: mol_type = other DNA
agtgaggactctgcaaaggggg

SEQ ID NO: 64901 - DNA, 22 bp, synthetic construct
  misc_feature 1..22: note = chemically synthesized
  source 1..22: mol_type = other DNA
tgcaaagggggtggatgagttg

SEQ ID NO: 64902 - DNA, 22 bp, synthetic construct
  misc_feature 1..22: note = chemically synthesized
  source 1..22: mol_type = other DNA
caaagggggtggatgagttgtt

SEQ ID NO: 64903 - DNA, 22 bp, synthetic construct
  misc_feature 1..22: note = chemically synthesized
  source 1..22: mol_type = other DNA
ttgaaattctctgttataccct

SEQ ID NO: 64904 - DNA, 22 bp, synthetic construct
  misc_feature 1..22: note = chemically synthesized
  source 1..22: mol_type = other DNA
aaattctctgttatacccttca

SEQ ID NO: 64905 - DNA, 22 bp, synthetic construct
  misc_feature 1..22: note = chemically synthesized
  source 1..22: mol_type = other DNA
tctgttatacccttcatgccga

SEQ ID NO: 64906 - DNA, 22 bp, synthetic construct
  misc_feature 1..22: note = chemically synthesized
  source 1..22: mol_type = other DNA
tgttatacccttcatgccgagt

SEQ ID NO: 64907 - DNA, 22 bp, synthetic construct
  misc_feature 1..22: note = chemically synthesized
  source 1..22: mol_type = other DNA
ttatacccttcatgccgagttc

SEQ ID NO: 64908 - DNA, 22 bp, synthetic construct
  misc_feature 1..22: note = chemically synthesized
  source 1..22: mol_type = other DNA
tacccttcatgccgagttctcc

SEQ ID NO: 64909 - DNA, 22 bp, synthetic construct
  misc_feature 1..22: note = chemically synthesized
  source 1..22: mol_type = other DNA
catgccgagttctcccctgttg

SEQ ID NO: 64910 - DNA, 22 bp, synthetic construct
  misc_feature 1..22: note = chemically synthesized
  source 1..22: mol_type = other DNA
atgccgagttctcccctgttga

SEQ ID NO: 64911 - DNA, 22 bp, synthetic construct
  misc_feature 1..22: note = chemically synthesized
  source 1..22: mol_type = other DNA
tcccctgttgacttatatgttc

SEQ ID NO: 64912 - DNA, 22 bp, synthetic construct
  misc_feature 1..22: note = chemically synthesized
  source 1..22: mol_type = other DNA
ccctgttgacttatatgttcta

SEQ ID NO: 64913 - DNA, 22 bp, synthetic construct
  misc_feature 1..22: note = chemically synthesized
  source 1..22: mol_type = other DNA
ttgacttatatgttctagagga

SEQ ID NO: 64914 - DNA, 22 bp, synthetic construct
  misc_feature 1..22: note = chemically synthesized
  source 1..22: mol_type = other DNA
acttatatgttctagaggatgg

SEQ ID NO: 64915 - DNA, 22 bp, synthetic construct
  misc_feature 1..22: note = chemically synthesized
  source 1..22: mol_type = other DNA
atatgttctagaggatggagtt

SEQ ID NO: 64916 - DNA, 22 bp, synthetic construct
  misc_feature 1..22: note = chemically synthesized
  source 1..22: mol_type = other DNA
tatgttctagaggatggagttg

SEQ ID NO: 64917 - DNA, 22 bp, synthetic construct
  misc_feature 1..22: note = chemically synthesized
  source 1..22: mol_type = other DNA
tagaggatggagttggttgacc

SEQ ID NO: 64918 - DNA, 22 bp, synthetic construct
  misc_feature 1..22: note = chemically synthesized
  source 1..22: mol_type = other DNA
gaggatggagttggttgaccgt

SEQ ID NO: 64919 - DNA, 22 bp, synthetic construct
  misc_feature 1..22: note = chemically synthesized
  source 1..22: mol_type = other DNA
gttgaccgtagggtttcctttc

SEQ ID NO: 64920 - DNA, 22 bp, synthetic construct
  misc_feature 1..22: note = chemically synthesized
  source 1..22: mol_type = other DNA
accgtagggtttcctttcacta

SEQ ID NO: 64921 - DNA, 22 bp, synthetic construct
  misc_feature 1..22: note = chemically synthesized
  source 1..22: mol_type = other DNA
cctttcactagcagaatggaac

SEQ ID NO: 64922 - DNA, 22 bp, synthetic construct
  misc_feature 1..22: note = chemically synthesized
  source 1..22: mol_type = other DNA
ctttcactagcagaatggaacc

SEQ ID NO: 64923 - DNA, 22 bp, synthetic construct
  misc_feature 1..22: note = chemically synthesized
  source 1..22: mol_type = other DNA
tcactagcagaatggaaccaga

SEQ ID NO: 64924 - DNA, 22 bp, synthetic construct
  misc_feature 1..22: note = chemically synthesized
  source 1..22: mol_type = other DNA
cactagcagaatggaaccagat

SEQ ID NO: 64925 - DNA, 22 bp, synthetic construct
  misc_feature 1..22: note = chemically synthesized
  source 1..22: mol_type = other DNA
actagcagaatggaaccagata

SEQ ID NO: 64926 - DNA, 22 bp, synthetic construct
  misc_feature 1..22: note = chemically synthesized
  source 1..22: mol_type = other DNA
gcagaatggaaccagatattgt

SEQ ID NO: 64927 - DNA, 22 bp, synthetic construct
  misc_feature 1..22: note = chemically synthesized
  source 1..22: mol_type = other DNA
taggagcctagcacatgggtct

SEQ ID NO: 64928 - DNA, 22 bp, synthetic construct
  misc_feature 1..22: note = chemically synthesized
  source 1..22: mol_type = other DNA
gcacatgggtctgttactaata

SEQ ID NO: 64929 - DNA, 22 bp, synthetic construct
  misc_feature 1..22: note = chemically synthesized
  source 1..22: mol_type = other DNA
ttactaatatagaggactgttt

SEQ ID NO: 64930 - DNA, 22 bp, synthetic construct
  misc_feature 1..22: note = chemically synthesized
  source 1..22: mol_type = other DNA
ctaatatagaggactgtttaaa

SEQ ID NO: 64931 - DNA, 22 bp, synthetic construct
  misc_feature 1..22: note = chemically synthesized
  source 1..22: mol_type = other DNA
atatagaggactgtttaaatct

SEQ ID NO: 64932 - DNA, 22 bp, synthetic construct
  misc_feature 1..22: note = chemically synthesized
  source 1..22: mol_type = other DNA
tttaaatcttggaaagctttcc

SEQ ID NO: 64933 - DNA, 22 bp, synthetic construct
  misc_feature 1..22: note = chemically synthesized
  source 1..22: mol_type = other DNA
aaatcttggaaagctttccttt

SEQ ID NO: 64934 - DNA, 22 bp, synthetic construct
  misc_feature 1..22: note = chemically synthesized
  source 1..22: mol_type = other DNA
aatcttggaaagctttcctttt

SEQ ID NO: 64935 - DNA, 22 bp, synthetic construct
  misc_feature 1..22: note = chemically synthesized
  source 1..22: mol_type = other DNA
ggaaagctttccttttgccttt

SEQ ID NO: 64936 - DNA, 22 bp, synthetic construct
  misc_feature 1..22: note = chemically synthesized
  source 1..22: mol_type = other DNA
gaaagctttccttttgcctttg

SEQ ID NO: 64937 - DNA, 22 bp, synthetic construct
  misc_feature 1..22: note = chemically synthesized
  source 1..22: mol_type = other DNA
tccttttgcctttgcccccatt

SEQ ID NO: 64938 - DNA, 22 bp, synthetic construct
  misc_feature 1..22: note = chemically synthesized
  source 1..22: mol_type = other DNA
ccttttgcctttgcccccattg

SEQ ID NO: 64939 - DNA, 22 bp, synthetic construct
  misc_feature 1..22: note = chemically synthesized
  source 1..22: mol_type = other DNA
cttttgcctttgcccccattgc

SEQ ID NO: 64940 - DNA, 22 bp, synthetic construct
  misc_feature 1..22: note = chemically synthesized
  source 1..22: mol_type = other DNA
ttgcctttgcccccattgcaga

SEQ ID NO: 64941 - DNA, 22 bp, synthetic construct
  misc_feature 1..22: note = chemically synthesized
  source 1..22: mol_type = other DNA
tgcctttgcccccattgcagat

SEQ ID NO: 64942 - DNA, 22 bp, synthetic construct
  misc_feature 1..22: note = chemically synthesized
  source 1..22: mol_type = other DNA
gcctttgcccccattgcagatg

SEQ ID NO: 64943 - DNA, 22 bp, synthetic construct
  misc_feature 1..22: note = chemically synthesized
  source 1..22: mol_type = other DNA
cctttgcccccattgcagatgg

SEQ ID NO: 64944 - DNA, 22 bp, synthetic construct
  misc_feature 1..22: note = chemically synthesized
  source 1..22: mol_type = other DNA
tgcccccattgcagatggggag

SEQ ID NO: 64945 - DNA, 22 bp, synthetic construct
  misc_feature 1..22: note = chemically synthesized
  source 1..22: mol_type = other DNA
gcccccattgcagatggggagt

SEQ ID NO: 64946 - DNA, 22 bp, synthetic construct
  misc_feature 1..22: note = chemically synthesized
  source 1..22: mol_type = other DNA
cccccattgcagatggggagtg

SEQ ID NO: 64947 - DNA, 22 bp, synthetic construct
  misc_feature 1..22: note = chemically synthesized
  source 1..22: mol_type = other DNA
cagatggggagtgggcaggaat

SEQ ID NO: 64948 - DNA, 22 bp, synthetic construct
  misc_feature 1..22: note = chemically synthesized
  source 1..22: mol_type = other DNA
agaatcaagggcccatcagggt

SEQ ID NO: 64949 - DNA, 22 bp, synthetic construct
  misc_feature 1..22: note = chemically synthesized
  source 1..22: mol_type = other DNA
tattggtcccttgtccctctcc

SEQ ID NO: 64950 - DNA, 22 bp, synthetic construct
  misc_feature 1..22: note = chemically synthesized
  source 1..22: mol_type = other DNA
gtcccttgtccctctcctccag

SEQ ID NO: 64951 - DNA, 22 bp, synthetic construct
  misc_feature 1..22: note = chemically synthesized
  source 1..22: mol_type = other DNA
gtccctctcctccagtccatcc

SEQ ID NO: 64952 - DNA, 22 bp, synthetic construct
  misc_feature 1..22: note = chemically synthesized
  source 1..22: mol_type = other DNA
tccctctcctccagtccatcca

SEQ ID NO: 64953 - DNA, 22 bp, synthetic construct
  misc_feature 1..22: note = chemically synthesized
  source 1..22: mol_type = other DNA
tcctccagtccatccatgttgg

SEQ ID NO: 64954 - DNA, 22 bp, synthetic construct
  misc_feature 1..22: note = chemically synthesized
  source 1..22: mol_type = other DNA
ctccagtccatccatgttggga

SEQ ID NO: 64955 - DNA, 22 bp, synthetic construct
  misc_feature 1..22: note = chemically synthesized
  source 1..22: mol_type = other DNA
cagtccatccatgttgggatac

SEQ ID NO: 64956 - DNA, 22 bp, synthetic construct
  misc_feature 1..22: note = chemically synthesized
  source 1..22: mol_type = other DNA
ggatactcagggcatggatggt

SEQ ID NO: 64957 - DNA, 22 bp, synthetic construct
  misc_feature 1..22: note = chemically synthesized
  source 1..22: mol_type = other DNA
agggcatggatggtgtttcatg

SEQ ID NO: 64958 - DNA, 22 bp, synthetic construct
  misc_feature 1..22: note = chemically synthesized
  source 1..22: mol_type = other DNA
catgatagcatttatcattttg

SEQ ID NO: 64959 - DNA, 22 bp, synthetic construct
  misc_feature 1..22: note = chemically synthesized
  source 1..22: mol_type = other DNA
atgatagcatttatcattttga

SEQ ID NO: 64960 - DNA, 22 bp, synthetic construct
  misc_feature 1..22: note = chemically synthesized
  source 1..22: mol_type = other DNA
atcattttgatgatatgtgaca

SEQ ID NO: 64961 - DNA, 22 bp, synthetic construct
  misc_feature 1..22: note = chemically synthesized
  source 1..22: mol_type = other DNA
tcattttgatgatatgtgacaa

SEQ ID NO: 64962 - DNA, 22 bp, synthetic construct
  misc_feature 1..22: note = chemically synthesized
  source 1..22: mol_type = other DNA
tgatgatatgtgacaaaataag

SEQ ID NO: 64963 - DNA, 22 bp, synthetic construct
  misc_feature 1..22: note = chemically synthesized
  source 1..22: mol_type = other DNA
gatgatatgtgacaaaataagg

SEQ ID NO: 64964 - DNA, 22 bp, synthetic construct
  misc_feature 1..22: note = chemically synthesized
  source 1..22: mol_type = other DNA
atgatatgtgacaaaataaggc

SEQ ID NO: 64965 - DNA, 22 bp, synthetic construct
  misc_feature 1..22: note = chemically synthesized
  source 1..22: mol_type = other DNA
atatccctgtgatctctcttta

SEQ ID NO: 64966 - DNA, 22 bp, synthetic construct
  misc_feature 1..22: note = chemically synthesized
  source 1..22: mol_type = other DNA
tgatctctctttaatagtgtcc

SEQ ID NO: 64967 - DNA, 22 bp, synthetic construct
  misc_feature 1..22: note = chemically synthesized
  source 1..22: mol_type = other DNA
tctttaatagtgtcctcctgct

SEQ ID NO: 64968 - DNA, 22 bp, synthetic construct
  misc_feature 1..22: note = chemically synthesized
  source 1..22: mol_type = other DNA
tttaatagtgtcctcctgcttt

SEQ ID NO: 64969 - DNA, 22 bp, synthetic construct
  misc_feature 1..22: note = chemically synthesized
  source 1..22: mol_type = other DNA
taatagtgtcctcctgctttgg

SEQ ID NO: 64970 - DNA, 22 bp, synthetic construct
  misc_feature 1..22: note = chemically synthesized
  source 1..22: mol_type = other DNA
aatagtgtcctcctgctttggg

SEQ ID NO: 64971 - DNA, 22 bp, synthetic construct
  misc_feature 1..22: note = chemically synthesized
  source 1..22: mol_type = other DNA
atagtgtcctcctgctttgggg

SEQ ID NO: 64972 - DNA, 22 bp, synthetic construct
  misc_feature 1..22: note = chemically synthesized
  source 1..22: mol_type = other DNA
ctgctttgggggttattaagct

SEQ ID NO: 64973 - DNA, 22 bp, synthetic construct
  misc_feature 1..22: note = chemically synthesized
  source 1..22: mol_type = other DNA
ctttgggggttattaagctagc

SEQ ID NO: 64974 - DNA, 22 bp, synthetic construct
  misc_feature 1..22: note = chemically synthesized
  source 1..22: mol_type = other DNA
tgggggttattaagctagcctg

SEQ ID NO: 64975 - DNA, 22 bp, synthetic construct
  misc_feature 1..22: note = chemically synthesized
  source 1..22: mol_type = other DNA
gggggttattaagctagcctga

SEQ ID NO: 64976 - DNA, 22 bp, synthetic construct
  misc_feature 1..22: note = chemically synthesized
  source 1..22: mol_type = other DNA
ggggttattaagctagcctgaa

SEQ ID NO: 64977 - DNA, 22 bp, synthetic construct
  misc_feature 1..22: note = chemically synthesized
  source 1..22: mol_type = other DNA
ttaagctagcctgaacttgagt

SEQ ID NO: 64978 - DNA, 22 bp, synthetic construct
  misc_feature 1..22: note = chemically synthesized
  source 1..22: mol_type = other DNA
agctagcctgaacttgagtaaa

SEQ ID NO: 64979 - DNA, 22 bp, synthetic construct
  misc_feature 1..22: note = chemically synthesized
  source 1..22: mol_type = other DNA
gcctgaacttgagtaaacattt

SEQ ID NO: 64980 - DNA, 22 bp, synthetic construct
  misc_feature 1..22: note = chemically synthesized
  source 1..22: mol_type = other DNA
aacttgagtaaacatttttgga

SEQ ID NO: 64981 - DNA, 22 bp, synthetic construct
  misc_feature 1..22: note = chemically synthesized
  source 1..22: mol_type = other DNA
gagtaaacatttttggatgggg

SEQ ID NO: 64982 - DNA, 22 bp, synthetic construct
  misc_feature 1..22: note = chemically synthesized
  source 1..22: mol_type = other DNA
agtaaacatttttggatggggt

SEQ ID NO: 64983 - DNA, 22 bp, synthetic construct
  misc_feature 1..22: note = chemically synthesized
  source 1..22: mol_type = other DNA
ttggatggggtgagaggggggc

SEQ ID NO: 64984 - DNA, 22 bp, synthetic construct
  misc_feature 1..22: note = chemically synthesized
  source 1..22: mol_type = other DNA
tggatggggtgagaggggggct

SEQ ID NO: 64985 - DNA, 22 bp, synthetic construct
  misc_feature 1..22: note = chemically synthesized
  source 1..22: mol_type = other DNA
ggatggggtgagaggggggctg

SEQ ID NO: 64986 - DNA, 22 bp, synthetic construct
  misc_feature 1..22: note = chemically synthesized
  source 1..22: mol_type = other DNA
gatggggtgagaggggggctga

SEQ ID NO: 64987 - DNA, 22 bp, synthetic construct
  misc_feature 1..22: note = chemically synthesized
  source 1..22: mol_type = other DNA
ataaaagtggttagtaaataga

SEQ ID NO: 64988 - DNA, 22 bp, synthetic construct
  misc_feature 1..22: note = chemically synthesized
  source 1..22: mol_type = other DNA
gtaaatagacagttggaaagga

SEQ ID NO: 64989 - DNA, 22 bp, synthetic construct
  misc_feature 1..22: note = chemically synthesized
  source 1..22: mol_type = other DNA
gaaaggagaacggcccgggggc

SEQ ID NO: 64990 - DNA, 22 bp, synthetic construct
  misc_feature 1..22: note = chemically synthesized
  source 1..22: mol_type = other DNA
aggagatgagccagggaacaag

SEQ ID NO: 64991 - DNA, 22 bp, synthetic construct
  misc_feature 1..22: note = chemically synthesized
  source 1..22: mol_type = other DNA
gtgacccagagtgtcctagagg

SEQ ID NO: 64992 - DNA, 22 bp, synthetic construct
  misc_feature 1..22: note = chemically synthesized
  source 1..22: mol_type = other DNA
gaggggaaagaacctctgttag

SEQ ID NO: 64993 - DNA, 22 bp, synthetic construct
  misc_feature 1..22: note = chemically synthesized
  source 1..22: mol_type = other DNA
tgttagaatttcaaatgtcaga

SEQ ID NO: 64994 - DNA, 22 bp, synthetic construct
  misc_feature 1..22: note = chemically synthesized
  source 1..22: mol_type = other DNA
ttagaatttcaaatgtcagact

SEQ ID NO: 64995 - DNA, 22 bp, synthetic construct
  misc_feature 1..22: note = chemically synthesized
  source 1..22: mol_type = other DNA
gaatttcaaatgtcagactttc

SEQ ID NO: 64996 - DNA, 22 bp, synthetic construct
  misc_feature 1..22: note = chemically synthesized
  source 1..22: mol_type = other DNA
caaatgtcagactttcttttca

SEQ ID NO: 64997 - DNA, 22 bp, synthetic construct
  misc_feature 1..22: note = chemically synthesized
  source 1..22: mol_type = other DNA
aaatgtcagactttcttttcag

SEQ ID NO: 64998 - DNA, 22 bp, synthetic construct
  misc_feature 1..22: note = chemically synthesized
  source 1..22: mol_type = other DNA
tcttttcagcttccttcaggtg

SEQ ID NO: 64999 - DNA, 22 bp, synthetic construct
  misc_feature 1..22: note = chemically synthesized
  source 1..22: mol_type = other DNA
cttttcagcttccttcaggtgc

SEQ ID NO: 65000 - DNA, 22 bp, synthetic construct
  misc_feature 1..22: note = chemically synthesized
  source 1..22: mol_type = other DNA
ttttcagcttccttcaggtgct

SEQ ID NO: 65001 - DNA, 22 bp, synthetic construct
  misc_feature 1..22: note = chemically synthesized
  source 1..22: mol_type = other DNA
ttcagcttccttcaggtgcttc

SEQ ID NO: 65002 - DNA, 22 bp, synthetic construct
  misc_feature 1..22: note = chemically synthesized
  source 1..22: mol_type = other DNA
tcagcttccttcaggtgcttcc

SEQ ID NO: 65003 - DNA, 22 bp, synthetic construct
  misc_feature 1..22: note = chemically synthesized
  source 1..22: mol_type = other DNA
cagcttccttcaggtgcttcct

SEQ ID NO: 65004 - DNA, 22 bp, synthetic construct
  misc_feature 1..22: note = chemically synthesized
  source 1..22: mol_type = other DNA
agcttccttcaggtgcttcctc

SEQ ID NO: 65005 - DNA, 22 bp, synthetic construct
  misc_feature 1..22: note = chemically synthesized
  source 1..22: mol_type = other DNA
ccttcaggtgcttcctcttcta

SEQ ID NO: 65006 - DNA, 22 bp, synthetic construct
  misc_feature 1..22: note = chemically synthesized
  source 1..22: mol_type = other DNA
cttcaggtgcttcctcttctac

SEQ ID NO: 65007 - DNA, 22 bp, synthetic construct
  misc_feature 1..22: note = chemically synthesized
  source 1..22: mol_type = other DNA
caggtgcttcctcttctactca

SEQ ID NO: 65008 - DNA, 22 bp, synthetic construct
  misc_feature 1..22: note = chemically synthesized
  source 1..22: mol_type = other DNA
aggtgcttcctcttctactcag

SEQ ID NO: 65009 - DNA, 22 bp, synthetic construct
  misc_feature 1..22: note = chemically synthesized
  source 1..22: mol_type = other DNA
cctcttctactcagaattttct

SEQ ID NO: 65010 - DNA, 22 bp, synthetic construct
  misc_feature 1..22: note = chemically synthesized
  source 1..22: mol_type = other DNA
ctcttctactcagaattttctt

SEQ ID NO: 65011 - DNA, 22 bp, synthetic construct
  misc_feature 1..22: note = chemically synthesized
  source 1..22: mol_type = other DNA
ttctactcagaattttcttttg

SEQ ID NO: 65012 - DNA, 22 bp, synthetic construct
  misc_feature 1..22: note = chemically synthesized
  source 1..22: mol_type = other DNA
ctactcagaattttcttttgag

SEQ ID NO: 65013 - DNA, 22 bp, synthetic construct
  misc_feature 1..22: note = chemically synthesized
  source 1..22: mol_type = other DNA
tactcagaattttcttttgaga

SEQ ID NO: 65014 - DNA, 22 bp, synthetic construct
  misc_feature 1..22: note = chemically synthesized
  source 1..22: mol_type = other DNA
ctcagaattttcttttgagata

SEQ ID NO: 65015 - DNA, 22 bp, synthetic construct
  misc_feature 1..22: note = chemically synthesized
  source 1..22: mol_type = other DNA
agaattttcttttgagataggt

SEQ ID NO: 65016 - DNA, 22 bp, synthetic construct
  misc_feature 1..22: note = chemically synthesized
  source 1..22: mol_type = other DNA
tcttttgagataggtgctggtc

SEQ ID NO: 65017 - DNA, 22 bp, synthetic construct
  misc_feature 1..22: note = chemically synthesized
  source 1..22: mol_type = other DNA
cttttgagataggtgctggtca

SEQ ID NO: 65018 - DNA, 22 bp, synthetic construct
  misc_feature 1..22: note = chemically synthesized
  source 1..22: mol_type = other DNA
ttttgagataggtgctggtcaa

SEQ ID NO: 65019 - DNA, 22 bp, synthetic construct
  misc_feature 1..22: note = chemically synthesized
  source 1..22: mol_type = other DNA
ttgagataggtgctggtcaaac

SEQ ID NO: 65020 - DNA, 22 bp, synthetic construct
  misc_feature 1..22: note = chemically synthesized
  source 1..22: mol_type = other DNA
tgagataggtgctggtcaaaca

SEQ ID NO: 65021 - DNA, 22 bp, synthetic construct
  misc_feature 1..22: note = chemically synthesized
  source 1..22: mol_type = other DNA
gagataggtgctggtcaaacaa

SEQ ID NO: 65022 - DNA, 22 bp, synthetic construct
  misc_feature 1..22: note = chemically synthesized
  source 1..22: mol_type = other DNA
agataggtgctggtcaaacaag

SEQ ID NO: 65023 - DNA, 22 bp, synthetic construct
  misc_feature 1..22: note = chemically synthesized
  source 1..22: mol_type = other DNA
gtcaaacaagcttttgtttgtg

SEQ ID NO: 65024 - DNA, 22 bp, synthetic construct
  misc_feature 1..22: note = chemically synthesized
  source 1..22: mol_type = other DNA
ttgtttgtggctggtcacttgg

SEQ ID NO: 65025 - DNA, 22 bp, synthetic construct
  misc_feature 1..22: note = chemically synthesized
  source 1..22: mol_type = other DNA
tgtttgtggctggtcacttggc

SEQ ID NO: 65026 - DNA, 22 bp, synthetic construct
  misc_feature 1..22: note = chemically synthesized
  source 1..22: mol_type = other DNA
gtttgtggctggtcacttggca

SEQ ID NO: 65027 - DNA, 22 bp, synthetic construct
  misc_feature 1..22: note = chemically synthesized
  source 1..22: mol_type = other DNA
tttgtggctggtcacttggcac

SEQ ID NO: 65028 - DNA, 22 bp, synthetic construct
  misc_feature 1..22: note = chemically synthesized
  source 1..22: mol_type = other DNA
gtggctggtcacttggcacaca

SEQ ID NO: 65029 - DNA, 22 bp, synthetic construct
  misc_feature 1..22: note = chemically synthesized
  source 1..22: mol_type = other DNA
tggctggtcacttggcacacag

SEQ ID NO: 65030 - DNA, 22 bp, synthetic construct
  misc_feature 1..22: note = chemically synthesized
  source 1..22: mol_type = other DNA
gtcacttggcacacagtgtggc

SEQ ID NO: 65031 - DNA, 22 bp, synthetic construct
  misc_feature 1..22: note = chemically synthesized
  source 1..22: mol_type = other DNA
ggcacacagtgtggctgtttgt

SEQ ID NO: 65032 - DNA, 22 bp, synthetic construct
  misc_feature 1..22: note = chemically synthesized
  source 1..22: mol_type = other DNA
gcacacagtgtggctgtttgtc

SEQ ID NO: 65033 - DNA, 22 bp, synthetic construct
  misc_feature 1..22: note = chemically synthesized
  source 1..22: mol_type = other DNA
tttgtcatcctggatgatgagg

SEQ ID NO: 65034 - DNA, 22 bp, synthetic construct
  misc_feature 1..22: note = chemically synthesized
  source 1..22: mol_type = other DNA
gtcatcctggatgatgaggcag

SEQ ID NO: 65035 - DNA, 22 bp, synthetic construct
  misc_feature 1..22: note = chemically synthesized
  source 1..22: mol_type = other DNA
tcatcctggatgatgaggcagc

SEQ ID NO: 65036 - DNA, 22 bp, synthetic construct
  misc_feature 1..22: note = chemically synthesized
  source 1..22: mol_type = other DNA
gatgatgaggcagctattttaa

SEQ ID NO: 65037 - DNA, 22 bp, synthetic construct
  misc_feature 1..22: note = chemically synthesized
  source 1..22: mol_type = other DNA
ttttaatggcacgcagggccgc

SEQ ID NO: 65038 - DNA, 22 bp, synthetic construct
  misc_feature 1..22: note = chemically synthesized
  source 1..22: mol_type = other DNA
taatggcacgcagggccgccgt

SEQ ID NO: 65039 - DNA, 22 bp, synthetic construct
  misc_feature 1..22: note = chemically synthesized
  source 1..22: mol_type = other DNA
aatggcacgcagggccgccgtg

SEQ ID NO: 65040 - DNA, 22 bp, synthetic construct
  misc_feature 1..22: note = chemically synthesized
  source 1..22: mol_type = other DNA
atggcacgcagggccgccgtgt

SEQ ID NO: 65041 - DNA, 22 bp, synthetic construct
  misc_feature 1..22: note = chemically synthesized
  source 1..22: mol_type = other DNA
actgccaagaaataagggcttc

SEQ ID NO: 65042 - DNA, 22 bp, synthetic construct
  misc_feature 1..22: note = chemically synthesized
  source 1..22: mol_type = other DNA
ctgccaagaaataagggcttct

SEQ ID NO: 65043 - DNA, 22 bp, synthetic construct
  misc_feature 1..22: note = chemically synthesized
  source 1..22: mol_type = other DNA
ccaagaaataagggcttctagg

SEQ ID NO: 65044 - DNA, 22 bp, synthetic construct
  misc_feature 1..22: note = chemically synthesized
  source 1..22: mol_type = other DNA
ctaggagacttggtggctttag

SEQ ID NO: 65045 - DNA, 22 bp, synthetic construct
  misc_feature 1..22: note = chemically synthesized
  source 1..22: mol_type = other DNA
taggagacttggtggctttagg

SEQ ID NO: 65046 - DNA, 22 bp, synthetic construct
  misc_feature 1..22: note = chemically synthesized
  source 1..22: mol_type = other DNA
ggagacttggtggctttaggaa

SEQ ID NO: 65047 - DNA, 22 bp, synthetic construct
  misc_feature 1..22: note = chemically synthesized
  source 1..22: mol_type = other DNA
ggtggctttaggaacaaacttc

SEQ ID NO: 65048 - DNA, 22 bp, synthetic construct
  misc_feature 1..22: note = chemically synthesized
  source 1..22: mol_type = other DNA
gtggctttaggaacaaacttcc

SEQ ID NO: 65049 - DNA, 22 bp, synthetic construct
  misc_feature 1..22: note = chemically synthesized
  source 1..22: mol_type = other DNA
taggaacaaacttccagcggca

SEQ ID NO: 65050 - DNA, 22 bp, synthetic construct
  misc_feature 1..22: note = chemically synthesized
  source 1..22: mol_type = other DNA
aggaacaaacttccagcggcag

SEQ ID NO: 65051 - DNA, 22 bp, synthetic construct
  misc_feature 1..22: note = chemically synthesized
  source 1..22: mol_type = other DNA
ggaacaaacttccagcggcaga

SEQ ID NO: 65052 - DNA, 22 bp, synthetic construct
  misc_feature 1..22: note = chemically synthesized
  source 1..22: mol_type = other DNA
ccagcggcagaaattagttagg

SEQ ID NO: 65053 - DNA, 22 bp, synthetic construct
  misc_feature 1..22: note = chemically synthesized
  source 1..22: mol_type = other DNA
cagcggcagaaattagttagga

SEQ ID NO: 65054 - DNA, 22 bp, synthetic construct
  misc_feature 1..22: note = chemically synthesized
  source 1..22: mol_type = other DNA
gttaggaagcagagtagcactg

SEQ ID NO: 65055 - DNA, 22 bp, synthetic construct
  misc_feature 1..22: note = chemically synthesized
  source 1..22: mol_type = other DNA
ggaagcagagtagcactgggtt

SEQ ID NO: 65056 - DNA, 22 bp, synthetic construct
  misc_feature 1..22: note = chemically synthesized
  source 1..22: mol_type = other DNA
ggttccaaatgcctctattgta

SEQ ID NO: 65057 - DNA, 22 bp, synthetic construct
  misc_feature 1..22: note = chemically synthesized
  source 1..22: mol_type = other DNA
caaatgcctctattgtatgaat

SEQ ID NO: 65058 - DNA, 22 bp, synthetic construct
  misc_feature 1..22: note = chemically synthesized
  source 1..22: mol_type = other DNA
tattgtatgaatttggatatgt

SEQ ID NO: 65059 - DNA, 22 bp, synthetic construct
  misc_feature 1..22: note = chemically synthesized
  source 1..22: mol_type = other DNA
ttgtatgaatttggatatgttg

SEQ ID NO: 65060 - DNA, 22 bp, synthetic construct
  misc_feature 1..22: note = chemically synthesized
  source 1..22: mol_type = other DNA
tatgaatttggatatgttgtgg

SEQ ID NO: 65061 - DNA, 22 bp, synthetic construct
  misc_feature 1..22: note = chemically synthesized
  source 1..22: mol_type = other DNA
ggatatgttgtgggcaaaatga

SEQ ID NO: 65062 - DNA, 22 bp, synthetic construct
  misc_feature 1..22: note = chemically synthesized
  source 1..22: mol_type = other DNA
gatatgttgtgggcaaaatgac

SEQ ID NO: 65063 - DNA, 22 bp, synthetic construct
  misc_feature 1..22: note = chemically synthesized
  source 1..22: mol_type = other DNA
tgggcaaaatgacataaaagaa

SEQ ID NO: 65064 - DNA, 22 bp, synthetic construct
  misc_feature 1..22: note = chemically synthesized
  source 1..22: mol_type = other DNA
acaaggaccccattggcatgtg

SEQ ID NO: 65065 - DNA, 22 bp, synthetic construct
  misc_feature 1..22: note = chemically synthesized
  source 1..22: mol_type = other DNA
gcatgtgggctagtgttgactg

SEQ ID NO: 65066 - DNA, 22 bp, synthetic construct
  misc_feature 1..22: note = chemically synthesized
  source 1..22: mol_type = other DNA
gtgttgactggctctcacagtg

SEQ ID NO: 65067 - DNA, 22 bp, synthetic construct
  misc_feature 1..22: note = chemically synthesized
  source 1..22: mol_type = other DNA
actggctctcacagtgtgaatt

SEQ ID NO: 65068 - DNA, 22 bp, synthetic construct
  misc_feature 1..22: note = chemically synthesized
  source 1..22: mol_type = other DNA
gctctcacagtgtgaatttagt

SEQ ID NO: 65069 - DNA, 22 bp, synthetic construct
  misc_feature 1..22: note = chemically synthesized
  source 1..22: mol_type = other DNA
tcacagtgtgaatttagttagg

SEQ ID NO: 65070 - DNA, 22 bp, synthetic construct
  misc_feature 1..22: note = chemically synthesized
  source 1..22: mol_type = other DNA
acagtgtgaatttagttaggtg

SEQ ID NO: 65071 - DNA, 22 bp, synthetic construct
  misc_feature 1..22: note = chemically synthesized
  source 1..22: mol_type = other DNA
agttaggtgtttccactttatt

SEQ ID NO: 65072 - DNA, 22 bp, synthetic construct
  misc_feature 1..22: note = chemically synthesized
  source 1..22: mol_type = other DNA
gttaggtgtttccactttattt

SEQ ID NO: 65073 - DNA, 22 bp, synthetic construct
  misc_feature 1..22: note = chemically synthesized
  source 1..22: mol_type = other DNA
ggtgtttccactttattttccc

SEQ ID NO: 65074 - DNA, 22 bp, synthetic construct
  misc_feature 1..22: note = chemically synthesized
  source 1..22: mol_type = other DNA
ccactttattttccccaaactc

SEQ ID NO: 65075 - DNA, 22 bp, synthetic construct
  misc_feature 1..22: note = chemically synthesized
  source 1..22: mol_type = other DNA
cactttattttccccaaactct

SEQ ID NO: 65076 - DNA, 22 bp, synthetic construct
  misc_feature 1..22: note = chemically synthesized
  source 1..22: mol_type = other DNA
tattttccccaaactctaaagc

SEQ ID NO: 65077 - DNA, 22 bp, synthetic construct
  misc_feature 1..22: note = chemically synthesized
  source 1..22: mol_type = other DNA
attttccccaaactctaaagca

SEQ ID NO: 65078 - DNA, 22 bp, synthetic construct
  misc_feature 1..22: note = chemically synthesized
  source 1..22: mol_type = other DNA
ttttccccaaactctaaagcaa

SEQ ID NO: 65079 - DNA, 22 bp, synthetic construct
  misc_feature 1..22: note = chemically synthesized
  source 1..22: mol_type = other DNA
tccccaaactctaaagcaacag

SEQ ID NO: 65080 - DNA, 22 bp, synthetic construct
  misc_feature 1..22: note = chemically synthesized
  source 1..22: mol_type = other DNA
ccccaaactctaaagcaacagt

SEQ ID NO: 65081 - DNA, 22 bp, synthetic construct
  misc_feature 1..22: note = chemically synthesized
  source 1..22: mol_type = other DNA
cccaaactctaaagcaacagtt

SEQ ID NO: 65082 - DNA, 22 bp, synthetic construct
  misc_feature 1..22: note = chemically synthesized
  source 1..22: mol_type = other DNA
taaagcaacagtttaattgggg

SEQ ID NO: 65083 - DNA, 22 bp, synthetic construct
  misc_feature 1..22: note = chemically synthesized
  source 1..22: mol_type = other DNA
aagcaacagtttaattggggtc

SEQ ID NO: 65084 - DNA, 22 bp, synthetic construct
  misc_feature 1..22: note = chemically synthesized
  source 1..22: mol_type = other DNA
aattggggtctaaggtaccctt

SEQ ID NO: 65085 - DNA, 22 bp, synthetic construct
  misc_feature 1..22: note = chemically synthesized
  source 1..22: mol_type = other DNA
attggggtctaaggtacccttt

SEQ ID NO: 65086 - DNA, 22 bp, synthetic construct
  misc_feature 1..22: note = chemically synthesized
  source 1..22: mol_type = other DNA
gggtctaaggtaccctttagaa

SEQ ID NO: 65087 - DNA, 22 bp, synthetic construct
  misc_feature 1..22: note = chemically synthesized
  source 1..22: mol_type = other DNA
aggtaccctttagaaacatttt

SEQ ID NO: 65088 - DNA, 22 bp, synthetic construct
  misc_feature 1..22: note = chemically synthesized
  source 1..22: mol_type = other DNA
tagaaacattttgaccacctat

SEQ ID NO: 65089 - DNA, 22 bp, synthetic construct
  misc_feature 1..22: note = chemically synthesized
  source 1..22: mol_type = other DNA
agaaacattttgaccacctatt

SEQ ID NO: 65090 - DNA, 22 bp, synthetic construct
  misc_feature 1..22: note = chemically synthesized
  source 1..22: mol_type = other DNA
gaaacattttgaccacctatta

SEQ ID NO: 65091 - DNA, 22 bp, synthetic construct
  misc_feature 1..22: note = chemically synthesized
  source 1..22: mol_type = other DNA
tgaccacctattatttaggaca

SEQ ID NO: 65092 - DNA, 22 bp, synthetic construct
  misc_feature 1..22: note = chemically synthesized
  source 1..22: mol_type = other DNA
gaccacctattatttaggacac

SEQ ID NO: 65093 - DNA, 22 bp, synthetic construct
  misc_feature 1..22: note = chemically synthesized
  source 1..22: mol_type = other DNA
accacctattatttaggacaca

SEQ ID NO: 65094 - DNA, 22 bp, synthetic construct
  misc_feature 1..22: note = chemically synthesized
  source 1..22: mol_type = other DNA
ttatttaggacacacagcattt

SEQ ID NO: 65095 - DNA, 22 bp, synthetic construct
  misc_feature 1..22: note = chemically synthesized
  source 1..22: mol_type = other DNA
tttaggacacacagcatttttt

SEQ ID NO: 65096 - DNA, 22 bp, synthetic construct
  misc_feature 1..22: note = chemically synthesized
  source 1..22: mol_type = other DNA
aggacacacagcattttttttc

SEQ ID NO: 65097 - DNA, 22 bp, synthetic construct
  misc_feature 1..22: note = chemically synthesized
  source 1..22: mol_type = other DNA
ggacacacagcattttttttct

SEQ ID NO: 65098 - DNA, 22 bp, synthetic construct
  misc_feature 1..22: note = chemically synthesized
  source 1..22: mol_type = other DNA
tttttctttgaagataaatttg

SEQ ID NO: 65099 - DNA, 22 bp, synthetic construct
  misc_feature 1..22: note = chemically synthesized
  source 1..22: mol_type = other DNA
ttttctttgaagataaatttgt

SEQ ID NO: 65100 - DNA, 22 bp, synthetic construct
  misc_feature 1..22: note = chemically synthesized
  source 1..22: mol_type = other DNA
tttctttgaagataaatttgtt

SEQ ID NO: 65101 - DNA, 22 bp, synthetic construct
  misc_feature 1..22: note = chemically synthesized
  source 1..22: mol_type = other DNA
ttctttgaagataaatttgttt

SEQ ID NO: 65102 - DNA, 22 bp, synthetic construct
  misc_feature 1..22: note = chemically synthesized
  source 1..22: mol_type = other DNA
tctttgaagataaatttgtttt

SEQ ID NO: 65103 - DNA, 22 bp, synthetic construct
  misc_feature 1..22: note = chemically synthesized
  source 1..22: mol_type = other DNA
ctttgaagataaatttgttttg

SEQ ID NO: 65104 - DNA, 22 bp, synthetic construct
  misc_feature 1..22: note = chemically synthesized
  source 1..22: mol_type = other DNA
tttgaagataaatttgttttgg

SEQ ID NO: 65105 - DNA, 22 bp, synthetic construct
  misc_feature 1..22: note = chemically synthesized
  source 1..22: mol_type = other DNA
tgaagataaatttgttttgggt

SEQ ID NO: 65106 - DNA, 22 bp, synthetic construct
  misc_feature 1..22: note = chemically synthesized
  source 1..22: mol_type = other DNA
gaagataaatttgttttgggta

SEQ ID NO: 65107 - DNA, 22 bp, synthetic construct
  misc_feature 1..22: note = chemically synthesized
  source 1..22: mol_type = other DNA
aagataaatttgttttgggtat

SEQ ID NO: 65108 - DNA, 22 bp, synthetic construct
  misc_feature 1..22: note = chemically synthesized
  source 1..22: mol_type = other DNA
gttttgggtatggctgggtgtg

SEQ ID NO: 65109 - DNA, 22 bp, synthetic construct
  misc_feature 1..22: note = chemically synthesized
  source 1..22: mol_type = other DNA
ttttgggtatggctgggtgtgg

SEQ ID NO: 65110 - DNA, 22 bp, synthetic construct
  misc_feature 1..22: note = chemically synthesized
  source 1..22: mol_type = other DNA
tgggtatggctgggtgtggtag

SEQ ID NO: 65111 - DNA, 22 bp, synthetic construct
  misc_feature 1..22: note = chemically synthesized
  source 1..22: mol_type = other DNA
gggtatggctgggtgtggtagc

SEQ ID NO: 65112 - DNA, 22 bp, synthetic construct
  misc_feature 1..22: note = chemically synthesized
  source 1..22: mol_type = other DNA
ggtatggctgggtgtggtagct

SEQ ID NO: 65113 - DNA, 22 bp, synthetic construct
  misc_feature 1..22: note = chemically synthesized
  source 1..22: mol_type = other DNA
ggtgtggtagcttatgcctata

SEQ ID NO: 65114 - DNA, 22 bp, synthetic construct
  misc_feature 1..22: note = chemically synthesized
  source 1..22: mol_type = other DNA
atgcctataatcccagcacttt

SEQ ID NO: 65115 - DNA, 22 bp, synthetic construct
  misc_feature 1..22: note = chemically synthesized
  source 1..22: mol_type = other DNA
tgcctataatcccagcactttg

SEQ ID NO: 65116 - DNA, 22 bp, synthetic construct
  misc_feature 1..22: note = chemically synthesized
  source 1..22: mol_type = other DNA
taatcccagcactttgggaggc

SEQ ID NO: 65117 - DNA, 22 bp, synthetic construct
  misc_feature 1..22: note = chemically synthesized
  source 1..22: mol_type = other DNA
tgggaggctgaggtgggtggat

SEQ ID NO: 65118 - DNA, 22 bp, synthetic construct
  misc_feature 1..22: note = chemically synthesized
  source 1..22: mol_type = other DNA
gggaggctgaggtgggtggatc

SEQ ID NO: 65119 - DNA, 22 bp, synthetic construct
  misc_feature 1..22: note = chemically synthesized
  source 1..22: mol_type = other DNA
ggaggctgaggtgggtggatca

SEQ ID NO: 65120 - DNA, 22 bp, synthetic construct
  misc_feature 1..22: note = chemically synthesized
  source 1..22: mol_type = other DNA
aggtgggtggatcacctaaggt

SEQ ID NO: 65121 - DNA, 22 bp, synthetic construct
  misc_feature 1..22: note = chemically synthesized
  source 1..22: mol_type = other DNA
aggtcgggagtttgagaccagc

SEQ ID NO: 65122 - DNA, 22 bp, synthetic construct
  misc_feature 1..22: note = chemically synthesized
  source 1..22: mol_type = other DNA
gagaccagcctgaccaacatgg

SEQ ID NO: 65123 - DNA, 22 bp, synthetic construct
  misc_feature 1..22: note = chemically synthesized
  source 1..22: mol_type = other DNA
agaccagcctgaccaacatgga

SEQ ID NO: 65124 - DNA, 22 bp, synthetic construct
  misc_feature 1..22: note = chemically synthesized
  source 1..22: mol_type = other DNA
accaacatggagaaaccccgtc

SEQ ID NO: 65125 - DNA, 22 bp, synthetic construct
  misc_feature 1..22: note = chemically synthesized
  source 1..22: mol_type = other DNA
taccaaaaatacagaaattagc

SEQ ID NO: 65126 - DNA, 22 bp, synthetic construct
  misc_feature 1..22: note = chemically synthesized
  source 1..22: mol_type = other DNA
ccaaaaatacagaaattagccg

SEQ ID NO: 65127 - DNA, 22 bp, synthetic construct
  misc_feature 1..22: note = chemically synthesized
  source 1..22: mol_type = other DNA
gccgcgtgtggtggcgcatgcc

SEQ ID NO: 65128 - DNA, 22 bp, synthetic construct
  misc_feature 1..22: note = chemically synthesized
  source 1..22: mol_type = other DNA
taatcccagctacttgggaggc

SEQ ID NO: 65129 - DNA, 22 bp, synthetic construct
  misc_feature 1..22: note = chemically synthesized
  source 1..22: mol_type = other DNA
cttgggaggctgaggcaggaga

SEQ ID NO: 65130 - DNA, 22 bp, synthetic construct
  misc_feature 1..22: note = chemically synthesized
  source 1..22: mol_type = other DNA
gggaggctgaggcaggagaatc

SEQ ID NO: 65131 - DNA, 22 bp, synthetic construct
  misc_feature 1..22: note = chemically synthesized
  source 1..22: mol_type = other DNA
ggaggctgaggcaggagaatcg

SEQ ID NO: 65132 - DNA, 22 bp, synthetic construct
  misc_feature 1..22: note = chemically synthesized
  source 1..22: mol_type = other DNA
aggcaggagaatcgcttgaacc

SEQ ID NO: 65133 - DNA, 22 bp, synthetic construct
  misc_feature 1..22: note = chemically synthesized
  source 1..22: mol_type = other DNA
gaacccgggaggcggagattgc

SEQ ID NO: 65134 - DNA, 22 bp, synthetic construct
  misc_feature 1..22: note = chemically synthesized
  source 1..22: mol_type = other DNA
aacccgggaggcggagattgcg

SEQ ID NO: 65135 - DNA, 22 bp, synthetic construct
  misc_feature 1..22: note = chemically synthesized
  source 1..22: mol_type = other DNA
cggtgagccgagattgcgccat

SEQ ID NO: 65136 - DNA, 22 bp, synthetic construct
  misc_feature 1..22: note = chemically synthesized
  source 1..22: mol_type = other DNA
cgccattgcactccagcccggg

SEQ ID NO: 65137 - DNA, 22 bp, synthetic construct
  misc_feature 1..22: note = chemically synthesized
  source 1..22: mol_type = other DNA
cactccagcccgggcaacaaga

SEQ ID NO: 65138 - DNA, 22 bp, synthetic construct
  misc_feature 1..22: note = chemically synthesized
  source 1..22: mol_type = other DNA
cagcccgggcaacaagagcgaa

SEQ ID NO: 65139 - DNA, 22 bp, synthetic construct
  misc_feature 1..22: note = chemically synthesized
  source 1..22: mol_type = other DNA
cacctcagaaacaaaaaacaaa

SEQ ID NO: 65140 - DNA, 22 bp, synthetic construct
  misc_feature 1..22: note = chemically synthesized
  source 1..22: mol_type = other DNA
agaaacaaaaaacaaacaaaca

SEQ ID NO: 65141 - DNA, 22 bp, synthetic construct
  misc_feature 1..22: note = chemically synthesized
  source 1..22: mol_type = other DNA
tgggtagcagtggctttaggct

SEQ ID NO: 65142 - DNA, 22 bp, synthetic construct
  misc_feature 1..22: note = chemically synthesized
  source 1..22: mol_type = other DNA
gggtagcagtggctttaggctg

SEQ ID NO: 65143 - DNA, 22 bp, synthetic construct
  misc_feature 1..22: note = chemically synthesized
  source 1..22: mol_type = other DNA
ggtagcagtggctttaggctgt

SEQ ID NO: 65144 - DNA, 22 bp, synthetic construct
  misc_feature 1..22: note = chemically synthesized
  source 1..22: mol_type = other DNA
taggctgtttttggatctttgg

SEQ ID NO: 65145 - DNA, 22 bp, synthetic construct
  misc_feature 1..22: note = chemically synthesized
  source 1..22: mol_type = other DNA
aggctgtttttggatctttggc

SEQ ID NO: 65146 - DNA, 22 bp, synthetic construct
  misc_feature 1..22: note = chemically synthesized
  source 1..22: mol_type = other DNA
ggctgtttttggatctttggct

SEQ ID NO: 65147 - DNA, 22 bp, synthetic construct
  misc_feature 1..22: note = chemically synthesized
  source 1..22: mol_type = other DNA
tttttggatctttggctattga

SEQ ID NO: 65148 - DNA, 22 bp, synthetic construct
  misc_feature 1..22: note = chemically synthesized
  source 1..22: mol_type = other DNA
ttggatctttggctattgatac

SEQ ID NO: 65149 - DNA, 22 bp, synthetic construct
  misc_feature 1..22: note = chemically synthesized
  source 1..22: mol_type = other DNA
tggatctttggctattgatact

SEQ ID NO: 65150 - DNA, 22 bp, synthetic construct
  misc_feature 1..22: note = chemically synthesized
  source 1..22: mol_type = other DNA
ggatctttggctattgatactg

SEQ ID NO: 65151 - DNA, 22 bp, synthetic construct
  misc_feature 1..22: note = chemically synthesized
  source 1..22: mol_type = other DNA
gatctttggctattgatactga

SEQ ID NO: 65152 - DNA, 22 bp, synthetic construct
  misc_feature 1..22: note = chemically synthesized
  source 1..22: mol_type = other DNA
tggctattgatactgatttgaa

SEQ ID NO: 65153 - DNA, 22 bp, synthetic construct
  misc_feature 1..22: note = chemically synthesized
  source 1..22: mol_type = other DNA
ggctattgatactgatttgaaa

SEQ ID NO: 65154 - DNA, 22 bp, synthetic construct
  misc_feature 1..22: note = chemically synthesized
  source 1..22: mol_type = other DNA
gctattgatactgatttgaaat

SEQ ID NO: 65155 - DNA, 22 bp, synthetic construct
  misc_feature 1..22: note = chemically synthesized
  source 1..22: mol_type = other DNA
ttgatactgatttgaaattttt

SEQ ID NO: 65156 - DNA, 22 bp, synthetic construct
  misc_feature 1..22: note = chemically synthesized
  source 1..22: mol_type = other DNA
atactgatttgaaattttttgt

SEQ ID NO: 65157 - DNA, 22 bp, synthetic construct
  misc_feature 1..22: note = chemically synthesized
  source 1..22: mol_type = other DNA
atttgaaattttttgttattat

SEQ ID NO: 65158 - DNA, 22 bp, synthetic construct
  misc_feature 1..22: note = chemically synthesized
  source 1..22: mol_type = other DNA
gaaattttttgttattattttc

SEQ ID NO: 65159 - DNA, 22 bp, synthetic construct
  misc_feature 1..22: note = chemically synthesized
  source 1..22: mol_type = other DNA
aaattttttgttattattttca

SEQ ID NO: 65160 - DNA, 22 bp, synthetic construct
  misc_feature 1..22: note = chemically synthesized
  source 1..22: mol_type = other DNA
tttgttattattttcatgttaa

SEQ ID NO: 65161 - DNA, 22 bp, synthetic construct
  misc_feature 1..22: note = chemically synthesized
  source 1..22: mol_type = other DNA
ttgttattattttcatgttaag

SEQ ID NO: 65162 - DNA, 22 bp, synthetic construct
  misc_feature 1..22: note = chemically synthesized
  source 1..22: mol_type = other DNA
tgttattattttcatgttaagc

SEQ ID NO: 65163 - DNA, 22 bp, synthetic construct
  misc_feature 1..22: note = chemically synthesized
  source 1..22: mol_type = other DNA
gttattattttcatgttaagca

SEQ ID NO: 65164 - DNA, 22 bp, synthetic construct
  misc_feature 1..22: note = chemically synthesized
  source 1..22: mol_type = other DNA
ttattattttcatgttaagcaa

SEQ ID NO: 65165 - DNA, 22 bp, synthetic construct
  misc_feature 1..22: note = chemically synthesized
  source 1..22: mol_type = other DNA
ttattttcatgttaagcaaaac

SEQ ID NO: 65166 - DNA, 22 bp, synthetic construct
  misc_feature 1..22: note = chemically synthesized
  source 1..22: mol_type = other DNA
ttttcatgttaagcaaaactag

SEQ ID NO: 65167 - DNA, 22 bp, synthetic construct
  misc_feature 1..22: note = chemically synthesized
  source 1..22: mol_type = other DNA
tcatgttaagcaaaactagaaa

SEQ ID NO: 65168 - DNA, 22 bp, synthetic construct
  misc_feature 1..22: note = chemically synthesized
  source 1..22: mol_type = other DNA
catgttaagcaaaactagaaag

SEQ ID NO: 65169 - DNA, 22 bp, synthetic construct
  misc_feature 1..22: note = chemically synthesized
  source 1..22: mol_type = other DNA
atgttaagcaaaactagaaagt

SEQ ID NO: 65170 - DNA, 22 bp, synthetic construct
  misc_feature 1..22: note = chemically synthesized
  source 1..22: mol_type = other DNA
agcaaaactagaaagttttacc

SEQ ID NO: 65171 - DNA, 22 bp, synthetic construct
  misc_feature 1..22: note = chemically synthesized
  source 1..22: mol_type = other DNA
gaaagttttaccgaattcccct

SEQ ID NO: 65172 - DNA, 22 bp, synthetic construct
  misc_feature 1..22: note = chemically synthesized
  source 1..22: mol_type = other DNA
taccgaattcccctgcagtaca

SEQ ID NO: 65173 - DNA, 22 bp, synthetic construct
  misc_feature 1..22: note = chemically synthesized
  source 1..22: mol_type = other DNA
accgaattcccctgcagtacag

SEQ ID NO: 65174 - DNA, 22 bp, synthetic construct
  misc_feature 1..22: note = chemically synthesized
  source 1..22: mol_type = other DNA
ccgaattcccctgcagtacagt

SEQ ID NO: 65175 - DNA, 22 bp, synthetic construct
  misc_feature 1..22: note = chemically synthesized
  source 1..22: mol_type = other DNA
ccctgcagtacagtaagtattt

SEQ ID NO: 65176 - DNA, 22 bp, synthetic construct
  misc_feature 1..22: note = chemically synthesized
  source 1..22: mol_type = other DNA
cagtacagtaagtattttcttt

SEQ ID NO: 65177 - DNA, 22 bp, synthetic construct
  misc_feature 1..22: note = chemically synthesized
  source 1..22: mol_type = other DNA
tctttcattgggggaagcaaac

SEQ ID NO: 65178 - DNA, 22 bp, synthetic construct
  misc_feature 1..22: note = chemically synthesized
  source 1..22: mol_type = other DNA
ctttcattgggggaagcaaact

SEQ ID NO: 65179 - DNA, 22 bp, synthetic construct
  misc_feature 1..22: note = chemically synthesized
  source 1..22: mol_type = other DNA
tttcattgggggaagcaaacta

SEQ ID NO: 65180 - DNA, 22 bp, synthetic construct
  misc_feature 1..22: note = chemically synthesized
  source 1..22: mol_type = other DNA
tcattgggggaagcaaactatt

SEQ ID NO: 65181 - DNA, 22 bp, synthetic construct
  misc_feature 1..22: note = chemically synthesized
  source 1..22: mol_type = other DNA
cattgggggaagcaaactattt

SEQ ID NO: 65182 - DNA, 22 bp, synthetic construct
  misc_feature 1..22: note = chemically synthesized
  source 1..22: mol_type = other DNA
attgggggaagcaaactattta

SEQ ID NO: 65183 - DNA, 22 bp, synthetic construct
  misc_feature 1..22: note = chemically synthesized
  source 1..22: mol_type = other DNA
ggggaagcaaactatttacagc

SEQ ID NO: 65184 - DNA, 22 bp, synthetic construct
  misc_feature 1..22: note = chemically synthesized
  source 1..22: mol_type = other DNA
tttacagccataacagggtttc

SEQ ID NO: 65185 - DNA, 22 bp, synthetic construct
  misc_feature 1..22: note = chemically synthesized
  source 1..22: mol_type = other DNA
acagccataacagggtttccag

SEQ ID NO: 65186 - DNA, 22 bp, synthetic construct
  misc_feature 1..22: note = chemically synthesized
  source 1..22: mol_type = other DNA
cagccataacagggtttccagt

SEQ ID NO: 65187 - DNA, 22 bp, synthetic construct
  misc_feature 1..22: note = chemically synthesized
  source 1..22: mol_type = other DNA
ccagtgaattgtataagtagca

SEQ ID NO: 65188 - DNA, 22 bp, synthetic construct
  misc_feature 1..22: note = chemically synthesized
  source 1..22: mol_type = other DNA
cagtgaattgtataagtagcac

SEQ ID NO: 65189 - DNA, 22 bp, synthetic construct
  misc_feature 1..22: note = chemically synthesized
  source 1..22: mol_type = other DNA
tataagtagcactgagttctgt

SEQ ID NO: 65190 - DNA, 22 bp, synthetic construct
  misc_feature 1..22: note = chemically synthesized
  source 1..22: mol_type = other DNA
agttctgtgtcagcaaaaaatg

SEQ ID NO: 65191 - DNA, 22 bp, synthetic construct
  misc_feature 1..22: note = chemically synthesized
  source 1..22: mol_type = other DNA
tgtgtcagcaaaaaatgaaaca

SEQ ID NO: 65192 - DNA, 22 bp, synthetic construct
  misc_feature 1..22: note = chemically synthesized
  source 1..22: mol_type = other DNA
tgtcagcaaaaaatgaaacaaa

SEQ ID NO: 65193 - DNA, 22 bp, synthetic construct
  misc_feature 1..22: note = chemically synthesized
  source 1..22: mol_type = other DNA
atcatagatgacattacctaaa

SEQ ID NO: 65194 - DNA, 22 bp, synthetic construct
  misc_feature 1..22: note = chemically synthesized
  source 1..22: mol_type = other DNA
cctaaatgacagtacctacgtg

SEQ ID NO: 65195 - DNA, 22 bp, synthetic construct
  misc_feature 1..22: note = chemically synthesized
  source 1..22: mol_type = other DNA
aatgacagtacctacgtgtgtc

SEQ ID NO: 65196 - DNA, 22 bp, synthetic construct
  misc_feature 1..22: note = chemically synthesized
  source 1..22: mol_type = other DNA
cgtgtgtcctttctttcacatt

SEQ ID NO: 65197 - DNA, 22 bp, synthetic construct
  misc_feature 1..22: note = chemically synthesized
  source 1..22: mol_type = other DNA
tctttcacatttgctgtaatcc

SEQ ID NO: 65198 - DNA, 22 bp, synthetic construct
  misc_feature 1..22: note = chemically synthesized
  source 1..22: mol_type = other DNA
ctttcacatttgctgtaatcct

SEQ ID NO: 65199 - DNA, 22 bp, synthetic construct
  misc_feature 1..22: note = chemically synthesized
  source 1..22: mol_type = other DNA
tttcacatttgctgtaatcctg

SEQ ID NO: 65200 - DNA, 22 bp, synthetic construct
  misc_feature 1..22: note = chemically synthesized
  source 1..22: mol_type = other DNA
tcacatttgctgtaatcctgtt

SEQ ID NO: 65201 - DNA, 22 bp, synthetic construct
  misc_feature 1..22: note = chemically synthesized
  source 1..22: mol_type = other DNA
cacatttgctgtaatcctgtta

SEQ ID NO: 65202 - DNA, 22 bp, synthetic construct
  misc_feature 1..22: note = chemically synthesized
  source 1..22: mol_type = other DNA
acatttgctgtaatcctgttat

SEQ ID NO: 65203 - DNA, 22 bp, synthetic construct
  misc_feature 1..22: note = chemically synthesized
  source 1..22: mol_type = other DNA
gctgtaatcctgttatggcatt

SEQ ID NO: 65204 - DNA, 22 bp, synthetic construct
  misc_feature 1..22: note = chemically synthesized
  source 1..22: mol_type = other DNA
ctgtaatcctgttatggcattg

SEQ ID NO: 65205 - DNA, 22 bp, synthetic construct
  misc_feature 1..22: note = chemically synthesized
  source 1..22: mol_type = other DNA
taatcctgttatggcattgtcc

SEQ ID NO: 65206 - DNA, 22 bp, synthetic construct
  misc_feature 1..22: note = chemically synthesized
  source 1..22: mol_type = other DNA
ttatggcattgtcctattatct

SEQ ID NO: 65207 - DNA, 22 bp, synthetic construct
  misc_feature 1..22: note = chemically synthesized
  source 1..22: mol_type = other DNA
tggcattgtcctattatctcaa

SEQ ID NO: 65208 - DNA, 22 bp, synthetic construct
  misc_feature 1..22: note = chemically synthesized
  source 1..22: mol_type = other DNA
tcctattatctcaagtactgtc

SEQ ID NO: 65209 - DNA, 22 bp, synthetic construct
  misc_feature 1..22: note = chemically synthesized
  source 1..22: mol_type = other DNA
ttatctcaagtactgtcatctt

SEQ ID NO: 65210 - DNA, 22 bp, synthetic construct
  misc_feature 1..22: note = chemically synthesized
  source 1..22: mol_type = other DNA
tctcaagtactgtcatctttaa

SEQ ID NO: 65211 - DNA, 22 bp, synthetic construct
  misc_feature 1..22: note = chemically synthesized
  source 1..22: mol_type = other DNA
aagtactgtcatctttaaatgc

SEQ ID NO: 65212 - DNA, 22 bp, synthetic construct
  misc_feature 1..22: note = chemically synthesized
  source 1..22: mol_type = other DNA
tcatctttaaatgctgtcaaat

SEQ ID NO: 65213 - DNA, 22 bp, synthetic construct
  misc_feature 1..22: note = chemically synthesized
  source 1..22: mol_type = other DNA
taaatgctgtcaaattgtaact

SEQ ID NO: 65214 - DNA, 22 bp, synthetic construct
  misc_feature 1..22: note = chemically synthesized
  source 1..22: mol_type = other DNA
aaatgctgtcaaattgtaactg

SEQ ID NO: 65215 - DNA, 22 bp, synthetic construct
  misc_feature 1..22: note = chemically synthesized
  source 1..22: mol_type = other DNA
aatgctgtcaaattgtaactgg

SEQ ID NO: 65216 - DNA, 22 bp, synthetic construct
  misc_feature 1..22: note = chemically synthesized
  source 1..22: mol_type = other DNA
tcaaattgtaactggattgcca

SEQ ID NO: 65217 - DNA, 22 bp, synthetic construct
  misc_feature 1..22: note = chemically synthesized
  source 1..22: mol_type = other DNA
taactggattgccaaggacaga

SEQ ID NO: 65218 - DNA, 22 bp, synthetic construct
  misc_feature 1..22: note = chemically synthesized
  source 1..22: mol_type = other DNA
gattgccaaggacagaggagag

SEQ ID NO: 65219 - DNA, 22 bp, synthetic construct
  misc_feature 1..22: note = chemically synthesized
  source 1..22: mol_type = other DNA
ccaaggacagaggagaggaacc

SEQ ID NO: 65220 - DNA, 22 bp, synthetic construct
  misc_feature 1..22: note = chemically synthesized
  source 1..22: mol_type = other DNA
ccactgcaccaaagagacggtc

SEQ ID NO: 65221 - DNA, 22 bp, synthetic construct
  misc_feature 1..22: note = chemically synthesized
  source 1..22: mol_type = other DNA
caccaaagagacggtcttcttc

SEQ ID NO: 65222 - DNA, 22 bp, synthetic construct
  misc_feature 1..22: note = chemically synthesized
  source 1..22: mol_type = other DNA
cttccccctctcacagtctgaa

SEQ ID NO: 65223 - DNA, 22 bp, synthetic construct
  misc_feature 1..22: note = chemically synthesized
  source 1..22: mol_type = other DNA
ttccccctctcacagtctgaat

SEQ ID NO: 65224 - DNA, 22 bp, synthetic construct
  misc_feature 1..22: note = chemically synthesized
  source 1..22: mol_type = other DNA
ccccctctcacagtctgaattc

SEQ ID NO: 65225 - DNA, 22 bp, synthetic construct
  misc_feature 1..22: note = chemically synthesized
  source 1..22: mol_type = other DNA
cccctctcacagtctgaattct

SEQ ID NO: 65226 - DNA, 22 bp, synthetic construct
  misc_feature 1..22: note = chemically synthesized
  source 1..22: mol_type = other DNA
tcacagtctgaattcttggaga

SEQ ID NO: 65227 - DNA, 22 bp, synthetic construct
  misc_feature 1..22: note = chemically synthesized
  source 1..22: mol_type = other DNA
acagtctgaattcttggagaca

SEQ ID NO: 65228 - DNA, 22 bp, synthetic construct
  misc_feature 1..22: note = chemically synthesized
  source 1..22: mol_type = other DNA
aattcttggagacattgttcag

SEQ ID NO: 65229 - DNA, 22 bp, synthetic construct
  misc_feature 1..22: note = chemically synthesized
  source 1..22: mol_type = other DNA
ttggagacattgttcagttaaa

SEQ ID NO: 65230 - DNA, 22 bp, synthetic construct
  misc_feature 1..22: note = chemically synthesized
  source 1..22: mol_type = other DNA
ggagacattgttcagttaaaat

SEQ ID NO: 65231 - DNA, 22 bp, synthetic construct
  misc_feature 1..22: note = chemically synthesized
  source 1..22: mol_type = other DNA
gagacattgttcagttaaaatc

SEQ ID NO: 65232 - DNA, 22 bp, synthetic construct
  misc_feature 1..22: note = chemically synthesized
  source 1..22: mol_type = other DNA
ttcagttaaaatcatgactcag

SEQ ID NO: 65233 - DNA, 22 bp, synthetic construct
  misc_feature 1..22: note = chemically synthesized
  source 1..22: mol_type = other DNA
agttaaaatcatgactcaggta

SEQ ID NO: 65234 - DNA, 22 bp, synthetic construct
  misc_feature 1..22: note = chemically synthesized
  source 1..22: mol_type = other DNA
aaatcatgactcaggtatcttt

SEQ ID NO: 65235 - DNA, 22 bp, synthetic construct
  misc_feature 1..22: note = chemically synthesized
  source 1..22: mol_type = other DNA
aggtatcttttacaggctttga

SEQ ID NO: 65236 - DNA, 22 bp, synthetic construct
  misc_feature 1..22: note = chemically synthesized
  source 1..22: mol_type = other DNA
ttacaggctttgatgaaatagt

SEQ ID NO: 65237 - DNA, 22 bp, synthetic construct
  misc_feature 1..22: note = chemically synthesized
  source 1..22: mol_type = other DNA
tacaggctttgatgaaatagtc

SEQ ID NO: 65238 - DNA, 22 bp, synthetic construct
  misc_feature 1..22: note = chemically synthesized
  source 1..22: mol_type = other DNA
acaggctttgatgaaatagtca

SEQ ID NO: 65239 - DNA, 22 bp, synthetic construct
  misc_feature 1..22: note = chemically synthesized
  source 1..22: mol_type = other DNA
caggctttgatgaaatagtcag

SEQ ID NO: 65240 - DNA, 22 bp, synthetic construct
  misc_feature 1..22: note = chemically synthesized
  source 1..22: mol_type = other DNA
tgatgaaatagtcagattcact

SEQ ID NO: 65241 - DNA, 22 bp, synthetic construct
  misc_feature 1..22: note = chemically synthesized
  source 1..22: mol_type = other DNA
gatgaaatagtcagattcactc

SEQ ID NO: 65242 - DNA, 22 bp, synthetic construct
  misc_feature 1..22: note = chemically synthesized
  source 1..22: mol_type = other DNA
atgaaatagtcagattcactcc

SEQ ID NO: 65243 - DNA, 22 bp, synthetic construct
  misc_feature 1..22: note = chemically synthesized
  source 1..22: mol_type = other DNA
actcctcatgttcctagaagga

SEQ ID NO: 65244 - DNA, 22 bp, synthetic construct
  misc_feature 1..22: note = chemically synthesized
  source 1..22: mol_type = other DNA
ctcatgttcctagaaggaaagg

SEQ ID NO: 65245 - DNA, 22 bp, synthetic construct
  misc_feature 1..22: note = chemically synthesized
  source 1..22: mol_type = other DNA
atgttcctagaaggaaaggaag

SEQ ID NO: 65246 - DNA, 22 bp, synthetic construct
  misc_feature 1..22: note = chemically synthesized
  source 1..22: mol_type = other DNA
ctagaaggaaaggaagaaacac

SEQ ID NO: 65247 - DNA, 22 bp, synthetic construct
  misc_feature 1..22: note = chemically synthesized
  source 1..22: mol_type = other DNA
gaaggaaaggaagaaacactct

SEQ ID NO: 65248 - DNA, 22 bp, synthetic construct
  misc_feature 1..22: note = chemically synthesized
  source 1..22: mol_type = other DNA
tttgaacagcccgtgagacaaa

SEQ ID NO: 65249 - DNA, 22 bp, synthetic construct
  misc_feature 1..22: note = chemically synthesized
  source 1..22: mol_type = other DNA
tgaacagcccgtgagacaaact

SEQ ID NO: 65250 - DNA, 22 bp, synthetic construct
  misc_feature 1..22: note = chemically synthesized
  source 1..22: mol_type = other DNA
gaacagcccgtgagacaaactc

SEQ ID NO: 65251 - DNA, 22 bp, synthetic construct
  misc_feature 1..22: note = chemically synthesized
  source 1..22: mol_type = other DNA
aacagcccgtgagacaaactct

SEQ ID NO: 65252 - DNA, 22 bp, synthetic construct
  misc_feature 1..22: note = chemically synthesized
  source 1..22: mol_type = other DNA
ttccaggataatttaaatgttt

SEQ ID NO: 65253 - DNA, 22 bp, synthetic construct
  misc_feature 1..22: note = chemically synthesized
  source 1..22: mol_type = other DNA
ccaggataatttaaatgtttct

SEQ ID NO: 65254 - DNA, 22 bp, synthetic construct
  misc_feature 1..22: note = chemically synthesized
  source 1..22: mol_type = other DNA
caggataatttaaatgtttcta

SEQ ID NO: 65255 - DNA, 22 bp, synthetic construct
  misc_feature 1..22: note = chemically synthesized
  source 1..22: mol_type = other DNA
aaatgtttctacataatgagaa

SEQ ID NO: 65256 - DNA, 22 bp, synthetic construct
  misc_feature 1..22: note = chemically synthesized
  source 1..22: mol_type = other DNA
aatgtttctacataatgagaat

SEQ ID NO: 65257 - DNA, 22 bp, synthetic construct
  misc_feature 1..22: note = chemically synthesized
  source 1..22: mol_type = other DNA
ctacataatgagaataaattgt

SEQ ID NO: 65258 - DNA, 22 bp, synthetic construct
  misc_feature 1..22: note = chemically synthesized
  source 1..22: mol_type = other DNA
tacataatgagaataaattgta

SEQ ID NO: 65259 - DNA, 22 bp, synthetic construct
  misc_feature 1..22: note = chemically synthesized
  source 1..22: mol_type = other DNA
cataatgagaataaattgtaag

SEQ ID NO: 65260 - DNA, 22 bp, synthetic construct
  misc_feature 1..22: note = chemically synthesized
  source 1..22: mol_type = other DNA
taagtgttactgtgtttttaaa

SEQ ID NO: 65261 - DNA, 22 bp, synthetic construct
  misc_feature 1..22: note = chemically synthesized
  source 1..22: mol_type = other DNA
ctgtgtttttaaaacccaggtc

SEQ ID NO: 65262 - DNA, 22 bp, synthetic construct
  misc_feature 1..22: note = chemically synthesized
  source 1..22: mol_type = other DNA
tgtttttaaaacccaggtcaaa

SEQ ID NO: 65263 - DNA, 22 bp, synthetic construct
  misc_feature 1..22: note = chemically synthesized
  source 1..22: mol_type = other DNA
ttaaaacccaggtcaaaagtaa

SEQ ID NO: 65264 - DNA, 22 bp, synthetic construct
  misc_feature 1..22: note = chemically synthesized
  source 1..22: mol_type = other DNA
taaaacccaggtcaaaagtaat

SEQ ID NO: 65265 - DNA, 22 bp, synthetic construct
  misc_feature 1..22: note = chemically synthesized
  source 1..22: mol_type = other DNA
aaaacccaggtcaaaagtaata

SEQ ID NO: 65266 - DNA, 22 bp, synthetic construct
  misc_feature 1..22: note = chemically synthesized
  source 1..22: mol_type = other DNA
aaacccaggtcaaaagtaatag

SEQ ID NO: 65267 - DNA, 22 bp, synthetic construct
  misc_feature 1..22: note = chemically synthesized
  source 1..22: mol_type = other DNA
taagcatttaatatctaattgt

SEQ ID NO: 65268 - DNA, 22 bp, synthetic construct
  misc_feature 1..22: note = chemically synthesized
  source 1..22: mol_type = other DNA
aatatctaattgttcatatatt

SEQ ID NO: 65269 - DNA, 22 bp, synthetic construct
  misc_feature 1..22: note = chemically synthesized
  source 1..22: mol_type = other DNA
atatctaattgttcatatattg

SEQ ID NO: 65270 - DNA, 22 bp, synthetic construct
  misc_feature 1..22: note = chemically synthesized
  source 1..22: mol_type = other DNA
attgttcatatattgcttcccc

SEQ ID NO: 65271 - DNA, 22 bp, synthetic construct
  misc_feature 1..22: note = chemically synthesized
  source 1..22: mol_type = other DNA
ttcatatattgcttccccaggt

SEQ ID NO: 65272 - DNA, 22 bp, synthetic construct
  misc_feature 1..22: note = chemically synthesized
  source 1..22: mol_type = other DNA
atatattgcttccccaggttta

SEQ ID NO: 65273 - DNA, 22 bp, synthetic construct
  misc_feature 1..22: note = chemically synthesized
  source 1..22: mol_type = other DNA
cttccccaggtttagatgaggg

SEQ ID NO: 65274 - DNA, 22 bp, synthetic construct
  misc_feature 1..22: note = chemically synthesized
  source 1..22: mol_type = other DNA
ccccaggtttagatgagggctc

SEQ ID NO: 65275 - DNA, 22 bp, synthetic construct
  misc_feature 1..22: note = chemically synthesized
  source 1..22: mol_type = other DNA
cccaggtttagatgagggctcc

SEQ ID NO: 65276 - DNA, 22 bp, synthetic construct
  misc_feature 1..22: note = chemically synthesized
  source 1..22: mol_type = other DNA
agatgagggctccattctagag

SEQ ID NO: 65277 - DNA, 22 bp, synthetic construct
  misc_feature 1..22: note = chemically synthesized
  source 1..22: mol_type = other DNA
gatgagggctccattctagagt

SEQ ID NO: 65278 - DNA, 22 bp, synthetic construct
  misc_feature 1..22: note = chemically synthesized
  source 1..22: mol_type = other DNA
cattctagagttgggaaaacca

SEQ ID NO: 65279 - DNA, 22 bp, synthetic construct
  misc_feature 1..22: note = chemically synthesized
  source 1..22: mol_type = other DNA
tagagttgggaaaaccaagtca

SEQ ID NO: 65280 - DNA, 22 bp, synthetic construct
  misc_feature 1..22: note = chemically synthesized
  source 1..22: mol_type = other DNA
gagttgggaaaaccaagtcagt

SEQ ID NO: 65281 - DNA, 22 bp, synthetic construct
  misc_feature 1..22: note = chemically synthesized
  source 1..22: mol_type = other DNA
ggaaaaccaagtcagtaaacct

SEQ ID NO: 65282 - DNA, 22 bp, synthetic construct
  misc_feature 1..22: note = chemically synthesized
  source 1..22: mol_type = other DNA
tagtggcagatgttatcaggga

SEQ ID NO: 65283 - DNA, 22 bp, synthetic construct
  misc_feature 1..22: note = chemically synthesized
  source 1..22: mol_type = other DNA
agtggcagatgttatcagggag

SEQ ID NO: 65284 - DNA, 22 bp, synthetic construct
  misc_feature 1..22: note = chemically synthesized
  source 1..22: mol_type = other DNA
gtggcagatgttatcagggagc

SEQ ID NO: 65285 - DNA, 22 bp, synthetic construct
  misc_feature 1..22: note = chemically synthesized
  source 1..22: mol_type = other DNA
tcagggagctggagttggagta

SEQ ID NO: 65286 - DNA, 22 bp, synthetic construct
  misc_feature 1..22: note = chemically synthesized
  source 1..22: mol_type = other DNA
gagttggagtacttgcattttg

SEQ ID NO: 65287 - DNA, 22 bp, synthetic construct
  misc_feature 1..22: note = chemically synthesized
  source 1..22: mol_type = other DNA
gagtacttgcattttgtgtttg

SEQ ID NO: 65288 - DNA, 22 bp, synthetic construct
  misc_feature 1..22: note = chemically synthesized
  source 1..22: mol_type = other DNA
gcattttgtgtttgtgccagct

SEQ ID NO: 65289 - DNA, 22 bp, synthetic construct
  misc_feature 1..22: note = chemically synthesized
  source 1..22: mol_type = other DNA
cattttgtgtttgtgccagctg

SEQ ID NO: 65290 - DNA, 22 bp, synthetic construct
  misc_feature 1..22: note = chemically synthesized
  source 1..22: mol_type = other DNA
tgtgtttgtgccagctgtccat

SEQ ID NO: 65291 - DNA, 22 bp, synthetic construct
  misc_feature 1..22: note = chemically synthesized
  source 1..22: mol_type = other DNA
gtgtttgtgccagctgtccatg

SEQ ID NO: 65292 - DNA, 22 bp, synthetic construct
  misc_feature 1..22: note = chemically synthesized
  source 1..22: mol_type = other DNA
tgtttgtgccagctgtccatgt

SEQ ID NO: 65293 - DNA, 22 bp, synthetic construct
  misc_feature 1..22: note = chemically synthesized
  source 1..22: mol_type = other DNA
gtgccagctgtccatgttcctc

SEQ ID NO: 65294 - DNA, 22 bp, synthetic construct
  misc_feature 1..22: note = chemically synthesized
  source 1..22: mol_type = other DNA
tgccagctgtccatgttcctct

SEQ ID NO: 65295 - DNA, 22 bp, synthetic construct
  misc_feature 1..22: note = chemically synthesized
  source 1..22: mol_type = other DNA
tccatgttcctcttcatatatt

SEQ ID NO: 65296 - DNA, 22 bp, synthetic construct
  misc_feature 1..22: note = chemically synthesized
  source 1..22: mol_type = other DNA
ctcttcatatatttagaccaaa

SEQ ID NO: 65297 - DNA, 22 bp, synthetic construct
  misc_feature 1..22: note = chemically synthesized
  source 1..22: mol_type = other DNA
ttcatatatttagaccaaattc

SEQ ID NO: 65298 - DNA, 22 bp, synthetic construct
  misc_feature 1..22: note = chemically synthesized
  source 1..22: mol_type = other DNA
catatatttagaccaaattctt

SEQ ID NO: 65299 - DNA, 22 bp, synthetic construct
  misc_feature 1..22: note = chemically synthesized
  source 1..22: mol_type = other DNA
atatatttagaccaaattctta

SEQ ID NO: 65300 - DNA, 22 bp, synthetic construct
  misc_feature 1..22: note = chemically synthesized
  source 1..22: mol_type = other DNA
agaccaaattcttatccagatt

SEQ ID NO: 65301 - DNA, 22 bp, synthetic construct
  misc_feature 1..22: note = chemically synthesized
  source 1..22: mol_type = other DNA
gaccaaattcttatccagattt

SEQ ID NO: 65302 - DNA, 22 bp, synthetic construct
  misc_feature 1..22: note = chemically synthesized
  source 1..22: mol_type = other DNA
ttatccagatttcccattaaag

SEQ ID NO: 65303 - DNA, 22 bp, synthetic construct
  misc_feature 1..22: note = chemically synthesized
  source 1..22: mol_type = other DNA
atccagatttcccattaaaggt

SEQ ID NO: 65304 - DNA, 22 bp, synthetic construct
  misc_feature 1..22: note = chemically synthesized
  source 1..22: mol_type = other DNA
tccagatttcccattaaaggtt

SEQ ID NO: 65305 - DNA, 22 bp, synthetic construct
  misc_feature 1..22: note = chemically synthesized
  source 1..22: mol_type = other DNA
cccattaaaggttcataaattt

SEQ ID NO: 65306 - DNA, 22 bp, synthetic construct
  misc_feature 1..22: note = chemically synthesized
  source 1..22: mol_type = other DNA
ccattaaaggttcataaatttc

SEQ ID NO: 65307 - DNA, 22 bp, synthetic construct
  misc_feature 1..22: note = chemically synthesized
  source 1..22: mol_type = other DNA
aaggttcataaatttccagttt

SEQ ID NO: 65308 - DNA, 22 bp, synthetic construct
  misc_feature 1..22: note = chemically synthesized
  source 1..22: mol_type = other DNA
ataaatttccagttttcacctt

SEQ ID NO: 65309 - DNA, 22 bp, synthetic construct
  misc_feature 1..22: note = chemically synthesized
  source 1..22: mol_type = other DNA
ccagttttcacctttctgcagc

SEQ ID NO: 65310 - DNA, 22 bp, synthetic construct
  misc_feature 1..22: note = chemically synthesized
  source 1..22: mol_type = other DNA
cagttttcacctttctgcagct

SEQ ID NO: 65311 - DNA, 22 bp, synthetic construct
  misc_feature 1..22: note = chemically synthesized
  source 1..22: mol_type = other DNA
tcacctttctgcagcttcctta

SEQ ID NO: 65312 - DNA, 22 bp, synthetic construct
  misc_feature 1..22: note = chemically synthesized
  source 1..22: mol_type = other DNA
cacctttctgcagcttccttag

SEQ ID NO: 65313 - DNA, 22 bp, synthetic construct
  misc_feature 1..22: note = chemically synthesized
  source 1..22: mol_type = other DNA
acctttctgcagcttccttaga

SEQ ID NO: 65314 - DNA, 22 bp, synthetic construct
  misc_feature 1..22: note = chemically synthesized
  source 1..22: mol_type = other DNA
tctgcagcttccttagatagaa

SEQ ID NO: 65315 - DNA, 22 bp, synthetic construct
  misc_feature 1..22: note = chemically synthesized
  source 1..22: mol_type = other DNA
ctgcagcttccttagatagaat

SEQ ID NO: 65316 - DNA, 22 bp, synthetic construct
  misc_feature 1..22: note = chemically synthesized
  source 1..22: mol_type = other DNA
tgcagcttccttagatagaatg

SEQ ID NO: 65317 - DNA, 22 bp, synthetic construct
  misc_feature 1..22: note = chemically synthesized
  source 1..22: mol_type = other DNA
cagcttccttagatagaatggt

SEQ ID NO: 65318 - DNA, 22 bp, synthetic construct
  misc_feature 1..22: note = chemically synthesized
  source 1..22: mol_type = other DNA
ccttagatagaatggttgatga

SEQ ID NO: 65319 - DNA, 22 bp, synthetic construct
  misc_feature 1..22: note = chemically synthesized
  source 1..22: mol_type = other DNA
cttagatagaatggttgatgag

SEQ ID NO: 65320 - DNA, 22 bp, synthetic construct
  misc_feature 1..22: note = chemically synthesized
  source 1..22: mol_type = other DNA
agatagaatggttgatgagaaa

SEQ ID NO: 65321 - DNA, 22 bp, synthetic construct
  misc_feature 1..22: note = chemically synthesized
  source 1..22: mol_type = other DNA
gatagaatggttgatgagaaaa

SEQ ID NO: 65322 - DNA, 22 bp, synthetic construct
  misc_feature 1..22: note = chemically synthesized
  source 1..22: mol_type = other DNA
atgagaaaattaccgcattaaa

SEQ ID NO: 65323 - DNA, 22 bp, synthetic construct
  misc_feature 1..22: note = chemically synthesized
  source 1..22: mol_type = other DNA
ccgcattaaaattaagcctctt

SEQ ID NO: 65324 - DNA, 22 bp, synthetic construct
  misc_feature 1..22: note = chemically synthesized
  source 1..22: mol_type = other DNA
aaattaagcctcttgcttttta

SEQ ID NO: 65325 - DNA, 22 bp, synthetic construct
  misc_feature 1..22: note = chemically synthesized
  source 1..22: mol_type = other DNA
agcctcttgctttttacattct

SEQ ID NO: 65326 - DNA, 22 bp, synthetic construct
  misc_feature 1..22: note = chemically synthesized
  source 1..22: mol_type = other DNA
ttgctttttacattctgctgct

SEQ ID NO: 65327 - DNA, 22 bp, synthetic construct
  misc_feature 1..22: note = chemically synthesized
  source 1..22: mol_type = other DNA
gctttttacattctgctgctca

SEQ ID NO: 65328 - DNA, 22 bp, synthetic construct
  misc_feature 1..22: note = chemically synthesized
  source 1..22: mol_type = other DNA
ctttttacattctgctgctcat

SEQ ID NO: 65329 - DNA, 22 bp, synthetic construct
  misc_feature 1..22: note = chemically synthesized
  source 1..22: mol_type = other DNA
tttacattctgctgctcataaa

SEQ ID NO: 65330 - DNA, 22 bp, synthetic construct
  misc_feature 1..22: note = chemically synthesized
  source 1..22: mol_type = other DNA
ttacattctgctgctcataaat

SEQ ID NO: 65331 - DNA, 22 bp, synthetic construct
  misc_feature 1..22: note = chemically synthesized
  source 1..22: mol_type = other DNA
tacattctgctgctcataaata

SEQ ID NO: 65332 - DNA, 22 bp, synthetic construct
  misc_feature 1..22: note = chemically synthesized
  source 1..22: mol_type = other DNA
acattctgctgctcataaataa

SEQ ID NO: 65333 - DNA, 22 bp, synthetic construct
  misc_feature 1..22: note = chemically synthesized
  source 1..22: mol_type = other DNA
cattctgctgctcataaataag

SEQ ID NO: 65334 - DNA, 22 bp, synthetic construct
  misc_feature 1..22: note = chemically synthesized
  source 1..22: mol_type = other DNA
tgctgctcataaataagggagt

SEQ ID NO: 65335 - DNA, 22 bp, synthetic construct
  misc_feature 1..22: note = chemically synthesized
  source 1..22: mol_type = other DNA
ctgctcataaataagggagtgg

SEQ ID NO: 65336 - DNA, 22 bp, synthetic construct
  misc_feature 1..22: note = chemically synthesized
  source 1..22: mol_type = other DNA
ctcataaataagggagtgggaa

SEQ ID NO: 65337 - DNA, 22 bp, synthetic construct
  misc_feature 1..22: note = chemically synthesized
  source 1..22: mol_type = other DNA
ataaataagggagtgggaaatg

SEQ ID NO: 65338 - DNA, 22 bp, synthetic construct
  misc_feature 1..22: note = chemically synthesized
  source 1..22: mol_type = other DNA
ctttgaacaccctcgttaaagg

SEQ ID NO: 65339 - DNA, 22 bp, synthetic construct
  misc_feature 1..22: note = chemically synthesized
  source 1..22: mol_type = other DNA
tgaacaccctcgttaaaggctg

SEQ ID NO: 65340 - DNA, 22 bp, synthetic construct
  misc_feature 1..22: note = chemically synthesized
  source 1..22: mol_type = other DNA
gaacaccctcgttaaaggctgg

SEQ ID NO: 65341 - DNA, 22 bp, synthetic construct
  misc_feature 1..22: note = chemically synthesized
  source 1..22: mol_type = other DNA
aacaccctcgttaaaggctggt

SEQ ID NO: 65342 - DNA, 22 bp, synthetic construct
  misc_feature 1..22: note = chemically synthesized
  source 1..22: mol_type = other DNA
gttaaaggctggtgtggttgcc

SEQ ID NO: 65343 - DNA, 22 bp, synthetic construct
  misc_feature 1..22: note = chemically synthesized
  source 1..22: mol_type = other DNA
aaggctggtgtggttgccagag

SEQ ID NO: 65344 - DNA, 22 bp, synthetic construct
  misc_feature 1..22: note = chemically synthesized
  source 1..22: mol_type = other DNA
gtgtggttgccagagaataggg

SEQ ID NO: 65345 - DNA, 22 bp, synthetic construct
  misc_feature 1..22: note = chemically synthesized
  source 1..22: mol_type = other DNA
ccagagaatagggctaacttaa

SEQ ID NO: 65346 - DNA, 22 bp, synthetic construct
  misc_feature 1..22: note = chemically synthesized
  source 1..22: mol_type = other DNA
acttaagggggatccgctaagc

SEQ ID NO: 65347 - DNA, 22 bp, synthetic construct
  misc_feature 1..22: note = chemically synthesized
  source 1..22: mol_type = other DNA
aagggggatccgctaagccttc

SEQ ID NO: 65348 - DNA, 22 bp, synthetic construct
  misc_feature 1..22: note = chemically synthesized
  source 1..22: mol_type = other DNA
agggggatccgctaagccttct

SEQ ID NO: 65349 - DNA, 22 bp, synthetic construct
  misc_feature 1..22: note = chemically synthesized
  source 1..22: mol_type = other DNA
agccttctttttcatgcctttt

SEQ ID NO: 65350 - DNA, 22 bp, synthetic construct
  misc_feature 1..22: note = chemically synthesized
  source 1..22: mol_type = other DNA
ctttttcatgcctttttttgtt

SEQ ID NO: 65351 - DNA, 22 bp, synthetic construct
  misc_feature 1..22: note = chemically synthesized
  source 1..22: mol_type = other DNA
tttttcatgcctttttttgttt

SEQ ID NO: 65352 - DNA, 22 bp, synthetic construct
  misc_feature 1..22: note = chemically synthesized
  source 1..22: mol_type = other DNA
tttcatgcctttttttgttttg

SEQ ID NO: 65353 - DNA, 22 bp, synthetic construct
  misc_feature 1..22: note = chemically synthesized
  source 1..22: mol_type = other DNA
ttcatgcctttttttgttttgt

SEQ ID NO: 65354 - DNA, 22 bp, synthetic construct
  misc_feature 1..22: note = chemically synthesized
  source 1..22: mol_type = other DNA
tcatgcctttttttgttttgtt

SEQ ID NO: 65355 - DNA, 22 bp, synthetic construct
  misc_feature 1..22: note = chemically synthesized
  source 1..22: mol_type = other DNA
catgcctttttttgttttgttt

SEQ ID NO: 65356 - DNA, 22 bp, synthetic construct
  misc_feature 1..22: note = chemically synthesized
  source 1..22: mol_type = other DNA
atgcctttttttgttttgtttt

SEQ ID NO: 65357 - DNA, 22 bp, synthetic construct
  misc_feature 1..22: note = chemically synthesized
  source 1..22: mol_type = other DNA
tttttgttttgttttgttctgg

SEQ ID NO: 65358 - DNA, 22 bp, synthetic construct
  misc_feature 1..22: note = chemically synthesized
  source 1..22: mol_type = other DNA
ttttgttttgttttgttctgga

SEQ ID NO: 65359 - DNA, 22 bp, synthetic construct
  misc_feature 1..22: note = chemically synthesized
  source 1..22: mol_type = other DNA
tttgttttgttttgttctggat

SEQ ID NO: 65360 - DNA, 22 bp, synthetic construct
  misc_feature 1..22: note = chemically synthesized
  source 1..22: mol_type = other DNA
ttgttttgttttgttctggatt

SEQ ID NO: 65361 - DNA, 22 bp, synthetic construct
  misc_feature 1..22: note = chemically synthesized
  source 1..22: mol_type = other DNA
tgttttgttttgttctggattt

SEQ ID NO: 65362 - DNA, 22 bp, synthetic construct
  misc_feature 1..22: note = chemically synthesized
  source 1..22: mol_type = other DNA
gttttgttttgttctggatttt

SEQ ID NO: 65363 - DNA, 22 bp, synthetic construct
  misc_feature 1..22: note = chemically synthesized
  source 1..22: mol_type = other DNA
ttttgttttgttctggatttta

SEQ ID NO: 65364 - DNA, 22 bp, synthetic construct
  misc_feature 1..22: note = chemically synthesized
  source 1..22: mol_type = other DNA
tgttttgttctggattttataa

SEQ ID NO: 65365 - DNA, 22 bp, synthetic construct
  misc_feature 1..22: note = chemically synthesized
  source 1..22: mol_type = other DNA
gttttgttctggattttataaa

SEQ ID NO: 65366 - DNA, 22 bp, synthetic construct
  misc_feature 1..22: note = chemically synthesized
  source 1..22: mol_type = other DNA
ttttgttctggattttataaag

SEQ ID NO: 65367 - DNA, 22 bp, synthetic construct
  misc_feature 1..22: note = chemically synthesized
  source 1..22: mol_type = other DNA
tgttctggattttataaaggca

SEQ ID NO: 65368 - DNA, 22 bp, synthetic construct
  misc_feature 1..22: note = chemically synthesized
  source 1..22: mol_type = other DNA
gttctggattttataaaggcat

SEQ ID NO: 65369 - DNA, 22 bp, synthetic construct
  misc_feature 1..22: note = chemically synthesized
  source 1..22: mol_type = other DNA
ttctggattttataaaggcatc

SEQ ID NO: 65370 - DNA, 22 bp, synthetic construct
  misc_feature 1..22: note = chemically synthesized
  source 1..22: mol_type = other DNA
tggattttataaaggcatcatt

SEQ ID NO: 65371 - DNA, 22 bp, synthetic construct
  misc_feature 1..22: note = chemically synthesized
  source 1..22: mol_type = other DNA
gattttataaaggcatcattta

SEQ ID NO: 65372 - DNA, 22 bp, synthetic construct
  misc_feature 1..22: note = chemically synthesized
  source 1..22: mol_type = other DNA
tataaaggcatcatttagtttt

SEQ ID NO: 65373 - DNA, 22 bp, synthetic construct
  misc_feature 1..22: note = chemically synthesized
  source 1..22: mol_type = other DNA
ataaaggcatcatttagttttc

SEQ ID NO: 65374 - DNA, 22 bp, synthetic construct
  misc_feature 1..22: note = chemically synthesized
  source 1..22: mol_type = other DNA
taaaggcatcatttagttttcc

SEQ ID NO: 65375 - DNA, 22 bp, synthetic construct
  misc_feature 1..22: note = chemically synthesized
  source 1..22: mol_type = other DNA
agttttcccttaatctgaatct

SEQ ID NO: 65376 - DNA, 22 bp, synthetic construct
  misc_feature 1..22: note = chemically synthesized
  source 1..22: mol_type = other DNA
gttttcccttaatctgaatctg

SEQ ID NO: 65377 - DNA, 22 bp, synthetic construct
  misc_feature 1..22: note = chemically synthesized
  source 1..22: mol_type = other DNA
tcccttaatctgaatctgtatt

SEQ ID NO: 65378 - DNA, 22 bp, synthetic construct
  misc_feature 1..22: note = chemically synthesized
  source 1..22: mol_type = other DNA
cccttaatctgaatctgtattc

SEQ ID NO: 65379 - DNA, 22 bp, synthetic construct
  misc_feature 1..22: note = chemically synthesized
  source 1..22: mol_type = other DNA
ccttaatctgaatctgtattca

SEQ ID NO: 65380 - DNA, 22 bp, synthetic construct
  misc_feature 1..22: note = chemically synthesized
  source 1..22: mol_type = other DNA
aatctgaatctgtattcatttt

SEQ ID NO: 65381 - DNA, 22 bp, synthetic construct
  misc_feature 1..22: note = chemically synthesized
  source 1..22: mol_type = other DNA
atctgaatctgtattcattttt

SEQ ID NO: 65382 - DNA, 22 bp, synthetic construct
  misc_feature 1..22: note = chemically synthesized
  source 1..22: mol_type = other DNA
aatctgtattcatttttaaata

SEQ ID NO: 65383 - DNA, 22 bp, synthetic construct
  misc_feature 1..22: note = chemically synthesized
  source 1..22: mol_type = other DNA
tattcatttttaaatatctaat

SEQ ID NO: 65384 - DNA, 22 bp, synthetic construct
  misc_feature 1..22: note = chemically synthesized
  source 1..22: mol_type = other DNA
atttttaaatatctaatgttga

SEQ ID NO: 65385 - DNA, 22 bp, synthetic construct
  misc_feature 1..22: note = chemically synthesized
  source 1..22: mol_type = other DNA
ttaaatatctaatgttgattag

SEQ ID NO: 65386 - DNA, 22 bp, synthetic construct
  misc_feature 1..22: note = chemically synthesized
  source 1..22: mol_type = other DNA
taaatatctaatgttgattagt

SEQ ID NO: 65387 - DNA, 22 bp, synthetic construct
  misc_feature 1..22: note = chemically synthesized
  source 1..22: mol_type = other DNA
aaatatctaatgttgattagta

SEQ ID NO: 65388 - DNA, 22 bp, synthetic construct
  misc_feature 1..22: note = chemically synthesized
  source 1..22: mol_type = other DNA
aatatctaatgttgattagtat

SEQ ID NO: 65389 - DNA, 22 bp, synthetic construct
  misc_feature 1..22: note = chemically synthesized
  source 1..22: mol_type = other DNA
atgttgattagtatgttctatt

SEQ ID NO: 65390 - DNA, 22 bp, synthetic construct
  misc_feature 1..22: note = chemically synthesized
  source 1..22: mol_type = other DNA
attagtatgttctattatttat

SEQ ID NO: 65391 - DNA, 22 bp, synthetic construct
  misc_feature 1..22: note = chemically synthesized
  source 1..22: mol_type = other DNA
gtatgttctattatttatagcc

SEQ ID NO: 65392 - DNA, 22 bp, synthetic construct
  misc_feature 1..22: note = chemically synthesized
  source 1..22: mol_type = other DNA
tattatttatagccctccagaa

SEQ ID NO: 65393 - DNA, 22 bp, synthetic construct
  misc_feature 1..22: note = chemically synthesized
  source 1..22: mol_type = other DNA
ttatttatagccctccagaagg

SEQ ID NO: 65394 - DNA, 22 bp, synthetic construct
  misc_feature 1..22: note = chemically synthesized
  source 1..22: mol_type = other DNA
tttatagccctccagaaggatc

SEQ ID NO: 65395 - DNA, 22 bp, synthetic construct
  misc_feature 1..22: note = chemically synthesized
  source 1..22: mol_type = other DNA
atagccctccagaaggatccca

SEQ ID NO: 65396 - DNA, 22 bp, synthetic construct
  misc_feature 1..22: note = chemically synthesized
  source 1..22: mol_type = other DNA
tagccctccagaaggatcccaa

SEQ ID NO: 65397 - DNA, 22 bp, synthetic construct
  misc_feature 1..22: note = chemically synthesized
  source 1..22: mol_type = other DNA
cagaaggatcccaagggaagat

SEQ ID NO: 65398 - DNA, 22 bp, synthetic construct
  misc_feature 1..22: note = chemically synthesized
  source 1..22: mol_type = other DNA
catttgagaagacgatttccca

SEQ ID NO: 65399 - DNA, 22 bp, synthetic construct
  misc_feature 1..22: note = chemically synthesized
  source 1..22: mol_type = other DNA
gagaagacgatttcccaatttc

SEQ ID NO: 65400 - DNA, 22 bp, synthetic construct
  misc_feature 1..22: note = chemically synthesized
  source 1..22: mol_type = other DNA
agaagacgatttcccaatttcc

SEQ ID NO: 65401 - DNA, 22 bp, synthetic construct
  misc_feature 1..22: note = chemically synthesized
  source 1..22: mol_type = other DNA
cccaatttccatacagatgacg

SEQ ID NO: 65402 - DNA, 22 bp, synthetic construct
  misc_feature 1..22: note = chemically synthesized
  source 1..22: mol_type = other DNA
ccaatttccatacagatgacga

SEQ ID NO: 65403 - DNA, 22 bp, synthetic construct
  misc_feature 1..22: note = chemically synthesized
  source 1..22: mol_type = other DNA
ccatacagatgacgaaaacgta

SEQ ID NO: 65404 - DNA, 22 bp, synthetic construct
  misc_feature 1..22: note = chemically synthesized
  source 1..22: mol_type = other DNA
catacagatgacgaaaacgtaa

SEQ ID NO: 65405 - DNA, 22 bp, synthetic construct
  misc_feature 1..22: note = chemically synthesized
  source 1..22: mol_type = other DNA
cccactacactgctccccctgc

SEQ ID NO: 65406 - DNA, 22 bp, synthetic construct
  misc_feature 1..22: note = chemically synthesized
  source 1..22: mol_type = other DNA
cactgctccccctgctgaattt

SEQ ID NO: 65407 - DNA, 22 bp, synthetic construct
  misc_feature 1..22: note = chemically synthesized
  source 1..22: mol_type = other DNA
ctccccctgctgaattttcttt

SEQ ID NO: 65408 - DNA, 22 bp, synthetic construct
  misc_feature 1..22: note = chemically synthesized
  source 1..22: mol_type = other DNA
cccctgctgaattttctttttc

SEQ ID NO: 65409 - DNA, 22 bp, synthetic construct
  misc_feature 1..22: note = chemically synthesized
  source 1..22: mol_type = other DNA
ctgaattttctttttccactct

SEQ ID NO: 65410 - DNA, 22 bp, synthetic construct
  misc_feature 1..22: note = chemically synthesized
  source 1..22: mol_type = other DNA
aattttctttttccactctcgg

SEQ ID NO: 65411 - DNA, 22 bp, synthetic construct
  misc_feature 1..22: note = chemically synthesized
  source 1..22: mol_type = other DNA
tctttttccactctcggtgtgt

SEQ ID NO: 65412 - DNA, 22 bp, synthetic construct
  misc_feature 1..22: note = chemically synthesized
  source 1..22: mol_type = other DNA
ctttttccactctcggtgtgtg

SEQ ID NO: 65413 - DNA, 22 bp, synthetic construct
  misc_feature 1..22: note = chemically synthesized
  source 1..22: mol_type = other DNA
tttttccactctcggtgtgtgg

SEQ ID NO: 65414 - DNA, 22 bp, synthetic construct
  misc_feature 1..22: note = chemically synthesized
  source 1..22: mol_type = other DNA
tttccactctcggtgtgtggca

SEQ ID NO: 65415 - DNA, 22 bp, synthetic construct
  misc_feature 1..22: note = chemically synthesized
  source 1..22: mol_type = other DNA
ttccactctcggtgtgtggcat

SEQ ID NO: 65416 - DNA, 22 bp, synthetic construct
  misc_feature 1..22: note = chemically synthesized
  source 1..22: mol_type = other DNA
tccactctcggtgtgtggcatt

SEQ ID NO: 65417 - DNA, 22 bp, synthetic construct
  misc_feature 1..22: note = chemically synthesized
  source 1..22: mol_type = other DNA
ccactctcggtgtgtggcattg

SEQ ID NO: 65418 - DNA, 22 bp, synthetic construct
  misc_feature 1..22: note = chemically synthesized
  source 1..22: mol_type = other DNA
cactctcggtgtgtggcattgt

SEQ ID NO: 65419 - DNA, 22 bp, synthetic construct
  misc_feature 1..22: note = chemically synthesized
  source 1..22: mol_type = other DNA
tcggtgtgtggcattgtggggt

SEQ ID NO: 65420 - DNA, 22 bp, synthetic construct
  misc_feature 1..22: note = chemically synthesized
  source 1..22: mol_type = other DNA
ggtgtgtggcattgtggggtgc

SEQ ID NO: 65421 - DNA, 22 bp, synthetic construct
  misc_feature 1..22: note = chemically synthesized
  source 1..22: mol_type = other DNA
tggggtgcagacacctgaaagc

SEQ ID NO: 65422 - DNA, 22 bp, synthetic construct
  misc_feature 1..22: note = chemically synthesized
  source 1..22: mol_type = other DNA
aaagcctgactggagatgtaac

SEQ ID NO: 65423 - DNA, 22 bp, synthetic construct
  misc_feature 1..22: note = chemically synthesized
  source 1..22: mol_type = other DNA
actggagatgtaacatgggctc

SEQ ID NO: 65424 - DNA, 22 bp, synthetic construct
  misc_feature 1..22: note = chemically synthesized
  source 1..22: mol_type = other DNA
gagatgtaacatgggctctgct

SEQ ID NO: 65425 - DNA, 22 bp, synthetic construct
  misc_feature 1..22: note = chemically synthesized
  source 1..22: mol_type = other DNA
tgctgacattagcatgaagagc

SEQ ID NO: 65426 - DNA, 22 bp, synthetic construct
  misc_feature 1..22: note = chemically synthesized
  source 1..22: mol_type = other DNA
ctgacattagcatgaagagctt

SEQ ID NO: 65427 - DNA, 22 bp, synthetic construct
  misc_feature 1..22: note = chemically synthesized
  source 1..22: mol_type = other DNA
acattagcatgaagagcttagc

SEQ ID NO: 65428 - DNA, 22 bp, synthetic construct
  misc_feature 1..22: note = chemically synthesized
  source 1..22: mol_type = other DNA
gcatgaagagcttagctaatcg

SEQ ID NO: 65429 - DNA, 22 bp, synthetic construct
  misc_feature 1..22: note = chemically synthesized
  source 1..22: mol_type = other DNA
agctaatcgacttgcaaaatat

SEQ ID NO: 65430 - DNA, 22 bp, synthetic construct
  misc_feature 1..22: note = chemically synthesized
  source 1..22: mol_type = other DNA
gctaatcgacttgcaaaatata

SEQ ID NO: 65431 - DNA, 22 bp, synthetic construct
  misc_feature 1..22: note = chemically synthesized
  source 1..22: mol_type = other DNA
atcgacttgcaaaatataggtt

SEQ ID NO: 65432 - DNA, 22 bp, synthetic construct
  misc_feature 1..22: note = chemically synthesized
  source 1..22: mol_type = other DNA
gcaaaatataggttagggagtt

SEQ ID NO: 65433 - DNA, 22 bp, synthetic construct
  misc_feature 1..22: note = chemically synthesized
  source 1..22: mol_type = other DNA
caaaatataggttagggagttt

SEQ ID NO: 65434 - DNA, 22 bp, synthetic construct
  misc_feature 1..22: note = chemically synthesized
  source 1..22: mol_type = other DNA
gggagttttataggatatcaaa

SEQ ID NO: 65435 - DNA, 22 bp, synthetic construct
  misc_feature 1..22: note = chemically synthesized
  source 1..22: mol_type = other DNA
tataggatatcaaattatctta

SEQ ID NO: 65436 - DNA, 22 bp, synthetic construct
  misc_feature 1..22: note = chemically synthesized
  source 1..22: mol_type = other DNA
ataggatatcaaattatcttac

SEQ ID NO: 65437 - DNA, 22 bp, synthetic construct
  misc_feature 1..22: note = chemically synthesized
  source 1..22: mol_type = other DNA
taggatatcaaattatcttact

SEQ ID NO: 65438 - DNA, 22 bp, synthetic construct
  misc_feature 1..22: note = chemically synthesized
  source 1..22: mol_type = other DNA
tcttactctttcattgattaaa

SEQ ID NO: 65439 - DNA, 22 bp, synthetic construct
  misc_feature 1..22: note = chemically synthesized
  source 1..22: mol_type = other DNA
actctttcattgattaaaggca

SEQ ID NO: 65440 - DNA, 22 bp, synthetic construct
  misc_feature 1..22: note = chemically synthesized
  source 1..22: mol_type = other DNA
ctctttcattgattaaaggcaa

SEQ ID NO: 65441 - DNA, 22 bp, synthetic construct
  misc_feature 1..22: note = chemically synthesized
  source 1..22: mol_type = other DNA
tttcattgattaaaggcaaaat

SEQ ID NO: 65442 - DNA, 22 bp, synthetic construct
  misc_feature 1..22: note = chemically synthesized
  source 1..22: mol_type = other DNA
tcattgattaaaggcaaaatat

SEQ ID NO: 65443 - DNA, 22 bp, synthetic construct
  misc_feature 1..22: note = chemically synthesized
  source 1..22: mol_type = other DNA
cattgattaaaggcaaaatatt

SEQ ID NO: 65444 - DNA, 22 bp, synthetic construct
  misc_feature 1..22: note = chemically synthesized
  source 1..22: mol_type = other DNA
attgattaaaggcaaaatatta

SEQ ID NO: 65445 - DNA, 22 bp, synthetic construct
  misc_feature 1..22: note = chemically synthesized
  source 1..22: mol_type = other DNA
attaaaggcaaaatattacatt

SEQ ID NO: 65446 - DNA, 22 bp, synthetic construct
  misc_feature 1..22: note = chemically synthesized
  source 1..22: mol_type = other DNA
aaggcaaaatattacattaact

SEQ ID NO: 65447 - DNA, 22 bp, synthetic construct
  misc_feature 1..22: note = chemically synthesized
  source 1..22: mol_type = other DNA
cattaactagatcattacatgg

SEQ ID NO: 65448 - DNA, 22 bp, synthetic construct
  misc_feature 1..22: note = chemically synthesized
  source 1..22: mol_type = other DNA
actagatcattacatgggtaaa

SEQ ID NO: 65449 - DNA, 22 bp, synthetic construct
  misc_feature 1..22: note = chemically synthesized
  source 1..22: mol_type = other DNA
gatcattacatgggtaaaaggt

SEQ ID NO: 65450 - DNA, 22 bp, synthetic construct
  misc_feature 1..22: note = chemically synthesized
  source 1..22: mol_type = other DNA
catgggtaaaaggttagaactt

SEQ ID NO: 65451 - DNA, 22 bp, synthetic construct
  misc_feature 1..22: note = chemically synthesized
  source 1..22: mol_type = other DNA
gaacttcacacacttaggggtg

SEQ ID NO: 65452 - DNA, 22 bp, synthetic construct
  misc_feature 1..22: note = chemically synthesized
  source 1..22: mol_type = other DNA
cacacacttaggggtgttgcac

SEQ ID NO: 65453 - DNA, 22 bp, synthetic construct
  misc_feature 1..22: note = chemically synthesized
  source 1..22: mol_type = other DNA
acacacttaggggtgttgcact

SEQ ID NO: 65454 - DNA, 22 bp, synthetic construct
  misc_feature 1..22: note = chemically synthesized
  source 1..22: mol_type = other DNA
aggggtgttgcactatccttcc

SEQ ID NO: 65455 - DNA, 22 bp, synthetic construct
  misc_feature 1..22: note = chemically synthesized
  source 1..22: mol_type = other DNA
ggggtgttgcactatccttccc

SEQ ID NO: 65456 - DNA, 22 bp, synthetic construct
  misc_feature 1..22: note = chemically synthesized
  source 1..22: mol_type = other DNA
cactatccttccccttcctgcc

SEQ ID NO: 65457 - DNA, 22 bp, synthetic construct
  misc_feature 1..22: note = chemically synthesized
  source 1..22: mol_type = other DNA
tccttccccttcctgccttgtg

SEQ ID NO: 65458 - DNA, 22 bp, synthetic construct
  misc_feature 1..22: note = chemically synthesized
  source 1..22: mol_type = other DNA
ccccttcctgccttgtggcaaa

SEQ ID NO: 65459 - DNA, 22 bp, synthetic construct
  misc_feature 1..22: note = chemically synthesized
  source 1..22: mol_type = other DNA
cccttcctgccttgtggcaaat

SEQ ID NO: 65460 - DNA, 22 bp, synthetic construct
  misc_feature 1..22: note = chemically synthesized
  source 1..22: mol_type = other DNA
cctgccttgtggcaaatcacag

SEQ ID NO: 65461 - DNA, 22 bp, synthetic construct
  misc_feature 1..22: note = chemically synthesized
  source 1..22: mol_type = other DNA
ctgccttgtggcaaatcacagg

SEQ ID NO: 65462 - DNA, 22 bp, synthetic construct
  misc_feature 1..22: note = chemically synthesized
  source 1..22: mol_type = other DNA
ccttgtggcaaatcacaggttg

SEQ ID NO: 65463 - DNA, 22 bp, synthetic construct
  misc_feature 1..22: note = chemically synthesized
  source 1..22: mol_type = other DNA
gtggcaaatcacaggttggagg

SEQ ID NO: 65464 - DNA, 22 bp, synthetic construct
  misc_feature 1..22: note = chemically synthesized
  source 1..22: mol_type = other DNA
tggcaaatcacaggttggaggc

SEQ ID NO: 65465 - DNA, 22 bp, synthetic construct
  misc_feature 1..22: note = chemically synthesized
  source 1..22: mol_type = other DNA
gaggcagggaaactcactgtgt

SEQ ID NO: 65466 - DNA, 22 bp, synthetic construct
  misc_feature 1..22: note = chemically synthesized
  source 1..22: mol_type = other DNA
actgtgtctagcgctcctaaat

SEQ ID NO: 65467 - DNA, 22 bp, synthetic construct
  misc_feature 1..22: note = chemically synthesized
  source 1..22: mol_type = other DNA
tgtctagcgctcctaaatgcct

SEQ ID NO: 65468 - DNA, 22 bp, synthetic construct
  misc_feature 1..22: note = chemically synthesized
  source 1..22: mol_type = other DNA
gcgctcctaaatgcctgaatag

SEQ ID NO: 65469 - DNA, 22 bp, synthetic construct
  misc_feature 1..22: note = chemically synthesized
  source 1..22: mol_type = other DNA
ctaaatgcctgaatagcaacgt

SEQ ID NO: 65470 - DNA, 22 bp, synthetic construct
  misc_feature 1..22: note = chemically synthesized
  source 1..22: mol_type = other DNA
aatgcctgaatagcaacgttag

SEQ ID NO: 65471 - DNA, 22 bp, synthetic construct
  misc_feature 1..22: note = chemically synthesized
  source 1..22: mol_type = other DNA
aatagcaacgttagacttaaag

SEQ ID NO: 65472 - DNA, 22 bp, synthetic construct
  misc_feature 1..22: note = chemically synthesized
  source 1..22: mol_type = other DNA
gacttaaaggaggggcatttgc

SEQ ID NO: 65473 - DNA, 22 bp, synthetic construct
  misc_feature 1..22: note = chemically synthesized
  source 1..22: mol_type = other DNA
aaaggaggggcatttgccttcg

SEQ ID NO: 65474 - DNA, 22 bp, synthetic construct
  misc_feature 1..22: note = chemically synthesized
  source 1..22: mol_type = other DNA
aaggaggggcatttgccttcgc

SEQ ID NO: 65475 - DNA, 22 bp, synthetic construct
  misc_feature 1..22: note = chemically synthesized
  source 1..22: mol_type = other DNA
gccttcgctttgaatctcccga

SEQ ID NO: 65476 - DNA, 22 bp, synthetic construct
  misc_feature 1..22: note = chemically synthesized
  source 1..22: mol_type = other DNA
ccttcgctttgaatctcccgag

SEQ ID NO: 65477 - DNA, 22 bp, synthetic construct
  misc_feature 1..22: note = chemically synthesized
  source 1..22: mol_type = other DNA
cgctttgaatctcccgagtctt

SEQ ID NO: 65478 - DNA, 22 bp, synthetic construct
  misc_feature 1..22: note = chemically synthesized
  source 1..22: mol_type = other DNA
gctttgaatctcccgagtcttt

SEQ ID NO: 65479 - DNA, 22 bp, synthetic construct
  misc_feature 1..22: note = chemically synthesized
  source 1..22: mol_type = other DNA
tgaatctcccgagtctttttta

SEQ ID NO: 65480 - DNA, 22 bp, synthetic construct
  misc_feature 1..22: note = chemically synthesized
  source 1..22: mol_type = other DNA
gaatctcccgagtcttttttat

SEQ ID NO: 65481 - DNA, 22 bp, synthetic construct
  misc_feature 1..22: note = chemically synthesized
  source 1..22: mol_type = other DNA
aatctcccgagtcttttttatt

SEQ ID NO: 65482 - DNA, 22 bp, synthetic construct
  misc_feature 1..22: note = chemically synthesized
  source 1..22: mol_type = other DNA
ccgagtcttttttattctgata

SEQ ID NO: 65483 - DNA, 22 bp, synthetic construct
  misc_feature 1..22: note = chemically synthesized
  source 1..22: mol_type = other DNA
ttttattctgatagaatagtaa

SEQ ID NO: 65484 - DNA, 22 bp, synthetic construct
  misc_feature 1..22: note = chemically synthesized
  source 1..22: mol_type = other DNA
tttattctgatagaatagtaat

SEQ ID NO: 65485 - DNA, 22 bp, synthetic construct
  misc_feature 1..22: note = chemically synthesized
  source 1..22: mol_type = other DNA
ttattctgatagaatagtaatc

SEQ ID NO: 65486 - DNA, 22 bp, synthetic construct
  misc_feature 1..22: note = chemically synthesized
  source 1..22: mol_type = other DNA
tattctgatagaatagtaatct

SEQ ID NO: 65487 - DNA, 22 bp, synthetic construct
  misc_feature 1..22: note = chemically synthesized
  source 1..22: mol_type = other DNA
attctgatagaatagtaatctt

SEQ ID NO: 65488 - DNA, 22 bp, synthetic construct
  misc_feature 1..22: note = chemically synthesized
  source 1..22: mol_type = other DNA
ttctgatagaatagtaatctta

SEQ ID NO: 65489 - DNA, 22 bp, synthetic construct
  misc_feature 1..22: note = chemically synthesized
  source 1..22: mol_type = other DNA
tgatagaatagtaatcttaaaa

SEQ ID NO: 65490 - DNA, 22 bp, synthetic construct
  misc_feature 1..22: note = chemically synthesized
  source 1..22: mol_type = other DNA
atagaatagtaatcttaaaatt

SEQ ID NO: 65491 - DNA, 22 bp, synthetic construct
  misc_feature 1..22: note = chemically synthesized
  source 1..22: mol_type = other DNA
aaaattaaatattaatttgttc

SEQ ID NO: 65492 - DNA, 22 bp, synthetic construct
  misc_feature 1..22: note = chemically synthesized
  source 1..22: mol_type = other DNA
aaattaaatattaatttgttct

SEQ ID NO: 65493 - DNA, 22 bp, synthetic construct
  misc_feature 1..22: note = chemically synthesized
  source 1..22: mol_type = other DNA
aatattaatttgttctgattcc

SEQ ID NO: 65494 - DNA, 22 bp, synthetic construct
  misc_feature 1..22: note = chemically synthesized
  source 1..22: mol_type = other DNA
atttgttctgattccatttctg

SEQ ID NO: 65495 - DNA, 22 bp, synthetic construct
  misc_feature 1..22: note = chemically synthesized
  source 1..22: mol_type = other DNA
gttctgattccatttctgttag

SEQ ID NO: 65496 - DNA, 22 bp, synthetic construct
  misc_feature 1..22: note = chemically synthesized
  source 1..22: mol_type = other DNA
ttctgattccatttctgttagc

SEQ ID NO: 65497 - DNA, 22 bp, synthetic construct
  misc_feature 1..22: note = chemically synthesized
  source 1..22: mol_type = other DNA
tgattccatttctgttagcagg

SEQ ID NO: 65498 - DNA, 22 bp, synthetic construct
  misc_feature 1..22: note = chemically synthesized
  source 1..22: mol_type = other DNA
attccatttctgttagcaggga

SEQ ID NO: 65499 - DNA, 22 bp, synthetic construct
  misc_feature 1..22: note = chemically synthesized
  source 1..22: mol_type = other DNA
catttctgttagcagggaaaag

SEQ ID NO: 65500 - DNA, 22 bp, synthetic construct
  misc_feature 1..22: note = chemically synthesized
  source 1..22: mol_type = other DNA
ctgttagcagggaaaagggcaa

SEQ ID NO: 65501 - DNA, 22 bp, synthetic construct
  misc_feature 1..22: note = chemically synthesized
  source 1..22: mol_type = other DNA
tgttagcagggaaaagggcaaa

SEQ ID NO: 65502 - DNA, 22 bp, synthetic construct
  misc_feature 1..22: note = chemically synthesized
  source 1..22: mol_type = other DNA
ttagcagggaaaagggcaaata

SEQ ID NO: 65503 - DNA, 22 bp, synthetic construct
  misc_feature 1..22: note = chemically synthesized
  source 1..22: mol_type = other DNA
gcagggaaaagggcaaatacat

SEQ ID NO: 65504 - DNA, 22 bp, synthetic construct
  misc_feature 1..22: note = chemically synthesized
  source 1..22: mol_type = other DNA
agccatggccaggtttgagaga

SEQ ID NO: 65505 - DNA, 22 bp, synthetic construct
  misc_feature 1..22: note = chemically synthesized
  source 1..22: mol_type = other DNA
gagagacagagtgattcgcagt

SEQ ID NO: 65506 - DNA, 22 bp, synthetic construct
  misc_feature 1..22: note = chemically synthesized
  source 1..22: mol_type = other DNA
agagacagagtgattcgcagta

SEQ ID NO: 65507 - DNA, 22 bp, synthetic construct
  misc_feature 1..22: note = chemically synthesized
  source 1..22: mol_type = other DNA
gcagtagtcttcccagggtgtt

SEQ ID NO: 65508 - DNA, 22 bp, synthetic construct
  misc_feature 1..22: note = chemically synthesized
  source 1..22: mol_type = other DNA
cccagggtgttgagtgggaacg

SEQ ID NO: 65509 - DNA, 22 bp, synthetic construct
  misc_feature 1..22: note = chemically synthesized
  source 1..22: mol_type = other DNA
ccagggtgttgagtgggaacgt

SEQ ID NO: 65510 - DNA, 22 bp, synthetic construct
  misc_feature 1..22: note = chemically synthesized
  source 1..22: mol_type = other DNA
agtgggaacgtctccctgggaa

SEQ ID NO: 65511 - DNA, 22 bp, synthetic construct
  misc_feature 1..22: note = chemically synthesized
  source 1..22: mol_type = other DNA
cctgggaagggatgtggtcatt

SEQ ID NO: 65512 - DNA, 22 bp, synthetic construct
  misc_feature 1..22: note = chemically synthesized
  source 1..22: mol_type = other DNA
ggaagggatgtggtcattctca

SEQ ID NO: 65513 - DNA, 22 bp, synthetic construct
  misc_feature 1..22: note = chemically synthesized
  source 1..22: mol_type = other DNA
tcagactgtgggctcagactct

SEQ ID NO: 65514 - DNA, 22 bp, synthetic construct
  misc_feature 1..22: note = chemically synthesized
  source 1..22: mol_type = other DNA
agactgtgggctcagactctgt

SEQ ID NO: 65515 - DNA, 22 bp, synthetic construct
  misc_feature 1..22: note = chemically synthesized
  source 1..22: mol_type = other DNA
tgggctcagactctgtcacact

SEQ ID NO: 65516 - DNA, 22 bp, synthetic construct
  misc_feature 1..22: note = chemically synthesized
  source 1..22: mol_type = other DNA
agactctgtcacactgtaatac

SEQ ID NO: 65517 - DNA, 22 bp, synthetic construct
  misc_feature 1..22: note = chemically synthesized
  source 1..22: mol_type = other DNA
tgtcacactgtaatacctctgt

SEQ ID NO: 65518 - DNA, 22 bp, synthetic construct
  misc_feature 1..22: note = chemically synthesized
  source 1..22: mol_type = other DNA
tcacactgtaatacctctgtca

SEQ ID NO: 65519 - DNA, 22 bp, synthetic construct
  misc_feature 1..22: note = chemically synthesized
  source 1..22: mol_type = other DNA
taatacctctgtcaaccatcta

SEQ ID NO: 65520 - DNA, 22 bp, synthetic construct
  misc_feature 1..22: note = chemically synthesized
  source 1..22: mol_type = other DNA
tgtcaaccatctaatgctatca

SEQ ID NO: 65521 - DNA, 22 bp, synthetic construct
  misc_feature 1..22: note = chemically synthesized
  source 1..22: mol_type = other DNA
tcaaccatctaatgctatcaag

SEQ ID NO: 65522 - DNA, 22 bp, synthetic construct
  misc_feature 1..22: note = chemically synthesized
  source 1..22: mol_type = other DNA
atgctatcaaggccttcctgag

SEQ ID NO: 65523 - DNA, 22 bp, synthetic construct
  misc_feature 1..22: note = chemically synthesized
  source 1..22: mol_type = other DNA
tcaaggccttcctgagagaagt

SEQ ID NO: 65524 - DNA, 22 bp, synthetic construct
  misc_feature 1..22: note = chemically synthesized
  source 1..22: mol_type = other DNA
cctgagagaagtttcaggccca

SEQ ID NO: 65525 - DNA, 22 bp, synthetic construct
  misc_feature 1..22: note = chemically synthesized
  source 1..22: mol_type = other DNA
ctgagagaagtttcaggcccaa

SEQ ID NO: 65526 - DNA, 22 bp, synthetic construct
  misc_feature 1..22: note = chemically synthesized
  source 1..22: mol_type = other DNA
agagaagtttcaggcccaatcc

SEQ ID NO: 65527 - DNA, 22 bp, synthetic construct
  misc_feature 1..22: note = chemically synthesized
  source 1..22: mol_type = other DNA
caggcccaatcctgatgttgag

SEQ ID NO: 65528 - DNA, 22 bp, synthetic construct
  misc_feature 1..22: note = chemically synthesized
  source 1..22: mol_type = other DNA
aggcccaatcctgatgttgagt

SEQ ID NO: 65529 - DNA, 22 bp, synthetic construct
  misc_feature 1..22: note = chemically synthesized
  source 1..22: mol_type = other DNA
atgttgagttggcatgttcaca

SEQ ID NO: 65530 - DNA, 22 bp, synthetic construct
  misc_feature 1..22: note = chemically synthesized
  source 1..22: mol_type = other DNA
agttggcatgttcacatgtctg

SEQ ID NO: 65531 - DNA, 22 bp, synthetic construct
  misc_feature 1..22: note = chemically synthesized
  source 1..22: mol_type = other DNA
gcatgttcacatgtctggtaat

SEQ ID NO: 65532 - DNA, 22 bp, synthetic construct
  misc_feature 1..22: note = chemically synthesized
  source 1..22: mol_type = other DNA
acatgtctggtaataatctgcc

SEQ ID NO: 65533 - DNA, 22 bp, synthetic construct
  misc_feature 1..22: note = chemically synthesized
  source 1..22: mol_type = other DNA
gtaataatctgccagctaatcc

SEQ ID NO: 65534 - DNA, 22 bp, synthetic construct
  misc_feature 1..22: note = chemically synthesized
  source 1..22: mol_type = other DNA
ccagctaatccatcatgctgct

SEQ ID NO: 65535 - DNA, 22 bp, synthetic construct
  misc_feature 1..22: note = chemically synthesized
  source 1..22: mol_type = other DNA
atccatcatgctgctcatttct

SEQ ID NO: 65536 - DNA, 22 bp, synthetic construct
  misc_feature 1..22: note = chemically synthesized
  source 1..22: mol_type = other DNA
ctcatttctgtgcattattcat

SEQ ID NO: 65537 - DNA, 22 bp, synthetic construct
  misc_feature 1..22: note = chemically synthesized
  source 1..22: mol_type = other DNA
atttctgtgcattattcatctc

SEQ ID NO: 65538 - DNA, 22 bp, synthetic construct
  misc_feature 1..22: note = chemically synthesized
  source 1..22: mol_type = other DNA
ctgtgcattattcatctcaaag

SEQ ID NO: 65539 - DNA, 22 bp, synthetic construct
  misc_feature 1..22: note = chemically synthesized
  source 1..22: mol_type = other DNA
tgtgcattattcatctcaaagc

SEQ ID NO: 65540 - DNA, 22 bp, synthetic construct
  misc_feature 1..22: note = chemically synthesized
  source 1..22: mol_type = other DNA
tgcattattcatctcaaagcca

SEQ ID NO: 65541 - DNA, 22 bp, synthetic construct
  misc_feature 1..22: note = chemically synthesized
  source 1..22: mol_type = other DNA
ttcatctcaaagccagaggatc

SEQ ID NO: 65542 - DNA, 22 bp, synthetic construct
  misc_feature 1..22: note = chemically synthesized
  source 1..22: mol_type = other DNA
atctcaaagccagaggatctca

SEQ ID NO: 65543 - DNA, 22 bp, synthetic construct
  misc_feature 1..22: note = chemically synthesized
  source 1..22: mol_type = other DNA
aaagccagaggatctcatgtcc

SEQ ID NO: 65544 - DNA, 22 bp, synthetic construct
  misc_feature 1..22: note = chemically synthesized
  source 1..22: mol_type = other DNA
atgtccatcacagggctgtggt

SEQ ID NO: 65545 - DNA, 22 bp, synthetic construct
  misc_feature 1..22: note = chemically synthesized
  source 1..22: mol_type = other DNA
tggtctgtggatagggaaaatt

SEQ ID NO: 65546 - DNA, 22 bp, synthetic construct
  misc_feature 1..22: note = chemically synthesized
  source 1..22: mol_type = other DNA
tggatagggaaaatttcaaggc

SEQ ID NO: 65547 - DNA, 22 bp, synthetic construct
  misc_feature 1..22: note = chemically synthesized
  source 1..22: mol_type = other DNA
caaggcttttctgggcctgatg

SEQ ID NO: 65548 - DNA, 22 bp, synthetic construct
  misc_feature 1..22: note = chemically synthesized
  source 1..22: mol_type = other DNA
aaggcttttctgggcctgatgt

SEQ ID NO: 65549 - DNA, 22 bp, synthetic construct
  misc_feature 1..22: note = chemically synthesized
  source 1..22: mol_type = other DNA
ttctgggcctgatgtagccatt

SEQ ID NO: 65550 - DNA, 22 bp, synthetic construct
  misc_feature 1..22: note = chemically synthesized
  source 1..22: mol_type = other DNA
tctgggcctgatgtagccattt

SEQ ID NO: 65551 - DNA, 22 bp, synthetic construct
  misc_feature 1..22: note = chemically synthesized
  source 1..22: mol_type = other DNA
ctgggcctgatgtagccatttt

SEQ ID NO: 65552 - DNA, 22 bp, synthetic construct
  misc_feature 1..22: note = chemically synthesized
  source 1..22: mol_type = other DNA
tgggcctgatgtagccattttc

SEQ ID NO: 65553 - DNA, 22 bp, synthetic construct
  misc_feature 1..22: note = chemically synthesized
  source 1..22: mol_type = other DNA
ggcctgatgtagccattttctt

SEQ ID NO: 65554 - DNA, 22 bp, synthetic construct
  misc_feature 1..22: note = chemically synthesized
  source 1..22: mol_type = other DNA
atgtagccattttctttcagta

SEQ ID NO: 65555 - DNA, 22 bp, synthetic construct
  misc_feature 1..22: note = chemically synthesized
  source 1..22: mol_type = other DNA
tctttcagtatcttagattggt

SEQ ID NO: 65556 - DNA, 22 bp, synthetic construct
  misc_feature 1..22: note = chemically synthesized
  source 1..22: mol_type = other DNA
ctttcagtatcttagattggta

SEQ ID NO: 65557 - DNA, 22 bp, synthetic construct
  misc_feature 1..22: note = chemically synthesized
  source 1..22: mol_type = other DNA
tttcagtatcttagattggtag

SEQ ID NO: 65558 - DNA, 22 bp, synthetic construct
  misc_feature 1..22: note = chemically synthesized
  source 1..22: mol_type = other DNA
tcagtatcttagattggtaggt

SEQ ID NO: 65559 - DNA, 22 bp, synthetic construct
  misc_feature 1..22: note = chemically synthesized
  source 1..22: mol_type = other DNA
cagtatcttagattggtaggtc

SEQ ID NO: 65560 - DNA, 22 bp, synthetic construct
  misc_feature 1..22: note = chemically synthesized
  source 1..22: mol_type = other DNA
agtatcttagattggtaggtct

SEQ ID NO: 65561 - DNA, 22 bp, synthetic construct
  misc_feature 1..22: note = chemically synthesized
  source 1..22: mol_type = other DNA
agattggtaggtctttagaaat

SEQ ID NO: 65562 - DNA, 22 bp, synthetic construct
  misc_feature 1..22: note = chemically synthesized
  source 1..22: mol_type = other DNA
gattggtaggtctttagaaatt

SEQ ID NO: 65563 - DNA, 22 bp, synthetic construct
  misc_feature 1..22: note = chemically synthesized
  source 1..22: mol_type = other DNA
gtaggtctttagaaattatctc

SEQ ID NO: 65564 - DNA, 22 bp, synthetic construct
  misc_feature 1..22: note = chemically synthesized
  source 1..22: mol_type = other DNA
tagaaattatctctcaaaatgt

SEQ ID NO: 65565 - DNA, 22 bp, synthetic construct
  misc_feature 1..22: note = chemically synthesized
  source 1..22: mol_type = other DNA
agaaattatctctcaaaatgtg

SEQ ID NO: 65566 - DNA, 22 bp, synthetic construct
  misc_feature 1..22: note = chemically synthesized
  source 1..22: mol_type = other DNA
gaaattatctctcaaaatgtgt

SEQ ID NO: 65567 - DNA, 22 bp, synthetic construct
  misc_feature 1..22: note = chemically synthesized
  source 1..22: mol_type = other DNA
tctctcaaaatgtgtgtgtgtg

SEQ ID NO: 65568 - DNA, 22 bp, synthetic construct
  misc_feature 1..22: note = chemically synthesized
  source 1..22: mol_type = other DNA
tcaaaatgtgtgtgtgtgtgcc

SEQ ID NO: 65569 - DNA, 22 bp, synthetic construct
  misc_feature 1..22: note = chemically synthesized
  source 1..22: mol_type = other DNA
aaaatgtgtgtgtgtgtgccta

SEQ ID NO: 65570 - DNA, 22 bp, synthetic construct
  misc_feature 1..22: note = chemically synthesized
  source 1..22: mol_type = other DNA
agtatagttttcttgaatttct

SEQ ID NO: 65571 - DNA, 22 bp, synthetic construct
  misc_feature 1..22: note = chemically synthesized
  source 1..22: mol_type = other DNA
tcttgaatttctcacttcagta

SEQ ID NO: 65572 - DNA, 22 bp, synthetic construct
  misc_feature 1..22: note = chemically synthesized
  source 1..22: mol_type = other DNA
cttgaatttctcacttcagtac

SEQ ID NO: 65573 - DNA, 22 bp, synthetic construct
  misc_feature 1..22: note = chemically synthesized
  source 1..22: mol_type = other DNA
ttgaatttctcacttcagtact

SEQ ID NO: 65574 - DNA, 22 bp, synthetic construct
  misc_feature 1..22: note = chemically synthesized
  source 1..22: mol_type = other DNA
gaatttctcacttcagtactta

SEQ ID NO: 65575 - DNA, 22 bp, synthetic construct
  misc_feature 1..22: note = chemically synthesized
  source 1..22: mol_type = other DNA
aatttctcacttcagtacttaa

SEQ ID NO: 65576 - DNA, 22 bp, synthetic construct
  misc_feature 1..22: note = chemically synthesized
  source 1..22: mol_type = other DNA
ctcacttcagtacttaactaca

SEQ ID NO: 65577 - DNA, 22 bp, synthetic construct
  misc_feature 1..22: note = chemically synthesized
  source 1..22: mol_type = other DNA
tcacttcagtacttaactacac

SEQ ID NO: 65578 - DNA, 22 bp, synthetic construct
  misc_feature 1..22: note = chemically synthesized
  source 1..22: mol_type = other DNA
acttcagtacttaactacacat

SEQ ID NO: 65579 - DNA, 22 bp, synthetic construct
  misc_feature 1..22: note = chemically synthesized
  source 1..22: mol_type = other DNA
cagtacttaactacacatatgt

SEQ ID NO: 65580 - DNA, 22 bp, synthetic construct
  misc_feature 1..22: note = chemically synthesized
  source 1..22: mol_type = other DNA
agtacttaactacacatatgtg

SEQ ID NO: 65581 - DNA, 22 bp, synthetic construct
  misc_feature 1..22: note = chemically synthesized
  source 1..22: mol_type = other DNA
aactacacatatgtgcagaaag

SEQ ID NO: 65582 - DNA, 22 bp, synthetic construct
  misc_feature 1..22: note = chemically synthesized
  source 1..22: mol_type = other DNA
actacacatatgtgcagaaagt

SEQ ID NO: 65583 - DNA, 22 bp, synthetic construct
  misc_feature 1..22: note = chemically synthesized
  source 1..22: mol_type = other DNA
cacatatgtgcagaaagtgaac

SEQ ID NO: 65584 - DNA, 22 bp, synthetic construct
  misc_feature 1..22: note = chemically synthesized
  source 1..22: mol_type = other DNA
ttagaatttggctatccgttct

SEQ ID NO: 65585 - DNA, 22 bp, synthetic construct
  misc_feature 1..22: note = chemically synthesized
  source 1..22: mol_type = other DNA
agaatttggctatccgttcttt

SEQ ID NO: 65586 - DNA, 22 bp, synthetic construct
  misc_feature 1..22: note = chemically synthesized
  source 1..22: mol_type = other DNA
gaatttggctatccgttctttc

SEQ ID NO: 65587 - DNA, 22 bp, synthetic construct
  misc_feature 1..22: note = chemically synthesized
  source 1..22: mol_type = other DNA
ggctatccgttctttctcattg

SEQ ID NO: 65588 - DNA, 22 bp, synthetic construct
  misc_feature 1..22: note = chemically synthesized
  source 1..22: mol_type = other DNA
gctatccgttctttctcattgt

SEQ ID NO: 65589 - DNA, 22 bp, synthetic construct
  misc_feature 1..22: note = chemically synthesized
  source 1..22: mol_type = other DNA
tccgttctttctcattgtgtga

SEQ ID NO: 65590 - DNA, 22 bp, synthetic construct
  misc_feature 1..22: note = chemically synthesized
  source 1..22: mol_type = other DNA
tttctcattgtgtgagaaggag

SEQ ID NO: 65591 - DNA, 22 bp, synthetic construct
  misc_feature 1..22: note = chemically synthesized
  source 1..22: mol_type = other DNA
tctcattgtgtgagaaggaggc

SEQ ID NO: 65592 - DNA, 22 bp, synthetic construct
  misc_feature 1..22: note = chemically synthesized
  source 1..22: mol_type = other DNA
ctcattgtgtgagaaggaggca

SEQ ID NO: 65593 - DNA, 22 bp, synthetic construct
  misc_feature 1..22: note = chemically synthesized
  source 1..22: mol_type = other DNA
tcattgtgtgagaaggaggcaa

SEQ ID NO: 65594 - DNA, 22 bp, synthetic construct
  misc_feature 1..22: note = chemically synthesized
  source 1..22: mol_type = other DNA
attgtgtgagaaggaggcaaag

SEQ ID NO: 65595 - DNA, 22 bp, synthetic construct
  misc_feature 1..22: note = chemically synthesized
  source 1..22: mol_type = other DNA
tgtgagaaggaggcaaagttgc

SEQ ID NO: 65596 - DNA, 22 bp, synthetic construct
  misc_feature 1..22: note = chemically synthesized
  source 1..22: mol_type = other DNA
ccaaattggaggtggggcaagg

SEQ ID NO: 65597 - DNA, 22 bp, synthetic construct
  misc_feature 1..22: note = chemically synthesized
  source 1..22: mol_type = other DNA
gaggtggggcaaggtgggccag

SEQ ID NO: 65598 - DNA, 22 bp, synthetic construct
  misc_feature 1..22: note = chemically synthesized
  source 1..22: mol_type = other DNA
tgattggtgtctcactttgatg

SEQ ID NO: 65599 - DNA, 22 bp, synthetic construct
  misc_feature 1..22: note = chemically synthesized
  source 1..22: mol_type = other DNA
gtgtctcactttgatgtgtagg

SEQ ID NO: 65600 - DNA, 22 bp, synthetic construct
  misc_feature 1..22: note = chemically synthesized
  source 1..22: mol_type = other DNA
actttgatgtgtaggagagaga

SEQ ID NO: 65601 - DNA, 22 bp, synthetic construct
  misc_feature 1..22: note = chemically synthesized
  source 1..22: mol_type = other DNA
tgatgtgtaggagagagaacaa

SEQ ID NO: 65602 - DNA, 22 bp, synthetic construct
  misc_feature 1..22: note = chemically synthesized
  source 1..22: mol_type = other DNA
gatgtgtaggagagagaacaaa

SEQ ID NO: 65603 - DNA, 22 bp, synthetic construct
  misc_feature 1..22: note = chemically synthesized
  source 1..22: mol_type = other DNA
atgtgtaggagagagaacaaat

SEQ ID NO: 65604 - DNA, 22 bp, synthetic construct
  misc_feature 1..22: note = chemically synthesized
  source 1..22: mol_type = other DNA
tctggaaaggagccatggtcca

SEQ ID NO: 65605 - DNA, 22 bp, synthetic construct
  misc_feature 1..22: note = chemically synthesized
  source 1..22: mol_type = other DNA
tggaaaggagccatggtccacc

SEQ ID NO: 65606 - DNA, 22 bp, synthetic construct
  misc_feature 1..22: note = chemically synthesized
  source 1..22: mol_type = other DNA
gaaaggagccatggtccaccca

SEQ ID NO: 65607 - DNA, 22 bp, synthetic construct
  misc_feature 1..22: note = chemically synthesized
  source 1..22: mol_type = other DNA
aaatccccagtaccagtctccc

SEQ ID NO: 65608 - DNA, 22 bp, synthetic construct
  misc_feature 1..22: note = chemically synthesized
  source 1..22: mol_type = other DNA
cctaggatgtcttgcctttcag

SEQ ID NO: 65609 - DNA, 22 bp, synthetic construct
  misc_feature 1..22: note = chemically synthesized
  source 1..22: mol_type = other DNA
ggatgtcttgcctttcagcagc

SEQ ID NO: 65610 - DNA, 22 bp, synthetic construct
  misc_feature 1..22: note = chemically synthesized
  source 1..22: mol_type = other DNA
gcctttcagcagctgttcagtc

SEQ ID NO: 65611 - DNA, 22 bp, synthetic construct
  misc_feature 1..22: note = chemically synthesized
  source 1..22: mol_type = other DNA
cctttcagcagctgttcagtca

SEQ ID NO: 65612 - DNA, 22 bp, synthetic construct
  misc_feature 1..22: note = chemically synthesized
  source 1..22: mol_type = other DNA
tcagcagctgttcagtcaaatc

SEQ ID NO: 65613 - DNA, 22 bp, synthetic construct
  misc_feature 1..22: note = chemically synthesized
  source 1..22: mol_type = other DNA
cagcagctgttcagtcaaatcc

SEQ ID NO: 65614 - DNA, 22 bp, synthetic construct
  misc_feature 1..22: note = chemically synthesized
  source 1..22: mol_type = other DNA
agcagctgttcagtcaaatcca

SEQ ID NO: 65615 - DNA, 22 bp, synthetic construct
  misc_feature 1..22: note = chemically synthesized
  source 1..22: mol_type = other DNA
ttcagtcaaatccatttcagaa

SEQ ID NO: 65616 - DNA, 22 bp, synthetic construct
  misc_feature 1..22: note = chemically synthesized
  source 1..22: mol_type = other DNA
agtcaaatccatttcagaatgg

SEQ ID NO: 65617 - DNA, 22 bp, synthetic construct
  misc_feature 1..22: note = chemically synthesized
  source 1..22: mol_type = other DNA
cagaatggagaacagcttgtca

SEQ ID NO: 65618 - DNA, 22 bp, synthetic construct
  misc_feature 1..22: note = chemically synthesized
  source 1..22: mol_type = other DNA
agaatggagaacagcttgtcac

SEQ ID NO: 65619 - DNA, 22 bp, synthetic construct
  misc_feature 1..22: note = chemically synthesized
  source 1..22: mol_type = other DNA
gtcacagttctctactcttgac

SEQ ID NO: 65620 - DNA, 22 bp, synthetic construct
  misc_feature 1..22: note = chemically synthesized
  source 1..22: mol_type = other DNA
tcacagttctctactcttgacc

SEQ ID NO: 65621 - DNA, 22 bp, synthetic construct
  misc_feature 1..22: note = chemically synthesized
  source 1..22: mol_type = other DNA
tctactcttgacctgctgatag

SEQ ID NO: 65622 - DNA, 22 bp, synthetic construct
  misc_feature 1..22: note = chemically synthesized
  source 1..22: mol_type = other DNA
tactcttgacctgctgatagaa

SEQ ID NO: 65623 - DNA, 22 bp, synthetic construct
  misc_feature 1..22: note = chemically synthesized
  source 1..22: mol_type = other DNA
ctcttgacctgctgatagaaca

SEQ ID NO: 65624 - DNA, 22 bp, synthetic construct
  misc_feature 1..22: note = chemically synthesized
  source 1..22: mol_type = other DNA
ttgacctgctgatagaacaagg

SEQ ID NO: 65625 - DNA, 22 bp, synthetic construct
  misc_feature 1..22: note = chemically synthesized
  source 1..22: mol_type = other DNA
gacctgctgatagaacaagggg

SEQ ID NO: 65626 - DNA, 22 bp, synthetic construct
  misc_feature 1..22: note = chemically synthesized
  source 1..22: mol_type = other DNA
acctgctgatagaacaaggggc

SEQ ID NO: 65627 - DNA, 22 bp, synthetic construct
  misc_feature 1..22: note = chemically synthesized
  source 1..22: mol_type = other DNA
ctgatagaacaaggggcttgga

SEQ ID NO: 65628 - DNA, 22 bp, synthetic construct
  misc_feature 1..22: note = chemically synthesized
  source 1..22: mol_type = other DNA
atagaacaaggggcttggagat

SEQ ID NO: 65629 - DNA, 22 bp, synthetic construct
  misc_feature 1..22: note = chemically synthesized
  source 1..22: mol_type = other DNA
ggagattttgggtagatatgga

SEQ ID NO: 65630 - DNA, 22 bp, synthetic construct
  misc_feature 1..22: note = chemically synthesized
  source 1..22: mol_type = other DNA
gagattttgggtagatatggaa

SEQ ID NO: 65631 - DNA, 22 bp, synthetic construct
  misc_feature 1..22: note = chemically synthesized
  source 1..22: mol_type = other DNA
tgggtagatatggaaatagatc

SEQ ID NO: 65632 - DNA, 22 bp, synthetic construct
  misc_feature 1..22: note = chemically synthesized
  source 1..22: mol_type = other DNA
gggtagatatggaaatagatcc

SEQ ID NO: 65633 - DNA, 22 bp, synthetic construct
  misc_feature 1..22: note = chemically synthesized
  source 1..22: mol_type = other DNA
ggtagatatggaaatagatccc

SEQ ID NO: 65634 - DNA, 22 bp, synthetic construct
  misc_feature 1..22: note = chemically synthesized
  source 1..22: mol_type = other DNA
aacatactaaaaagattttttt

SEQ ID NO: 65635 - DNA, 22 bp, synthetic construct
  misc_feature 1..22: note = chemically synthesized
  source 1..22: mol_type = other DNA
aaaagattttttttgtacgtgt

SEQ ID NO: 65636 - DNA, 22 bp, synthetic construct
  misc_feature 1..22: note = chemically synthesized
  source 1..22: mol_type = other DNA
tttttgtacgtgtggtggggga

SEQ ID NO: 65637 - DNA, 22 bp, synthetic construct
  misc_feature 1..22: note = chemically synthesized
  source 1..22: mol_type = other DNA
ttttgtacgtgtggtgggggag

SEQ ID NO: 65638 - DNA, 22 bp, synthetic construct
  misc_feature 1..22: note = chemically synthesized
  source 1..22: mol_type = other DNA
tttgtacgtgtggtgggggaga

SEQ ID NO: 65639 - DNA, 22 bp, synthetic construct
  misc_feature 1..22: note = chemically synthesized
  source 1..22: mol_type = other DNA
ttgtacgtgtggtgggggagag

SEQ ID NO: 65640 - DNA, 22 bp, synthetic construct
  misc_feature 1..22: note = chemically synthesized
  source 1..22: mol_type = other DNA
tgtacgtgtggtgggggagagg

SEQ ID NO: 65641 - DNA, 22 bp, synthetic construct
  misc_feature 1..22: note = chemically synthesized
  source 1..22: mol_type = other DNA
gtacgtgtggtgggggagagga

SEQ ID NO: 65642 - DNA, 22 bp, synthetic construct
  misc_feature 1..22: note = chemically synthesized
  source 1..22: mol_type = other DNA
tacgtgtggtgggggagaggag

SEQ ID NO: 65643 - DNA, 22 bp, synthetic construct
  misc_feature 1..22: note = chemically synthesized
  source 1..22: mol_type = other DNA
gagaaagaaagttggggaagga

SEQ ID NO: 65644 - DNA, 22 bp, synthetic construct
  misc_feature 1..22: note = chemically synthesized
  source 1..22: mol_type = other DNA
gggaaggaaactaaaatgtgca

SEQ ID NO: 65645 - DNA, 22 bp, synthetic construct
  misc_feature 1..22: note = chemically synthesized
  source 1..22: mol_type = other DNA
aaatgtgcaatctcattcctca

SEQ ID NO: 65646 - DNA, 22 bp, synthetic construct
  misc_feature 1..22: note = chemically synthesized
  source 1..22: mol_type = other DNA
attcctcagccttcttgttgaa

SEQ ID NO: 65647 - DNA, 22 bp, synthetic construct
  misc_feature 1..22: note = chemically synthesized
  source 1..22: mol_type = other DNA
ctcagccttcttgttgaaaatg

SEQ ID NO: 65648 - DNA, 22 bp, synthetic construct
  misc_feature 1..22: note = chemically synthesized
  source 1..22: mol_type = other DNA
agccttcttgttgaaaatgaga

SEQ ID NO: 65649 - DNA, 22 bp, synthetic construct
  misc_feature 1..22: note = chemically synthesized
  source 1..22: mol_type = other DNA
cttgttgaaaatgagaatcaga

SEQ ID NO: 65650 - DNA, 22 bp, synthetic construct
  misc_feature 1..22: note = chemically synthesized
  source 1..22: mol_type = other DNA
ttgttgaaaatgagaatcagat

SEQ ID NO: 65651 - DNA, 22 bp, synthetic construct
  misc_feature 1..22: note = chemically synthesized
  source 1..22: mol_type = other DNA
gttgaaaatgagaatcagatgc

SEQ ID NO: 65652 - DNA, 22 bp, synthetic construct
  misc_feature 1..22: note = chemically synthesized
  source 1..22: mol_type = other DNA
ttgaaaatgagaatcagatgca

SEQ ID NO: 65653 - DNA, 22 bp, synthetic construct
  misc_feature 1..22: note = chemically synthesized
  source 1..22: mol_type = other DNA
aaaatgagaatcagatgcagca

SEQ ID NO: 65654 - DNA, 22 bp, synthetic construct
  misc_feature 1..22: note = chemically synthesized
  source 1..22: mol_type = other DNA
tttccaagagctatctggtgat

SEQ ID NO: 65655 - DNA, 22 bp, synthetic construct
  misc_feature 1..22: note = chemically synthesized
  source 1..22: mol_type = other DNA
ccaagagctatctggtgatggg

SEQ ID NO: 65656 - DNA, 22 bp, synthetic construct
  misc_feature 1..22: note = chemically synthesized
  source 1..22: mol_type = other DNA
caagagctatctggtgatggga

SEQ ID NO: 65657 - DNA, 22 bp, synthetic construct
  misc_feature 1..22: note = chemically synthesized
  source 1..22: mol_type = other DNA
tctggtgatgggatccatctgg

SEQ ID NO: 65658 - DNA, 22 bp, synthetic construct
  misc_feature 1..22: note = chemically synthesized
  source 1..22: mol_type = other DNA
gtgatgggatccatctggtgaa

SEQ ID NO: 65659 - DNA, 22 bp, synthetic construct
  misc_feature 1..22: note = chemically synthesized
  source 1..22: mol_type = other DNA
gtgaagggctacttctggggga

SEQ ID NO: 65660 - DNA, 22 bp, synthetic construct
  misc_feature 1..22: note = chemically synthesized
  source 1..22: mol_type = other DNA
cttctgggggacctggaattgc

SEQ ID NO: 65661 - DNA, 22 bp, synthetic construct
  misc_feature 1..22: note = chemically synthesized
  source 1..22: mol_type = other DNA
ctgggggacctggaattgctgt

SEQ ID NO: 65662 - DNA, 22 bp, synthetic construct
  misc_feature 1..22: note = chemically synthesized
  source 1..22: mol_type = other DNA
tgggggacctggaattgctgtg

SEQ ID NO: 65663 - DNA, 22 bp, synthetic construct
  misc_feature 1..22: note = chemically synthesized
  source 1..22: mol_type = other DNA
ggggacctggaattgctgtgtg

SEQ ID NO: 65664 - DNA, 22 bp, synthetic construct
  misc_feature 1..22: note = chemically synthesized
  source 1..22: mol_type = other DNA
gaattgctgtgtgacctttggg

SEQ ID NO: 65665 - DNA, 22 bp, synthetic construct
  misc_feature 1..22: note = chemically synthesized
  source 1..22: mol_type = other DNA
ctgtgtgacctttgggaaacac

SEQ ID NO: 65666 - DNA, 22 bp, synthetic construct
  misc_feature 1..22: note = chemically synthesized
  source 1..22: mol_type = other DNA
tgtgacctttgggaaacacttg

SEQ ID NO: 65667 - DNA, 22 bp, synthetic construct
  misc_feature 1..22: note = chemically synthesized
  source 1..22: mol_type = other DNA
tgggaaacacttgccttctctg

SEQ ID NO: 65668 - DNA, 22 bp, synthetic construct
  misc_feature 1..22: note = chemically synthesized
  source 1..22: mol_type = other DNA
gggaaacacttgccttctctgg

SEQ ID NO: 65669 - DNA, 22 bp, synthetic construct
  misc_feature 1..22: note = chemically synthesized
  source 1..22: mol_type = other DNA
ggaaacacttgccttctctggg

SEQ ID NO: 65670 - DNA, 22 bp, synthetic construct
  misc_feature 1..22: note = chemically synthesized
  source 1..22: mol_type = other DNA
gccttctctgggttgagctcag

SEQ ID NO: 65671 - DNA, 22 bp, synthetic construct
  misc_feature 1..22: note = chemically synthesized
  source 1..22: mol_type = other DNA
ccttctctgggttgagctcagc

SEQ ID NO: 65672 - DNA, 22 bp, synthetic construct
  misc_feature 1..22: note = chemically synthesized
  source 1..22: mol_type = other DNA
ctctgggttgagctcagcccgt

SEQ ID NO: 65673 - DNA, 22 bp, synthetic construct
  misc_feature 1..22: note = chemically synthesized
  source 1..22: mol_type = other DNA
tctgggttgagctcagcccgta

SEQ ID NO: 65674 - DNA, 22 bp, synthetic construct
  misc_feature 1..22: note = chemically synthesized
  source 1..22: mol_type = other DNA
tgggttgagctcagcccgtagt

SEQ ID NO: 65675 - DNA, 22 bp, synthetic construct
  misc_feature 1..22: note = chemically synthesized
  source 1..22: mol_type = other DNA
ggttgagctcagcccgtagttc

SEQ ID NO: 65676 - DNA, 22 bp, synthetic construct
  misc_feature 1..22: note = chemically synthesized
  source 1..22: mol_type = other DNA
agctcagcccgtagttcacaag

SEQ ID NO: 65677 - DNA, 22 bp, synthetic construct
  misc_feature 1..22: note = chemically synthesized
  source 1..22: mol_type = other DNA
agcccgtagttcacaaggggca

SEQ ID NO: 65678 - DNA, 22 bp, synthetic construct
  misc_feature 1..22: note = chemically synthesized
  source 1..22: mol_type = other DNA
acaaggggcattgctggtattt

SEQ ID NO: 65679 - DNA, 22 bp, synthetic construct
  misc_feature 1..22: note = chemically synthesized
  source 1..22: mol_type = other DNA
ctggtatttatagactgtgttt

SEQ ID NO: 65680 - DNA, 22 bp, synthetic construct
  misc_feature 1..22: note = chemically synthesized
  source 1..22: mol_type = other DNA
gtatttatagactgtgtttgac

SEQ ID NO: 65681 - DNA, 22 bp, synthetic construct
  misc_feature 1..22: note = chemically synthesized
  source 1..22: mol_type = other DNA
atagactgtgtttgacagtccc

SEQ ID NO: 65682 - DNA, 22 bp, synthetic construct
  misc_feature 1..22: note = chemically synthesized
  source 1..22: mol_type = other DNA
tagactgtgtttgacagtcccg

SEQ ID NO: 65683 - DNA, 22 bp, synthetic construct
  misc_feature 1..22: note = chemically synthesized
  source 1..22: mol_type = other DNA
tgtttgacagtcccgagtgaaa

SEQ ID NO: 65684 - DNA, 22 bp, synthetic construct
  misc_feature 1..22: note = chemically synthesized
  source 1..22: mol_type = other DNA
gacagtcccgagtgaaaggcaa

SEQ ID NO: 65685 - DNA, 22 bp, synthetic construct
  misc_feature 1..22: note = chemically synthesized
  source 1..22: mol_type = other DNA
acagtcccgagtgaaaggcaac

SEQ ID NO: 65686 - DNA, 22 bp, synthetic construct
  misc_feature 1..22: note = chemically synthesized
  source 1..22: mol_type = other DNA
cacttctcaccccagaatagca

SEQ ID NO: 65687 - DNA, 22 bp, synthetic construct
  misc_feature 1..22: note = chemically synthesized
  source 1..22: mol_type = other DNA
acttctcaccccagaatagcaa

SEQ ID NO: 65688 - DNA, 22 bp, synthetic construct
  misc_feature 1..22: note = chemically synthesized
  source 1..22: mol_type = other DNA
ctcaccccagaatagcaagcgt

SEQ ID NO: 65689 - DNA, 22 bp, synthetic construct
  misc_feature 1..22: note = chemically synthesized
  source 1..22: mol_type = other DNA
tcaccccagaatagcaagcgtt

SEQ ID NO: 65690 - DNA, 22 bp, synthetic construct
  misc_feature 1..22: note = chemically synthesized
  source 1..22: mol_type = other DNA
accccagaatagcaagcgttgt

SEQ ID NO: 65691 - DNA, 22 bp, synthetic construct
  misc_feature 1..22: note = chemically synthesized
  source 1..22: mol_type = other DNA
tttctcatatctaggttgctgg

SEQ ID NO: 65692 - DNA, 22 bp, synthetic construct
  misc_feature 1..22: note = chemically synthesized
  source 1..22: mol_type = other DNA
ctcatatctaggttgctgggac

SEQ ID NO: 65693 - DNA, 22 bp, synthetic construct
  misc_feature 1..22: note = chemically synthesized
  source 1..22: mol_type = other DNA
tcatatctaggttgctgggaca

SEQ ID NO: 65694 - DNA, 22 bp, synthetic construct
  misc_feature 1..22: note = chemically synthesized
  source 1..22: mol_type = other DNA
atatctaggttgctgggacagc

SEQ ID NO: 65695 - DNA, 22 bp, synthetic construct
  misc_feature 1..22: note = chemically synthesized
  source 1..22: mol_type = other DNA
ggttgctgggacagcttcccag

SEQ ID NO: 65696 - DNA, 22 bp, synthetic construct
  misc_feature 1..22: note = chemically synthesized
  source 1..22: mol_type = other DNA
ctgggacagcttcccaggaacc

SEQ ID NO: 65697 - DNA, 22 bp, synthetic construct
  misc_feature 1..22: note = chemically synthesized
  source 1..22: mol_type = other DNA
ggacagcttcccaggaacctaa

SEQ ID NO: 65698 - DNA, 22 bp, synthetic construct
  misc_feature 1..22: note = chemically synthesized
  source 1..22: mol_type = other DNA
cccaggaacctaatattcagca

SEQ ID NO: 65699 - DNA, 22 bp, synthetic construct
  misc_feature 1..22: note = chemically synthesized
  source 1..22: mol_type = other DNA
ccaggaacctaatattcagcag

SEQ ID NO: 65700 - DNA, 22 bp, synthetic construct
  misc_feature 1..22: note = chemically synthesized
  source 1..22: mol_type = other DNA
atattcagcagcttcgtgacgt

SEQ ID NO: 65701 - DNA, 22 bp, synthetic construct
  misc_feature 1..22: note = chemically synthesized
  source 1..22: mol_type = other DNA
agcagcttcgtgacgttggatg

SEQ ID NO: 65702 - DNA, 22 bp, synthetic construct
  misc_feature 1..22: note = chemically synthesized
  source 1..22: mol_type = other DNA
cgtgacgttggatggagggttt

SEQ ID NO: 65703 - DNA, 22 bp, synthetic construct
  misc_feature 1..22: note = chemically synthesized
  source 1..22: mol_type = other DNA
gtgacgttggatggagggtttt

SEQ ID NO: 65704 - DNA, 22 bp, synthetic construct
  misc_feature 1..22: note = chemically synthesized
  source 1..22: mol_type = other DNA
gatggagggtttttctttttaa

SEQ ID NO: 65705 - DNA, 22 bp, synthetic construct
  misc_feature 1..22: note = chemically synthesized
  source 1..22: mol_type = other DNA
ttctttttaaatgagttgattg

SEQ ID NO: 65706 - DNA, 22 bp, synthetic construct
  misc_feature 1..22: note = chemically synthesized
  source 1..22: mol_type = other DNA
tctttttaaatgagttgattgg

SEQ ID NO: 65707 - DNA, 22 bp, synthetic construct
  misc_feature 1..22: note = chemically synthesized
  source 1..22: mol_type = other DNA
ctttttaaatgagttgattggc

SEQ ID NO: 65708 - DNA, 22 bp, synthetic construct
  misc_feature 1..22: note = chemically synthesized
  source 1..22: mol_type = other DNA
tttttaaatgagttgattggct

SEQ ID NO: 65709 - DNA, 22 bp, synthetic construct
  misc_feature 1..22: note = chemically synthesized
  source 1..22: mol_type = other DNA
tttaaatgagttgattggcttt

SEQ ID NO: 65710 - DNA, 22 bp, synthetic construct
  misc_feature 1..22: note = chemically synthesized
  source 1..22: mol_type = other DNA
ttaaatgagttgattggctttt

SEQ ID NO: 65711 - DNA, 22 bp, synthetic construct
  misc_feature 1..22: note = chemically synthesized
  source 1..22: mol_type = other DNA
taaatgagttgattggcttttg

SEQ ID NO: 65712 - DNA, 22 bp, synthetic construct
  misc_feature 1..22: note = chemically synthesized
  source 1..22: mol_type = other DNA
aaatgagttgattggcttttgc

SEQ ID NO: 65713 - DNA, 22 bp, synthetic construct
  misc_feature 1..22: note = chemically synthesized
  source 1..22: mol_type = other DNA
aatgagttgattggcttttgcc

SEQ ID NO: 65714 - DNA, 22 bp, synthetic construct
  misc_feature 1..22: note = chemically synthesized
  source 1..22: mol_type = other DNA
attggcttttgccactttacac

SEQ ID NO: 65715 - DNA, 22 bp, synthetic construct
  misc_feature 1..22: note = chemically synthesized
  source 1..22: mol_type = other DNA
gcttttgccactttacacattg

SEQ ID NO: 65716 - DNA, 22 bp, synthetic construct
  misc_feature 1..22: note = chemically synthesized
  source 1..22: mol_type = other DNA
ttgccactttacacattgtttt

SEQ ID NO: 65717 - DNA, 22 bp, synthetic construct
  misc_feature 1..22: note = chemically synthesized
  source 1..22: mol_type = other DNA
tgccactttacacattgttttc

SEQ ID NO: 65718 - DNA, 22 bp, synthetic construct
  misc_feature 1..22: note = chemically synthesized
  source 1..22: mol_type = other DNA
gccactttacacattgttttcc

SEQ ID NO: 65719 - DNA, 22 bp, synthetic construct
  misc_feature 1..22: note = chemically synthesized
  source 1..22: mol_type = other DNA
ccactttacacattgttttcca

SEQ ID NO: 65720 - DNA, 22 bp, synthetic construct
  misc_feature 1..22: note = chemically synthesized
  source 1..22: mol_type = other DNA
tacacattgttttccaggtcta

SEQ ID NO: 65721 - DNA, 22 bp, synthetic construct
  misc_feature 1..22: note = chemically synthesized
  source 1..22: mol_type = other DNA
acacattgttttccaggtctag

SEQ ID NO: 65722 - DNA, 22 bp, synthetic construct
  misc_feature 1..22: note = chemically synthesized
  source 1..22: mol_type = other DNA
cacattgttttccaggtctagg

SEQ ID NO: 65723 - DNA, 22 bp, synthetic construct
  misc_feature 1..22: note = chemically synthesized
  source 1..22: mol_type = other DNA
ttttccaggtctaggtttattt

SEQ ID NO: 65724 - DNA, 22 bp, synthetic construct
  misc_feature 1..22: note = chemically synthesized
  source 1..22: mol_type = other DNA
tccaggtctaggtttatttttc

SEQ ID NO: 65725 - DNA, 22 bp, synthetic construct
  misc_feature 1..22: note = chemically synthesized
  source 1..22: mol_type = other DNA
ccaggtctaggtttatttttcc

SEQ ID NO: 65726 - DNA, 22 bp, synthetic construct
  misc_feature 1..22: note = chemically synthesized
  source 1..22: mol_type = other DNA
caggtctaggtttatttttccc

SEQ ID NO: 65727 - DNA, 22 bp, synthetic construct
  misc_feature 1..22: note = chemically synthesized
  source 1..22: mol_type = other DNA
ggtttatttttcccttataggt

SEQ ID NO: 65728 - DNA, 22 bp, synthetic construct
  misc_feature 1..22: note = chemically synthesized
  source 1..22: mol_type = other DNA
atttttcccttataggtagaat

SEQ ID NO: 65729 - DNA, 22 bp, synthetic construct
  misc_feature 1..22: note = chemically synthesized
  source 1..22: mol_type = other DNA
tttttcccttataggtagaata

SEQ ID NO: 65730 - DNA, 22 bp, synthetic construct
  misc_feature 1..22: note = chemically synthesized
  source 1..22: mol_type = other DNA
ttcccttataggtagaatataa

SEQ ID NO: 65731 - DNA, 22 bp, synthetic construct
  misc_feature 1..22: note = chemically synthesized
  source 1..22: mol_type = other DNA
tcccttataggtagaatataaa

SEQ ID NO: 65732 - DNA, 22 bp, synthetic construct
  misc_feature 1..22: note = chemically synthesized
  source 1..22: mol_type = other DNA
cccttataggtagaatataaaa

SEQ ID NO: 65733 - DNA, 22 bp, synthetic construct
  misc_feature 1..22: note = chemically synthesized
  source 1..22: mol_type = other DNA
ccttataggtagaatataaaag

SEQ ID NO: 65734 - DNA, 22 bp, synthetic construct
  misc_feature 1..22: note = chemically synthesized
  source 1..22: mol_type = other DNA
ataggtagaatataaaagagta

SEQ ID NO: 65735 - DNA, 22 bp, synthetic construct
  misc_feature 1..22: note = chemically synthesized
  source 1..22: mol_type = other DNA
taggtagaatataaaagagtat

SEQ ID NO: 65736 - DNA, 22 bp, synthetic construct
  misc_feature 1..22: note = chemically synthesized
  source 1..22: mol_type = other DNA
ccctggctcacaccgttctgtt

SEQ ID NO: 65737 - DNA, 22 bp, synthetic construct
  misc_feature 1..22: note = chemically synthesized
  source 1..22: mol_type = other DNA
gctcacaccgttctgtttttgc

SEQ ID NO: 65738 - DNA, 22 bp, synthetic construct
  misc_feature 1..22: note = chemically synthesized
  source 1..22: mol_type = other DNA
acaccgttctgtttttgcagtt

SEQ ID NO: 65739 - DNA, 22 bp, synthetic construct
  misc_feature 1..22: note = chemically synthesized
  source 1..22: mol_type = other DNA
tgtttttgcagttagcttaaag

SEQ ID NO: 65740 - DNA, 22 bp, synthetic construct
  misc_feature 1..22: note = chemically synthesized
  source 1..22: mol_type = other DNA
tttttgcagttagcttaaaggc

SEQ ID NO: 65741 - DNA, 22 bp, synthetic construct
  misc_feature 1..22: note = chemically synthesized
  source 1..22: mol_type = other DNA
ttgcagttagcttaaaggcatg

SEQ ID NO: 65742 - DNA, 22 bp, synthetic construct
  misc_feature 1..22: note = chemically synthesized
  source 1..22: mol_type = other DNA
tgcagttagcttaaaggcatgg

SEQ ID NO: 65743 - DNA, 22 bp, synthetic construct
  misc_feature 1..22: note = chemically synthesized
  source 1..22: mol_type = other DNA
gcagttagcttaaaggcatgga

SEQ ID NO: 65744 - DNA, 22 bp, synthetic construct
  misc_feature 1..22: note = chemically synthesized
  source 1..22: mol_type = other DNA
cagttagcttaaaggcatggag

SEQ ID NO: 65745 - DNA, 22 bp, synthetic construct
  misc_feature 1..22: note = chemically synthesized
  source 1..22: mol_type = other DNA
gcttaaaggcatggaggacatt

SEQ ID NO: 65746 - DNA, 22 bp, synthetic construct
  misc_feature 1..22: note = chemically synthesized
  source 1..22: mol_type = other DNA
aaaggcatggaggacattcctg

SEQ ID NO: 65747 - DNA, 22 bp, synthetic construct
  misc_feature 1..22: note = chemically synthesized
  source 1..22: mol_type = other DNA
aaggcatggaggacattcctgg

SEQ ID NO: 65748 - DNA, 22 bp, synthetic construct
  misc_feature 1..22: note = chemically synthesized
  source 1..22: mol_type = other DNA
ctgggactagcatctgctagcc

SEQ ID NO: 65749 - DNA, 22 bp, synthetic construct
  misc_feature 1..22: note = chemically synthesized
  source 1..22: mol_type = other DNA
ggactagcatctgctagccaag

SEQ ID NO: 65750 - DNA, 22 bp, synthetic construct
  misc_feature 1..22: note = chemically synthesized
  source 1..22: mol_type = other DNA
gcatctgctagccaagaacgaa

SEQ ID NO: 65751 - DNA, 22 bp, synthetic construct
  misc_feature 1..22: note = chemically synthesized
  source 1..22: mol_type = other DNA
ctagccaagaacgaagatgaca

SEQ ID NO: 65752 - DNA, 22 bp, synthetic construct
  misc_feature 1..22: note = chemically synthesized
  source 1..22: mol_type = other DNA
gccaagaacgaagatgacagca

SEQ ID NO: 65753 - DNA, 22 bp, synthetic construct
  misc_feature 1..22: note = chemically synthesized
  source 1..22: mol_type = other DNA
ctggggctaataacccactgca

SEQ ID NO: 65754 - DNA, 22 bp, synthetic construct
  misc_feature 1..22: note = chemically synthesized
  source 1..22: mol_type = other DNA
gggctaataacccactgcaggc

SEQ ID NO: 65755 - DNA, 22 bp, synthetic construct
  misc_feature 1..22: note = chemically synthesized
  source 1..22: mol_type = other DNA
ataacccactgcaggctatcct

SEQ ID NO: 65756 - DNA, 22 bp, synthetic construct
  misc_feature 1..22: note = chemically synthesized
  source 1..22: mol_type = other DNA
caggctatccttggcattcttg

SEQ ID NO: 65757 - DNA, 22 bp, synthetic construct
  misc_feature 1..22: note = chemically synthesized
  source 1..22: mol_type = other DNA
tccttggcattcttgctggagt

SEQ ID NO: 65758 - DNA, 22 bp, synthetic construct
  misc_feature 1..22: note = chemically synthesized
  source 1..22: mol_type = other DNA
ggcattcttgctggagtggcct

SEQ ID NO: 65759 - DNA, 22 bp, synthetic construct
  misc_feature 1..22: note = chemically synthesized
  source 1..22: mol_type = other DNA
gcattcttgctggagtggcctt

SEQ ID NO: 65760 - DNA, 22 bp, synthetic construct
  misc_feature 1..22: note = chemically synthesized
  source 1..22: mol_type = other DNA
ttgctggagtggccttgctcca

SEQ ID NO: 65761 - DNA, 22 bp, synthetic construct
  misc_feature 1..22: note = chemically synthesized
  source 1..22: mol_type = other DNA
gctggagtggccttgctccacc

SEQ ID NO: 65762 - DNA, 22 bp, synthetic construct
  misc_feature 1..22: note = chemically synthesized
  source 1..22: mol_type = other DNA
ctggagtggccttgctccaccc

SEQ ID NO: 65763 - DNA, 22 bp, synthetic construct
  misc_feature 1..22: note = chemically synthesized
  source 1..22: mol_type = other DNA
gagtggccttgctccaccctac

SEQ ID NO: 65764 - DNA, 22 bp, synthetic construct
  misc_feature 1..22: note = chemically synthesized
  source 1..22: mol_type = other DNA
gctccaccctacctggtcactg

SEQ ID NO: 65765 - DNA, 22 bp, synthetic construct
  misc_feature 1..22: note = chemically synthesized
  source 1..22: mol_type = other DNA
ctccaccctacctggtcactgt

SEQ ID NO: 65766 - DNA, 22 bp, synthetic construct
  misc_feature 1..22: note = chemically synthesized
  source 1..22: mol_type = other DNA
caccctacctggtcactgtgcc

SEQ ID NO: 65767 - DNA, 22 bp, synthetic construct
  misc_feature 1..22: note = chemically synthesized
  source 1..22: mol_type = other DNA
cctggtcactgtgccgttcagt

SEQ ID NO: 65768 - DNA, 22 bp, synthetic construct
  misc_feature 1..22: note = chemically synthesized
  source 1..22: mol_type = other DNA
gtcactgtgccgttcagtctgg

SEQ ID NO: 65769 - DNA, 22 bp, synthetic construct
  misc_feature 1..22: note = chemically synthesized
  source 1..22: mol_type = other DNA
tgccgttcagtctgggctatgg

SEQ ID NO: 65770 - DNA, 22 bp, synthetic construct
  misc_feature 1..22: note = chemically synthesized
  source 1..22: mol_type = other DNA
agtctgggctatggcctctcac

SEQ ID NO: 65771 - DNA, 22 bp, synthetic construct
  misc_feature 1..22: note = chemically synthesized
  source 1..22: mol_type = other DNA
ggctatggcctctcaccccacc

SEQ ID NO: 65772 - DNA, 22 bp, synthetic construct
  misc_feature 1..22: note = chemically synthesized
  source 1..22: mol_type = other DNA
tggcctctcaccccacctcatc

SEQ ID NO: 65773 - DNA, 22 bp, synthetic construct
  misc_feature 1..22: note = chemically synthesized
  source 1..22: mol_type = other DNA
tcaccccacctcatcccattgc

SEQ ID NO: 65774 - DNA, 22 bp, synthetic construct
  misc_feature 1..22: note = chemically synthesized
  source 1..22: mol_type = other DNA
accccacctcatcccattgcat

SEQ ID NO: 65775 - DNA, 22 bp, synthetic construct
  misc_feature 1..22: note = chemically synthesized
  source 1..22: mol_type = other DNA
atcccattgcatttcataagcc

SEQ ID NO: 65776 - DNA, 22 bp, synthetic construct
  misc_feature 1..22: note = chemically synthesized
  source 1..22: mol_type = other DNA
catttcataagccagtaactcc

SEQ ID NO: 65777 - DNA, 22 bp, synthetic construct
  misc_feature 1..22: note = chemically synthesized
  source 1..22: mol_type = other DNA
cataagccagtaactccaaggc

SEQ ID NO: 65778 - DNA, 22 bp, synthetic construct
  misc_feature 1..22: note = chemically synthesized
  source 1..22: mol_type = other DNA
ataagccagtaactccaaggcc

SEQ ID NO: 65779 - DNA, 22 bp, synthetic construct
  misc_feature 1..22: note = chemically synthesized
  source 1..22: mol_type = other DNA
caaggccagacttccattacac

SEQ ID NO: 65780 - DNA, 22 bp, synthetic construct
  misc_feature 1..22: note = chemically synthesized
  source 1..22: mol_type = other DNA
ccattacactctggatgactgc

SEQ ID NO: 65781 - DNA, 22 bp, synthetic construct
  misc_feature 1..22: note = chemically synthesized
  source 1..22: mol_type = other DNA
cattacactctggatgactgca

SEQ ID NO: 65782 - DNA, 22 bp, synthetic construct
  misc_feature 1..22: note = chemically synthesized
  source 1..22: mol_type = other DNA
cactctggatgactgcatttat

SEQ ID NO: 65783 - DNA, 22 bp, synthetic construct
  misc_feature 1..22: note = chemically synthesized
  source 1..22: mol_type = other DNA
tggatgactgcatttatttgca

SEQ ID NO: 65784 - DNA, 22 bp, synthetic construct
  misc_feature 1..22: note = chemically synthesized
  source 1..22: mol_type = other DNA
gatgactgcatttatttgcagt

SEQ ID NO: 65785 - DNA, 22 bp, synthetic construct
  misc_feature 1..22: note = chemically synthesized
  source 1..22: mol_type = other DNA
catttatttgcagtgacttcaa

SEQ ID NO: 65786 - DNA, 22 bp, synthetic construct
  misc_feature 1..22: note = chemically synthesized
  source 1..22: mol_type = other DNA
atttgcagtgacttcaaggaag

SEQ ID NO: 65787 - DNA, 22 bp, synthetic construct
  misc_feature 1..22: note = chemically synthesized
  source 1..22: mol_type = other DNA
tttgcagtgacttcaaggaaga

SEQ ID NO: 65788 - DNA, 22 bp, synthetic construct
  misc_feature 1..22: note = chemically synthesized
  source 1..22: mol_type = other DNA
gcagtgacttcaaggaagaagg

SEQ ID NO: 65789 - DNA, 22 bp, synthetic construct
  misc_feature 1..22: note = chemically synthesized
  source 1..22: mol_type = other DNA
cagtgacttcaaggaagaaggg

SEQ ID NO: 65790 - DNA, 22 bp, synthetic construct
  misc_feature 1..22: note = chemically synthesized
  source 1..22: mol_type = other DNA
caaggaagaaggggcctgttta

SEQ ID NO: 65791 - DNA, 22 bp, synthetic construct
  misc_feature 1..22: note = chemically synthesized
  source 1..22: mol_type = other DNA
aaggaagaaggggcctgtttag

SEQ ID NO: 65792 - DNA, 22 bp, synthetic construct
  misc_feature 1..22: note = chemically synthesized
  source 1..22: mol_type = other DNA
tttaggaaattaggcactggcc

SEQ ID NO: 65793 - DNA, 22 bp, synthetic construct
  misc_feature 1..22: note = chemically synthesized
  source 1..22: mol_type = other DNA
aggaaattaggcactggcctgg

SEQ ID NO: 65794 - DNA, 22 bp, synthetic construct
  misc_feature 1..22: note = chemically synthesized
  source 1..22: mol_type = other DNA
ggaaattaggcactggcctggt

SEQ ID NO: 65795 - DNA, 22 bp, synthetic construct
  misc_feature 1..22: note = chemically synthesized
  source 1..22: mol_type = other DNA
ggcactggcctggtgaaaaggt

SEQ ID NO: 65796 - DNA, 22 bp, synthetic construct
  misc_feature 1..22: note = chemically synthesized
  source 1..22: mol_type = other DNA
gcctggtgaaaaggtcaacttg

SEQ ID NO: 65797 - DNA, 22 bp, synthetic construct
  misc_feature 1..22: note = chemically synthesized
  source 1..22: mol_type = other DNA
gtgaaaaggtcaacttgcgaaa

SEQ ID NO: 65798 - DNA, 22 bp, synthetic construct
  misc_feature 1..22: note = chemically synthesized
  source 1..22: mol_type = other DNA
gcgaaattgtggctgcaaggga

SEQ ID NO: 65799 - DNA, 22 bp, synthetic construct
  misc_feature 1..22: note = chemically synthesized
  source 1..22: mol_type = other DNA
cgaaattgtggctgcaagggat

SEQ ID NO: 65800 - DNA, 22 bp, synthetic construct
  misc_feature 1..22: note = chemically synthesized
  source 1..22: mol_type = other DNA
tggctgcaagggatgccttttt

SEQ ID NO: 65801 - DNA, 22 bp, synthetic construct
  misc_feature 1..22: note = chemically synthesized
  source 1..22: mol_type = other DNA
caagggatgcctttttcttcca

SEQ ID NO: 65802 - DNA, 22 bp, synthetic construct
  misc_feature 1..22: note = chemically synthesized
  source 1..22: mol_type = other DNA
tttcttccaaggctatgccttg

SEQ ID NO: 65803 - DNA, 22 bp, synthetic construct
  misc_feature 1..22: note = chemically synthesized
  source 1..22: mol_type = other DNA
ttcttccaaggctatgccttgg

SEQ ID NO: 65804 - DNA, 22 bp, synthetic construct
  misc_feature 1..22: note = chemically synthesized
  source 1..22: mol_type = other DNA
tcttccaaggctatgccttggt

SEQ ID NO: 65805 - DNA, 22 bp, synthetic construct
  misc_feature 1..22: note = chemically synthesized
  source 1..22: mol_type = other DNA
cttccaaggctatgccttggtg

SEQ ID NO: 65806 - DNA, 22 bp, synthetic construct
  misc_feature 1..22: note = chemically synthesized
  source 1..22: mol_type = other DNA
ttccaaggctatgccttggtgg

SEQ ID NO: 65807 - DNA, 22 bp, synthetic construct
  misc_feature 1..22: note = chemically synthesized
  source 1..22: mol_type = other DNA
ccaaggctatgccttggtggtg

SEQ ID NO: 65808 - DNA, 22 bp, synthetic construct
  misc_feature 1..22: note = chemically synthesized
  source 1..22: mol_type = other DNA
caaggctatgccttggtggtgg

SEQ ID NO: 65809 - DNA, 22 bp, synthetic construct
  misc_feature 1..22: note = chemically synthesized
  source 1..22: mol_type = other DNA
tgccttggtggtggtggtgagg

SEQ ID NO: 65810 - DNA, 22 bp, synthetic construct
  misc_feature 1..22: note = chemically synthesized
  source 1..22: mol_type = other DNA
ggtggtggtggtgagggtgtac

SEQ ID NO: 65811 - DNA, 22 bp, synthetic construct
  misc_feature 1..22: note = chemically synthesized
  source 1..22: mol_type = other DNA
gtggtggtggtgagggtgtaca

SEQ ID NO: 65812 - DNA, 22 bp, synthetic construct
  misc_feature 1..22: note = chemically synthesized
  source 1..22: mol_type = other DNA
ttttttgtatttcctattttga

SEQ ID NO: 65813 - DNA, 22 bp, synthetic construct
  misc_feature 1..22: note = chemically synthesized
  source 1..22: mol_type = other DNA
tttgtatttcctattttgattt

SEQ ID NO: 65814 - DNA, 22 bp, synthetic construct
  misc_feature 1..22: note = chemically synthesized
  source 1..22: mol_type = other DNA
ttgtatttcctattttgattta

SEQ ID NO: 65815 - DNA, 22 bp, synthetic construct
  misc_feature 1..22: note = chemically synthesized
  source 1..22: mol_type = other DNA
tgtatttcctattttgatttaa

SEQ ID NO: 65816 - DNA, 22 bp, synthetic construct
  misc_feature 1..22: note = chemically synthesized
  source 1..22: mol_type = other DNA
gtatttcctattttgatttaaa

SEQ ID NO: 65817 - DNA, 22 bp, synthetic construct
  misc_feature 1..22: note = chemically synthesized
  source 1..22: mol_type = other DNA
tatttcctattttgatttaaat

SEQ ID NO: 65818 - DNA, 22 bp, synthetic construct
  misc_feature 1..22: note = chemically synthesized
  source 1..22: mol_type = other DNA
cctattttgatttaaatactgt

SEQ ID NO: 65819 - DNA, 22 bp, synthetic construct
  misc_feature 1..22: note = chemically synthesized
  source 1..22: mol_type = other DNA
ctattttgatttaaatactgtt

SEQ ID NO: 65820 - DNA, 22 bp, synthetic construct
  misc_feature 1..22: note = chemically synthesized
  source 1..22: mol_type = other DNA
ttttgatttaaatactgttttt

SEQ ID NO: 65821 - DNA, 22 bp, synthetic construct
  misc_feature 1..22: note = chemically synthesized
  source 1..22: mol_type = other DNA
tgatttaaatactgttttttgt

SEQ ID NO: 65822 - DNA, 22 bp, synthetic construct
  misc_feature 1..22: note = chemically synthesized
  source 1..22: mol_type = other DNA
gatttaaatactgttttttgtt

SEQ ID NO: 65823 - DNA, 22 bp, synthetic construct
  misc_feature 1..22: note = chemically synthesized
  source 1..22: mol_type = other DNA
atttaaatactgttttttgttt

SEQ ID NO: 65824 - DNA, 22 bp, synthetic construct
  misc_feature 1..22: note = chemically synthesized
  source 1..22: mol_type = other DNA
aaatactgttttttgtttggtt

SEQ ID NO: 65825 - DNA, 22 bp, synthetic construct
  misc_feature 1..22: note = chemically synthesized
  source 1..22: mol_type = other DNA
aatactgttttttgtttggttg

SEQ ID NO: 65826 - DNA, 22 bp, synthetic construct
  misc_feature 1..22: note = chemically synthesized
  source 1..22: mol_type = other DNA
ttttttgtttggttggttggtt

SEQ ID NO: 65827 - DNA, 22 bp, synthetic construct
  misc_feature 1..22: note = chemically synthesized
  source 1..22: mol_type = other DNA
tttgtttggttggttggttttt

SEQ ID NO: 65828 - DNA, 22 bp, synthetic construct
  misc_feature 1..22: note = chemically synthesized
  source 1..22: mol_type = other DNA
ttgtttggttggttggtttttt

SEQ ID NO: 65829 - DNA, 22 bp, synthetic construct
  misc_feature 1..22: note = chemically synthesized
  source 1..22: mol_type = other DNA
tgtttggttggttggttttttt

SEQ ID NO: 65830 - DNA, 22 bp, synthetic construct
  misc_feature 1..22: note = chemically synthesized
  source 1..22: mol_type = other DNA
gtttggttggttggtttttttt

SEQ ID NO: 65831 - DNA, 22 bp, synthetic construct
  misc_feature 1..22: note = chemically synthesized
  source 1..22: mol_type = other DNA
tttggttggttggttttttttt

SEQ ID NO: 65832 - DNA, 22 bp, synthetic construct
  misc_feature 1..22: note = chemically synthesized
  source 1..22: mol_type = other DNA
ggttggttggtttttttttttt

SEQ ID NO: 65833 - DNA, 22 bp, synthetic construct
  misc_feature 1..22: note = chemically synthesized
  source 1..22: mol_type = other DNA
gttggttggttttttttttttt

SEQ ID NO: 65834 - DNA, 22 bp, synthetic construct
  misc_feature 1..22: note = chemically synthesized
  source 1..22: mol_type = other DNA
gttggttttttttttttttttt

SEQ ID NO: 65835 - DNA, 22 bp, synthetic construct
  misc_feature 1..22: note = chemically synthesized
  source 1..22: mol_type = other DNA
gttttttttttttttttttaag

SEQ ID NO: 65836 - DNA, 22 bp, synthetic construct
  misc_feature 1..22: note = chemically synthesized
  source 1..22: mol_type = other DNA
tttttttttttttttaagtcct

SEQ ID NO: 65837 - DNA, 22 bp, synthetic construct
  misc_feature 1..22: note = chemically synthesized
  source 1..22: mol_type = other DNA
ttttttttttttttaagtccta

SEQ ID NO: 65838 - DNA, 22 bp, synthetic construct
  misc_feature 1..22: note = chemically synthesized
  source 1..22: mol_type = other DNA
tttttttttttttaagtcctaa

SEQ ID NO: 65839 - DNA, 22 bp, synthetic construct
  misc_feature 1..22: note = chemically synthesized
  source 1..22: mol_type = other DNA
ttttttttttttaagtcctaaa

SEQ ID NO: 65840 - DNA, 22 bp, synthetic construct
  misc_feature 1..22: note = chemically synthesized
  source 1..22: mol_type = other DNA
tttttttttttaagtcctaaac

SEQ ID NO: 65841 - DNA, 22 bp, synthetic construct
  misc_feature 1..22: note = chemically synthesized
  source 1..22: mol_type = other DNA
ttttttttttaagtcctaaaca

SEQ ID NO: 65842 - DNA, 22 bp, synthetic construct
  misc_feature 1..22: note = chemically synthesized
  source 1..22: mol_type = other DNA
tttttttttaagtcctaaacaa

SEQ ID NO: 65843 - DNA, 22 bp, synthetic construct
  misc_feature 1..22: note = chemically synthesized
  source 1..22: mol_type = other DNA
ttttttttaagtcctaaacaag

SEQ ID NO: 65844 - DNA, 22 bp, synthetic construct
  misc_feature 1..22: note = chemically synthesized
  source 1..22: mol_type = other DNA
tttttttaagtcctaaacaagt

SEQ ID NO: 65845 - DNA, 22 bp, synthetic construct
  misc_feature 1..22: note = chemically synthesized
  source 1..22: mol_type = other DNA
ttttttaagtcctaaacaagtg

SEQ ID NO: 65846 - DNA, 22 bp, synthetic construct
  misc_feature 1..22: note = chemically synthesized
  source 1..22: mol_type = other DNA
tttttaagtcctaaacaagtgc

SEQ ID NO: 65847 - DNA, 22 bp, synthetic construct
  misc_feature 1..22: note = chemically synthesized
  source 1..22: mol_type = other DNA
ttttaagtcctaaacaagtgcc

SEQ ID NO: 65848 - DNA, 22 bp, synthetic construct
  misc_feature 1..22: note = chemically synthesized
  source 1..22: mol_type = other DNA
tttaagtcctaaacaagtgcca

SEQ ID NO: 65849 - DNA, 22 bp, synthetic construct
  misc_feature 1..22: note = chemically synthesized
  source 1..22: mol_type = other DNA
ttaagtcctaaacaagtgccac

SEQ ID NO: 65850 - DNA, 22 bp, synthetic construct
  misc_feature 1..22: note = chemically synthesized
  source 1..22: mol_type = other DNA
taagtcctaaacaagtgccaca

SEQ ID NO: 65851 - DNA, 22 bp, synthetic construct
  misc_feature 1..22: note = chemically synthesized
  source 1..22: mol_type = other DNA
aagtcctaaacaagtgccacag

SEQ ID NO: 65852 - DNA, 22 bp, synthetic construct
  misc_feature 1..22: note = chemically synthesized
  source 1..22: mol_type = other DNA
agtcctaaacaagtgccacaga

SEQ ID NO: 65853 - DNA, 22 bp, synthetic construct
  misc_feature 1..22: note = chemically synthesized
  source 1..22: mol_type = other DNA
aacaagtgccacagaggatttc

SEQ ID NO: 65854 - DNA, 22 bp, synthetic construct
  misc_feature 1..22: note = chemically synthesized
  source 1..22: mol_type = other DNA
ctttttggcttgaacttgataa

SEQ ID NO: 65855 - DNA, 22 bp, synthetic construct
  misc_feature 1..22: note = chemically synthesized
  source 1..22: mol_type = other DNA
tttttggcttgaacttgataaa

SEQ ID NO: 65856 - DNA, 22 bp, synthetic construct
  misc_feature 1..22: note = chemically synthesized
  source 1..22: mol_type = other DNA
tttggcttgaacttgataaaat

SEQ ID NO: 65857 - DNA, 22 bp, synthetic construct
  misc_feature 1..22: note = chemically synthesized
  source 1..22: mol_type = other DNA
ttggcttgaacttgataaaatt

SEQ ID NO: 65858 - DNA, 22 bp, synthetic construct
  misc_feature 1..22: note = chemically synthesized
  source 1..22: mol_type = other DNA
tggcttgaacttgataaaattt

SEQ ID NO: 65859 - DNA, 22 bp, synthetic construct
  misc_feature 1..22: note = chemically synthesized
  source 1..22: mol_type = other DNA
ggcttgaacttgataaaatttg

SEQ ID NO: 65860 - DNA, 22 bp, synthetic construct
  misc_feature 1..22: note = chemically synthesized
  source 1..22: mol_type = other DNA
gcttgaacttgataaaatttgg

SEQ ID NO: 65861 - DNA, 22 bp, synthetic construct
  misc_feature 1..22: note = chemically synthesized
  source 1..22: mol_type = other DNA
gaacttgataaaatttggagca

SEQ ID NO: 65862 - DNA, 22 bp, synthetic construct
  misc_feature 1..22: note = chemically synthesized
  source 1..22: mol_type = other DNA
aacttgataaaatttggagcac

SEQ ID NO: 65863 - DNA, 22 bp, synthetic construct
  misc_feature 1..22: note = chemically synthesized
  source 1..22: mol_type = other DNA
gataaaatttggagcacacaag

SEQ ID NO: 65864 - DNA, 22 bp, synthetic construct
  misc_feature 1..22: note = chemically synthesized
  source 1..22: mol_type = other DNA
ataaaatttggagcacacaagt

SEQ ID NO: 65865 - DNA, 22 bp, synthetic construct
  misc_feature 1..22: note = chemically synthesized
  source 1..22: mol_type = other DNA
ggagcacacaagtttacacaca

SEQ ID NO: 65866 - DNA, 22 bp, synthetic construct
  misc_feature 1..22: note = chemically synthesized
  source 1..22: mol_type = other DNA
gagcacacaagtttacacacat

SEQ ID NO: 65867 - DNA, 22 bp, synthetic construct
  misc_feature 1..22: note = chemically synthesized
  source 1..22: mol_type = other DNA
acacacatggtcatgaacacac

SEQ ID NO: 65868 - DNA, 22 bp, synthetic construct
  misc_feature 1..22: note = chemically synthesized
  source 1..22: mol_type = other DNA
cacacatggtcatgaacacaca

SEQ ID NO: 65869 - DNA, 22 bp, synthetic construct
  misc_feature 1..22: note = chemically synthesized
  source 1..22: mol_type = other DNA
ctcccatctccccagaccccca

SEQ ID NO: 65870 - DNA, 22 bp, synthetic construct
  misc_feature 1..22: note = chemically synthesized
  source 1..22: mol_type = other DNA
tcccatctccccagacccccag

SEQ ID NO: 65871 - DNA, 22 bp, synthetic construct
  misc_feature 1..22: note = chemically synthesized
  source 1..22: mol_type = other DNA
ccatctccccagacccccagca

SEQ ID NO: 65872 - DNA, 22 bp, synthetic construct
  misc_feature 1..22: note = chemically synthesized
  source 1..22: mol_type = other DNA
cccagacccccagcacatatgt

SEQ ID NO: 65873 - DNA, 22 bp, synthetic construct
  misc_feature 1..22: note = chemically synthesized
  source 1..22: mol_type = other DNA
cataatgaggtgttcctaagtg

SEQ ID NO: 65874 - DNA, 22 bp, synthetic construct
  misc_feature 1..22: note = chemically synthesized
  source 1..22: mol_type = other DNA
ctaagtgagaattcccataatt

SEQ ID NO: 65875 - DNA, 22 bp, synthetic construct
  misc_feature 1..22: note = chemically synthesized
  source 1..22: mol_type = other DNA
agtgagaattcccataatttga

SEQ ID NO: 65876 - DNA, 22 bp, synthetic construct
  misc_feature 1..22: note = chemically synthesized
  source 1..22: mol_type = other DNA
ccataatttgaggttttatact

SEQ ID NO: 65877 - DNA, 22 bp, synthetic construct
  misc_feature 1..22: note = chemically synthesized
  source 1..22: mol_type = other DNA
gaggttttatactggaatggtg

SEQ ID NO: 65878 - DNA, 22 bp, synthetic construct
  misc_feature 1..22: note = chemically synthesized
  source 1..22: mol_type = other DNA
aggttttatactggaatggtga

SEQ ID NO: 65879 - DNA, 22 bp, synthetic construct
  misc_feature 1..22: note = chemically synthesized
  source 1..22: mol_type = other DNA
tatactggaatggtgataaggg

SEQ ID NO: 65880 - DNA, 22 bp, synthetic construct
  misc_feature 1..22: note = chemically synthesized
  source 1..22: mol_type = other DNA
atactggaatggtgataagggc

SEQ ID NO: 65881 - DNA, 22 bp, synthetic construct
  misc_feature 1..22: note = chemically synthesized
  source 1..22: mol_type = other DNA
tactggaatggtgataagggca

SEQ ID NO: 65882 - DNA, 22 bp, synthetic construct
  misc_feature 1..22: note = chemically synthesized
  source 1..22: mol_type = other DNA
gaatggtgataagggcaggaaa

SEQ ID NO: 65883 - DNA, 22 bp, synthetic construct
  misc_feature 1..22: note = chemically synthesized
  source 1..22: mol_type = other DNA
agcccatgtgcattttttctcg

SEQ ID NO: 65884 - DNA, 22 bp, synthetic construct
  misc_feature 1..22: note = chemically synthesized
  source 1..22: mol_type = other DNA
tttctcgagtggttaacctttc

SEQ ID NO: 65885 - DNA, 22 bp, synthetic construct
  misc_feature 1..22: note = chemically synthesized
  source 1..22: mol_type = other DNA
ttctcgagtggttaacctttcc

SEQ ID NO: 65886 - DNA, 22 bp, synthetic construct
  misc_feature 1..22: note = chemically synthesized
  source 1..22: mol_type = other DNA
tctcgagtggttaacctttcct

SEQ ID NO: 65887 - DNA, 22 bp, synthetic construct
  misc_feature 1..22: note = chemically synthesized
  source 1..22: mol_type = other DNA
ctcgagtggttaacctttcctc

SEQ ID NO: 65888 - DNA, 22 bp, synthetic construct
  misc_feature 1..22: note = chemically synthesized
  source 1..22: mol_type = other DNA
tcgagtggttaacctttcctct

SEQ ID NO: 65889 - DNA, 22 bp, synthetic construct
  misc_feature 1..22: note = chemically synthesized
  source 1..22: mol_type = other DNA
gagtggttaacctttcctctct

SEQ ID NO: 65890 - DNA, 22 bp, synthetic construct
  misc_feature 1..22: note = chemically synthesized
  source 1..22: mol_type = other DNA
acctttcctctctttctccttc

SEQ ID NO: 65891 - DNA, 22 bp, synthetic construct
  misc_feature 1..22: note = chemically synthesized
  source 1..22: mol_type = other DNA
tcctctctttctccttcttttt

SEQ ID NO: 65892 - DNA, 22 bp, synthetic construct
  misc_feature 1..22: note = chemically synthesized
  source 1..22: mol_type = other DNA
cctctctttctccttctttttt

SEQ ID NO: 65893 - DNA, 22 bp, synthetic construct
  misc_feature 1..22: note = chemically synthesized
  source 1..22: mol_type = other DNA
ctctctttctccttcttttttt

SEQ ID NO: 65894 - DNA, 22 bp, synthetic construct
  misc_feature 1..22: note = chemically synthesized
  source 1..22: mol_type = other DNA
tctttctccttctttttttgcc

SEQ ID NO: 65895 - DNA, 22 bp, synthetic construct
  misc_feature 1..22: note = chemically synthesized
  source 1..22: mol_type = other DNA
tttctccttctttttttgcccc

SEQ ID NO: 65896 - DNA, 22 bp, synthetic construct
  misc_feature 1..22: note = chemically synthesized
  source 1..22: mol_type = other DNA
tctccttctttttttgcccccc

SEQ ID NO: 65897 - DNA, 22 bp, synthetic construct
  misc_feature 1..22: note = chemically synthesized
  source 1..22: mol_type = other DNA
ctccttctttttttgcccccct

SEQ ID NO: 65898 - DNA, 22 bp, synthetic construct
  misc_feature 1..22: note = chemically synthesized
  source 1..22: mol_type = other DNA
tccttctttttttgcccccctc

SEQ ID NO: 65899 - DNA, 22 bp, synthetic construct
  misc_feature 1..22: note = chemically synthesized
  source 1..22: mol_type = other DNA
cttctttttttgcccccctcca

SEQ ID NO: 65900 - DNA, 22 bp, synthetic construct
  misc_feature 1..22: note = chemically synthesized
  source 1..22: mol_type = other DNA
ctttttttgcccccctccaaat

SEQ ID NO: 65901 - DNA, 22 bp, synthetic construct
  misc_feature 1..22: note = chemically synthesized
  source 1..22: mol_type = other DNA
tttttttgcccccctccaaatt

SEQ ID NO: 65902 - DNA, 22 bp, synthetic construct
  misc_feature 1..22: note = chemically synthesized
  source 1..22: mol_type = other DNA
tttttgcccccctccaaattcc

SEQ ID NO: 65903 - DNA, 22 bp, synthetic construct
  misc_feature 1..22: note = chemically synthesized
  source 1..22: mol_type = other DNA
ttttgcccccctccaaattccc

SEQ ID NO: 65904 - DNA, 22 bp, synthetic construct
  misc_feature 1..22: note = chemically synthesized
  source 1..22: mol_type = other DNA
tttgcccccctccaaattcccc

SEQ ID NO: 65905 - DNA, 22 bp, synthetic construct
  misc_feature 1..22: note = chemically synthesized
  source 1..22: mol_type = other DNA
ttgcccccctccaaattccccc

SEQ ID NO: 65906 - DNA, 22 bp, synthetic construct
  misc_feature 1..22: note = chemically synthesized
  source 1..22: mol_type = other DNA
tgcccccctccaaattccccct

SEQ ID NO: 65907 - DNA, 22 bp, synthetic construct
  misc_feature 1..22: note = chemically synthesized
  source 1..22: mol_type = other DNA
gcccccctccaaattccccctt

SEQ ID NO: 65908 - DNA, 22 bp, synthetic construct
  misc_feature 1..22: note = chemically synthesized
  source 1..22: mol_type = other DNA
cccccctccaaattcccccttc

SEQ ID NO: 65909 - DNA, 22 bp, synthetic construct
  misc_feature 1..22: note = chemically synthesized
  source 1..22: mol_type = other DNA
caaattcccccttctcttaaga

SEQ ID NO: 65910 - DNA, 22 bp, synthetic construct
  misc_feature 1..22: note = chemically synthesized
  source 1..22: mol_type = other DNA
ccccttctcttaagaaaaaaca

SEQ ID NO: 65911 - DNA, 22 bp, synthetic construct
  misc_feature 1..22: note = chemically synthesized
  source 1..22: mol_type = other DNA
ctcttaagaaaaaacacgtgag

SEQ ID NO: 65912 - DNA, 22 bp, synthetic construct
  misc_feature 1..22: note = chemically synthesized
  source 1..22: mol_type = other DNA
tcttaagaaaaaacacgtgagc

SEQ ID NO: 65913 - DNA, 22 bp, synthetic construct
  misc_feature 1..22: note = chemically synthesized
  source 1..22: mol_type = other DNA
ttaagaaaaaacacgtgagcca

SEQ ID NO: 65914 - DNA, 22 bp, synthetic construct
  misc_feature 1..22: note = chemically synthesized
  source 1..22: mol_type = other DNA
aagaaaaaacacgtgagccatg

SEQ ID NO: 65915 - DNA, 22 bp, synthetic construct
  misc_feature 1..22: note = chemically synthesized
  source 1..22: mol_type = other DNA
agaaaaaacacgtgagccatgt

SEQ ID NO: 65916 - DNA, 22 bp, synthetic construct
  misc_feature 1..22: note = chemically synthesized
  source 1..22: mol_type = other DNA
gaagtacagccttgacctcagc

SEQ ID NO: 65917 - DNA, 22 bp, synthetic construct
  misc_feature 1..22: note = chemically synthesized
  source 1..22: mol_type = other DNA
gacctcagcctcaccaggtgcg

SEQ ID NO: 65918 - DNA, 22 bp, synthetic construct
  misc_feature 1..22: note = chemically synthesized
  source 1..22: mol_type = other DNA
acctcagcctcaccaggtgcgg

SEQ ID NO: 65919 - DNA, 22 bp, synthetic construct
  misc_feature 1..22: note = chemically synthesized
  source 1..22: mol_type = other DNA
agcctcaccaggtgcggctgct

SEQ ID NO: 65920 - DNA, 22 bp, synthetic construct
  misc_feature 1..22: note = chemically synthesized
  source 1..22: mol_type = other DNA
accaggtgcggctgctgaccgg

SEQ ID NO: 65921 - DNA, 22 bp, synthetic construct
  misc_feature 1..22: note = chemically synthesized
  source 1..22: mol_type = other DNA
ctgaccggtgcaaaaaaatagg

SEQ ID NO: 65922 - DNA, 22 bp, synthetic construct
  misc_feature 1..22: note = chemically synthesized
  source 1..22: mol_type = other DNA
accggtgcaaaaaaataggaaa

SEQ ID NO: 65923 - DNA, 22 bp, synthetic construct
  misc_feature 1..22: note = chemically synthesized
  source 1..22: mol_type = other DNA
tttaaaaggcagggaggggaga

SEQ ID NO: 65924 - DNA, 22 bp, synthetic construct
  misc_feature 1..22: note = chemically synthesized
  source 1..22: mol_type = other DNA
aaaaggcagggaggggagagtt

SEQ ID NO: 65925 - DNA, 22 bp, synthetic construct
  misc_feature 1..22: note = chemically synthesized
  source 1..22: mol_type = other DNA
aaaggcagggaggggagagttt

SEQ ID NO: 65926 - DNA, 22 bp, synthetic construct
  misc_feature 1..22: note = chemically synthesized
  source 1..22: mol_type = other DNA
ctgttccacaatcactgctgtt

SEQ ID NO: 65927 - DNA, 22 bp, synthetic construct
  misc_feature 1..22: note = chemically synthesized
  source 1..22: mol_type = other DNA
tgttccacaatcactgctgttt

SEQ ID NO: 65928 - DNA, 22 bp, synthetic construct
  misc_feature 1..22: note = chemically synthesized
  source 1..22: mol_type = other DNA
ttccacaatcactgctgtttca

SEQ ID NO: 65929 - DNA, 22 bp, synthetic construct
  misc_feature 1..22: note = chemically synthesized
  source 1..22: mol_type = other DNA
cacaatcactgctgtttcagtg

SEQ ID NO: 65930 - DNA, 22 bp, synthetic construct
  misc_feature 1..22: note = chemically synthesized
  source 1..22: mol_type = other DNA
ctgtttcagtgaaaagcaaccc

SEQ ID NO: 65931 - DNA, 22 bp, synthetic construct
  misc_feature 1..22: note = chemically synthesized
  source 1..22: mol_type = other DNA
tttcagtgaaaagcaacccggt

SEQ ID NO: 65932 - DNA, 22 bp, synthetic construct
  misc_feature 1..22: note = chemically synthesized
  source 1..22: mol_type = other DNA
cagtgaaaagcaacccggttta

SEQ ID NO: 65933 - DNA, 22 bp, synthetic construct
  misc_feature 1..22: note = chemically synthesized
  source 1..22: mol_type = other DNA
agtgaaaagcaacccggtttat

SEQ ID NO: 65934 - DNA, 22 bp, synthetic construct
  misc_feature 1..22: note = chemically synthesized
  source 1..22: mol_type = other DNA
atctgtaaaacctacttccctt

SEQ ID NO: 65935 - DNA, 22 bp, synthetic construct
  misc_feature 1..22: note = chemically synthesized
  source 1..22: mol_type = other DNA
tctgtaaaacctacttcccttt

SEQ ID NO: 65936 - DNA, 22 bp, synthetic construct
  misc_feature 1..22: note = chemically synthesized
  source 1..22: mol_type = other DNA
taaaacctacttccctttctgg

SEQ ID NO: 65937 - DNA, 22 bp, synthetic construct
  misc_feature 1..22: note = chemically synthesized
  source 1..22: mol_type = other DNA
cttccctttctggtgaatgtgg

SEQ ID NO: 65938 - DNA, 22 bp, synthetic construct
  misc_feature 1..22: note = chemically synthesized
  source 1..22: mol_type = other DNA
ccctttctggtgaatgtggctg

SEQ ID NO: 65939 - DNA, 22 bp, synthetic construct
  misc_feature 1..22: note = chemically synthesized
  source 1..22: mol_type = other DNA
cctttctggtgaatgtggctgt

SEQ ID NO: 65940 - DNA, 22 bp, synthetic construct
  misc_feature 1..22: note = chemically synthesized
  source 1..22: mol_type = other DNA
tctggtgaatgtggctgttttt

SEQ ID NO: 65941 - DNA, 22 bp, synthetic construct
  misc_feature 1..22: note = chemically synthesized
  source 1..22: mol_type = other DNA
ctggtgaatgtggctgtttttg

SEQ ID NO: 65942 - DNA, 22 bp, synthetic construct
  misc_feature 1..22: note = chemically synthesized
  source 1..22: mol_type = other DNA
tggtgaatgtggctgtttttga

SEQ ID NO: 65943 - DNA, 22 bp, synthetic construct
  misc_feature 1..22: note = chemically synthesized
  source 1..22: mol_type = other DNA
gtgaatgtggctgtttttgaca

SEQ ID NO: 65944 - DNA, 22 bp, synthetic construct
  misc_feature 1..22: note = chemically synthesized
  source 1..22: mol_type = other DNA
tttttgacagcagaggacccca

SEQ ID NO: 65945 - DNA, 22 bp, synthetic construct
  misc_feature 1..22: note = chemically synthesized
  source 1..22: mol_type = other DNA
ttgacagcagaggaccccagtt

SEQ ID NO: 65946 - DNA, 22 bp, synthetic construct
  misc_feature 1..22: note = chemically synthesized
  source 1..22: mol_type = other DNA
tgacagcagaggaccccagttg

SEQ ID NO: 65947 - DNA, 22 bp, synthetic construct
  misc_feature 1..22: note = chemically synthesized
  source 1..22: mol_type = other DNA
gacagcagaggaccccagttgt

SEQ ID NO: 65948 - DNA, 22 bp, synthetic construct
  misc_feature 1..22: note = chemically synthesized
  source 1..22: mol_type = other DNA
acagcagaggaccccagttgtt

SEQ ID NO: 65949 - DNA, 22 bp, synthetic construct
  misc_feature 1..22: note = chemically synthesized
  source 1..22: mol_type = other DNA
ttgaggactaaagagagagaag

SEQ ID NO: 65950 - DNA, 22 bp, synthetic construct
  misc_feature 1..22: note = chemically synthesized
  source 1..22: mol_type = other DNA
aggactaaagagagagaagatg

SEQ ID NO: 65951 - DNA, 22 bp, synthetic construct
  misc_feature 1..22: note = chemically synthesized
  source 1..22: mol_type = other DNA
aagagagagaagatgagaaaga

SEQ ID NO: 65952 - DNA, 22 bp, synthetic construct
  misc_feature 1..22: note = chemically synthesized
  source 1..22: mol_type = other DNA
gaaacagaggttggagaaagag

SEQ ID NO: 65953 - DNA, 22 bp, synthetic construct
  misc_feature 1..22: note = chemically synthesized
  source 1..22: mol_type = other DNA
gagaaagagaggcaaggaagta

SEQ ID NO: 65954 - DNA, 22 bp, synthetic construct
  misc_feature 1..22: note = chemically synthesized
  source 1..22: mol_type = other DNA
gaattcgagctattttcagctg

SEQ ID NO: 65955 - DNA, 22 bp, synthetic construct
  misc_feature 1..22: note = chemically synthesized
  source 1..22: mol_type = other DNA
gagctattttcagctgaatgtg

SEQ ID NO: 65956 - DNA, 22 bp, synthetic construct
  misc_feature 1..22: note = chemically synthesized
  source 1..22: mol_type = other DNA
ttttcagctgaatgtgagtgca

SEQ ID NO: 65957 - DNA, 22 bp, synthetic construct
  misc_feature 1..22: note = chemically synthesized
  source 1..22: mol_type = other DNA
tcagctgaatgtgagtgcagat

SEQ ID NO: 65958 - DNA, 22 bp, synthetic construct
  misc_feature 1..22: note = chemically synthesized
  source 1..22: mol_type = other DNA
cagctgaatgtgagtgcagatt

SEQ ID NO: 65959 - DNA, 22 bp, synthetic construct
  misc_feature 1..22: note = chemically synthesized
  source 1..22: mol_type = other DNA
agctgaatgtgagtgcagattt

SEQ ID NO: 65960 - DNA, 22 bp, synthetic construct
  misc_feature 1..22: note = chemically synthesized
  source 1..22: mol_type = other DNA
aatgtgagtgcagatttcatca

SEQ ID NO: 65961 - DNA, 22 bp, synthetic construct
  misc_feature 1..22: note = chemically synthesized
  source 1..22: mol_type = other DNA
catcaggcttctgggctacagg

SEQ ID NO: 65962 - DNA, 22 bp, synthetic construct
  misc_feature 1..22: note = chemically synthesized
  source 1..22: mol_type = other DNA
atcaggcttctgggctacaggg

SEQ ID NO: 65963 - DNA, 22 bp, synthetic construct
  misc_feature 1..22: note = chemically synthesized
  source 1..22: mol_type = other DNA
ctgggctacagggaaactgact

SEQ ID NO: 65964 - DNA, 22 bp, synthetic construct
  misc_feature 1..22: note = chemically synthesized
  source 1..22: mol_type = other DNA
tgggctacagggaaactgactg

SEQ ID NO: 65965 - DNA, 22 bp, synthetic construct
  misc_feature 1..22: note = chemically synthesized
  source 1..22: mol_type = other DNA
ggctacagggaaactgactgtg

SEQ ID NO: 65966 - DNA, 22 bp, synthetic construct
  misc_feature 1..22: note = chemically synthesized
  source 1..22: mol_type = other DNA
cagggaaactgactgtgtgcgg

SEQ ID NO: 65967 - DNA, 22 bp, synthetic construct
  misc_feature 1..22: note = chemically synthesized
  source 1..22: mol_type = other DNA
actgtgtgcggaccttgcgtgt

SEQ ID NO: 65968 - DNA, 22 bp, synthetic construct
  misc_feature 1..22: note = chemically synthesized
  source 1..22: mol_type = other DNA
tgtgcggaccttgcgtgtaact

SEQ ID NO: 65969 - DNA, 22 bp, synthetic construct
  misc_feature 1..22: note = chemically synthesized
  source 1..22: mol_type = other DNA
gcgtgtaacttcctgtgaagca

SEQ ID NO: 65970 - DNA, 22 bp, synthetic construct
  misc_feature 1..22: note = chemically synthesized
  source 1..22: mol_type = other DNA
cgtgtaacttcctgtgaagcag

SEQ ID NO: 65971 - DNA, 22 bp, synthetic construct
  misc_feature 1..22: note = chemically synthesized
  source 1..22: mol_type = other DNA
cctgtgaagcagccgtggtgac

SEQ ID NO: 65972 - DNA, 22 bp, synthetic construct
  misc_feature 1..22: note = chemically synthesized
  source 1..22: mol_type = other DNA
ctgtgaagcagccgtggtgact

SEQ ID NO: 65973 - DNA, 22 bp, synthetic construct
  misc_feature 1..22: note = chemically synthesized
  source 1..22: mol_type = other DNA
tgaagcagccgtggtgactgca

SEQ ID NO: 65974 - DNA, 22 bp, synthetic construct
  misc_feature 1..22: note = chemically synthesized
  source 1..22: mol_type = other DNA
cattttctgacactgtcagagt

SEQ ID NO: 65975 - DNA, 22 bp, synthetic construct
  misc_feature 1..22: note = chemically synthesized
  source 1..22: mol_type = other DNA
tctgacactgtcagagtctgga

SEQ ID NO: 65976 - DNA, 22 bp, synthetic construct
  misc_feature 1..22: note = chemically synthesized
  source 1..22: mol_type = other DNA
ctgacactgtcagagtctggac

SEQ ID NO: 65977 - DNA, 22 bp, synthetic construct
  misc_feature 1..22: note = chemically synthesized
  source 1..22: mol_type = other DNA
tgacactgtcagagtctggaca

SEQ ID NO: 65978 - DNA, 22 bp, synthetic construct
  misc_feature 1..22: note = chemically synthesized
  source 1..22: mol_type = other DNA
acactgtcagagtctggacaac

SEQ ID NO: 65979 - DNA, 22 bp, synthetic construct
  misc_feature 1..22: note = chemically synthesized
  source 1..22: mol_type = other DNA
tcagagtctggacaaccctgcc

SEQ ID NO: 65980 - DNA, 22 bp, synthetic construct
  misc_feature 1..22: note = chemically synthesized
  source 1..22: mol_type = other DNA
gacaaccctgccagctcctaga

SEQ ID NO: 65981 - DNA, 22 bp, synthetic construct
  misc_feature 1..22: note = chemically synthesized
  source 1..22: mol_type = other DNA
ccagctcctagaagggcaaccc

SEQ ID NO: 65982 - DNA, 22 bp, synthetic construct
  misc_feature 1..22: note = chemically synthesized
  source 1..22: mol_type = other DNA
ctagaagggcaacccaacaact

SEQ ID NO: 65983 - DNA, 22 bp, synthetic construct
  misc_feature 1..22: note = chemically synthesized
  source 1..22: mol_type = other DNA
gaagggcaacccaacaactgtc

SEQ ID NO: 65984 - DNA, 22 bp, synthetic construct
  misc_feature 1..22: note = chemically synthesized
  source 1..22: mol_type = other DNA
tcacagacgaagcatcaaaagc

SEQ ID NO: 65985 - DNA, 22 bp, synthetic construct
  misc_feature 1..22: note = chemically synthesized
  source 1..22: mol_type = other DNA
tcgatagtgacctgcatttgca

SEQ ID NO: 65986 - DNA, 22 bp, synthetic construct
  misc_feature 1..22: note = chemically synthesized
  source 1..22: mol_type = other DNA
catttgcagaaaatctgagggc

SEQ ID NO: 65987 - DNA, 22 bp, synthetic construct
  misc_feature 1..22: note = chemically synthesized
  source 1..22: mol_type = other DNA
gcagaaaatctgagggctttct

SEQ ID NO: 65988 - DNA, 22 bp, synthetic construct
  misc_feature 1..22: note = chemically synthesized
  source 1..22: mol_type = other DNA
cagaaaatctgagggctttcta

SEQ ID NO: 65989 - DNA, 22 bp, synthetic construct
  misc_feature 1..22: note = chemically synthesized
  source 1..22: mol_type = other DNA
agggctttctaattaacagagg

SEQ ID NO: 65990 - DNA, 22 bp, synthetic construct
  misc_feature 1..22: note = chemically synthesized
  source 1..22: mol_type = other DNA
tctaattaacagaggagctcta

SEQ ID NO: 65991 - DNA, 22 bp, synthetic construct
  misc_feature 1..22: note = chemically synthesized
  source 1..22: mol_type = other DNA
ctaattaacagaggagctctaa

SEQ ID NO: 65992 - DNA, 22 bp, synthetic construct
  misc_feature 1..22: note = chemically synthesized
  source 1..22: mol_type = other DNA
taattaacagaggagctctaaa

SEQ ID NO: 65993 - DNA, 22 bp, synthetic construct
  misc_feature 1..22: note = chemically synthesized
  source 1..22: mol_type = other DNA
attaacagaggagctctaaatt

SEQ ID NO: 65994 - DNA, 22 bp, synthetic construct
  misc_feature 1..22: note = chemically synthesized
  source 1..22: mol_type = other DNA
acagaggagctctaaattagag

SEQ ID NO: 65995 - DNA, 22 bp, synthetic construct
  misc_feature 1..22: note = chemically synthesized
  source 1..22: mol_type = other DNA
taaattagagtaaagctgttcg

SEQ ID NO: 65996 - DNA, 22 bp, synthetic construct
  misc_feature 1..22: note = chemically synthesized
  source 1..22: mol_type = other DNA
aattagagtaaagctgttcgac

SEQ ID NO: 65997 - DNA, 22 bp, synthetic construct
  misc_feature 1..22: note = chemically synthesized
  source 1..22: mol_type = other DNA
gagtaaagctgttcgacaagac

SEQ ID NO: 65998 - DNA, 22 bp, synthetic construct
  misc_feature 1..22: note = chemically synthesized
  source 1..22: mol_type = other DNA
ttcgacaagacccctcatacgc

SEQ ID NO: 65999 - DNA, 22 bp, synthetic construct
  misc_feature 1..22: note = chemically synthesized
  source 1..22: mol_type = other DNA
gacaagacccctcatacgcggt

SEQ ID NO: 66000 - DNA, 22 bp, synthetic construct
  misc_feature 1..22: note = chemically synthesized
  source 1..22: mol_type = other DNA
atacgcggtaagtgtcacaatg

SEQ ID NO: 66001 - DNA, 22 bp, synthetic construct
  misc_feature 1..22: note = chemically synthesized
  source 1..22: mol_type = other DNA
catctaacaagcttctgatttt

SEQ ID NO: 66002 - DNA, 22 bp, synthetic construct
  misc_feature 1..22: note = chemically synthesized
  source 1..22: mol_type = other DNA
acaagcttctgatttttaacag

SEQ ID NO: 66003 - DNA, 22 bp, synthetic construct
  misc_feature 1..22: note = chemically synthesized
  source 1..22: mol_type = other DNA
ctgatttttaacagaagctatg

SEQ ID NO: 66004 - DNA, 22 bp, synthetic construct
  misc_feature 1..22: note = chemically synthesized
  source 1..22: mol_type = other DNA
tgatttttaacagaagctatga

SEQ ID NO: 66005 - DNA, 22 bp, synthetic construct
  misc_feature 1..22: note = chemically synthesized
  source 1..22: mol_type = other DNA
atttttaacagaagctatgaga

SEQ ID NO: 66006 - DNA, 22 bp, synthetic construct
  misc_feature 1..22: note = chemically synthesized
  source 1..22: mol_type = other DNA
ttaacagaagctatgagaccaa

SEQ ID NO: 66007 - DNA, 22 bp, synthetic construct
  misc_feature 1..22: note = chemically synthesized
  source 1..22: mol_type = other DNA
taacagaagctatgagaccaac

SEQ ID NO: 66008 - DNA, 22 bp, synthetic construct
  misc_feature 1..22: note = chemically synthesized
  source 1..22: mol_type = other DNA
aacagaagctatgagaccaact

SEQ ID NO: 66009 - DNA, 22 bp, synthetic construct
  misc_feature 1..22: note = chemically synthesized
  source 1..22: mol_type = other DNA
acagaagctatgagaccaactc

SEQ ID NO: 66010 - DNA, 22 bp, synthetic construct
  misc_feature 1..22: note = chemically synthesized
  source 1..22: mol_type = other DNA
tgagaccaactcatttataatg

SEQ ID NO: 66011 - DNA, 22 bp, synthetic construct
  misc_feature 1..22: note = chemically synthesized
  source 1..22: mol_type = other DNA
atttataatggttcagtttcaa

SEQ ID NO: 66012 - DNA, 22 bp, synthetic construct
  misc_feature 1..22: note = chemically synthesized
  source 1..22: mol_type = other DNA
ataatggttcagtttcaaaggg

SEQ ID NO: 66013 - DNA, 22 bp, synthetic construct
  misc_feature 1..22: note = chemically synthesized
  source 1..22: mol_type = other DNA
taatggttcagtttcaaagggg

SEQ ID NO: 66014 - DNA, 22 bp, synthetic construct
  misc_feature 1..22: note = chemically synthesized
  source 1..22: mol_type = other DNA
agtttcaaagggggaaaaaaaa

SEQ ID NO: 66015 - DNA, 22 bp, synthetic construct
  misc_feature 1..22: note = chemically synthesized
  source 1..22: mol_type = other DNA
caaagggggaaaaaaaagcaac

SEQ ID NO: 66016 - DNA, 22 bp, synthetic construct
  misc_feature 1..22: note = chemically synthesized
  source 1..22: mol_type = other DNA
aaagggggaaaaaaaagcaacc

SEQ ID NO: 66017 - DNA, 22 bp, synthetic construct
  misc_feature 1..22: note = chemically synthesized
  source 1..22: mol_type = other DNA
cttctagtgctttgggcgagtg

SEQ ID NO: 66018 - DNA, 22 bp, synthetic construct
  misc_feature 1..22: note = chemically synthesized
  source 1..22: mol_type = other DNA
ctagtgctttgggcgagtgctt

SEQ ID NO: 66019 - DNA, 22 bp, synthetic construct
  misc_feature 1..22: note = chemically synthesized
  source 1..22: mol_type = other DNA
tagtgctttgggcgagtgctta

SEQ ID NO: 66020 - DNA, 22 bp, synthetic construct
  misc_feature 1..22: note = chemically synthesized
  source 1..22: mol_type = other DNA
gtgctttgggcgagtgcttaga

SEQ ID NO: 66021 - DNA, 22 bp, synthetic construct
  misc_feature 1..22: note = chemically synthesized
  source 1..22: mol_type = other DNA
tgggcgagtgcttagacccagt

SEQ ID NO: 66022 - DNA, 22 bp, synthetic construct
  misc_feature 1..22: note = chemically synthesized
  source 1..22: mol_type = other DNA
gggcgagtgcttagacccagtc

SEQ ID NO: 66023 - DNA, 22 bp, synthetic construct
  misc_feature 1..22: note = chemically synthesized
  source 1..22: mol_type = other DNA
ggcgagtgcttagacccagtcc

SEQ ID NO: 66024 - DNA, 22 bp, synthetic construct
  misc_feature 1..22: note = chemically synthesized
  source 1..22: mol_type = other DNA
agacccagtccccaaattcttc

SEQ ID NO: 66025 - DNA, 22 bp, synthetic construct
  misc_feature 1..22: note = chemically synthesized
  source 1..22: mol_type = other DNA
gacccagtccccaaattcttcc

SEQ ID NO: 66026 - DNA, 22 bp, synthetic construct
  misc_feature 1..22: note = chemically synthesized
  source 1..22: mol_type = other DNA
ttcctttgttgtctgctgaagc

SEQ ID NO: 66027 - DNA, 22 bp, synthetic construct
  misc_feature 1..22: note = chemically synthesized
  source 1..22: mol_type = other DNA
cctttgttgtctgctgaagcat

SEQ ID NO: 66028 - DNA, 22 bp, synthetic construct
  misc_feature 1..22: note = chemically synthesized
  source 1..22: mol_type = other DNA
ctttgttgtctgctgaagcatc

SEQ ID NO: 66029 - DNA, 22 bp, synthetic construct
  misc_feature 1..22: note = chemically synthesized
  source 1..22: mol_type = other DNA
tgttgtctgctgaagcatccag

SEQ ID NO: 66030 - DNA, 22 bp, synthetic construct
  misc_feature 1..22: note = chemically synthesized
  source 1..22: mol_type = other DNA
gttgtctgctgaagcatccaga

SEQ ID NO: 66031 - DNA, 22 bp, synthetic construct
  misc_feature 1..22: note = chemically synthesized
  source 1..22: mol_type = other DNA
ttgtctgctgaagcatccagat

SEQ ID NO: 66032 - DNA, 22 bp, synthetic construct
  misc_feature 1..22: note = chemically synthesized
  source 1..22: mol_type = other DNA
tctgctgaagcatccagataca

SEQ ID NO: 66033 - DNA, 22 bp, synthetic construct
  misc_feature 1..22: note = chemically synthesized
  source 1..22: mol_type = other DNA
ctgaagcatccagatacatctt

SEQ ID NO: 66034 - DNA, 22 bp, synthetic construct
  misc_feature 1..22: note = chemically synthesized
  source 1..22: mol_type = other DNA
aagcatccagatacatcttctg

SEQ ID NO: 66035 - DNA, 22 bp, synthetic construct
  misc_feature 1..22: note = chemically synthesized
  source 1..22: mol_type = other DNA
ctgttttagattttccttactg

SEQ ID NO: 66036 - DNA, 22 bp, synthetic construct
  misc_feature 1..22: note = chemically synthesized
  source 1..22: mol_type = other DNA
tgttttagattttccttactgt

SEQ ID NO: 66037 - DNA, 22 bp, synthetic construct
  misc_feature 1..22: note = chemically synthesized
  source 1..22: mol_type = other DNA
ttttagattttccttactgtaa

SEQ ID NO: 66038 - DNA, 22 bp, synthetic construct
  misc_feature 1..22: note = chemically synthesized
  source 1..22: mol_type = other DNA
tagattttccttactgtaatcc

SEQ ID NO: 66039 - DNA, 22 bp, synthetic construct
  misc_feature 1..22: note = chemically synthesized
  source 1..22: mol_type = other DNA
agattttccttactgtaatcca

SEQ ID NO: 66040 - DNA, 22 bp, synthetic construct
  misc_feature 1..22: note = chemically synthesized
  source 1..22: mol_type = other DNA
gattttccttactgtaatccac

SEQ ID NO: 66041 - DNA, 22 bp, synthetic construct
  misc_feature 1..22: note = chemically synthesized
  source 1..22: mol_type = other DNA
tccttactgtaatccacgtctg

SEQ ID NO: 66042 - DNA, 22 bp, synthetic construct
  misc_feature 1..22: note = chemically synthesized
  source 1..22: mol_type = other DNA
ccttactgtaatccacgtctgc

SEQ ID NO: 66043 - DNA, 22 bp, synthetic construct
  misc_feature 1..22: note = chemically synthesized
  source 1..22: mol_type = other DNA
cttactgtaatccacgtctgct

SEQ ID NO: 66044 - DNA, 22 bp, synthetic construct
  misc_feature 1..22: note = chemically synthesized
  source 1..22: mol_type = other DNA
actgtaatccacgtctgctaat

SEQ ID NO: 66045 - DNA, 22 bp, synthetic construct
  misc_feature 1..22: note = chemically synthesized
  source 1..22: mol_type = other DNA
ctgtaatccacgtctgctaata

SEQ ID NO: 66046 - DNA, 22 bp, synthetic construct
  misc_feature 1..22: note = chemically synthesized
  source 1..22: mol_type = other DNA
taatccacgtctgctaatatgc

SEQ ID NO: 66047 - DNA, 22 bp, synthetic construct
  misc_feature 1..22: note = chemically synthesized
  source 1..22: mol_type = other DNA
ctaatatgccagctcattcatt

SEQ ID NO: 66048 - DNA, 22 bp, synthetic construct
  misc_feature 1..22: note = chemically synthesized
  source 1..22: mol_type = other DNA
atatgccagctcattcatttga

SEQ ID NO: 66049 - DNA, 22 bp, synthetic construct
  misc_feature 1..22: note = chemically synthesized
  source 1..22: mol_type = other DNA
attcatttgatgtttcctgggg

SEQ ID NO: 66050 - DNA, 22 bp, synthetic construct
  misc_feature 1..22: note = chemically synthesized
  source 1..22: mol_type = other DNA
atttgatgtttcctggggacga

SEQ ID NO: 66051 - DNA, 22 bp, synthetic construct
  misc_feature 1..22: note = chemically synthesized
  source 1..22: mol_type = other DNA
gatgtttcctggggacgagcat

SEQ ID NO: 66052 - DNA, 22 bp, synthetic construct
  misc_feature 1..22: note = chemically synthesized
  source 1..22: mol_type = other DNA
atgtttcctggggacgagcatc

SEQ ID NO: 66053 - DNA, 22 bp, synthetic construct
  misc_feature 1..22: note = chemically synthesized
  source 1..22: mol_type = other DNA
cctggggacgagcatcctctct

SEQ ID NO: 66054 - DNA, 22 bp, synthetic construct
  misc_feature 1..22: note = chemically synthesized
  source 1..22: mol_type = other DNA
ctggggacgagcatcctctctt

SEQ ID NO: 66055 - DNA, 22 bp, synthetic construct
  misc_feature 1..22: note = chemically synthesized
  source 1..22: mol_type = other DNA
gggacgagcatcctctcttgag

SEQ ID NO: 66056 - DNA, 22 bp, synthetic construct
  misc_feature 1..22: note = chemically synthesized
  source 1..22: mol_type = other DNA
tcttgagttatttctgacaact

SEQ ID NO: 66057 - DNA, 22 bp, synthetic construct
  misc_feature 1..22: note = chemically synthesized
  source 1..22: mol_type = other DNA
ttgagttatttctgacaactgc

SEQ ID NO: 66058 - DNA, 22 bp, synthetic construct
  misc_feature 1..22: note = chemically synthesized
  source 1..22: mol_type = other DNA
gagttatttctgacaactgcag

SEQ ID NO: 66059 - DNA, 22 bp, synthetic construct
  misc_feature 1..22: note = chemically synthesized
  source 1..22: mol_type = other DNA
agttatttctgacaactgcagc

SEQ ID NO: 66060 - DNA, 22 bp, synthetic construct
  misc_feature 1..22: note = chemically synthesized
  source 1..22: mol_type = other DNA
tttctgacaactgcagcattcc

SEQ ID NO: 66061 - DNA, 22 bp, synthetic construct
  misc_feature 1..22: note = chemically synthesized
  source 1..22: mol_type = other DNA
ctgacaactgcagcattccaca

SEQ ID NO: 66062 - DNA, 22 bp, synthetic construct
  misc_feature 1..22: note = chemically synthesized
  source 1..22: mol_type = other DNA
tgacaactgcagcattccacag

SEQ ID NO: 66063 - DNA, 22 bp, synthetic construct
  misc_feature 1..22: note = chemically synthesized
  source 1..22: mol_type = other DNA
acaactgcagcattccacaggg

SEQ ID NO: 66064 - DNA, 22 bp, synthetic construct
  misc_feature 1..22: note = chemically synthesized
  source 1..22: mol_type = other DNA
cagcattccacagggtctgagt

SEQ ID NO: 66065 - DNA, 22 bp, synthetic construct
  misc_feature 1..22: note = chemically synthesized
  source 1..22: mol_type = other DNA
cacagggtctgagttgttgaac

SEQ ID NO: 66066 - DNA, 22 bp, synthetic construct
  misc_feature 1..22: note = chemically synthesized
  source 1..22: mol_type = other DNA
agttgttgaacacagtgcccta

SEQ ID NO: 66067 - DNA, 22 bp, synthetic construct
  misc_feature 1..22: note = chemically synthesized
  source 1..22: mol_type = other DNA
ttgaacacagtgccctaactta

SEQ ID NO: 66068 - DNA, 22 bp, synthetic construct
  misc_feature 1..22: note = chemically synthesized
  source 1..22: mol_type = other DNA
aacacagtgccctaacttaaat

SEQ ID NO: 66069 - DNA, 22 bp, synthetic construct
  misc_feature 1..22: note = chemically synthesized
  source 1..22: mol_type = other DNA
acttaaatattacaatcaaaac

SEQ ID NO: 66070 - DNA, 22 bp, synthetic construct
  misc_feature 1..22: note = chemically synthesized
  source 1..22: mol_type = other DNA
aaatattacaatcaaaacacat

SEQ ID NO: 66071 - DNA, 22 bp, synthetic construct
  misc_feature 1..22: note = chemically synthesized
  source 1..22: mol_type = other DNA
aatattacaatcaaaacacatg

SEQ ID NO: 66072 - DNA, 22 bp, synthetic construct
  misc_feature 1..22: note = chemically synthesized
  source 1..22: mol_type = other DNA
caatcaaaacacatgacataga

SEQ ID NO: 66073 - DNA, 22 bp, synthetic construct
  misc_feature 1..22: note = chemically synthesized
  source 1..22: mol_type = other DNA
atttgggttctgccttggacag

SEQ ID NO: 66074 - DNA, 22 bp, synthetic construct
  misc_feature 1..22: note = chemically synthesized
  source 1..22: mol_type = other DNA
gggttctgccttggacagagaa

SEQ ID NO: 66075 - DNA, 22 bp, synthetic construct
  misc_feature 1..22: note = chemically synthesized
  source 1..22: mol_type = other DNA
ggttctgccttggacagagaaa

SEQ ID NO: 66076 - DNA, 22 bp, synthetic construct
  misc_feature 1..22: note = chemically synthesized
  source 1..22: mol_type = other DNA
tgccttggacagagaaacagac

SEQ ID NO: 66077 - DNA, 22 bp, synthetic construct
  misc_feature 1..22: note = chemically synthesized
  source 1..22: mol_type = other DNA
ccttggacagagaaacagactg

SEQ ID NO: 66078 - DNA, 22 bp, synthetic construct
  misc_feature 1..22: note = chemically synthesized
  source 1..22: mol_type = other DNA
ggacagagaaacagactggggc

SEQ ID NO: 66079 - DNA, 22 bp, synthetic construct
  misc_feature 1..22: note = chemically synthesized
  source 1..22: mol_type = other DNA
gacagagaaacagactggggct

SEQ ID NO: 66080 - DNA, 22 bp, synthetic construct
  misc_feature 1..22: note = chemically synthesized
  source 1..22: mol_type = other DNA
gggctaaagggactgcagctat

SEQ ID NO: 66081 - DNA, 22 bp, synthetic construct
  misc_feature 1..22: note = chemically synthesized
  source 1..22: mol_type = other DNA
aagggactgcagctatacctgg

SEQ ID NO: 66082 - DNA, 22 bp, synthetic construct
  misc_feature 1..22: note = chemically synthesized
  source 1..22: mol_type = other DNA
cagctatacctggggacttgcc

SEQ ID NO: 66083 - DNA, 22 bp, synthetic construct
  misc_feature 1..22: note = chemically synthesized
  source 1..22: mol_type = other DNA
tacctggggacttgcctgagat

SEQ ID NO: 66084 - DNA, 22 bp, synthetic construct
  misc_feature 1..22: note = chemically synthesized
  source 1..22: mol_type = other DNA
gggacttgcctgagatcatctg

SEQ ID NO: 66085 - DNA, 22 bp, synthetic construct
  misc_feature 1..22: note = chemically synthesized
  source 1..22: mol_type = other DNA
gcctgagatcatctgggacttg

SEQ ID NO: 66086 - DNA, 22 bp, synthetic construct
  misc_feature 1..22: note = chemically synthesized
  source 1..22: mol_type = other DNA
cctgagatcatctgggacttgc

SEQ ID NO: 66087 - DNA, 22 bp, synthetic construct
  misc_feature 1..22: note = chemically synthesized
  source 1..22: mol_type = other DNA
agatcatctgggacttgcctgg

SEQ ID NO: 66088 - DNA, 22 bp, synthetic construct
  misc_feature 1..22: note = chemically synthesized
  source 1..22: mol_type = other DNA
ggacttgcctggtctcaagtct

SEQ ID NO: 66089 - DNA, 22 bp, synthetic construct
  misc_feature 1..22: note = chemically synthesized
  source 1..22: mol_type = other DNA
gcctggtctcaagtcttctgac

SEQ ID NO: 66090 - DNA, 22 bp, synthetic construct
  misc_feature 1..22: note = chemically synthesized
  source 1..22: mol_type = other DNA
cctggtctcaagtcttctgacc

SEQ ID NO: 66091 - DNA, 22 bp, synthetic construct
  misc_feature 1..22: note = chemically synthesized
  source 1..22: mol_type = other DNA
gtctcaagtcttctgaccttgg

SEQ ID NO: 66092 - DNA, 22 bp, synthetic construct
  misc_feature 1..22: note = chemically synthesized
  source 1..22: mol_type = other DNA
aagtcttctgaccttggccagg

SEQ ID NO: 66093 - DNA, 22 bp, synthetic construct
  misc_feature 1..22: note = chemically synthesized
  source 1..22: mol_type = other DNA
ctgaccttggccagggatcttt

SEQ ID NO: 66094 - DNA, 22 bp, synthetic construct
  misc_feature 1..22: note = chemically synthesized
  source 1..22: mol_type = other DNA
tgaccttggccagggatctttg

SEQ ID NO: 66095 - DNA, 22 bp, synthetic construct
  misc_feature 1..22: note = chemically synthesized
  source 1..22: mol_type = other DNA
accttggccagggatctttgca

SEQ ID NO: 66096 - DNA, 22 bp, synthetic construct
  misc_feature 1..22: note = chemically synthesized
  source 1..22: mol_type = other DNA
ggccagggatctttgcactggg

SEQ ID NO: 66097 - DNA, 22 bp, synthetic construct
  misc_feature 1..22: note = chemically synthesized
  source 1..22: mol_type = other DNA
gccagggatctttgcactgggc

SEQ ID NO: 66098 - DNA, 22 bp, synthetic construct
  misc_feature 1..22: note = chemically synthesized
  source 1..22: mol_type = other DNA
tgcactgggcaggggaatttga

SEQ ID NO: 66099 - DNA, 22 bp, synthetic construct
  misc_feature 1..22: note = chemically synthesized
  source 1..22: mol_type = other DNA
gcactgggcaggggaatttgag

SEQ ID NO: 66100 - DNA, 22 bp, synthetic construct
  misc_feature 1..22: note = chemically synthesized
  source 1..22: mol_type = other DNA
cactgggcaggggaatttgagt

SEQ ID NO: 66101 - DNA, 22 bp, synthetic construct
  misc_feature 1..22: note = chemically synthesized
  source 1..22: mol_type = other DNA
ggcaggggaatttgagtcccaa

SEQ ID NO: 66102 - DNA, 22 bp, synthetic construct
  misc_feature 1..22: note = chemically synthesized
  source 1..22: mol_type = other DNA
gagtcccaatttgaggcatcga

SEQ ID NO: 66103 - DNA, 22 bp, synthetic construct
  misc_feature 1..22: note = chemically synthesized
  source 1..22: mol_type = other DNA
agtcccaatttgaggcatcgat

SEQ ID NO: 66104 - DNA, 22 bp, synthetic construct
  misc_feature 1..22: note = chemically synthesized
  source 1..22: mol_type = other DNA
gaggcatcgatttaaaccactt

SEQ ID NO: 66105 - DNA, 22 bp, synthetic construct
  misc_feature 1..22: note = chemically synthesized
  source 1..22: mol_type = other DNA
aggcatcgatttaaaccacttt

SEQ ID NO: 66106 - DNA, 22 bp, synthetic construct
  misc_feature 1..22: note = chemically synthesized
  source 1..22: mol_type = other DNA
aaaccacttttcaaaggcctga

SEQ ID NO: 66107 - DNA, 22 bp, synthetic construct
  misc_feature 1..22: note = chemically synthesized
  source 1..22: mol_type = other DNA
aaccacttttcaaaggcctgaa

SEQ ID NO: 66108 - DNA, 22 bp, synthetic construct
  misc_feature 1..22: note = chemically synthesized
  source 1..22: mol_type = other DNA
ttcaaaggcctgaatggagctg

SEQ ID NO: 66109 - DNA, 22 bp, synthetic construct
  misc_feature 1..22: note = chemically synthesized
  source 1..22: mol_type = other DNA
tcaaaggcctgaatggagctga

SEQ ID NO: 66110 - DNA, 22 bp, synthetic construct
  misc_feature 1..22: note = chemically synthesized
  source 1..22: mol_type = other DNA
caaaggcctgaatggagctgat

SEQ ID NO: 66111 - DNA, 22 bp, synthetic construct
  misc_feature 1..22: note = chemically synthesized
  source 1..22: mol_type = other DNA
aaaggcctgaatggagctgatt

SEQ ID NO: 66112 - DNA, 22 bp, synthetic construct
  misc_feature 1..22: note = chemically synthesized
  source 1..22: mol_type = other DNA
aatggagctgattatttgtgtg

SEQ ID NO: 66113 - DNA, 22 bp, synthetic construct
  misc_feature 1..22: note = chemically synthesized
  source 1..22: mol_type = other DNA
attatttgtgtgtcttcttttc

SEQ ID NO: 66114 - DNA, 22 bp, synthetic construct
  misc_feature 1..22: note = chemically synthesized
  source 1..22: mol_type = other DNA
tttgtgtgtcttcttttcctgg

SEQ ID NO: 66115 - DNA, 22 bp, synthetic construct
  misc_feature 1..22: note = chemically synthesized
  source 1..22: mol_type = other DNA
gtgtgtcttcttttcctggtct

SEQ ID NO: 66116 - DNA, 22 bp, synthetic construct
  misc_feature 1..22: note = chemically synthesized
  source 1..22: mol_type = other DNA
tgtgtcttcttttcctggtctt

SEQ ID NO: 66117 - DNA, 22 bp, synthetic construct
  misc_feature 1..22: note = chemically synthesized
  source 1..22: mol_type = other DNA
cttttcctggtcttccccttgt

SEQ ID NO: 66118 - DNA, 22 bp, synthetic construct
  misc_feature 1..22: note = chemically synthesized
  source 1..22: mol_type = other DNA
ttttcctggtcttccccttgtc

SEQ ID NO: 66119 - DNA, 22 bp, synthetic construct
  misc_feature 1..22: note = chemically synthesized
  source 1..22: mol_type = other DNA
ttcctggtcttccccttgtcaa

SEQ ID NO: 66120 - DNA, 22 bp, synthetic construct
  misc_feature 1..22: note = chemically synthesized
  source 1..22: mol_type = other DNA
tcctggtcttccccttgtcaag

SEQ ID NO: 66121 - DNA, 22 bp, synthetic construct
  misc_feature 1..22: note = chemically synthesized
  source 1..22: mol_type = other DNA
cctggtcttccccttgtcaaga

SEQ ID NO: 66122 - DNA, 22 bp, synthetic construct
  misc_feature 1..22: note = chemically synthesized
  source 1..22: mol_type = other DNA
ctggtcttccccttgtcaagac

SEQ ID NO: 66123 - DNA, 22 bp, synthetic construct
  misc_feature 1..22: note = chemically synthesized
  source 1..22: mol_type = other DNA
gtcttccccttgtcaagaccat

SEQ ID NO: 66124 - DNA, 22 bp, synthetic construct
  misc_feature 1..22: note = chemically synthesized
  source 1..22: mol_type = other DNA
ccccttgtcaagaccatttctc

SEQ ID NO: 66125 - DNA, 22 bp, synthetic construct
  misc_feature 1..22: note = chemically synthesized
  source 1..22: mol_type = other DNA
cccttgtcaagaccatttctct

SEQ ID NO: 66126 - DNA, 22 bp, synthetic construct
  misc_feature 1..22: note = chemically synthesized
  source 1..22: mol_type = other DNA
gtcaagaccatttctctaccac

SEQ ID NO: 66127 - DNA, 22 bp, synthetic construct
  misc_feature 1..22: note = chemically synthesized
  source 1..22: mol_type = other DNA
tcaagaccatttctctaccacg

SEQ ID NO: 66128 - DNA, 22 bp, synthetic construct
  misc_feature 1..22: note = chemically synthesized
  source 1..22: mol_type = other DNA
ctctaccacgggatatatatta

SEQ ID NO: 66129 - DNA, 22 bp, synthetic construct
  misc_feature 1..22: note = chemically synthesized
  source 1..22: mol_type = other DNA
tctaccacgggatatatattag

SEQ ID NO: 66130 - DNA, 22 bp, synthetic construct
  misc_feature 1..22: note = chemically synthesized
  source 1..22: mol_type = other DNA
taccacgggatatatattagag

SEQ ID NO: 66131 - DNA, 22 bp, synthetic construct
  misc_feature 1..22: note = chemically synthesized
  source 1..22: mol_type = other DNA
ccacgggatatatattagaggg

SEQ ID NO: 66132 - DNA, 22 bp, synthetic construct
  misc_feature 1..22: note = chemically synthesized
  source 1..22: mol_type = other DNA
gaggggaaaacggctgtaaacc

SEQ ID NO: 66133 - DNA, 22 bp, synthetic construct
  misc_feature 1..22: note = chemically synthesized
  source 1..22: mol_type = other DNA
taaaccctgattgttggctagc

SEQ ID NO: 66134 - DNA, 22 bp, synthetic construct
  misc_feature 1..22: note = chemically synthesized
  source 1..22: mol_type = other DNA
attgttggctagcattgttcag

SEQ ID NO: 66135 - DNA, 22 bp, synthetic construct
  misc_feature 1..22: note = chemically synthesized
  source 1..22: mol_type = other DNA
ttggctagcattgttcaggaag

SEQ ID NO: 66136 - DNA, 22 bp, synthetic construct
  misc_feature 1..22: note = chemically synthesized
  source 1..22: mol_type = other DNA
gctagcattgttcaggaagtgt

SEQ ID NO: 66137 - DNA, 22 bp, synthetic construct
  misc_feature 1..22: note = chemically synthesized
  source 1..22: mol_type = other DNA
gcattgttcaggaagtgtagca

SEQ ID NO: 66138 - DNA, 22 bp, synthetic construct
  misc_feature 1..22: note = chemically synthesized
  source 1..22: mol_type = other DNA
ttcaggaagtgtagcattaagg

SEQ ID NO: 66139 - DNA, 22 bp, synthetic construct
  misc_feature 1..22: note = chemically synthesized
  source 1..22: mol_type = other DNA
aggaagtgtagcattaaggagc

SEQ ID NO: 66140 - DNA, 22 bp, synthetic construct
  misc_feature 1..22: note = chemically synthesized
  source 1..22: mol_type = other DNA
aggagcaacacttctctcgcct

SEQ ID NO: 66141 - DNA, 22 bp, synthetic construct
  misc_feature 1..22: note = chemically synthesized
  source 1..22: mol_type = other DNA
ctctcgcctgtgttgattctcc

SEQ ID NO: 66142 - DNA, 22 bp, synthetic construct
  misc_feature 1..22: note = chemically synthesized
  source 1..22: mol_type = other DNA
tctcgcctgtgttgattctcct

SEQ ID NO: 66143 - DNA, 22 bp, synthetic construct
  misc_feature 1..22: note = chemically synthesized
  source 1..22: mol_type = other DNA
tcgcctgtgttgattctcctcc

SEQ ID NO: 66144 - DNA, 22 bp, synthetic construct
  misc_feature 1..22: note = chemically synthesized
  source 1..22: mol_type = other DNA
gcctgtgttgattctcctccaa

SEQ ID NO: 66145 - DNA, 22 bp, synthetic construct
  misc_feature 1..22: note = chemically synthesized
  source 1..22: mol_type = other DNA
tgttgattctcctccaactacc

SEQ ID NO: 66146 - DNA, 22 bp, synthetic construct
  misc_feature 1..22: note = chemically synthesized
  source 1..22: mol_type = other DNA
attctcctccaactacccacac

SEQ ID NO: 66147 - DNA, 22 bp, synthetic construct
  misc_feature 1..22: note = chemically synthesized
  source 1..22: mol_type = other DNA
tcctccaactacccacactatc

SEQ ID NO: 66148 - DNA, 22 bp, synthetic construct
  misc_feature 1..22: note = chemically synthesized
  source 1..22: mol_type = other DNA
ctccaactacccacactatcct

SEQ ID NO: 66149 - DNA, 22 bp, synthetic construct
  misc_feature 1..22: note = chemically synthesized
  source 1..22: mol_type = other DNA
caactacccacactatccttgc

SEQ ID NO: 66150 - DNA, 22 bp, synthetic construct
  misc_feature 1..22: note = chemically synthesized
  source 1..22: mol_type = other DNA
cccacactatccttgcagttat

SEQ ID NO: 66151 - DNA, 22 bp, synthetic construct
  misc_feature 1..22: note = chemically synthesized
  source 1..22: mol_type = other DNA
tccttgcagttattcatgggaa

SEQ ID NO: 66152 - DNA, 22 bp, synthetic construct
  misc_feature 1..22: note = chemically synthesized
  source 1..22: mol_type = other DNA
gcagttattcatgggaaataat

SEQ ID NO: 66153 - DNA, 22 bp, synthetic construct
  misc_feature 1..22: note = chemically synthesized
  source 1..22: mol_type = other DNA
cagttattcatgggaaataata

SEQ ID NO: 66154 - DNA, 22 bp, synthetic construct
  misc_feature 1..22: note = chemically synthesized
  source 1..22: mol_type = other DNA
ttcatgggaaataatataaatc

SEQ ID NO: 66155 - DNA, 22 bp, synthetic construct
  misc_feature 1..22: note = chemically synthesized
  source 1..22: mol_type = other DNA
atgggaaataatataaatcaca

SEQ ID NO: 66156 - DNA, 22 bp, synthetic construct
  misc_feature 1..22: note = chemically synthesized
  source 1..22: mol_type = other DNA
cctgattcttctcaaacatctc

SEQ ID NO: 66157 - DNA, 22 bp, synthetic construct
  misc_feature 1..22: note = chemically synthesized
  source 1..22: mol_type = other DNA
attcttctcaaacatctcgcaa

SEQ ID NO: 66158 - DNA, 22 bp, synthetic construct
  misc_feature 1..22: note = chemically synthesized
  source 1..22: mol_type = other DNA
ttctcaaacatctcgcaaagta

SEQ ID NO: 66159 - DNA, 22 bp, synthetic construct
  misc_feature 1..22: note = chemically synthesized
  source 1..22: mol_type = other DNA
ctcaaacatctcgcaaagtaat

SEQ ID NO: 66160 - DNA, 22 bp, synthetic construct
  misc_feature 1..22: note = chemically synthesized
  source 1..22: mol_type = other DNA
tcaaacatctcgcaaagtaatc

SEQ ID NO: 66161 - DNA, 22 bp, synthetic construct
  misc_feature 1..22: note = chemically synthesized
  source 1..22: mol_type = other DNA
aaacatctcgcaaagtaatcat

SEQ ID NO: 66162 - DNA, 22 bp, synthetic construct
  misc_feature 1..22: note = chemically synthesized
  source 1..22: mol_type = other DNA
gcaaagtaatcatgggctgaag

SEQ ID NO: 66163 - DNA, 22 bp, synthetic construct
  misc_feature 1..22: note = chemically synthesized
  source 1..22: mol_type = other DNA
aagtgcaggttttcttgcagtg

SEQ ID NO: 66164 - DNA, 22 bp, synthetic construct
  misc_feature 1..22: note = chemically synthesized
  source 1..22: mol_type = other DNA
tcttgcagtgcctttatcagta

SEQ ID NO: 66165 - DNA, 22 bp, synthetic construct
  misc_feature 1..22: note = chemically synthesized
  source 1..22: mol_type = other DNA
cttgcagtgcctttatcagtaa

SEQ ID NO: 66166 - DNA, 22 bp, synthetic construct
  misc_feature 1..22: note = chemically synthesized
  source 1..22: mol_type = other DNA
ttgcagtgcctttatcagtaaa

SEQ ID NO: 66167 - DNA, 22 bp, synthetic construct
  misc_feature 1..22: note = chemically synthesized
  source 1..22: mol_type = other DNA
gcagtgcctttatcagtaaatc

SEQ ID NO: 66168 - DNA, 22 bp, synthetic construct
  misc_feature 1..22: note = chemically synthesized
  source 1..22: mol_type = other DNA
cagtgcctttatcagtaaatca

SEQ ID NO: 66169 - DNA, 22 bp, synthetic construct
  misc_feature 1..22: note = chemically synthesized
  source 1..22: mol_type = other DNA
tatcagtaaatcagattttgag

SEQ ID NO: 66170 - DNA, 22 bp, synthetic construct
  misc_feature 1..22: note = chemically synthesized
  source 1..22: mol_type = other DNA
atcagtaaatcagattttgagc

SEQ ID NO: 66171 - DNA, 22 bp, synthetic construct
  misc_feature 1..22: note = chemically synthesized
  source 1..22: mol_type = other DNA
tcagtaaatcagattttgagca

SEQ ID NO: 66172 - DNA, 22 bp, synthetic construct
  misc_feature 1..22: note = chemically synthesized
  source 1..22: mol_type = other DNA
tgagcatttatcagcaaaagtt

SEQ ID NO: 66173 - DNA, 22 bp, synthetic construct
  misc_feature 1..22: note = chemically synthesized
  source 1..22: mol_type = other DNA
gagcatttatcagcaaaagtta

SEQ ID NO: 66174 - DNA, 22 bp, synthetic construct
  misc_feature 1..22: note = chemically synthesized
  source 1..22: mol_type = other DNA
agcatttatcagcaaaagttag

SEQ ID NO: 66175 - DNA, 22 bp, synthetic construct
  misc_feature 1..22: note = chemically synthesized
  source 1..22: mol_type = other DNA
atcagcaaaagttagacttaaa

SEQ ID NO: 66176 - DNA, 22 bp, synthetic construct
  misc_feature 1..22: note = chemically synthesized
  source 1..22: mol_type = other DNA
tcagcaaaagttagacttaaac

SEQ ID NO: 66177 - DNA, 22 bp, synthetic construct
  misc_feature 1..22: note = chemically synthesized
  source 1..22: mol_type = other DNA
gacttaaacatcatcatttctg

SEQ ID NO: 66178 - DNA, 22 bp, synthetic construct
  misc_feature 1..22: note = chemically synthesized
  source 1..22: mol_type = other DNA
aaacatcatcatttctgtaatg

SEQ ID NO: 66179 - DNA, 22 bp, synthetic construct
  misc_feature 1..22: note = chemically synthesized
  source 1..22: mol_type = other DNA
aacatcatcatttctgtaatgt

SEQ ID NO: 66180 - DNA, 22 bp, synthetic construct
  misc_feature 1..22: note = chemically synthesized
  source 1..22: mol_type = other DNA
ctgtaatgtttgaaagaaagat

SEQ ID NO: 66181 - DNA, 22 bp, synthetic construct
  misc_feature 1..22: note = chemically synthesized
  source 1..22: mol_type = other DNA
tgtaatgtttgaaagaaagatt

SEQ ID NO: 66182 - DNA, 22 bp, synthetic construct
  misc_feature 1..22: note = chemically synthesized
  source 1..22: mol_type = other DNA
taatgtttgaaagaaagatttg

SEQ ID NO: 66183 - DNA, 22 bp, synthetic construct
  misc_feature 1..22: note = chemically synthesized
  source 1..22: mol_type = other DNA
gaaagaaagatttgtttcagtg

SEQ ID NO: 66184 - DNA, 22 bp, synthetic construct
  misc_feature 1..22: note = chemically synthesized
  source 1..22: mol_type = other DNA
aaagaaagatttgtttcagtgg

SEQ ID NO: 66185 - DNA, 22 bp, synthetic construct
  misc_feature 1..22: note = chemically synthesized
  source 1..22: mol_type = other DNA
gtttcagtggggactctgccaa

SEQ ID NO: 66186 - DNA, 22 bp, synthetic construct
  misc_feature 1..22: note = chemically synthesized
  source 1..22: mol_type = other DNA
tttcagtggggactctgccaat

SEQ ID NO: 66187 - DNA, 22 bp, synthetic construct
  misc_feature 1..22: note = chemically synthesized
  source 1..22: mol_type = other DNA
cagtggggactctgccaatcaa

SEQ ID NO: 66188 - DNA, 22 bp, synthetic construct
  misc_feature 1..22: note = chemically synthesized
  source 1..22: mol_type = other DNA
agtggggactctgccaatcaat

SEQ ID NO: 66189 - DNA, 22 bp, synthetic construct
  misc_feature 1..22: note = chemically synthesized
  source 1..22: mol_type = other DNA
tgccaatcaatgatcttccagc

SEQ ID NO: 66190 - DNA, 22 bp, synthetic construct
  misc_feature 1..22: note = chemically synthesized
  source 1..22: mol_type = other DNA
ccaatcaatgatcttccagctt

SEQ ID NO: 66191 - DNA, 22 bp, synthetic construct
  misc_feature 1..22: note = chemically synthesized
  source 1..22: mol_type = other DNA
ccagcttgactctgctatcaat

SEQ ID NO: 66192 - DNA, 22 bp, synthetic construct
  misc_feature 1..22: note = chemically synthesized
  source 1..22: mol_type = other DNA
cagcttgactctgctatcaatt

SEQ ID NO: 66193 - DNA, 22 bp, synthetic construct
  misc_feature 1..22: note = chemically synthesized
  source 1..22: mol_type = other DNA
gactctgctatcaattattgct

SEQ ID NO: 66194 - DNA, 22 bp, synthetic construct
  misc_feature 1..22: note = chemically synthesized
  source 1..22: mol_type = other DNA
actctgctatcaattattgctg

SEQ ID NO: 66195 - DNA, 22 bp, synthetic construct
  misc_feature 1..22: note = chemically synthesized
  source 1..22: mol_type = other DNA
tgctatcaattattgctgcaat

SEQ ID NO: 66196 - DNA, 22 bp, synthetic construct
  misc_feature 1..22: note = chemically synthesized
  source 1..22: mol_type = other DNA
ctatcaattattgctgcaatta

SEQ ID NO: 66197 - DNA, 22 bp, synthetic construct
  misc_feature 1..22: note = chemically synthesized
  source 1..22: mol_type = other DNA
tcaattattgctgcaattattt

SEQ ID NO: 66198 - DNA, 22 bp, synthetic construct
  misc_feature 1..22: note = chemically synthesized
  source 1..22: mol_type = other DNA
ttgctgcaattatttgtctagt

SEQ ID NO: 66199 - DNA, 22 bp, synthetic construct
  misc_feature 1..22: note = chemically synthesized
  source 1..22: mol_type = other DNA
ctgcaattatttgtctagttgg

SEQ ID NO: 66200 - DNA, 22 bp, synthetic construct
  misc_feature 1..22: note = chemically synthesized
  source 1..22: mol_type = other DNA
caattatttgtctagttggata

SEQ ID NO: 66201 - DNA, 22 bp, synthetic construct
  misc_feature 1..22: note = chemically synthesized
  source 1..22: mol_type = other DNA
tttgtctagttggatatttaaa

SEQ ID NO: 66202 - DNA, 22 bp, synthetic construct
  misc_feature 1..22: note = chemically synthesized
  source 1..22: mol_type = other DNA
gtctagttggatatttaaaatg

SEQ ID NO: 66203 - DNA, 22 bp, synthetic construct
  misc_feature 1..22: note = chemically synthesized
  source 1..22: mol_type = other DNA
tctagttggatatttaaaatgt

SEQ ID NO: 66204 - DNA, 22 bp, synthetic construct
  misc_feature 1..22: note = chemically synthesized
  source 1..22: mol_type = other DNA
gttggatatttaaaatgtcatc

SEQ ID NO: 66205 - DNA, 22 bp, synthetic construct
  misc_feature 1..22: note = chemically synthesized
  source 1..22: mol_type = other DNA
gatatttaaaatgtcatcagaa

SEQ ID NO: 66206 - DNA, 22 bp, synthetic construct
  misc_feature 1..22: note = chemically synthesized
  source 1..22: mol_type = other DNA
aaaatgtcatcagaaagagatg

SEQ ID NO: 66207 - DNA, 22 bp, synthetic construct
  misc_feature 1..22: note = chemically synthesized
  source 1..22: mol_type = other DNA
aaatgtcatcagaaagagatga

SEQ ID NO: 66208 - DNA, 22 bp, synthetic construct
  misc_feature 1..22: note = chemically synthesized
  source 1..22: mol_type = other DNA
cacattctagaaagcaaggcac

SEQ ID NO: 66209 - DNA, 22 bp, synthetic construct
  misc_feature 1..22: note = chemically synthesized
  source 1..22: mol_type = other DNA
tagaaagcaaggcactgtataa

SEQ ID NO: 66210 - DNA, 22 bp, synthetic construct
  misc_feature 1..22: note = chemically synthesized
  source 1..22: mol_type = other DNA
gaaagcaaggcactgtataatc

SEQ ID NO: 66211 - DNA, 22 bp, synthetic construct
  misc_feature 1..22: note = chemically synthesized
  source 1..22: mol_type = other DNA
tataatcacatgaactgaatcc

SEQ ID NO: 66212 - DNA, 22 bp, synthetic construct
  misc_feature 1..22: note = chemically synthesized
  source 1..22: mol_type = other DNA
aatccagttaaatgtagtgtgg

SEQ ID NO: 66213 - DNA, 22 bp, synthetic construct
  misc_feature 1..22: note = chemically synthesized
  source 1..22: mol_type = other DNA
aatgtagtgtggtactaacctg

SEQ ID NO: 66214 - DNA, 22 bp, synthetic construct
  misc_feature 1..22: note = chemically synthesized
  source 1..22: mol_type = other DNA
acctgtccttcaaaatagaatt

SEQ ID NO: 66215 - DNA, 22 bp, synthetic construct
  misc_feature 1..22: note = chemically synthesized
  source 1..22: mol_type = other DNA
tccttcaaaatagaatttttga

SEQ ID NO: 66216 - DNA, 22 bp, synthetic construct
  misc_feature 1..22: note = chemically synthesized
  source 1..22: mol_type = other DNA
caaaatagaatttttgagctac

SEQ ID NO: 66217 - DNA, 22 bp, synthetic construct
  misc_feature 1..22: note = chemically synthesized
  source 1..22: mol_type = other DNA
aaaatagaatttttgagctacc

SEQ ID NO: 66218 - DNA, 22 bp, synthetic construct
  misc_feature 1..22: note = chemically synthesized
  source 1..22: mol_type = other DNA
ttgagctaccactgaagcagca

SEQ ID NO: 66219 - DNA, 22 bp, synthetic construct
  misc_feature 1..22: note = chemically synthesized
  source 1..22: mol_type = other DNA
tgagctaccactgaagcagcag

SEQ ID NO: 66220 - DNA, 22 bp, synthetic construct
  misc_feature 1..22: note = chemically synthesized
  source 1..22: mol_type = other DNA
gagctaccactgaagcagcagt

SEQ ID NO: 66221 - DNA, 22 bp, synthetic construct
  misc_feature 1..22: note = chemically synthesized
  source 1..22: mol_type = other DNA
agctaccactgaagcagcagtc

SEQ ID NO: 66222 - DNA, 22 bp, synthetic construct
  misc_feature 1..22: note = chemically synthesized
  source 1..22: mol_type = other DNA
ccactgaagcagcagtcttctg

SEQ ID NO: 66223 - DNA, 22 bp, synthetic construct
  misc_feature 1..22: note = chemically synthesized
  source 1..22: mol_type = other DNA
aagcagcagtcttctgccctgt

SEQ ID NO: 66224 - DNA, 22 bp, synthetic construct
  misc_feature 1..22: note = chemically synthesized
  source 1..22: mol_type = other DNA
ctgccctgttttcaggaagctg

SEQ ID NO: 66225 - DNA, 22 bp, synthetic construct
  misc_feature 1..22: note = chemically synthesized
  source 1..22: mol_type = other DNA
tgccctgttttcaggaagctga

SEQ ID NO: 66226 - DNA, 22 bp, synthetic construct
  misc_feature 1..22: note = chemically synthesized
  source 1..22: mol_type = other DNA
ccctgttttcaggaagctgatc

SEQ ID NO: 66227 - DNA, 22 bp, synthetic construct
  misc_feature 1..22: note = chemically synthesized
  source 1..22: mol_type = other DNA
ttttcaggaagctgatcttaac

SEQ ID NO: 66228 - DNA, 22 bp, synthetic construct
  misc_feature 1..22: note = chemically synthesized
  source 1..22: mol_type = other DNA
tcaggaagctgatcttaacctt

SEQ ID NO: 66229 - DNA, 22 bp, synthetic construct
  misc_feature 1..22: note = chemically synthesized
  source 1..22: mol_type = other DNA
caggaagctgatcttaaccttg

SEQ ID NO: 66230 - DNA, 22 bp, synthetic construct
  misc_feature 1..22: note = chemically synthesized
  source 1..22: mol_type = other DNA
aggaagctgatcttaaccttgg

SEQ ID NO: 66231 - DNA, 22 bp, synthetic construct
  misc_feature 1..22: note = chemically synthesized
  source 1..22: mol_type = other DNA
atcttaaccttgggatgcagtg

SEQ ID NO: 66232 - DNA, 22 bp, synthetic construct
  misc_feature 1..22: note = chemically synthesized
  source 1..22: mol_type = other DNA
aaccttgggatgcagtgtgctt

SEQ ID NO: 66233 - DNA, 22 bp, synthetic construct
  misc_feature 1..22: note = chemically synthesized
  source 1..22: mol_type = other DNA
accttgggatgcagtgtgcttt

SEQ ID NO: 66234 - DNA, 22 bp, synthetic construct
  misc_feature 1..22: note = chemically synthesized
  source 1..22: mol_type = other DNA
gggatgcagtgtgctttcaggg

SEQ ID NO: 66235 - DNA, 22 bp, synthetic construct
  misc_feature 1..22: note = chemically synthesized
  source 1..22: mol_type = other DNA
ggatgcagtgtgctttcagggt

SEQ ID NO: 66236 - DNA, 22 bp, synthetic construct
  misc_feature 1..22: note = chemically synthesized
  source 1..22: mol_type = other DNA
tcagggttgggtgatacttaat

SEQ ID NO: 66237 - DNA, 22 bp, synthetic construct
  misc_feature 1..22: note = chemically synthesized
  source 1..22: mol_type = other DNA
cagggttgggtgatacttaatt

SEQ ID NO: 66238 - DNA, 22 bp, synthetic construct
  misc_feature 1..22: note = chemically synthesized
  source 1..22: mol_type = other DNA
agggttgggtgatacttaatta

SEQ ID NO: 66239 - DNA, 22 bp, synthetic construct
  misc_feature 1..22: note = chemically synthesized
  source 1..22: mol_type = other DNA
ggtgatacttaattatggagaa

SEQ ID NO: 66240 - DNA, 22 bp, synthetic construct
  misc_feature 1..22: note = chemically synthesized
  source 1..22: mol_type = other DNA
aattatggagaactttccaagt

SEQ ID NO: 66241 - DNA, 22 bp, synthetic construct
  misc_feature 1..22: note = chemically synthesized
  source 1..22: mol_type = other DNA
attatggagaactttccaagtc

SEQ ID NO: 66242 - DNA, 22 bp, synthetic construct
  misc_feature 1..22: note = chemically synthesized
  source 1..22: mol_type = other DNA
tggagaactttccaagtctgaa

SEQ ID NO: 66243 - DNA, 22 bp, synthetic construct
  misc_feature 1..22: note = chemically synthesized
  source 1..22: mol_type = other DNA
tccaagtctgaaaatggaattg

SEQ ID NO: 66244 - DNA, 22 bp, synthetic construct
  misc_feature 1..22: note = chemically synthesized
  source 1..22: mol_type = other DNA
ccaagtctgaaaatggaattgc

SEQ ID NO: 66245 - DNA, 22 bp, synthetic construct
  misc_feature 1..22: note = chemically synthesized
  source 1..22: mol_type = other DNA
caagtctgaaaatggaattgct

SEQ ID NO: 66246 - DNA, 22 bp, synthetic construct
  misc_feature 1..22: note = chemically synthesized
  source 1..22: mol_type = other DNA
aaaatggaattgctccttcaca

SEQ ID NO: 66247 - DNA, 22 bp, synthetic construct
  misc_feature 1..22: note = chemically synthesized
  source 1..22: mol_type = other DNA
ctccttcacatacgcgagaagt

SEQ ID NO: 66248 - DNA, 22 bp, synthetic construct
  misc_feature 1..22: note = chemically synthesized
  source 1..22: mol_type = other DNA
cttcacatacgcgagaagtgca

SEQ ID NO: 66249 - DNA, 22 bp, synthetic construct
  misc_feature 1..22: note = chemically synthesized
  source 1..22: mol_type = other DNA
cacatacgcgagaagtgcattt

SEQ ID NO: 66250 - DNA, 22 bp, synthetic construct
  misc_feature 1..22: note = chemically synthesized
  source 1..22: mol_type = other DNA
acatacgcgagaagtgcatttt

SEQ ID NO: 66251 - DNA, 22 bp, synthetic construct
  misc_feature 1..22: note = chemically synthesized
  source 1..22: mol_type = other DNA
tggttatctcattcatctgcaa

SEQ ID NO: 66252 - DNA, 22 bp, synthetic construct
  misc_feature 1..22: note = chemically synthesized
  source 1..22: mol_type = other DNA
ggttatctcattcatctgcaaa

SEQ ID NO: 66253 - DNA, 22 bp, synthetic construct
  misc_feature 1..22: note = chemically synthesized
  source 1..22: mol_type = other DNA
gttatctcattcatctgcaaat

SEQ ID NO: 66254 - DNA, 22 bp, synthetic construct
  misc_feature 1..22: note = chemically synthesized
  source 1..22: mol_type = other DNA
tctcattcatctgcaaatctat

SEQ ID NO: 66255 - DNA, 22 bp, synthetic construct
  misc_feature 1..22: note = chemically synthesized
  source 1..22: mol_type = other DNA
attcatctgcaaatctataaat

SEQ ID NO: 66256 - DNA, 22 bp, synthetic construct
  misc_feature 1..22: note = chemically synthesized
  source 1..22: mol_type = other DNA
atctgcaaatctataaataagc

SEQ ID NO: 66257 - DNA, 22 bp, synthetic construct
  misc_feature 1..22: note = chemically synthesized
  source 1..22: mol_type = other DNA
caaatctataaataagcagtcc

SEQ ID NO: 66258 - DNA, 22 bp, synthetic construct
  misc_feature 1..22: note = chemically synthesized
  source 1..22: mol_type = other DNA
taaataagcagtccctctattc

SEQ ID NO: 66259 - DNA, 22 bp, synthetic construct
  misc_feature 1..22: note = chemically synthesized
  source 1..22: mol_type = other DNA
tattcttcttgcttcctgtgga

SEQ ID NO: 66260 - DNA, 22 bp, synthetic construct
  misc_feature 1..22: note = chemically synthesized
  source 1..22: mol_type = other DNA
ttcttcttgcttcctgtggatt

SEQ ID NO: 66261 - DNA, 22 bp, synthetic construct
  misc_feature 1..22: note = chemically synthesized
  source 1..22: mol_type = other DNA
ttcttgcttcctgtggatttaa

SEQ ID NO: 66262 - DNA, 22 bp, synthetic construct
  misc_feature 1..22: note = chemically synthesized
  source 1..22: mol_type = other DNA
cttgcttcctgtggatttaaat

SEQ ID NO: 66263 - DNA, 22 bp, synthetic construct
  misc_feature 1..22: note = chemically synthesized
  source 1..22: mol_type = other DNA
ttgcttcctgtggatttaaatg

SEQ ID NO: 66264 - DNA, 22 bp, synthetic construct
  misc_feature 1..22: note = chemically synthesized
  source 1..22: mol_type = other DNA
gcttcctgtggatttaaatgcc

SEQ ID NO: 66265 - DNA, 22 bp, synthetic construct
  misc_feature 1..22: note = chemically synthesized
  source 1..22: mol_type = other DNA
cttcctgtggatttaaatgcca

SEQ ID NO: 66266 - DNA, 22 bp, synthetic construct
  misc_feature 1..22: note = chemically synthesized
  source 1..22: mol_type = other DNA
cctgtggatttaaatgccaaat

SEQ ID NO: 66267 - DNA, 22 bp, synthetic construct
  misc_feature 1..22: note = chemically synthesized
  source 1..22: mol_type = other DNA
ctgtggatttaaatgccaaatc

SEQ ID NO: 66268 - DNA, 22 bp, synthetic construct
  misc_feature 1..22: note = chemically synthesized
  source 1..22: mol_type = other DNA
tggatttaaatgccaaatcctg

SEQ ID NO: 66269 - DNA, 22 bp, synthetic construct
  misc_feature 1..22: note = chemically synthesized
  source 1..22: mol_type = other DNA
aaatgccaaatcctgatttgtg

SEQ ID NO: 66270 - DNA, 22 bp, synthetic construct
  misc_feature 1..22: note = chemically synthesized
  source 1..22: mol_type = other DNA
aatgccaaatcctgatttgtgg

SEQ ID NO: 66271 - DNA, 22 bp, synthetic construct
  misc_feature 1..22: note = chemically synthesized
  source 1..22: mol_type = other DNA
atttgtggcaaagttgtcacat

SEQ ID NO: 66272 - DNA, 22 bp, synthetic construct
  misc_feature 1..22: note = chemically synthesized
  source 1..22: mol_type = other DNA
gtggcaaagttgtcacatgccc

SEQ ID NO: 66273 - DNA, 22 bp, synthetic construct
  misc_feature 1..22: note = chemically synthesized
  source 1..22: mol_type = other DNA
tggcaaagttgtcacatgcccc

SEQ ID NO: 66274 - DNA, 22 bp, synthetic construct
  misc_feature 1..22: note = chemically synthesized
  source 1..22: mol_type = other DNA
tcacatgcccctttcccactct

SEQ ID NO: 66275 - DNA, 22 bp, synthetic construct
  misc_feature 1..22: note = chemically synthesized
  source 1..22: mol_type = other DNA
tcccactctgtatgcctggtgc

SEQ ID NO: 66276 - DNA, 22 bp, synthetic construct
  misc_feature 1..22: note = chemically synthesized
  source 1..22: mol_type = other DNA
cccactctgtatgcctggtgcc

SEQ ID NO: 66277 - DNA, 22 bp, synthetic construct
  misc_feature 1..22: note = chemically synthesized
  source 1..22: mol_type = other DNA
ccactctgtatgcctggtgccc

SEQ ID NO: 66278 - DNA, 22 bp, synthetic construct
  misc_feature 1..22: note = chemically synthesized
  source 1..22: mol_type = other DNA
tgtatgcctggtgcccaggaac

SEQ ID NO: 66279 - DNA, 22 bp, synthetic construct
  misc_feature 1..22: note = chemically synthesized
  source 1..22: mol_type = other DNA
tatgcctggtgcccaggaacta

SEQ ID NO: 66280 - DNA, 22 bp, synthetic construct
  misc_feature 1..22: note = chemically synthesized
  source 1..22: mol_type = other DNA
gtgcccaggaactaagcagtgg

SEQ ID NO: 66281 - DNA, 22 bp, synthetic construct
  misc_feature 1..22: note = chemically synthesized
  source 1..22: mol_type = other DNA
agcagtggcagtggaaattaca

SEQ ID NO: 66282 - DNA, 22 bp, synthetic construct
  misc_feature 1..22: note = chemically synthesized
  source 1..22: mol_type = other DNA
caactgtttggaagccaagaaa

SEQ ID NO: 66283 - DNA, 22 bp, synthetic construct
  misc_feature 1..22: note = chemically synthesized
  source 1..22: mol_type = other DNA
tttggaagccaagaaaaaagct

SEQ ID NO: 66284 - DNA, 22 bp, synthetic construct
  misc_feature 1..22: note = chemically synthesized
  source 1..22: mol_type = other DNA
ggaagccaagaaaaaagctcca

SEQ ID NO: 66285 - DNA, 22 bp, synthetic construct
  misc_feature 1..22: note = chemically synthesized
  source 1..22: mol_type = other DNA
gaagccaagaaaaaagctccat

SEQ ID NO: 66286 - DNA, 22 bp, synthetic construct
  misc_feature 1..22: note = chemically synthesized
  source 1..22: mol_type = other DNA
catttctcacttttctccagtt

SEQ ID NO: 66287 - DNA, 22 bp, synthetic construct
  misc_feature 1..22: note = chemically synthesized
  source 1..22: mol_type = other DNA
ctcacttttctccagttccgga

SEQ ID NO: 66288 - DNA, 22 bp, synthetic construct
  misc_feature 1..22: note = chemically synthesized
  source 1..22: mol_type = other DNA
tcacttttctccagttccggat

SEQ ID NO: 66289 - DNA, 22 bp, synthetic construct
  misc_feature 1..22: note = chemically synthesized
  source 1..22: mol_type = other DNA
acttttctccagttccggatat

SEQ ID NO: 66290 - DNA, 22 bp, synthetic construct
  misc_feature 1..22: note = chemically synthesized
  source 1..22: mol_type = other DNA
ttctccagttccggatattctc

SEQ ID NO: 66291 - DNA, 22 bp, synthetic construct
  misc_feature 1..22: note = chemically synthesized
  source 1..22: mol_type = other DNA
tctccagttccggatattctcg

SEQ ID NO: 66292 - DNA, 22 bp, synthetic construct
  misc_feature 1..22: note = chemically synthesized
  source 1..22: mol_type = other DNA
ctccagttccggatattctcgg

SEQ ID NO: 66293 - DNA, 22 bp, synthetic construct
  misc_feature 1..22: note = chemically synthesized
  source 1..22: mol_type = other DNA
tccagttccggatattctcggc

SEQ ID NO: 66294 - DNA, 22 bp, synthetic construct
  misc_feature 1..22: note = chemically synthesized
  source 1..22: mol_type = other DNA
cagttccggatattctcggctc

SEQ ID NO: 66295 - DNA, 22 bp, synthetic construct
  misc_feature 1..22: note = chemically synthesized
  source 1..22: mol_type = other DNA
cggatattctcggctctgctcc

SEQ ID NO: 66296 - DNA, 22 bp, synthetic construct
  misc_feature 1..22: note = chemically synthesized
  source 1..22: mol_type = other DNA
tcggctctgctccatgtatcag

SEQ ID NO: 66297 - DNA, 22 bp, synthetic construct
  misc_feature 1..22: note = chemically synthesized
  source 1..22: mol_type = other DNA
ggctctgctccatgtatcagcc

SEQ ID NO: 66298 - DNA, 22 bp, synthetic construct
  misc_feature 1..22: note = chemically synthesized
  source 1..22: mol_type = other DNA
tgctccatgtatcagcctcctc

SEQ ID NO: 66299 - DNA, 22 bp, synthetic construct
  misc_feature 1..22: note = chemically synthesized
  source 1..22: mol_type = other DNA
ctccatgtatcagcctcctccc

SEQ ID NO: 66300 - DNA, 22 bp, synthetic construct
  misc_feature 1..22: note = chemically synthesized
  source 1..22: mol_type = other DNA
catgtatcagcctcctccccac

SEQ ID NO: 66301 - DNA, 22 bp, synthetic construct
  misc_feature 1..22: note = chemically synthesized
  source 1..22: mol_type = other DNA
ctccccacacacctcctccact

SEQ ID NO: 66302 - DNA, 22 bp, synthetic construct
  misc_feature 1..22: note = chemically synthesized
  source 1..22: mol_type = other DNA
cccacacacctcctccactgca

SEQ ID NO: 66303 - DNA, 22 bp, synthetic construct
  misc_feature 1..22: note = chemically synthesized
  source 1..22: mol_type = other DNA
ctccactgcacaccctccttct

SEQ ID NO: 66304 - DNA, 22 bp, synthetic construct
  misc_feature 1..22: note = chemically synthesized
  source 1..22: mol_type = other DNA
cactgcacaccctccttctgtc

SEQ ID NO: 66305 - DNA, 22 bp, synthetic construct
  misc_feature 1..22: note = chemically synthesized
  source 1..22: mol_type = other DNA
cacaccctccttctgtccgctc

SEQ ID NO: 66306 - DNA, 22 bp, synthetic construct
  misc_feature 1..22: note = chemically synthesized
  source 1..22: mol_type = other DNA
cttctgtccgctccgtgaacag

SEQ ID NO: 66307 - DNA, 22 bp, synthetic construct
  misc_feature 1..22: note = chemically synthesized
  source 1..22: mol_type = other DNA
ctgtccgctccgtgaacaggaa

SEQ ID NO: 66308 - DNA, 22 bp, synthetic construct
  misc_feature 1..22: note = chemically synthesized
  source 1..22: mol_type = other DNA
tgtccgctccgtgaacaggaaa

SEQ ID NO: 66309 - DNA, 22 bp, synthetic construct
  misc_feature 1..22: note = chemically synthesized
  source 1..22: mol_type = other DNA
tccgctccgtgaacaggaaaca

SEQ ID NO: 66310 - DNA, 22 bp, synthetic construct
  misc_feature 1..22: note = chemically synthesized
  source 1..22: mol_type = other DNA
cgtgaacaggaaacagaaatac

SEQ ID NO: 66311 - DNA, 22 bp, synthetic construct
  misc_feature 1..22: note = chemically synthesized
  source 1..22: mol_type = other DNA
caatttttttttttaatggagg

SEQ ID NO: 66312 - DNA, 22 bp, synthetic construct
  misc_feature 1..22: note = chemically synthesized
  source 1..22: mol_type = other DNA
ttttttttaatggaggaagaga

SEQ ID NO: 66313 - DNA, 22 bp, synthetic construct
  misc_feature 1..22: note = chemically synthesized
  source 1..22: mol_type = other DNA
tttttttaatggaggaagagaa

SEQ ID NO: 66314 - DNA, 22 bp, synthetic construct
  misc_feature 1..22: note = chemically synthesized
  source 1..22: mol_type = other DNA
ttttttaatggaggaagagaaa

SEQ ID NO: 66315 - DNA, 22 bp, synthetic construct
  misc_feature 1..22: note = chemically synthesized
  source 1..22: mol_type = other DNA
tttttaatggaggaagagaaac

SEQ ID NO: 66316 - DNA, 22 bp, synthetic construct
  misc_feature 1..22: note = chemically synthesized
  source 1..22: mol_type = other DNA
ttttaatggaggaagagaaacc

SEQ ID NO: 66317 - DNA, 22 bp, synthetic construct
  misc_feature 1..22: note = chemically synthesized
  source 1..22: mol_type = other DNA
tttaatggaggaagagaaacca

SEQ ID NO: 66318 - DNA, 22 bp, synthetic construct
  misc_feature 1..22: note = chemically synthesized
  source 1..22: mol_type = other DNA
ttaatggaggaagagaaaccac

SEQ ID NO: 66319 - DNA, 22 bp, synthetic construct
  misc_feature 1..22: note = chemically synthesized
  source 1..22: mol_type = other DNA
taatggaggaagagaaaccaca

SEQ ID NO: 66320 - DNA, 22 bp, synthetic construct
  misc_feature 1..22: note = chemically synthesized
  source 1..22: mol_type = other DNA
aatggaggaagagaaaccacaa

SEQ ID NO: 66321 - DNA, 22 bp, synthetic construct
  misc_feature 1..22: note = chemically synthesized
  source 1..22: mol_type = other DNA
atggaggaagagaaaccacaac

SEQ ID NO: 66322 - DNA, 22 bp, synthetic construct
  misc_feature 1..22: note = chemically synthesized
  source 1..22: mol_type = other DNA
aaaaactaaactccaaccaaac

SEQ ID NO: 66323 - DNA, 22 bp, synthetic construct
  misc_feature 1..22: note = chemically synthesized
  source 1..22: mol_type = other DNA
aactccaaccaaactaaactct

SEQ ID NO: 66324 - DNA, 22 bp, synthetic construct
  misc_feature 1..22: note = chemically synthesized
  source 1..22: mol_type = other DNA
caaccaaactaaactctcaaga

SEQ ID NO: 66325 - DNA, 22 bp, synthetic construct
  misc_feature 1..22: note = chemically synthesized
  source 1..22: mol_type = other DNA
aactctcaagatagaatcatga

SEQ ID NO: 66326 - DNA, 22 bp, synthetic construct
  misc_feature 1..22: note = chemically synthesized
  source 1..22: mol_type = other DNA
tcaagatagaatcatgagagat

SEQ ID NO: 66327 - DNA, 22 bp, synthetic construct
  misc_feature 1..22: note = chemically synthesized
  source 1..22: mol_type = other DNA
aagatagaatcatgagagatgc

SEQ ID NO: 66328 - DNA, 22 bp, synthetic construct
  misc_feature 1..22: note = chemically synthesized
  source 1..22: mol_type = other DNA
agtggctcaaaccacccgcccc

SEQ ID NO: 66329 - DNA, 22 bp, synthetic construct
  misc_feature 1..22: note = chemically synthesized
  source 1..22: mol_type = other DNA
aaaccacccgccccttaacagg

SEQ ID NO: 66330 - DNA, 22 bp, synthetic construct
  misc_feature 1..22: note = chemically synthesized
  source 1..22: mol_type = other DNA
aacaggtctgcctctcttcctg

SEQ ID NO: 66331 - DNA, 22 bp, synthetic construct
  misc_feature 1..22: note = chemically synthesized
  source 1..22: mol_type = other DNA
acaggtctgcctctcttcctgg

SEQ ID NO: 66332 - DNA, 22 bp, synthetic construct
  misc_feature 1..22: note = chemically synthesized
  source 1..22: mol_type = other DNA
cctctcttcctgggagtcagaa

SEQ ID NO: 66333 - DNA, 22 bp, synthetic construct
  misc_feature 1..22: note = chemically synthesized
  source 1..22: mol_type = other DNA
tcttcctgggagtcagaagtga

SEQ ID NO: 66334 - DNA, 22 bp, synthetic construct
  misc_feature 1..22: note = chemically synthesized
  source 1..22: mol_type = other DNA
ttcctgggagtcagaagtgacc

SEQ ID NO: 66335 - DNA, 22 bp, synthetic construct
  misc_feature 1..22: note = chemically synthesized
  source 1..22: mol_type = other DNA
cctgggagtcagaagtgacctt

SEQ ID NO: 66336 - DNA, 22 bp, synthetic construct
  misc_feature 1..22: note = chemically synthesized
  source 1..22: mol_type = other DNA
ctgggagtcagaagtgaccttg

SEQ ID NO: 66337 - DNA, 22 bp, synthetic construct
  misc_feature 1..22: note = chemically synthesized
  source 1..22: mol_type = other DNA
ggagtcagaagtgaccttgatg

SEQ ID NO: 66338 - DNA, 22 bp, synthetic construct
  misc_feature 1..22: note = chemically synthesized
  source 1..22: mol_type = other DNA
gatgaactggatgttaggtcca

SEQ ID NO: 66339 - DNA, 22 bp, synthetic construct
  misc_feature 1..22: note = chemically synthesized
  source 1..22: mol_type = other DNA
atgaactggatgttaggtccaa

SEQ ID NO: 66340 - DNA, 22 bp, synthetic construct
  misc_feature 1..22: note = chemically synthesized
  source 1..22: mol_type = other DNA
gatgttaggtccaaaaatgaca

SEQ ID NO: 66341 - DNA, 22 bp, synthetic construct
  misc_feature 1..22: note = chemically synthesized
  source 1..22: mol_type = other DNA
ggtccaaaaatgacaaacaagc

SEQ ID NO: 66342 - DNA, 22 bp, synthetic construct
  misc_feature 1..22: note = chemically synthesized
  source 1..22: mol_type = other DNA
cactgggaaacatcagtccaac

SEQ ID NO: 66343 - DNA, 22 bp, synthetic construct
  misc_feature 1..22: note = chemically synthesized
  source 1..22: mol_type = other DNA
ggaaacatcagtccaacccctt

SEQ ID NO: 66344 - DNA, 22 bp, synthetic construct
  misc_feature 1..22: note = chemically synthesized
  source 1..22: mol_type = other DNA
tcttttgacagcaggactagaa

SEQ ID NO: 66345 - DNA, 22 bp, synthetic construct
  misc_feature 1..22: note = chemically synthesized
  source 1..22: mol_type = other DNA
cttttgacagcaggactagaac

SEQ ID NO: 66346 - DNA, 22 bp, synthetic construct
  misc_feature 1..22: note = chemically synthesized
  source 1..22: mol_type = other DNA
ttttgacagcaggactagaaca

SEQ ID NO: 66347 - DNA, 22 bp, synthetic construct
  misc_feature 1..22: note = chemically synthesized
  source 1..22: mol_type = other DNA
ttgacagcaggactagaacaga

SEQ ID NO: 66348 - DNA, 22 bp, synthetic construct
  misc_feature 1..22: note = chemically synthesized
  source 1..22: mol_type = other DNA
tgacagcaggactagaacagac

SEQ ID NO: 66349 - DNA, 22 bp, synthetic construct
  misc_feature 1..22: note = chemically synthesized
  source 1..22: mol_type = other DNA
gacagcaggactagaacagacc

SEQ ID NO: 66350 - DNA, 22 bp, synthetic construct
  misc_feature 1..22: note = chemically synthesized
  source 1..22: mol_type = other DNA
acagcaggactagaacagacca

SEQ ID NO: 66351 - DNA, 22 bp, synthetic construct
  misc_feature 1..22: note = chemically synthesized
  source 1..22: mol_type = other DNA
gaacagaccagaggttccggag

SEQ ID NO: 66352 - DNA, 22 bp, synthetic construct
  misc_feature 1..22: note = chemically synthesized
  source 1..22: mol_type = other DNA
cggagaaggtctctatacctag

SEQ ID NO: 66353 - DNA, 22 bp, synthetic construct
  misc_feature 1..22: note = chemically synthesized
  source 1..22: mol_type = other DNA
tatacctaggtgggtttcctga

SEQ ID NO: 66354 - DNA, 22 bp, synthetic construct
  misc_feature 1..22: note = chemically synthesized
  source 1..22: mol_type = other DNA
tacctaggtgggtttcctgagc

SEQ ID NO: 66355 - DNA, 22 bp, synthetic construct
  misc_feature 1..22: note = chemically synthesized
  source 1..22: mol_type = other DNA
ggtgggtttcctgagctggaga

SEQ ID NO: 66356 - DNA, 22 bp, synthetic construct
  misc_feature 1..22: note = chemically synthesized
  source 1..22: mol_type = other DNA
cctgagctggagaattttccat

SEQ ID NO: 66357 - DNA, 22 bp, synthetic construct
  misc_feature 1..22: note = chemically synthesized
  source 1..22: mol_type = other DNA
ctgagctggagaattttccatg

SEQ ID NO: 66358 - DNA, 22 bp, synthetic construct
  misc_feature 1..22: note = chemically synthesized
  source 1..22: mol_type = other DNA
agctggagaattttccatgggg

SEQ ID NO: 66359 - DNA, 22 bp, synthetic construct
  misc_feature 1..22: note = chemically synthesized
  source 1..22: mol_type = other DNA
gagaattttccatggggctgtc

SEQ ID NO: 66360 - DNA, 22 bp, synthetic construct
  misc_feature 1..22: note = chemically synthesized
  source 1..22: mol_type = other DNA
tccatggggctgtctgtgtgtt

SEQ ID NO: 66361 - DNA, 22 bp, synthetic construct
  misc_feature 1..22: note = chemically synthesized
  source 1..22: mol_type = other DNA
ccatggggctgtctgtgtgttg

SEQ ID NO: 66362 - DNA, 22 bp, synthetic construct
  misc_feature 1..22: note = chemically synthesized
  source 1..22: mol_type = other DNA
catggggctgtctgtgtgttga

SEQ ID NO: 66363 - DNA, 22 bp, synthetic construct
  misc_feature 1..22: note = chemically synthesized
  source 1..22: mol_type = other DNA
tctgtgtgttgaggcttttccc

SEQ ID NO: 66364 - DNA, 22 bp, synthetic construct
  misc_feature 1..22: note = chemically synthesized
  source 1..22: mol_type = other DNA
tgtgttgaggcttttccccatt

SEQ ID NO: 66365 - DNA, 22 bp, synthetic construct
  misc_feature 1..22: note = chemically synthesized
  source 1..22: mol_type = other DNA
aggcttttccccattcactttc

SEQ ID NO: 66366 - DNA, 22 bp, synthetic construct
  misc_feature 1..22: note = chemically synthesized
  source 1..22: mol_type = other DNA
ttccccattcactttcccaatt

SEQ ID NO: 66367 - DNA, 22 bp, synthetic construct
  misc_feature 1..22: note = chemically synthesized
  source 1..22: mol_type = other DNA
tccccattcactttcccaattc

SEQ ID NO: 66368 - DNA, 22 bp, synthetic construct
  misc_feature 1..22: note = chemically synthesized
  source 1..22: mol_type = other DNA
ccccattcactttcccaattca

SEQ ID NO: 66369 - DNA, 22 bp, synthetic construct
  misc_feature 1..22: note = chemically synthesized
  source 1..22: mol_type = other DNA
cccattcactttcccaattcac

SEQ ID NO: 66370 - DNA, 22 bp, synthetic construct
  misc_feature 1..22: note = chemically synthesized
  source 1..22: mol_type = other DNA
actttcccaattcacttcccag

SEQ ID NO: 66371 - DNA, 22 bp, synthetic construct
  misc_feature 1..22: note = chemically synthesized
  source 1..22: mol_type = other DNA
tcccaattcacttcccagagag

SEQ ID NO: 66372 - DNA, 22 bp, synthetic construct
  misc_feature 1..22: note = chemically synthesized
  source 1..22: mol_type = other DNA
cccaattcacttcccagagagc

SEQ ID NO: 66373 - DNA, 22 bp, synthetic construct
  misc_feature 1..22: note = chemically synthesized
  source 1..22: mol_type = other DNA
ccaattcacttcccagagagca

SEQ ID NO: 66374 - DNA, 22 bp, synthetic construct
  misc_feature 1..22: note = chemically synthesized
  source 1..22: mol_type = other DNA
acttcccagagagcatgctgag

SEQ ID NO: 66375 - DNA, 22 bp, synthetic construct
  misc_feature 1..22: note = chemically synthesized
  source 1..22: mol_type = other DNA
cccagagagcatgctgagctca

SEQ ID NO: 66376 - DNA, 22 bp, synthetic construct
  misc_feature 1..22: note = chemically synthesized
  source 1..22: mol_type = other DNA
ccagagagcatgctgagctcat

SEQ ID NO: 66377 - DNA, 22 bp, synthetic construct
  misc_feature 1..22: note = chemically synthesized
  source 1..22: mol_type = other DNA
agctcattccaggacactgtga

SEQ ID NO: 66378 - DNA, 22 bp, synthetic construct
  misc_feature 1..22: note = chemically synthesized
  source 1..22: mol_type = other DNA
attccaggacactgtgatggtc

SEQ ID NO: 66379 - DNA, 22 bp, synthetic construct
  misc_feature 1..22: note = chemically synthesized
  source 1..22: mol_type = other DNA
caggacactgtgatggtcaaaa

SEQ ID NO: 66380 - DNA, 22 bp, synthetic construct
  misc_feature 1..22: note = chemically synthesized
  source 1..22: mol_type = other DNA
tgatggtcaaaaggctctccca

SEQ ID NO: 66381 - DNA, 22 bp, synthetic construct
  misc_feature 1..22: note = chemically synthesized
  source 1..22: mol_type = other DNA
tcccaccatcacacagaatgta

SEQ ID NO: 66382 - DNA, 22 bp, synthetic construct
  misc_feature 1..22: note = chemically synthesized
  source 1..22: mol_type = other DNA
ccaccatcacacagaatgtact

SEQ ID NO: 66383 - DNA, 22 bp, synthetic construct
  misc_feature 1..22: note = chemically synthesized
  source 1..22: mol_type = other DNA
gggttctgttagaaaattaatc

SEQ ID NO: 66384 - DNA, 22 bp, synthetic construct
  misc_feature 1..22: note = chemically synthesized
  source 1..22: mol_type = other DNA
tgttagaaaattaatctcactt

SEQ ID NO: 66385 - DNA, 22 bp, synthetic construct
  misc_feature 1..22: note = chemically synthesized
  source 1..22: mol_type = other DNA
ttagaaaattaatctcacttgt

SEQ ID NO: 66386 - DNA, 22 bp, synthetic construct
  misc_feature 1..22: note = chemically synthesized
  source 1..22: mol_type = other DNA
gaaaattaatctcacttgtgga

SEQ ID NO: 66387 - DNA, 22 bp, synthetic construct
  misc_feature 1..22: note = chemically synthesized
  source 1..22: mol_type = other DNA
atctcacttgtggaaaaaaaat

SEQ ID NO: 66388 - DNA, 22 bp, synthetic construct
  misc_feature 1..22: note = chemically synthesized
  source 1..22: mol_type = other DNA
acttgtggaaaaaaaatgccct

SEQ ID NO: 66389 - DNA, 22 bp, synthetic construct
  misc_feature 1..22: note = chemically synthesized
  source 1..22: mol_type = other DNA
gtggaaaaaaaatgcccttaaa

SEQ ID NO: 66390 - DNA, 22 bp, synthetic construct
  misc_feature 1..22: note = chemically synthesized
  source 1..22: mol_type = other DNA
tggaaaaaaaatgcccttaaaa

SEQ ID NO: 66391 - DNA, 22 bp, synthetic construct
  misc_feature 1..22: note = chemically synthesized
  source 1..22: mol_type = other DNA
aaaacactggagccctgagttg

SEQ ID NO: 66392 - DNA, 22 bp, synthetic construct
  misc_feature 1..22: note = chemically synthesized
  source 1..22: mol_type = other DNA
aaacactggagccctgagttgt

SEQ ID NO: 66393 - DNA, 22 bp, synthetic construct
  misc_feature 1..22: note = chemically synthesized
  source 1..22: mol_type = other DNA
gagccctgagttgtatgtgctg

SEQ ID NO: 66394 - DNA, 22 bp, synthetic construct
  misc_feature 1..22: note = chemically synthesized
  source 1..22: mol_type = other DNA
agttgtatgtgctggagcatgt

SEQ ID NO: 66395 - DNA, 22 bp, synthetic construct
  misc_feature 1..22: note = chemically synthesized
  source 1..22: mol_type = other DNA
tatgtgctggagcatgtgggga

SEQ ID NO: 66396 - DNA, 22 bp, synthetic construct
  misc_feature 1..22: note = chemically synthesized
  source 1..22: mol_type = other DNA
gagcatgtggggaaaagaaaga

SEQ ID NO: 66397 - DNA, 22 bp, synthetic construct
  misc_feature 1..22: note = chemically synthesized
  source 1..22: mol_type = other DNA
acgagccatggaaatggagaag

SEQ ID NO: 66398 - DNA, 22 bp, synthetic construct
  misc_feature 1..22: note = chemically synthesized
  source 1..22: mol_type = other DNA
tttctgctgcagttgctcttag

SEQ ID NO: 66399 - DNA, 22 bp, synthetic construct
  misc_feature 1..22: note = chemically synthesized
  source 1..22: mol_type = other DNA
ctgctgcagttgctcttagcca

SEQ ID NO: 66400 - DNA, 22 bp, synthetic construct
  misc_feature 1..22: note = chemically synthesized
  source 1..22: mol_type = other DNA
tgctgcagttgctcttagccag

SEQ ID NO: 66401 - DNA, 22 bp, synthetic construct
  misc_feature 1..22: note = chemically synthesized
  source 1..22: mol_type = other DNA
ctgcagttgctcttagccaggg

SEQ ID NO: 66402 - DNA, 22 bp, synthetic construct
  misc_feature 1..22: note = chemically synthesized
  source 1..22: mol_type = other DNA
cagttgctcttagccaggggcc

SEQ ID NO: 66403 - DNA, 22 bp, synthetic construct
  misc_feature 1..22: note = chemically synthesized
  source 1..22: mol_type = other DNA
ctcttagccaggggccagcgtg

SEQ ID NO: 66404 - DNA, 22 bp, synthetic construct
  misc_feature 1..22: note = chemically synthesized
  source 1..22: mol_type = other DNA
ttagccaggggccagcgtggac

SEQ ID NO: 66405 - DNA, 22 bp, synthetic construct
  misc_feature 1..22: note = chemically synthesized
  source 1..22: mol_type = other DNA
agccaggggccagcgtggacag

SEQ ID NO: 66406 - DNA, 22 bp, synthetic construct
  misc_feature 1..22: note = chemically synthesized
  source 1..22: mol_type = other DNA
gccaggggccagcgtggacagc

SEQ ID NO: 66407 - DNA, 22 bp, synthetic construct
  misc_feature 1..22: note = chemically synthesized
  source 1..22: mol_type = other DNA
tcaccttgatccctgtcctcct

SEQ ID NO: 66408 - DNA, 22 bp, synthetic construct
  misc_feature 1..22: note = chemically synthesized
  source 1..22: mol_type = other DNA
gatccctgtcctccttcacctg

SEQ ID NO: 66409 - DNA, 22 bp, synthetic construct
  misc_feature 1..22: note = chemically synthesized
  source 1..22: mol_type = other DNA
atccctgtcctccttcacctgc

SEQ ID NO: 66410 - DNA, 22 bp, synthetic construct
  misc_feature 1..22: note = chemically synthesized
  source 1..22: mol_type = other DNA
tcctccttcacctgccagcttg

SEQ ID NO: 66411 - DNA, 22 bp, synthetic construct
  misc_feature 1..22: note = chemically synthesized
  source 1..22: mol_type = other DNA
cttcacctgccagcttgtgggc

SEQ ID NO: 66412 - DNA, 22 bp, synthetic construct
  misc_feature 1..22: note = chemically synthesized
  source 1..22: mol_type = other DNA
cacctgccagcttgtgggctgg

SEQ ID NO: 66413 - DNA, 22 bp, synthetic construct
  misc_feature 1..22: note = chemically synthesized
  source 1..22: mol_type = other DNA
acctgccagcttgtgggctggg

SEQ ID NO: 66414 - DNA, 22 bp, synthetic construct
  misc_feature 1..22: note = chemically synthesized
  source 1..22: mol_type = other DNA
ccagcttgtgggctgggtggct

SEQ ID NO: 66415 - DNA, 22 bp, synthetic construct
  misc_feature 1..22: note = chemically synthesized
  source 1..22: mol_type = other DNA
gtgggctgggtggcttaagttc

SEQ ID NO: 66416 - DNA, 22 bp, synthetic construct
  misc_feature 1..22: note = chemically synthesized
  source 1..22: mol_type = other DNA
tgggctgggtggcttaagttct

SEQ ID NO: 66417 - DNA, 22 bp, synthetic construct
  misc_feature 1..22: note = chemically synthesized
  source 1..22: mol_type = other DNA
ggtggcttaagttctagccctg

SEQ ID NO: 66418 - DNA, 22 bp, synthetic construct
  misc_feature 1..22: note = chemically synthesized
  source 1..22: mol_type = other DNA
aagttctagccctgggtgaccc

SEQ ID NO: 66419 - DNA, 22 bp, synthetic construct
  misc_feature 1..22: note = chemically synthesized
  source 1..22: mol_type = other DNA
agttctagccctgggtgaccct

SEQ ID NO: 66420 - DNA, 22 bp, synthetic construct
  misc_feature 1..22: note = chemically synthesized
  source 1..22: mol_type = other DNA
tagccctgggtgaccctctgac

SEQ ID NO: 66421 - DNA, 22 bp, synthetic construct
  misc_feature 1..22: note = chemically synthesized
  source 1..22: mol_type = other DNA
gccctgggtgaccctctgactc

SEQ ID NO: 66422 - DNA, 22 bp, synthetic construct
  misc_feature 1..22: note = chemically synthesized
  source 1..22: mol_type = other DNA
ggtgaccctctgactcctgaga

SEQ ID NO: 66423 - DNA, 22 bp, synthetic construct
  misc_feature 1..22: note = chemically synthesized
  source 1..22: mol_type = other DNA
tgactcctgagagcatgtgtat

SEQ ID NO: 66424 - DNA, 22 bp, synthetic construct
  misc_feature 1..22: note = chemically synthesized
  source 1..22: mol_type = other DNA
actcctgagagcatgtgtatgt

SEQ ID NO: 66425 - DNA, 22 bp, synthetic construct
  misc_feature 1..22: note = chemically synthesized
  source 1..22: mol_type = other DNA
ctgagagcatgtgtatgtgctt

SEQ ID NO: 66426 - DNA, 22 bp, synthetic construct
  misc_feature 1..22: note = chemically synthesized
  source 1..22: mol_type = other DNA
agagcatgtgtatgtgcttgtg

SEQ ID NO: 66427 - DNA, 22 bp, synthetic construct
  misc_feature 1..22: note = chemically synthesized
  source 1..22: mol_type = other DNA
gtggtgggtggggtgtagtgcg

SEQ ID NO: 66428 - DNA, 22 bp, synthetic construct
  misc_feature 1..22: note = chemically synthesized
  source 1..22: mol_type = other DNA
tggtgggtggggtgtagtgcgt

SEQ ID NO: 66429 - DNA, 22 bp, synthetic construct
  misc_feature 1..22: note = chemically synthesized
  source 1..22: mol_type = other DNA
aagccgcaaagcagaggtgcga

SEQ ID NO: 66430 - DNA, 22 bp, synthetic construct
  misc_feature 1..22: note = chemically synthesized
  source 1..22: mol_type = other DNA
gtgtaggtcgtgggagacagag

SEQ ID NO: 66431 - DNA, 22 bp, synthetic construct
  misc_feature 1..22: note = chemically synthesized
  source 1..22: mol_type = other DNA
ggttctgaatgtttttactttt

SEQ ID NO: 66432 - DNA, 22 bp, synthetic construct
  misc_feature 1..22: note = chemically synthesized
  source 1..22: mol_type = other DNA
tgaatgtttttacttttcctag

SEQ ID NO: 66433 - DNA, 22 bp, synthetic construct
  misc_feature 1..22: note = chemically synthesized
  source 1..22: mol_type = other DNA
aatgtttttacttttcctagga

SEQ ID NO: 66434 - DNA, 22 bp, synthetic construct
  misc_feature 1..22: note = chemically synthesized
  source 1..22: mol_type = other DNA
ttacttttcctaggatccctgc

SEQ ID NO: 66435 - DNA, 22 bp, synthetic construct
  misc_feature 1..22: note = chemically synthesized
  source 1..22: mol_type = other DNA
tacttttcctaggatccctgct

SEQ ID NO: 66436 - DNA, 22 bp, synthetic construct
  misc_feature 1..22: note = chemically synthesized
  source 1..22: mol_type = other DNA
acttttcctaggatccctgctt

SEQ ID NO: 66437 - DNA, 22 bp, synthetic construct
  misc_feature 1..22: note = chemically synthesized
  source 1..22: mol_type = other DNA
cttttcctaggatccctgcttc

SEQ ID NO: 66438 - DNA, 22 bp, synthetic construct
  misc_feature 1..22: note = chemically synthesized
  source 1..22: mol_type = other DNA
ttcctaggatccctgcttcatt

SEQ ID NO: 66439 - DNA, 22 bp, synthetic construct
  misc_feature 1..22: note = chemically synthesized
  source 1..22: mol_type = other DNA
tcctaggatccctgcttcattt

SEQ ID NO: 66440 - DNA, 22 bp, synthetic construct
  misc_feature 1..22: note = chemically synthesized
  source 1..22: mol_type = other DNA
cctaggatccctgcttcatttt

SEQ ID NO: 66441 - DNA, 22 bp, synthetic construct
  misc_feature 1..22: note = chemically synthesized
  source 1..22: mol_type = other DNA
ctaggatccctgcttcattttt

SEQ ID NO: 66442 - DNA, 22 bp, synthetic construct
  misc_feature 1..22: note = chemically synthesized
  source 1..22: mol_type = other DNA
ggatccctgcttcatttttgtt

SEQ ID NO: 66443 - DNA, 22 bp, synthetic construct
  misc_feature 1..22: note = chemically synthesized
  source 1..22: mol_type = other DNA
cttcatttttgttttcaaggag

SEQ ID NO: 66444 - DNA, 22 bp, synthetic construct
  misc_feature 1..22: note = chemically synthesized
  source 1..22: mol_type = other DNA
catttttgttttcaaggagtta

SEQ ID NO: 66445 - DNA, 22 bp, synthetic construct
  misc_feature 1..22: note = chemically synthesized
  source 1..22: mol_type = other DNA
atttttgttttcaaggagttac

SEQ ID NO: 66446 - DNA, 22 bp, synthetic construct
  misc_feature 1..22: note = chemically synthesized
  source 1..22: mol_type = other DNA
ttgttttcaaggagttacttgt

SEQ ID NO: 66447 - DNA, 22 bp, synthetic construct
  misc_feature 1..22: note = chemically synthesized
  source 1..22: mol_type = other DNA
tgttttcaaggagttacttgtt

SEQ ID NO: 66448 - DNA, 22 bp, synthetic construct
  misc_feature 1..22: note = chemically synthesized
  source 1..22: mol_type = other DNA
gttttcaaggagttacttgttt

SEQ ID NO: 66449 - DNA, 22 bp, synthetic construct
  misc_feature 1..22: note = chemically synthesized
  source 1..22: mol_type = other DNA
ttttcaaggagttacttgtttc

SEQ ID NO: 66450 - DNA, 22 bp, synthetic construct
  misc_feature 1..22: note = chemically synthesized
  source 1..22: mol_type = other DNA
tcaaggagttacttgtttctct

SEQ ID NO: 66451 - DNA, 22 bp, synthetic construct
  misc_feature 1..22: note = chemically synthesized
  source 1..22: mol_type = other DNA
caaggagttacttgtttctctc

SEQ ID NO: 66452 - DNA, 22 bp, synthetic construct
  misc_feature 1..22: note = chemically synthesized
  source 1..22: mol_type = other DNA
aaggagttacttgtttctctct

SEQ ID NO: 66453 - DNA, 22 bp, synthetic construct
  misc_feature 1..22: note = chemically synthesized
  source 1..22: mol_type = other DNA
cttgtttctctcttcttgcctt

SEQ ID NO: 66454 - DNA, 22 bp, synthetic construct
  misc_feature 1..22: note = chemically synthesized
  source 1..22: mol_type = other DNA
gtttctctcttcttgccttcca

SEQ ID NO: 66455 - DNA, 22 bp, synthetic construct
  misc_feature 1..22: note = chemically synthesized
  source 1..22: mol_type = other DNA
tttctctcttcttgccttccag

SEQ ID NO: 66456 - DNA, 22 bp, synthetic construct
  misc_feature 1..22: note = chemically synthesized
  source 1..22: mol_type = other DNA
ctctcttcttgccttccagcat

SEQ ID NO: 66457 - DNA, 22 bp, synthetic construct
  misc_feature 1..22: note = chemically synthesized
  source 1..22: mol_type = other DNA
tctcttcttgccttccagcatg

SEQ ID NO: 66458 - DNA, 22 bp, synthetic construct
  misc_feature 1..22: note = chemically synthesized
  source 1..22: mol_type = other DNA
tcttcttgccttccagcatgtc

SEQ ID NO: 66459 - DNA, 22 bp, synthetic construct
  misc_feature 1..22: note = chemically synthesized
  source 1..22: mol_type = other DNA
ttcttgccttccagcatgtccc

SEQ ID NO: 66460 - DNA, 22 bp, synthetic construct
  misc_feature 1..22: note = chemically synthesized
  source 1..22: mol_type = other DNA
cttgccttccagcatgtcccaa

SEQ ID NO: 66461 - DNA, 22 bp, synthetic construct
  misc_feature 1..22: note = chemically synthesized
  source 1..22: mol_type = other DNA
ttgccttccagcatgtcccaag

SEQ ID NO: 66462 - DNA, 22 bp, synthetic construct
  misc_feature 1..22: note = chemically synthesized
  source 1..22: mol_type = other DNA
gccttccagcatgtcccaagca

SEQ ID NO: 66463 - DNA, 22 bp, synthetic construct
  misc_feature 1..22: note = chemically synthesized
  source 1..22: mol_type = other DNA
ccttccagcatgtcccaagcag

SEQ ID NO: 66464 - DNA, 22 bp, synthetic construct
  misc_feature 1..22: note = chemically synthesized
  source 1..22: mol_type = other DNA
ccagcatgtcccaagcagagat

SEQ ID NO: 66465 - DNA, 22 bp, synthetic construct
  misc_feature 1..22: note = chemically synthesized
  source 1..22: mol_type = other DNA
cagcatgtcccaagcagagatg

SEQ ID NO: 66466 - DNA, 22 bp, synthetic construct
  misc_feature 1..22: note = chemically synthesized
  source 1..22: mol_type = other DNA
ggtttgggaatggggtgctggg

SEQ ID NO: 66467 - DNA, 22 bp, synthetic construct
  misc_feature 1..22: note = chemically synthesized
  source 1..22: mol_type = other DNA
gggaatggggtgctgggagggg

SEQ ID NO: 66468 - DNA, 22 bp, synthetic construct
  misc_feature 1..22: note = chemically synthesized
  source 1..22: mol_type = other DNA
ggaatggggtgctgggagggga

SEQ ID NO: 66469 - DNA, 22 bp, synthetic construct
  misc_feature 1..22: note = chemically synthesized
  source 1..22: mol_type = other DNA
ggaggggaggggatatcccatt

SEQ ID NO: 66470 - DNA, 22 bp, synthetic construct
  misc_feature 1..22: note = chemically synthesized
  source 1..22: mol_type = other DNA
cagggcccttcccagttttggg

SEQ ID NO: 66471 - DNA, 22 bp, synthetic construct
  misc_feature 1..22: note = chemically synthesized
  source 1..22: mol_type = other DNA
cccagttttggggctgggaagc

SEQ ID NO: 66472 - DNA, 22 bp, synthetic construct
  misc_feature 1..22: note = chemically synthesized
  source 1..22: mol_type = other DNA
ccagttttggggctgggaagcc

SEQ ID NO: 66473 - DNA, 22 bp, synthetic construct
  misc_feature 1..22: note = chemically synthesized
  source 1..22: mol_type = other DNA
tggggctgggaagcctcaatct

SEQ ID NO: 66474 - DNA, 22 bp, synthetic construct
  misc_feature 1..22: note = chemically synthesized
  source 1..22: mol_type = other DNA
ggggctgggaagcctcaatctc

SEQ ID NO: 66475 - DNA, 22 bp, synthetic construct
  misc_feature 1..22: note = chemically synthesized
  source 1..22: mol_type = other DNA
gggctgggaagcctcaatctcc

SEQ ID NO: 66476 - DNA, 22 bp, synthetic construct
  misc_feature 1..22: note = chemically synthesized
  source 1..22: mol_type = other DNA
ggaagcctcaatctccttgagc

SEQ ID NO: 66477 - DNA, 22 bp, synthetic construct
  misc_feature 1..22: note = chemically synthesized
  source 1..22: mol_type = other DNA
aatctccttgagcacagcaggg

SEQ ID NO: 66478 - DNA, 22 bp, synthetic construct
  misc_feature 1..22: note = chemically synthesized
  source 1..22: mol_type = other DNA
cttgagcacagcagggctttgc

SEQ ID NO: 66479 - DNA, 22 bp, synthetic construct
  misc_feature 1..22: note = chemically synthesized
  source 1..22: mol_type = other DNA
gagcacagcagggctttgcctt

SEQ ID NO: 66480 - DNA, 22 bp, synthetic construct
  misc_feature 1..22: note = chemically synthesized
  source 1..22: mol_type = other DNA
agcacagcagggctttgccttc

SEQ ID NO: 66481 - DNA, 22 bp, synthetic construct
  misc_feature 1..22: note = chemically synthesized
  source 1..22: mol_type = other DNA
tgccttctttcttccctgagct

SEQ ID NO: 66482 - DNA, 22 bp, synthetic construct
  misc_feature 1..22: note = chemically synthesized
  source 1..22: mol_type = other DNA
gccttctttcttccctgagctg

SEQ ID NO: 66483 - DNA, 22 bp, synthetic construct
  misc_feature 1..22: note = chemically synthesized
  source 1..22: mol_type = other DNA
ccttctttcttccctgagctgc

SEQ ID NO: 66484 - DNA, 22 bp, synthetic construct
  misc_feature 1..22: note = chemically synthesized
  source 1..22: mol_type = other DNA
ctttcttccctgagctgcggcc

SEQ ID NO: 66485 - DNA, 22 bp, synthetic construct
  misc_feature 1..22: note = chemically synthesized
  source 1..22: mol_type = other DNA
tttcttccctgagctgcggcca

SEQ ID NO: 66486 - DNA, 22 bp, synthetic construct
  misc_feature 1..22: note = chemically synthesized
  source 1..22: mol_type = other DNA
tcttccctgagctgcggccacc

SEQ ID NO: 66487 - DNA, 22 bp, synthetic construct
  misc_feature 1..22: note = chemically synthesized
  source 1..22: mol_type = other DNA
cttccctgagctgcggccacca

SEQ ID NO: 66488 - DNA, 22 bp, synthetic construct
  misc_feature 1..22: note = chemically synthesized
  source 1..22: mol_type = other DNA
ttccctgagctgcggccaccac

SEQ ID NO: 66489 - DNA, 22 bp, synthetic construct
  misc_feature 1..22: note = chemically synthesized
  source 1..22: mol_type = other DNA
ccctgagctgcggccaccactg

SEQ ID NO: 66490 - DNA, 22 bp, synthetic construct
  misc_feature 1..22: note = chemically synthesized
  source 1..22: mol_type = other DNA
cctgagctgcggccaccactgg

SEQ ID NO: 66491 - DNA, 22 bp, synthetic construct
  misc_feature 1..22: note = chemically synthesized
  source 1..22: mol_type = other DNA
agctgcggccaccactgggctg

SEQ ID NO: 66492 - DNA, 22 bp, synthetic construct
  misc_feature 1..22: note = chemically synthesized
  source 1..22: mol_type = other DNA
cggccaccactgggctgtacca

SEQ ID NO: 66493 - DNA, 22 bp, synthetic construct
  misc_feature 1..22: note = chemically synthesized
  source 1..22: mol_type = other DNA
ggctgtaccaggatctagtgca

SEQ ID NO: 66494 - DNA, 22 bp, synthetic construct
  misc_feature 1..22: note = chemically synthesized
  source 1..22: mol_type = other DNA
taccaggatctagtgcaacttg

SEQ ID NO: 66495 - DNA, 22 bp, synthetic construct
  misc_feature 1..22: note = chemically synthesized
  source 1..22: mol_type = other DNA
gtgcaacttgggtgacaaggtg

SEQ ID NO: 66496 - DNA, 22 bp, synthetic construct
  misc_feature 1..22: note = chemically synthesized
  source 1..22: mol_type = other DNA
gggtgacaaggtgtgggtggct

SEQ ID NO: 66497 - DNA, 22 bp, synthetic construct
  misc_feature 1..22: note = chemically synthesized
  source 1..22: mol_type = other DNA
ggtgacaaggtgtgggtggctg

SEQ ID NO: 66498 - DNA, 22 bp, synthetic construct
  misc_feature 1..22: note = chemically synthesized
  source 1..22: mol_type = other DNA
caggtgttctccctgcatctga

SEQ ID NO: 66499 - DNA, 22 bp, synthetic construct
  misc_feature 1..22: note = chemically synthesized
  source 1..22: mol_type = other DNA
tccctgcatctgaggcagggag

SEQ ID NO: 66500 - DNA, 22 bp, synthetic construct
  misc_feature 1..22: note = chemically synthesized
  source 1..22: mol_type = other DNA
cctgcatctgaggcagggaggc

SEQ ID NO: 66501 - DNA, 22 bp, synthetic construct
  misc_feature 1..22: note = chemically synthesized
  source 1..22: mol_type = other DNA
catctgaggcagggaggcagct

SEQ ID NO: 66502 - DNA, 22 bp, synthetic construct
  misc_feature 1..22: note = chemically synthesized
  source 1..22: mol_type = other DNA
aggcagggaggcagctgggggc

SEQ ID NO: 66503 - DNA, 22 bp, synthetic construct
  misc_feature 1..22: note = chemically synthesized
  source 1..22: mol_type = other DNA
ggggcttccagccagcctgtaa

SEQ ID NO: 66504 - DNA, 22 bp, synthetic construct
  misc_feature 1..22: note = chemically synthesized
  source 1..22: mol_type = other DNA
ccagccagcctgtaatgcccct

SEQ ID NO: 66505 - DNA, 22 bp, synthetic construct
  misc_feature 1..22: note = chemically synthesized
  source 1..22: mol_type = other DNA
cagccagcctgtaatgcccctc

SEQ ID NO: 66506 - DNA, 22 bp, synthetic construct
  misc_feature 1..22: note = chemically synthesized
  source 1..22: mol_type = other DNA
taatgcccctcccaggtctagc

SEQ ID NO: 66507 - DNA, 22 bp, synthetic construct
  misc_feature 1..22: note = chemically synthesized
  source 1..22: mol_type = other DNA
ccaggtctagcttcctagcctt

SEQ ID NO: 66508 - DNA, 22 bp, synthetic construct
  misc_feature 1..22: note = chemically synthesized
  source 1..22: mol_type = other DNA
gcttcctagccttatttttaag

SEQ ID NO: 66509 - DNA, 22 bp, synthetic construct
  misc_feature 1..22: note = chemically synthesized
  source 1..22: mol_type = other DNA
cctagccttatttttaagccct

SEQ ID NO: 66510 - DNA, 22 bp, synthetic construct
  misc_feature 1..22: note = chemically synthesized
  source 1..22: mol_type = other DNA
ctagccttatttttaagccctt

SEQ ID NO: 66511 - DNA, 22 bp, synthetic construct
  misc_feature 1..22: note = chemically synthesized
  source 1..22: mol_type = other DNA
gccttatttttaagccctttta

SEQ ID NO: 66512 - DNA, 22 bp, synthetic construct
  misc_feature 1..22: note = chemically synthesized
  source 1..22: mol_type = other DNA
atttttaagcccttttagtgga

SEQ ID NO: 66513 - DNA, 22 bp, synthetic construct
  misc_feature 1..22: note = chemically synthesized
  source 1..22: mol_type = other DNA
tttttaagcccttttagtggag

SEQ ID NO: 66514 - DNA, 22 bp, synthetic construct
  misc_feature 1..22: note = chemically synthesized
  source 1..22: mol_type = other DNA
ttaagcccttttagtggagcaa

SEQ ID NO: 66515 - DNA, 22 bp, synthetic construct
  misc_feature 1..22: note = chemically synthesized
  source 1..22: mol_type = other DNA
taagcccttttagtggagcaaa

SEQ ID NO: 66516 - DNA, 22 bp, synthetic construct
  misc_feature 1..22: note = chemically synthesized
  source 1..22: mol_type = other DNA
aagcccttttagtggagcaaaa

SEQ ID NO: 66517 - DNA, 22 bp, synthetic construct
  misc_feature 1..22: note = chemically synthesized
  source 1..22: mol_type = other DNA
agcccttttagtggagcaaaaa

SEQ ID NO: 66518 - DNA, 22 bp, synthetic construct
  misc_feature 1..22: note = chemically synthesized
  source 1..22: mol_type = other DNA
ttagtggagcaaaaactattta

SEQ ID NO: 66519 - DNA, 22 bp, synthetic construct
  misc_feature 1..22: note = chemically synthesized
  source 1..22: mol_type = other DNA
tagtggagcaaaaactatttag

SEQ ID NO: 66520 - DNA, 22 bp, synthetic construct
  misc_feature 1..22: note = chemically synthesized
  source 1..22: mol_type = other DNA
agtggagcaaaaactatttaga

SEQ ID NO: 66521 - DNA, 22 bp, synthetic construct
  misc_feature 1..22: note = chemically synthesized
  source 1..22: mol_type = other DNA
gtggagcaaaaactatttagaa

SEQ ID NO: 66522 - DNA, 22 bp, synthetic construct
  misc_feature 1..22: note = chemically synthesized
  source 1..22: mol_type = other DNA
tttagaactatgagttcaaaaa

SEQ ID NO: 66523 - DNA, 22 bp, synthetic construct
  misc_feature 1..22: note = chemically synthesized
  source 1..22: mol_type = other DNA
agaactatgagttcaaaaatag

SEQ ID NO: 66524 - DNA, 22 bp, synthetic construct
  misc_feature 1..22: note = chemically synthesized
  source 1..22: mol_type = other DNA
gaactatgagttcaaaaatagg

SEQ ID NO: 66525 - DNA, 22 bp, synthetic construct
  misc_feature 1..22: note = chemically synthesized
  source 1..22: mol_type = other DNA
tgagttcaaaaataggattatt

SEQ ID NO: 66526 - DNA, 22 bp, synthetic construct
  misc_feature 1..22: note = chemically synthesized
  source 1..22: mol_type = other DNA
aaaaataggattattcaagcgg

SEQ ID NO: 66527 - DNA, 22 bp, synthetic construct
  misc_feature 1..22: note = chemically synthesized
  source 1..22: mol_type = other DNA
ttcaagcggaggtacttcacac

SEQ ID NO: 66528 - DNA, 22 bp, synthetic construct
  misc_feature 1..22: note = chemically synthesized
  source 1..22: mol_type = other DNA
aagcggaggtacttcacactgt

SEQ ID NO: 66529 - DNA, 22 bp, synthetic construct
  misc_feature 1..22: note = chemically synthesized
  source 1..22: mol_type = other DNA
cacactgttctttctcttggga

SEQ ID NO: 66530 - DNA, 22 bp, synthetic construct
  misc_feature 1..22: note = chemically synthesized
  source 1..22: mol_type = other DNA
acactgttctttctcttgggac

SEQ ID NO: 66531 - DNA, 22 bp, synthetic construct
  misc_feature 1..22: note = chemically synthesized
  source 1..22: mol_type = other DNA
ttctttctcttgggacagagat

SEQ ID NO: 66532 - DNA, 22 bp, synthetic construct
  misc_feature 1..22: note = chemically synthesized
  source 1..22: mol_type = other DNA
tttctcttgggacagagatggg

SEQ ID NO: 66533 - DNA, 22 bp, synthetic construct
  misc_feature 1..22: note = chemically synthesized
  source 1..22: mol_type = other DNA
tctcttgggacagagatggggg

SEQ ID NO: 66534 - DNA, 22 bp, synthetic construct
  misc_feature 1..22: note = chemically synthesized
  source 1..22: mol_type = other DNA
ctcttgggacagagatgggggt

SEQ ID NO: 66535 - DNA, 22 bp, synthetic construct
  misc_feature 1..22: note = chemically synthesized
  source 1..22: mol_type = other DNA
tcttgggacagagatgggggtg

SEQ ID NO: 66536 - DNA, 22 bp, synthetic construct
  misc_feature 1..22: note = chemically synthesized
  source 1..22: mol_type = other DNA
ttgggacagagatgggggtgca

SEQ ID NO: 66537 - DNA, 22 bp, synthetic construct
  misc_feature 1..22: note = chemically synthesized
  source 1..22: mol_type = other DNA
gggacagagatgggggtgcagg

SEQ ID NO: 66538 - DNA, 22 bp, synthetic construct
  misc_feature 1..22: note = chemically synthesized
  source 1..22: mol_type = other DNA
ggacagagatgggggtgcaggt

SEQ ID NO: 66539 - DNA, 22 bp, synthetic construct
  misc_feature 1..22: note = chemically synthesized
  source 1..22: mol_type = other DNA
ctaaaacaaattgagagaggaa

SEQ ID NO: 66540 - DNA, 22 bp, synthetic construct
  misc_feature 1..22: note = chemically synthesized
  source 1..22: mol_type = other DNA
aaacaaattgagagaggaagga

SEQ ID NO: 66541 - DNA, 22 bp, synthetic construct
  misc_feature 1..22: note = chemically synthesized
  source 1..22: mol_type = other DNA
agagaggaaggaagaaagggac

SEQ ID NO: 66542 - DNA, 22 bp, synthetic construct
  misc_feature 1..22: note = chemically synthesized
  source 1..22: mol_type = other DNA
gtaattgagaccaattcaccag

SEQ ID NO: 66543 - DNA, 22 bp, synthetic construct
  misc_feature 1..22: note = chemically synthesized
  source 1..22: mol_type = other DNA
agaccaattcaccagaagactt

SEQ ID NO: 66544 - DNA, 22 bp, synthetic construct
  misc_feature 1..22: note = chemically synthesized
  source 1..22: mol_type = other DNA
accagaagacttaaggaaattt

SEQ ID NO: 66545 - DNA, 22 bp, synthetic construct
  misc_feature 1..22: note = chemically synthesized
  source 1..22: mol_type = other DNA
aaggaaatttgacatccgctgt

SEQ ID NO: 66546 - DNA, 22 bp, synthetic construct
  misc_feature 1..22: note = chemically synthesized
  source 1..22: mol_type = other DNA
aggaaatttgacatccgctgta

SEQ ID NO: 66547 - DNA, 22 bp, synthetic construct
  misc_feature 1..22: note = chemically synthesized
  source 1..22: mol_type = other DNA
gacatccgctgtagctctttta

SEQ ID NO: 66548 - DNA, 22 bp, synthetic construct
  misc_feature 1..22: note = chemically synthesized
  source 1..22: mol_type = other DNA
acatccgctgtagctcttttaa

SEQ ID NO: 66549 - DNA, 22 bp, synthetic construct
  misc_feature 1..22: note = chemically synthesized
  source 1..22: mol_type = other DNA
tagctcttttaactgtgtaatt

SEQ ID NO: 66550 - DNA, 22 bp, synthetic construct
  misc_feature 1..22: note = chemically synthesized
  source 1..22: mol_type = other DNA
ttttaactgtgtaattacacag

SEQ ID NO: 66551 - DNA, 22 bp, synthetic construct
  misc_feature 1..22: note = chemically synthesized
  source 1..22: mol_type = other DNA
ttaactgtgtaattacacagca

SEQ ID NO: 66552 - DNA, 22 bp, synthetic construct
  misc_feature 1..22: note = chemically synthesized
  source 1..22: mol_type = other DNA
taactgtgtaattacacagcat

SEQ ID NO: 66553 - DNA, 22 bp, synthetic construct
  misc_feature 1..22: note = chemically synthesized
  source 1..22: mol_type = other DNA
aactgtgtaattacacagcatt

SEQ ID NO: 66554 - DNA, 22 bp, synthetic construct
  misc_feature 1..22: note = chemically synthesized
  source 1..22: mol_type = other DNA
actgtgtaattacacagcattt

SEQ ID NO: 66555 - DNA, 22 bp, synthetic construct
  misc_feature 1..22: note = chemically synthesized
  source 1..22: mol_type = other DNA
tgtaattacacagcatttggaa

SEQ ID NO: 66556 - DNA, 22 bp, synthetic construct
  misc_feature 1..22: note = chemically synthesized
  source 1..22: mol_type = other DNA
cacagcatttggaaagtgaatg

SEQ ID NO: 66557 - DNA, 22 bp, synthetic construct
  misc_feature 1..22: note = chemically synthesized
  source 1..22: mol_type = other DNA
ggaaagtgaatgattaacctga

SEQ ID NO: 66558 - DNA, 22 bp, synthetic construct
  misc_feature 1..22: note = chemically synthesized
  source 1..22: mol_type = other DNA
gaaagtgaatgattaacctgat

SEQ ID NO: 66559 - DNA, 22 bp, synthetic construct
  misc_feature 1..22: note = chemically synthesized
  source 1..22: mol_type = other DNA
acctgattgtccataacaacca

SEQ ID NO: 66560 - DNA, 22 bp, synthetic construct
  misc_feature 1..22: note = chemically synthesized
  source 1..22: mol_type = other DNA
attgtccataacaaccattgag

SEQ ID NO: 66561 - DNA, 22 bp, synthetic construct
  misc_feature 1..22: note = chemically synthesized
  source 1..22: mol_type = other DNA
tccataacaaccattgagtaaa

SEQ ID NO: 66562 - DNA, 22 bp, synthetic construct
  misc_feature 1..22: note = chemically synthesized
  source 1..22: mol_type = other DNA
agtaaatacactattacagatt

SEQ ID NO: 66563 - DNA, 22 bp, synthetic construct
  misc_feature 1..22: note = chemically synthesized
  source 1..22: mol_type = other DNA
ttacagattgccaaaatagtac

SEQ ID NO: 66564 - DNA, 22 bp, synthetic construct
  misc_feature 1..22: note = chemically synthesized
  source 1..22: mol_type = other DNA
cagattgccaaaatagtacagt

SEQ ID NO: 66565 - DNA, 22 bp, synthetic construct
  misc_feature 1..22: note = chemically synthesized
  source 1..22: mol_type = other DNA
ccaaaatagtacagtgaagcga

SEQ ID NO: 66566 - DNA, 22 bp, synthetic construct
  misc_feature 1..22: note = chemically synthesized
  source 1..22: mol_type = other DNA
tcaaggggctgtaatcctctcc

SEQ ID NO: 66567 - DNA, 22 bp, synthetic construct
  misc_feature 1..22: note = chemically synthesized
  source 1..22: mol_type = other DNA
caaggggctgtaatcctctcct

SEQ ID NO: 66568 - DNA, 22 bp, synthetic construct
  misc_feature 1..22: note = chemically synthesized
  source 1..22: mol_type = other DNA
aaggggctgtaatcctctcctg

SEQ ID NO: 66569 - DNA, 22 bp, synthetic construct
  misc_feature 1..22: note = chemically synthesized
  source 1..22: mol_type = other DNA
taatcctctcctgggtcaaggc

SEQ ID NO: 66570 - DNA, 22 bp, synthetic construct
  misc_feature 1..22: note = chemically synthesized
  source 1..22: mol_type = other DNA
tcctgggtcaaggctgacccag

SEQ ID NO: 66571 - DNA, 22 bp, synthetic construct
  misc_feature 1..22: note = chemically synthesized
  source 1..22: mol_type = other DNA
ctgggtcaaggctgacccagag

SEQ ID NO: 66572 - DNA, 22 bp, synthetic construct
  misc_feature 1..22: note = chemically synthesized
  source 1..22: mol_type = other DNA
ggtcaaggctgacccagaggct

SEQ ID NO: 66573 - DNA, 22 bp, synthetic construct
  misc_feature 1..22: note = chemically synthesized
  source 1..22: mol_type = other DNA
acccagaggctccttggttagt

SEQ ID NO: 66574 - DNA, 22 bp, synthetic construct
  misc_feature 1..22: note = chemically synthesized
  source 1..22: mol_type = other DNA
cttggttagtgaatcatttact

SEQ ID NO: 66575 - DNA, 22 bp, synthetic construct
  misc_feature 1..22: note = chemically synthesized
  source 1..22: mol_type = other DNA
ggttagtgaatcatttactagg

SEQ ID NO: 66576 - DNA, 22 bp, synthetic construct
  misc_feature 1..22: note = chemically synthesized
  source 1..22: mol_type = other DNA
gttagtgaatcatttactaggg

SEQ ID NO: 66577 - DNA, 22 bp, synthetic construct
  misc_feature 1..22: note = chemically synthesized
  source 1..22: mol_type = other DNA
gtgaatcatttactagggaagg

SEQ ID NO: 66578 - DNA, 22 bp, synthetic construct
  misc_feature 1..22: note = chemically synthesized
  source 1..22: mol_type = other DNA
actagggaaggtttcccctggt

SEQ ID NO: 66579 - DNA, 22 bp, synthetic construct
  misc_feature 1..22: note = chemically synthesized
  source 1..22: mol_type = other DNA
ctagggaaggtttcccctggtc

SEQ ID NO: 66580 - DNA, 22 bp, synthetic construct
  misc_feature 1..22: note = chemically synthesized
  source 1..22: mol_type = other DNA
gggaaggtttcccctggtcact

SEQ ID NO: 66581 - DNA, 22 bp, synthetic construct
  misc_feature 1..22: note = chemically synthesized
  source 1..22: mol_type = other DNA
cccctggtcactgctggctcca

SEQ ID NO: 66582 - DNA, 22 bp, synthetic construct
  misc_feature 1..22: note = chemically synthesized
  source 1..22: mol_type = other DNA
ccctggtcactgctggctccat

SEQ ID NO: 66583 - DNA, 22 bp, synthetic construct
  misc_feature 1..22: note = chemically synthesized
  source 1..22: mol_type = other DNA
gtcactgctggctccatggcct

SEQ ID NO: 66584 - DNA, 22 bp, synthetic construct
  misc_feature 1..22: note = chemically synthesized
  source 1..22: mol_type = other DNA
ctggctccatggcctggtcctt

SEQ ID NO: 66585 - DNA, 22 bp, synthetic construct
  misc_feature 1..22: note = chemically synthesized
  source 1..22: mol_type = other DNA
gctccatggcctggtccttcca

SEQ ID NO: 66586 - DNA, 22 bp, synthetic construct
  misc_feature 1..22: note = chemically synthesized
  source 1..22: mol_type = other DNA
catggcctggtccttccagcca

SEQ ID NO: 66587 - DNA, 22 bp, synthetic construct
  misc_feature 1..22: note = chemically synthesized
  source 1..22: mol_type = other DNA
gtccttccagccaggtcattta

SEQ ID NO: 66588 - DNA, 22 bp, synthetic construct
  misc_feature 1..22: note = chemically synthesized
  source 1..22: mol_type = other DNA
ccagccaggtcatttagaatgg

SEQ ID NO: 66589 - DNA, 22 bp, synthetic construct
  misc_feature 1..22: note = chemically synthesized
  source 1..22: mol_type = other DNA
cagccaggtcatttagaatggc

SEQ ID NO: 66590 - DNA, 22 bp, synthetic construct
  misc_feature 1..22: note = chemically synthesized
  source 1..22: mol_type = other DNA
agaatggctctccaacaggaag

SEQ ID NO: 66591 - DNA, 22 bp, synthetic construct
  misc_feature 1..22: note = chemically synthesized
  source 1..22: mol_type = other DNA
gaatggctctccaacaggaaga

SEQ ID NO: 66592 - DNA, 22 bp, synthetic construct
  misc_feature 1..22: note = chemically synthesized
  source 1..22: mol_type = other DNA
tccaacaggaagaaaagttcac

SEQ ID NO: 66593 - DNA, 22 bp, synthetic construct
  misc_feature 1..22: note = chemically synthesized
  source 1..22: mol_type = other DNA
caacaggaagaaaagttcactg

SEQ ID NO: 66594 - DNA, 22 bp, synthetic construct
  misc_feature 1..22: note = chemically synthesized
  source 1..22: mol_type = other DNA
actgcacagcgcttgaatccta

SEQ ID NO: 66595 - DNA, 22 bp, synthetic construct
  misc_feature 1..22: note = chemically synthesized
  source 1..22: mol_type = other DNA
cacagcgcttgaatcctaatta

SEQ ID NO: 66596 - DNA, 22 bp, synthetic construct
  misc_feature 1..22: note = chemically synthesized
  source 1..22: mol_type = other DNA
gaatcctaattatttattgagg

SEQ ID NO: 66597 - DNA, 22 bp, synthetic construct
  misc_feature 1..22: note = chemically synthesized
  source 1..22: mol_type = other DNA
aatcctaattatttattgaggg

SEQ ID NO: 66598 - DNA, 22 bp, synthetic construct
  misc_feature 1..22: note = chemically synthesized
  source 1..22: mol_type = other DNA
attatttattgaggggctcttc

SEQ ID NO: 66599 - DNA, 22 bp, synthetic construct
  misc_feature 1..22: note = chemically synthesized
  source 1..22: mol_type = other DNA
tttattgaggggctcttctttg

SEQ ID NO: 66600 - DNA, 22 bp, synthetic construct
  misc_feature 1..22: note = chemically synthesized
  source 1..22: mol_type = other DNA
attgaggggctcttctttgccc

SEQ ID NO: 66601 - DNA, 22 bp, synthetic construct
  misc_feature 1..22: note = chemically synthesized
  source 1..22: mol_type = other DNA
ttgaggggctcttctttgccca

SEQ ID NO: 66602 - DNA, 22 bp, synthetic construct
  misc_feature 1..22: note = chemically synthesized
  source 1..22: mol_type = other DNA
aggggctcttctttgcccagca

SEQ ID NO: 66603 - DNA, 22 bp, synthetic construct
  misc_feature 1..22: note = chemically synthesized
  source 1..22: mol_type = other DNA
ttctttgcccagcatggtgctg

SEQ ID NO: 66604 - DNA, 22 bp, synthetic construct
  misc_feature 1..22: note = chemically synthesized
  source 1..22: mol_type = other DNA
ctttgcccagcatggtgctgga

SEQ ID NO: 66605 - DNA, 22 bp, synthetic construct
  misc_feature 1..22: note = chemically synthesized
  source 1..22: mol_type = other DNA
tttgcccagcatggtgctggac

SEQ ID NO: 66606 - DNA, 22 bp, synthetic construct
  misc_feature 1..22: note = chemically synthesized
  source 1..22: mol_type = other DNA
tgcccagcatggtgctggacag

SEQ ID NO: 66607 - DNA, 22 bp, synthetic construct
  misc_feature 1..22: note = chemically synthesized
  source 1..22: mol_type = other DNA
gcccagcatggtgctggacagt

SEQ ID NO: 66608 - DNA, 22 bp, synthetic construct
  misc_feature 1..22: note = chemically synthesized
  source 1..22: mol_type = other DNA
cccagcatggtgctggacagtc

SEQ ID NO: 66609 - DNA, 22 bp, synthetic construct
  misc_feature 1..22: note = chemically synthesized
  source 1..22: mol_type = other DNA
gacagtcagaggtagaccactg

SEQ ID NO: 66610 - DNA, 22 bp, synthetic construct
  misc_feature 1..22: note = chemically synthesized
  source 1..22: mol_type = other DNA
agtcttggttcttagaagcctt

SEQ ID NO: 66611 - DNA, 22 bp, synthetic construct
  misc_feature 1..22: note = chemically synthesized
  source 1..22: mol_type = other DNA
ggttcttagaagccttgaactt

SEQ ID NO: 66612 - DNA, 22 bp, synthetic construct
  misc_feature 1..22: note = chemically synthesized
  source 1..22: mol_type = other DNA
gttcttagaagccttgaacttt

SEQ ID NO: 66613 - DNA, 22 bp, synthetic construct
  misc_feature 1..22: note = chemically synthesized
  source 1..22: mol_type = other DNA
ttagaagccttgaacttttagt

SEQ ID NO: 66614 - DNA, 22 bp, synthetic construct
  misc_feature 1..22: note = chemically synthesized
  source 1..22: mol_type = other DNA
agaagccttgaacttttagttg

SEQ ID NO: 66615 - DNA, 22 bp, synthetic construct
  misc_feature 1..22: note = chemically synthesized
  source 1..22: mol_type = other DNA
gaagccttgaacttttagttgg

SEQ ID NO: 66616 - DNA, 22 bp, synthetic construct
  misc_feature 1..22: note = chemically synthesized
  source 1..22: mol_type = other DNA
gaacttttagttggagaaccag

SEQ ID NO: 66617 - DNA, 22 bp, synthetic construct
  misc_feature 1..22: note = chemically synthesized
  source 1..22: mol_type = other DNA
aacttttagttggagaaccagt

SEQ ID NO: 66618 - DNA, 22 bp, synthetic construct
  misc_feature 1..22: note = chemically synthesized
  source 1..22: mol_type = other DNA
ttagttggagaaccagtggtag

SEQ ID NO: 66619 - DNA, 22 bp, synthetic construct
  misc_feature 1..22: note = chemically synthesized
  source 1..22: mol_type = other DNA
tagttggagaaccagtggtaga

SEQ ID NO: 66620 - DNA, 22 bp, synthetic construct
  misc_feature 1..22: note = chemically synthesized
  source 1..22: mol_type = other DNA
agttggagaaccagtggtagat

SEQ ID NO: 66621 - DNA, 22 bp, synthetic construct
  misc_feature 1..22: note = chemically synthesized
  source 1..22: mol_type = other DNA
gttggagaaccagtggtagata

SEQ ID NO: 66622 - DNA, 22 bp, synthetic construct
  misc_feature 1..22: note = chemically synthesized
  source 1..22: mol_type = other DNA
gagaaccagtggtagatacatg

SEQ ID NO: 66623 - DNA, 22 bp, synthetic construct
  misc_feature 1..22: note = chemically synthesized
  source 1..22: mol_type = other DNA
attacagggagacttggatcca

SEQ ID NO: 66624 - DNA, 22 bp, synthetic construct
  misc_feature 1..22: note = chemically synthesized
  source 1..22: mol_type = other DNA
cagggagacttggatccaggag

SEQ ID NO: 66625 - DNA, 22 bp, synthetic construct
  misc_feature 1..22: note = chemically synthesized
  source 1..22: mol_type = other DNA
ggatccaggagaaatggagtgg

SEQ ID NO: 66626 - DNA, 22 bp, synthetic construct
  misc_feature 1..22: note = chemically synthesized
  source 1..22: mol_type = other DNA
gatccaggagaaatggagtgga

SEQ ID NO: 66627 - DNA, 22 bp, synthetic construct
  misc_feature 1..22: note = chemically synthesized
  source 1..22: mol_type = other DNA
agaagagagacatatcctttac

SEQ ID NO: 66628 - DNA, 22 bp, synthetic construct
  misc_feature 1..22: note = chemically synthesized
  source 1..22: mol_type = other DNA
tacaggcctttgtgttacctag

SEQ ID NO: 66629 - DNA, 22 bp, synthetic construct
  misc_feature 1..22: note = chemically synthesized
  source 1..22: mol_type = other DNA
acaggcctttgtgttacctagc

SEQ ID NO: 66630 - DNA, 22 bp, synthetic construct
  misc_feature 1..22: note = chemically synthesized
  source 1..22: mol_type = other DNA
caggcctttgtgttacctagcc

SEQ ID NO: 66631 - DNA, 22 bp, synthetic construct
  misc_feature 1..22: note = chemically synthesized
  source 1..22: mol_type = other DNA
tgtgttacctagccagtgcctt

SEQ ID NO: 66632 - DNA, 22 bp, synthetic construct
  misc_feature 1..22: note = chemically synthesized
  source 1..22: mol_type = other DNA
gtgttacctagccagtgccttc

SEQ ID NO: 66633 - DNA, 22 bp, synthetic construct
  misc_feature 1..22: note = chemically synthesized
  source 1..22: mol_type = other DNA
tgttacctagccagtgccttca

SEQ ID NO: 66634 - DNA, 22 bp, synthetic construct
  misc_feature 1..22: note = chemically synthesized
  source 1..22: mol_type = other DNA
cctagccagtgccttcatgtcc

SEQ ID NO: 66635 - DNA, 22 bp, synthetic construct
  misc_feature 1..22: note = chemically synthesized
  source 1..22: mol_type = other DNA
gccagtgccttcatgtccccag

SEQ ID NO: 66636 - DNA, 22 bp, synthetic construct
  misc_feature 1..22: note = chemically synthesized
  source 1..22: mol_type = other DNA
catgtccccagccccctggcct

SEQ ID NO: 66637 - DNA, 22 bp, synthetic construct
  misc_feature 1..22: note = chemically synthesized
  source 1..22: mol_type = other DNA
atgtccccagccccctggcctc

SEQ ID NO: 66638 - DNA, 22 bp, synthetic construct
  misc_feature 1..22: note = chemically synthesized
  source 1..22: mol_type = other DNA
gcctccagctcctccaccccca

SEQ ID NO: 66639 - DNA, 22 bp, synthetic construct
  misc_feature 1..22: note = chemically synthesized
  source 1..22: mol_type = other DNA
cagctcctccacccccaccttc

SEQ ID NO: 66640 - DNA, 22 bp, synthetic construct
  misc_feature 1..22: note = chemically synthesized
  source 1..22: mol_type = other DNA
ctccacccccaccttcccccct

SEQ ID NO: 66641 - DNA, 22 bp, synthetic construct
  misc_feature 1..22: note = chemically synthesized
  source 1..22: mol_type = other DNA
cacccccaccttcccccctcct

SEQ ID NO: 66642 - DNA, 22 bp, synthetic construct
  misc_feature 1..22: note = chemically synthesized
  source 1..22: mol_type = other DNA
cccccctcctcgctgtccttgg

SEQ ID NO: 66643 - DNA, 22 bp, synthetic construct
  misc_feature 1..22: note = chemically synthesized
  source 1..22: mol_type = other DNA
ccccctcctcgctgtccttggt

SEQ ID NO: 66644 - DNA, 22 bp, synthetic construct
  misc_feature 1..22: note = chemically synthesized
  source 1..22: mol_type = other DNA
ctcgctgtccttggtgcagagt

SEQ ID NO: 66645 - DNA, 22 bp, synthetic construct
  misc_feature 1..22: note = chemically synthesized
  source 1..22: mol_type = other DNA
gctgtccttggtgcagagtggg

SEQ ID NO: 66646 - DNA, 22 bp, synthetic construct
  misc_feature 1..22: note = chemically synthesized
  source 1..22: mol_type = other DNA
tccttggtgcagagtggggcag

SEQ ID NO: 66647 - DNA, 22 bp, synthetic construct
  misc_feature 1..22: note = chemically synthesized
  source 1..22: mol_type = other DNA
ggtgcagagtggggcagtcatc

SEQ ID NO: 66648 - DNA, 22 bp, synthetic construct
  misc_feature 1..22: note = chemically synthesized
  source 1..22: mol_type = other DNA
gtgcagagtggggcagtcatct

SEQ ID NO: 66649 - DNA, 22 bp, synthetic construct
  misc_feature 1..22: note = chemically synthesized
  source 1..22: mol_type = other DNA
agtggggcctcctcccggggaa

SEQ ID NO: 66650 - DNA, 22 bp, synthetic construct
  misc_feature 1..22: note = chemically synthesized
  source 1..22: mol_type = other DNA
ctcccggggaagtccacagctt

SEQ ID NO: 66651 - DNA, 22 bp, synthetic construct
  misc_feature 1..22: note = chemically synthesized
  source 1..22: mol_type = other DNA
ccggggaagtccacagcttgct

SEQ ID NO: 66652 - DNA, 22 bp, synthetic construct
  misc_feature 1..22: note = chemically synthesized
  source 1..22: mol_type = other DNA
gctccacaccggaggagccgcc

SEQ ID NO: 66653 - DNA, 22 bp, synthetic construct
  misc_feature 1..22: note = chemically synthesized
  source 1..22: mol_type = other DNA
ctccacaccggaggagccgcca

SEQ ID NO: 66654 - DNA, 22 bp, synthetic construct
  misc_feature 1..22: note = chemically synthesized
  source 1..22: mol_type = other DNA
cacaccggaggagccgccaaag

SEQ ID NO: 66655 - DNA, 22 bp, synthetic construct
  misc_feature 1..22: note = chemically synthesized
  source 1..22: mol_type = other DNA
aacaaaagcagcttttgagtga

SEQ ID NO: 66656 - DNA, 22 bp, synthetic construct
  misc_feature 1..22: note = chemically synthesized
  source 1..22: mol_type = other DNA
acaaaagcagcttttgagtgag

SEQ ID NO: 66657 - DNA, 22 bp, synthetic construct
  misc_feature 1..22: note = chemically synthesized
  source 1..22: mol_type = other DNA
ttgagtgagaaagctgagtgga

SEQ ID NO: 66658 - DNA, 22 bp, synthetic construct
  misc_feature 1..22: note = chemically synthesized
  source 1..22: mol_type = other DNA
tgagtgagaaagctgagtggag

SEQ ID NO: 66659 - DNA, 22 bp, synthetic construct
  misc_feature 1..22: note = chemically synthesized
  source 1..22: mol_type = other DNA
gagtgagaaagctgagtggagt

SEQ ID NO: 66660 - DNA, 22 bp, synthetic construct
  misc_feature 1..22: note = chemically synthesized
  source 1..22: mol_type = other DNA
agtgagaaagctgagtggagtt

SEQ ID NO: 66661 - DNA, 22 bp, synthetic construct
  misc_feature 1..22: note = chemically synthesized
  source 1..22: mol_type = other DNA
agtggagttgtcccaacctgtc

SEQ ID NO: 66662 - DNA, 22 bp, synthetic construct
  misc_feature 1..22: note = chemically synthesized
  source 1..22: mol_type = other DNA
tcccaacctgtcaacttcagat

SEQ ID NO: 66663 - DNA, 22 bp, synthetic construct
  misc_feature 1..22: note = chemically synthesized
  source 1..22: mol_type = other DNA
tcaacttcagatttctttcctc

SEQ ID NO: 66664 - DNA, 22 bp, synthetic construct
  misc_feature 1..22: note = chemically synthesized
  source 1..22: mol_type = other DNA
cagatttctttcctcctcccca

SEQ ID NO: 66665 - DNA, 22 bp, synthetic construct
  misc_feature 1..22: note = chemically synthesized
  source 1..22: mol_type = other DNA
agatttctttcctcctccccat

SEQ ID NO: 66666 - DNA, 22 bp, synthetic construct
  misc_feature 1..22: note = chemically synthesized
  source 1..22: mol_type = other DNA
ctttcctcctccccataaatca

SEQ ID NO: 66667 - DNA, 22 bp, synthetic construct
  misc_feature 1..22: note = chemically synthesized
  source 1..22: mol_type = other DNA
tttcctcctccccataaatcaa

SEQ ID NO: 66668 - DNA, 22 bp, synthetic construct
  misc_feature 1..22: note = chemically synthesized
  source 1..22: mol_type = other DNA
tcctcctccccataaatcaaaa

SEQ ID NO: 66669 - DNA, 22 bp, synthetic construct
  misc_feature 1..22: note = chemically synthesized
  source 1..22: mol_type = other DNA
cctcctccccataaatcaaaaa

SEQ ID NO: 66670 - DNA, 22 bp, synthetic construct
  misc_feature 1..22: note = chemically synthesized
  source 1..22: mol_type = other DNA
ctcctccccataaatcaaaaaa

SEQ ID NO: 66671 - DNA, 22 bp, synthetic construct
  misc_feature 1..22: note = chemically synthesized
  source 1..22: mol_type = other DNA
ctccccataaatcaaaaaacgg

SEQ ID NO: 66672 - DNA, 22 bp, synthetic construct
  misc_feature 1..22: note = chemically synthesized
  source 1..22: mol_type = other DNA
cccataaatcaaaaaacggttg

SEQ ID NO: 66673 - DNA, 22 bp, synthetic construct
  misc_feature 1..22: note = chemically synthesized
  source 1..22: mol_type = other DNA
gtggaagggagggacagaagcg

SEQ ID NO: 66674 - DNA, 22 bp, synthetic construct
  misc_feature 1..22: note = chemically synthesized
  source 1..22: mol_type = other DNA
cattttcagattttgtaagaaa

SEQ ID NO: 66675 - DNA, 22 bp, synthetic construct
  misc_feature 1..22: note = chemically synthesized
  source 1..22: mol_type = other DNA
attttcagattttgtaagaaaa

SEQ ID NO: 66676 - DNA, 22 bp, synthetic construct
  misc_feature 1..22: note = chemically synthesized
  source 1..22: mol_type = other DNA
tcagattttgtaagaaaataaa

SEQ ID NO: 66677 - DNA, 22 bp, synthetic construct
  misc_feature 1..22: note = chemically synthesized
  source 1..22: mol_type = other DNA
cagattttgtaagaaaataaaa

SEQ ID NO: 66678 - DNA, 22 bp, synthetic construct
  misc_feature 1..22: note = chemically synthesized
  source 1..22: mol_type = other DNA
agattttgtaagaaaataaaat

SEQ ID NO: 66679 - DNA, 22 bp, synthetic construct
  misc_feature 1..22: note = chemically synthesized
  source 1..22: mol_type = other DNA
tgtaagaaaataaaataaaatc

SEQ ID NO: 66680 - DNA, 22 bp, synthetic construct
  misc_feature 1..22: note = chemically synthesized
  source 1..22: mol_type = other DNA
gtaagaaaataaaataaaatca

SEQ ID NO: 66681 - DNA, 22 bp, synthetic construct
  misc_feature 1..22: note = chemically synthesized
  source 1..22: mol_type = other DNA
taagaaaataaaataaaatcaa

SEQ ID NO: 66682 - DNA, 22 bp, synthetic construct
  misc_feature 1..22: note = chemically synthesized
  source 1..22: mol_type = other DNA
tcccacgctgataccttacatg

SEQ ID NO: 66683 - DNA, 22 bp, synthetic construct
  misc_feature 1..22: note = chemically synthesized
  source 1..22: mol_type = other DNA
ataccttacatgccaggtttga

SEQ ID NO: 66684 - DNA, 22 bp, synthetic construct
  misc_feature 1..22: note = chemically synthesized
  source 1..22: mol_type = other DNA
acatgccaggtttgagcctgag

SEQ ID NO: 66685 - DNA, 22 bp, synthetic construct
  misc_feature 1..22: note = chemically synthesized
  source 1..22: mol_type = other DNA
catgccaggtttgagcctgagg

SEQ ID NO: 66686 - DNA, 22 bp, synthetic construct
  misc_feature 1..22: note = chemically synthesized
  source 1..22: mol_type = other DNA
gagcctgaggcaaatttttgtg

SEQ ID NO: 66687 - DNA, 22 bp, synthetic construct
  misc_feature 1..22: note = chemically synthesized
  source 1..22: mol_type = other DNA
agcctgaggcaaatttttgtgg

SEQ ID NO: 66688 - DNA, 22 bp, synthetic construct
  misc_feature 1..22: note = chemically synthesized
  source 1..22: mol_type = other DNA
aggcaaatttttgtggccatgt

SEQ ID NO: 66689 - DNA, 22 bp, synthetic construct
  misc_feature 1..22: note = chemically synthesized
  source 1..22: mol_type = other DNA
ttgtggccatgtaataagcctc

SEQ ID NO: 66690 - DNA, 22 bp, synthetic construct
  misc_feature 1..22: note = chemically synthesized
  source 1..22: mol_type = other DNA
tgtggccatgtaataagcctct

SEQ ID NO: 66691 - DNA, 22 bp, synthetic construct
  misc_feature 1..22: note = chemically synthesized
  source 1..22: mol_type = other DNA
gtggccatgtaataagcctctt

SEQ ID NO: 66692 - DNA, 22 bp, synthetic construct
  misc_feature 1..22: note = chemically synthesized
  source 1..22: mol_type = other DNA
tggccatgtaataagcctcttt

SEQ ID NO: 66693 - DNA, 22 bp, synthetic construct
  misc_feature 1..22: note = chemically synthesized
  source 1..22: mol_type = other DNA
tttaaaatggtgacagaccctt

SEQ ID NO: 66694 - DNA, 22 bp, synthetic construct
  misc_feature 1..22: note = chemically synthesized
  source 1..22: mol_type = other DNA
taaaatggtgacagacccttga

SEQ ID NO: 66695 - DNA, 22 bp, synthetic construct
  misc_feature 1..22: note = chemically synthesized
  source 1..22: mol_type = other DNA
aaaatggtgacagacccttgac

SEQ ID NO: 66696 - DNA, 22 bp, synthetic construct
  misc_feature 1..22: note = chemically synthesized
  source 1..22: mol_type = other DNA
aaatggtgacagacccttgact

SEQ ID NO: 66697 - DNA, 22 bp, synthetic construct
  misc_feature 1..22: note = chemically synthesized
  source 1..22: mol_type = other DNA
gactctttgccttgaattacat

SEQ ID NO: 66698 - DNA, 22 bp, synthetic construct
  misc_feature 1..22: note = chemically synthesized
  source 1..22: mol_type = other DNA
actctttgccttgaattacatt

SEQ ID NO: 66699 - DNA, 22 bp, synthetic construct
  misc_feature 1..22: note = chemically synthesized
  source 1..22: mol_type = other DNA
tttgccttgaattacattgata

SEQ ID NO: 66700 - DNA, 22 bp, synthetic construct
  misc_feature 1..22: note = chemically synthesized
  source 1..22: mol_type = other DNA
tgccttgaattacattgataaa

SEQ ID NO: 66701 - DNA, 22 bp, synthetic construct
  misc_feature 1..22: note = chemically synthesized
  source 1..22: mol_type = other DNA
gccttgaattacattgataaaa

SEQ ID NO: 66702 - DNA, 22 bp, synthetic construct
  misc_feature 1..22: note = chemically synthesized
  source 1..22: mol_type = other DNA
ccttgaattacattgataaaag

SEQ ID NO: 66703 - DNA, 22 bp, synthetic construct
  misc_feature 1..22: note = chemically synthesized
  source 1..22: mol_type = other DNA
gaattacattgataaaagacat

SEQ ID NO: 66704 - DNA, 22 bp, synthetic construct
  misc_feature 1..22: note = chemically synthesized
  source 1..22: mol_type = other DNA
aattacattgataaaagacatt

SEQ ID NO: 66705 - DNA, 22 bp, synthetic construct
  misc_feature 1..22: note = chemically synthesized
  source 1..22: mol_type = other DNA
cattgataaaagacattttatt

SEQ ID NO: 66706 - DNA, 22 bp, synthetic construct
  misc_feature 1..22: note = chemically synthesized
  source 1..22: mol_type = other DNA
ataaaagacattttattgcatt

SEQ ID NO: 66707 - DNA, 22 bp, synthetic construct
  misc_feature 1..22: note = chemically synthesized
  source 1..22: mol_type = other DNA
tattgcattagagctggggcag

SEQ ID NO: 66708 - DNA, 22 bp, synthetic construct
  misc_feature 1..22: note = chemically synthesized
  source 1..22: mol_type = other DNA
attgcattagagctggggcagg

SEQ ID NO: 66709 - DNA, 22 bp, synthetic construct
  misc_feature 1..22: note = chemically synthesized
  source 1..22: mol_type = other DNA
ttgcattagagctggggcagga

SEQ ID NO: 66710 - DNA, 22 bp, synthetic construct
  misc_feature 1..22: note = chemically synthesized
  source 1..22: mol_type = other DNA
cattagagctggggcaggagta

SEQ ID NO: 66711 - DNA, 22 bp, synthetic construct
  misc_feature 1..22: note = chemically synthesized
  source 1..22: mol_type = other DNA
gagctggggcaggagtacagga

SEQ ID NO: 66712 - DNA, 22 bp, synthetic construct
  misc_feature 1..22: note = chemically synthesized
  source 1..22: mol_type = other DNA
gggcaggagtacaggacggttc

SEQ ID NO: 66713 - DNA, 22 bp, synthetic construct
  misc_feature 1..22: note = chemically synthesized
  source 1..22: mol_type = other DNA
ttgcctggtcggcctctttgaa

SEQ ID NO: 66714 - DNA, 22 bp, synthetic construct
  misc_feature 1..22: note = chemically synthesized
  source 1..22: mol_type = other DNA
gcctggtcggcctctttgaaac

SEQ ID NO: 66715 - DNA, 22 bp, synthetic construct
  misc_feature 1..22: note = chemically synthesized
  source 1..22: mol_type = other DNA
cctggtcggcctctttgaaacc

SEQ ID NO: 66716 - DNA, 22 bp, synthetic construct
  misc_feature 1..22: note = chemically synthesized
  source 1..22: mol_type = other DNA
gtcggcctctttgaaaccgcgt

SEQ ID NO: 66717 - DNA, 22 bp, synthetic construct
  misc_feature 1..22: note = chemically synthesized
  source 1..22: mol_type = other DNA
tttgaaaccgcgtcagcctgcc

SEQ ID NO: 66718 - DNA, 22 bp, synthetic construct
  misc_feature 1..22: note = chemically synthesized
  source 1..22: mol_type = other DNA
tgaaaccgcgtcagcctgccgt

SEQ ID NO: 66719 - DNA, 22 bp, synthetic construct
  misc_feature 1..22: note = chemically synthesized
  source 1..22: mol_type = other DNA
gaaaccgcgtcagcctgccgtc

SEQ ID NO: 66720 - DNA, 22 bp, synthetic construct
  misc_feature 1..22: note = chemically synthesized
  source 1..22: mol_type = other DNA
aaaccgcgtcagcctgccgtcc

SEQ ID NO: 66721 - DNA, 22 bp, synthetic construct
  misc_feature 1..22: note = chemically synthesized
  source 1..22: mol_type = other DNA
ccgtccacactctccaccgcct

SEQ ID NO: 66722 - DNA, 22 bp, synthetic construct
  misc_feature 1..22: note = chemically synthesized
  source 1..22: mol_type = other DNA
tccaccgcctgacagggtttga

SEQ ID NO: 66723 - DNA, 22 bp, synthetic construct
  misc_feature 1..22: note = chemically synthesized
  source 1..22: mol_type = other DNA
caccgcctgacagggtttgagt

SEQ ID NO: 66724 - DNA, 22 bp, synthetic construct
  misc_feature 1..22: note = chemically synthesized
  source 1..22: mol_type = other DNA
acagggtttgagtgcgatggca

SEQ ID NO: 66725 - DNA, 22 bp, synthetic construct
  misc_feature 1..22: note = chemically synthesized
  source 1..22: mol_type = other DNA
gagtgcgatggcagctgagatc

SEQ ID NO: 66726 - DNA, 22 bp, synthetic construct
  misc_feature 1..22: note = chemically synthesized
  source 1..22: mol_type = other DNA
agtgcgatggcagctgagatct

SEQ ID NO: 66727 - DNA, 22 bp, synthetic construct
  misc_feature 1..22: note = chemically synthesized
  source 1..22: mol_type = other DNA
agatctgtgggccggtgacaga

SEQ ID NO: 66728 - DNA, 22 bp, synthetic construct
  misc_feature 1..22: note = chemically synthesized
  source 1..22: mol_type = other DNA
tgggccggtgacagagggggct

SEQ ID NO: 66729 - DNA, 22 bp, synthetic construct
  misc_feature 1..22: note = chemically synthesized
  source 1..22: mol_type = other DNA
tctacccagcagtagaaggttg

SEQ ID NO: 66730 - DNA, 22 bp, synthetic construct
  misc_feature 1..22: note = chemically synthesized
  source 1..22: mol_type = other DNA
ctacccagcagtagaaggttga

SEQ ID NO: 66731 - DNA, 22 bp, synthetic construct
  misc_feature 1..22: note = chemically synthesized
  source 1..22: mol_type = other DNA
tacccagcagtagaaggttgag

SEQ ID NO: 66732 - DNA, 22 bp, synthetic construct
  misc_feature 1..22: note = chemically synthesized
  source 1..22: mol_type = other DNA
cccagcagtagaaggttgaggc

SEQ ID NO: 66733 - DNA, 22 bp, synthetic construct
  misc_feature 1..22: note = chemically synthesized
  source 1..22: mol_type = other DNA
aggccctggaagcaaaaggatt

SEQ ID NO: 66734 - DNA, 22 bp, synthetic construct
  misc_feature 1..22: note = chemically synthesized
  source 1..22: mol_type = other DNA
gaagcaaaaggatttcagcctg

SEQ ID NO: 66735 - DNA, 22 bp, synthetic construct
  misc_feature 1..22: note = chemically synthesized
  source 1..22: mol_type = other DNA
cagcctgaggggcttgttaagg

SEQ ID NO: 66736 - DNA, 22 bp, synthetic construct
  misc_feature 1..22: note = chemically synthesized
  source 1..22: mol_type = other DNA
agcctgaggggcttgttaaggg

SEQ ID NO: 66737 - DNA, 22 bp, synthetic construct
  misc_feature 1..22: note = chemically synthesized
  source 1..22: mol_type = other DNA
aggggcttgttaagggagagtt

SEQ ID NO: 66738 - DNA, 22 bp, synthetic construct
  misc_feature 1..22: note = chemically synthesized
  source 1..22: mol_type = other DNA
gttaagggagagttattctttc

SEQ ID NO: 66739 - DNA, 22 bp, synthetic construct
  misc_feature 1..22: note = chemically synthesized
  source 1..22: mol_type = other DNA
ttaagggagagttattctttcc

SEQ ID NO: 66740 - DNA, 22 bp, synthetic construct
  misc_feature 1..22: note = chemically synthesized
  source 1..22: mol_type = other DNA
agggagagttattctttcctgt

SEQ ID NO: 66741 - DNA, 22 bp, synthetic construct
  misc_feature 1..22: note = chemically synthesized
  source 1..22: mol_type = other DNA
ttctttcctgttcctagtagac

SEQ ID NO: 66742 - DNA, 22 bp, synthetic construct
  misc_feature 1..22: note = chemically synthesized
  source 1..22: mol_type = other DNA
tttcctgttcctagtagacctg

SEQ ID NO: 66743 - DNA, 22 bp, synthetic construct
  misc_feature 1..22: note = chemically synthesized
  source 1..22: mol_type = other DNA
tcctgttcctagtagacctgag

SEQ ID NO: 66744 - DNA, 22 bp, synthetic construct
  misc_feature 1..22: note = chemically synthesized
  source 1..22: mol_type = other DNA
cctgttcctagtagacctgaga

SEQ ID NO: 66745 - DNA, 22 bp, synthetic construct
  misc_feature 1..22: note = chemically synthesized
  source 1..22: mol_type = other DNA
ctgttcctagtagacctgagag

SEQ ID NO: 66746 - DNA, 22 bp, synthetic construct
  misc_feature 1..22: note = chemically synthesized
  source 1..22: mol_type = other DNA
ttcctagtagacctgagagagc

SEQ ID NO: 66747 - DNA, 22 bp, synthetic construct
  misc_feature 1..22: note = chemically synthesized
  source 1..22: mol_type = other DNA
ctagtagacctgagagagcttg

SEQ ID NO: 66748 - DNA, 22 bp, synthetic construct
  misc_feature 1..22: note = chemically synthesized
  source 1..22: mol_type = other DNA
gtagacctgagagagcttgacg

SEQ ID NO: 66749 - DNA, 22 bp, synthetic construct
  misc_feature 1..22: note = chemically synthesized
  source 1..22: mol_type = other DNA
agagagcttgacgttggtggcc

SEQ ID NO: 66750 - DNA, 22 bp, synthetic construct
  misc_feature 1..22: note = chemically synthesized
  source 1..22: mol_type = other DNA
gacgttggtggcctctggtcag

SEQ ID NO: 66751 - DNA, 22 bp, synthetic construct
  misc_feature 1..22: note = chemically synthesized
  source 1..22: mol_type = other DNA
acgttggtggcctctggtcagc

SEQ ID NO: 66752 - DNA, 22 bp, synthetic construct
  misc_feature 1..22: note = chemically synthesized
  source 1..22: mol_type = other DNA
gtggcctctggtcagcctcatg

SEQ ID NO: 66753 - DNA, 22 bp, synthetic construct
  misc_feature 1..22: note = chemically synthesized
  source 1..22: mol_type = other DNA
tggtcagcctcatggttgggac

SEQ ID NO: 66754 - DNA, 22 bp, synthetic construct
  misc_feature 1..22: note = chemically synthesized
  source 1..22: mol_type = other DNA
gtcagcctcatggttgggactg

SEQ ID NO: 66755 - DNA, 22 bp, synthetic construct
  misc_feature 1..22: note = chemically synthesized
  source 1..22: mol_type = other DNA
atggttgggactgcgtggaaat

SEQ ID NO: 66756 - DNA, 22 bp, synthetic construct
  misc_feature 1..22: note = chemically synthesized
  source 1..22: mol_type = other DNA
ggactgcgtggaaatgctagac

SEQ ID NO: 66757 - DNA, 22 bp, synthetic construct
  misc_feature 1..22: note = chemically synthesized
  source 1..22: mol_type = other DNA
cgtggaaatgctagacctgaga

SEQ ID NO: 66758 - DNA, 22 bp, synthetic construct
  misc_feature 1..22: note = chemically synthesized
  source 1..22: mol_type = other DNA
gacctgagagacctcatttccc

SEQ ID NO: 66759 - DNA, 22 bp, synthetic construct
  misc_feature 1..22: note = chemically synthesized
  source 1..22: mol_type = other DNA
agagacctcatttcccaagcag

SEQ ID NO: 66760 - DNA, 22 bp, synthetic construct
  misc_feature 1..22: note = chemically synthesized
  source 1..22: mol_type = other DNA
atttcccaagcagtcttagaga

SEQ ID NO: 66761 - DNA, 22 bp, synthetic construct
  misc_feature 1..22: note = chemically synthesized
  source 1..22: mol_type = other DNA
cccaagcagtcttagagagact

SEQ ID NO: 66762 - DNA, 22 bp, synthetic construct
  misc_feature 1..22: note = chemically synthesized
  source 1..22: mol_type = other DNA
ccaagcagtcttagagagactc

SEQ ID NO: 66763 - DNA, 22 bp, synthetic construct
  misc_feature 1..22: note = chemically synthesized
  source 1..22: mol_type = other DNA
agagagactcaaaacaaaaaat

SEQ ID NO: 66764 - DNA, 22 bp, synthetic construct
  misc_feature 1..22: note = chemically synthesized
  source 1..22: mol_type = other DNA
gagagactcaaaacaaaaaatg

SEQ ID NO: 66765 - DNA, 22 bp, synthetic construct
  misc_feature 1..22: note = chemically synthesized
  source 1..22: mol_type = other DNA
aaaacaaaaaatggtctccggg

SEQ ID NO: 66766 - DNA, 22 bp, synthetic construct
  misc_feature 1..22: note = chemically synthesized
  source 1..22: mol_type = other DNA
cgggtcccaccgtggtgtgtgg

SEQ ID NO: 66767 - DNA, 22 bp, synthetic construct
  misc_feature 1..22: note = chemically synthesized
  source 1..22: mol_type = other DNA
tgcccgcagaggccaggtgtcc

SEQ ID NO: 66768 - DNA, 22 bp, synthetic construct
  misc_feature 1..22: note = chemically synthesized
  source 1..22: mol_type = other DNA
agtccccacgtggacctgctag

SEQ ID NO: 66769 - DNA, 22 bp, synthetic construct
  misc_feature 1..22: note = chemically synthesized
  source 1..22: mol_type = other DNA
ctaggtgggtagaaaggagttg

SEQ ID NO: 66770 - DNA, 22 bp, synthetic construct
  misc_feature 1..22: note = chemically synthesized
  source 1..22: mol_type = other DNA
ggtgggtagaaaggagttgaag

SEQ ID NO: 66771 - DNA, 22 bp, synthetic construct
  misc_feature 1..22: note = chemically synthesized
  source 1..22: mol_type = other DNA
aagatgttgtgctgttggttgg

SEQ ID NO: 66772 - DNA, 22 bp, synthetic construct
  misc_feature 1..22: note = chemically synthesized
  source 1..22: mol_type = other DNA
tgctgttggttggaggagcttg

SEQ ID NO: 66773 - DNA, 22 bp, synthetic construct
  misc_feature 1..22: note = chemically synthesized
  source 1..22: mol_type = other DNA
ttggttggaggagcttggaggt

SEQ ID NO: 66774 - DNA, 22 bp, synthetic construct
  misc_feature 1..22: note = chemically synthesized
  source 1..22: mol_type = other DNA
gttggaggagcttggaggtgtc

SEQ ID NO: 66775 - DNA, 22 bp, synthetic construct
  misc_feature 1..22: note = chemically synthesized
  source 1..22: mol_type = other DNA
gaggagcttggaggtgtctggg

SEQ ID NO: 66776 - DNA, 22 bp, synthetic construct
  misc_feature 1..22: note = chemically synthesized
  source 1..22: mol_type = other DNA
ggaggtgtctgggaacattgga

SEQ ID NO: 66777 - DNA, 22 bp, synthetic construct
  misc_feature 1..22: note = chemically synthesized
  source 1..22: mol_type = other DNA
gaggtgtctgggaacattggat

SEQ ID NO: 66778 - DNA, 22 bp, synthetic construct
  misc_feature 1..22: note = chemically synthesized
  source 1..22: mol_type = other DNA
ggaacattggatgttactcata

SEQ ID NO: 66779 - DNA, 22 bp, synthetic construct
  misc_feature 1..22: note = chemically synthesized
  source 1..22: mol_type = other DNA
gatgttactcatatggaatcag

SEQ ID NO: 66780 - DNA, 22 bp, synthetic construct
  misc_feature 1..22: note = chemically synthesized
  source 1..22: mol_type = other DNA
ctcatatggaatcagcagaatt

SEQ ID NO: 66781 - DNA, 22 bp, synthetic construct
  misc_feature 1..22: note = chemically synthesized
  source 1..22: mol_type = other DNA
atatggaatcagcagaattagt

SEQ ID NO: 66782 - DNA, 22 bp, synthetic construct
  misc_feature 1..22: note = chemically synthesized
  source 1..22: mol_type = other DNA
gtagagccaagaacagacggca

SEQ ID NO: 66783 - DNA, 22 bp, synthetic construct
  misc_feature 1..22: note = chemically synthesized
  source 1..22: mol_type = other DNA
gactgaggctgctccaatgatg

SEQ ID NO: 66784 - DNA, 22 bp, synthetic construct
  misc_feature 1..22: note = chemically synthesized
  source 1..22: mol_type = other DNA
aggctgctccaatgatggcagg

SEQ ID NO: 66785 - DNA, 22 bp, synthetic construct
  misc_feature 1..22: note = chemically synthesized
  source 1..22: mol_type = other DNA
ctccaatgatggcaggttgtat

SEQ ID NO: 66786 - DNA, 22 bp, synthetic construct
  misc_feature 1..22: note = chemically synthesized
  source 1..22: mol_type = other DNA
caatgatggcaggttgtatctg

SEQ ID NO: 66787 - DNA, 22 bp, synthetic construct
  misc_feature 1..22: note = chemically synthesized
  source 1..22: mol_type = other DNA
tatctgcgggcatctccaattt

SEQ ID NO: 66788 - DNA, 22 bp, synthetic construct
  misc_feature 1..22: note = chemically synthesized
  source 1..22: mol_type = other DNA
cgggcatctccaatttgctcag

SEQ ID NO: 66789 - DNA, 22 bp, synthetic construct
  misc_feature 1..22: note = chemically synthesized
  source 1..22: mol_type = other DNA
caatttgctcagggaactcttt

SEQ ID NO: 66790 - DNA, 22 bp, synthetic construct
  misc_feature 1..22: note = chemically synthesized
  source 1..22: mol_type = other DNA
gctcagggaactctttccagat

SEQ ID NO: 66791 - DNA, 22 bp, synthetic construct
  misc_feature 1..22: note = chemically synthesized
  source 1..22: mol_type = other DNA
ctcagggaactctttccagatt

SEQ ID NO: 66792 - DNA, 22 bp, synthetic construct
  misc_feature 1..22: note = chemically synthesized
  source 1..22: mol_type = other DNA
agggaactctttccagattggt

SEQ ID NO: 66793 - DNA, 22 bp, synthetic construct
  misc_feature 1..22: note = chemically synthesized
  source 1..22: mol_type = other DNA
tttccagattggtcagtggtat

SEQ ID NO: 66794 - DNA, 22 bp, synthetic construct
  misc_feature 1..22: note = chemically synthesized
  source 1..22: mol_type = other DNA
tccagattggtcagtggtataa

SEQ ID NO: 66795 - DNA, 22 bp, synthetic construct
  misc_feature 1..22: note = chemically synthesized
  source 1..22: mol_type = other DNA
ccagattggtcagtggtataaa

SEQ ID NO: 66796 - DNA, 22 bp, synthetic construct
  misc_feature 1..22: note = chemically synthesized
  source 1..22: mol_type = other DNA
cagattggtcagtggtataaat

SEQ ID NO: 66797 - DNA, 22 bp, synthetic construct
  misc_feature 1..22: note = chemically synthesized
  source 1..22: mol_type = other DNA
gtcagtggtataaatgaaggat

SEQ ID NO: 66798 - DNA, 22 bp, synthetic construct
  misc_feature 1..22: note = chemically synthesized
  source 1..22: mol_type = other DNA
ggaaattgggtaaaaagccagg

SEQ ID NO: 66799 - DNA, 22 bp, synthetic construct
  misc_feature 1..22: note = chemically synthesized
  source 1..22: mol_type = other DNA
ggtaaaaagccagggaggaggg

SEQ ID NO: 66800 - DNA, 22 bp, synthetic construct
  misc_feature 1..22: note = chemically synthesized
  source 1..22: mol_type = other DNA
tgttttgttctgtgggactttg

SEQ ID NO: 66801 - DNA, 22 bp, synthetic construct
  misc_feature 1..22: note = chemically synthesized
  source 1..22: mol_type = other DNA
tgttctgtgggactttgccaga

SEQ ID NO: 66802 - DNA, 22 bp, synthetic construct
  misc_feature 1..22: note = chemically synthesized
  source 1..22: mol_type = other DNA
gttctgtgggactttgccagag

SEQ ID NO: 66803 - DNA, 22 bp, synthetic construct
  misc_feature 1..22: note = chemically synthesized
  source 1..22: mol_type = other DNA
ttctgtgggactttgccagaga

SEQ ID NO: 66804 - DNA, 22 bp, synthetic construct
  misc_feature 1..22: note = chemically synthesized
  source 1..22: mol_type = other DNA
tgtgggactttgccagagagat

SEQ ID NO: 66805 - DNA, 22 bp, synthetic construct
  misc_feature 1..22: note = chemically synthesized
  source 1..22: mol_type = other DNA
tgggactttgccagagagatga

SEQ ID NO: 66806 - DNA, 22 bp, synthetic construct
  misc_feature 1..22: note = chemically synthesized
  source 1..22: mol_type = other DNA
tgccagagagatgaggactgag

SEQ ID NO: 66807 - DNA, 22 bp, synthetic construct
  misc_feature 1..22: note = chemically synthesized
  source 1..22: mol_type = other DNA
gccagagagatgaggactgagg

SEQ ID NO: 66808 - DNA, 22 bp, synthetic construct
  misc_feature 1..22: note = chemically synthesized
  source 1..22: mol_type = other DNA
ccagagagatgaggactgaggc

SEQ ID NO: 66809 - DNA, 22 bp, synthetic construct
  misc_feature 1..22: note = chemically synthesized
  source 1..22: mol_type = other DNA
aggctgggctgctgtgtgcctg

SEQ ID NO: 66810 - DNA, 22 bp, synthetic construct
  misc_feature 1..22: note = chemically synthesized
  source 1..22: mol_type = other DNA
ggctgctgtgtgcctgggaggc

SEQ ID NO: 66811 - DNA, 22 bp, synthetic construct
  misc_feature 1..22: note = chemically synthesized
  source 1..22: mol_type = other DNA
ctgtgtgcctgggaggcgggaa

SEQ ID NO: 66812 - DNA, 22 bp, synthetic construct
  misc_feature 1..22: note = chemically synthesized
  source 1..22: mol_type = other DNA
tgtgcctgggaggcgggaaggt

SEQ ID NO: 66813 - DNA, 22 bp, synthetic construct
  misc_feature 1..22: note = chemically synthesized
  source 1..22: mol_type = other DNA
ggaggcgggaaggtgctgaggc

SEQ ID NO: 66814 - DNA, 22 bp, synthetic construct
  misc_feature 1..22: note = chemically synthesized
  source 1..22: mol_type = other DNA
aggcactgcagagaagcagctg

SEQ ID NO: 66815 - DNA, 22 bp, synthetic construct
  misc_feature 1..22: note = chemically synthesized
  source 1..22: mol_type = other DNA
cagagaagcagctgcagcatgc

SEQ ID NO: 66816 - DNA, 22 bp, synthetic construct
  misc_feature 1..22: note = chemically synthesized
  source 1..22: mol_type = other DNA
cagcatgccccgggcagaggcc

SEQ ID NO: 66817 - DNA, 22 bp, synthetic construct
  misc_feature 1..22: note = chemically synthesized
  source 1..22: mol_type = other DNA
ttttctgaaagaaggacttgcc

SEQ ID NO: 66818 - DNA, 22 bp, synthetic construct
  misc_feature 1..22: note = chemically synthesized
  source 1..22: mol_type = other DNA
tctgaaagaaggacttgccgtc

SEQ ID NO: 66819 - DNA, 22 bp, synthetic construct
  misc_feature 1..22: note = chemically synthesized
  source 1..22: mol_type = other DNA
ctgaaagaaggacttgccgtca

SEQ ID NO: 66820 - DNA, 22 bp, synthetic construct
  misc_feature 1..22: note = chemically synthesized
  source 1..22: mol_type = other DNA
tgaaagaaggacttgccgtcat

SEQ ID NO: 66821 - DNA, 22 bp, synthetic construct
  misc_feature 1..22: note = chemically synthesized
  source 1..22: mol_type = other DNA
aaagaaggacttgccgtcatgg

SEQ ID NO: 66822 - DNA, 22 bp, synthetic construct
  misc_feature 1..22: note = chemically synthesized
  source 1..22: mol_type = other DNA
gccgtcatgggaggaggcctgg

SEQ ID NO: 66823 - DNA, 22 bp, synthetic construct
  misc_feature 1..22: note = chemically synthesized
  source 1..22: mol_type = other DNA
ccgtcatgggaggaggcctggc

SEQ ID NO: 66824 - DNA, 22 bp, synthetic construct
  misc_feature 1..22: note = chemically synthesized
  source 1..22: mol_type = other DNA
gcctcgcagcaccagagcgctc

SEQ ID NO: 66825 - DNA, 22 bp, synthetic construct
  misc_feature 1..22: note = chemically synthesized
  source 1..22: mol_type = other DNA
gcagcaccagagcgctccttca

SEQ ID NO: 66826 - DNA, 22 bp, synthetic construct
  misc_feature 1..22: note = chemically synthesized
  source 1..22: mol_type = other DNA
cttcattcagcctcacctcagg

SEQ ID NO: 66827 - DNA, 22 bp, synthetic construct
  misc_feature 1..22: note = chemically synthesized
  source 1..22: mol_type = other DNA
cattcagcctcacctcaggcga

SEQ ID NO: 66828 - DNA, 22 bp, synthetic construct
  misc_feature 1..22: note = chemically synthesized
  source 1..22: mol_type = other DNA
attcagcctcacctcaggcgag

SEQ ID NO: 66829 - DNA, 22 bp, synthetic construct
  misc_feature 1..22: note = chemically synthesized
  source 1..22: mol_type = other DNA
agcctcacctcaggcgagaggg

SEQ ID NO: 66830 - DNA, 22 bp, synthetic construct
  misc_feature 1..22: note = chemically synthesized
  source 1..22: mol_type = other DNA
acctcaggcgagagggcagcct

SEQ ID NO: 66831 - DNA, 22 bp, synthetic construct
  misc_feature 1..22: note = chemically synthesized
  source 1..22: mol_type = other DNA
aggcgagagggcagcctagttt

SEQ ID NO: 66832 - DNA, 22 bp, synthetic construct
  misc_feature 1..22: note = chemically synthesized
  source 1..22: mol_type = other DNA
gttttattcctgaagaaatgtt

SEQ ID NO: 66833 - DNA, 22 bp, synthetic construct
  misc_feature 1..22: note = chemically synthesized
  source 1..22: mol_type = other DNA
tattcctgaagaaatgttagag

SEQ ID NO: 66834 - DNA, 22 bp, synthetic construct
  misc_feature 1..22: note = chemically synthesized
  source 1..22: mol_type = other DNA
attcctgaagaaatgttagagc

SEQ ID NO: 66835 - DNA, 22 bp, synthetic construct
  misc_feature 1..22: note = chemically synthesized
  source 1..22: mol_type = other DNA
ttcctgaagaaatgttagagcc

SEQ ID NO: 66836 - DNA, 22 bp, synthetic construct
  misc_feature 1..22: note = chemically synthesized
  source 1..22: mol_type = other DNA
ctgaagaaatgttagagcctga

SEQ ID NO: 66837 - DNA, 22 bp, synthetic construct
  misc_feature 1..22: note = chemically synthesized
  source 1..22: mol_type = other DNA
aagaaatgttagagcctgacct

SEQ ID NO: 66838 - DNA, 22 bp, synthetic construct
  misc_feature 1..22: note = chemically synthesized
  source 1..22: mol_type = other DNA
gagcctgacctgctagaccatt

SEQ ID NO: 66839 - DNA, 22 bp, synthetic construct
  misc_feature 1..22: note = chemically synthesized
  source 1..22: mol_type = other DNA
acctgctagaccattttttttg

SEQ ID NO: 66840 - DNA, 22 bp, synthetic construct
  misc_feature 1..22: note = chemically synthesized
  source 1..22: mol_type = other DNA
ctagaccattttttttggtaga

SEQ ID NO: 66841 - DNA, 22 bp, synthetic construct
  misc_feature 1..22: note = chemically synthesized
  source 1..22: mol_type = other DNA
gaccattttttttggtagagct

SEQ ID NO: 66842 - DNA, 22 bp, synthetic construct
  misc_feature 1..22: note = chemically synthesized
  source 1..22: mol_type = other DNA
tttttggtagagctttgaagcc

SEQ ID NO: 66843 - DNA, 22 bp, synthetic construct
  misc_feature 1..22: note = chemically synthesized
  source 1..22: mol_type = other DNA
ttttggtagagctttgaagcct

SEQ ID NO: 66844 - DNA, 22 bp, synthetic construct
  misc_feature 1..22: note = chemically synthesized
  source 1..22: mol_type = other DNA
tttggtagagctttgaagcctt

SEQ ID NO: 66845 - DNA, 22 bp, synthetic construct
  misc_feature 1..22: note = chemically synthesized
  source 1..22: mol_type = other DNA
ttggtagagctttgaagcctta

SEQ ID NO: 66846 - DNA, 22 bp, synthetic construct
  misc_feature 1..22: note = chemically synthesized
  source 1..22: mol_type = other DNA
tggtagagctttgaagccttaa

SEQ ID NO: 66847 - DNA, 22 bp, synthetic construct
  misc_feature 1..22: note = chemically synthesized
  source 1..22: mol_type = other DNA
ggtagagctttgaagccttaaa

SEQ ID NO: 66848 - DNA, 22 bp, synthetic construct
  misc_feature 1..22: note = chemically synthesized
  source 1..22: mol_type = other DNA
gtagagctttgaagccttaaat

SEQ ID NO: 66849 - DNA, 22 bp, synthetic construct
  misc_feature 1..22: note = chemically synthesized
  source 1..22: mol_type = other DNA
tgaagccttaaattagttctca

SEQ ID NO: 66850 - DNA, 22 bp, synthetic construct
  misc_feature 1..22: note = chemically synthesized
  source 1..22: mol_type = other DNA
gaagccttaaattagttctcat

SEQ ID NO: 66851 - DNA, 22 bp, synthetic construct
  misc_feature 1..22: note = chemically synthesized
  source 1..22: mol_type = other DNA
aagccttaaattagttctcata

SEQ ID NO: 66852 - DNA, 22 bp, synthetic construct
  misc_feature 1..22: note = chemically synthesized
  source 1..22: mol_type = other DNA
aaattagttctcataatttctg

SEQ ID NO: 66853 - DNA, 22 bp, synthetic construct
  misc_feature 1..22: note = chemically synthesized
  source 1..22: mol_type = other DNA
aattagttctcataatttctga

SEQ ID NO: 66854 - DNA, 22 bp, synthetic construct
  misc_feature 1..22: note = chemically synthesized
  source 1..22: mol_type = other DNA
gttctcataatttctgagcagc

SEQ ID NO: 66855 - DNA, 22 bp, synthetic construct
  misc_feature 1..22: note = chemically synthesized
  source 1..22: mol_type = other DNA
tcataatttctgagcagctctg

SEQ ID NO: 66856 - DNA, 22 bp, synthetic construct
  misc_feature 1..22: note = chemically synthesized
  source 1..22: mol_type = other DNA
ataatttctgagcagctctgtg

SEQ ID NO: 66857 - DNA, 22 bp, synthetic construct
  misc_feature 1..22: note = chemically synthesized
  source 1..22: mol_type = other DNA
ctgagcagctctgtgttaacca

SEQ ID NO: 66858 - DNA, 22 bp, synthetic construct
  misc_feature 1..22: note = chemically synthesized
  source 1..22: mol_type = other DNA
tgagcagctctgtgttaaccat

SEQ ID NO: 66859 - DNA, 22 bp, synthetic construct
  misc_feature 1..22: note = chemically synthesized
  source 1..22: mol_type = other DNA
agcagctctgtgttaaccatag

SEQ ID NO: 66860 - DNA, 22 bp, synthetic construct
  misc_feature 1..22: note = chemically synthesized
  source 1..22: mol_type = other DNA
tgtgttaaccataggacataat

SEQ ID NO: 66861 - DNA, 22 bp, synthetic construct
  misc_feature 1..22: note = chemically synthesized
  source 1..22: mol_type = other DNA
tgttaaccataggacataatag

SEQ ID NO: 66862 - DNA, 22 bp, synthetic construct
  misc_feature 1..22: note = chemically synthesized
  source 1..22: mol_type = other DNA
accataggacataataggtttt

SEQ ID NO: 66863 - DNA, 22 bp, synthetic construct
  misc_feature 1..22: note = chemically synthesized
  source 1..22: mol_type = other DNA
taattctggagaatggccagtt

SEQ ID NO: 66864 - DNA, 22 bp, synthetic construct
  misc_feature 1..22: note = chemically synthesized
  source 1..22: mol_type = other DNA
aattctggagaatggccagttc

SEQ ID NO: 66865 - DNA, 22 bp, synthetic construct
  misc_feature 1..22: note = chemically synthesized
  source 1..22: mol_type = other DNA
attctggagaatggccagttct

SEQ ID NO: 66866 - DNA, 22 bp, synthetic construct
  misc_feature 1..22: note = chemically synthesized
  source 1..22: mol_type = other DNA
tggagaatggccagttctggtt

SEQ ID NO: 66867 - DNA, 22 bp, synthetic construct
  misc_feature 1..22: note = chemically synthesized
  source 1..22: mol_type = other DNA
gagaatggccagttctggttct

SEQ ID NO: 66868 - DNA, 22 bp, synthetic construct
  misc_feature 1..22: note = chemically synthesized
  source 1..22: mol_type = other DNA
tggttctcagaatctcttggcc

SEQ ID NO: 66869 - DNA, 22 bp, synthetic construct
  misc_feature 1..22: note = chemically synthesized
  source 1..22: mol_type = other DNA
gttctcagaatctcttggccaa

SEQ ID NO: 66870 - DNA, 22 bp, synthetic construct
  misc_feature 1..22: note = chemically synthesized
  source 1..22: mol_type = other DNA
tcagaatctcttggccaagact

SEQ ID NO: 66871 - DNA, 22 bp, synthetic construct
  misc_feature 1..22: note = chemically synthesized
  source 1..22: mol_type = other DNA
agaatctcttggccaagactgt

SEQ ID NO: 66872 - DNA, 22 bp, synthetic construct
  misc_feature 1..22: note = chemically synthesized
  source 1..22: mol_type = other DNA
ttggccaagactgtcacagagt

SEQ ID NO: 66873 - DNA, 22 bp, synthetic construct
  misc_feature 1..22: note = chemically synthesized
  source 1..22: mol_type = other DNA
ggccaagactgtcacagagtat

SEQ ID NO: 66874 - DNA, 22 bp, synthetic construct
  misc_feature 1..22: note = chemically synthesized
  source 1..22: mol_type = other DNA
gccaagactgtcacagagtatt

SEQ ID NO: 66875 - DNA, 22 bp, synthetic construct
  misc_feature 1..22: note = chemically synthesized
  source 1..22: mol_type = other DNA
tcacagagtattaggcctgtga

SEQ ID NO: 66876 - DNA, 22 bp, synthetic construct
  misc_feature 1..22: note = chemically synthesized
  source 1..22: mol_type = other DNA
ggcctgtgaagtgccttccacg

SEQ ID NO: 66877 - DNA, 22 bp, synthetic construct
  misc_feature 1..22: note = chemically synthesized
  source 1..22: mol_type = other DNA
tgaagtgccttccacgcttccc

SEQ ID NO: 66878 - DNA, 22 bp, synthetic construct
  misc_feature 1..22: note = chemically synthesized
  source 1..22: mol_type = other DNA
ccacgcttcccctgaagtccac

SEQ ID NO: 66879 - DNA, 22 bp, synthetic construct
  misc_feature 1..22: note = chemically synthesized
  source 1..22: mol_type = other DNA
cacgcttcccctgaagtccaca

SEQ ID NO: 66880 - DNA, 22 bp, synthetic construct
  misc_feature 1..22: note = chemically synthesized
  source 1..22: mol_type = other DNA
cccctgaagtccacacaccagt

SEQ ID NO: 66881 - DNA, 22 bp, synthetic construct
  misc_feature 1..22: note = chemically synthesized
  source 1..22: mol_type = other DNA
ccctgaagtccacacaccagtc

SEQ ID NO: 66882 - DNA, 22 bp, synthetic construct
  misc_feature 1..22: note = chemically synthesized
  source 1..22: mol_type = other DNA
aagtccacacaccagtcactca

SEQ ID NO: 66883 - DNA, 22 bp, synthetic construct
  misc_feature 1..22: note = chemically synthesized
  source 1..22: mol_type = other DNA
aatagtgccagaaaggcaagtg

SEQ ID NO: 66884 - DNA, 22 bp, synthetic construct
  misc_feature 1..22: note = chemically synthesized
  source 1..22: mol_type = other DNA
cctgaaaggggctgtatgacca

SEQ ID NO: 66885 - DNA, 22 bp, synthetic construct
  misc_feature 1..22: note = chemically synthesized
  source 1..22: mol_type = other DNA
aaaggggctgtatgaccagtgt

SEQ ID NO: 66886 - DNA, 22 bp, synthetic construct
  misc_feature 1..22: note = chemically synthesized
  source 1..22: mol_type = other DNA
tatgaccagtgtccagacgaca

SEQ ID NO: 66887 - DNA, 22 bp, synthetic construct
  misc_feature 1..22: note = chemically synthesized
  source 1..22: mol_type = other DNA
ctgccgcggccctgaggtggca

SEQ ID NO: 66888 - DNA, 22 bp, synthetic construct
  misc_feature 1..22: note = chemically synthesized
  source 1..22: mol_type = other DNA
tgccgcggccctgaggtggcag

SEQ ID NO: 66889 - DNA, 22 bp, synthetic construct
  misc_feature 1..22: note = chemically synthesized
  source 1..22: mol_type = other DNA
ccgcggccctgaggtggcagtg

SEQ ID NO: 66890 - DNA, 22 bp, synthetic construct
  misc_feature 1..22: note = chemically synthesized
  source 1..22: mol_type = other DNA
aggtggcagtgggaggggtttg

SEQ ID NO: 66891 - DNA, 22 bp, synthetic construct
  misc_feature 1..22: note = chemically synthesized
  source 1..22: mol_type = other DNA
gtcagaaggtgggcagggtcct

SEQ ID NO: 66892 - DNA, 22 bp, synthetic construct
  misc_feature 1..22: note = chemically synthesized
  source 1..22: mol_type = other DNA
tcagaaggtgggcagggtcctg

SEQ ID NO: 66893 - DNA, 22 bp, synthetic construct
  misc_feature 1..22: note = chemically synthesized
  source 1..22: mol_type = other DNA
aagcccagccctgtcctccctg

SEQ ID NO: 66894 - DNA, 22 bp, synthetic construct
  misc_feature 1..22: note = chemically synthesized
  source 1..22: mol_type = other DNA
tcctccctgtccacagcaggac

SEQ ID NO: 66895 - DNA, 22 bp, synthetic construct
  misc_feature 1..22: note = chemically synthesized
  source 1..22: mol_type = other DNA
cctgtccacagcaggacacttc

SEQ ID NO: 66896 - DNA, 22 bp, synthetic construct
  misc_feature 1..22: note = chemically synthesized
  source 1..22: mol_type = other DNA
tccacagcaggacacttctgag

SEQ ID NO: 66897 - DNA, 22 bp, synthetic construct
  misc_feature 1..22: note = chemically synthesized
  source 1..22: mol_type = other DNA
ctgagatcttcgagttcctcac

SEQ ID NO: 66898 - DNA, 22 bp, synthetic construct
  misc_feature 1..22: note = chemically synthesized
  source 1..22: mol_type = other DNA
tgagatcttcgagttcctcact

SEQ ID NO: 66899 - DNA, 22 bp, synthetic construct
  misc_feature 1..22: note = chemically synthesized
  source 1..22: mol_type = other DNA
agatcttcgagttcctcactgg

SEQ ID NO: 66900 - DNA, 22 bp, synthetic construct
  misc_feature 1..22: note = chemically synthesized
  source 1..22: mol_type = other DNA
cgagttcctcactgggaggtga

SEQ ID NO: 66901 - DNA, 22 bp, synthetic construct
  misc_feature 1..22: note = chemically synthesized
  source 1..22: mol_type = other DNA
gagttcctcactgggaggtgag

SEQ ID NO: 66902 - DNA, 22 bp, synthetic construct
  misc_feature 1..22: note = chemically synthesized
  source 1..22: mol_type = other DNA
ctcactgggaggtgaggctaat

SEQ ID NO: 66903 - DNA, 22 bp, synthetic construct
  misc_feature 1..22: note = chemically synthesized
  source 1..22: mol_type = other DNA
actgggaggtgaggctaatacc

SEQ ID NO: 66904 - DNA, 22 bp, synthetic construct
  misc_feature 1..22: note = chemically synthesized
  source 1..22: mol_type = other DNA
ggaggtgaggctaataccttcc

SEQ ID NO: 66905 - DNA, 22 bp, synthetic construct
  misc_feature 1..22: note = chemically synthesized
  source 1..22: mol_type = other DNA
ataccttccctcattccacagg

SEQ ID NO: 66906 - DNA, 22 bp, synthetic construct
  misc_feature 1..22: note = chemically synthesized
  source 1..22: mol_type = other DNA
ccctcattccacagggcgactg

SEQ ID NO: 66907 - DNA, 22 bp, synthetic construct
  misc_feature 1..22: note = chemically synthesized
  source 1..22: mol_type = other DNA
cctcattccacagggcgactgt

SEQ ID NO: 66908 - DNA, 22 bp, synthetic construct
  misc_feature 1..22: note = chemically synthesized
  source 1..22: mol_type = other DNA
attccacagggcgactgttggg

SEQ ID NO: 66909 - DNA, 22 bp, synthetic construct
  misc_feature 1..22: note = chemically synthesized
  source 1..22: mol_type = other DNA
cacagggcgactgttggggcag

SEQ ID NO: 66910 - DNA, 22 bp, synthetic construct
  misc_feature 1..22: note = chemically synthesized
  source 1..22: mol_type = other DNA
ttggggcaggatgtgaggagag

SEQ ID NO: 66911 - DNA, 22 bp, synthetic construct
  misc_feature 1..22: note = chemically synthesized
  source 1..22: mol_type = other DNA
gggcaggatgtgaggagagtac

SEQ ID NO: 66912 - DNA, 22 bp, synthetic construct
  misc_feature 1..22: note = chemically synthesized
  source 1..22: mol_type = other DNA
tgggaagaacataacactttcc

SEQ ID NO: 66913 - DNA, 22 bp, synthetic construct
  misc_feature 1..22: note = chemically synthesized
  source 1..22: mol_type = other DNA
gggaagaacataacactttcca

SEQ ID NO: 66914 - DNA, 22 bp, synthetic construct
  misc_feature 1..22: note = chemically synthesized
  source 1..22: mol_type = other DNA
ggaagaacataacactttccac

SEQ ID NO: 66915 - DNA, 22 bp, synthetic construct
  misc_feature 1..22: note = chemically synthesized
  source 1..22: mol_type = other DNA
tccacccagcctgggcaacatg

SEQ ID NO: 66916 - DNA, 22 bp, synthetic construct
  misc_feature 1..22: note = chemically synthesized
  source 1..22: mol_type = other DNA
ccacccagcctgggcaacatgg

SEQ ID NO: 66917 - DNA, 22 bp, synthetic construct
  misc_feature 1..22: note = chemically synthesized
  source 1..22: mol_type = other DNA
cacccagcctgggcaacatggt

SEQ ID NO: 66918 - DNA, 22 bp, synthetic construct
  misc_feature 1..22: note = chemically synthesized
  source 1..22: mol_type = other DNA
ggcaacatggtgagatcccatc

SEQ ID NO: 66919 - DNA, 22 bp, synthetic construct
  misc_feature 1..22: note = chemically synthesized
  source 1..22: mol_type = other DNA
tacaaaaaatacaaaaattagc

SEQ ID NO: 66920 - DNA, 22 bp, synthetic construct
  misc_feature 1..22: note = chemically synthesized
  source 1..22: mol_type = other DNA
caaaaaatacaaaaattagcca

SEQ ID NO: 66921 - DNA, 22 bp, synthetic construct
  misc_feature 1..22: note = chemically synthesized
  source 1..22: mol_type = other DNA
gccaggtgtggtggtggcgcat

SEQ ID NO: 66922 - DNA, 22 bp, synthetic construct
  misc_feature 1..22: note = chemically synthesized
  source 1..22: mol_type = other DNA
tagtcctagctacttgagagct

SEQ ID NO: 66923 - DNA, 22 bp, synthetic construct
  misc_feature 1..22: note = chemically synthesized
  source 1..22: mol_type = other DNA
gctacttgagagctgaggcagg

SEQ ID NO: 66924 - DNA, 22 bp, synthetic construct
  misc_feature 1..22: note = chemically synthesized
  source 1..22: mol_type = other DNA
cttgagagctgaggcaggagga

SEQ ID NO: 66925 - DNA, 22 bp, synthetic construct
  misc_feature 1..22: note = chemically synthesized
  source 1..22: mol_type = other DNA
gagagctgaggcaggaggactg

SEQ ID NO: 66926 - DNA, 22 bp, synthetic construct
  misc_feature 1..22: note = chemically synthesized
  source 1..22: mol_type = other DNA
agagctgaggcaggaggactgc

SEQ ID NO: 66927 - DNA, 22 bp, synthetic construct
  misc_feature 1..22: note = chemically synthesized
  source 1..22: mol_type = other DNA
aggcaggaggactgcttgaact

SEQ ID NO: 66928 - DNA, 22 bp, synthetic construct
  misc_feature 1..22: note = chemically synthesized
  source 1..22: mol_type = other DNA
cttgaactcgggaggcggaggt

SEQ ID NO: 66929 - DNA, 22 bp, synthetic construct
  misc_feature 1..22: note = chemically synthesized
  source 1..22: mol_type = other DNA
gaactcgggaggcggaggttgc

SEQ ID NO: 66930 - DNA, 22 bp, synthetic construct
  misc_feature 1..22: note = chemically synthesized
  source 1..22: mol_type = other DNA
aactcgggaggcggaggttgca

SEQ ID NO: 66931 - DNA, 22 bp, synthetic construct
  misc_feature 1..22: note = chemically synthesized
  source 1..22: mol_type = other DNA
gggaggcggaggttgcagtgag

SEQ ID NO: 66932 - DNA, 22 bp, synthetic construct
  misc_feature 1..22: note = chemically synthesized
  source 1..22: mol_type = other DNA
cagtgagccaagattgcaccac

SEQ ID NO: 66933 - DNA, 22 bp, synthetic construct
  misc_feature 1..22: note = chemically synthesized
  source 1..22: mol_type = other DNA
caccactgcactccagcctggg

SEQ ID NO: 66934 - DNA, 22 bp, synthetic construct
  misc_feature 1..22: note = chemically synthesized
  source 1..22: mol_type = other DNA
cactccagcctgggcaacagag

SEQ ID NO: 66935 - DNA, 22 bp, synthetic construct
  misc_feature 1..22: note = chemically synthesized
  source 1..22: mol_type = other DNA
cagcctgggcaacagagtgaga

SEQ ID NO: 66936 - DNA, 22 bp, synthetic construct
  misc_feature 1..22: note = chemically synthesized
  source 1..22: mol_type = other DNA
ggcaacagagtgagaccatgtc

SEQ ID NO: 66937 - DNA, 22 bp, synthetic construct
  misc_feature 1..22: note = chemically synthesized
  source 1..22: mol_type = other DNA
aattaaaaaaaaaaaaaaaaaa

SEQ ID NO: 66938 - DNA, 22 bp, synthetic construct
  misc_feature 1..22: note = chemically synthesized
  source 1..22: mol_type = other DNA
aaaaaaaaaaaaaaaaagcttt

SEQ ID NO: 66939 - DNA, 22 bp, synthetic construct
  misc_feature 1..22: note = chemically synthesized
  source 1..22: mol_type = other DNA
tccataaaggccaggacagatg

SEQ ID NO: 66940 - DNA, 22 bp, synthetic construct
  misc_feature 1..22: note = chemically synthesized
  source 1..22: mol_type = other DNA
ccataaaggccaggacagatgt

SEQ ID NO: 66941 - DNA, 22 bp, synthetic construct
  misc_feature 1..22: note = chemically synthesized
  source 1..22: mol_type = other DNA
cataaaggccaggacagatgtg

SEQ ID NO: 66942 - DNA, 22 bp, synthetic construct
  misc_feature 1..22: note = chemically synthesized
  source 1..22: mol_type = other DNA
ccttaagaagggctagagttgg

SEQ ID NO: 66943 - DNA, 22 bp, synthetic construct
  misc_feature 1..22: note = chemically synthesized
  source 1..22: mol_type = other DNA
cttaagaagggctagagttgga

SEQ ID NO: 66944 - DNA, 22 bp, synthetic construct
  misc_feature 1..22: note = chemically synthesized
  source 1..22: mol_type = other DNA
aagaagggctagagttggaggc

SEQ ID NO: 66945 - DNA, 22 bp, synthetic construct
  misc_feature 1..22: note = chemically synthesized
  source 1..22: mol_type = other DNA
agaagggctagagttggaggcc

SEQ ID NO: 66946 - DNA, 22 bp, synthetic construct
  misc_feature 1..22: note = chemically synthesized
  source 1..22: mol_type = other DNA
gagttggaggccttgccctcct

SEQ ID NO: 66947 - DNA, 22 bp, synthetic construct
  misc_feature 1..22: note = chemically synthesized
  source 1..22: mol_type = other DNA
gaggccttgccctcctctgggc

SEQ ID NO: 66948 - DNA, 22 bp, synthetic construct
  misc_feature 1..22: note = chemically synthesized
  source 1..22: mol_type = other DNA
gccctcctctgggcttgttggc

SEQ ID NO: 66949 - DNA, 22 bp, synthetic construct
  misc_feature 1..22: note = chemically synthesized
  source 1..22: mol_type = other DNA
ccctcctctgggcttgttggcc

SEQ ID NO: 66950 - DNA, 22 bp, synthetic construct
  misc_feature 1..22: note = chemically synthesized
  source 1..22: mol_type = other DNA
ctctgggcttgttggccttggg

SEQ ID NO: 66951 - DNA, 22 bp, synthetic construct
  misc_feature 1..22: note = chemically synthesized
  source 1..22: mol_type = other DNA
tgggcttgttggccttggggga

SEQ ID NO: 66952 - DNA, 22 bp, synthetic construct
  misc_feature 1..22: note = chemically synthesized
  source 1..22: mol_type = other DNA
ggcttgttggccttgggggagg

SEQ ID NO: 66953 - DNA, 22 bp, synthetic construct
  misc_feature 1..22: note = chemically synthesized
  source 1..22: mol_type = other DNA
gttggccttgggggaggcctga

SEQ ID NO: 66954 - DNA, 22 bp, synthetic construct
  misc_feature 1..22: note = chemically synthesized
  source 1..22: mol_type = other DNA
ttggccttgggggaggcctgac

SEQ ID NO: 66955 - DNA, 22 bp, synthetic construct
  misc_feature 1..22: note = chemically synthesized
  source 1..22: mol_type = other DNA
gccttgggggaggcctgacaga

SEQ ID NO: 66956 - DNA, 22 bp, synthetic construct
  misc_feature 1..22: note = chemically synthesized
  source 1..22: mol_type = other DNA
gggggaggcctgacagagcctt

SEQ ID NO: 66957 - DNA, 22 bp, synthetic construct
  misc_feature 1..22: note = chemically synthesized
  source 1..22: mol_type = other DNA
ggggaggcctgacagagccttc

SEQ ID NO: 66958 - DNA, 22 bp, synthetic construct
  misc_feature 1..22: note = chemically synthesized
  source 1..22: mol_type = other DNA
acagagccttcctggggctgcc

SEQ ID NO: 66959 - DNA, 22 bp, synthetic construct
  misc_feature 1..22: note = chemically synthesized
  source 1..22: mol_type = other DNA
cctggggctgcctgttcttctg

SEQ ID NO: 66960 - DNA, 22 bp, synthetic construct
  misc_feature 1..22: note = chemically synthesized
  source 1..22: mol_type = other DNA
ctggggctgcctgttcttctgg

SEQ ID NO: 66961 - DNA, 22 bp, synthetic construct
  misc_feature 1..22: note = chemically synthesized
  source 1..22: mol_type = other DNA
gggctgcctgttcttctggccc

SEQ ID NO: 66962 - DNA, 22 bp, synthetic construct
  misc_feature 1..22: note = chemically synthesized
  source 1..22: mol_type = other DNA
cctgttcttctggccccttctc

SEQ ID NO: 66963 - DNA, 22 bp, synthetic construct
  misc_feature 1..22: note = chemically synthesized
  source 1..22: mol_type = other DNA
ttcttctggccccttctccgtg

SEQ ID NO: 66964 - DNA, 22 bp, synthetic construct
  misc_feature 1..22: note = chemically synthesized
  source 1..22: mol_type = other DNA
ttctggccccttctccgtgcac

SEQ ID NO: 66965 - DNA, 22 bp, synthetic construct
  misc_feature 1..22: note = chemically synthesized
  source 1..22: mol_type = other DNA
ctggccccttctccgtgcacag

SEQ ID NO: 66966 - DNA, 22 bp, synthetic construct
  misc_feature 1..22: note = chemically synthesized
  source 1..22: mol_type = other DNA
tggccccttctccgtgcacaga

SEQ ID NO: 66967 - DNA, 22 bp, synthetic construct
  misc_feature 1..22: note = chemically synthesized
  source 1..22: mol_type = other DNA
gccccttctccgtgcacagacc

SEQ ID NO: 66968 - DNA, 22 bp, synthetic construct
  misc_feature 1..22: note = chemically synthesized
  source 1..22: mol_type = other DNA
ctccgtgcacagaccagtcttg

SEQ ID NO: 66969 - DNA, 22 bp, synthetic construct
  misc_feature 1..22: note = chemically synthesized
  source 1..22: mol_type = other DNA
tccgtgcacagaccagtcttgg

SEQ ID NO: 66970 - DNA, 22 bp, synthetic construct
  misc_feature 1..22: note = chemically synthesized
  source 1..22: mol_type = other DNA
cgtgcacagaccagtcttggat

SEQ ID NO: 66971 - DNA, 22 bp, synthetic construct
  misc_feature 1..22: note = chemically synthesized
  source 1..22: mol_type = other DNA
ggatgataagtcaggaaagccc

SEQ ID NO: 66972 - DNA, 22 bp, synthetic construct
  misc_feature 1..22: note = chemically synthesized
  source 1..22: mol_type = other DNA
gatgataagtcaggaaagccct

SEQ ID NO: 66973 - DNA, 22 bp, synthetic construct
  misc_feature 1..22: note = chemically synthesized
  source 1..22: mol_type = other DNA
cacctggccgggctgcagtgtc

SEQ ID NO: 66974 - DNA, 22 bp, synthetic construct
  misc_feature 1..22: note = chemically synthesized
  source 1..22: mol_type = other DNA
gccgggctgcagtgtcgctggg

SEQ ID NO: 66975 - DNA, 22 bp, synthetic construct
  misc_feature 1..22: note = chemically synthesized
  source 1..22: mol_type = other DNA
cagtgtcgctggggctgcccac

SEQ ID NO: 66976 - DNA, 22 bp, synthetic construct
  misc_feature 1..22: note = chemically synthesized
  source 1..22: mol_type = other DNA
gggctgcccacacttgctgacc

SEQ ID NO: 66977 - DNA, 22 bp, synthetic construct
  misc_feature 1..22: note = chemically synthesized
  source 1..22: mol_type = other DNA
cccacacttgctgaccatggct

SEQ ID NO: 66978 - DNA, 22 bp, synthetic construct
  misc_feature 1..22: note = chemically synthesized
  source 1..22: mol_type = other DNA
gctgaccatggctccccactcc

SEQ ID NO: 66979 - DNA, 22 bp, synthetic construct
  misc_feature 1..22: note = chemically synthesized
  source 1..22: mol_type = other DNA
ctgaccatggctccccactccc

SEQ ID NO: 66980 - DNA, 22 bp, synthetic construct
  misc_feature 1..22: note = chemically synthesized
  source 1..22: mol_type = other DNA
accatggctccccactcccttg

SEQ ID NO: 66981 - DNA, 22 bp, synthetic construct
  misc_feature 1..22: note = chemically synthesized
  source 1..22: mol_type = other DNA
cccactcccttgtctctcacag

SEQ ID NO: 66982 - DNA, 22 bp, synthetic construct
  misc_feature 1..22: note = chemically synthesized
  source 1..22: mol_type = other DNA
ccttgtctctcacagcaccact

SEQ ID NO: 66983 - DNA, 22 bp, synthetic construct
  misc_feature 1..22: note = chemically synthesized
  source 1..22: mol_type = other DNA
gtctctcacagcaccactgccc

SEQ ID NO: 66984 - DNA, 22 bp, synthetic construct
  misc_feature 1..22: note = chemically synthesized
  source 1..22: mol_type = other DNA
tctctcacagcaccactgcccc

SEQ ID NO: 66985 - DNA, 22 bp, synthetic construct
  misc_feature 1..22: note = chemically synthesized
  source 1..22: mol_type = other DNA
tcacagcaccactgcccctgtt

SEQ ID NO: 66986 - DNA, 22 bp, synthetic construct
  misc_feature 1..22: note = chemically synthesized
  source 1..22: mol_type = other DNA
acagcaccactgcccctgtttc

SEQ ID NO: 66987 - DNA, 22 bp, synthetic construct
  misc_feature 1..22: note = chemically synthesized
  source 1..22: mol_type = other DNA
cccctgtttccacagtgcccac

SEQ ID NO: 66988 - DNA, 22 bp, synthetic construct
  misc_feature 1..22: note = chemically synthesized
  source 1..22: mol_type = other DNA
tttccacagtgcccacgaacaa

SEQ ID NO: 66989 - DNA, 22 bp, synthetic construct
  misc_feature 1..22: note = chemically synthesized
  source 1..22: mol_type = other DNA
ccacagtgcccacgaacaaaac

SEQ ID NO: 66990 - DNA, 22 bp, synthetic construct
  misc_feature 1..22: note = chemically synthesized
  source 1..22: mol_type = other DNA
cacagtgcccacgaacaaaaca

SEQ ID NO: 66991 - DNA, 22 bp, synthetic construct
  misc_feature 1..22: note = chemically synthesized
  source 1..22: mol_type = other DNA
ttggaaacaccatgtttgatta

SEQ ID NO: 66992 - DNA, 22 bp, synthetic construct
  misc_feature 1..22: note = chemically synthesized
  source 1..22: mol_type = other DNA
ggaaacaccatgtttgattatt

SEQ ID NO: 66993 - DNA, 22 bp, synthetic construct
  misc_feature 1..22: note = chemically synthesized
  source 1..22: mol_type = other DNA
gaaacaccatgtttgattattt

SEQ ID NO: 66994 - DNA, 22 bp, synthetic construct
  misc_feature 1..22: note = chemically synthesized
  source 1..22: mol_type = other DNA
gattatttctttctttctttct

SEQ ID NO: 66995 - DNA, 22 bp, synthetic construct
  misc_feature 1..22: note = chemically synthesized
  source 1..22: mol_type = other DNA
attatttctttctttctttctt

SEQ ID NO: 66996 - DNA, 22 bp, synthetic construct
  misc_feature 1..22: note = chemically synthesized
  source 1..22: mol_type = other DNA
tttctttctttctttctttctt

SEQ ID NO: 66997 - DNA, 22 bp, synthetic construct
  misc_feature 1..22: note = chemically synthesized
  source 1..22: mol_type = other DNA
ctttctttctttctttctttat

SEQ ID NO: 66998 - DNA, 22 bp, synthetic construct
  misc_feature 1..22: note = chemically synthesized
  source 1..22: mol_type = other DNA
tttctttctttctttctttatt

SEQ ID NO: 66999 - DNA, 22 bp, synthetic construct
  misc_feature 1..22: note = chemically synthesized
  source 1..22: mol_type = other DNA
tctttctttctttctttattta

SEQ ID NO: 67000 - DNA, 22 bp, synthetic construct
  misc_feature 1..22: note = chemically synthesized
  source 1..22: mol_type = other DNA
ctttctttctttctttatttat

SEQ ID NO: 67001 - DNA, 22 bp, synthetic construct
  misc_feature 1..22: note = chemically synthesized
  source 1..22: mol_type = other DNA
tttctttctttctttatttatt

SEQ ID NO: 67002 - DNA, 22 bp, synthetic construct
  misc_feature 1..22: note = chemically synthesized
  source 1..22: mol_type = other DNA
tctttctttctttatttatttt

SEQ ID NO: 67003 - DNA, 22 bp, synthetic construct
  misc_feature 1..22: note = chemically synthesized
  source 1..22: mol_type = other DNA
ctttctttctttatttatttta

SEQ ID NO: 67004 - DNA, 22 bp, synthetic construct
  misc_feature 1..22: note = chemically synthesized
  source 1..22: mol_type = other DNA
tttctttctttatttattttac

SEQ ID NO: 67005 - DNA, 22 bp, synthetic construct
  misc_feature 1..22: note = chemically synthesized
  source 1..22: mol_type = other DNA
tctttctttatttattttactc

SEQ ID NO: 67006 - DNA, 22 bp, synthetic construct
  misc_feature 1..22: note = chemically synthesized
  source 1..22: mol_type = other DNA
ctttctttatttattttactct

SEQ ID NO: 67007 - DNA, 22 bp, synthetic construct
  misc_feature 1..22: note = chemically synthesized
  source 1..22: mol_type = other DNA
tttctttatttattttactcta

SEQ ID NO: 67008 - DNA, 22 bp, synthetic construct
  misc_feature 1..22: note = chemically synthesized
  source 1..22: mol_type = other DNA
tctttatttattttactctaag

SEQ ID NO: 67009 - DNA, 22 bp, synthetic construct
  misc_feature 1..22: note = chemically synthesized
  source 1..22: mol_type = other DNA
ctttatttattttactctaagt

SEQ ID NO: 67010 - DNA, 22 bp, synthetic construct
  misc_feature 1..22: note = chemically synthesized
  source 1..22: mol_type = other DNA
tttatttattttactctaagtt

SEQ ID NO: 67011 - DNA, 22 bp, synthetic construct
  misc_feature 1..22: note = chemically synthesized
  source 1..22: mol_type = other DNA
tatttattttactctaagttct

SEQ ID NO: 67012 - DNA, 22 bp, synthetic construct
  misc_feature 1..22: note = chemically synthesized
  source 1..22: mol_type = other DNA
atttattttactctaagttctg

SEQ ID NO: 67013 - DNA, 22 bp, synthetic construct
  misc_feature 1..22: note = chemically synthesized
  source 1..22: mol_type = other DNA
tttattttactctaagttctgg

SEQ ID NO: 67014 - DNA, 22 bp, synthetic construct
  misc_feature 1..22: note = chemically synthesized
  source 1..22: mol_type = other DNA
attttactctaagttctgggat

SEQ ID NO: 67015 - DNA, 22 bp, synthetic construct
  misc_feature 1..22: note = chemically synthesized
  source 1..22: mol_type = other DNA
ttttactctaagttctgggata

SEQ ID NO: 67016 - DNA, 22 bp, synthetic construct
  misc_feature 1..22: note = chemically synthesized
  source 1..22: mol_type = other DNA
tactctaagttctgggatacat

SEQ ID NO: 67017 - DNA, 22 bp, synthetic construct
  misc_feature 1..22: note = chemically synthesized
  source 1..22: mol_type = other DNA
actctaagttctgggatacatg

SEQ ID NO: 67018 - DNA, 22 bp, synthetic construct
  misc_feature 1..22: note = chemically synthesized
  source 1..22: mol_type = other DNA
ctctaagttctgggatacatgt

SEQ ID NO: 67019 - DNA, 22 bp, synthetic construct
  misc_feature 1..22: note = chemically synthesized
  source 1..22: mol_type = other DNA
taagttctgggatacatgtgca

SEQ ID NO: 67020 - DNA, 22 bp, synthetic construct
  misc_feature 1..22: note = chemically synthesized
  source 1..22: mol_type = other DNA
agttctgggatacatgtgcaga

SEQ ID NO: 67021 - DNA, 22 bp, synthetic construct
  misc_feature 1..22: note = chemically synthesized
  source 1..22: mol_type = other DNA
tgggatacatgtgcagaatgtg

SEQ ID NO: 67022 - DNA, 22 bp, synthetic construct
  misc_feature 1..22: note = chemically synthesized
  source 1..22: mol_type = other DNA
ggatacatgtgcagaatgtgca

SEQ ID NO: 67023 - DNA, 22 bp, synthetic construct
  misc_feature 1..22: note = chemically synthesized
  source 1..22: mol_type = other DNA
gttacataagtatacatgtacc

SEQ ID NO: 67024 - DNA, 22 bp, synthetic construct
  misc_feature 1..22: note = chemically synthesized
  source 1..22: mol_type = other DNA
ttacataagtatacatgtacca

SEQ ID NO: 67025 - DNA, 22 bp, synthetic construct
  misc_feature 1..22: note = chemically synthesized
  source 1..22: mol_type = other DNA
cataagtatacatgtaccatgg

SEQ ID NO: 67026 - DNA, 22 bp, synthetic construct
  misc_feature 1..22: note = chemically synthesized
  source 1..22: mol_type = other DNA
gctgcacctatcaacccatcat

SEQ ID NO: 67027 - DNA, 22 bp, synthetic construct
  misc_feature 1..22: note = chemically synthesized
  source 1..22: mol_type = other DNA
ctgcacctatcaacccatcatc

SEQ ID NO: 67028 - DNA, 22 bp, synthetic construct
  misc_feature 1..22: note = chemically synthesized
  source 1..22: mol_type = other DNA
cacctatcaacccatcatctac

SEQ ID NO: 67029 - DNA, 22 bp, synthetic construct
  misc_feature 1..22: note = chemically synthesized
  source 1..22: mol_type = other DNA
tcaacccatcatctacattagg

SEQ ID NO: 67030 - DNA, 22 bp, synthetic construct
  misc_feature 1..22: note = chemically synthesized
  source 1..22: mol_type = other DNA
cattaggcatttctcctaatgc

SEQ ID NO: 67031 - DNA, 22 bp, synthetic construct
  misc_feature 1..22: note = chemically synthesized
  source 1..22: mol_type = other DNA
ggcatttctcctaatgctatcc

SEQ ID NO: 67032 - DNA, 22 bp, synthetic construct
  misc_feature 1..22: note = chemically synthesized
  source 1..22: mol_type = other DNA
ctcctaatgctatccctcccct

SEQ ID NO: 67033 - DNA, 22 bp, synthetic construct
  misc_feature 1..22: note = chemically synthesized
  source 1..22: mol_type = other DNA
tcctaatgctatccctcccctt

SEQ ID NO: 67034 - DNA, 22 bp, synthetic construct
  misc_feature 1..22: note = chemically synthesized
  source 1..22: mol_type = other DNA
ctaatgctatccctccccttgc

SEQ ID NO: 67035 - DNA, 22 bp, synthetic construct
  misc_feature 1..22: note = chemically synthesized
  source 1..22: mol_type = other DNA
atgctatccctccccttgcccc

SEQ ID NO: 67036 - DNA, 22 bp, synthetic construct
  misc_feature 1..22: note = chemically synthesized
  source 1..22: mol_type = other DNA
tccctccccttgcccctccacc

SEQ ID NO: 67037 - DNA, 22 bp, synthetic construct
  misc_feature 1..22: note = chemically synthesized
  source 1..22: mol_type = other DNA
cccttgcccctccacccatgtt

SEQ ID NO: 67038 - DNA, 22 bp, synthetic construct
  misc_feature 1..22: note = chemically synthesized
  source 1..22: mol_type = other DNA
gcccctccacccatgtttggtt

SEQ ID NO: 67039 - DNA, 22 bp, synthetic construct
  misc_feature 1..22: note = chemically synthesized
  source 1..22: mol_type = other DNA
cccctccacccatgtttggttt

SEQ ID NO: 67040 - DNA, 22 bp, synthetic construct
  misc_feature 1..22: note = chemically synthesized
  source 1..22: mol_type = other DNA
cacccatgtttggttttcttta

SEQ ID NO: 67041 - DNA, 22 bp, synthetic construct
  misc_feature 1..22: note = chemically synthesized
  source 1..22: mol_type = other DNA
ggttttctttagcttattctag

SEQ ID NO: 67042 - DNA, 22 bp, synthetic construct
  misc_feature 1..22: note = chemically synthesized
  source 1..22: mol_type = other DNA
gttttctttagcttattctagt

SEQ ID NO: 67043 - DNA, 22 bp, synthetic construct
  misc_feature 1..22: note = chemically synthesized
  source 1..22: mol_type = other DNA
tctttagcttattctagtattt

SEQ ID NO: 67044 - DNA, 22 bp, synthetic construct
  misc_feature 1..22: note = chemically synthesized
  source 1..22: mol_type = other DNA
ctttagcttattctagtatttt

SEQ ID NO: 67045 - DNA, 22 bp, synthetic construct
  misc_feature 1..22: note = chemically synthesized
  source 1..22: mol_type = other DNA
tttagcttattctagtattttc

SEQ ID NO: 67046 - DNA, 22 bp, synthetic construct
  misc_feature 1..22: note = chemically synthesized
  source 1..22: mol_type = other DNA
tagcttattctagtattttctc

SEQ ID NO: 67047 - DNA, 22 bp, synthetic construct
  misc_feature 1..22: note = chemically synthesized
  source 1..22: mol_type = other DNA
agcttattctagtattttctca

SEQ ID NO: 67048 - DNA, 22 bp, synthetic construct
  misc_feature 1..22: note = chemically synthesized
  source 1..22: mol_type = other DNA
gcttattctagtattttctcaa

SEQ ID NO: 67049 - DNA, 22 bp, synthetic construct
  misc_feature 1..22: note = chemically synthesized
  source 1..22: mol_type = other DNA
attctagtattttctcaagacc

SEQ ID NO: 67050 - DNA, 22 bp, synthetic construct
  misc_feature 1..22: note = chemically synthesized
  source 1..22: mol_type = other DNA
ttctagtattttctcaagaccg

SEQ ID NO: 67051 - DNA, 22 bp, synthetic construct
  misc_feature 1..22: note = chemically synthesized
  source 1..22: mol_type = other DNA
tagtattttctcaagaccgatc

SEQ ID NO: 67052 - DNA, 22 bp, synthetic construct
  misc_feature 1..22: note = chemically synthesized
  source 1..22: mol_type = other DNA
gtattttctcaagaccgatcga

SEQ ID NO: 67053 - DNA, 22 bp, synthetic construct
  misc_feature 1..22: note = chemically synthesized
  source 1..22: mol_type = other DNA
tctcaagaccgatcgaaatgat

SEQ ID NO: 67054 - DNA, 22 bp, synthetic construct
  misc_feature 1..22: note = chemically synthesized
  source 1..22: mol_type = other DNA
ctcaagaccgatcgaaatgata

SEQ ID NO: 67055 - DNA, 22 bp, synthetic construct
  misc_feature 1..22: note = chemically synthesized
  source 1..22: mol_type = other DNA
tcaagaccgatcgaaatgataa

SEQ ID NO: 67056 - DNA, 22 bp, synthetic construct
  misc_feature 1..22: note = chemically synthesized
  source 1..22: mol_type = other DNA
aagaccgatcgaaatgataata

SEQ ID NO: 67057 - DNA, 22 bp, synthetic construct
  misc_feature 1..22: note = chemically synthesized
  source 1..22: mol_type = other DNA
gttgtgagttgatgcagataaa

SEQ ID NO: 67058 - DNA, 22 bp, synthetic construct
  misc_feature 1..22: note = chemically synthesized
  source 1..22: mol_type = other DNA
ttgtgagttgatgcagataaaa

SEQ ID NO: 67059 - DNA, 22 bp, synthetic construct
  misc_feature 1..22: note = chemically synthesized
  source 1..22: mol_type = other DNA
tgagttgatgcagataaaaagg

SEQ ID NO: 67060 - DNA, 22 bp, synthetic construct
  misc_feature 1..22: note = chemically synthesized
  source 1..22: mol_type = other DNA
atgcagataaaaaggcttgggg

SEQ ID NO: 67061 - DNA, 22 bp, synthetic construct
  misc_feature 1..22: note = chemically synthesized
  source 1..22: mol_type = other DNA
ggggtggtcttcagagtaattt

SEQ ID NO: 67062 - DNA, 22 bp, synthetic construct
  misc_feature 1..22: note = chemically synthesized
  source 1..22: mol_type = other DNA
gggtggtcttcagagtaatttg

SEQ ID NO: 67063 - DNA, 22 bp, synthetic construct
  misc_feature 1..22: note = chemically synthesized
  source 1..22: mol_type = other DNA
cagagtaatttgggagttgtgt

SEQ ID NO: 67064 - DNA, 22 bp, synthetic construct
  misc_feature 1..22: note = chemically synthesized
  source 1..22: mol_type = other DNA
agagtaatttgggagttgtgtg

SEQ ID NO: 67065 - DNA, 22 bp, synthetic construct
  misc_feature 1..22: note = chemically synthesized
  source 1..22: mol_type = other DNA
gggagttgtgtgttctgctggc

SEQ ID NO: 67066 - DNA, 22 bp, synthetic construct
  misc_feature 1..22: note = chemically synthesized
  source 1..22: mol_type = other DNA
ggagttgtgtgttctgctggct

SEQ ID NO: 67067 - DNA, 22 bp, synthetic construct
  misc_feature 1..22: note = chemically synthesized
  source 1..22: mol_type = other DNA
tgtgttctgctggctttgatag

SEQ ID NO: 67068 - DNA, 22 bp, synthetic construct
  misc_feature 1..22: note = chemically synthesized
  source 1..22: mol_type = other DNA
tgctggctttgatagacaagcc

SEQ ID NO: 67069 - DNA, 22 bp, synthetic construct
  misc_feature 1..22: note = chemically synthesized
  source 1..22: mol_type = other DNA
ctggctttgatagacaagccct

SEQ ID NO: 67070 - DNA, 22 bp, synthetic construct
  misc_feature 1..22: note = chemically synthesized
  source 1..22: mol_type = other DNA
gctttgatagacaagcccttct

SEQ ID NO: 67071 - DNA, 22 bp, synthetic construct
  misc_feature 1..22: note = chemically synthesized
  source 1..22: mol_type = other DNA
tgatagacaagcccttctctgc

SEQ ID NO: 67072 - DNA, 22 bp, synthetic construct
  misc_feature 1..22: note = chemically synthesized
  source 1..22: mol_type = other DNA
gatagacaagcccttctctgct

SEQ ID NO: 67073 - DNA, 22 bp, synthetic construct
  misc_feature 1..22: note = chemically synthesized
  source 1..22: mol_type = other DNA
atagacaagcccttctctgctc

SEQ ID NO: 67074 - DNA, 22 bp, synthetic construct
  misc_feature 1..22: note = chemically synthesized
  source 1..22: mol_type = other DNA
ctctgctctggcaggtgttatc

SEQ ID NO: 67075 - DNA, 22 bp, synthetic construct
  misc_feature 1..22: note = chemically synthesized
  source 1..22: mol_type = other DNA
tctgctctggcaggtgttatca

SEQ ID NO: 67076 - DNA, 22 bp, synthetic construct
  misc_feature 1..22: note = chemically synthesized
  source 1..22: mol_type = other DNA
tgctctggcaggtgttatcaga

SEQ ID NO: 67077 - DNA, 22 bp, synthetic construct
  misc_feature 1..22: note = chemically synthesized
  source 1..22: mol_type = other DNA
ctctggcaggtgttatcagaat

SEQ ID NO: 67078 - DNA, 22 bp, synthetic construct
  misc_feature 1..22: note = chemically synthesized
  source 1..22: mol_type = other DNA
tggcaggtgttatcagaatcaa

SEQ ID NO: 67079 - DNA, 22 bp, synthetic construct
  misc_feature 1..22: note = chemically synthesized
  source 1..22: mol_type = other DNA
gcaggtgttatcagaatcaaac

SEQ ID NO: 67080 - DNA, 22 bp, synthetic construct
  misc_feature 1..22: note = chemically synthesized
  source 1..22: mol_type = other DNA
tcagaatcaaacgtttgcaaat

SEQ ID NO: 67081 - DNA, 22 bp, synthetic construct
  misc_feature 1..22: note = chemically synthesized
  source 1..22: mol_type = other DNA
gcaaatgatcattctcatcgca

SEQ ID NO: 67082 - DNA, 22 bp, synthetic construct
  misc_feature 1..22: note = chemically synthesized
  source 1..22: mol_type = other DNA
caaatgatcattctcatcgcat

SEQ ID NO: 67083 - DNA, 22 bp, synthetic construct
  misc_feature 1..22: note = chemically synthesized
  source 1..22: mol_type = other DNA
tcatcgcatccatcttcacagc

SEQ ID NO: 67084 - DNA, 22 bp, synthetic construct
  misc_feature 1..22: note = chemically synthesized
  source 1..22: mol_type = other DNA
atcgcatccatcttcacagccc

SEQ ID NO: 67085 - DNA, 22 bp, synthetic construct
  misc_feature 1..22: note = chemically synthesized
  source 1..22: mol_type = other DNA
cacagccccatgcctcttcctg

SEQ ID NO: 67086 - DNA, 22 bp, synthetic construct
  misc_feature 1..22: note = chemically synthesized
  source 1..22: mol_type = other DNA
acagccccatgcctcttcctga

SEQ ID NO: 67087 - DNA, 22 bp, synthetic construct
  misc_feature 1..22: note = chemically synthesized
  source 1..22: mol_type = other DNA
ttcctgaatgctcagttgaaaa

SEQ ID NO: 67088 - DNA, 22 bp, synthetic construct
  misc_feature 1..22: note = chemically synthesized
  source 1..22: mol_type = other DNA
cctgaatgctcagttgaaaatg

SEQ ID NO: 67089 - DNA, 22 bp, synthetic construct
  misc_feature 1..22: note = chemically synthesized
  source 1..22: mol_type = other DNA
ctgaatgctcagttgaaaatgc

SEQ ID NO: 67090 - DNA, 22 bp, synthetic construct
  misc_feature 1..22: note = chemically synthesized
  source 1..22: mol_type = other DNA
aatgctcagttgaaaatgcgta

SEQ ID NO: 67091 - DNA, 22 bp, synthetic construct
  misc_feature 1..22: note = chemically synthesized
  source 1..22: mol_type = other DNA
agttgaaaatgcgtatttcacc

SEQ ID NO: 67092 - DNA, 22 bp, synthetic construct
  misc_feature 1..22: note = chemically synthesized
  source 1..22: mol_type = other DNA
aaaatgcgtatttcaccttcct

SEQ ID NO: 67093 - DNA, 22 bp, synthetic construct
  misc_feature 1..22: note = chemically synthesized
  source 1..22: mol_type = other DNA
caccttcctcaggtatctaata

SEQ ID NO: 67094 - DNA, 22 bp, synthetic construct
  misc_feature 1..22: note = chemically synthesized
  source 1..22: mol_type = other DNA
accttcctcaggtatctaatac

SEQ ID NO: 67095 - DNA, 22 bp, synthetic construct
  misc_feature 1..22: note = chemically synthesized
  source 1..22: mol_type = other DNA
cctcaggtatctaatacttaac

SEQ ID NO: 67096 - DNA, 22 bp, synthetic construct
  misc_feature 1..22: note = chemically synthesized
  source 1..22: mol_type = other DNA
ctcaggtatctaatacttaacc

SEQ ID NO: 67097 - DNA, 22 bp, synthetic construct
  misc_feature 1..22: note = chemically synthesized
  source 1..22: mol_type = other DNA
aggtatctaatacttaacctgg

SEQ ID NO: 67098 - DNA, 22 bp, synthetic construct
  misc_feature 1..22: note = chemically synthesized
  source 1..22: mol_type = other DNA
atacttaacctgggagaaacgc

SEQ ID NO: 67099 - DNA, 22 bp, synthetic construct
  misc_feature 1..22: note = chemically synthesized
  source 1..22: mol_type = other DNA
aacctgggagaaacgcaagtgt

SEQ ID NO: 67100 - DNA, 22 bp, synthetic construct
  misc_feature 1..22: note = chemically synthesized
  source 1..22: mol_type = other DNA
acctgggagaaacgcaagtgtg

SEQ ID NO: 67101 - DNA, 22 bp, synthetic construct
  misc_feature 1..22: note = chemically synthesized
  source 1..22: mol_type = other DNA
ggagaaacgcaagtgtggtttg

SEQ ID NO: 67102 - DNA, 22 bp, synthetic construct
  misc_feature 1..22: note = chemically synthesized
  source 1..22: mol_type = other DNA
gcaaggctttccaggtgtccaa

SEQ ID NO: 67103 - DNA, 22 bp, synthetic construct
  misc_feature 1..22: note = chemically synthesized
  source 1..22: mol_type = other DNA
caaggctttccaggtgtccaaa

SEQ ID NO: 67104 - DNA, 22 bp, synthetic construct
  misc_feature 1..22: note = chemically synthesized
  source 1..22: mol_type = other DNA
tccaggtgtccaaatgatgatt

SEQ ID NO: 67105 - DNA, 22 bp, synthetic construct
  misc_feature 1..22: note = chemically synthesized
  source 1..22: mol_type = other DNA
ccaggtgtccaaatgatgattt

SEQ ID NO: 67106 - DNA, 22 bp, synthetic construct
  misc_feature 1..22: note = chemically synthesized
  source 1..22: mol_type = other DNA
caggtgtccaaatgatgatttc

SEQ ID NO: 67107 - DNA, 22 bp, synthetic construct
  misc_feature 1..22: note = chemically synthesized
  source 1..22: mol_type = other DNA
cccatccttttcttcatttctc

SEQ ID NO: 67108 - DNA, 22 bp, synthetic construct
  misc_feature 1..22: note = chemically synthesized
  source 1..22: mol_type = other DNA
ccatccttttcttcatttctcg

SEQ ID NO: 67109 - DNA, 22 bp, synthetic construct
  misc_feature 1..22: note = chemically synthesized
  source 1..22: mol_type = other DNA
ttcttcatttctcgagtggggc

SEQ ID NO: 67110 - DNA, 22 bp, synthetic construct
  misc_feature 1..22: note = chemically synthesized
  source 1..22: mol_type = other DNA
tcttcatttctcgagtggggca

SEQ ID NO: 67111 - DNA, 22 bp, synthetic construct
  misc_feature 1..22: note = chemically synthesized
  source 1..22: mol_type = other DNA
cttcatttctcgagtggggcag

SEQ ID NO: 67112 - DNA, 22 bp, synthetic construct
  misc_feature 1..22: note = chemically synthesized
  source 1..22: mol_type = other DNA
ttcatttctcgagtggggcagg

SEQ ID NO: 67113 - DNA, 22 bp, synthetic construct
  misc_feature 1..22: note = chemically synthesized
  source 1..22: mol_type = other DNA
catttctcgagtggggcaggga

SEQ ID NO: 67114 - DNA, 22 bp, synthetic construct
  misc_feature 1..22: note = chemically synthesized
  source 1..22: mol_type = other DNA
atttctcgagtggggcagggag

SEQ ID NO: 67115 - DNA, 22 bp, synthetic construct
  misc_feature 1..22: note = chemically synthesized
  source 1..22: mol_type = other DNA
ctcgagtggggcagggaggcat

SEQ ID NO: 67116 - DNA, 22 bp, synthetic construct
  misc_feature 1..22: note = chemically synthesized
  source 1..22: mol_type = other DNA
tcgagtggggcagggaggcatc

SEQ ID NO: 67117 - DNA, 22 bp, synthetic construct
  misc_feature 1..22: note = chemically synthesized
  source 1..22: mol_type = other DNA
gagtggggcagggaggcatcgg

SEQ ID NO: 67118 - DNA, 22 bp, synthetic construct
  misc_feature 1..22: note = chemically synthesized
  source 1..22: mol_type = other DNA
gtgatacgtttgtgtgaagctg

SEQ ID NO: 67119 - DNA, 22 bp, synthetic construct
  misc_feature 1..22: note = chemically synthesized
  source 1..22: mol_type = other DNA
tgatacgtttgtgtgaagctgg

SEQ ID NO: 67120 - DNA, 22 bp, synthetic construct
  misc_feature 1..22: note = chemically synthesized
  source 1..22: mol_type = other DNA
gtgtgaagctggacaattcggg

SEQ ID NO: 67121 - DNA, 22 bp, synthetic construct
  misc_feature 1..22: note = chemically synthesized
  source 1..22: mol_type = other DNA
tgtgaagctggacaattcgggt

SEQ ID NO: 67122 - DNA, 22 bp, synthetic construct
  misc_feature 1..22: note = chemically synthesized
  source 1..22: mol_type = other DNA
gacaattcgggtgacagaaata

SEQ ID NO: 67123 - DNA, 22 bp, synthetic construct
  misc_feature 1..22: note = chemically synthesized
  source 1..22: mol_type = other DNA
gggtgacagaaatatgttcagg

SEQ ID NO: 67124 - DNA, 22 bp, synthetic construct
  misc_feature 1..22: note = chemically synthesized
  source 1..22: mol_type = other DNA
agggcagtgtcttttatcgtcc

SEQ ID NO: 67125 - DNA, 22 bp, synthetic construct
  misc_feature 1..22: note = chemically synthesized
  source 1..22: mol_type = other DNA
ttatcgtcccttctaactacaa

SEQ ID NO: 67126 - DNA, 22 bp, synthetic construct
  misc_feature 1..22: note = chemically synthesized
  source 1..22: mol_type = other DNA
tatcgtcccttctaactacaaa

SEQ ID NO: 67127 - DNA, 22 bp, synthetic construct
  misc_feature 1..22: note = chemically synthesized
  source 1..22: mol_type = other DNA
atcgtcccttctaactacaaag

SEQ ID NO: 67128 - DNA, 22 bp, synthetic construct
  misc_feature 1..22: note = chemically synthesized
  source 1..22: mol_type = other DNA
tcgtcccttctaactacaaagg

SEQ ID NO: 67129 - DNA, 22 bp, synthetic construct
  misc_feature 1..22: note = chemically synthesized
  source 1..22: mol_type = other DNA
ctaactacaaaggcatggattg

SEQ ID NO: 67130 - DNA, 22 bp, synthetic construct
  misc_feature 1..22: note = chemically synthesized
  source 1..22: mol_type = other DNA
taactacaaaggcatggattgc

SEQ ID NO: 67131 - DNA, 22 bp, synthetic construct
  misc_feature 1..22: note = chemically synthesized
  source 1..22: mol_type = other DNA
actacaaaggcatggattgcag

SEQ ID NO: 67132 - DNA, 22 bp, synthetic construct
  misc_feature 1..22: note = chemically synthesized
  source 1..22: mol_type = other DNA
caaaggcatggattgcagttga

SEQ ID NO: 67133 - DNA, 22 bp, synthetic construct
  misc_feature 1..22: note = chemically synthesized
  source 1..22: mol_type = other DNA
cagttgagccccactttcagaa

SEQ ID NO: 67134 - DNA, 22 bp, synthetic construct
  misc_feature 1..22: note = chemically synthesized
  source 1..22: mol_type = other DNA
agccccactttcagaaggccca

SEQ ID NO: 67135 - DNA, 22 bp, synthetic construct
  misc_feature 1..22: note = chemically synthesized
  source 1..22: mol_type = other DNA
tcagaaggcccaatacacacaa

SEQ ID NO: 67136 - DNA, 22 bp, synthetic construct
  misc_feature 1..22: note = chemically synthesized
  source 1..22: mol_type = other DNA
cagaaggcccaatacacacaaa

SEQ ID NO: 67137 - DNA, 22 bp, synthetic construct
  misc_feature 1..22: note = chemically synthesized
  source 1..22: mol_type = other DNA
agaaggcccaatacacacaaaa

SEQ ID NO: 67138 - DNA, 22 bp, synthetic construct
  misc_feature 1..22: note = chemically synthesized
  source 1..22: mol_type = other DNA
attaatggaaactgataaatta

SEQ ID NO: 67139 - DNA, 22 bp, synthetic construct
  misc_feature 1..22: note = chemically synthesized
  source 1..22: mol_type = other DNA
atggaaactgataaattagaga

SEQ ID NO: 67140 - DNA, 22 bp, synthetic construct
  misc_feature 1..22: note = chemically synthesized
  source 1..22: mol_type = other DNA
ataaattagagagtgatttttc

SEQ ID NO: 67141 - DNA, 22 bp, synthetic construct
  misc_feature 1..22: note = chemically synthesized
  source 1..22: mol_type = other DNA
gagagtgatttttcacattaca

SEQ ID NO: 67142 - DNA, 22 bp, synthetic construct
  misc_feature 1..22: note = chemically synthesized
  source 1..22: mol_type = other DNA
ttcacattacagaaagattgtt

SEQ ID NO: 67143 - DNA, 22 bp, synthetic construct
  misc_feature 1..22: note = chemically synthesized
  source 1..22: mol_type = other DNA
tcacattacagaaagattgtta

SEQ ID NO: 67144 - DNA, 22 bp, synthetic construct
  misc_feature 1..22: note = chemically synthesized
  source 1..22: mol_type = other DNA
cacattacagaaagattgttaa

SEQ ID NO: 67145 - DNA, 22 bp, synthetic construct
  misc_feature 1..22: note = chemically synthesized
  source 1..22: mol_type = other DNA
acattacagaaagattgttaac

SEQ ID NO: 67146 - DNA, 22 bp, synthetic construct
  misc_feature 1..22: note = chemically synthesized
  source 1..22: mol_type = other DNA
cagaaagattgttaacttttca

SEQ ID NO: 67147 - DNA, 22 bp, synthetic construct
  misc_feature 1..22: note = chemically synthesized
  source 1..22: mol_type = other DNA
ttaacttttcaaaaggtttcac

SEQ ID NO: 67148 - DNA, 22 bp, synthetic construct
  misc_feature 1..22: note = chemically synthesized
  source 1..22: mol_type = other DNA
acttttcaaaaggtttcaccac

SEQ ID NO: 67149 - DNA, 22 bp, synthetic construct
  misc_feature 1..22: note = chemically synthesized
  source 1..22: mol_type = other DNA
ttcaaaaggtttcaccacaggg

SEQ ID NO: 67150 - DNA, 22 bp, synthetic construct
  misc_feature 1..22: note = chemically synthesized
  source 1..22: mol_type = other DNA
tcaaaaggtttcaccacagggt

SEQ ID NO: 67151 - DNA, 22 bp, synthetic construct
  misc_feature 1..22: note = chemically synthesized
  source 1..22: mol_type = other DNA
caaaaggtttcaccacagggtt

SEQ ID NO: 67152 - DNA, 22 bp, synthetic construct
  misc_feature 1..22: note = chemically synthesized
  source 1..22: mol_type = other DNA
aaaaggtttcaccacagggttt

SEQ ID NO: 67153 - DNA, 22 bp, synthetic construct
  misc_feature 1..22: note = chemically synthesized
  source 1..22: mol_type = other DNA
caccacagggtttctttaaata

SEQ ID NO: 67154 - DNA, 22 bp, synthetic construct
  misc_feature 1..22: note = chemically synthesized
  source 1..22: mol_type = other DNA
accacagggtttctttaaatag

SEQ ID NO: 67155 - DNA, 22 bp, synthetic construct
  misc_feature 1..22: note = chemically synthesized
  source 1..22: mol_type = other DNA
ctttaaatagtgagctccccca

SEQ ID NO: 67156 - DNA, 22 bp, synthetic construct
  misc_feature 1..22: note = chemically synthesized
  source 1..22: mol_type = other DNA
tttaaatagtgagctcccccac

SEQ ID NO: 67157 - DNA, 22 bp, synthetic construct
  misc_feature 1..22: note = chemically synthesized
  source 1..22: mol_type = other DNA
taaatagtgagctcccccactg

SEQ ID NO: 67158 - DNA, 22 bp, synthetic construct
  misc_feature 1..22: note = chemically synthesized
  source 1..22: mol_type = other DNA
aaatagtgagctcccccactga

SEQ ID NO: 67159 - DNA, 22 bp, synthetic construct
  misc_feature 1..22: note = chemically synthesized
  source 1..22: mol_type = other DNA
aatagtgagctcccccactgaa

SEQ ID NO: 67160 - DNA, 22 bp, synthetic construct
  misc_feature 1..22: note = chemically synthesized
  source 1..22: mol_type = other DNA
ccccactgaatttaaagtgttt

SEQ ID NO: 67161 - DNA, 22 bp, synthetic construct
  misc_feature 1..22: note = chemically synthesized
  source 1..22: mol_type = other DNA
aatttaaagtgtttgtttacag

SEQ ID NO: 67162 - DNA, 22 bp, synthetic construct
  misc_feature 1..22: note = chemically synthesized
  source 1..22: mol_type = other DNA
aaagtgtttgtttacagatcat

SEQ ID NO: 67163 - DNA, 22 bp, synthetic construct
  misc_feature 1..22: note = chemically synthesized
  source 1..22: mol_type = other DNA
aagtgtttgtttacagatcatt

SEQ ID NO: 67164 - DNA, 22 bp, synthetic construct
  misc_feature 1..22: note = chemically synthesized
  source 1..22: mol_type = other DNA
gtttacagatcattaactactt

SEQ ID NO: 67165 - DNA, 22 bp, synthetic construct
  misc_feature 1..22: note = chemically synthesized
  source 1..22: mol_type = other DNA
tttacagatcattaactacttg

SEQ ID NO: 67166 - DNA, 22 bp, synthetic construct
  misc_feature 1..22: note = chemically synthesized
  source 1..22: mol_type = other DNA
acagatcattaactacttgaca

SEQ ID NO: 67167 - DNA, 22 bp, synthetic construct
  misc_feature 1..22: note = chemically synthesized
  source 1..22: mol_type = other DNA
cagatcattaactacttgacag

SEQ ID NO: 67168 - DNA, 22 bp, synthetic construct
  misc_feature 1..22: note = chemically synthesized
  source 1..22: mol_type = other DNA
actacttgacagagaggatatt

SEQ ID NO: 67169 - DNA, 22 bp, synthetic construct
  misc_feature 1..22: note = chemically synthesized
  source 1..22: mol_type = other DNA
cttgacagagaggatattgggg

SEQ ID NO: 67170 - DNA, 22 bp, synthetic construct
  misc_feature 1..22: note = chemically synthesized
  source 1..22: mol_type = other DNA
gacagagaggatattgggggtt

SEQ ID NO: 67171 - DNA, 22 bp, synthetic construct
  misc_feature 1..22: note = chemically synthesized
  source 1..22: mol_type = other DNA
acagagaggatattgggggttg

SEQ ID NO: 67172 - DNA, 22 bp, synthetic construct
  misc_feature 1..22: note = chemically synthesized
  source 1..22: mol_type = other DNA
ggggttgggggaaggaagacac

SEQ ID NO: 67173 - DNA, 22 bp, synthetic construct
  misc_feature 1..22: note = chemically synthesized
  source 1..22: mol_type = other DNA
ggggaaggaagacacacttaaa

SEQ ID NO: 67174 - DNA, 22 bp, synthetic construct
  misc_feature 1..22: note = chemically synthesized
  source 1..22: mol_type = other DNA
aaaaggtaaaatgttagaagcc

SEQ ID NO: 67175 - DNA, 22 bp, synthetic construct
  misc_feature 1..22: note = chemically synthesized
  source 1..22: mol_type = other DNA
aaaggtaaaatgttagaagccc

SEQ ID NO: 67176 - DNA, 22 bp, synthetic construct
  misc_feature 1..22: note = chemically synthesized
  source 1..22: mol_type = other DNA
gaagccctgccaattttcaatg

SEQ ID NO: 67177 - DNA, 22 bp, synthetic construct
  misc_feature 1..22: note = chemically synthesized
  source 1..22: mol_type = other DNA
ccaattttcaatgagcctggaa

SEQ ID NO: 67178 - DNA, 22 bp, synthetic construct
  misc_feature 1..22: note = chemically synthesized
  source 1..22: mol_type = other DNA
tcaatgagcctggaagggtgac

SEQ ID NO: 67179 - DNA, 22 bp, synthetic construct
  misc_feature 1..22: note = chemically synthesized
  source 1..22: mol_type = other DNA
caatgagcctggaagggtgacg

SEQ ID NO: 67180 - DNA, 22 bp, synthetic construct
  misc_feature 1..22: note = chemically synthesized
  source 1..22: mol_type = other DNA
aatgagcctggaagggtgacga

SEQ ID NO: 67181 - DNA, 22 bp, synthetic construct
  misc_feature 1..22: note = chemically synthesized
  source 1..22: mol_type = other DNA
gaagggtgacgaaacatctctg

SEQ ID NO: 67182 - DNA, 22 bp, synthetic construct
  misc_feature 1..22: note = chemically synthesized
  source 1..22: mol_type = other DNA
tgaaattatgttggttagcaaa

SEQ ID NO: 67183 - DNA, 22 bp, synthetic construct
  misc_feature 1..22: note = chemically synthesized
  source 1..22: mol_type = other DNA
aaattatgttggttagcaaata

SEQ ID NO: 67184 - DNA, 22 bp, synthetic construct
  misc_feature 1..22: note = chemically synthesized
  source 1..22: mol_type = other DNA
tgttggttagcaaatatgattt

SEQ ID NO: 67185 - DNA, 22 bp, synthetic construct
  misc_feature 1..22: note = chemically synthesized
  source 1..22: mol_type = other DNA
gttagcaaatatgatttatttt

SEQ ID NO: 67186 - DNA, 22 bp, synthetic construct
  misc_feature 1..22: note = chemically synthesized
  source 1..22: mol_type = other DNA
gcaaatatgatttattttacag

SEQ ID NO: 67187 - DNA, 22 bp, synthetic construct
  misc_feature 1..22: note = chemically synthesized
  source 1..22: mol_type = other DNA
attttacagaaattcattttac

SEQ ID NO: 67188 - DNA, 22 bp, synthetic construct
  misc_feature 1..22: note = chemically synthesized
  source 1..22: mol_type = other DNA
ttttacagaaattcattttaca

SEQ ID NO: 67189 - DNA, 22 bp, synthetic construct
  misc_feature 1..22: note = chemically synthesized
  source 1..22: mol_type = other DNA
tacagaaattcattttacacat

SEQ ID NO: 67190 - DNA, 22 bp, synthetic construct
  misc_feature 1..22: note = chemically synthesized
  source 1..22: mol_type = other DNA
acagaaattcattttacacatg

SEQ ID NO: 67191 - DNA, 22 bp, synthetic construct
  misc_feature 1..22: note = chemically synthesized
  source 1..22: mol_type = other DNA
cagaaattcattttacacatgg

SEQ ID NO: 67192 - DNA, 22 bp, synthetic construct
  misc_feature 1..22: note = chemically synthesized
  source 1..22: mol_type = other DNA
attttacacatggctttccaag

SEQ ID NO: 67193 - DNA, 22 bp, synthetic construct
  misc_feature 1..22: note = chemically synthesized
  source 1..22: mol_type = other DNA
tacacatggctttccaagaacc

SEQ ID NO: 67194 - DNA, 22 bp, synthetic construct
  misc_feature 1..22: note = chemically synthesized
  source 1..22: mol_type = other DNA
acacatggctttccaagaaccc

SEQ ID NO: 67195 - DNA, 22 bp, synthetic construct
  misc_feature 1..22: note = chemically synthesized
  source 1..22: mol_type = other DNA
cacatggctttccaagaaccct

SEQ ID NO: 67196 - DNA, 22 bp, synthetic construct
  misc_feature 1..22: note = chemically synthesized
  source 1..22: mol_type = other DNA
tccaagaaccctccatgctgat

SEQ ID NO: 67197 - DNA, 22 bp, synthetic construct
  misc_feature 1..22: note = chemically synthesized
  source 1..22: mol_type = other DNA
ccaagaaccctccatgctgatg

SEQ ID NO: 67198 - DNA, 22 bp, synthetic construct
  misc_feature 1..22: note = chemically synthesized
  source 1..22: mol_type = other DNA
caagaaccctccatgctgatgg

SEQ ID NO: 67199 - DNA, 22 bp, synthetic construct
  misc_feature 1..22: note = chemically synthesized
  source 1..22: mol_type = other DNA
catgctgatggggtgtggtggg

SEQ ID NO: 67200 - DNA, 22 bp, synthetic construct
  misc_feature 1..22: note = chemically synthesized
  source 1..22: mol_type = other DNA
atggggtgtggtgggaggtcaa

SEQ ID NO: 67201 - DNA, 22 bp, synthetic construct
  misc_feature 1..22: note = chemically synthesized
  source 1..22: mol_type = other DNA
ggctttgctgtcctggtttgtg

SEQ ID NO: 67202 - DNA, 22 bp, synthetic construct
  misc_feature 1..22: note = chemically synthesized
  source 1..22: mol_type = other DNA
tgctgtcctggtttgtggtggc

SEQ ID NO: 67203 - DNA, 22 bp, synthetic construct
  misc_feature 1..22: note = chemically synthesized
  source 1..22: mol_type = other DNA
gctgtcctggtttgtggtggct

SEQ ID NO: 67204 - DNA, 22 bp, synthetic construct
  misc_feature 1..22: note = chemically synthesized
  source 1..22: mol_type = other DNA
ctgtcctggtttgtggtggctg

SEQ ID NO: 67205 - DNA, 22 bp, synthetic construct
  misc_feature 1..22: note = chemically synthesized
  source 1..22: mol_type = other DNA
tcctggtttgtggtggctgggg

SEQ ID NO: 67206 - DNA, 22 bp, synthetic construct
  misc_feature 1..22: note = chemically synthesized
  source 1..22: mol_type = other DNA
gtttgtggtggctggggagagg

SEQ ID NO: 67207 - DNA, 22 bp, synthetic construct
  misc_feature 1..22: note = chemically synthesized
  source 1..22: mol_type = other DNA
gtggtggctggggagaggactc

SEQ ID NO: 67208 - DNA, 22 bp, synthetic construct
  misc_feature 1..22: note = chemically synthesized
  source 1..22: mol_type = other DNA
tggtggctggggagaggactcc

SEQ ID NO: 67209 - DNA, 22 bp, synthetic construct
  misc_feature 1..22: note = chemically synthesized
  source 1..22: mol_type = other DNA
gggagaggactcccttttctta

SEQ ID NO: 67210 - DNA, 22 bp, synthetic construct
  misc_feature 1..22: note = chemically synthesized
  source 1..22: mol_type = other DNA
ccttttcttagagtcctgtgtg

SEQ ID NO: 67211 - DNA, 22 bp, synthetic construct
  misc_feature 1..22: note = chemically synthesized
  source 1..22: mol_type = other DNA
ttcttagagtcctgtgtgtgcc

SEQ ID NO: 67212 - DNA, 22 bp, synthetic construct
  misc_feature 1..22: note = chemically synthesized
  source 1..22: mol_type = other DNA
tcttagagtcctgtgtgtgcct

SEQ ID NO: 67213 - DNA, 22 bp, synthetic construct
  misc_feature 1..22: note = chemically synthesized
  source 1..22: mol_type = other DNA
cttagagtcctgtgtgtgcctt

SEQ ID NO: 67214 - DNA, 22 bp, synthetic construct
  misc_feature 1..22: note = chemically synthesized
  source 1..22: mol_type = other DNA
ttagagtcctgtgtgtgccttt

SEQ ID NO: 67215 - DNA, 22 bp, synthetic construct
  misc_feature 1..22: note = chemically synthesized
  source 1..22: mol_type = other DNA
agagtcctgtgtgtgcctttgt

SEQ ID NO: 67216 - DNA, 22 bp, synthetic construct
  misc_feature 1..22: note = chemically synthesized
  source 1..22: mol_type = other DNA
gagtcctgtgtgtgcctttgtg

SEQ ID NO: 67217 - DNA, 22 bp, synthetic construct
  misc_feature 1..22: note = chemically synthesized
  source 1..22: mol_type = other DNA
tgtgtgcctttgtgagcaatgg

SEQ ID NO: 67218 - DNA, 22 bp, synthetic construct
  misc_feature 1..22: note = chemically synthesized
  source 1..22: mol_type = other DNA
tgtgagcaatgggtgccaggct

SEQ ID NO: 67219 - DNA, 22 bp, synthetic construct
  misc_feature 1..22: note = chemically synthesized
  source 1..22: mol_type = other DNA
gtgagcaatgggtgccaggctc

SEQ ID NO: 67220 - DNA, 22 bp, synthetic construct
  misc_feature 1..22: note = chemically synthesized
  source 1..22: mol_type = other DNA
tgagcaatgggtgccaggctct

SEQ ID NO: 67221 - DNA, 22 bp, synthetic construct
  misc_feature 1..22: note = chemically synthesized
  source 1..22: mol_type = other DNA
tggcatgaggccgagctttgct

SEQ ID NO: 67222 - DNA, 22 bp, synthetic construct
  misc_feature 1..22: note = chemically synthesized
  source 1..22: mol_type = other DNA
gcatgaggccgagctttgctac

SEQ ID NO: 67223 - DNA, 22 bp, synthetic construct
  misc_feature 1..22: note = chemically synthesized
  source 1..22: mol_type = other DNA
tgctactggacttctggcatga

SEQ ID NO: 67224 - DNA, 22 bp, synthetic construct
  misc_feature 1..22: note = chemically synthesized
  source 1..22: mol_type = other DNA
gctactggacttctggcatgag

SEQ ID NO: 67225 - DNA, 22 bp, synthetic construct
  misc_feature 1..22: note = chemically synthesized
  source 1..22: mol_type = other DNA
ctactggacttctggcatgagc

SEQ ID NO: 67226 - DNA, 22 bp, synthetic construct
  misc_feature 1..22: note = chemically synthesized
  source 1..22: mol_type = other DNA
ctggacttctggcatgagccac

SEQ ID NO: 67227 - DNA, 22 bp, synthetic construct
  misc_feature 1..22: note = chemically synthesized
  source 1..22: mol_type = other DNA
gacttctggcatgagccactga

SEQ ID NO: 67228 - DNA, 22 bp, synthetic construct
  misc_feature 1..22: note = chemically synthesized
  source 1..22: mol_type = other DNA
ctggcatgagccactgagacct

SEQ ID NO: 67229 - DNA, 22 bp, synthetic construct
  misc_feature 1..22: note = chemically synthesized
  source 1..22: mol_type = other DNA
tggcatgagccactgagacctt

SEQ ID NO: 67230 - DNA, 22 bp, synthetic construct
  misc_feature 1..22: note = chemically synthesized
  source 1..22: mol_type = other DNA
gcatgagccactgagacctttt

SEQ ID NO: 67231 - DNA, 22 bp, synthetic construct
  misc_feature 1..22: note = chemically synthesized
  source 1..22: mol_type = other DNA
agaccttttcccttgacattta

SEQ ID NO: 67232 - DNA, 22 bp, synthetic construct
  misc_feature 1..22: note = chemically synthesized
  source 1..22: mol_type = other DNA
ttcccttgacatttagcctggg

SEQ ID NO: 67233 - DNA, 22 bp, synthetic construct
  misc_feature 1..22: note = chemically synthesized
  source 1..22: mol_type = other DNA
tcccttgacatttagcctgggt

SEQ ID NO: 67234 - DNA, 22 bp, synthetic construct
  misc_feature 1..22: note = chemically synthesized
  source 1..22: mol_type = other DNA
cccttgacatttagcctgggtt

SEQ ID NO: 67235 - DNA, 22 bp, synthetic construct
  misc_feature 1..22: note = chemically synthesized
  source 1..22: mol_type = other DNA
ccttgacatttagcctgggttt

SEQ ID NO: 67236 - DNA, 22 bp, synthetic construct
  misc_feature 1..22: note = chemically synthesized
  source 1..22: mol_type = other DNA
gacatttagcctgggtttgggg

SEQ ID NO: 67237 - DNA, 22 bp, synthetic construct
  misc_feature 1..22: note = chemically synthesized
  source 1..22: mol_type = other DNA
acatttagcctgggtttgggga

SEQ ID NO: 67238 - DNA, 22 bp, synthetic construct
  misc_feature 1..22: note = chemically synthesized
  source 1..22: mol_type = other DNA
agcctgggtttggggaagtttc

SEQ ID NO: 67239 - DNA, 22 bp, synthetic construct
  misc_feature 1..22: note = chemically synthesized
  source 1..22: mol_type = other DNA
gcctgggtttggggaagtttct

SEQ ID NO: 67240 - DNA, 22 bp, synthetic construct
  misc_feature 1..22: note = chemically synthesized
  source 1..22: mol_type = other DNA
ggtttggggaagtttcttcctg

SEQ ID NO: 67241 - DNA, 22 bp, synthetic construct
  misc_feature 1..22: note = chemically synthesized
  source 1..22: mol_type = other DNA
ggggaagtttcttcctggttct

SEQ ID NO: 67242 - DNA, 22 bp, synthetic construct
  misc_feature 1..22: note = chemically synthesized
  source 1..22: mol_type = other DNA
gggaagtttcttcctggttctc

SEQ ID NO: 67243 - DNA, 22 bp, synthetic construct
  misc_feature 1..22: note = chemically synthesized
  source 1..22: mol_type = other DNA
cttcctggttctctgaccttca

SEQ ID NO: 67244 - DNA, 22 bp, synthetic construct
  misc_feature 1..22: note = chemically synthesized
  source 1..22: mol_type = other DNA
ttcctggttctctgaccttcag

SEQ ID NO: 67245 - DNA, 22 bp, synthetic construct
  misc_feature 1..22: note = chemically synthesized
  source 1..22: mol_type = other DNA
cctggttctctgaccttcagtc

SEQ ID NO: 67246 - DNA, 22 bp, synthetic construct
  misc_feature 1..22: note = chemically synthesized
  source 1..22: mol_type = other DNA
ctggttctctgaccttcagtct

SEQ ID NO: 67247 - DNA, 22 bp, synthetic construct
  misc_feature 1..22: note = chemically synthesized
  source 1..22: mol_type = other DNA
gttctctgaccttcagtctcat

SEQ ID NO: 67248 - DNA, 22 bp, synthetic construct
  misc_feature 1..22: note = chemically synthesized
  source 1..22: mol_type = other DNA
tctgaccttcagtctcattggc

SEQ ID NO: 67249 - DNA, 22 bp, synthetic construct
  misc_feature 1..22: note = chemically synthesized
  source 1..22: mol_type = other DNA
tgaccttcagtctcattggctc

SEQ ID NO: 67250 - DNA, 22 bp, synthetic construct
  misc_feature 1..22: note = chemically synthesized
  source 1..22: mol_type = other DNA
accttcagtctcattggctcag

SEQ ID NO: 67251 - DNA, 22 bp, synthetic construct
  misc_feature 1..22: note = chemically synthesized
  source 1..22: mol_type = other DNA
cagtctcattggctcaggacac

SEQ ID NO: 67252 - DNA, 22 bp, synthetic construct
  misc_feature 1..22: note = chemically synthesized
  source 1..22: mol_type = other DNA
agtctcattggctcaggacaca

SEQ ID NO: 67253 - DNA, 22 bp, synthetic construct
  misc_feature 1..22: note = chemically synthesized
  source 1..22: mol_type = other DNA
attggctcaggacacacctagg

SEQ ID NO: 67254 - DNA, 22 bp, synthetic construct
  misc_feature 1..22: note = chemically synthesized
  source 1..22: mol_type = other DNA
gctcaggacacacctaggtttc

SEQ ID NO: 67255 - DNA, 22 bp, synthetic construct
  misc_feature 1..22: note = chemically synthesized
  source 1..22: mol_type = other DNA
aggacacacctaggtttcctcc

SEQ ID NO: 67256 - DNA, 22 bp, synthetic construct
  misc_feature 1..22: note = chemically synthesized
  source 1..22: mol_type = other DNA
ggtttcctccttgaagctcaga

SEQ ID NO: 67257 - DNA, 22 bp, synthetic construct
  misc_feature 1..22: note = chemically synthesized
  source 1..22: mol_type = other DNA
cctccttgaagctcagacatgt

SEQ ID NO: 67258 - DNA, 22 bp, synthetic construct
  misc_feature 1..22: note = chemically synthesized
  source 1..22: mol_type = other DNA
ctccttgaagctcagacatgta

SEQ ID NO: 67259 - DNA, 22 bp, synthetic construct
  misc_feature 1..22: note = chemically synthesized
  source 1..22: mol_type = other DNA
cttgaagctcagacatgtaaac

SEQ ID NO: 67260 - DNA, 22 bp, synthetic construct
  misc_feature 1..22: note = chemically synthesized
  source 1..22: mol_type = other DNA
gaagctcagacatgtaaacttt

SEQ ID NO: 67261 - DNA, 22 bp, synthetic construct
  misc_feature 1..22: note = chemically synthesized
  source 1..22: mol_type = other DNA
aagctcagacatgtaaactttg

SEQ ID NO: 67262 - DNA, 22 bp, synthetic construct
  misc_feature 1..22: note = chemically synthesized
  source 1..22: mol_type = other DNA
agacatgtaaactttgcaagac

SEQ ID NO: 67263 - DNA, 22 bp, synthetic construct
  misc_feature 1..22: note = chemically synthesized
  source 1..22: mol_type = other DNA
tgcaagactgtgtcccaggagg

SEQ ID NO: 67264 - DNA, 22 bp, synthetic construct
  misc_feature 1..22: note = chemically synthesized
  source 1..22: mol_type = other DNA
gcaagactgtgtcccaggaggt

SEQ ID NO: 67265 - DNA, 22 bp, synthetic construct
  misc_feature 1..22: note = chemically synthesized
  source 1..22: mol_type = other DNA
caagactgtgtcccaggaggtt

SEQ ID NO: 67266 - DNA, 22 bp, synthetic construct
  misc_feature 1..22: note = chemically synthesized
  source 1..22: mol_type = other DNA
tgtcccaggaggttgaaatcca

SEQ ID NO: 67267 - DNA, 22 bp, synthetic construct
  misc_feature 1..22: note = chemically synthesized
  source 1..22: mol_type = other DNA
aaatccatcatcaggctcactc

SEQ ID NO: 67268 - DNA, 22 bp, synthetic construct
  misc_feature 1..22: note = chemically synthesized
  source 1..22: mol_type = other DNA
actctctaagcctaaggattag

SEQ ID NO: 67269 - DNA, 22 bp, synthetic construct
  misc_feature 1..22: note = chemically synthesized
  source 1..22: mol_type = other DNA
tctaagcctaaggattagcctg

SEQ ID NO: 67270 - DNA, 22 bp, synthetic construct
  misc_feature 1..22: note = chemically synthesized
  source 1..22: mol_type = other DNA
taagcctaaggattagcctggg

SEQ ID NO: 67271 - DNA, 22 bp, synthetic construct
  misc_feature 1..22: note = chemically synthesized
  source 1..22: mol_type = other DNA
agcctaaggattagcctgggga

SEQ ID NO: 67272 - DNA, 22 bp, synthetic construct
  misc_feature 1..22: note = chemically synthesized
  source 1..22: mol_type = other DNA
aggattagcctggggaccaagc

SEQ ID NO: 67273 - DNA, 22 bp, synthetic construct
  misc_feature 1..22: note = chemically synthesized
  source 1..22: mol_type = other DNA
gcctggggaccaagcccagccc

SEQ ID NO: 67274 - DNA, 22 bp, synthetic construct
  misc_feature 1..22: note = chemically synthesized
  source 1..22: mol_type = other DNA
gggaccaagcccagccctgaac

SEQ ID NO: 67275 - DNA, 22 bp, synthetic construct
  misc_feature 1..22: note = chemically synthesized
  source 1..22: mol_type = other DNA
aactctcctataaggccctcct

SEQ ID NO: 67276 - DNA, 22 bp, synthetic construct
  misc_feature 1..22: note = chemically synthesized
  source 1..22: mol_type = other DNA
tcctataaggccctcctcatcc

SEQ ID NO: 67277 - DNA, 22 bp, synthetic construct
  misc_feature 1..22: note = chemically synthesized
  source 1..22: mol_type = other DNA
ctataaggccctcctcatccag

SEQ ID NO: 67278 - DNA, 22 bp, synthetic construct
  misc_feature 1..22: note = chemically synthesized
  source 1..22: mol_type = other DNA
taaggccctcctcatccaggtc

SEQ ID NO: 67279 - DNA, 22 bp, synthetic construct
  misc_feature 1..22: note = chemically synthesized
  source 1..22: mol_type = other DNA
ctcatccaggtcaaggtcatga

SEQ ID NO: 67280 - DNA, 22 bp, synthetic construct
  misc_feature 1..22: note = chemically synthesized
  source 1..22: mol_type = other DNA
atccaggtcaaggtcatgaggg

SEQ ID NO: 67281 - DNA, 22 bp, synthetic construct
  misc_feature 1..22: note = chemically synthesized
  source 1..22: mol_type = other DNA
gccagcttctagcacggcctat

SEQ ID NO: 67282 - DNA, 22 bp, synthetic construct
  misc_feature 1..22: note = chemically synthesized
  source 1..22: mol_type = other DNA
ctagcacggcctatagtaggtc

SEQ ID NO: 67283 - DNA, 22 bp, synthetic construct
  misc_feature 1..22: note = chemically synthesized
  source 1..22: mol_type = other DNA
tagcacggcctatagtaggtct

SEQ ID NO: 67284 - DNA, 22 bp, synthetic construct
  misc_feature 1..22: note = chemically synthesized
  source 1..22: mol_type = other DNA
gcacggcctatagtaggtctct

SEQ ID NO: 67285 - DNA, 22 bp, synthetic construct
  misc_feature 1..22: note = chemically synthesized
  source 1..22: mol_type = other DNA
tagtaggtctcttggttggtcc

SEQ ID NO: 67286 - DNA, 22 bp, synthetic construct
  misc_feature 1..22: note = chemically synthesized
  source 1..22: mol_type = other DNA
ttggttggtccaaaggaggcct

SEQ ID NO: 67287 - DNA, 22 bp, synthetic construct
  misc_feature 1..22: note = chemically synthesized
  source 1..22: mol_type = other DNA
ggttggtccaaaggaggcctgg

SEQ ID NO: 67288 - DNA, 22 bp, synthetic construct
  misc_feature 1..22: note = chemically synthesized
  source 1..22: mol_type = other DNA
gttggtccaaaggaggcctgga

SEQ ID NO: 67289 - DNA, 22 bp, synthetic construct
  misc_feature 1..22: note = chemically synthesized
  source 1..22: mol_type = other DNA
gtccaaaggaggcctggacttg

SEQ ID NO: 67290 - DNA, 22 bp, synthetic construct
  misc_feature 1..22: note = chemically synthesized
  source 1..22: mol_type = other DNA
gacttgcatgggaggcaggaga

SEQ ID NO: 67291 - DNA, 22 bp, synthetic construct
  misc_feature 1..22: note = chemically synthesized
  source 1..22: mol_type = other DNA
gcatgggaggcaggagagagaa

SEQ ID NO: 67292 - DNA, 22 bp, synthetic construct
  misc_feature 1..22: note = chemically synthesized
  source 1..22: mol_type = other DNA
catgggaggcaggagagagaag

SEQ ID NO: 67293 - DNA, 22 bp, synthetic construct
  misc_feature 1..22: note = chemically synthesized
  source 1..22: mol_type = other DNA
atccagtcttctccttttaaag

SEQ ID NO: 67294 - DNA, 22 bp, synthetic construct
  misc_feature 1..22: note = chemically synthesized
  source 1..22: mol_type = other DNA
ctccttttaaagatggaaacac

SEQ ID NO: 67295 - DNA, 22 bp, synthetic construct
  misc_feature 1..22: note = chemically synthesized
  source 1..22: mol_type = other DNA
tccttttaaagatggaaacact

SEQ ID NO: 67296 - DNA, 22 bp, synthetic construct
  misc_feature 1..22: note = chemically synthesized
  source 1..22: mol_type = other DNA
cttttaaagatggaaacactta

SEQ ID NO: 67297 - DNA, 22 bp, synthetic construct
  misc_feature 1..22: note = chemically synthesized
  source 1..22: mol_type = other DNA
ttaaagatggaaacacttaggg

SEQ ID NO: 67298 - DNA, 22 bp, synthetic construct
  misc_feature 1..22: note = chemically synthesized
  source 1..22: mol_type = other DNA
taaagatggaaacacttagggc

SEQ ID NO: 67299 - DNA, 22 bp, synthetic construct
  misc_feature 1..22: note = chemically synthesized
  source 1..22: mol_type = other DNA
aaagatggaaacacttagggcc

SEQ ID NO: 67300 - DNA, 22 bp, synthetic construct
  misc_feature 1..22: note = chemically synthesized
  source 1..22: mol_type = other DNA
aagatggaaacacttagggcca

SEQ ID NO: 67301 - DNA, 22 bp, synthetic construct
  misc_feature 1..22: note = chemically synthesized
  source 1..22: mol_type = other DNA
agggccagaaagaaaggattta

SEQ ID NO: 67302 - DNA, 22 bp, synthetic construct
  misc_feature 1..22: note = chemically synthesized
  source 1..22: mol_type = other DNA
gggccagaaagaaaggatttat

SEQ ID NO: 67303 - DNA, 22 bp, synthetic construct
  misc_feature 1..22: note = chemically synthesized
  source 1..22: mol_type = other DNA
attcaaagtcacgaaacagctg

SEQ ID NO: 67304 - DNA, 22 bp, synthetic construct
  misc_feature 1..22: note = chemically synthesized
  source 1..22: mol_type = other DNA
ttcaaagtcacgaaacagctgg

SEQ ID NO: 67305 - DNA, 22 bp, synthetic construct
  misc_feature 1..22: note = chemically synthesized
  source 1..22: mol_type = other DNA
aaagtcacgaaacagctggtga

SEQ ID NO: 67306 - DNA, 22 bp, synthetic construct
  misc_feature 1..22: note = chemically synthesized
  source 1..22: mol_type = other DNA
gtgagtggcagagttggggttg

SEQ ID NO: 67307 - DNA, 22 bp, synthetic construct
  misc_feature 1..22: note = chemically synthesized
  source 1..22: mol_type = other DNA
gggttgcagaacttaggttcct

SEQ ID NO: 67308 - DNA, 22 bp, synthetic construct
  misc_feature 1..22: note = chemically synthesized
  source 1..22: mol_type = other DNA
cagaacttaggttcctgacttt

SEQ ID NO: 67309 - DNA, 22 bp, synthetic construct
  misc_feature 1..22: note = chemically synthesized
  source 1..22: mol_type = other DNA
aggttcctgactttcctctagc

SEQ ID NO: 67310 - DNA, 22 bp, synthetic construct
  misc_feature 1..22: note = chemically synthesized
  source 1..22: mol_type = other DNA
ggttcctgactttcctctagca

SEQ ID NO: 67311 - DNA, 22 bp, synthetic construct
  misc_feature 1..22: note = chemically synthesized
  source 1..22: mol_type = other DNA
ctgactttcctctagcagtctc

SEQ ID NO: 67312 - DNA, 22 bp, synthetic construct
  misc_feature 1..22: note = chemically synthesized
  source 1..22: mol_type = other DNA
actttcctctagcagtctctcc

SEQ ID NO: 67313 - DNA, 22 bp, synthetic construct
  misc_feature 1..22: note = chemically synthesized
  source 1..22: mol_type = other DNA
tcctctagcagtctctccagag

SEQ ID NO: 67314 - DNA, 22 bp, synthetic construct
  misc_feature 1..22: note = chemically synthesized
  source 1..22: mol_type = other DNA
cctctagcagtctctccagagg

SEQ ID NO: 67315 - DNA, 22 bp, synthetic construct
  misc_feature 1..22: note = chemically synthesized
  source 1..22: mol_type = other DNA
ctctagcagtctctccagagga

SEQ ID NO: 67316 - DNA, 22 bp, synthetic construct
  misc_feature 1..22: note = chemically synthesized
  source 1..22: mol_type = other DNA
tagcagtctctccagaggaaca

SEQ ID NO: 67317 - DNA, 22 bp, synthetic construct
  misc_feature 1..22: note = chemically synthesized
  source 1..22: mol_type = other DNA
gcagtctctccagaggaacaag

SEQ ID NO: 67318 - DNA, 22 bp, synthetic construct
  misc_feature 1..22: note = chemically synthesized
  source 1..22: mol_type = other DNA
tccagaggaacaagtccctgct

SEQ ID NO: 67319 - DNA, 22 bp, synthetic construct
  misc_feature 1..22: note = chemically synthesized
  source 1..22: mol_type = other DNA
cagaggaacaagtccctgcttc

SEQ ID NO: 67320 - DNA, 22 bp, synthetic construct
  misc_feature 1..22: note = chemically synthesized
  source 1..22: mol_type = other DNA
cttcctaaaggaagaaaagaat

SEQ ID NO: 67321 - DNA, 22 bp, synthetic construct
  misc_feature 1..22: note = chemically synthesized
  source 1..22: mol_type = other DNA
cctaaaggaagaaaagaatccg

SEQ ID NO: 67322 - DNA, 22 bp, synthetic construct
  misc_feature 1..22: note = chemically synthesized
  source 1..22: mol_type = other DNA
ctaaaggaagaaaagaatccgg

SEQ ID NO: 67323 - DNA, 22 bp, synthetic construct
  misc_feature 1..22: note = chemically synthesized
  source 1..22: mol_type = other DNA
aaggaagaaaagaatccgggga

SEQ ID NO: 67324 - DNA, 22 bp, synthetic construct
  misc_feature 1..22: note = chemically synthesized
  source 1..22: mol_type = other DNA
tgaaagtagctcccaaataacc

SEQ ID NO: 67325 - DNA, 22 bp, synthetic construct
  misc_feature 1..22: note = chemically synthesized
  source 1..22: mol_type = other DNA
aaagtagctcccaaataacctg

SEQ ID NO: 67326 - DNA, 22 bp, synthetic construct
  misc_feature 1..22: note = chemically synthesized
  source 1..22: mol_type = other DNA
ccaaataacctgataaatacct

SEQ ID NO: 67327 - DNA, 22 bp, synthetic construct
  misc_feature 1..22: note = chemically synthesized
  source 1..22: mol_type = other DNA
ataaatacctcggatagaggca

SEQ ID NO: 67328 - DNA, 22 bp, synthetic construct
  misc_feature 1..22: note = chemically synthesized
  source 1..22: mol_type = other DNA
ggatagaggcaaggctacaccc

SEQ ID NO: 67329 - DNA, 22 bp, synthetic construct
  misc_feature 1..22: note = chemically synthesized
  source 1..22: mol_type = other DNA
cacccctccccctgcccccact

SEQ ID NO: 67330 - DNA, 22 bp, synthetic construct
  misc_feature 1..22: note = chemically synthesized
  source 1..22: mol_type = other DNA
cccctgcccccactacacacaa

SEQ ID NO: 67331 - DNA, 22 bp, synthetic construct
  misc_feature 1..22: note = chemically synthesized
  source 1..22: mol_type = other DNA
cccccactacacacaaacaaga

SEQ ID NO: 67332 - DNA, 22 bp, synthetic construct
  misc_feature 1..22: note = chemically synthesized
  source 1..22: mol_type = other DNA
cacacaaacaagatcctcagct

SEQ ID NO: 67333 - DNA, 22 bp, synthetic construct
  misc_feature 1..22: note = chemically synthesized
  source 1..22: mol_type = other DNA
agctgaggactcagagcaggag

SEQ ID NO: 67334 - DNA, 22 bp, synthetic construct
  misc_feature 1..22: note = chemically synthesized
  source 1..22: mol_type = other DNA
aggactcagagcaggagtaagg

SEQ ID NO: 67335 - DNA, 22 bp, synthetic construct
  misc_feature 1..22: note = chemically synthesized
  source 1..22: mol_type = other DNA
agagcaggagtaagggcacccc

SEQ ID NO: 67336 - DNA, 22 bp, synthetic construct
  misc_feature 1..22: note = chemically synthesized
  source 1..22: mol_type = other DNA
tcctccccatggctttgaaaag

SEQ ID NO: 67337 - DNA, 22 bp, synthetic construct
  misc_feature 1..22: note = chemically synthesized
  source 1..22: mol_type = other DNA
cccatggctttgaaaagaagaa

SEQ ID NO: 67338 - DNA, 22 bp, synthetic construct
  misc_feature 1..22: note = chemically synthesized
  source 1..22: mol_type = other DNA
tgaaaagaagaaagaggggaaa

SEQ ID NO: 67339 - DNA, 22 bp, synthetic construct
  misc_feature 1..22: note = chemically synthesized
  source 1..22: mol_type = other DNA
gaaaagaagaaagaggggaaat

SEQ ID NO: 67340 - DNA, 22 bp, synthetic construct
  misc_feature 1..22: note = chemically synthesized
  source 1..22: mol_type = other DNA
aaaagaagaaagaggggaaatt

SEQ ID NO: 67341 - DNA, 22 bp, synthetic construct
  misc_feature 1..22: note = chemically synthesized
  source 1..22: mol_type = other DNA
ggagggatggtcaagttgatga

SEQ ID NO: 67342 - DNA, 22 bp, synthetic construct
  misc_feature 1..22: note = chemically synthesized
  source 1..22: mol_type = other DNA
gagggatggtcaagttgatgat

SEQ ID NO: 67343 - DNA, 22 bp, synthetic construct
  misc_feature 1..22: note = chemically synthesized
  source 1..22: mol_type = other DNA
atgattgaagagacaaagtagt

SEQ ID NO: 67344 - DNA, 22 bp, synthetic construct
  misc_feature 1..22: note = chemically synthesized
  source 1..22: mol_type = other DNA
aagagacaaagtagtgtaggaa

SEQ ID NO: 67345 - DNA, 22 bp, synthetic construct
  misc_feature 1..22: note = chemically synthesized
  source 1..22: mol_type = other DNA
aatgtttcttgcacagtcattt

SEQ ID NO: 67346 - DNA, 22 bp, synthetic construct
  misc_feature 1..22: note = chemically synthesized
  source 1..22: mol_type = other DNA
cttgcacagtcatttgttgaaa

SEQ ID NO: 67347 - DNA, 22 bp, synthetic construct
  misc_feature 1..22: note = chemically synthesized
  source 1..22: mol_type = other DNA
ttgcacagtcatttgttgaaaa

SEQ ID NO: 67348 - DNA, 22 bp, synthetic construct
  misc_feature 1..22: note = chemically synthesized
  source 1..22: mol_type = other DNA
gcacagtcatttgttgaaaatg

SEQ ID NO: 67349 - DNA, 22 bp, synthetic construct
  misc_feature 1..22: note = chemically synthesized
  source 1..22: mol_type = other DNA
cacagtcatttgttgaaaatgt

SEQ ID NO: 67350 - DNA, 22 bp, synthetic construct
  misc_feature 1..22: note = chemically synthesized
  source 1..22: mol_type = other DNA
gttgaaaatgtgtcagcaagta

SEQ ID NO: 67351 - DNA, 22 bp, synthetic construct
  misc_feature 1..22: note = chemically synthesized
  source 1..22: mol_type = other DNA
ttgaaaatgtgtcagcaagtac

SEQ ID NO: 67352 - DNA, 22 bp, synthetic construct
  misc_feature 1..22: note = chemically synthesized
  source 1..22: mol_type = other DNA
aaaatgtgtcagcaagtacaag

SEQ ID NO: 67353 - DNA, 22 bp, synthetic construct
  misc_feature 1..22: note = chemically synthesized
  source 1..22: mol_type = other DNA
aaactggcaatgagacatctga

SEQ ID NO: 67354 - DNA, 22 bp, synthetic construct
  misc_feature 1..22: note = chemically synthesized
  source 1..22: mol_type = other DNA
aactggcaatgagacatctgaa

SEQ ID NO: 67355 - DNA, 22 bp, synthetic construct
  misc_feature 1..22: note = chemically synthesized
  source 1..22: mol_type = other DNA
gcaatgagacatctgaaataga

SEQ ID NO: 67356 - DNA, 22 bp, synthetic construct
  misc_feature 1..22: note = chemically synthesized
  source 1..22: mol_type = other DNA
aaatagattatttaagccaggg

SEQ ID NO: 67357 - DNA, 22 bp, synthetic construct
  misc_feature 1..22: note = chemically synthesized
  source 1..22: mol_type = other DNA
tttaagccagggaggcagtatt

SEQ ID NO: 67358 - DNA, 22 bp, synthetic construct
  misc_feature 1..22: note = chemically synthesized
  source 1..22: mol_type = other DNA
aagccagggaggcagtattgca

SEQ ID NO: 67359 - DNA, 22 bp, synthetic construct
  misc_feature 1..22: note = chemically synthesized
  source 1..22: mol_type = other DNA
agccagggaggcagtattgcaa

SEQ ID NO: 67360 - DNA, 22 bp, synthetic construct
  misc_feature 1..22: note = chemically synthesized
  source 1..22: mol_type = other DNA
caaggaagaacatggctatcaa

SEQ ID NO: 67361 - DNA, 22 bp, synthetic construct
  misc_feature 1..22: note = chemically synthesized
  source 1..22: mol_type = other DNA
tcaacacttgtttgtctgactc

SEQ ID NO: 67362 - DNA, 22 bp, synthetic construct
  misc_feature 1..22: note = chemically synthesized
  source 1..22: mol_type = other DNA
gtttgtctgactcagaggaata

SEQ ID NO: 67363 - DNA, 22 bp, synthetic construct
  misc_feature 1..22: note = chemically synthesized
  source 1..22: mol_type = other DNA
tttgtctgactcagaggaataa

SEQ ID NO: 67364 - DNA, 22 bp, synthetic construct
  misc_feature 1..22: note = chemically synthesized
  source 1..22: mol_type = other DNA
gtctgactcagaggaataaaac

SEQ ID NO: 67365 - DNA, 22 bp, synthetic construct
  misc_feature 1..22: note = chemically synthesized
  source 1..22: mol_type = other DNA
tctgactcagaggaataaaaca

SEQ ID NO: 67366 - DNA, 22 bp, synthetic construct
  misc_feature 1..22: note = chemically synthesized
  source 1..22: mol_type = other DNA
actcagaggaataaaacatagt

SEQ ID NO: 67367 - DNA, 22 bp, synthetic construct
  misc_feature 1..22: note = chemically synthesized
  source 1..22: mol_type = other DNA
agaggaataaaacatagtaaat

SEQ ID NO: 67368 - DNA, 22 bp, synthetic construct
  misc_feature 1..22: note = chemically synthesized
  source 1..22: mol_type = other DNA
tgccttagcgggccacccacat

SEQ ID NO: 67369 - DNA, 22 bp, synthetic construct
  misc_feature 1..22: note = chemically synthesized
  source 1..22: mol_type = other DNA
gccttagcgggccacccacatt

SEQ ID NO: 67370 - DNA, 22 bp, synthetic construct
  misc_feature 1..22: note = chemically synthesized
  source 1..22: mol_type = other DNA
ccttagcgggccacccacattc

SEQ ID NO: 67371 - DNA, 22 bp, synthetic construct
  misc_feature 1..22: note = chemically synthesized
  source 1..22: mol_type = other DNA
agcgggccacccacattcattg

SEQ ID NO: 67372 - DNA, 22 bp, synthetic construct
  misc_feature 1..22: note = chemically synthesized
  source 1..22: mol_type = other DNA
gcgggccacccacattcattgg

SEQ ID NO: 67373 - DNA, 22 bp, synthetic construct
  misc_feature 1..22: note = chemically synthesized
  source 1..22: mol_type = other DNA
attgggggaagaaacaattgag

SEQ ID NO: 67374 - DNA, 22 bp, synthetic construct
  misc_feature 1..22: note = chemically synthesized
  source 1..22: mol_type = other DNA
ggggaagaaacaattgaggtgg

SEQ ID NO: 67375 - DNA, 22 bp, synthetic construct
  misc_feature 1..22: note = chemically synthesized
  source 1..22: mol_type = other DNA
aggtggggggaaaacagaacag

SEQ ID NO: 67376 - DNA, 22 bp, synthetic construct
  misc_feature 1..22: note = chemically synthesized
  source 1..22: mol_type = other DNA
catggagtttcacaagagtcca

SEQ ID NO: 67377 - DNA, 22 bp, synthetic construct
  misc_feature 1..22: note = chemically synthesized
  source 1..22: mol_type = other DNA
atggagtttcacaagagtccac

SEQ ID NO: 67378 - DNA, 22 bp, synthetic construct
  misc_feature 1..22: note = chemically synthesized
  source 1..22: mol_type = other DNA
cacaagagtccacatggttgtg

SEQ ID NO: 67379 - DNA, 22 bp, synthetic construct
  misc_feature 1..22: note = chemically synthesized
  source 1..22: mol_type = other DNA
acaagagtccacatggttgtgt

SEQ ID NO: 67380 - DNA, 22 bp, synthetic construct
  misc_feature 1..22: note = chemically synthesized
  source 1..22: mol_type = other DNA
tgtcccttattttcagaaaatg

SEQ ID NO: 67381 - DNA, 22 bp, synthetic construct
  misc_feature 1..22: note = chemically synthesized
  source 1..22: mol_type = other DNA
attttcagaaaatgtgaaattg

SEQ ID NO: 67382 - DNA, 22 bp, synthetic construct
  misc_feature 1..22: note = chemically synthesized
  source 1..22: mol_type = other DNA
ttttcagaaaatgtgaaattgg

SEQ ID NO: 67383 - DNA, 22 bp, synthetic construct
  misc_feature 1..22: note = chemically synthesized
  source 1..22: mol_type = other DNA
tcagaaaatgtgaaattggaaa

SEQ ID NO: 67384 - DNA, 22 bp, synthetic construct
  misc_feature 1..22: note = chemically synthesized
  source 1..22: mol_type = other DNA
cagaaaatgtgaaattggaaaa

SEQ ID NO: 67385 - DNA, 22 bp, synthetic construct
  misc_feature 1..22: note = chemically synthesized
  source 1..22: mol_type = other DNA
agaaaatgtgaaattggaaaat

SEQ ID NO: 67386 - DNA, 22 bp, synthetic construct
  misc_feature 1..22: note = chemically synthesized
  source 1..22: mol_type = other DNA
gaaaatacgcacttgtgaaagc

SEQ ID NO: 67387 - DNA, 22 bp, synthetic construct
  misc_feature 1..22: note = chemically synthesized
  source 1..22: mol_type = other DNA
gtgaaagctgaagatgtcacag

SEQ ID NO: 67388 - DNA, 22 bp, synthetic construct
  misc_feature 1..22: note = chemically synthesized
  source 1..22: mol_type = other DNA
tgaaagctgaagatgtcacaga

SEQ ID NO: 67389 - DNA, 22 bp, synthetic construct
  misc_feature 1..22: note = chemically synthesized
  source 1..22: mol_type = other DNA
aagatgtcacagaaatcttcag

SEQ ID NO: 67390 - DNA, 22 bp, synthetic construct
  misc_feature 1..22: note = chemically synthesized
  source 1..22: mol_type = other DNA
cagaggatttatttagatggtc

SEQ ID NO: 67391 - DNA, 22 bp, synthetic construct
  misc_feature 1..22: note = chemically synthesized
  source 1..22: mol_type = other DNA
agaggatttatttagatggtcg

SEQ ID NO: 67392 - DNA, 22 bp, synthetic construct
  misc_feature 1..22: note = chemically synthesized
  source 1..22: mol_type = other DNA
atttagatggtcgtatcctccg

SEQ ID NO: 67393 - DNA, 22 bp, synthetic construct
  misc_feature 1..22: note = chemically synthesized
  source 1..22: mol_type = other DNA
tttagatggtcgtatcctccgc

SEQ ID NO: 67394 - DNA, 22 bp, synthetic construct
  misc_feature 1..22: note = chemically synthesized
  source 1..22: mol_type = other DNA
agatggtcgtatcctccgctgt

SEQ ID NO: 67395 - DNA, 22 bp, synthetic construct
  misc_feature 1..22: note = chemically synthesized
  source 1..22: mol_type = other DNA
gatggtcgtatcctccgctgtc

SEQ ID NO: 67396 - DNA, 22 bp, synthetic construct
  misc_feature 1..22: note = chemically synthesized
  source 1..22: mol_type = other DNA
cgctgtcaactggatgaatcag

SEQ ID NO: 67397 - DNA, 22 bp, synthetic construct
  misc_feature 1..22: note = chemically synthesized
  source 1..22: mol_type = other DNA
tcaactggatgaatcagtgtgc

SEQ ID NO: 67398 - DNA, 22 bp, synthetic construct
  misc_feature 1..22: note = chemically synthesized
  source 1..22: mol_type = other DNA
gatgaatcagtgtgcaatattt

SEQ ID NO: 67399 - DNA, 22 bp, synthetic construct
  misc_feature 1..22: note = chemically synthesized
  source 1..22: mol_type = other DNA
tgatgtgaatgtaaccgcctat

SEQ ID NO: 67400 - DNA, 22 bp, synthetic construct
  misc_feature 1..22: note = chemically synthesized
  source 1..22: mol_type = other DNA
gatgtgaatgtaaccgcctatt

SEQ ID NO: 67401 - DNA, 22 bp, synthetic construct
  misc_feature 1..22: note = chemically synthesized
  source 1..22: mol_type = other DNA
atgtgaatgtaaccgcctattg

SEQ ID NO: 67402 - DNA, 22 bp, synthetic construct
  misc_feature 1..22: note = chemically synthesized
  source 1..22: mol_type = other DNA
ttgggccccatttactctgtgc

SEQ ID NO: 67403 - DNA, 22 bp, synthetic construct
  misc_feature 1..22: note = chemically synthesized
  source 1..22: mol_type = other DNA
ggccccatttactctgtgccca

SEQ ID NO: 67404 - DNA, 22 bp, synthetic construct
  misc_feature 1..22: note = chemically synthesized
  source 1..22: mol_type = other DNA
actctgtgcccaccttgggctt

SEQ ID NO: 67405 - DNA, 22 bp, synthetic construct
  misc_feature 1..22: note = chemically synthesized
  source 1..22: mol_type = other DNA
ctctgtgcccaccttgggcttt

SEQ ID NO: 67406 - DNA, 22 bp, synthetic construct
  misc_feature 1..22: note = chemically synthesized
  source 1..22: mol_type = other DNA
tgtgcccaccttgggctttgct

SEQ ID NO: 67407 - DNA, 22 bp, synthetic construct
  misc_feature 1..22: note = chemically synthesized
  source 1..22: mol_type = other DNA
tgcccaccttgggctttgcttc

SEQ ID NO: 67408 - DNA, 22 bp, synthetic construct
  misc_feature 1..22: note = chemically synthesized
  source 1..22: mol_type = other DNA
gggctttgcttctctctaagca

SEQ ID NO: 67409 - DNA, 22 bp, synthetic construct
  misc_feature 1..22: note = chemically synthesized
  source 1..22: mol_type = other DNA
ggctttgcttctctctaagcat

SEQ ID NO: 67410 - DNA, 22 bp, synthetic construct
  misc_feature 1..22: note = chemically synthesized
  source 1..22: mol_type = other DNA
tgcttctctctaagcatcttta

SEQ ID NO: 67411 - DNA, 22 bp, synthetic construct
  misc_feature 1..22: note = chemically synthesized
  source 1..22: mol_type = other DNA
gcttctctctaagcatctttac

SEQ ID NO: 67412 - DNA, 22 bp, synthetic construct
  misc_feature 1..22: note = chemically synthesized
  source 1..22: mol_type = other DNA
cttctctctaagcatctttacc

SEQ ID NO: 67413 - DNA, 22 bp, synthetic construct
  misc_feature 1..22: note = chemically synthesized
  source 1..22: mol_type = other DNA
ctctctaagcatctttacctgc

SEQ ID NO: 67414 - DNA, 22 bp, synthetic construct
  misc_feature 1..22: note = chemically synthesized
  source 1..22: mol_type = other DNA
tctctaagcatctttacctgct

SEQ ID NO: 67415 - DNA, 22 bp, synthetic construct
  misc_feature 1..22: note = chemically synthesized
  source 1..22: mol_type = other DNA
tctaagcatctttacctgcttt

SEQ ID NO: 67416 - DNA, 22 bp, synthetic construct
  misc_feature 1..22: note = chemically synthesized
  source 1..22: mol_type = other DNA
taagcatctttacctgcttttt

SEQ ID NO: 67417 - DNA, 22 bp, synthetic construct
  misc_feature 1..22: note = chemically synthesized
  source 1..22: mol_type = other DNA
agcatctttacctgctttttct

SEQ ID NO: 67418 - DNA, 22 bp, synthetic construct
  misc_feature 1..22: note = chemically synthesized
  source 1..22: mol_type = other DNA
tacctgctttttctttttatct

SEQ ID NO: 67419 - DNA, 22 bp, synthetic construct
  misc_feature 1..22: note = chemically synthesized
  source 1..22: mol_type = other DNA
acctgctttttctttttatcta

SEQ ID NO: 67420 - DNA, 22 bp, synthetic construct
  misc_feature 1..22: note = chemically synthesized
  source 1..22: mol_type = other DNA
cctgctttttctttttatctag

SEQ ID NO: 67421 - DNA, 22 bp, synthetic construct
  misc_feature 1..22: note = chemically synthesized
  source 1..22: mol_type = other DNA
ctttttctttttatctaggata

SEQ ID NO: 67422 - DNA, 22 bp, synthetic construct
  misc_feature 1..22: note = chemically synthesized
  source 1..22: mol_type = other DNA
tttctttttatctaggatatcc

SEQ ID NO: 67423 - DNA, 22 bp, synthetic construct
  misc_feature 1..22: note = chemically synthesized
  source 1..22: mol_type = other DNA
ttctttttatctaggatatcct

SEQ ID NO: 67424 - DNA, 22 bp, synthetic construct
  misc_feature 1..22: note = chemically synthesized
  source 1..22: mol_type = other DNA
tctttttatctaggatatcctt

SEQ ID NO: 67425 - DNA, 22 bp, synthetic construct
  misc_feature 1..22: note = chemically synthesized
  source 1..22: mol_type = other DNA
ctttttatctaggatatccttt

SEQ ID NO: 67426 - DNA, 22 bp, synthetic construct
  misc_feature 1..22: note = chemically synthesized
  source 1..22: mol_type = other DNA
tttttatctaggatatcctttc

SEQ ID NO: 67427 - DNA, 22 bp, synthetic construct
  misc_feature 1..22: note = chemically synthesized
  source 1..22: mol_type = other DNA
tttatctaggatatcctttctc

SEQ ID NO: 67428 - DNA, 22 bp, synthetic construct
  misc_feature 1..22: note = chemically synthesized
  source 1..22: mol_type = other DNA
ttatctaggatatcctttctct

SEQ ID NO: 67429 - DNA, 22 bp, synthetic construct
  misc_feature 1..22: note = chemically synthesized
  source 1..22: mol_type = other DNA
tatctaggatatcctttctctt

SEQ ID NO: 67430 - DNA, 22 bp, synthetic construct
  misc_feature 1..22: note = chemically synthesized
  source 1..22: mol_type = other DNA
atctaggatatcctttctcttg

SEQ ID NO: 67431 - DNA, 22 bp, synthetic construct
  misc_feature 1..22: note = chemically synthesized
  source 1..22: mol_type = other DNA
tctaggatatcctttctcttgg

SEQ ID NO: 67432 - DNA, 22 bp, synthetic construct
  misc_feature 1..22: note = chemically synthesized
  source 1..22: mol_type = other DNA
ggatatcctttctcttggctct

SEQ ID NO: 67433 - DNA, 22 bp, synthetic construct
  misc_feature 1..22: note = chemically synthesized
  source 1..22: mol_type = other DNA
tctcttggctctccaggtttaa

SEQ ID NO: 67434 - DNA, 22 bp, synthetic construct
  misc_feature 1..22: note = chemically synthesized
  source 1..22: mol_type = other DNA
ctcttggctctccaggtttaac

SEQ ID NO: 67435 - DNA, 22 bp, synthetic construct
  misc_feature 1..22: note = chemically synthesized
  source 1..22: mol_type = other DNA
tcttggctctccaggtttaact

SEQ ID NO: 67436 - DNA, 22 bp, synthetic construct
  misc_feature 1..22: note = chemically synthesized
  source 1..22: mol_type = other DNA
ttggctctccaggtttaactca

SEQ ID NO: 67437 - DNA, 22 bp, synthetic construct
  misc_feature 1..22: note = chemically synthesized
  source 1..22: mol_type = other DNA
ggctctccaggtttaactcata

SEQ ID NO: 67438 - DNA, 22 bp, synthetic construct
  misc_feature 1..22: note = chemically synthesized
  source 1..22: mol_type = other DNA
gctctccaggtttaactcataa

SEQ ID NO: 67439 - DNA, 22 bp, synthetic construct
  misc_feature 1..22: note = chemically synthesized
  source 1..22: mol_type = other DNA
tccaggtttaactcataagttt

SEQ ID NO: 67440 - DNA, 22 bp, synthetic construct
  misc_feature 1..22: note = chemically synthesized
  source 1..22: mol_type = other DNA
caggtttaactcataagttttc

SEQ ID NO: 67441 - DNA, 22 bp, synthetic construct
  misc_feature 1..22: note = chemically synthesized
  source 1..22: mol_type = other DNA
aactcataagttttcctctttc

SEQ ID NO: 67442 - DNA, 22 bp, synthetic construct
  misc_feature 1..22: note = chemically synthesized
  source 1..22: mol_type = other DNA
actcataagttttcctctttcc

SEQ ID NO: 67443 - DNA, 22 bp, synthetic construct
  misc_feature 1..22: note = chemically synthesized
  source 1..22: mol_type = other DNA
ataagttttcctctttcccaaa

SEQ ID NO: 67444 - DNA, 22 bp, synthetic construct
  misc_feature 1..22: note = chemically synthesized
  source 1..22: mol_type = other DNA
tcctctttcccaaagcctctct

SEQ ID NO: 67445 - DNA, 22 bp, synthetic construct
  misc_feature 1..22: note = chemically synthesized
  source 1..22: mol_type = other DNA
cctctttcccaaagcctctctc

SEQ ID NO: 67446 - DNA, 22 bp, synthetic construct
  misc_feature 1..22: note = chemically synthesized
  source 1..22: mol_type = other DNA
ctctttcccaaagcctctctcc

SEQ ID NO: 67447 - DNA, 22 bp, synthetic construct
  misc_feature 1..22: note = chemically synthesized
  source 1..22: mol_type = other DNA
tttcccaaagcctctctccctc

SEQ ID NO: 67448 - DNA, 22 bp, synthetic construct
  misc_feature 1..22: note = chemically synthesized
  source 1..22: mol_type = other DNA
tcccaaagcctctctccctccc

SEQ ID NO: 67449 - DNA, 22 bp, synthetic construct
  misc_feature 1..22: note = chemically synthesized
  source 1..22: mol_type = other DNA
cccaaagcctctctccctccct

SEQ ID NO: 67450 - DNA, 22 bp, synthetic construct
  misc_feature 1..22: note = chemically synthesized
  source 1..22: mol_type = other DNA
ccaaagcctctctccctccctt

SEQ ID NO: 67451 - DNA, 22 bp, synthetic construct
  misc_feature 1..22: note = chemically synthesized
  source 1..22: mol_type = other DNA
tctccctcccttccaaatggaa

SEQ ID NO: 67452 - DNA, 22 bp, synthetic construct
  misc_feature 1..22: note = chemically synthesized
  source 1..22: mol_type = other DNA
tccctcccttccaaatggaaat

SEQ ID NO: 67453 - DNA, 22 bp, synthetic construct
  misc_feature 1..22: note = chemically synthesized
  source 1..22: mol_type = other DNA
cctcccttccaaatggaaataa

SEQ ID NO: 67454 - DNA, 22 bp, synthetic construct
  misc_feature 1..22: note = chemically synthesized
  source 1..22: mol_type = other DNA
ccttccaaatggaaataatttc

SEQ ID NO: 67455 - DNA, 22 bp, synthetic construct
  misc_feature 1..22: note = chemically synthesized
  source 1..22: mol_type = other DNA
ccaaatggaaataatttctctt

SEQ ID NO: 67456 - DNA, 22 bp, synthetic construct
  misc_feature 1..22: note = chemically synthesized
  source 1..22: mol_type = other DNA
caaatggaaataatttctcttc

SEQ ID NO: 67457 - DNA, 22 bp, synthetic construct
  misc_feature 1..22: note = chemically synthesized
  source 1..22: mol_type = other DNA
ctcttcctttgaatttccatag

SEQ ID NO: 67458 - DNA, 22 bp, synthetic construct
  misc_feature 1..22: note = chemically synthesized
  source 1..22: mol_type = other DNA
tcttcctttgaatttccatagc

SEQ ID NO: 67459 - DNA, 22 bp, synthetic construct
  misc_feature 1..22: note = chemically synthesized
  source 1..22: mol_type = other DNA
ttcctttgaatttccatagcag

SEQ ID NO: 67460 - DNA, 22 bp, synthetic construct
  misc_feature 1..22: note = chemically synthesized
  source 1..22: mol_type = other DNA
cctttgaatttccatagcagct

SEQ ID NO: 67461 - DNA, 22 bp, synthetic construct
  misc_feature 1..22: note = chemically synthesized
  source 1..22: mol_type = other DNA
ctttgaatttccatagcagctc

SEQ ID NO: 67462 - DNA, 22 bp, synthetic construct
  misc_feature 1..22: note = chemically synthesized
  source 1..22: mol_type = other DNA
tgaatttccatagcagctcatc

SEQ ID NO: 67463 - DNA, 22 bp, synthetic construct
  misc_feature 1..22: note = chemically synthesized
  source 1..22: mol_type = other DNA
gaatttccatagcagctcatct

SEQ ID NO: 67464 - DNA, 22 bp, synthetic construct
  misc_feature 1..22: note = chemically synthesized
  source 1..22: mol_type = other DNA
aatttccatagcagctcatctg

SEQ ID NO: 67465 - DNA, 22 bp, synthetic construct
  misc_feature 1..22: note = chemically synthesized
  source 1..22: mol_type = other DNA
ccatagcagctcatctgtacct

SEQ ID NO: 67466 - DNA, 22 bp, synthetic construct
  misc_feature 1..22: note = chemically synthesized
  source 1..22: mol_type = other DNA
catagcagctcatctgtacctc

SEQ ID NO: 67467 - DNA, 22 bp, synthetic construct
  misc_feature 1..22: note = chemically synthesized
  source 1..22: mol_type = other DNA
atctgtacctctctcatgacac

SEQ ID NO: 67468 - DNA, 22 bp, synthetic construct
  misc_feature 1..22: note = chemically synthesized
  source 1..22: mol_type = other DNA
tacctctctcatgacacacttt

SEQ ID NO: 67469 - DNA, 22 bp, synthetic construct
  misc_feature 1..22: note = chemically synthesized
  source 1..22: mol_type = other DNA
tctcatgacacactttctacat

SEQ ID NO: 67470 - DNA, 22 bp, synthetic construct
  misc_feature 1..22: note = chemically synthesized
  source 1..22: mol_type = other DNA
tcatgacacactttctacatgg

SEQ ID NO: 67471 - DNA, 22 bp, synthetic construct
  misc_feature 1..22: note = chemically synthesized
  source 1..22: mol_type = other DNA
atgacacactttctacatgggg

SEQ ID NO: 67472 - DNA, 22 bp, synthetic construct
  misc_feature 1..22: note = chemically synthesized
  source 1..22: mol_type = other DNA
tctacatgggggtagagcaatt

SEQ ID NO: 67473 - DNA, 22 bp, synthetic construct
  misc_feature 1..22: note = chemically synthesized
  source 1..22: mol_type = other DNA
ctacatgggggtagagcaattt

SEQ ID NO: 67474 - DNA, 22 bp, synthetic construct
  misc_feature 1..22: note = chemically synthesized
  source 1..22: mol_type = other DNA
tacatgggggtagagcaatttc

SEQ ID NO: 67475 - DNA, 22 bp, synthetic construct
  misc_feature 1..22: note = chemically synthesized
  source 1..22: mol_type = other DNA
catgggggtagagcaatttctg

SEQ ID NO: 67476 - DNA, 22 bp, synthetic construct
  misc_feature 1..22: note = chemically synthesized
  source 1..22: mol_type = other DNA
ctgtgcaggccttaccttttct

SEQ ID NO: 67477 - DNA, 22 bp, synthetic construct
  misc_feature 1..22: note = chemically synthesized
  source 1..22: mol_type = other DNA
tgtgcaggccttaccttttcta

SEQ ID NO: 67478 - DNA, 22 bp, synthetic construct
  misc_feature 1..22: note = chemically synthesized
  source 1..22: mol_type = other DNA
tgcaggccttaccttttctact

SEQ ID NO: 67479 - DNA, 22 bp, synthetic construct
  misc_feature 1..22: note = chemically synthesized
  source 1..22: mol_type = other DNA
accttttctactaaatgaagcc

SEQ ID NO: 67480 - DNA, 22 bp, synthetic construct
  misc_feature 1..22: note = chemically synthesized
  source 1..22: mol_type = other DNA
ccttttctactaaatgaagcct

SEQ ID NO: 67481 - DNA, 22 bp, synthetic construct
  misc_feature 1..22: note = chemically synthesized
  source 1..22: mol_type = other DNA
ttctactaaatgaagcctgctg

SEQ ID NO: 67482 - DNA, 22 bp, synthetic construct
  misc_feature 1..22: note = chemically synthesized
  source 1..22: mol_type = other DNA
tctactaaatgaagcctgctgt

SEQ ID NO: 67483 - DNA, 22 bp, synthetic construct
  misc_feature 1..22: note = chemically synthesized
  source 1..22: mol_type = other DNA
ctactaaatgaagcctgctgtg

SEQ ID NO: 67484 - DNA, 22 bp, synthetic construct
  misc_feature 1..22: note = chemically synthesized
  source 1..22: mol_type = other DNA
tactaaatgaagcctgctgtgg

SEQ ID NO: 67485 - DNA, 22 bp, synthetic construct
  misc_feature 1..22: note = chemically synthesized
  source 1..22: mol_type = other DNA
ctaaatgaagcctgctgtggga

SEQ ID NO: 67486 - DNA, 22 bp, synthetic construct
  misc_feature 1..22: note = chemically synthesized
  source 1..22: mol_type = other DNA
aatgaagcctgctgtgggagaa

SEQ ID NO: 67487 - DNA, 22 bp, synthetic construct
  misc_feature 1..22: note = chemically synthesized
  source 1..22: mol_type = other DNA
ctgtgggagaaatctgtgtccg

SEQ ID NO: 67488 - DNA, 22 bp, synthetic construct
  misc_feature 1..22: note = chemically synthesized
  source 1..22: mol_type = other DNA
tgggagaaatctgtgtccgtgt

SEQ ID NO: 67489 - DNA, 22 bp, synthetic construct
  misc_feature 1..22: note = chemically synthesized
  source 1..22: mol_type = other DNA
tgtccgtgttttctttgtactg

SEQ ID NO: 67490 - DNA, 22 bp, synthetic construct
  misc_feature 1..22: note = chemically synthesized
  source 1..22: mol_type = other DNA
tctttgtactgcccacagcggc

SEQ ID NO: 67491 - DNA, 22 bp, synthetic construct
  misc_feature 1..22: note = chemically synthesized
  source 1..22: mol_type = other DNA
ctttgtactgcccacagcggct

SEQ ID NO: 67492 - DNA, 22 bp, synthetic construct
  misc_feature 1..22: note = chemically synthesized
  source 1..22: mol_type = other DNA
tttgtactgcccacagcggcta

SEQ ID NO: 67493 - DNA, 22 bp, synthetic construct
  misc_feature 1..22: note = chemically synthesized
  source 1..22: mol_type = other DNA
tgtactgcccacagcggctagc

SEQ ID NO: 67494 - DNA, 22 bp, synthetic construct
  misc_feature 1..22: note = chemically synthesized
  source 1..22: mol_type = other DNA
gtactgcccacagcggctagcc

SEQ ID NO: 67495 - DNA, 22 bp, synthetic construct
  misc_feature 1..22: note = chemically synthesized
  source 1..22: mol_type = other DNA
tactgcccacagcggctagccc

SEQ ID NO: 67496 - DNA, 22 bp, synthetic construct
  misc_feature 1..22: note = chemically synthesized
  source 1..22: mol_type = other DNA
cccacagcggctagcccattgc

SEQ ID NO: 67497 - DNA, 22 bp, synthetic construct
  misc_feature 1..22: note = chemically synthesized
  source 1..22: mol_type = other DNA
gcccattgctttgggcattgta

SEQ ID NO: 67498 - DNA, 22 bp, synthetic construct
  misc_feature 1..22: note = chemically synthesized
  source 1..22: mol_type = other DNA
ctttgggcattgtaggcactcg

SEQ ID NO: 67499 - DNA, 22 bp, synthetic construct
  misc_feature 1..22: note = chemically synthesized
  source 1..22: mol_type = other DNA
tgggcattgtaggcactcggta

SEQ ID NO: 67500 - DNA, 22 bp, synthetic construct
  misc_feature 1..22: note = chemically synthesized
  source 1..22: mol_type = other DNA
gggcattgtaggcactcggtaa

SEQ ID NO: 67501 - DNA, 22 bp, synthetic construct
  misc_feature 1..22: note = chemically synthesized
  source 1..22: mol_type = other DNA
ggcattgtaggcactcggtaaa

SEQ ID NO: 67502 - DNA, 22 bp, synthetic construct
  misc_feature 1..22: note = chemically synthesized
  source 1..22: mol_type = other DNA
taggcactcggtaaatatttgt

SEQ ID NO: 67503 - DNA, 22 bp, synthetic construct
  misc_feature 1..22: note = chemically synthesized
  source 1..22: mol_type = other DNA
ggtaaatatttgttgaatgaat

SEQ ID NO: 67504 - DNA, 22 bp, synthetic construct
  misc_feature 1..22: note = chemically synthesized
  source 1..22: mol_type = other DNA
gttgaatgaatgcatgagaggt

SEQ ID NO: 67505 - DNA, 22 bp, synthetic construct
  misc_feature 1..22: note = chemically synthesized
  source 1..22: mol_type = other DNA
ttgaatgaatgcatgagaggtt

SEQ ID NO: 67506 - DNA, 22 bp, synthetic construct
  misc_feature 1..22: note = chemically synthesized
  source 1..22: mol_type = other DNA
aatgaatgcatgagaggttgaa

SEQ ID NO: 67507 - DNA, 22 bp, synthetic construct
  misc_feature 1..22: note = chemically synthesized
  source 1..22: mol_type = other DNA
aatgaatgcatgagagaatgaa

SEQ ID NO: 67508 - DNA, 22 bp, synthetic construct
  misc_feature 1..22: note = chemically synthesized
  source 1..22: mol_type = other DNA
atcctgggaacacacattttgc

SEQ ID NO: 67509 - DNA, 22 bp, synthetic construct
  misc_feature 1..22: note = chemically synthesized
  source 1..22: mol_type = other DNA
tcctgggaacacacattttgca

SEQ ID NO: 67510 - DNA, 22 bp, synthetic construct
  misc_feature 1..22: note = chemically synthesized
  source 1..22: mol_type = other DNA
ggaacacacattttgcatagtg

SEQ ID NO: 67511 - DNA, 22 bp, synthetic construct
  misc_feature 1..22: note = chemically synthesized
  source 1..22: mol_type = other DNA
tgcatagtgaggtatgtgatta

SEQ ID NO: 67512 - DNA, 22 bp, synthetic construct
  misc_feature 1..22: note = chemically synthesized
  source 1..22: mol_type = other DNA
gcatagtgaggtatgtgattaa

SEQ ID NO: 67513 - DNA, 22 bp, synthetic construct
  misc_feature 1..22: note = chemically synthesized
  source 1..22: mol_type = other DNA
catagtgaggtatgtgattaaa

SEQ ID NO: 67514 - DNA, 22 bp, synthetic construct
  misc_feature 1..22: note = chemically synthesized
  source 1..22: mol_type = other DNA
aacaaacaaaaaaaaattgtcc

SEQ ID NO: 67515 - DNA, 22 bp, synthetic construct
  misc_feature 1..22: note = chemically synthesized
  source 1..22: mol_type = other DNA
tcctaagacaatttgtcttttt

SEQ ID NO: 67516 - DNA, 22 bp, synthetic construct
  misc_feature 1..22: note = chemically synthesized
  source 1..22: mol_type = other DNA
agacaatttgtctttttatgca

SEQ ID NO: 67517 - DNA, 22 bp, synthetic construct
  misc_feature 1..22: note = chemically synthesized
  source 1..22: mol_type = other DNA
gtctttttatgcagctgccctc

SEQ ID NO: 67518 - DNA, 22 bp, synthetic construct
  misc_feature 1..22: note = chemically synthesized
  source 1..22: mol_type = other DNA
tctttttatgcagctgccctct

SEQ ID NO: 67519 - DNA, 22 bp, synthetic construct
  misc_feature 1..22: note = chemically synthesized
  source 1..22: mol_type = other DNA
tttatgcagctgccctctcagt

SEQ ID NO: 67520 - DNA, 22 bp, synthetic construct
  misc_feature 1..22: note = chemically synthesized
  source 1..22: mol_type = other DNA
ttatgcagctgccctctcagtc

SEQ ID NO: 67521 - DNA, 22 bp, synthetic construct
  misc_feature 1..22: note = chemically synthesized
  source 1..22: mol_type = other DNA
tatgcagctgccctctcagtct

SEQ ID NO: 67522 - DNA, 22 bp, synthetic construct
  misc_feature 1..22: note = chemically synthesized
  source 1..22: mol_type = other DNA
atgcagctgccctctcagtctc

SEQ ID NO: 67523 - DNA, 22 bp, synthetic construct
  misc_feature 1..22: note = chemically synthesized
  source 1..22: mol_type = other DNA
tgcagctgccctctcagtctcc

SEQ ID NO: 67524 - DNA, 22 bp, synthetic construct
  misc_feature 1..22: note = chemically synthesized
  source 1..22: mol_type = other DNA
ccctctcagtctcctagataag

SEQ ID NO: 67525 - DNA, 22 bp, synthetic construct
  misc_feature 1..22: note = chemically synthesized
  source 1..22: mol_type = other DNA
tcagtctcctagataagttccg

SEQ ID NO: 67526 - DNA, 22 bp, synthetic construct
  misc_feature 1..22: note = chemically synthesized
  source 1..22: mol_type = other DNA
agtctcctagataagttccgcc

SEQ ID NO: 67527 - DNA, 22 bp, synthetic construct
  misc_feature 1..22: note = chemically synthesized
  source 1..22: mol_type = other DNA
ctagataagttccgccattcta

SEQ ID NO: 67528 - DNA, 22 bp, synthetic construct
  misc_feature 1..22: note = chemically synthesized
  source 1..22: mol_type = other DNA
gataagttccgccattctaagg

SEQ ID NO: 67529 - DNA, 22 bp, synthetic construct
  misc_feature 1..22: note = chemically synthesized
  source 1..22: mol_type = other DNA
cgccattctaaggcaaaagctt

SEQ ID NO: 67530 - DNA, 22 bp, synthetic construct
  misc_feature 1..22: note = chemically synthesized
  source 1..22: mol_type = other DNA
taaggcaaaagcttaaagtgta

SEQ ID NO: 67531 - DNA, 22 bp, synthetic construct
  misc_feature 1..22: note = chemically synthesized
  source 1..22: mol_type = other DNA
aggcaaaagcttaaagtgtaat

SEQ ID NO: 67532 - DNA, 22 bp, synthetic construct
  misc_feature 1..22: note = chemically synthesized
  source 1..22: mol_type = other DNA
aaagtgtaataaaaatttatct

SEQ ID NO: 67533 - DNA, 22 bp, synthetic construct
  misc_feature 1..22: note = chemically synthesized
  source 1..22: mol_type = other DNA
aagtgtaataaaaatttatcta

SEQ ID NO: 67534 - DNA, 22 bp, synthetic construct
  misc_feature 1..22: note = chemically synthesized
  source 1..22: mol_type = other DNA
atctaattcacgatcaagtgaa

SEQ ID NO: 67535 - DNA, 22 bp, synthetic construct
  misc_feature 1..22: note = chemically synthesized
  source 1..22: mol_type = other DNA
tctaattcacgatcaagtgaaa

SEQ ID NO: 67536 - DNA, 22 bp, synthetic construct
  misc_feature 1..22: note = chemically synthesized
  source 1..22: mol_type = other DNA
attcacgatcaagtgaaaatac

SEQ ID NO: 67537 - DNA, 22 bp, synthetic construct
  misc_feature 1..22: note = chemically synthesized
  source 1..22: mol_type = other DNA
acgatcaagtgaaaatactttg

SEQ ID NO: 67538 - DNA, 22 bp, synthetic construct
  misc_feature 1..22: note = chemically synthesized
  source 1..22: mol_type = other DNA
tgggcccagagccaaagaatat

SEQ ID NO: 67539 - DNA, 22 bp, synthetic construct
  misc_feature 1..22: note = chemically synthesized
  source 1..22: mol_type = other DNA
gggcccagagccaaagaatatt

SEQ ID NO: 67540 - DNA, 22 bp, synthetic construct
  misc_feature 1..22: note = chemically synthesized
  source 1..22: mol_type = other DNA
ggcccagagccaaagaatatta

SEQ ID NO: 67541 - DNA, 22 bp, synthetic construct
  misc_feature 1..22: note = chemically synthesized
  source 1..22: mol_type = other DNA
ttggagtgaactttttttaaca

SEQ ID NO: 67542 - DNA, 22 bp, synthetic construct
  misc_feature 1..22: note = chemically synthesized
  source 1..22: mol_type = other DNA
gagtgaactttttttaacaccc

SEQ ID NO: 67543 - DNA, 22 bp, synthetic construct
  misc_feature 1..22: note = chemically synthesized
  source 1..22: mol_type = other DNA
tttttaacaccctaaatttaac

SEQ ID NO: 67544 - DNA, 22 bp, synthetic construct
  misc_feature 1..22: note = chemically synthesized
  source 1..22: mol_type = other DNA
ttttaacaccctaaatttaacc

SEQ ID NO: 67545 - DNA, 22 bp, synthetic construct
  misc_feature 1..22: note = chemically synthesized
  source 1..22: mol_type = other DNA
tttaacaccctaaatttaacca

SEQ ID NO: 67546 - DNA, 22 bp, synthetic construct
  misc_feature 1..22: note = chemically synthesized
  source 1..22: mol_type = other DNA
ttaacaccctaaatttaaccag

SEQ ID NO: 67547 - DNA, 22 bp, synthetic construct
  misc_feature 1..22: note = chemically synthesized
  source 1..22: mol_type = other DNA
taacaccctaaatttaaccagc

SEQ ID NO: 67548 - DNA, 22 bp, synthetic construct
  misc_feature 1..22: note = chemically synthesized
  source 1..22: mol_type = other DNA
aacaccctaaatttaaccagct

SEQ ID NO: 67549 - DNA, 22 bp, synthetic construct
  misc_feature 1..22: note = chemically synthesized
  source 1..22: mol_type = other DNA
acaccctaaatttaaccagctg

SEQ ID NO: 67550 - DNA, 22 bp, synthetic construct
  misc_feature 1..22: note = chemically synthesized
  source 1..22: mol_type = other DNA
aatttaaccagctggaattctt

SEQ ID NO: 67551 - DNA, 22 bp, synthetic construct
  misc_feature 1..22: note = chemically synthesized
  source 1..22: mol_type = other DNA
aaccagctggaattcttttttt

SEQ ID NO: 67552 - DNA, 22 bp, synthetic construct
  misc_feature 1..22: note = chemically synthesized
  source 1..22: mol_type = other DNA
accagctggaattcttttttta

SEQ ID NO: 67553 - DNA, 22 bp, synthetic construct
  misc_feature 1..22: note = chemically synthesized
  source 1..22: mol_type = other DNA
gaattctttttttaagtaccat

SEQ ID NO: 67554 - DNA, 22 bp, synthetic construct
  misc_feature 1..22: note = chemically synthesized
  source 1..22: mol_type = other DNA
tttttttaagtaccatcctatt

SEQ ID NO: 67555 - DNA, 22 bp, synthetic construct
  misc_feature 1..22: note = chemically synthesized
  source 1..22: mol_type = other DNA
tttttaagtaccatcctattca

SEQ ID NO: 67556 - DNA, 22 bp, synthetic construct
  misc_feature 1..22: note = chemically synthesized
  source 1..22: mol_type = other DNA
ttttaagtaccatcctattcaa

SEQ ID NO: 67557 - DNA, 22 bp, synthetic construct
  misc_feature 1..22: note = chemically synthesized
  source 1..22: mol_type = other DNA
tttaagtaccatcctattcaac

SEQ ID NO: 67558 - DNA, 22 bp, synthetic construct
  misc_feature 1..22: note = chemically synthesized
  source 1..22: mol_type = other DNA
ttaagtaccatcctattcaacc

SEQ ID NO: 67559 - DNA, 22 bp, synthetic construct
  misc_feature 1..22: note = chemically synthesized
  source 1..22: mol_type = other DNA
taagtaccatcctattcaacct

SEQ ID NO: 67560 - DNA, 22 bp, synthetic construct
  misc_feature 1..22: note = chemically synthesized
  source 1..22: mol_type = other DNA
aagtaccatcctattcaacctt

SEQ ID NO: 67561 - DNA, 22 bp, synthetic construct
  misc_feature 1..22: note = chemically synthesized
  source 1..22: mol_type = other DNA
agtaccatcctattcaaccttt

SEQ ID NO: 67562 - DNA, 22 bp, synthetic construct
  misc_feature 1..22: note = chemically synthesized
  source 1..22: mol_type = other DNA
ttcaaccttttgaaatgaagga

SEQ ID NO: 67563 - DNA, 22 bp, synthetic construct
  misc_feature 1..22: note = chemically synthesized
  source 1..22: mol_type = other DNA
aaccttttgaaatgaaggattt

SEQ ID NO: 67564 - DNA, 22 bp, synthetic construct
  misc_feature 1..22: note = chemically synthesized
  source 1..22: mol_type = other DNA
ttgaaatgaaggatttgccttt

SEQ ID NO: 67565 - DNA, 22 bp, synthetic construct
  misc_feature 1..22: note = chemically synthesized
  source 1..22: mol_type = other DNA
tgaaatgaaggatttgcctttt

SEQ ID NO: 67566 - DNA, 22 bp, synthetic construct
  misc_feature 1..22: note = chemically synthesized
  source 1..22: mol_type = other DNA
gaaatgaaggatttgcctttta

SEQ ID NO: 67567 - DNA, 22 bp, synthetic construct
  misc_feature 1..22: note = chemically synthesized
  source 1..22: mol_type = other DNA
aaatgaaggatttgccttttag

SEQ ID NO: 67568 - DNA, 22 bp, synthetic construct
  misc_feature 1..22: note = chemically synthesized
  source 1..22: mol_type = other DNA
gccttttagtgggaaatctgca

SEQ ID NO: 67569 - DNA, 22 bp, synthetic construct
  misc_feature 1..22: note = chemically synthesized
  source 1..22: mol_type = other DNA
ccttttagtgggaaatctgcat

SEQ ID NO: 67570 - DNA, 22 bp, synthetic construct
  misc_feature 1..22: note = chemically synthesized
  source 1..22: mol_type = other DNA
ttagtgggaaatctgcatttca

SEQ ID NO: 67571 - DNA, 22 bp, synthetic construct
  misc_feature 1..22: note = chemically synthesized
  source 1..22: mol_type = other DNA
tagtgggaaatctgcatttcaa

SEQ ID NO: 67572 - DNA, 22 bp, synthetic construct
  misc_feature 1..22: note = chemically synthesized
  source 1..22: mol_type = other DNA
agtgggaaatctgcatttcaac

SEQ ID NO: 67573 - DNA, 22 bp, synthetic construct
  misc_feature 1..22: note = chemically synthesized
  source 1..22: mol_type = other DNA
gtgggaaatctgcatttcaaca

SEQ ID NO: 67574 - DNA, 22 bp, synthetic construct
  misc_feature 1..22: note = chemically synthesized
  source 1..22: mol_type = other DNA
catttcaacacaaagatggaac

SEQ ID NO: 67575 - DNA, 22 bp, synthetic construct
  misc_feature 1..22: note = chemically synthesized
  source 1..22: mol_type = other DNA
caacacaaagatggaacacaat

SEQ ID NO: 67576 - DNA, 22 bp, synthetic construct
  misc_feature 1..22: note = chemically synthesized
  source 1..22: mol_type = other DNA
aacacaaagatggaacacaatg

SEQ ID NO: 67577 - DNA, 22 bp, synthetic construct
  misc_feature 1..22: note = chemically synthesized
  source 1..22: mol_type = other DNA
tggcttagttgcttttcagaaa

SEQ ID NO: 67578 - DNA, 22 bp, synthetic construct
  misc_feature 1..22: note = chemically synthesized
  source 1..22: mol_type = other DNA
ggcttagttgcttttcagaaaa

SEQ ID NO: 67579 - DNA, 22 bp, synthetic construct
  misc_feature 1..22: note = chemically synthesized
  source 1..22: mol_type = other DNA
gcttagttgcttttcagaaaag

SEQ ID NO: 67580 - DNA, 22 bp, synthetic construct
  misc_feature 1..22: note = chemically synthesized
  source 1..22: mol_type = other DNA
agttgcttttcagaaaagcaag

SEQ ID NO: 67581 - DNA, 22 bp, synthetic construct
  misc_feature 1..22: note = chemically synthesized
  source 1..22: mol_type = other DNA
gttgcttttcagaaaagcaaga

SEQ ID NO: 67582 - DNA, 22 bp, synthetic construct
  misc_feature 1..22: note = chemically synthesized
  source 1..22: mol_type = other DNA
cttttcagaaaagcaagatttt

SEQ ID NO: 67583 - DNA, 22 bp, synthetic construct
  misc_feature 1..22: note = chemically synthesized
  source 1..22: mol_type = other DNA
ttcagaaaagcaagattttttt

SEQ ID NO: 67584 - DNA, 22 bp, synthetic construct
  misc_feature 1..22: note = chemically synthesized
  source 1..22: mol_type = other DNA
tcagaaaagcaagatttttttt

SEQ ID NO: 67585 - DNA, 22 bp, synthetic construct
  misc_feature 1..22: note = chemically synthesized
  source 1..22: mol_type = other DNA
cagaaaagcaagattttttttt

SEQ ID NO: 67586 - DNA, 22 bp, synthetic construct
  misc_feature 1..22: note = chemically synthesized
  source 1..22: mol_type = other DNA
agaaaagcaagatttttttttt

SEQ ID NO: 67587 - DNA, 22 bp, synthetic construct
  misc_feature 1..22: note = chemically synthesized
  source 1..22: mol_type = other DNA
tttttttttggaattatatgct

SEQ ID NO: 67588 - DNA, 22 bp, synthetic construct
  misc_feature 1..22: note = chemically synthesized
  source 1..22: mol_type = other DNA
ttttttttggaattatatgctt

SEQ ID NO: 67589 - DNA, 22 bp, synthetic construct
  misc_feature 1..22: note = chemically synthesized
  source 1..22: mol_type = other DNA
tttttttggaattatatgcttt

SEQ ID NO: 67590 - DNA, 22 bp, synthetic construct
  misc_feature 1..22: note = chemically synthesized
  source 1..22: mol_type = other DNA
ttttttggaattatatgctttg

SEQ ID NO: 67591 - DNA, 22 bp, synthetic construct
  misc_feature 1..22: note = chemically synthesized
  source 1..22: mol_type = other DNA
tttttggaattatatgctttgc

SEQ ID NO: 67592 - DNA, 22 bp, synthetic construct
  misc_feature 1..22: note = chemically synthesized
  source 1..22: mol_type = other DNA
ttttggaattatatgctttgct

SEQ ID NO: 67593 - DNA, 22 bp, synthetic construct
  misc_feature 1..22: note = chemically synthesized
  source 1..22: mol_type = other DNA
tttggaattatatgctttgctt

SEQ ID NO: 67594 - DNA, 22 bp, synthetic construct
  misc_feature 1..22: note = chemically synthesized
  source 1..22: mol_type = other DNA
ttggaattatatgctttgctta

SEQ ID NO: 67595 - DNA, 22 bp, synthetic construct
  misc_feature 1..22: note = chemically synthesized
  source 1..22: mol_type = other DNA
tggaattatatgctttgcttat

SEQ ID NO: 67596 - DNA, 22 bp, synthetic construct
  misc_feature 1..22: note = chemically synthesized
  source 1..22: mol_type = other DNA
ggaattatatgctttgcttatg

SEQ ID NO: 67597 - DNA, 22 bp, synthetic construct
  misc_feature 1..22: note = chemically synthesized
  source 1..22: mol_type = other DNA
gaattatatgctttgcttatgt

SEQ ID NO: 67598 - DNA, 22 bp, synthetic construct
  misc_feature 1..22: note = chemically synthesized
  source 1..22: mol_type = other DNA
tatgctttgcttatgttaaaga

SEQ ID NO: 67599 - DNA, 22 bp, synthetic construct
  misc_feature 1..22: note = chemically synthesized
  source 1..22: mol_type = other DNA
tgcttatgttaaagacacagct

SEQ ID NO: 67600 - DNA, 22 bp, synthetic construct
  misc_feature 1..22: note = chemically synthesized
  source 1..22: mol_type = other DNA
gcttatgttaaagacacagctt

SEQ ID NO: 67601 - DNA, 22 bp, synthetic construct
  misc_feature 1..22: note = chemically synthesized
  source 1..22: mol_type = other DNA
cttatgttaaagacacagcttg

SEQ ID NO: 67602 - DNA, 22 bp, synthetic construct
  misc_feature 1..22: note = chemically synthesized
  source 1..22: mol_type = other DNA
atgttaaagacacagcttgcag

SEQ ID NO: 67603 - DNA, 22 bp, synthetic construct
  misc_feature 1..22: note = chemically synthesized
  source 1..22: mol_type = other DNA
tgttaaagacacagcttgcaga

SEQ ID NO: 67604 - DNA, 22 bp, synthetic construct
  misc_feature 1..22: note = chemically synthesized
  source 1..22: mol_type = other DNA
aagacacagcttgcagaaaaat

SEQ ID NO: 67605 - DNA, 22 bp, synthetic construct
  misc_feature 1..22: note = chemically synthesized
  source 1..22: mol_type = other DNA
gcagaaaaattttgtttaggcc

SEQ ID NO: 67606 - DNA, 22 bp, synthetic construct
  misc_feature 1..22: note = chemically synthesized
  source 1..22: mol_type = other DNA
cagaaaaattttgtttaggcct

SEQ ID NO: 67607 - DNA, 22 bp, synthetic construct
  misc_feature 1..22: note = chemically synthesized
  source 1..22: mol_type = other DNA
tgtttaggcctgacagattggt

SEQ ID NO: 67608 - DNA, 22 bp, synthetic construct
  misc_feature 1..22: note = chemically synthesized
  source 1..22: mol_type = other DNA
gtttaggcctgacagattggtg

SEQ ID NO: 67609 - DNA, 22 bp, synthetic construct
  misc_feature 1..22: note = chemically synthesized
  source 1..22: mol_type = other DNA
tttaggcctgacagattggtgg

SEQ ID NO: 67610 - DNA, 22 bp, synthetic construct
  misc_feature 1..22: note = chemically synthesized
  source 1..22: mol_type = other DNA
aggcctgacagattggtggctg

SEQ ID NO: 67611 - DNA, 22 bp, synthetic construct
  misc_feature 1..22: note = chemically synthesized
  source 1..22: mol_type = other DNA
ggcctgacagattggtggctgg

SEQ ID NO: 67612 - DNA, 22 bp, synthetic construct
  misc_feature 1..22: note = chemically synthesized
  source 1..22: mol_type = other DNA
acagattggtggctggcatttt

SEQ ID NO: 67613 - DNA, 22 bp, synthetic construct
  misc_feature 1..22: note = chemically synthesized
  source 1..22: mol_type = other DNA
gtggctggcatttttatagata

SEQ ID NO: 67614 - DNA, 22 bp, synthetic construct
  misc_feature 1..22: note = chemically synthesized
  source 1..22: mol_type = other DNA
gcatttttatagataaaggggc

SEQ ID NO: 67615 - DNA, 22 bp, synthetic construct
  misc_feature 1..22: note = chemically synthesized
  source 1..22: mol_type = other DNA
ttatagataaaggggcacgcaa

SEQ ID NO: 67616 - DNA, 22 bp, synthetic construct
  misc_feature 1..22: note = chemically synthesized
  source 1..22: mol_type = other DNA
tatagataaaggggcacgcaaa

SEQ ID NO: 67617 - DNA, 22 bp, synthetic construct
  misc_feature 1..22: note = chemically synthesized
  source 1..22: mol_type = other DNA
atagataaaggggcacgcaaaa

SEQ ID NO: 67618 - DNA, 22 bp, synthetic construct
  misc_feature 1..22: note = chemically synthesized
  source 1..22: mol_type = other DNA
tagataaaggggcacgcaaaat

SEQ ID NO: 67619 - DNA, 22 bp, synthetic construct
  misc_feature 1..22: note = chemically synthesized
  source 1..22: mol_type = other DNA
tacttcctccctttattgagaa

SEQ ID NO: 67620 - DNA, 22 bp, synthetic construct
  misc_feature 1..22: note = chemically synthesized
  source 1..22: mol_type = other DNA
cttcctccctttattgagaaaa

SEQ ID NO: 67621 - DNA, 22 bp, synthetic construct
  misc_feature 1..22: note = chemically synthesized
  source 1..22: mol_type = other DNA
cctccctttattgagaaaaagc

SEQ ID NO: 67622 - DNA, 22 bp, synthetic construct
  misc_feature 1..22: note = chemically synthesized
  source 1..22: mol_type = other DNA
ctccctttattgagaaaaagcc

SEQ ID NO: 67623 - DNA, 22 bp, synthetic construct
  misc_feature 1..22: note = chemically synthesized
  source 1..22: mol_type = other DNA
cctttattgagaaaaagcctag

SEQ ID NO: 67624 - DNA, 22 bp, synthetic construct
  misc_feature 1..22: note = chemically synthesized
  source 1..22: mol_type = other DNA
tattgagaaaaagcctaggagg

SEQ ID NO: 67625 - DNA, 22 bp, synthetic construct
  misc_feature 1..22: note = chemically synthesized
  source 1..22: mol_type = other DNA
attgagaaaaagcctaggagga

SEQ ID NO: 67626 - DNA, 22 bp, synthetic construct
  misc_feature 1..22: note = chemically synthesized
  source 1..22: mol_type = other DNA
ttgagaaaaagcctaggaggag

SEQ ID NO: 67627 - DNA, 22 bp, synthetic construct
  misc_feature 1..22: note = chemically synthesized
  source 1..22: mol_type = other DNA
agaaaaagcctaggaggagaac

SEQ ID NO: 67628 - DNA, 22 bp, synthetic construct
  misc_feature 1..22: note = chemically synthesized
  source 1..22: mol_type = other DNA
ggaggagaactcttaaaaggtg

SEQ ID NO: 67629 - DNA, 22 bp, synthetic construct
  misc_feature 1..22: note = chemically synthesized
  source 1..22: mol_type = other DNA
ttaaaaggtgaagttagtaacc

SEQ ID NO: 67630 - DNA, 22 bp, synthetic construct
  misc_feature 1..22: note = chemically synthesized
  source 1..22: mol_type = other DNA
aaaaggtgaagttagtaacctg

SEQ ID NO: 67631 - DNA, 22 bp, synthetic construct
  misc_feature 1..22: note = chemically synthesized
  source 1..22: mol_type = other DNA
aaaggtgaagttagtaacctgt

SEQ ID NO: 67632 - DNA, 22 bp, synthetic construct
  misc_feature 1..22: note = chemically synthesized
  source 1..22: mol_type = other DNA
gtaacctgttgtttgagtaatc

SEQ ID NO: 67633 - DNA, 22 bp, synthetic construct
  misc_feature 1..22: note = chemically synthesized
  source 1..22: mol_type = other DNA
ttgtttgagtaatcaaggctct

SEQ ID NO: 67634 - DNA, 22 bp, synthetic construct
  misc_feature 1..22: note = chemically synthesized
  source 1..22: mol_type = other DNA
tttgagtaatcaaggctctaag

SEQ ID NO: 67635 - DNA, 22 bp, synthetic construct
  misc_feature 1..22: note = chemically synthesized
  source 1..22: mol_type = other DNA
gagtaatcaaggctctaagagg

SEQ ID NO: 67636 - DNA, 22 bp, synthetic construct
  misc_feature 1..22: note = chemically synthesized
  source 1..22: mol_type = other DNA
agtaatcaaggctctaagagga

SEQ ID NO: 67637 - DNA, 22 bp, synthetic construct
  misc_feature 1..22: note = chemically synthesized
  source 1..22: mol_type = other DNA
taagaggatagcattgatcaaa

SEQ ID NO: 67638 - DNA, 22 bp, synthetic construct
  misc_feature 1..22: note = chemically synthesized
  source 1..22: mol_type = other DNA
agaggatagcattgatcaaaaa

SEQ ID NO: 67639 - DNA, 22 bp, synthetic construct
  misc_feature 1..22: note = chemically synthesized
  source 1..22: mol_type = other DNA
atcaaaaaagagttttaaaatg

SEQ ID NO: 67640 - DNA, 22 bp, synthetic construct
  misc_feature 1..22: note = chemically synthesized
  source 1..22: mol_type = other DNA
taaaatgagtgattgatgttat

SEQ ID NO: 67641 - DNA, 22 bp, synthetic construct
  misc_feature 1..22: note = chemically synthesized
  source 1..22: mol_type = other DNA
aaaatgagtgattgatgttatt

SEQ ID NO: 67642 - DNA, 22 bp, synthetic construct
  misc_feature 1..22: note = chemically synthesized
  source 1..22: mol_type = other DNA
aaatgagtgattgatgttatta

SEQ ID NO: 67643 - DNA, 22 bp, synthetic construct
  misc_feature 1..22: note = chemically synthesized
  source 1..22: mol_type = other DNA
atgttattaaagtcactggtga

SEQ ID NO: 67644 - DNA, 22 bp, synthetic construct
  misc_feature 1..22: note = chemically synthesized
  source 1..22: mol_type = other DNA
ttaaagtcactggtgaagtatc

SEQ ID NO: 67645 - DNA, 22 bp, synthetic construct
  misc_feature 1..22: note = chemically synthesized
  source 1..22: mol_type = other DNA
aagtcactggtgaagtatcaag

SEQ ID NO: 67646 - DNA, 22 bp, synthetic construct
  misc_feature 1..22: note = chemically synthesized
  source 1..22: mol_type = other DNA
gtgaagtatcaaggaatctaag

SEQ ID NO: 67647 - DNA, 22 bp, synthetic construct
  misc_feature 1..22: note = chemically synthesized
  source 1..22: mol_type = other DNA
aggaccatgagagagtttcagg

SEQ ID NO: 67648 - DNA, 22 bp, synthetic construct
  misc_feature 1..22: note = chemically synthesized
  source 1..22: mol_type = other DNA
cagggaagaaattctatattgt

SEQ ID NO: 67649 - DNA, 22 bp, synthetic construct
  misc_feature 1..22: note = chemically synthesized
  source 1..22: mol_type = other DNA
agggaagaaattctatattgta

SEQ ID NO: 67650 - DNA, 22 bp, synthetic construct
  misc_feature 1..22: note = chemically synthesized
  source 1..22: mol_type = other DNA
tatattgtagtgtctataatta

SEQ ID NO: 67651 - DNA, 22 bp, synthetic construct
  misc_feature 1..22: note = chemically synthesized
  source 1..22: mol_type = other DNA
tattgtagtgtctataattatt

SEQ ID NO: 67652 - DNA, 22 bp, synthetic construct
  misc_feature 1..22: note = chemically synthesized
  source 1..22: mol_type = other DNA
tagtgtctataattattgcttt

SEQ ID NO: 67653 - DNA, 22 bp, synthetic construct
  misc_feature 1..22: note = chemically synthesized
  source 1..22: mol_type = other DNA
taattattgctttcttttgttt

SEQ ID NO: 67654 - DNA, 22 bp, synthetic construct
  misc_feature 1..22: note = chemically synthesized
  source 1..22: mol_type = other DNA
ttgctttcttttgtttttgcag

SEQ ID NO: 67655 - DNA, 22 bp, synthetic construct
  misc_feature 1..22: note = chemically synthesized
  source 1..22: mol_type = other DNA
ctttcttttgtttttgcagaat

SEQ ID NO: 67656 - DNA, 22 bp, synthetic construct
  misc_feature 1..22: note = chemically synthesized
  source 1..22: mol_type = other DNA
tcttttgtttttgcagaataca

SEQ ID NO: 67657 - DNA, 22 bp, synthetic construct
  misc_feature 1..22: note = chemically synthesized
  source 1..22: mol_type = other DNA
cttttgtttttgcagaatacac

SEQ ID NO: 67658 - DNA, 22 bp, synthetic construct
  misc_feature 1..22: note = chemically synthesized
  source 1..22: mol_type = other DNA
ttttgtttttgcagaatacact

SEQ ID NO: 67659 - DNA, 22 bp, synthetic construct
  misc_feature 1..22: note = chemically synthesized
  source 1..22: mol_type = other DNA
ttgtttttgcagaatacacttt

SEQ ID NO: 67660 - DNA, 22 bp, synthetic construct
  misc_feature 1..22: note = chemically synthesized
  source 1..22: mol_type = other DNA
tgtttttgcagaatacactttt

SEQ ID NO: 67661 - DNA, 22 bp, synthetic construct
  misc_feature 1..22: note = chemically synthesized
  source 1..22: mol_type = other DNA
gtttttgcagaatacacttttt

SEQ ID NO: 67662 - DNA, 22 bp, synthetic construct
  misc_feature 1..22: note = chemically synthesized
  source 1..22: mol_type = other DNA
tttttgcagaatacacttttta

SEQ ID NO: 67663 - DNA, 22 bp, synthetic construct
  misc_feature 1..22: note = chemically synthesized
  source 1..22: mol_type = other DNA
ttgcagaatacactttttaaag

SEQ ID NO: 67664 - DNA, 22 bp, synthetic construct
  misc_feature 1..22: note = chemically synthesized
  source 1..22: mol_type = other DNA
tgcagaatacactttttaaaga

SEQ ID NO: 67665 - DNA, 22 bp, synthetic construct
  misc_feature 1..22: note = chemically synthesized
  source 1..22: mol_type = other DNA
gcagaatacactttttaaagaa

SEQ ID NO: 67666 - DNA, 22 bp, synthetic construct
  misc_feature 1..22: note = chemically synthesized
  source 1..22: mol_type = other DNA
cagaatacactttttaaagaac

SEQ ID NO: 67667 - DNA, 22 bp, synthetic construct
  misc_feature 1..22: note = chemically synthesized
  source 1..22: mol_type = other DNA
tttaaagaacatcaggatttgg

SEQ ID NO: 67668 - DNA, 22 bp, synthetic construct
  misc_feature 1..22: note = chemically synthesized
  source 1..22: mol_type = other DNA
ttaaagaacatcaggatttggt

SEQ ID NO: 67669 - DNA, 22 bp, synthetic construct
  misc_feature 1..22: note = chemically synthesized
  source 1..22: mol_type = other DNA
taaagaacatcaggatttggta

SEQ ID NO: 67670 - DNA, 22 bp, synthetic construct
  misc_feature 1..22: note = chemically synthesized
  source 1..22: mol_type = other DNA
aaagaacatcaggatttggtaa

SEQ ID NO: 67671 - DNA, 22 bp, synthetic construct
  misc_feature 1..22: note = chemically synthesized
  source 1..22: mol_type = other DNA
aagaacatcaggatttggtaaa

SEQ ID NO: 67672 - DNA, 22 bp, synthetic construct
  misc_feature 1..22: note = chemically synthesized
  source 1..22: mol_type = other DNA
ggtaaaacagccagtaaaaaag

SEQ ID NO: 67673 - DNA, 22 bp, synthetic construct
  misc_feature 1..22: note = chemically synthesized
  source 1..22: mol_type = other DNA
gtaaaacagccagtaaaaaagc

SEQ ID NO: 67674 - DNA, 22 bp, synthetic construct
  misc_feature 1..22: note = chemically synthesized
  source 1..22: mol_type = other DNA
atttctagaacaaaagagagtg

SEQ ID NO: 67675 - DNA, 22 bp, synthetic construct
  misc_feature 1..22: note = chemically synthesized
  source 1..22: mol_type = other DNA
ctagaacaaaagagagtgcgat

SEQ ID NO: 67676 - DNA, 22 bp, synthetic construct
  misc_feature 1..22: note = chemically synthesized
  source 1..22: mol_type = other DNA
tagaacaaaagagagtgcgatt

SEQ ID NO: 67677 - DNA, 22 bp, synthetic construct
  misc_feature 1..22: note = chemically synthesized
  source 1..22: mol_type = other DNA
gaacaaaagagagtgcgatttt

SEQ ID NO: 67678 - DNA, 22 bp, synthetic construct
  misc_feature 1..22: note = chemically synthesized
  source 1..22: mol_type = other DNA
tgacaatatcagaaggttaatt

SEQ ID NO: 67679 - DNA, 22 bp, synthetic construct
  misc_feature 1..22: note = chemically synthesized
  source 1..22: mol_type = other DNA
gacaatatcagaaggttaatta

SEQ ID NO: 67680 - DNA, 22 bp, synthetic construct
  misc_feature 1..22: note = chemically synthesized
  source 1..22: mol_type = other DNA
acaatatcagaaggttaattaa

SEQ ID NO: 67681 - DNA, 22 bp, synthetic construct
  misc_feature 1..22: note = chemically synthesized
  source 1..22: mol_type = other DNA
attaagaagtctgtgagtgatg

SEQ ID NO: 67682 - DNA, 22 bp, synthetic construct
  misc_feature 1..22: note = chemically synthesized
  source 1..22: mol_type = other DNA
agaagtctgtgagtgatgataa

SEQ ID NO: 67683 - DNA, 22 bp, synthetic construct
  misc_feature 1..22: note = chemically synthesized
  source 1..22: mol_type = other DNA
tgagtgatgataaagctggcac

SEQ ID NO: 67684 - DNA, 22 bp, synthetic construct
  misc_feature 1..22: note = chemically synthesized
  source 1..22: mol_type = other DNA
gcacattttcattacagattga

SEQ ID NO: 67685 - DNA, 22 bp, synthetic construct
  misc_feature 1..22: note = chemically synthesized
  source 1..22: mol_type = other DNA
tcattacagattgacacaactc

SEQ ID NO: 67686 - DNA, 22 bp, synthetic construct
  misc_feature 1..22: note = chemically synthesized
  source 1..22: mol_type = other DNA
cattacagattgacacaactca

SEQ ID NO: 67687 - DNA, 22 bp, synthetic construct
  misc_feature 1..22: note = chemically synthesized
  source 1..22: mol_type = other DNA
attacagattgacacaactcaa

SEQ ID NO: 67688 - DNA, 22 bp, synthetic construct
  misc_feature 1..22: note = chemically synthesized
  source 1..22: mol_type = other DNA
cagattgacacaactcaagtca

SEQ ID NO: 67689 - DNA, 22 bp, synthetic construct
  misc_feature 1..22: note = chemically synthesized
  source 1..22: mol_type = other DNA
acacaactcaagtcacaggcat

SEQ ID NO: 67690 - DNA, 22 bp, synthetic construct
  misc_feature 1..22: note = chemically synthesized
  source 1..22: mol_type = other DNA
aagtcacaggcatagctaatgt

SEQ ID NO: 67691 - DNA, 22 bp, synthetic construct
  misc_feature 1..22: note = chemically synthesized
  source 1..22: mol_type = other DNA
atgtttgctctataatactctg

SEQ ID NO: 67692 - DNA, 22 bp, synthetic construct
  misc_feature 1..22: note = chemically synthesized
  source 1..22: mol_type = other DNA
gctctataatactctgataagt

SEQ ID NO: 67693 - DNA, 22 bp, synthetic construct
  misc_feature 1..22: note = chemically synthesized
  source 1..22: mol_type = other DNA
ctctataatactctgataagtc

SEQ ID NO: 67694 - DNA, 22 bp, synthetic construct
  misc_feature 1..22: note = chemically synthesized
  source 1..22: mol_type = other DNA
tataatactctgataagtcaga

SEQ ID NO: 67695 - DNA, 22 bp, synthetic construct
  misc_feature 1..22: note = chemically synthesized
  source 1..22: mol_type = other DNA
taatactctgataagtcagaga

SEQ ID NO: 67696 - DNA, 22 bp, synthetic construct
  misc_feature 1..22: note = chemically synthesized
  source 1..22: mol_type = other DNA
tgataagtcagagaatctaagt

SEQ ID NO: 67697 - DNA, 22 bp, synthetic construct
  misc_feature 1..22: note = chemically synthesized
  source 1..22: mol_type = other DNA
ataagtcagagaatctaagtga

SEQ ID NO: 67698 - DNA, 22 bp, synthetic construct
  misc_feature 1..22: note = chemically synthesized
  source 1..22: mol_type = other DNA
agtgagaagaactggtatctat

SEQ ID NO: 67699 - DNA, 22 bp, synthetic construct
  misc_feature 1..22: note = chemically synthesized
  source 1..22: mol_type = other DNA
gtatctatggtaaacatagggt

SEQ ID NO: 67700 - DNA, 22 bp, synthetic construct
  misc_feature 1..22: note = chemically synthesized
  source 1..22: mol_type = other DNA
tggtaaacatagggtcaagagc

SEQ ID NO: 67701 - DNA, 22 bp, synthetic construct
  misc_feature 1..22: note = chemically synthesized
  source 1..22: mol_type = other DNA
gatgcggctgaatagaaaggac

SEQ ID NO: 67702 - DNA, 22 bp, synthetic construct
  misc_feature 1..22: note = chemically synthesized
  source 1..22: mol_type = other DNA
aatagaaaggacatttactttg

SEQ ID NO: 67703 - DNA, 22 bp, synthetic construct
  misc_feature 1..22: note = chemically synthesized
  source 1..22: mol_type = other DNA
actttgcagttaggtaaagaag

SEQ ID NO: 67704 - DNA, 22 bp, synthetic construct
  misc_feature 1..22: note = chemically synthesized
  source 1..22: mol_type = other DNA
ctttgcagttaggtaaagaagc

SEQ ID NO: 67705 - DNA, 22 bp, synthetic construct
  misc_feature 1..22: note = chemically synthesized
  source 1..22: mol_type = other DNA
tgcagttaggtaaagaagcctc

SEQ ID NO: 67706 - DNA, 22 bp, synthetic construct
  misc_feature 1..22: note = chemically synthesized
  source 1..22: mol_type = other DNA
gcagttaggtaaagaagcctct

SEQ ID NO: 67707 - DNA, 22 bp, synthetic construct
  misc_feature 1..22: note = chemically synthesized
  source 1..22: mol_type = other DNA
cagttaggtaaagaagcctcta

SEQ ID NO: 67708 - DNA, 22 bp, synthetic construct
  misc_feature 1..22: note = chemically synthesized
  source 1..22: mol_type = other DNA
ggtaaagaagcctctagctcag

SEQ ID NO: 67709 - DNA, 22 bp, synthetic construct
  misc_feature 1..22: note = chemically synthesized
  source 1..22: mol_type = other DNA
tagctcagactagctgcactgt

SEQ ID NO: 67710 - DNA, 22 bp, synthetic construct
  misc_feature 1..22: note = chemically synthesized
  source 1..22: mol_type = other DNA
gctcagactagctgcactgttg

SEQ ID NO: 67711 - DNA, 22 bp, synthetic construct
  misc_feature 1..22: note = chemically synthesized
  source 1..22: mol_type = other DNA
agactagctgcactgttgttat

SEQ ID NO: 67712 - DNA, 22 bp, synthetic construct
  misc_feature 1..22: note = chemically synthesized
  source 1..22: mol_type = other DNA
gctgcactgttgttatttgtgt

SEQ ID NO: 67713 - DNA, 22 bp, synthetic construct
  misc_feature 1..22: note = chemically synthesized
  source 1..22: mol_type = other DNA
cactgttgttatttgtgtggct

SEQ ID NO: 67714 - DNA, 22 bp, synthetic construct
  misc_feature 1..22: note = chemically synthesized
  source 1..22: mol_type = other DNA
ttgttatttgtgtggcttgaac

SEQ ID NO: 67715 - DNA, 22 bp, synthetic construct
  misc_feature 1..22: note = chemically synthesized
  source 1..22: mol_type = other DNA
ttatttgtgtggcttgaaccta

SEQ ID NO: 67716 - DNA, 22 bp, synthetic construct
  misc_feature 1..22: note = chemically synthesized
  source 1..22: mol_type = other DNA
tttgtgtggcttgaacctagta

SEQ ID NO: 67717 - DNA, 22 bp, synthetic construct
  misc_feature 1..22: note = chemically synthesized
  source 1..22: mol_type = other DNA
gtgtggcttgaacctagtaatc

SEQ ID NO: 67718 - DNA, 22 bp, synthetic construct
  misc_feature 1..22: note = chemically synthesized
  source 1..22: mol_type = other DNA
tgtggcttgaacctagtaatcg

SEQ ID NO: 67719 - DNA, 22 bp, synthetic construct
  misc_feature 1..22: note = chemically synthesized
  source 1..22: mol_type = other DNA
gaacctagtaatcggattcaga

SEQ ID NO: 67720 - DNA, 22 bp, synthetic construct
  misc_feature 1..22: note = chemically synthesized
  source 1..22: mol_type = other DNA
aacctagtaatcggattcagaa

SEQ ID NO: 67721 - DNA, 22 bp, synthetic construct
  misc_feature 1..22: note = chemically synthesized
  source 1..22: mol_type = other DNA
gtaatcggattcagaactggaa

SEQ ID NO: 67722 - DNA, 22 bp, synthetic construct
  misc_feature 1..22: note = chemically synthesized
  source 1..22: mol_type = other DNA
agaactggaatgggttccttca

SEQ ID NO: 67723 - DNA, 22 bp, synthetic construct
  misc_feature 1..22: note = chemically synthesized
  source 1..22: mol_type = other DNA
gaatgggttccttcagggtact

SEQ ID NO: 67724 - DNA, 22 bp, synthetic construct
  misc_feature 1..22: note = chemically synthesized
  source 1..22: mol_type = other DNA
cttcagggtactttacaaacgt

SEQ ID NO: 67725 - DNA, 22 bp, synthetic construct
  misc_feature 1..22: note = chemically synthesized
  source 1..22: mol_type = other DNA
cagggtactttacaaacgttca

SEQ ID NO: 67726 - DNA, 22 bp, synthetic construct
  misc_feature 1..22: note = chemically synthesized
  source 1..22: mol_type = other DNA
agggtactttacaaacgttcag

SEQ ID NO: 67727 - DNA, 22 bp, synthetic construct
  misc_feature 1..22: note = chemically synthesized
  source 1..22: mol_type = other DNA
tacaaacgttcaggatgcattt

SEQ ID NO: 67728 - DNA, 22 bp, synthetic construct
  misc_feature 1..22: note = chemically synthesized
  source 1..22: mol_type = other DNA
acaaacgttcaggatgcatttt

SEQ ID NO: 67729 - DNA, 22 bp, synthetic construct
  misc_feature 1..22: note = chemically synthesized
  source 1..22: mol_type = other DNA
caaacgttcaggatgcatttta

SEQ ID NO: 67730 - DNA, 22 bp, synthetic construct
  misc_feature 1..22: note = chemically synthesized
  source 1..22: mol_type = other DNA
aggatgcattttaagtgtagtc

SEQ ID NO: 67731 - DNA, 22 bp, synthetic construct
  misc_feature 1..22: note = chemically synthesized
  source 1..22: mol_type = other DNA
taagtgtagtctagaaggtggt
